United States Patent Application Publication US 2015/0240253 A1 - sequence listing, part 8

SEQ ID NO: 34536 - DNA, 400 bp, Zea Mays
gcaaaacattccagcataatttctcctggaataggaaccgcaaaaaacaagtgccaataatctgtgaagtgatcaagattccttgtcaagcaacaactgagatctcagaggcttgtccctgatgtgaatagcagcataccatccagcactgaaagactttgtactcttctaccaaaagcaatggaaccaacagacgaatcgaagccgatgagaacaaaatcagcagctttattccactctcaaacatgtcccagtacagctcctatgcaggcagcgcctatctatgccgatatacctttccctccctgttacctttttttttctcacaaatcaaagtgccacccttcctatgactgtactgtcaaatccggagggcctgagaaacagaaccacggtgcga

SEQ ID NO: 34537 - DNA, 903 bp, Zea Mays
gttcagtccagaactggctagtgaaaactgtgtcccgatcactgactatcgagcatggcagaccatgaagtttgacaatttcgtcaaagaaggcttttgccactgatgctgctgaatatggatggcctaaagtaataaaatgaccatacttagagaaccgatccaccactgttagaactactgacttgccaccaacctttggaaatccttcaataaagtccattgatatatcagcccacaccatagagggaataggcaagggttgaagtaggccggctgggtgaagatgctgagtcttatgttgttggcaaactgcacagctgcgcacaaactccctaacacgttggagagttttagaattgtaaaatgatgtgcgccacctatgggctatcttctgcacgccttcatgaccagactcatgtgcttgggccagaagttgaggccacaaagtggatgcatccgggatgaataccttgcctttgaactgtagtaagccatctgccattgtctagtcaggacttgcttttccctctgccagctgagcgcggactgcagccacttgagggtccgagtcagcctccgtttgcaaagtagagaagagatcaaaggaaggggaagaaagggtatacacagttcttgtatcttcctctcgacgagacaatgcatctgctgcgccattcaacttgccgggcctgtattccactgttatatcatacccaaacagtttgctgacccaagtatgctgagggattgttgacagccgctgatcgagcaagaattttaagctatagtggtcagtgcggactgtaaagggtcggccctagacatatggccgccagtgtcaaactgcctttaccaatccaatcaactcccgctcatatgctggaaatttttggtgacgaa

SEQ ID NO: 34538 - DNA, 722 bp, Zea Mays
tagcaggtgataggccgaagacttggctccagtggctgccatgggcggagtacagctataattcttcatatcaaactgccatcaagtgttcacccttccaggtagtctatgggcgtgaccccccgccattactaccttaccagccgggtaaagcgcgagtagctgcggtggatgaccagcttcgcgaccgggatgagttcttagcagaaatcaaggagaggctggtccaggcccaagtcacaatgaagcagtaccaagaccagactcggcgggaggtgaaattccaggttggggattgggtgtggctccggttacagcaaaggtcagtcgtgggcgtgacaccagcatctacatccaagttgggacctcgtttctttgggccctacaaggttacacagctagtgggggacgtatcttataaattgcagctccctccgaaggcaaaaattcatgatgtttttcatgtgtcgctattaaagaaatttattgggcagttgccagacgaggtggtgcctcttccagatctgttacatggcagggtggtacctacacctgagaaggtatccaaggcaaggcttaacagaggcgtgtgggaagtgttagttcactgggtgggtcgtccagcagcagaagcatcctgggttcagctagaggatttccaactacgatatccagctatacaggtcgcggacgacctgtttctccaggaggggagaaatgtt

SEQ ID NO: 34539 - DNA, 660 bp, Zea Mays
ctttggagcgtccaggcgcaaaacgcagatcaaggaagacgagaagcggctaactaacaatcacggcacgcatgaaggaaaaaaaaagatccaatccaatccagcggagtctgtttagtgagagggaagcggggcataccaggtggagcggaaatgagcggcggcgagatgccaagatccagcaggctgcccactttctccctccatcttgtttctcaacccatcccgtgctctctcttcctcaccttatcgcatttgcctgtggacattgtactctgctgctgggtgcggggactgcgggcgtagcgtagtgcagagaagacagggaaaggctgcttcaacacaggaggaagcggtaccccacccccaaacactgccgaaggaaagagactgctactggccaccatgagctgtagttttgggcctcataaattggatggccctcaatttgaggagcgaattatcgtagtactactatataaatttggtgcaacggttataagatgctgtttggcatatatgacgaatatattttccaaagtcgtaaattatactgtttacggagcgaaatttaaaatactagataaaatattagatgagataggataaatgctacctgctggcgcctagagacagccttagctagctcgagccgacttt

SEQ ID NO: 34540 - DNA, 310 bp, Zea Mays
tggctcacagaatctccctcttctctccctcctgtcatccacggcgggtacgatatggactagctctctccttcctcccttcctgacttcccgtgcattgtcggtggtctgctcagctcggctccgtcgtcggtgtgctccctgcgcgtcttgtggttgtggatctacctcttctctcccacctctactatctactcccaagcagctaaccctaatccctaagtccctaacctaaatcgcactcggcttctcctaatcctccgtcgttttggtcaagtcacaaggtctgttggccagatctccatctccc

SEQ ID NO: 34541 - DNA, 632 bp, Zea Mays
gtgatttgcgccatcgccatgattcgtgctctctggtgaggggataatcatggcggagtaaagatcttggcactagataggcttgggctctgtcgcggatgagtttcaccgtacccacttgctcgtcgatcagccgggatagacctcaccgcggttggccacttaccgttgtgtgccacgtgctcaagcgttgtaccacgtcactgtgaatcgcgtcttgcatgctcggtgatcgccggagagccaccacggtgaaagccactaagcttgcgcgccagtaaccttcttcctctctggccgccagcacatcttcgcaaaattggacgccaccactgagggagcctataaattgtcgcccccgcctgctccgctaagtaattgtgcacccagtaaaccaaccctcacctcagatcgtccaccagagctccccaatttgggatttcccccaaatcaaccaagaacatcgtgcggtgtgacctcgccatggccaaagtgtttcaggtccgttcatgtccgctgtcctcttgtttcagcacccttacttgctcctgatactcgctgacccatccgatttagctaggcggtcctagatcaccgggaacacgtttactcatccgatggtccgcgctgtc

SEQ ID NO: 34542 - DNA, 711 bp, Zea Mays
cttctcttgtcttgctatctagggaatgttgtagttgttcaacctttttgcccataactagccaataggaccccccactccaaacaaccttgtggttagcaagtaaaaccttttaaatttttttttcatgtgcttgttttggtgtttctagcccttgtgtgttttacacttgaatttacacctacacaacttgtagattcccatagcttgacccctaaatcggctaaagcttccttgtacacttgtagtgtcaaaaaaattgttgctggtgtctagttgcgcaaaccctatcaaggccctgtttctttccataaatccttgcccctgaaacttcatagcattcctgttgatcatccagctgatcttgttgcctacctctcctttcgcatggatctggtgatctctttccttgtgaatcatgttgtggctttatcatccgaatctctggatcccttaatgattctgcctcgttatctgggtatctgctataacccgttctcaagtatcagatgttgatctgcctaaatctctcacttctgatcattctcataccccttctttgaggatcatgacacttgttttatcaacttatctctaagcggcatatccatgtggattaatggatgttgttgttatctttgaatctctcctgtctctaaaagcttatcaatctcgatctcatggttggttcctcctcatattaaatatcgt

SEQ ID NO: 34543 - DNA, 479 bp, Zea Mays
tgcaagtttccctagactcagtaaaccacgagttggacggcgggttcattacttgattttgcaggggttcatatgctaaactgtcatggcgaaggggtatgggcggccctggtccgcccgatcgagaaccgacggcggtgattagatttatatcttatcgaatcgttacgaaccgagagctattggatctagatccaacggcccacatcctacgatcccgagatctgaccccaaccctctgatcacaatcctgctgtcgtggtggatctaccgaaggaatacgcgcgtcgtctaatcacagccgttcactactaaaccaacggtcaccaaaccttcttccttctcccagcgactagaacggcggcgctgtccaaaaacccacggcggagatcaacgccggccactcaactatccgaatcctgctccgatatctcgatccgataggcgcaaaccgaaatagaggtaattgcgaagctagg

SEQ ID NO: 34544 - DNA, 405 bp, Zea Mays
ggccaccgctgtgggagcctataaattgccgaccccgcctgctccgctaagtaattgtgcaactagtgaagcaacccgtgcctcgaatcatccactagaactccccaatttgggatttcccccaaatcactcaagaataccgagcggtgtgacctcgccgtggttagctcgtctcaggtccgctcataccctctgcccttccgttttagtgttcttgtgttcccctgatactcctcgaccaacttaattgagctaagctaccttagatcgccgggaacgcattagaatgtccgttgatcatacggtcaccgtggacagagcaggttagagcgtcgttcgttaaattagttgaggggaaacgattattagggcttgaatttggtttcagctgaagtagagcacccg

SEQ ID NO: 34545 - DNA, 1048 bp, Zea Mays
aagaggttgcagcagcccagctgggtggagagcttcagttttgttttgttggcagactgaacatgccctaacccaatcccttaccaaggctctatctttgggaacaaaaaaatcggcccgtagtcggtgtaatgttttctggattccaccatgaccagccgagtgggctgtaccgagtatggccggcagcagggatgaatttggcggcacaaagatttgtcggccatgcagaatgagcccatcaaccatccgccatggttcagtgagggtgccgtctttgatttgagtacaaatgcgttgacagtcttggttagaggtgcactcctgacgcaactcttcatacaaatggaaggtggggctagacaacgtggcaatcatgccgtcggtagtctgccttcgtgacaaggcatctgccactgtgttgaatcggcctgctctgtattccacgataaagtcaaacccaaatagtttgctgatccactgatgctgaggcactgttgacaatctctggtcgagcatgaattttagactgaagtgatctgtgcgcactgtgaatcgacgaccccagagatatggtcgccagtgacgaactgcctgaacgagaccaatgagttcacgttcataagctgcgagcttgacatgacgggctgcaaacggcctactaaagaatgccaggggcccagatccttgatgcaggaccgccccaaatccagaaccagaagcatcacagtccacaatgaacatttgatcgaagttgggcagctgcaacactggggctgtagaaagagcctttttgagttcctggaatgttgtgtcagcagccaaaccccacttgaaaccttctttctttagtagtgctgttaatggtgctgcaatagacccaaaatctttgatgaattttctgtagtagcctgccaatcccaagaagccacgtaatccacgtgttgattggggaaccggccatgagtagaccgcttccactttgctattgtccatggctaccccgtctgctgaaatcacatgacccaagtaagcaactgaggtggct

SEQ ID NO: 34546 - DNA, 538 bp, Zea Mays
ggcagatccgcaccacgtcgtggccagacatcgtcgcgccatcatcgccggtgagtcctcgtccatcatgcttgctttgttcgtctctgcgggaaacgctagccgcatcgtgtttgggctcagggcactcgccggttcgtggggtcgccggtgcttctgccgtgggggtgtggcggcgccacctgtgctgaccgggaaggaagaagggtccctcaccctcgatccaaggatggatggatatcgttgatcctgggcataccgtttctagaccgttgatccagcgataaacgcttacgattagatcctgagtatccctcgcttgagtcgatctggttcattgatatcaggatgagcggatgctgttagatcgcgcgttaataaaaccccgaccgtggatctcggatcctacggtggacagaacgtaccgattcgtgttatagtcgatctaatttgggcccttggttcttgatcaagcggctcgagatcgcccgtaccccttcgccgcgtccgagttataaaataacccctgggatctcca

SEQ ID NO: 34547 - DNA, 329 bp, Zea Mays
gctgaggcgggtgtgttgctgactgaagttggactgctgaaagaaagaggtctaactgctgaagctgtggtcgctgactttgttttcaagaacattcagccactgaaagatagggcctatccagcatatctgtatcgagggctggccgactcaactcggggttaccaataggagaattccttctgtagacttggtaagccgacttgaaatgatcctcaggggtaaggtgtcaaatgttggtgctccaactgcatactcggcctggaacctgcctcctcccaaagccttcaccctttttgtgtcaaatccacctgtgactgatggcaatt

SEQ ID NO: 34548 - DNA, 410 bp, Zea Mays
gggctgcccaaggtgaggtacttggtctgatgtagcctttctctgacaactcatcaatctgcttcttgagttccaccaactctggttcggacaatcgataagctctcttggaaataggggcggtgcctggtataagctctatggcaaattcaaccttcctttcaggtggcatgcccggtaactcctcaggaaacacatatgggaactctaacactacattgatagcctctgatggtttaatctcctcaatatgagcggtgacttggtgacaacttccttttcttggtctagacaagaccaactccactaacacttcttcccctgataaggaaactaacttcaccgttctcttgtcacagctaagactggcttgatacttggttagccaattcatccctaggatgacatct

SEQ ID NO: 34549 - DNA, 1328 bp, Zea Mays
gattcagattcagaagagccatgtggaaaggacattcccctaaaaggtttcaattgattttttgttcatatcacataagttctcgaagaattatgtttacttttttgttcctctgctctataacttattatggctacaggttgcgtgttctaaaaaaataccgaaaggggtgttgtaccaaaactgaaaacatgcattcctgttgtatggatatacctacgtttgctatttagatcgtacaaaagtatcgaaacataagtgccattccctaccagtcttcctggttgattcctatacttcaatgcaggcatggagcctattactagttgtggaccaccagatatttctcgtccattccaaggaacacccaaactgcaatcttctacaatggtatgctttacttttgacggataaactttctcaacaagtgaacataccttctttttccttaaaagtttcaattcaaacatactgttattttgcatctgccctgctagggttctgctaaactagctatgccacctcgtcgagccaatgaaaactttcttgaagcctatgaagttattttaatattggatgaccgtgaaaaattcgggtttgtatcatcatatcctactctcacaaagaaattttgtatcttcttttgtatatttgtagttatctttgatttttatgtgggatatctcattcagtgcataagtattaaaagaaaaatgcccctctgctgttcattttccataatttgttcaaattatcatgaggatggttgccttatgcaatgtttgtaaccttggtacaagtttcatactttcattggttatgactggtctggtttatccttctattttgtacgaaactgtaatatatgacttgacttccacaggttcataggtcattggagaaaattgggtttttattatctttaaacaatcttgatatgtcgatactgttattactgcttttgcgttgtcttttgttggaattcaatatatttgctctgcatggttcatgtattttatttgtgcagttggatgtgtcaccattagaatttaatgtgattgctttgcgtggaatcgggttctcatgttttttttatcttgtgcaggtctcgttcaagaaaagttgctgataacatttgttccctgagccattttgctgtggatgttagttgggatcagagtttgcactcttctatatcatgtcctactttctctctgctgtagaaatgaaaatgggggcatagttatactgattagcgatatctcttatatggtgccagacctagagcctgacaatttcattggccactacattttcccgctttcatg

SEQ ID NO: 34550 - DNA, 300 bp, Zea Mays
caagcatggcacagagaagtgtgtcatgactgtatgcattggatccagtctgcaccatgtggaatggagtgtcactgcagcgggccacagattcagagacacctgccaagtcgtcgctcgcaaggcattgagggccctgtgtcaaatctacgaagaagaagtggtcgacaccccgctcagattctttccgccctttcagggataccatcccatttggatggtcaggatgcgttccttggaagtacaacagctgcttgaggatgaccccatagtcatgtacctcactgcatacctgctcac

SEQ ID NO: 34551 - DNA, 847 bp, Zea Mays
acacatggctgggctgaccacatggagatggttccggttcaggggttgtagaacgacgaccacgtcgggcaccgttggggccacctcgggcagaaccaccgattggtatcagtgctgggagcctgacgaggagctcaaggtgtgggattggtatcagaccacagagggagtctgccatgcccttcatccgacgatattacttgctgacgaagtggttcctctaggagaacatgcggaacgaggcatcgaggtggagagagtgggcctctagggcgacctaggcccggcgagcggtgcccctgttcgccgacgatgttttgtagctcaacagtgagggtgccaatgagctacgagaggacaacactgtccatctggtgctaggatggagacaatgggccaaggacgtcgtcgatgacgtagcgctggagcgtgaggagcacctgatcacgccagtgagcgtagtgggcggacgtcggatcctgcaggacagagactagggatcggatgttgtgaacaccggctgcctgagcatgtagagtagcgatggtggcattgtcgagtcggaggtggggtgtgcaacgggggccaccgggggggggggggggcatcaacacgactgagaagaaggcactgatcttctgccacttgagaggagggagtattttctttgagcacgacagagaagaaggcgcttaacttcacagtctcttgaaatcgagagatcaatcctcatgggaatacatagtggaactcacgatacccatgcatccatggcttgtggataggaggaagtattttctttgagcataagattgtacataactatacaataaatgtacttctttcg

SEQ ID NO: 34552 - DNA, 500 bp, Zea Mays
cgcctgggagattcatgctgtgtgagaagtagataacgtcaggaaggggtgaaaagatcctgggagaggtggagccagtcactggccggttcggccatcgtgtcccaccgtagttagtcatgttggcatcaccggagctcactgtttccccgaccgtgacactcagcgatctatccttcgggtcataaagatcgtggcaagcaaccagttatcatccctgaaccatttccctctcacgcgccacggtgagcaagccaccgtaaaaatatcctagccgcggtaacctcgatcccaatccaaaattcgtgataagctcagccggagtctataaattggaggcacccctattccgcctacttgttacgcgcccagcacaccacttctcgcctcccatcatccaccgtagcgcccaaattcgggttttcccccaaatcagttctccgcgccgccgcgaacaccccctccgtcgacccaccactctgtccctccacccaccttcc

SEQ ID NO: 34553 - DNA, 330 bp, Zea Mays
gcactggaccttgatacaacaacttgcttctttgatttccatacaataggaaaggaaccaaagaaaatacaataacctgtaatagagcagtgattagtgcgatcactcgcccaagtggcattagagtaggcatgaagccgaagaggactattacaatcatagaataagcctcgagatgtggttccccgtaaatatctcagtacatgaagcaagtgaccataatggactaaagtaggcgcagagataaactgactcagaatatgaacaacatgtgcaatatccggtcgagtgatagtgaggtagactagattgccaactatatgtcgatat

SEQ ID NO: 34554 - DNA, 379 bp, Zea Mays
aaaaaaaactggagggatgggggtgattgttgtttttgttcaattttgaaatctacagatcacttattttttgagtgttcagttgtgaagtatatttggagacttgtccaagttgtttttaacctcaaaacaatttcggggaaatttgatgaactgtttgacagatggttactaggtttcagtaagaaaactagaaacctaatgatcatcggtgctggtgctatcctttggtcgatctgaaaatttaggaatgacacatgtttcaataataagtgatttgttgacccttgtgatatagtgtttctcttggattgattgttggacgattttgcaaacaaagaagggaagagagatgttggaggaagtgtgcaggtcaaaa

SEQ ID NO: 34555 - DNA, 306 bp, Zea Mays
cctatctcctcttctttttgtcattgcaatagatcccctgcaaagactgcttgaagcagcaactaaactcggaatgctctccaaactccgtggccgctcgcccgacctatgcatattgatgtttgcggatgatgcggccatatttgtcacacccacaaaaggtgaggtatctaggctcgcgagaactcaggagctttttggtgaaaccacatgcctaaaaacaattttccacaagtccgcagtagtaccaatctagtgtaacaacatcaacctctctgacgttctatctggtccgccggcctcgag

SEQ ID NO: 34556 - DNA, 341 bp, Zea Mays
cttctctagctcttgtaggacctcatccacagtaaacctgccaggctcaactttgttttcacgcttaccattgaaatccaagctattccgccatgaatgtgtccttttaaggtaacgacgatgtccaatgtagcataacttgttccttattgccagagacaacagattcttgtcgcaataaatacatgcataatacccttttgttgttcgcctagataatgtggccagcgttgggtaatcacatgtatacaccatagtacagcagcacgaaggtcgatcttcctaccagtacatgcatcataggtcttgacacccttccatagcttgagcagttcttcaat

SEQ ID NO: 34557 - DNA, 376 bp, Zea Mays
gaaaccgaaggcattcaaatcctacgcgaagtccacagcggaacttgcggctcccactcagggcatagggccctcgctgccaaggtgatccgtcaaggattttactggcccgctataatctgcgccgcaaatcgagtcacgaggtcgtgcaaagcttgccagaagttttctccccactcgggcaacccttcgcagttcaccaagcggattgcccacacatggccacttcaacgctgggggctggatattgtcgggccactacctacggctcaagggaacctcaagttcaccttcgtcgccgtcgaatacttcaccaagttgatcgaggccagggcagtatccacaataacgtcgaagactgcccagaagttctttt

SEQ ID NO: 34558 - DNA, 311 bp, Zea Mays
ctcagcagtggcaaggagccaaggatcgtccgtccagcctgctctgctcggtagtgacaaggagccaaggtagttggctaaaagagtatccaagcacatgtgtagggcacttggtggaatccatatattgcgctattccgcaagaattgtaatattattaccgagcatacagtcgacactgactccacacattctatcagctactagttttgaacagcaagccggagaagagcatcaaacttcatgggcaaaaagtaaagaatcaaccatagagagagaataagacaaacactactattatataaatacaa

SEQ ID NO: 34559 - DNA, 422 bp, Zea Mays
ccaatctccaacatcatttgtatctagttagtgtaccttttacacagatgatagccaccaattgcaacctacgatgcgccagctttctgcacctgaacccttgagtccaagaaccagtgcagtgaacggcttggtcaaggcaaggctaacagttgtgttgacggcggaaatgcatgtcttgccatagaacatgagcttagcatctacattactgctcccctctactttgactggcttagattgtaggatggatggtcctgacgcctctcaacccttggtttcccacataacttgcactgaagggtggtcgttctccttttccaggaatgctaggacttctggtttctatataaatcgatccaacatgactatctcctccgtctgtgttgtgtatatataagtgccaattaccatgtagccac

SEQ ID NO: 34560 - DNA, 432 bp, Zea Mays
gaggttttgtggagaggaaggaaacatttcagcggtgtccattgtaggcttgcttggccaaagtcctgccgaccttgggagtttggtggtctgggcattactgatcttcaaaggatgagctgagtgcttcgtatgagatagctttggcttcaaaatacagagcctaataaaccttgggcttcacttccaattcagatccccaaggtggtgcggtccttctctgttgctgtttacagcgaggttggaaatggagctcatactcttttttggacagataaatggctacatggacagtctattgctgaccttgtacctcagctctttgggatgattcccaagcgaaaggccaacagacgcacggttcttgacgctttgtgtggatatccaaggggcccttgcttttgctgccatcctggaatttctgcagctttg

SEQ ID NO: 34561 - DNA, 463 bp, Zea Mays
ggacacaaattcagaaaatgacctatgaggtggcagattccaagcagaataggcaacaggagcaccaacatttgacactctgcccctcagaatcatgtccagtccgctcaccagatcctcagtaggaattctcttgttggtgacccgggtagagtcgttgataccgctgtacaaataagctgggtacgccctatctttcaaaggctgaatatttttgaagacgaagtcagcgaccacagcttcagcagtcaaacctctatctttcaatgagcagatctcggcaagcaacaccttcgcctctgttacctccgaagaggtcggagattctacctagctcggagtatggacatctggctgcctccccgaccgagggggaagggacttgcagtgattctccatgataaaccactctaggcgccaccctttgatgctatccttcagagggatatcgaggcactctgac

SEQ ID NO: 34562 - DNA, 276 bp, Zea Mays
ccccaccggtcagccactatgttccatggtacatggagccgtcactcccaatcctaggggtgacttctcccacctgctaataggttttaggaagccatgacagccacctttgtaaacatggcttccttcatggaatccattggtagggtgtcatgggccacgctagaggttgcatggcttgctgtgtcgccctacgccctcaccctctagcagaagaagcggtcctcgtcgtcggccatcaaccaagcctcatggcatgctcaggctccaaccgca

SEQ ID NO: 34563 - DNA, 310 bp, Zea Mays
tgtttttgtacatcatcaccactcgctaccaccactgcagcgtctctgtagaagagtttgcatagctttatcatgttgtttatataggtctgtatggtccaatgccttcaaaatatttctttgtgccttcgtggtttatttgcatgttaagcttggtcaaacttttttgaaatgggtggatgtatatagatcacaataaacggtaggatcaaagtggggtttagctgtcccgtgggctacaccgttcacatacttttggaaaagggccagcacatacactagacttgctattttctttatctcaactggg

SEQ ID NO: 34564 - DNA, 424 bp, Zea Mays
cgcgaaacagatgacatgacacaaaaatggaaaacgatacaatcctgacaagatggtgcacgcatccgatggtgaagcatggaaacactttgatgtcattcatcgtgagaaagccgaagaggctcgtaatgtacgtgttgcgttggccatagatgggttcaatccctatggaatgatgaggtgcaaaatgataatgacttagtaatccttgaaggcaatgacattaatgacgaacttgcgtcttccgatggtgttgactatgaaacggttgatagtgatgatgagagttatgatccggctaaccccaacacatatgaagattatttttaatcgatgtaatgctatatgactttttatttcgcacctgtttttaaatacatctttttatatgtgcttatttgtttactcttaattgcaggttttt

SEQ ID NO: 34565 - DNA, 420 bp, Zea Mays
ctaacagtgacataacttatatgtatgctatttgtctttgttgtgtgcgtcgataccaacttctccctggtacttggcccccctgggatgtaggctcgatgtgtcgaggctggatgccagtatacttaacaaagaattggtgacctggcccccaggaggtagtctcgacagggacctagaccaacacacatccttggctaggaagctttggtagtgcacccataggacccactaactggtatcttttatcctttgattcacgcaacaggacctgcaggacttagaccgggaagccaatccatgtgtccggaccacctggatcacaactccaaatactagggcacccgtcgtagagtagtggagcatgtaggcttagggtacgggaccaggctaagtggctacacagctccggaccacccc

SEQ ID NO: 34566 - DNA, 420 bp, Zea Mays
cagtgatcggccggacgtgacaacacaggcgactgcacacgtacctacgcacgtcagcatgccagtctacgctgcaacctatactagagccttcacccgtacgctaacgagacagggcgaaggagaaggtggtcatgaaatctgcacggcgaccaagataagatctttgtccgccgatgacgttacttgttccatgcagtatgcttttattactatattcctgggcccacctgtcggagctcagcttccttgtatgtgcccacttggactatacaagggaggacatgcaacgttacaggggagaggacggatacgcacagagactctcatgcaatacaactcacagtggatgtaggttattacgctccggcggcccaaagcactctaacccttgtgttctcgtgttcttgctgctaacca

SEQ ID NO: 34567 - DNA, 607 bp, Zea Mays
cgcaacgccggctgccccttcgcaggtggcgggatagagttaggggtgttgaatgtaggactttgtttttgtgatactcaaagtcggttgctgcgcaagttccgacgtctgggcctgtgcaagcaacccctactgatgatagtaattttgtggcggctgcgagtgtgatgcgtgtgaatgaaaatttgtctggtacgtaaactgggttttggtcatctgatgggggtgagtttgggagcctgttcttgtggacggaggagtcttaggctgaggatttggattattttgctgcattggatgtggccgcggcggagtctatgccgtggatggaagcgcgtggagcgtttgagtccctggctgaggcgaggaccggtgagtctcgcagatgaagggtggtggcgaagcatagtgttagtggtacgtcgtgaagtagtaggcatcatcggatggggatggaacggactcaccctcagctagatcgggatggccaacgagatttgttttcttcgaccgggacatgcatgggggagggggatctgtggagtctgtttgagggtgaggagttgaggatgatgctgtttaattttcgtgaagcagaccttatccc

SEQ ID NO: 34568 - DNA, 562 bp, Zea Mays
tcggtttcacgatggcgaaaatcggatttaggggaaattccaaattcaagctctctggtgggagacttgggatgcaagcgggtgcgacaggtagtagagtacatggcgaagccgagggggggctcaatttatagactccgagagcggtggctctcaatttgaccgcgacgagctggcggccggaggtaaagacgaaggtggcgcggtgaatacgtggctactgccgtggcaagctccccgacgacgatgggacggcccaagagagtcacagtgacacggtagaaagctaggccacgcggcgtaatgccgggaggcggcggttctccggcgagcctatctctccaccgcaaagcagagggggaggcacaggaggggtcaccggagtggagtccagctcacggcggtgaagatccttactgggtgatgcttatctggtgtccacggcgcacgaatcacggcgaacggcaatcaacggcgacgaccaccggcggcgagatcttttgggcgcgggcggtctgatctgtttcagtcgtgacactgtaccatggtgaacgcttcaaag

SEQ ID NO: 34569 - DNA, 361 bp, Zea Mays
aggataggagcgcgctgtagcagatatttctactgatgataattcagagatgtgcataaatctgaatatctttgctctccctcatctctacaatttccaataccaaagtaggacacggcagggagtaaaaagaccacagttagatatttctgcaattttggatctacaactcttgactgacccacccaacttcaattagcctcttctcttaatttttaattaagacagatcagtcactattaacagaacttgttcccagatcaagggtctataaatttactataagtctcttggacctaatccttatagattacaagttatggtgcccaaaaatcagctgcaatacactggtaccatttca

SEQ ID NO: 34570 - DNA, 383 bp, Zea Mays
cggcagttgccctatgctcactacttgtgccacatctttgtgcagctaattcagcctcctcggtttcagggcacccttgaggcctcacgcctcgtttttggatcctaccgtcctacgcctgagattcctgtgccagcttctgctcctgtttttgactctcaggccaaggatgcatctcttcatcagttcgacactcaggctacagcagttgttgttgttgatgatgatgatgattttggggttcctcctccgcctcctatgcctccacgttcacatgatcatgaggctgggagttctagtgctgcccctgctacccctcagcctatggaccctgctcttgcttcgattctccagtctatcactcagcagcaggctcacctggc

SEQ ID NO: 34571 - DNA, 373 bp, Zea Mays
atggttccagaggatctgttatcagagccagcggatggtgacacgatggatgtttgtgctgatgtgttcaacgccgggttggggtcatcccgggcagcgtcccacgcctcatcgaccttagagcgcggtcttgagggtcaggaaactgacttggatcgtcttgttctcatggaagtaactgaggggccttcagccttagaggcggctgccgcaaagaacttggccctcaaggatggtgttgacgcttacccagcccccgagggtgttgccggggatgattcggctcgggtgggaagcgtaagccacgacccagccaccgagggtgttgccggagacgatccggctgaagtgggtagcgcaagctatgacccag

SEQ ID NO: 34572 - DNA, 429 bp, Zea Mays
aagcagaactttgaagcagcacatttggaaaaatagcctcccaatcagaagagcaaaaaactctgtccaactttaccaaggcatgctaatttgaccaagtaaatttcctgccatgcaattggatttcctttaatgccagatcattaatagctgccctgaatctagacatcattgccctgttcaaatttgagttatttttatccgaagccttataaataaggttgaagtctccagcaatgacccaaggtccagcacaggcagctctgatttccttaatctcctagaggaaaagaattttatctgcatctgactgaggcccataaacgcaagttaaccaccatggtgtgccatcatttttacagaattgaatgaaacgcagtgattatctattcttgttaaccctatgtgaccaacattcctcctccaagc

SEQ ID NO: 34573 - DNA, 360 bp, Zea Mays
gcgagacatgcatgtttatcgttgatggacgtgtggagacaagtggtagtcatgaaggcggtgagtctaaaatttggcacaaaactcagacaactactaactggttgaattatttatattggttcactttctgacttttcatatcatcacatttgtgtcacatgtaaacaaagatgtatttgtggtataataaatctgctaatcataggcaatatgcaatacgaatcactaaactacattgatacactatcagtactaccttagcatagtttagagacatgttacatttcaacgcaattctcaaaaatgaacattccattgtaaacattgatagtttttaccttcacacaatggtgagcg

SEQ ID NO: 34574 - DNA, 304 bp, Zea Mays
ggcaggcctaaaaggctagtaagggcctgggactaaccagaccaggtcgtccaacacgctaggcagcccatcaagttggttctcctccacgccgacgccgctatgattttttcccttgcaaaacccatgctcgctaatgatggaaccgagaaaagaaccacagcgttctgactgagacacctgggcaatgagttgagatgattttttccagacagaaacctgctgcgcccacttgaactcgtaggatggtggctacggtctctacctgtagtagcctgtcaacctcgacccaatcgggttcctt

SEQ ID NO: 34575 - DNA, 409 bp, Zea Mays
caacaaagaatagatcataagatggtattgttcaatactcaacatattaaagtattaaatgtttgacataatcaagtggttagtggcaatatttaaatatatagagaacattaaataccataagaaagcttacatactacaagataaccttccgatccttcaagctttgaaattaagtgataatgttcttatccttgacttgtaagaaaatttgagcaacaatatccttcttttttgcagcagcttttgctaaaaaagctctcaaatcagtagtagcacagatctttctctttattttttgatatataaataatcacgatacactcaaactcaactcaatgtctagtctaaaacaaattataatatgctcaaatcagtggagctgggacggcaggaccttgaatcggcg

SEQ ID NO: 34576 - DNA, 333 bp, Zea Mays
aaaaacggagggagtatgtttattggcatatgctatgcatgtcttctgtattagacatgtatatttatgtatctagttcctactttggttgtactcagttttgctgccactctggcacacgtaccaagttctttagcaaacctatgttctaatgaccttaacaacatctctactatccattttgtctggttgcgctttcaattttctcttttaactcatgtggtcctggttagcatttggggtttcactagtgtgcaagttcaattgttctacctcattaccgtctggatgtttgtaaaggaacatatttcatatcttttatcttaaatgatg

SEQ ID NO: 34577 - DNA, 452 bp, Zea Mays
gtttgaaacaccgatagttggcgtgtcaggtaggggacttgcatggccagcaacgacatcggtgtggtctggaccaccggaatggccattgattttgggagtctatatttcatcgtcgacatcgaaggggagatgaccaaggcctcagaaactctagaccctttgacaactaacctacccaatgttgttataggtctcaatgacctccagctcggtccccctcacaaggagtgcgggccacaaggctcaccatgaccagtcgtaccgaggtcataggggtattggaccccatctgggattcattcatggacatcctcctgtcaggggcaaaggataggctctcctcctcgcctaacgaggctagttgcaaccccagccaggagtgcctcgtatccaacacgactggggatcattcccccgcacaggaggcccaagggaaacttctgccggtg

SEQ ID NO: 34578 - DNA, 365 bp, Zea Mays
gttgagccactgatccgcctgagtgaaggtgatcgggtgtttgtaccatcgatatggggcgggaggaccagtggtcgccaccagtatctgacggtcgttgagcttttgttgcctcttgctttcttgcgacccatgtccgccgaagatgacgttgacttctccgtcgatgcgtgggaatgctctgcctcctccccccctcccgttgttggggttgtcgaggttctccaggtcctccttgtggtgggggaggttgcattggttggaaaggtcggtcattccccatggagtgcttgaagtctctgcagttccggagggtgtggcgcatgtccttgtggtacgggcactgggcgtcgaggatgttgtcc

SEQ ID NO: 34579 - DNA, 341 bp, Zea Mays
cgcctcaacaccctgaagatatcagtagtctcgccgcgcaagttttgaggccagagtggcgtgaattggtcgtcggaggaaaagctctgccgtgcgctcgcacttcgtcgtggtcaaccatcgtcgcgtaatcatcgccggtgagataaccctcctcggattcacgttgctggccatacggtgtagacctatttggttgggtggatattccattgggggcctcggatcgcttggctccggtgatgggcgccaccgtgcgaggggctacgccaccgccgtagaggtagctgagtcgggtgttggtcagggtcgttgatcgggaaaagaacggccaggattag

SEQ ID NO: 34580 - DNA, 271 bp, Zea Mays
gtttagtgtagagacacagtactagcttggcatggcgatagggcaacacgggtttgcatgaaacatgatcaaccatgagagtttcctgcaagtataagaattgtttccttaggcaggacccatgttgtagacccaaacaattctgaagatattttttagttcaggtctcagcatccaaataatgtatacatacctatcggaatcacttccctgaacatggaagaatataattgtttcccaaatattgcactgcagaaaactcagcctccat

SEQ ID NO: 34581 - DNA, 398 bp, Zea Mays
cacaatcctttttatgaaccggtacatgatgattgccataggatctgaaatccacggccgttacttaacgaggcgaaagggtatctgtcacttaatctgagtcgttggttccgtgatgaacatccatcacactttatcccttccccagtcaccatcgcgaaggcatgcgcccaccacagcagcggcgccacagttccccacggcagaagtcgctggagtagtgcaatccggccctagtgaggaattgcgacggcgccaaggactcccacgactagctactcccgtgagcacctgccccgaggatcagcgatgccccaaggtccccagctgacaccagaacaaccacacaggaacgtcttccccccatggcggcccgacacgcatacggtacagctccg

SEQ ID NO: 34582 - DNA, 326 bp, Zea Mays
tttgggcacttggacgacttattgttgtttttggatactttgctcggcgccataggcctatggtgccgagataatatggctcagcgtcgtgacttatgatgctgagctatcagatgtgctagactcccatgttgcactggcgccaacatggccttgctcagcgccacacatcacgacgccaagctaggcaaaaatggcatgcatgcctttcctcttccccacgctatctcctttcgttgccgcggtgtctcttcgtcgcgccaccgtttctccgccgcaccgccatttctcctagccaccatgcccctgttcctggagctcgccac

SEQ ID NO: 34583 - DNA, 426 bp, Zea Mays
ggcaaatttgtagagctacaaaccagcaacacttcgactataggggttgaactcatttgagcactggatcaaggtgtaattcacactcaaagttgaccctgttacactgaaaagctgaatttcagaatgaaaccagcctgacagtcaaactttgagcataattatctccaatattttctcaacaactatgctcacactcttaagcaaagttgttctccttagtttggtctacaattttgatgtggtgacctagggcaaactcttaataatttggaagatgtagagctccaaagttgagccaatatcactgaaaatcagacttaatcatttgagaaaaagtgtggctttttgcatataagcccaaaacttagtgtttagattgcaaattcacatatgagtgacccaaatgacttaagacacttattt

SEQ ID NO: 34584 - DNA, 293 bp, Zea Mays
ctcaatttgattcacatgtgataattgtcttcaggttagtactgagaagaaaccctaggtaacacctaggtgttacaagaaacttttttgtattcatgaagacttttcttttcttgctgcctacaaagtgagagttctaccagtacgtttgtttcaggtctgtagccttggaaatttagtaggaatttgtcgaggagtgtcttccatgaatcaattgataacagcggtaaccttgaataccatgtgagagttgggccctcgagggctatgatgaatgacttggccatggtggc

SEQ ID NO: 34585 - DNA, 349 bp, Zea Mays
tactgccacagatgcagaggaatggtgcacagactactgtcattacattaaaaggccacattacttctactcctacaggaccctgctcattacataacattcagaaatcagaatacaaagagcagcaaaactggccaaccagaacatgcaaacagaggtcacagagggacacgtccagccattagttctattcatattcccccctctcggatgtcttccagttgtaggggagccagccagccaggtttgtcagagcagctgtagcaactagcaagcagtcttgtggccacctttagcacattattgacaccttccaccacatctcttgctttttctttgggtacagacc

SEQ ID NO: 34586 - DNA, 273 bp, Zea Mays
acaaactggactcccaattcctgtcgaacgtcaacacacaggctcttagtaaatctttgaggactttgttgaccctcttcgtttgaccatctgactgagggtgataagctgtgctgaaatctaacttggtgcccatagcttgctgaaggctcttccaaaattttgaggtgaaccgtgtccctctatctgacactatcttccgaggaataccatggagcctgactatctctttaagatatatccgggcaagggtggctcctccaaaagtggttt

SEQ ID NO: 34587 - DNA, 549 bp, Zea Mays
atttgatccgcgggtctcgcacacacctgatccgtaataaaagaaaagggtcgggtacatatgttttgtcgcacccgcgggtatccaacggatatccgcaattagtgaaactatttctcagcccaccataactccggaagctggtccaaagtcccagcagtccatcaccattgtctaaggcatctcaccctagtgcaagcctcctcttcactcccctcctgtgatatcctattcccctccttactgccagctccttgctcccagccccatgagaccatgtcaacgactcaccatgatgccccaaccaccacgcccaacgccccatgccaagccatcggccaccacgcatgaacgccccacactaactaggaggcccgaaccccctcttccccgtgaccggcagcgacgccatcctcttctagtcccgacgatctactcttgatcgggcatagccagcgccacccacctgcaatcccgattgggcattgtcgatgctgcatcaatcaatcctgaccttcatcacgtacggacccatcttcgctgaccact

SEQ ID NO: 34588 - DNA, 433 bp, Zea Mays
tccttgtcgaaagtgtttgaatcggattgctagacctaagtcaaagatagaggatcatttacatattcatggtatggcaagcacgtacactacgtggatacatcatggggaggcacaatttgatactgtaataaatcaacaagctgaccatctagaagaacaatattgtatgaatgaggatattagtatgaatgagtctgaaaacccagaagatagattgcctgatatggtacgagagttgttcacagctggagaggaaggtgcacataaatctatgtttgcagttgtattggaagatatggagcaagaacttcaccctggtgcatcgtacacaagattttcttttgttgttaagttacttcataacaaatctttttaccggatcagcaatgttgctttctccgcaattctaaagttgttatcattggctttc

SEQ ID NO: 34589 - DNA, 355 bp, Zea Mays
ggggtggttggggtggtggatgttttgttgttgtgggtgtggaggtggtggtgggggaggtacgatttgtacctcctggtggtgttggtatgcgtggtgcggcggatgcggagcgaggccgtggttatatggctgagggggttgttgatatgtgtgcgcgacaactctagggttgttggctagttgcgcccgtgccatcctatctctggtggccttcgtctctgggcagtctcttgtagggtgcgcgcagtcttcgccgtggaacaagcagtaaaatctgtgtggctgctgcacacgtccccggccccggccacgagttccgtttccgcggccctagggggatactcctggcggc

SEQ ID NO: 34590 - DNA, 407 bp, Zea Mays
cctttttgcatcttcagcaaatttgcctctgccggtgggcttagaatttttggcatttttactgtttcttccacttttggctcttcgaccgtatcatccttagcttcggctcgcccgactgtaggcaccttcggcattacaatacactctttagcgctctgcatgatggaagcagcttgttttgcttcggcagttgaagaggtcccttcgccaaattcaggcactacggccggttcaatatatcgcggcccggtgggttagaaccttcattttcttgcccttcagcacagcagtggtggctgaagcaacaatttttctcttctttccttgccttcgcagcgggtagtgataataagggtatacaaagtcgattgcatcaaataccttgttcaatcttttcttccccc

SEQ ID NO: 34591 - DNA, 334 bp, Zea Mays
ctaatggccttgcgcttctcctcatcaaaatggcggagtcactgggcgactagcctaactgtaggctggatattcagggagtgcttggtgagctcacttgggatccccgacatgtccacggcttccagacgaagacatcacggttggctcgaagaaagttgacgagggcaccttcttgtttgttggagagcgtcgccccaattcgaacgttctttgaagtgtcagcattgtcgactaggatgtttttcgtgtcctgggctgatttgaacgtgccggaaacgaccttgggggcgtctagcccgtcttgcgggttgatgcctttctgtagctcagc

SEQ ID NO: 34592 - DNA, 312 bp, Zea Mays
gttcgatctggaacccgaagacacttcttcaattgagatacgtggaacacattatgcacagcagaaaatgtttagggtaactggagtcggtatgctactggtccacattgttcaagaacatggaaaggaccaatgtactggggtgcaagcttcccttttaccccgaaacgagatacacccttcattggtgagacttttaggtagacataatcttcaacttgaaagtacaatggtttgcgtcgcttgtctgcataactcttttggtgagcttgggcttctttcaaattatgtattattcgttgaaccttttct

SEQ ID NO: 34593 - DNA, 440 bp, Zea Mays
atcagtgccacacacctcacaaaggagcttggccgagcagtcgctcattacgtgccccttgccgtaacatctatggcagtaacccttagtattcatgggcgcctccaatgaaccttccttctcctttcctggcaccttcttttccccttctgtagccggcgcagggggtgtcttcttcccctcaatgttcggaggctgcgactgattggctgtggcctgatgagcagcaggtggtggtgcatcgcttcctccctttgccgcattcatgccttggagagcagagagcgcttgttgaaggatagctgccgccatccctgcttgatcacccgctgtaccgacactgccaccagagatcgttcttgtccccaatgtgccttccacgccaggtattggagtcgacatgtcggggccggcagggataggtctgacctcccctcgcc

SEQ ID NO: 34594 - DNA, 335 bp, Zea Mays
gggctcttcagtacttgacgctgactcgtcctaatctggcctatgctgttcagcaggtgtgcctcttcatgcacaccccgcgcgagcctcaccgtgcgcttatcaagcgcatcctacgcttcgtctaggggactctctccttaggtcttcacattggcactagatctgtcgacacactgactgcctactctgacgctgactgggcaggctgtccagactctcgacggtccacctccggcttctgcgtctatctcggtgacaatctggtttcttggtcctccaagcgccagaccacgatgtcccgctccaacgctaaggcagaatatcgggccatg

SEQ ID NO: 34595 - DNA, 362 bp, Zea Mays
aatttacaagggaccggagaggaagacaaccctcggaagatcttgcagaaaggcatcaagctcggtaagcagctggagaggatggcggatggagatcgctggaaggcgctgcaagatttctgggccaagacaaccatccatgctgctaagtcgcactacaccaccaagcaacacatgcagcaccttgaaagtggcggggagttcctcacgcacatctgggctctgcttgctcatgcaggcattctctaccttaattctgtgaacaatgaagatcaggaggaccaggctaatctaggctctggaccctcagctgctgcatgatagattcaagtcaatggcggagctatctttgtcggttttcc

SEQ ID NO: 34596 - DNA, 379 bp, Zea Mays
agtgggggtcctgcctgaagtgctggaatgacagcagcctgaagagctggaggaggagcagactgcactgttgggagctaaacaccggtgtgctgaaggatattcatcgtgaatgtccgacgctctgccctatctaccaagagatgctgcagaagggtgtcttgacggtcctggatagtctgaaacatggagagcatatgttcggacatctgctactggatagctacctatcgagcttgctctactaccagatagcctgctgctgcgtaagtgactgaaggatagcgggcagagcagggtcaatatctggtgggacagcaggagcagcactagaactacctgcctcatgatcatgtgagcgaggtggcacaggaggcag

SEQ ID NO: 34597 - DNA, 274 bp, Zea Mays
gaggaattgaggataatgttgttcaactatagggagatgagtatcatcccgaaggttgagccaatgtgatgtatgatgccctcgctgtgtgtatgtaaccgtaatttatgtggtaaggctgctcgctttcgttgatctagccgcgcccgtaggcgacttctgcacggggtcttttgggaacgacctcgatcttcgcgtgcttgttgtgttgttcaggctgcagacgtaagcgacttttgcacggagagtctgttgggaaggacttcgattttgt

SEQ ID NO: 34598 - DNA, 633 bp, Zea Mays
gtcagagactcatgtgctgacaaagtcctgaaccctctatcacctacatccattaccctgacatgaatgcgagtgatgtagtagcaagcccgaggaggctcgtacactcgccttgtctcatacaggggtcggacgtaggttcccaacacgtgcagaacatcctgcagcaggttagggaagtgccctgtctcgaacattgaggtgtaatgttcagtgacaggccataaccacacgtagtggtcctgttgttcttcgttggcttcctcgttgaggttttcccccatcttcttcttcttcgtcgtcttcatcatcgtcactagagtcgtctaggtcgtcgcctccgggagcaggggcttggactgctggagctggtggtgctgaagctgacgatccagctgcgaaggctagtgattctgccaatggggtgggtgtaggcagaaactcctccgagctgtcctccaaaatgactctgtgctccacccgaatgcgagggagatccacaggaatttcctcgactaccactaggtagacaagaacttgccatggtggagggatgaagttggtgttgatccgagtggtttgaatggtacggaccatctataagagaaaatgtcaatttagttgatgtttaaa

SEQ ID NO: 34599 - DNA, 700 bp, Zea Mays
aaactagtagcccttatgacagcgacgaacctttgaaaccaagcacgaggggcctgtttcaatgcatataaagctttacgcagacgaccgacatgtctggaaggaatatcacctcctggtggtggatgcatataaacttcctcgtgtaaatcaccatgaagaaatgcatttttgacatccatctgagagatagtccatgaacaagatgctgcaacaacaatcaaagtactaattgtggtcatttgtgcaaccgatgcaaaggtttcatcataatctactccctgagtctgttgaaaacctttgaccacaagacaagctttatatagctcaactaaaccattagatttggtcttaatcttaaagacccatttacatgttatagggactgcatgtgattgtaaaggaacaagatcccaagtacccgttcgatcaagagcatccaactcttcttgcataccaagccgccattcatgaataccagaagctttttgataattagatggttcaacagttacatcaacaacactaggaaatccatagcaatctggaggttcaattgtactacaatcacgaagatgatatccctggtgatttggtaacgcatcaacaaactgtgacccatcaacaatctatagatcatcagaaacatatgaagagtcatcattgttagtacaaacatcaacaacatgtttgccatcag

SEQ ID NO: 34600 - DNA, 347 bp, Zea Mays
ccggaagtccaccacctgtttttgacacccaacttagtgcaccaaattcacataataagcctcaagaacaacgccgcacctacgcgcaatctcaaaccccgccgcggtaacaattctccccacaccaaccaaactgcagcggcgctgcttaacaattccataactttaaaataaaacagcaatggtgtcaaacaaaaactccagagacaactacataaaattccccacaagttttgtatacaatttataattaaattctaacatctaattacccctaaactgtccacaaaataaaccctgcaatctgtttttttcctgatttgggcagcgacatattcggattcaaa

SEQ ID NO: 34601 - DNA, 320 bp, Zea Mays
gtcgccagggtgtgggtatcccctgcactttggtttacctgttaaatgttaatgaaattagttatctagttgggaagccctttttcattccactttcctctttatctgggaagttgtgcttacctgtgatggaaatcagtgaaggcgttcatctgtttagtattgtggaaggattctatatccttttcttatgttgcaagcttgcaagatcagttctgatatgtgattgcattctgcagatgtcggaaaacaggcgtagataaggaaggcgtgctcagcaggagcaggcagcaccgcaggatgaggcaccccagcaatag

SEQ ID NO: 34602 - DNA, 393 bp, Zea Mays
gagttgcggcaggagccttttgcaccttcgacaggttcgcctctgctggagggctcataatttttggcattttcactgttttttccacctttggctcttcggccttatcatccttaacttcggctggcccgaatgtaggcacttcggcactacaattggctcttcagcgctctgcacgatggaagcaacttgttttgcctcggtagttgaagaggtcccctcaccgaattcaggcactatggctggttcaatatatcgtggccggtgggtcagaaccttcactttttccccttccgcacagcagtggtggccgaagcggcaacctttctcttctttccctaccttcgtagcgggtagtgataatcagggtatacgaagccaatcgcatcaaat

SEQ ID NO: 34603 - DNA, 608 bp, Zea Mays
ggcacacccaagagctaataggcaggtggaaagagctaacgtaatgatacttgatgcactcaggaaaaaggtgttcgacaagagcgaaaagcttgtaggaaaatagatcagagaactatcgtatatggtctggagcctgcgaacctagccaagccgggccttgcatggaaacaccccattcttcatggtatatggatcagaagcagtattaccagcagatttgatctttggagcacccaggataacatttaaaagcatagctaaggcagaagaaactaggctagaagatgttgatatattataggaagaatgtctgaatgttgtcattcagttggccagatgccagcaaaccctgaggcgctaccacaacaaaacagtgcaacatcgatccttcgcagtaggagacctagtccttcaccgagtactgacgggagaaggatgacacaaactgtcacccccatgggaaggaccattcatcgttgcagaggttacccagccaggatcctaccggcttacccaaatagacggaaccggagtggggaattcgtggaatattgaacacctcaggaaattctatccatagcaatacctcggaactctggtggaca

SEQ ID NO: 34604 - DNA, 390 bp, Zea Mays
ctttacccctttcagttgcatattgcaatttggaggtgaatactagaaaagaagtaaaaattactgtacgcatttcgtatttggctttgattcttgaacccatcagtaatagcaatgcagagattcatagctacccagctgatgtcagggatgtaaatatgccctagaaattcgtttgaggtatgcacaacattagagcaggggcaatagccctgtgcaaggttttggttaccaatcaggtagatagtagatatggttgcttcagttccaactacagccagaagagttcctatgatggaggttgtccagtatatggcttatgcagttagagtatcttaagtttggtgaagtttagtgcgcaacacattagcatatcgtacatctgtaaga

SEQ ID NO: 34605 - DNA, 443 bp, Zea Mays
ttaacttcccttctgtttccttgactcaacccaaacacttctgaagctatcttttggatgcatgtcgccatcttcctccacatgatgtttgcgtctccctcttctgcccaagggccctcctcgataactctctccttgaaagtttgggccacatcccctttaagcttccaccactttgttctaatgaccttgttatgcttattccgttgtaaacgaatcttaaaacgaaagtcagctacgacaagcttatgttgggttaccacacactctccaggtataaccttgcaatctaagcaggcatgcctgtcctcttttctcaagaggacgaaatcaatctagctagtgtgttggccactactaaaggtcaccaggtgggatttcctcttcctaaagaaagtgtttgctataaacatgtcataggctagggcaaagttcaggatttc

SEQ ID NO: 34606 - DNA, 376 bp, Zea Mays
tggatgcttaactaccttatggagctcacagcggggtcaatttatactatgagagggcggtggccgggaattttagcggtgacgcgcggcggtcggaagagtaaaagttcactagcgcgcgtgaattagtgtcccatgccgtggcagtcactccagcgatcaacgggaagctagagtgagtcacggtgatgcggtagacaggtagagacacgcggcggacggcggtgagggcttaacggcggtgagaaccttatccaagggatcagtgcgcaagggagaggcacgacggctagtcggagtggcgtccagttcaccggcgacgaagattttcctaccccgcgacgttatctatccactccgggcacgaatcgggacg

SEQ ID NO: 34607 - DNA, 414 bp, Zea Mays
ataggtagctgctcttcaggtaccctaagacacttcttcaactgtgatacatggaagacattatgtacatccgcaagatggtcgggtaattccagttgatagacaacttctcccactcgcttcaggatcaagaagggtccaataaagcgaggggacaacttccctttaactttaaacctcctcataccccggatcgataacaccttcaaatacacgtgatcaccatccttaaactctaactgccttctccgagtatccgcataacttttctgtcttgactgcgcagttctcaagttttcccgtatcaatcgtacttgttcttctacctcttgtataatctctggcctaaagaatttcctttcaccagtttgatcccaatataaaggagtcctgcattttctgccatataaagcc

SEQ ID NO: 34608 - DNA, 544 bp, Zea Mays
gaaaaggtgagttagacataactatacatacattatgtcataacaacaaaaacactatctatatattatgtaccggaacaatgactgcattcatagctccaaccatgtagtcgtagtgctgcatatatctcataacaaagaatccacaatcattagaccccaatttcattgttgggcagttattcaagagttcaatagggtacttcaaaaaagcagggagggctgatcttggtcgagcattttgtatggctagattgagcctattcattattaacttggcccatgaaaccttcctatcacccatatccattggtatacaatggtaatttttccggatagtcccacccatctctggtccatatgggttggaatctaacacatgtatgcgtccaatcttaagattaacaacatacaatgtccaatgtccagagcgtagcatgggtaccattatctacatgcacacaaaatggaaataacaaatgttgaatacactatgattgatatgaatgatttgattgaaatttaaatgcagcaatatgaagtg

SEQ ID NO: 34609 - DNA, 372 bp, Zea Mays
gccggtttggaaactggtccacctaccagctgagccagtccttgaaccgagaaacactctggtggaaaccggctcaaccggttttcagtcagaaaagcccaacggccaccagcttttgggggctcctttatataccccttgcactctctctcttcatttacttctgccccatccacgaattcttggctgacctacactcaaacaagagcattcactccacctctcacacccaaaatcgcatctccttcaattgattgaaggacccttggtgtgaggtgaagtttgtttaactcgttggtgatttcatctctattctccctttctcttcatctcttgagctcatcgcaaacttgaatcttgtgcggatttgtt

SEQ ID NO: 34610 - DNA, 646 bp, Zea Mays
tatttttatactaaaaattcattttctgtatttaatttcgaatttattataggttctggactgcgcacacaattttgcagaagcctagggtataactcataaagttcaggaccaatccgtaatattaacagcacaggagtggatggcgggttgaataggtaaaacctcagggtctcttttgaaagaagtacacgacgaaggggtattggtgatcgctggccgtcggatctgagatggaaagctcagattaaaagaacgaactggcaagcgatttgatcccttggatcacaaatatacggccatgatttaatgtacgaagggggtatgcgcccacttaatcttatccgtgcgctgcaatatcaacggtctgtgttgaacctagtcacgatccaatccacatcgctcctgctagatcctacggtccttatgcatcttcttccttagtccgagctgggcgatgccttgtcccaaccgcggtggcggcctgaccgagccccggaccaccgttgccccgatgaccaccgatgtacggaacccaaatgttgtgacggcccgaccactagcctatccacggtcatacaccaggaaacagaaacagtgataacacaggcggaaaagtacttactgacgacgaccctgctacgat

SEQ ID NO: 34611 - DNA, 451 bp, Zea Mays
atctgcctagtatgcagatcactatagcaactccggtgctgagtttccctgtagtgacgcctggcgagatccacgagtctgaatcgaagggcgccgagggccgtatgaggtgacgccccgtcccgttgtcagggactctccgtcagcccagccgcatgtcatggcgtcatctaagacgacacgtgcgtgatgacatgtcctaccatggccggtgtgggggcaacagtgcatgctttgtctccacgtcagtcgggtactgtaagccctggaatctagcttctaaaacctagtcagtcaagaaataataagggggtcattttaatacagtggcatatttcttttaaatatttttttatataaggggagtatatagaagatccttatatgagtaatttaattataaatacttcccaaaaatatctaaattaacatatgttatatattaggaatt

SEQ ID NO: 34612 - DNA, 461 bp, Zea Mays
ggatgaggccgaagcgaccgaaacagcactaatatcagaagtgatgaggcgatcgggtcttgttgtgccagaggaggctattgccgaaggtacctccactgctgaagctgaacagatcatggctgaagctgaacatgagatgattggaaaagttttaaagaattttgagatatactttcatcagttgacacccaaagcaatcgttagacttagtgtctacatatgggctctccgaagccagggtatgagtcctaatgacgaagctttctgttgggtgcacgagctgcactatcaaacgaaggctagagtggatggtcttcataagaacttcgactgctaaaacttcgcatatcagaaagatacaaaggcccttgtaattggctatcataccaagtgccgaccggttggacaagcgaatggttttacataaaagcggacgagaagaaaagggagaagctaat

SEQ ID NO: 34613 - DNA, 644 bp, Zea Mays
gcagccggaccctccgtgcaaaagtcgcctacgggtgcagccggaatagcacaataagtgcgcaaaatcgaagtcttctccaaaagactacccgtgcaaaagtcgcccaagggtgcagccggaccctccgtgcaaaagtcgcctacgggtgcagccggactagcataataagtgcgcaaaatcaaagtcttctccaaaagactccccgtgcaaaagttgcctacgggtgcagccggactagcataataagtacgcaaaatcgaagtattttccaaaaggttccccgcgcacaagtcgcctacgggcacgaccggatcaacgaaggcacgcaacttcatataaattacggttacatacatacaacgagggcatcgcactttacattggttcaacctttaggttgatacccatctccctgtagttgaacaacattatcctcagctcctcaccctcaaaaagatttcgcaactccccctcacctacactcgccccagccggcgaggacaacaattcccgtttgctagccccatccacacaaaaacgaccaccctccacctcactcaccctccgcttcgccaccgcccttgccgtctacgcccagcactcggaccaggaagaacttcagcacccatcacacgcggaga

SEQ ID NO: 34614 - DNA, 839 bp, Zea Mays
gagcgtccgagtccccggctgaggcgaggaccggggagtcccgccggtgaatggtggtggcaaagcatagtgttggtggtacgtcgcgtagtaataggtgtcgtcgaatggggatggaacgaacccgccctcggctagatcgggatggccaacgagatttgttgtcttcgtcgaccgggacatgcattggggagggggatctgcggagtctatttgagggtgaggagttgaggttgatgttgtttaattttcgtgaagcaggccttatcccgaaggctgagccaatgtagcgtctatgctgccctcactcttgtattgcggtagtgagtgaaaacgctgccctcccccgactcgcgataaagagggagggcaacagaatgcggtgggtatttatttgtgcaaagtggtcggtggccttttgctgtgtgtgtgaactgtgatattgtttgttgtaaaatgagaaggggacttcgcttgctgcggcgatgtgtgagtgccgaagccacatgcttggttgaatccgtaggtgattttgtgcgacaacggagattgtaacgtgcccttcgccattagggtgattcttggccttcggtgtacgtgtagtgcatatccggctgcacccttgggcggctttttgcgcggatgcctattagtgaaggcttcgtatcatgcgcttgttgcgcttgtccggctgcacccgtaggcgacttttgcacggatgtctttttagtaaagacttcgggttgtgcacttgttgtgcttgtccggctgcacccttaggcggcttttgcgcggatgtctttttagtaaagacttcggttgtgcacttgttgtgcttg

SEQ ID NO: 34615 - DNA, 307 bp, Zea Mays
gcggtaaggaatctggaccagggtcgttgagatttggccgagtatacccttggaaacggactctgctgctataaagtcgtggttgcgatccccttgaccatgtacccaagccgtcgaagctgcctgcagtgagactttgccgatgagctttgagaggagagagggtgctgacatatcgtgtagccatcaactatagactcattttctctatagcctcgctgcagcgctgtcgttatccaagccacaacaggtcgctgttagctaagctcccagccataagccgccatgacctgctcgtcgagttcga

SEQ ID NO: 34616 - DNA, 660 bp, Zea Mays
aactagatgaaattatacattagacaatgttataatagaatttgctaaagattaccatattttaccaatttctcatacaattcacacaaacaacaagaatataatgtatatccatccacatgcatcacaaacaccattcacaactcacttacatcacatcatcaaatacttcacattacaaattcctcaaacaaacacatagaaacacatattcattttgtcggtgttttggaccaggggtcctcaaccaactagtgaaacgatattgcgtgccctagacccagatggtgatttgagttgacacaagcgatttatcctggtttggactacgagaggccatacttccagcagaggtgggatgatgcttatattactcacacaaaagtgctcgtggtaggggttacaagcatagcgggagaggggtggatcctaagtcccagctggtgattgaggcaagtcccaataccaggtaggggagaagaatgatcaagtgttcgcctgccttgtgtctccctgttccttgtggagccgtgaactatcctatttataagctcggggagagttgccttgtagatgggagccaactacatgctgtgaaggggtgtcttcataacctatagacaatatggccttgtactttgccgttgacttgggcttgct

SEQ ID NO: 34617 - DNA, 418 bp, Zea Mays
catctaggtggtctgcgtgggcgctataattcattttaccaaacccgacacctttaggtttgtctgatttacaacgggcggacgatctgtgcatgagttcggaaggtccgcgcatggtgtcggacggtacttgtctttccttcggacggtccgtagaagaaatgtgcatttgacatagttcctatcaaaaatgcattgaggtgtcgcggatcatggaccaagttcctatttgaaatgacatagttcctgtccgaaatgcatcgagcttggcatcagatattagatatgctccactaaattattttggagctgatcatggaccagactaacatggattggtgtctcatgttgaaggataattgaaatctcagggtgcttcgttggtgctgtaacataggactccactatcttgcaattg

SEQ ID NO: 34618 - DNA, 579 bp, Zea Mays
gtctacaagtagccggggacttaagggaggctagaacatcaagcagagaagcttgaactaacctgtagagagctggccacggtgaagcgttcagggcggcgcgaaaaacagaattggggaaaaaggaaattgggatgctatggtggacgatcaggggcaagagctggtgcactgggtgcataataacctagcggacctggttgatcactcattttatagaagccaacagcggtggcgtccaatttggagaaggtgtgctggcggccggagagagggggagtttactgacgcgagctatcatggcggtcacttgctgaggagctacaacggtcattgttgagttattacggctagcaatgacgtggtgaaagggtccgctcgaccatgttgccggcaagtgggtacgacgtctgagcaaccacagtgccccgactacatccacgacgagatcttttcaccaggagtggttatccgcacgatactaggcgcgaatcacagcgccagcacgaatccgggcatggggtcaccggaggcgaggtgcactgtacctgagatcttcttcaggtcactgtaccattg

SEQ ID NO: 34619 - DNA, 547 bp, Zea Mays
gtacagtaaccggattggatcgccagctcagatacctcgccgctggcgaccacgcgcgtggattcgtgctatcaccgtgattcacgctgaattaaacgcggataatgatcacggggtgaaagatctcgccgcggatagggctggaatgtactgtgtgcttaatggttcatcagtgcacaccgacgacgtggccgagcggcaatcaccgacgtgttcgccgttcaccgggtggacgccacgccttaggaggtttatcacgtcagtatgagccgaagtgaccatccaatgaccgtcgtagttcaatcgctctgcggttgccacggtagatcaccgccgtgacttattcccctctcggccgccagcgcaattcgtccaaattaagcaacaccgctcacagactttataaattgagcacgccatgagctctgtagggtagtcaagcaccaagccaccaagccgtgccctcaattgatcaccagagctcgccaatttcccatttcccccaaacctgctttccgccaccgtgaaagaggcctcgccgtggcca

SEQ ID NO: 34620 - DNA, 290 bp, Zea Mays
gccgattcaaaccacccgagctacgattctttgatcccattggttctacgcctagcgaagattgagacgagtctataggggaggatttcgcagagggtttctcaccgtgagtcgtgcacaccgaggctcggtccccgtcggggttgcggcatcgcggcaagaaattccccatggtccgaggctgcccctgtcaaattggggtcacgcacagcctcccctcaatccaaccaacggattcttgaactccgagcgccgatgaaggtctgcgcccatggcagtggcaatcttcc

SEQ ID NO: 34621 - DNA, 329 bp, Zea Mays
tgcaactcttgcagataatagaaaactattcaacgagatccaggaactgaaaggtgcctatttgaactgtaaacatcgcttccttttgtctggtttatctatgtcgaacataaggctacaagcccaaaaatagtaacttaatgtagtattgttgagcaggaaatattagagtttattgccggataagaccttttcgaccctgggaggatgagaagtccacttcagtggaatatattggtgagaatggtgaactggttttatcaaaccctacaaagaagggaaaggaagccggcaagaatttcacttttaacaaggtttttggccctaca

SEQ ID NO: 34622 - DNA, 337 bp, Zea Mays
cggcgagagaaccctctcttcgcttggaacctgtaccccgactttgctcgtgcaatgaacatgttgagtgaggtcgaaggggtactggcgcagatagctgacgatctcccacgaaccccagatgtggaaggctaccggtggctgcttactcaggtagccaatcaccttctacccctcgctcatcttacgaatgacctgtgtcacgccatcaacagccagcgagacgcatagaactccatcaatgctttgcgcggtcgacgacatgaaaacgagataaggcgtcggggggagtatgaccgggatcacggcgcaccagcacggagtcgcaccacccgag

SEQ ID NO: 34623 - DNA, 412 bp, Zea Mays
tggttgggaacatgggtagaaacctgtggacatggaatgggtggtacaaactgggtttgaccgaatgacgtttgtgctggaggacccccatgattcatcataccaaaaaatgggttccatggactacgaaaggtatatgtagatgggtcattagctccctgggaccaggtaggattactcatatgggatgtaggaatagtaaatgtagaaggatgggttgggtctaaaccttggccctgccacatctgaggatcccacatgggtgggggaaagactggttacctgaattggggctggcaccagtaggtcgaaaaggtgtgtttgtgttgttgtcagccattctggaatgaaatacaggaatacattaatttggacaacacataacaaacttgtactataaagtataaacttt

SEQ ID NO: 34624 - DNA, 318 bp, Zea Mays
tagagcatacttcagaggtccattgagtccttcaataaagtgctcatgcttcctctcatcttcaacaacttcatctggtgcatatctggagagctgaatgaatttgtcgcggtactcgctgactgacatgcttccctgcttccgcgatagaaattccttcttcttaatcttcatcagtccagcaggaatatgtagtttctgaactgagtagcaaactctgcccatgtgatagtatcagcagcatcgtgggcagcagtatatgaatcccgccaatcagcagcatgacctgtcagaggaccaaaagcatataagaccttc

SEQ ID NO: 34625 - DNA, 592 bp, Zea Mays
attttatagggcagaggatggcgatcaggcgccagaatagcgagtggaaggggtgtcagcctccattgatggtggtcacggacagtggggaggagaactggcgcgcgattggagggagttgaaggcgaggaggctgctgcgtggcggatggtagtggagggctgaggtgaggtggggcgccagagtggggagtagtgacgagaaatttccaccatcaatggccaaaagtaacgtccgcgctaatgggatgtaaagagggaagagagggcgacacgattagtgtggactagtcgaggcatggaggtgacttggtgatcttagcgtgggtaggagctcgggcggcgtggcgtccaaccgacgtccgacggcgaagcggtctgcgcatgacgtacagccatttgtcccgtgtgcttttctatggctccattcggagaagaaaggcctgaatgtggggcctacgtggcatagaaatgacaagataatgaaacgtgcgtctgtgaaaaaatacgtgagagctgaggtccacttgcaatagagaagagggaggtagcggctggttcctgggccggaatagctgggagctagggacgag

SEQ ID NO: 34626 - DNA, 417 bp, Zea Mays
ttggtggcgatagcgggacaggtgggtgaccgaagtgcacccaattgatcttcaccgtcacgcatccgtagttcgccgtggactgaccgagccaacgccggagttagtgtaaggacccgctccccatgttcgcctccttcccaatttcatttcgcacctagtatacctagcaatcgtgcaccgtgggttaaagtgagaattccggccatggcgcgccgccgtgcgggtgttctcgtcgccggcgaggactcgggtcgggcagatctgcgtgcgccgtcgatttgggcaggaatgactaggattaggtgtggcgtaccgctttggtacgttaaatcagggccgttagatttgatcggagggttcagtagagatgtgcgcgtgatcgaatctcggccacggatctcggatccaacgata

SEQ ID NO: 34627 - DNA, 418 bp, Zea Mays
tgaataaggattccaatggtatagtgccacacaaatatcataggttcaaggaatatcgccgccggcgacccccgcgctcggattcgcgccgaccgtcacgattcgtgcctcgggcgagcgaattacgctcggcggtgaaaagatctcatcgcggatgaacacaagacactgtggccgctctgtctcttgcccacttgcgccagcgacgtggccaagcggccatcaccagagtttgcacccttcaccacggttgcaccacacctcaggctaattaccacgtcgcactaagccaccttaaatggccaggtcatcgccggtggtcttgccacggtaacatccacgaattgcttgcactagtagctctttccctctccggccgccacagtgccatctcaaattcacgagccaccactcaggg

SEQ ID NO: 34628 - DNA, 562 bp, Zea Mays
atcgaacttatatgtgcttatttttggtggtactggactggcaaggaggtgcagttgttttttgttttcttttgatgcttaggtcactgagttttggcggtggaggtagactaggtgaaatgctgtggtgttcttggctagctttgcaggatggagccagtgagccaccgaggtgggaaatgtgccttggggggatgaagccatctttgtggaaattctatgaccgccactttcgtgaagtgaaagccatatcaccttagtgccttttgcacttgtgccttatccttcagaccatgcagagcgttagagccacagagcagagtgaaacgatatggatgatgttggtaaagatgtccagtatcttcgagcgttcttgtgcgtgcgagcctgtatgttcgaagcggtggtattcatggatacccttcgtatttcgaattcggtcaggtgtttttttgtaactctaggctgcctaatgatgcccagcagcccaggtacaaggaaccgtacctggtgtgaagttgtggatatgtttttttttggtttatgcagcttagtgttcgaa

SEQ ID NO: 34629 - DNA, 356 bp, Zea Mays
gaaatcggtaacatcatgacaaatttggtcccagcaatgtgccacagttatatcttgctgttcacagagctgaaacatcgtatgaaatttactagccaaaggttcattatagagacaggcgtctttccagaaactggttttatttccattccttgatttcccaccttgtaagtatattggtttgactttgagaaggtcatcctagattggggaagcatcatacctgtgattcacagaatataatgattgattgtgtaaatatttggctttcacaatttcatgccatgtaccctcctgttcaaatttccaccaccatttgcacagaagactaatgttcagtttccgttgttctttaa

SEQ ID NO: 34630 - DNA, 396 bp, Zea Mays
gtcccgtgcctcgtcgaccttagagcgtggtcttaagggtcaggaggctggtctggattgttctgctcccatggaagtgggtgaaggtccttcagccttagaggtggctgttatagagagctcggccctcaaggatggcgctagcgcttacccagcccccgagggtgtcatcggggatgatccggctcggatgggtagcgcgagctatgacccagccccagagggtgtctgagttggttctccctctcacacttccatggatgttcacgtagggtcttctcctccgcattctggttgcatggcggcagctcaagctttgggtgaggaagtcaccttagagaccggcgctcctgatgacagagttttgatttctgttgttgacactgacttggtcgc

SEQ ID NO: 34631 - DNA, 272 bp, Zea Mays
gacttgtataaattattgtacttgtataaatcgtctcctgtacattagtaaaatcctgtcaaagatctaataacacgccccaacaaacatatcgcctgtacactcaaacagatgattcaaccaaacacgtgcccatcaaatcttggctggttatgtacagtcaaccaaacaaccatagaaaatattacttgcatccatttatataggcttggcttggcatgcatgaacttctgaatcaggctctgcctagccaaggaaccaaacagatggct

SEQ ID NO: 34632 - DNA, 304 bp, Zea Mays
agggagggtagcgttttcacttactagtgagggcatcacacactacatcagctcagccttcgggataatgcccgcctcccgataattaaacaacatcatcctcaattcctcaccatcaaacagattccgcagatccccctcaccaatactcgtcccaaacgacgaggacaacaaatcacgttggccaccccggtctacccgaagacgggttcgcaacagccccatccatcggcgcctaccacttcacgacacttcgccaacgctatgcttcgccaccactttttgtcatcggtgttcggacctc

SEQ ID NO: 34633 - DNA, 405 bp, Zea Mays
ggggggggggggatggagcgagggcgggaaccatggcggagtcgatggatgatcacgatgcttgctggagcagatgaggacagtgacatacgagagaggtgagagccgtagctgcggctacgagtgaacccagcgattgtgaaccctagcatcgtcagttttactcaagcgagtagactcgagccaggccgaccagcgatgcgagtcatgagcgtttccatcggtccaggccacggagtcggctgtggcccgcctcagccaggctctcaagctgggccaggcaaccaaacatgatgctaattatgaaacaggtctgaccgtgagttgggccaggcaaccaaacatatccataggttctgacgcttttaaatgggaacttacgatcgatgcggtcgtgcaaataag

SEQ ID NO: 34634 - DNA, 331 bp, Zea Mays
gttttccttgtatttttgcccacctaagtgctggccacatttcccttgccttgagatgtgctcccagaagtctattggaaattggatttattttgttttggatagggcagtccttgataaagtgtccagacttcccacagttgaagcagctgctagatgaactgggtaaggcagggaaacgagtaccagggtcactcggctgattgttttgagcaggggcaggagtgggacggataaaaactggctgcttgaagggacaggcgggtggacgaggaaaagagcgattagggttaaaaggacgaatcaccaacctcgaccacttctcgaatcc

SEQ ID NO: 34635 - DNA, 463 bp, Zea Mays
tgtcgctatagttgatggttttggcaactctgccattatcggagggcccaacggtttggttgttcttctattgttttcctcgtttctagttcttctacctcaccagtactagccttggttgacatgacaggaactgtttccgcagcttcagctgacatggcagggacaacttcagcattctcaaaaaactttacctcctctattgtgggcactgcagccatcccgacaggcctacgggtcagaaccttggccctcttcgacttcagcgcaccagaagaggttaaagtagaaattttcctttttcctttttgagtccgagcaggaaaacagcaatcaggttaaacaaacccaattatatcaaaaactctgttcagtcttcttttccctcgagcgccgaaggcaatagtcatggcctcgtcctttgctttcaagtagactctcaacagctcatcaatggttgcct

SEQ ID NO: 34636 - DNA, 415 bp, Zea Mays
tgtagcgtggtcggtgagtaagaaccttcacctttttcctcttcggcgcaggctcgcttgaggcggctgaagcaacatccttctcagaagctgcaccttttcttttctgacctcgcggcgggtaccgatagtcggggtacacaaatccaatagtgtcaaaaaccctatttagtcttttcttttttcggctcctgaaggccgcagataacacattatcttatgctttggagtatggcccaagcaattcatcacttgtagcttcgatacatttcagccagtcatcatttggctcatcaaatttatctccatatctgaaggtgtatttcagtcgaaccagctctccttcgccagtcttagtgacagtctccttcggcatttcccacttctctacaagtggccatactctgaaggctat

SEQ ID NO: 34637 - DNA, 825 bp, Zea Mays
ctggccatgtcgatcgtgagcagagcggatagttgggcgcgttaccggcgatcagtgggttcttggttcaattgggtgggtcggcaagcaacacggacgcatgagaatgcttaaacgagagagcaggcagcatgaactaaccagaattgtgctggccgcggtgaggtcgttttcatggtgttcttgagcagatttgggggaagtttaaaattggagctcactggtgatcgactgggagcaatactgggtggctgggtgtgtgatgaccttgcggagctcacggcgggctcaatttatagggagcgaccgcgagaacaatgaatttgagcggcagatcgtgatcggtaagaacaaggtgagtcactggtggccgctcaacgtggcttttaccgtggcggcacctccggcgatcaccggacatgcgaagcacggttagccgcgacgtggtaaagcatctggacacgcggcggatgacggtgatggttcaacggcggtgagaatcttatccgagggatcggtgagcaagggggaaggtacgacggctagccggagtggtgtccagctcaacggcggtgatgatccttctacccaagatgttatccacttgccgcgagcacgaatctagacgccggcgacacgaatcacggcggagatatcgttggcggtgagatctctgcactggcagcctgatccaattcaggttactgtaccatcgcatcccacatcagttagcctgacagagcaacttcagggcaaattctctctagatttcgcatgacaactttatcatccctctgcaccaaagttgtagagctacaaaccagc

SEQ ID NO: 34638 - DNA, 294 bp, Zea Mays
cggtcatgccgctcatcgattgtgcaggttctgtcatgcgaaagtgggtcaagctagttagcaagcgcgcgagtgcacgcactatcgatctggacagggcaagcacgctttggatcacggcagacatgatgttagcatggatgttagcctgtagctagcgtcttcgatcgccggtaggcggtagctagcgtccaagcgccggccatttcatatcgatccatcgtcacttgcttgccacttgacagtacagtaccctcgcgcggcctcgccgttgactttaggagtcctaggccg

SEQ ID NO: 34639 - DNA, 399 bp, Zea Mays
taaatttgaccatcgatatcttcttttcgctaaatggttgtgtggaaggactagtcatgagcgttttaagcggtgggtagctcctcccccgaatcctccaccaatgatggatgaagagaaggatgtagcaatagaaagacgaacggagttgccgcctcgatgcgattgcggagatcgtgctgtcatcgatgaggacactgcgaagcacttcgtgtgtccgaacattgattatgtgagtgcataacaaatgtccaaacttttgttattttttgcacaaatttactaaaatattctcctgcaaccatacgggtggcgtaagtgtcatttcatagagtggttgtatggccctatgtcccattggccagagccagaggcaaagaaaaagaaaactaatgagtg

SEQ ID NO: 34640 - DNA, 320 bp, Zea Mays
cataaacaagacaccagcttacacatcctaagcaaaacagatgtttgtgttctgaacaattgatgctaatctcatctcatgtatctgaagcataaaaccaaatagtgtcaccctggaagaagacagcaagtgaaggctatccttgtgttggaacttgcacagtgaagtgattgacacaataatgccaagctatgggcttgagtcgttgcatcctggattagctcatacgaattatggatgtgcacaaaggtcagaacgcttcaccttgaagcctgtagataagattagcaacacaaaaacatctcagcaggaaataaaaa

SEQ ID NO: 34641 - DNA, 307 bp, Zea Mays
gcggtcgcgagctagctggagatgaagctcggaaactgctcaactcggtatgagactttgtcctgtcttttaccttggtttttctttattacatttgtgtttaccttataccgtcatctgtctgcaggatggtggcaccgaaggtttctaagccgaagcttgttccgatggtcgctgagctgaagcttcttttggtatctacctgtagaaaacttaggatctctttgcattatttagcaaaagattgtaattgagagctgaacacaacattgtacatatttgtccataccttgtaatataattttac

SEQ ID NO: 34642 - DNA, 326 bp, Zea Mays
ttcacacccagccttttctaagattgctgcaattcctcaggcaccggaaacagcacaaaaatctccgtgatccctaaggatctcaccgaaagcttcgtcttcctcacctatccattggataaccccttcggggtcaccacaaataaatttctgttatgaggaatacacccctacctttgcaaagctatcttttagcttcttcgcgcaatctaaggattttttataacactgttccctggaatcacgaagctcttcaacattcttttttagccttgaacttgtccattaacttatctcttgtttgccttcgcgacttcaaaattttc

SEQ ID NO: 34643 - DNA, 446 bp, Zea Mays
tgtcgcttggggatggaccggtggccgtcagatggccatcgtacagctgtgattaggtcttggatacccctttgcgcggttatataggagtcgtggatcttagaatgtgcagatgcgattagatggcgcgcaatgcttcagccgggattcacatgggtcgtgggatcatgttcgaatgggtgaaaacagttttgatcccatataatctggaccgtcagatatcgatccggtggccatcatcacgtaccggttcacttgagtcgcgatttaatccggggcgtgcgtgctagatccagcggctcacatgtcatggtaccccttcagcctggcaaaatcactaaagagaccctagacttccttaatataaacccgccgtcctatctaggttaaaaatccttactgctgggtcctttgtcttgctgttaggcccctcaattcttagaaaa

SEQ ID NO: 34644 - DNA, 290 bp, Zea Mays
atcaggaccaaccagggatctctctctcaaggtctcccagcacagaggggagacacaccccctgccatacaaagcgccaaatggtgccatcttgatgctagccaggtagctgttgttataagtaaactctgccaatgcaagatgatcttcccagctacccttccaagacagaacacaagcgcgcaacatatcttccaaggtttggatcgttcgctccgactgaccatcagtctgaggatgaaaagcgacactaagagaaagcttggtgcccaatgcactgtgaagactct

SEQ ID NO: 34645 - DNA, 375 bp, Zea Mays
ggagttcaacgctgcatccgccttcgtcgcggcctccagtatcagcatccccgaggaagcacaactgcgtctctacaacttctacaagtttgtcaccgagccgtccgcgttcaagctcaaggagctagttcctatctggaatgcagacgaaggaattgattcagtatgtgatcttaatgctgctgaggttcttgcagaaacaaatacagttctgaatgctaagcacattgaagggcactggacactccaatatgatgttgtttgtgatggagaagacgtggcagcatggctcatccaacatcatattgaccttcagattaaggacatggttctcaacaccttaaccaacaggtgcttgaggaattgcttcagtct

SEQ ID NO: 34646 - DNA, 428 bp, Zea Mays
aagtctggtaacgccagtgttttttagaaataacagctgagttaaattgggccgcatcggccgttttggaaacaacggccgagtgatgacatggcacgccagcgttttagaaataacagctgggtgatgacatggcatgccagcgcttttagaaataacggctgggtgatgactgggcgctttttagaaatggcgtgtggcccgggaaaaccccatatgtactgcactgtcccatgcctctgcattatgtgccctagttttgcttttctgcatcccggccttctctgctctcttgcaatactgcttccgctctgttcgccagcaaggttgagatggcacccaagcggaaatcccagggttcgtttgccgcaatcattcctcctatcgatcccaacagttagttgcctttcgcaggtaaccacatgtct

SEQ ID NO: 34647 - DNA, 367 bp, Zea Mays
gccttcggcgctcacggtaagaagaggttgaatagagtgtttgatgtgattgggtttgtttactcagactactgctaccccgtccagaaacaaaggggaaaaaggaaagtcactactttggtatctgctagcgcgccgaaaacaaagaaaatcaaggtcttgacacgcagacctaggcgcgtcgagacggccagtgtgccgaagttaattgaaagggtggaaacaaccccctagtcagagagactattcctgctatgcctattgaagccattgcacacccggccaaagagccggagccagaaaaggtaaaagaaagagtaccagagcaacctaaaacgaaggtgacagcactgccgaagcttccacc

SEQ ID NO: 34648 - DNA, 317 bp, Zea Mays
caaaaagtgcccccgctgactgcttcacaacagggtcttcggtcttgaagatctcgcgttcaaagctctcgtctgattggtcgaagacctcgtagtgtctgcagccctcgcgggacaacgcattcatggccccctcgcaggtgacgagggaggtaaaggacatgaaaccctcgatgatggtcgggagtaccagcaactcctcctgcaaccattcgaggaagcgaaggcccgcctcccagtcgggcacctcgaagtgagcagttcgtgcacccagctcacggtacgagtccacgaactatgcgagtgtccgctcaacc

SEQ ID NO: 34649 - DNA, 436 bp, Zea Mays
ctggaccttactgtatgggatcaccttcccccattatgtgctgtgccttcatgtggtagcttcccccatgatatcattgaaaaaaccatgcaatgccattttataactacaattctatgcagatctgtctgtagactaggtataattggttggtcttattcactcaatgttgaatgtttcacataataagattgtttccctcacctcccaaccgcttggtgagaatcatacattctagtagaatgtgtacctgttgaacattttttaaaagttcataaaaaggtagccacattaaatttgttactagattcatcatggaatgttgtttgaatggccaaaaatttgagaaaattgcactaaatttatgttatattagagtgcattgttcctattgggcctaggccttgtatccaacccactatggggcttcgatttg

SEQ ID NO: 34650 - DNA, 418 bp, Zea Mays
atcagttatgtgtgcttggcgcaggttgttgatgaaggagaatcgaggtgccaccatggtgaatgccaaaactgcttccatgttgcggcgggagagggcgtcggcgacgatgttggtgctgcccggtttgtactcgacctcgaagtcgaatcccagtagcttgcccacccaatgatgttgagggatggttgccagacgttggtcaaggaggaacttgaggttgtagtggtcggtgcggacgcggaaatgcctgccccacaggtatggccgccaatggcgaacagcctgtacgaggccaatgagttccctctcgtatgccgcaagggaagcatgttgaggggccaccgacctaatgtagaatgccaggggtctcttgtattgtagcaacacggttctaaacttgtaggaggaggtgtcg

SEQ ID NO: 34651 - DNA, 307 bp, Zea Mays
cccgtaccgactctcatttgagtcaactccttccccaacttaccatagtgactttcttgacgatgtccttgtcgggtatggtacatacgtcaaccttcgagacgagatcgcatgtctccacgagttcatgtgcgaaggccactaaggtggccctagcattagcttcccctgatcaaaccgagggtgtctccgccgaagttttagaccgggcacggtcctccttcggtgtcatcctccgtagtttcgggctcactttgtattctccgtaaccaaggcccatctggctaaatacacgattcaaacgaac

SEQ ID NO: 34652 - DNA, 534 bp, Zea Mays
ctctgaagaagaaatcaatgtggcaacggctgttagctccaccggcgccgctctctttgactgagggtcgctctctgaagaagaaaccagtgtgggtgaggattacccctgctggtgaagccctgatggagaaaggtctgctggagaatcctgttcctagtggtcattcccagcgctctctttgcaacaagaaaaaagaagacgttccaaaggtggcagaggaactctaggcagtagcaaggctgtttcacattctctgtcagcgcctgaagtcattcctgaagtttccccaccgcatttaacatctcgggttttggccttctcggatgatatggcaagggaagaattaaacttgagaagggccttgcttgtcaccgttactggtactaggccggaggtccttggattagaggtattagaagaagtggcacattgtttcagcattaagttggaagacatgacaatccaatctgcaaagcctgaggattttcttctattctttcctaatgaagaaactgcaatgagggttcttaa

SEQ ID NO: 34653 - DNA, 289 bp, Zea Mays
cctttatatgttcaggcttcattggtttatttgaatgggttatcatgacatttggtctgaaaaatgctggtgctacttatcagagggctacgaatttgatcttctatgagctgttaggaaacactgtgggagtctacattgatgatattgtagtcaaatcggctgagtttagttctcatgtagctgatttgcgcaaagcctttgataaaatgtgtcggtatggtttgaaaatgaacccacgtaaatgtgcttttagagtgtcggctggtaagtttttaggatttgtcat

SEQ ID NO: 34654 - DNA, 331 bp, Zea Mays
ctcacagccgatcaccagcaagcccaaattttgaacttcccccaatttcggtcttcgccgccgtgaaacacaccccgtcgtggtcagcccaactcaggtcagctcttcccctctgctcccttgtctaagcattctcatgcgtctttgatgctcaccgacccacccaattgaaccgggccgccagggatcgccgggaacacgactgccaagccgcgatgctcacggccgccgtggccagagcttattagttagtcgttgatgaaattaggttaggggaagtgatctggggtggttcaattccatgcccactgctcgggagcaccggtcatcg

SEQ ID NO: 34655 - DNA, 744 bp, Zea Mays
gatggtgtgctctgctgtcgttagcgaaacagtgagtaagatcgtctcaagcctcctcgctaaggatgatggcaagtccagtgcagcagaaaacatagaaaggctggagatggcacacatcaagatggagtccgcgctgcacatggctgaaaaatggcaggtcactgatgtgccgctgctaaggtggcggagcaagctgaagcgcgccgcagaggagtgtgacggcgctctgcggaggtgcaagcagcgcgccctggaagaggaagagatccggcagtcctcgtttcccaaacggattgctcatgctaccaagtcatttatctcgtctttccccgccgccggcgctagcagagatgagacaagctcaggcagtagcgatgtccggagattcgagaggtttgcagacagttcacatgaattcctcaagttcgtcgaggtcggtggaaccccctggaagtacacgttcttcaaccctctcatcggccatcttcttgcagggaaatctatgaagtaccacgcagttcacatgaattcctcaaggggtttatatcttggcttcatgctgcggctctctgaaagcactgacatactcggcgtcatcatcaggtgcttgcagtcagtcacgccgcggttgaagcctaccgcagaatgtgtcaagagagagctcattcagctgcctacgcaagatttctcctggttgccgtatggtctccataccaaaaatgagtactggaacaacgtcca

SEQ ID NO: 34656 - DNA, 693 bp, Zea Mays
caagcatcttcagagctggtctcaaaaaaggacgggacatattacctctcaacttgggatggcaagggagatcatgcataagttgcagtctgctcaagatttcagacccttgtcggtgttagaaatgtggttggtggatcagctggatggtcgcattgtggccctctcatcgctgcagcgttctatggctcggagtcgctccaggatctcatggttggctgaaggggatgccaacactgcctttttccacctccatgctaaataccggaaaggcaagaattttgttggcaatctgatttctgatgatggatcggtgaagacatctcatggggataagttggaggttatcagtgatttcttccacaagctgctgggatgttcacctgaccgggcgcacaccattgacctggctcagcttgacatccctgcccataatctgacatcgctggacagtccgtttactgaagatgaagtctggaaaacagtcctatctcttcctctaaataaggctcccggcccggatggttttactgggaaattctataagacgtgctgtcagatcataaaaggggatattatggctgctgctacagctgtttggagcagaaaatgggtgaatttagatctgctaaactcagcctacatccttctcttgcccaagaaggacgatgcctgccaggtcaaggattttcg

SEQ ID NO: 34657 - DNA, 775 bp, Zea Mays
acctcttcatgtttatactaaacaggatccagggaaccacagctgttgagcttgcatctggcctacattggtatttgaaatactggtgtggcgcacatatctcctgggacaagactgggggtgcccagctggcttcgattccttctcctggatctctgccacgggtgcagggcaagggagtcaagattgagcgtcctgttccgtggaattactatcagaatgtcgtcacttctagttgtgagtcctttcttgccttaaacatttgttttcataatctttgtttgattccaaatctattaatttcttgatttcttcagtgtcatcctccttgtcctttgtaacagtcagtacttactttctagatgtgtggcaagtataagggcatggtgtggtcttggaaatacgattcttgccatacattctattgatgcagtaacgatctactagtagtacatctgttgcaaatgaagaactaatgtttcagcatttgttctcctacaccctaatcgtacagatttcatcctatgacttttggctctgttgacctgtcccttccaacttctaacatttgtcctactggattttttataacttgtaattttgaaagaaacgactctgaagcttcccactatttatgtggattccaacattttctctatctgacaaaattcatttagcgttctatagactcttttgtgtggtgggactggaaaagatgggagaaagaaattgactggatggcgcttcaaggaattaacttgcctttagcatttac

SEQ ID NO: 34658 - DNA, 421 bp, Zea Mays
aaagatcttagcgctcggattggctcggacccggtcgacggtgagctcgtcgtacccacttggattgcggctggccgggatgatcctcaccggcgttagccgcttaacgatcatgtgccacgcatcttggaagcttagcacgtcgcagtgaacctgtgtggcaagcccgtccatcaccagaggacttgccacggtgaaagccacgaatcccttgcgccagtaaccttccttctcttcggccgctagcacgccattccaaaattaggagccaccgcccttggactctataaattgagcacaccactagctccattaggtaatcatgaagccagagtacccgctccagcctccgattagccaccatagctctctaattcctcttttcccccaaatcgggtttccgcgcctccgtgaacgccgc

SEQ ID NO: 34659 - DNA, 465 bp, Zea Mays
tctgtccgagctgtccggacgagtacgaggtctccttcgttgaactccctcgggatgactgtgtggtcgcgccatgcttttgtctgagcttggtatttgtttagagcctgtagggcgaagacgcgatctccgtcgatgaggtccttcgaagtcggctcgtctacgtcggggacggccgacacggctgtccgaggtgacccatgttttatttcttgcggagtcatagcctccgatccatatagaaggcggaaaggggtgaacccagtcgccctgcactcagttgtgttcagcgcccagaccacttcgggtaacaggtcgggccatttgccttttttgtcgtcgaggagcattttcttgacggctgtgaaaattttgccgttggcgtgctccacgactccgttggattgggggtggtacaaggaggcgaaggcaagcttggtgccaatggagaagcagaaatctttg

SEQ ID NO: 34660 - DNA, 556 bp, Zea Mays
atggtagtcactatcgtgttcgcctcctgttcagctgcacgtagaacatatcggcttgggcgaaagggcactggtgcgaggtcgattgctcgccggggtgttgggcgccgccgtgatggtcggcaacgcctctgctcggccgtcgggtatggacgaaacacagtgaccgtgggatccgttctgcggctgggattggaaggggggtgtccaccgatggatcttggacgaacgggttagattagaagtagtataccccttcggtgggatcatcttgggtcgttcgatcaggatcccgtgacccagattgatctcgtttcattaaaccaggatcgttgatctcggatccaagggctcgtattgcataccgtttcatttaaagcacgatctaatccaggccgccgaatctggatcgggcggctctgtgtgcgggataccccttcgaccgggaagtcttacaaaagagcccctcggcttattccgaattaacccgccgtccacctcgggtcacactgtgtctagggaattcttgtagaacagtccctgcacttttcagaat

SEQ ID NO: 34661 - DNA, 319 bp, Zea Mays
gtacaccatgatctcggtcgtattcctcccggcgccttatctcattctcgtgccgatgatcgcatgaagcactaatgtttctccatgtgtctcgtaagttgttgatggcatgacacaggtcgttcggcgggtgggcgagaggtagaagatgattggccgcctgagtaagcagccgtcgataaccctccgcatttggggtccacgggaggccatcggctatctgcgccagtactcctccaacttcacttggcatgttcaaagctcgggcgaagtcagggtacaggtttcgggcgagaagcggattctcccgtcggagcct

SEQ ID NO: 34662 - DNA, 344 bp, Zea Mays
tgttgatagagtttgtggttgaggactcactagagctagtggaaaactagatgttggataggcaagcttgatgaagtgatgctttgctagcccccctcccatctcccttgaagttgatatagtcgatgatggactagttgaccattgatgtcaagccatcgtccaccatcttgccccatgtctagcctcgctcttcatcgaacatgatgtcgtgcatgatgtgcatgtgctttatcgtaggtcgtggatgaggtatgccttgacgccatcaacatagtcgatgaagacccctagcatactctatccatcaagctagttggcatggttgagcttcttggcaaaca

SEQ ID NO: 34663 - DNA, 543 bp, Zea Mays
cgatagcacaattgaccctagtggaggtaatggtggagaggatgatgatagccatggggatggtgaaggtgatgctgaaacatatgctcctaggggtagtgatggtccatggagtgatgttggagggagtggtatgcgggattggagtttcaccaaagagagttagttcacccatgccatccaagatttagattatgtagcacctcattcagaacaggagatgagaagcggtcgatgacgattggtttcccttcctgttgatgatggcagtcgcaactcagttagcttctattataactatctaactcgacgcgatcaaaacctaaacccttatgcatggctagcacctcccattcaagtaacgccatcggtcatgtatgagtatggacaaccacccccctctgccttcatatgcatattcacatccaatacttgatcccacatatggacaaccatttttggtattacaaacttggatccatatgctattacttcattcttgttactttcatttcaacattaactatttgtttgctactcatg

SEQ ID NO: 34664 - DNA, 314 bp, Zea Mays
gtccaacgtaccctccaccggctccgacgtgattttcattttcctcaaatgaagcaattggtgcaagagaaagtacgtcaatgcagtgtctgtcaacgttacaagtcggagcatgtgcacccagcagggctcctcctaccgctcccagtgcccaatggagtgtggacggatattgcgcttgattttgtggaggctcttccccgtgtccgtggcaagtcagtgattctcactgtggtggatcggttcagcaaatattgtcatttcattccactggcacacccttattcagctgaatcagttgcccaggccttctt

SEQ ID NO: 34665 - DNA, 709 bp, Zea Mays
caatttacgaaaagccctgttcgtcaccatcgcaggtactagacctgtggtacagggatcagaggtgttggatgaggtggctcgcagttttggggtatgcattgataacatgtccatccaacattcctcaccagaggattttctgcttttcctgccggatgaggacactgcctccaggattttaaatgggggcagattattcactggacctcgtttctgctcaatgttcaaaagatggtctcgtttctcgcatgcttctatgtctcgcatgtctcacttagtggatgtgcagattaggggaatccctgaacatgcatggtcttgctccactgcggaagttgttcttaacaactcatgtcatattgttgagatccattctgataccctgatgaaaaagagtctctcatcctttacagtgcgagcatggtgttttgattttaaaaagttacaacggcagatgacgctacacattattgagagagggctgcagagcaatgacaagggttgtttatcatacaagatcagtatcagtgcaaccatggtcaatcctgaggacacgaatttggggggattgcacccctcgcccccagacgacgctcatcagccagaagattttgaagatcaggatattggcaacagtatgttccctcgtcctcctcgtctgggtgccccttctgctggtcggcagtcagtccattccaggctggga

SEQ ID NO: 34666 - DNA, 825 bp, Zea Mays
atctacaactttattataatcgacaaggactgattctaacattaactcaagcaaacaatgcagtttctaaaatctgtacataatttggacagattcagttactgaatttgtaaaaagcataactcctaaactgtcagacctatggctgtcaaattttaacaccagcaagacaataaagttatctaccacttttctatagcacatatctacagaaaacacaatttagttcatccaacatacaacacaccaaaaacagtacgtgcagcccaaaacagcaactaatacatttcagcttctatataattcaaggattgacatgatctagagacttgaattattctaacactttaccatttgttagagttaacataaccaagggagaactaacaagtagacttactaaatttttatccgtgtcattttgtacgctagaatcaccacacacaattaacaacacatccaccacaataatcggacccggtacatatacatgcgtcgatgcgcccttcacacactaatttgcattttagcttagacatcatatgagcgctgctacttttcatccgcgaccataaccatgtatattggggctacaacaagcaatttatggtgattacgtgcttaaccaaaccatctgacaggtcggctaactggagcaacgacatagcccgctaaataacctacacatcggctagcccattattatcgcaatccgagacacaacatacactaccacatttttataaacacacataatcacaagtattttcgcacatcgaccaatctatacgaatcgtaaaccactaacccccaaatcgcaatcgc

SEQ ID NO: 34667 - DNA, 662 bp, Zea Mays
gtcacttccctgtgcaagatcactcttcgccctggatccgtattctgcttcgggaccatcttgtccgtagtagatgagaggggaattctgcaccacatagcggatccaccggagaagaagctttcctcggaaatccccgggaaagccggaacaagacagcgaacagcgcaacctcctatgccccagacaaagactacctcttgcaagtcgagagccgagaattcacttgcccgaagaaccccgttgtccacttcgcccacaaaggagtggacacggattacaagaaagaaagaagcaagcgttcctgaagaagggacggaggcccatcgagttatccttccgacacctccgccctcaaagaaggacggaaagaactcaccaccacagtaactcctttctacctcgacatcctcttcatcggggggagattggagtcatctcccatctccgacgacgagccaaccatgccaggggaagaacctccccagcgagaagctcggcgacgaaggaataggcgccggaatgttcggcgacatcacaaggctggggaacaagacccagcgtagcccgtatcctgggatgaagtctcggaagtgggagaaactcccgatgaatgggtcttcagagaaaggaggaattctcgtagacgtgaccgctggcaa

SEQ ID NO: 34668 - DNA, 1388 bp, Zea Mays
gcagtttctcaaggactctctgcctgatgtaccaattgctgttgctcatggaaaggtaggttggctaagttgttcaagaaattgggcatctatttcactgtgccatttcgtaactccttagttcttagtagacattatctatacttgtgtgtcttgtgttgtatttaaaactaaaatgcaaatgagaatttcttactattttatctttaacatatttcactgtgggcacaataccctgtgtcactggtggacccagggcctggtgactgtggatctccacccgggctcctttcagttcatgtccattaggtccaatgattggtttgcccattaaatcgtaccggcttcttgaaaattcttgggcttgcaattacctgtgtggttggtaattgtccaaattaattcaagtggagattctgtctgctcctatagttcatatcattttatgcttgattcattttcttcagcataacataccaacttttttgaagtcattatcttaaattattgaacattgcctgtaaatgtgtttatgttccagttgcatagatgaatgaagcattaacctcattgactaatcctatttgttaaacttatttcctacagaaattgtcaaagaacatacaacttgctatggaagattttactagcgggaaagtcaaaattcttgtctgcacacatatcattgaaagtggaatagatattgcacatgccaatacaatgattatccagtttgctgaactatatggacttgcccagctgtatcaggtagcttttttttccttgtatgttttttttgccttgttggtagattttttttaatgcatcaaaacttatatcatatctgtatgattaattcattatttgcttagtcatgctcaattgacaattattctaataaaaatacaagatgcatgtatctactctctaaatttcaagttcattgttttgcctttgcttcagttacgaggaagagtaggaagatcaggtacagaaggcttcgcataccttttctacactgataagtctttgctctcaagagttgcaacggtgagctcaacagtacaccttatagtttgttattggtatccgttattttgtctcataccgttttacctaatgtgacgctgaaagcatatttggggtgttgtccaagatgttgaagtcccaataaaaaatagaatctgacttttgattgttccaagatagtttgtgcttgttacttgtattttactaaggtcaatccacattgcaggtggtactaccttattacctgtttgtcatttactcattttcgtagtcgagacctactctcacaaccggtagaatattgccactgcgacaaccccttaggcaagatgtgatgtcattatgatagagccatgcca

SEQ ID NO: 34669 - DNA, 471 bp, Zea Mays
caatttctattaccttggtcttagtacgctcgtatcttttgagtcttgcatactcttatattttcgtgtatgcttatcttcatgccccaatgcctgtttaagacatttcagttaacgtgcccttgatcacccttgtttcttaatgatccatgagcggtcattttattttgcacatccttggtgatctcattaattccttataacttccctcggtaataatttcttttactaagccattctgttggaaccttacccgtgattgttttctccatctcgccatttcgtgagtcttgccttagctccatcctttcctatgctcttcgttattatcacctttacccttgacacttctatatattgcattgatgttcatctcatacctgccctttaaaatcgccccttttctgtctcataccttctttctcttggttgtatcctcttctttggctcgcgagtttgtaacctcatcct

SEQ ID NO: 34670 - DNA, 450 bp, Zea Mays
attcttttccccttggtccgtagccattgttggttggtgtcatatactttcatgcttcgtgtcctcctgctccttccattcctctccttcccgtagccattgttggtccttttacctgttatatattggtagtgccatcttcttgctgctacttctctttcccctcatctcatttgtcctgatcttgtgtcgacttttctgttcccagtttagatctccgcgtccgcaggcagggccgaatccagttgaaggcaggcggcgaagagccaaagatgggactcgacgcaaccaacgccctgctgcacatcaagagcgcgttgcgttcttccgccaggcttgcctgccagtccgcgtccgagtaccccgtggcgctcggcgtcggcacgctgctgctgttcctgcacaggctctgccctgccctgctcgctctcctcctgtcctcgtcgccgg

SEQ ID NO: 34671 - DNA, 319 bp, Zea Mays
gcggctacttgtttagtagtggtgaattagggctcgcttaaccgcgcctctgtccctcattatataggcattctggtgggcttctaactccgaggcccatcagtaaccctaaagccctgtctaatttcggatctaatctgagttcggctttgttccccttaagtgtgtgaccctataggttcacgtacatatagacatggcccaagtactcttacttggcccaataattgacagcagcctctagcaatacatgtcaactcctatgcacatgtaaagatcatattagatgaaccattgcaacattacatacatgttgttc

SEQ ID NO: 34672 - DNA, 424 bp, Zea Mays
cttgaaccaggaggaggacgtccggtccctgtatttgcatcttgaccgagcagagagccgaggccaggatctggggctcggacacgtacctgagcctgtctgatggaggtgctgtccaaacagtgataagtatggtgataagtgcatggtaattctccccatatggcataaagcggacttgacgttggtcctatagccatcctgttgtcagaaatcttcgtggaggagttggtggtgtcctttggtcgatgttatctaggttgaggccatgctcaggcgagatggaggttcctcccgatgccttggtcgagcctacctcgaagcatgcagccgtacaaggaggggtagttcagttgtcggagtagcctcctacgggattggcggggggttgttgccggggcagttggccgaagccgagctcggg

SEQ ID NO: 34673 - DNA, 476 bp, Zea Mays
gctagcttttcgatgtggacgtttcctcaggagagacagactcgtccgatgaggatgatgagaacattgcagatgctgagctagaggaagaagaccaaaaggagtacatcaacatcatcaggatgggaacgccagagtcatagattcctggagtacctgacttagaggatcccgcaccagagggccccgcacctgagattcccgagctggagagtccatcacctatgttcattccacaaccagtttggatgactttggttcaccacagaagtggtccgacccttcagttttctcgtatgctttggaaccttcttgtagcttcagaactagatgaagtcaccgtgacctacatcgacgtgtgtcgccagcatattcttggaatccaccatgccgagtgacatgtcacagctgagatttctggcctcgatgagtttggaggtcaagtggtgagaggacgacactatgccatcatcgct

SEQ ID NO: 34674 - DNA, 427 bp, Zea Mays
gtgaccgtacatcggctgctcgaaggctcagattagattctggtagcgtttcaggatcgattgtattgggatgtttgatctgatcggagggttaggattgaagcgcgccttcattatatcatggtcgtaactctcggagtgaacgacatcatccacataccgattcatcgtctgcaataatcttatctggaccgcttgattgaaacgggtggttcagatctaagaataccctttcgcctacacatcaggttccttaaaacctgacccggtttgaagcgctgtccgcgtttcatgggatgttcgcccatcgggtgccgacacgtggacactgctctagagtcgcggacgcgaaacttccatccaatgacgttgagtgctgagcagttccgtctccctcctgaccttccctccctccacaccctccctc

SEQ ID NO: 34675 - DNA, 424 bp, Zea Mays
acactccagtcactattttactccggtcgccgtgaccgagcgtgtcacgaccactttggatgggttcgcccaagatagccacttcgcggccttgcgccacatgccttggcacattaacctcaccaccgtgactcatgttagctcgtccggtggtcgccggggagcttgccacggtaattgccaccaatcgcgcgcgccagtaaccttcttctttctccggacgccacgcgtctccctcaaattcaccggccaccgctgtgggagcctataaattgccgaccccgcctgctccgctaagtaattgtgcacccagtagagcaacccatgcctcgaatcatccactagaactccccaatttgggatttcccccaaatcactcaagaacaccgagcggtgtgacctcgctgtggctagctcacctcag

SEQ ID NO: 34676 - DNA, 563 bp, Zea Mays
gagaaatgtgcgaggcaggagaagaggagtaatgaaaaagtagggaccggaaaaagctttacacagccccgcccccttatttatacaacacccgagcgacactttggaaaaccatgaaccgcctctcatcaaaagacgagccaccatacgtcagcctgctacgttagcgttcaacggtcacaaattttaaaaagcaattggcttaacttatgattgagggtagcgttcatcggtcgcttctacaagacttcaggattgtctcaacaagttgaaccaacccgtcagggggggagctcatgttggggcaaagacgtgacactcccctcgactatctccaaactattgagacggagggagaaaaggcgaagaccaagagactactgacgacacgaagataaccgctccatggtcgcaatgaagtctaccaatcacaccagcccacgaaggggactgacttctactaaagtcttgaagagttggagagcagcagaagcaacccatgtcgcctacaccagtagacctcgctccaagaaacgtccacgcaacagagattaccatcggcg

SEQ ID NO: 34677 - DNA, 320 bp, Zea Mays
cgctcggcttgcctcaaccgtagaggcccaagcccaacgacctaacaagagggcaggagccaggggatatataatcccccctccacggccatttgccttcctctaaaccctatcttccattttgttatggtcgctcgacttcctgtatgctatgtgtatatcccacgcatctcgctcccgtgtctctcgtcgccaccttccactgtcatcgcctcacccatctctagcgatgtctccatgccatatctagtggacccatattgtctctatatctctctggctatggtccttttgcttgtttatactctttggtcattgtt

SEQ ID NO: 34678 - DNA, 357 bp, Zea Mays
ggctctggtgcggaagtttggtaaaccggacatctttcttaccatgacatgtaaccccaactgggatgagataaggagggagcttctccctgggcaaacatcgtaagatcgtcctaatcttgtagtgtgtgtatttcatgcgaagctacaagagttaaagcataggctgactaaacaggatattctcggtaaggtctgggcctacgtctatgtcgtggagtttcaaaagcggggtttgccacatgcccatcttctactcatcatgcagaggaagtacaagctcacgtgccctaagcagtatgaccttttgatctcagccgagatcccacacaacaagtaccctgaactacgaaagat

SEQ ID NO: 34679 - DNA, 292 bp, Zea Mays
aggggggccaatagcggctggcttttgtgtggtgtggttccacaatccagcatcccgtggatccgtgctgagaaccatgcgcttgtctccgccgctgccgtgctacagcgggcggcaaacggcgcggtcaacatgacgtgtgcagtcgtctgcctgccgtgccttcttactaagcaccatatggcacccacgtattccgtcctaatctttgcgtcgccagaatatgcatcacgcctctacaaggcagcttcatgcacagcataaggctggtgtagggatgggggagttcccc

SEQ ID NO: 34680 - DNA, 376 bp, Zea Mays
caggttgatgatgagtgattgtcaacatgggtagtgctttggtgtgaatcgatgtactaaccagattatgagtttgtgttgtacaatcatgtctcttggattgtggtgtgcaggtgtgcagtctagggacggtgattgacgacaaaggtgaagatcatgtgggttcgtgttgatggtctgggagcaatgaaggatgagtgttgggtcttcattgagggactagagaagcggggtgactagccgtggtggctaacacttgggacatgcaatggtgtgaggatgcaaaggagggatcatgttgccaacgtgatcacagaccaacaggacatgtgtctaggacatgggggatgcgcacgtggtgctttactcgcagtag

SEQ ID NO: 34681 - DNA, 370 bp, Zea Mays
gtggaggagtggtgatgaaggttgttagagcatcgacaaggctggtggttgtcatgttaagctcctcaaggacaagattgtcccaaccttgaggaagaataggaaggggagtagcatcggatgatgatcccgacgtgctcaaacttcttgtccaggcctcaaagaatgttgaagaatgaagacgagggtccgatcattgacgggggcgcccaagtcagccagggagttagccatcccttcagcttgcaatagtagtcgcctacaagaaggttgccttagacgaaggtgcggaaggtggtatcaagctagagtgtgggtctcacaatttccgagaaactgattctcgagagtgaaccagaggtggcatgtc

SEQ ID NO: 34682 - DNA, 353 bp, Zea Mays
gcaaatgcctgcaagcaccagaaagtcacatagaagaagaggcaatacagattcagaaagatcttcagtaccgtgagaagccagtaaagattcttgactcagcagtccggaagacccgcaactcagaagtgaaactctgtaaagttcagtggagcagagaaggagaagaggaagctacatgggagagtgaggactctttgaggaaggaatacccttatcttttctcaaatctagtctaaatctcaagggcgagattcctttaagtggggtaggtttgtaacatcccaaaatctcaacccaaggtttggaaccctaatctcctaacccccccttatttctattttctccctaaa

SEQ ID NO: 34683 - DNA, 514 bp, Zea Mays
ctctggaagtatttgtatcattgtcggcccgggatggctgggggcagcaccagctcgttggtggcacaagtttggaaatgcgtcgcgggaggaagacagaataccttgatattcctctcaaggatagcattaaagggtggcgccttgagtggtttattgtggaaaaccactgcgagtccctccccccggccggggaggcaaccagatgtacgtactctaagttgggttgagtctccaactcctttggaggtaacggaggccagagttctgcttgctgagatctgtctgctgaaggagaaaggtctaactgccgaagttgtggttgccgatttcgtcttcaagaatatccagcctttgaaggacagggcataccctgcttatctgtacagcggcatcaacgatggcacccgagtgacaaacaagagaatccccactgccgatctgctgagccgactggatatgatcctgaggggcagagtttcgaacgctggtgctcatgttgcttattctgcct

SEQ ID NO: 34684 - DNA, 297 bp, Zea Mays
taaagcaccactcttgaactaggatggaaaagagaaggctttaaaagttaggttcaaagtaagcgttaaggtaaagatatagatattacaaaggttaaaggcgataatagacagcagtgtaagagataaatgtgcaggagaaccaagggcatgagtacaataaagaatggagctaaggccagactggcacgtggcaaagatgaggttacgaccaaaggcgggagaagtaaaacaccactctcgaactgagatgagagattggagattttagataacaaacataatgtaatcaccaag

SEQ ID NO: 34685 - DNA, 523 bp, Zea Mays
gagcgaagcctactccatctgcaccacggcgtgacgcgaaccaacaaaccgacaagcgttgggagaagaggcctcgtgaagaggtccacgccgctggaccacccgtctctcgtgcccgaggtgcaccccgtggaggcgaacggacactggacgacatcctcgatgcctagtgcccgtatcacaaggatatgtgccacaccttgcagaactgcagagacttcaagcattccgtcgggaatggccaacccttccaacctctaccacctcccccaccgcgaggagggcccggtgaacctcgacgacctcagcaaccggaagggggaggaggtggagcattcccgcgcatcgacagagaagtcaacgtcatcttcggaggacacgggtcgcaagagaacaaaaggcaacagaagctcaacgaccgacagatactggtggcaaccaccagtgcccccgccccctatcggtggtcagaacacccgatcacctttacccgggcggatcaatggctcaacttcgatcatcc

SEQ ID NO: 34686 - DNA, 272 bp, Zea Mays
ggtggtcgtgcctgtggggtgcttgtcgtgtgccatatggccaaggaccctgtggtagatgttttggttcttacttccccagtggaccacgatttccttctcatggtgatcgttatccctccatcggaccaggggatgtttggtgtttttcctaacaccttttaggggcacatgccaaagcactggtattattcttagtatcctaaccccagtgttgtgccatttgttcaccccgtgtcttattgttgatgtagggcggaggcctagagaac

SEQ ID NO: 34687 - DNA, 433 bp, Zea Mays
cggaggcggaggaggaatcccaaagtcatcatcatcatcatcatggactgctgcgtcctaagtctcaaactggtgaaaagtggtatcctcggcctgagtatcaatcactggagcaggtgccggcacaggatcctctggagctggacggtatgacccaaagataaggcgagaggcctcaagagtactctagaactgtgggggccgaatcagctgagcaaagatgtgacacagatagtgagcataaggtagctgtcgatgagctcggagaccatctagtacggtgtcctcgatctcacaaataagaaaatccacgacatcaaactctgagtgagaaactagggcaccaaggagccaaagctgaatatgagtggcagcctccctgtaacccatccgtggcagaagcgtccgtctcatgagctgatatagaaacctg

SEQ ID NO: 34688 - DNA, 421 bp, Zea Mays
ccttttggttcaactttctgagctaaccaaaggggtgcagaaggtgaatagatttctaaaaatctatagatttttctagtttaatccataatcttttaggaccccatattttctagattccaacaatccaaattttccaaaatagtatccactggtcactggttatataatcgaaacattttcttttctatttagaggacctcacccgactcgtcgctcaactcccaccgccaagaccttctaacgatggctaaggttctcaatcgcctccctatgcctgactccaacggtcaatgacgtggctcagccatccctaaaccatcacaactcttccccattgacccttgagtgttgtccatcgctgaacattcatgttgcccatctccattttacgtcgccctctttagtgcctttgcagcct

SEQ ID NO: 34689 - DNA, 347 bp, Zea Mays
gcgaaggtatgcatctgaatggacctgtgagatgttttgatgcatcgttgtgtggatctggtgtgtagcgtccgtcgtgtgagatttgtgtttaatgtcttcatttagcatcctgcatatacacgtttagggtttaaacaacaaattgaccgacacaaatacataccaatcaccaattggaattcaatgtgttccatgccggctagttgccttcctctggaagtaaggattgcgtgtagcgagctcgtgacaaatttccaagaacataggcttgcacatcctaaacctaaaaatgacactcgtgtttgttcgattgaaatacgattgagaactcaatgtattcattt

SEQ ID NO: 34690 - DNA, 448 bp, Zea Mays
tgattttctatacgaactgcagttccgggtggaagagaaaacgttggaggataatcctgtgccgatggatatggatgattatgatagtggagaaaataatgcgaactcatcaaataataatgccccagataatcataaagggggagctgctcctaatgtcattgggtcagctagcaacattgaaggggaaccaaagaacaaggatgtgaacgaaaagaaagtggggctgctaggagggcaagagacagaggtactcatggacagtgagatggagggatccgatctggtaccaggctcaggtgctccagatttgtcttttggtgatggggccgtaattagcaagatttcaagattgttaactcctgaaggcttagcacttgcggcagtaccggaggcagtggttggctcctctgtcatgaagagaagtaagaggagagcagcatcaagc

SEQ ID NO: 34691 - DNA, 325 bp, Zea Mays
gatgaggtctggtgtgtgatgggacgagatgagatatctttttgtaggggtccctcccttagccttatatacacgaccagagagttatccctttacaagtcgtcatcattatctattctgcctatctccttctttatcgcatcctgtagtcctgcttatccagagttcgatcacttcttcagccgagttaacgcctaatatatagctcttcaggtgtgtgcaactttcttacccgagatatcagcactttagtcagcgcataacttggttgcctagtcttcgtattcttggatcaggttctcccaatctgattgtagcatgctgg

SEQ ID NO: 34692 - DNA, 650 bp, Zea Mays
gtgaacttttgtgtgtgtgatactgaacctcggttgctgcgaaggttccgacgtttgggcctgtgcaagcaaccactactgacaatactgattttgcggcggagacttcagttgtagtgcccgccgatgatagtgtgtctggctctatgtctaaatgttttgagtctaacggtgagtccgggagttcatttccttggatggaggagtacttggatgaaggcttagattattttgttgcgttggatgtggctgcggcggaggctttgccacatgtggagggtgccgaggatcttcctggtacgagtactgggtgtaggcggtgaagggtggtgggaaaatagtgtgagggtgaattttcacgtagtggcaggcgctgtcgcatggggatggagcgtggccgacttcgagtagacgtggttggtaggcgagaattgttgtcttcgccgaatggggcgagcataagcgaaggggatcttcgggagctttttgagggtgaggaattgaggataatggtgtttaattacaaggagatgagtatcattccgaaggttgagccgatgtgataggcgatgccctcgccgtgtgtgtgtaataggcgatgccctcgccgtgtgtatgtaattgtaatggtgatgtggcctgttggccgt

SEQ ID NO: 34693 - DNA, 633 bp, Zea Mays
cgaaaagttagactgatgtttacttgtacatgaactatccctctctgcgtcaattctccgttattcattgctagcaagatgtgttttttctacaagagcaaccaactaagcttggatgttaacgctacccatggtccacctcccatttcatgaagacgccatcattttcataacttgccagccaagtatctaatgccatcacctatggactatggtgtggtgcagtagacagcatgattgatcaagcaaggatagcaatctcagtataaccattggcccagaatctcttcgcccaacatcttcacaatgaagccattacacatccttccaggaaaaaggtaccttggacaatgattgaactaatctaaacatttaggtttttttgtagcactagtgtataaaaatacagttattccatcatcaacgctattgcatagagataaatccttctcgccagctaaattgaagcagcatttacagagatttcgatgccgttaactattcacatgtaccgatgtgagattccactaaatagtatgacagatagtgcccctagaaaaacactcagaaacaaattaacatcattttacaaaagtacaaagtgctggtaccaactaaccgcactacttatgg

SEQ ID NO: 34694 - DNA, 846 bp, Zea Mays
ttatattaaaaattcgttttctaaatcatttatccactttaaatggtctctggactatgcgtgtattagacagaaatgaaggggtctcggtgtgaaagattccaagacacagggcgcccctgtcacggacggcgggttgattcctaaatttcaggagggctcatgtgcaaatcgccacggcgaaagggtaaggacaaatactggccgtccgatcaacacaggacgcgccagattaaatctctagggtttgaaccggtacgcgtcgttggccctgtgatcacagatcgacgctcgggatttaaaatagccccaaccaaccgtgcccgctcacacatcgatctacggtcgagatcaggctgagtcgaatcggtacgagcctcaaatctagtccactcatcgtggatctaacgatcgacgcgatctctaatcacacgcctaatcatcaccgcccatacccaaatccacggccaccccatacctccccaacaccgacaccgacgaccgcggtggcacgcgtatgcccggcggcgccacggcaatggacaactccggcgagtaacctgtggctacctggggctctattccctacgaagcacgatactaggcgactagaggaacatggcaacgctaggggagagggtctcaccgggagtgaaggtggggacgaggccgtacacggtgtgtggcggaacgctggcatcgaagtcccaccggtgagaaattgcgtagcctcgggtccacaatcccaccaggcgaggccatgattgacgtcccggtggccatagtcatccacctggcccgccctcgagggatctccatcggtgagccagagtcaccccacggcgg

SEQ ID NO: 34695 - DNA, 392 bp, Zea Mays
tgatagttcagtattttgtgattttggggcgacgtaagaagtcttcaaggaaagggctatcaaagaggacacttagaaagaagatgacacaagtaacatgtgggagaaagatgacaatctccatttggaagggtggtctcaaagttgtgtggagcaaccaaagggattggaggtgaagctatagatacttggtgtgacgaggaagtctgaaggggtattaaggagtttgtatcgacaggaatatggacaacatatgaaagtacaaggtagcaaagaggaccatacgagctgtaagtggggtgaaggatagagtgtacgaggatctttaccaaagtttgagtagaaaggaaggagagaaggatatataatatgatggctagggttcataaggt

SEQ ID NO: 34696 - DNA, 424 bp, Zea Mays
aggacatgtagtaaaagaaacaagaacttgctgtggtcaaagaaacaagataagaacttgttgtaggtcaatgaatacaaaggcgcatttaacaatttccgaaacagaggacataagaaacaagataagttttgcacataaaaacttgtcgtggaagttgttttggcatgcttctggcgtaggttgtactgaacagctgcagttctcttgtcacatagaggtttgtccggggaacaagaatcagtgaatgaatgtgccagattgggcaaccttatgcaggaactgcgccgaaaaataagagtgatttaatatattaaaatggaggcacgagggcagatagcaacagtaaaatggaggaactaagcagttgacctagatccatgtcttggtatctggcgtgcggtgtgcagagtcgacggccgag

SEQ ID NO: 34697 - DNA, 289 bp, Zea Mays
gacctccgccgtgggtggcggcggcgccgccgcctggactcccttgggttgggttggataaccgtgggctgttcgatcagtcatcaacggccgtgatcacatctcgcgtaccgttttcgttggatagaatcggggccgtaggatcttcagggacggttgcgattagatctggtgtcatccctgcgtcggttgatctgaaccggagatcgggggatggacggtcggcgttagtgtccagttatttaaaatctgggccatcgatctctcgttggatggctcgaattgtgta

SEQ ID NO: 34698 - DNA, 280 bp, Zea Mays
cggttataggaggagttgtttggtttaaaaagctcgaggccccaacccgagccccatcaaaatccaacacactcgatgttgcccggctcagacaaccttttgcagcagctctcactcaaacgaccatatataactgtaatgcatataaagaagacacggacttaaaggtgatggatcctatgcttggactttggcgggaccaaggttatatatgccacagttggcagttgcttgatcctcagctttaatatagagatatacactagttttctcaaatatg

SEQ ID NO: 34699 - DNA, 302 bp, Zea Mays
gcggtgtgtgcgcggagctcccagctagctgctatcttcagaaccgccttgcaggctgtggctcagtcaggggagcgcaggagtcatttataggaggagcagcaggtgcgcgcgcgagtggtggtggtgatgtgtgatgagtcagtggatcgcggggggctgtacgtggcatggcagcagccagcagccagcagggagggagagagactccgggcgcatgcagtggaatgtctattcttgcctccgttccctaattctcgctccactctgcccccgattctctcgcatcacgttgacacaac

SEQ ID NO: 34700 - DNA, 562 bp, Zea Mays
tggggggggggcttcccctatcagtcagtttttttaaagtgaagtagggtgaatgctcatccaacctctctaatatttgaagaaagtgactactctacatgtgatactaacggtccccaggaacgaggtaccccaaatagacccattacttgtagtatcccaacaagggtgagaggccacaggagtaaaatcgagccaaccaactcccgccgagcagtcgtgcgaggcggatggatcgaccaactcctagcaagcaactaggcgaggcaaagacataaagactcgtgatggagttcagtgcgcttgtggaccccgactcaatgaccctctatcacacaccgggcagagactcacacacgcctaaacccgtcgagcatgaaaatatggtgggcgctcatggcctacgctagccatgatgggacacattgccacctaacgtcatcccaactgacaccatggcatgccgagcgaacatcgaggagtcagcacagatgagacgggggcacccccatgtacgaccttcaacatatctgacactgcgatatgggacccaccaaaggcc

SEQ ID NO: 34701 - DNA, 326 bp, Zea Mays
tcttctgctgcttaatcgctttgaaatgttgtcggggctaggcgcttgtctaaattatatttcgtatcactcttttactgtataacaccgatcaattctctattcataataaaaattgatacaaaacaagaatattgtacccaactgtttgttgcaggctgtagcatctactagcatgtcattctaattcttaatgtcattgaccacttaaatgtggcatgatcaccagtctttcaactagtatgttttggataaaaactaagcagtatttttctggatatttaactggacaactggtcatgaaaatattttgatgatcatggtgg

SEQ ID NO: 34702 - DNA, 393 bp, Zea Mays
aagcactcgcccttggacgaacctcgaggcgccgagacgaagctagatagggggcagggtgaagcaaagggaaaccactcgagtggatccctcgcctggcccgagactgacacgtcgtaagtgaccgaccacgttaactacgcttggcaccgagctgcggtagagatgccaatccacctcccactcttgacctatgtgcttctccggatgtagcacactcatgacttatgaacccctcagattgcgtcgcatttatcagggctaggcctgagtgcgcaggctgcctgcagggcacaacgagacaagtcgcaccaagacccagactacaaagtctaggagtcggcgtagctcgaataatggtatgcgggccccacgctatttgtgtcctccgcc

SEQ ID NO: 34703 - DNA, 400 bp, Zea Mays
cggaggagtcaagaggaagaggattgtcagtattctaagtaggcaggttatccggtcggttaaagaagaccaagaggctttgaagaagagagaaactgtaccggaggcgaaattatcggctcccaaaaaacggaagcttgccgagatatcctctgagaagtcgaagatgcaagatgtaccaaagcagactgcaagcccttcttcgtcttctactgctgaggtctcggagatattgaaggtaatgactgagtctttcccatttgcactgctaagtcctttgaggttggaactgactagcctcttacatacaagggaaatctcttcggctggcaaggggaaaatgggggctagaagaaacgacgtatgatgaatatactggaagccattgaacagaccccgc

SEQ ID NO: 34704 - DNA, 314 bp, Zea Mays
aaggggaggcttttaaaagataagtttaaggtgagaatttaggtagaagacataaacatcacaagggccagaggcgataacagacaagggtatgagagaaaagatgaaggcattgaagagccagtggtatgagtacaacaaagaatggagtcacatcaaagcttacacgcggtaaagaagaggatgttgtcaagggtgagataagtaaaacactgctcctgaactaggatggaaaggagaaggctccaaaggctaggttcaaagtaagcgccgtggtaaaaatataggtattacaagggttgaaggcgataaca

SEQ ID NO: 34705 - DNA, 555 bp, Zea Mays
ggcgggttgattctagaaatccccagggtctctttagaaagaatggcgcccgaaggggtatccatcaatggaccatttgatctaaaatctaagaccccgattagatcagccaaaccctaaggtcacagccgtcggatcctaatctgacgttcctggtgctacctaacctggtcacacccgccattcactctctaccattggatccgagatccgtggccgagattcgatcacgtgcacatctctactgaaccctccgatcaaatctaacggccctgatttaacgtactgaagcggtacgccacacctaatcctagtcgttcttgcccaaaccgacggcgcacgcagatctacccgacccgagtcctcaccggcgacgagaacacccgcacgacggcgcgccatggccagaattctcactttaacccacggtgcactattgctaggtatactaggtgcgaaatgaaattgggaaggaggcaaacatggggagcgggtccttacactaactccggcgttggctcggtcagtccacggcgagctgcggatgcgtgacag

SEQ ID NO: 34706 - DNA, 367 bp, Zea Mays
ctcttttccaaccgtaacagccatcggttcagcagcggccgagtcagaagattctccagccaacatattgagtacaacatctatttctgcatcatccggacttgccggcatctcaaagtgaacttgcttctcatcattgggaagatcacgaagaggagcaaccagagcctcaatgtcttcaggagagggtcgcactctaagacccagaccactatcactggaaggagggttggacacgaaattgaaaaatgacctaggaggtgacagattccaagcagaataagcaacaggagcaccaacatttgataccttgcccctcaggatcatgtctagtcggctcactagatcctcagtaggaattttcctg

SEQ ID NO: 34707 - DNA, 358 bp, Zea Mays
gtcgagtctcagagaaaacccaaggaccctccgcagtccagcagaacctggataaggcctttgcagtcagactccggttgggacaaccgcagtcagcagcaggtgcataatatagccaaccagcatcccgccgacgaggccgctcgccatcaagattatcccccagggccgcgacaatggcacgcgtggccggggtcggggacgggcgcagcaaccacgcagatattactgcctgtttcacggcgaagactacgcgcacccaacgagggattgcccggaaacgaagcccaccagggacaggatgtctcgggcacaacccgccgacaaccaaagagttgtcgcgcacacatatcaacac

SEQ ID NO: 34708 - DNA, 271 bp, Zea Mays
tgggggtcgacggtgggcaacgggccatgtagaagaggggttgtgtcaggaggtgtgtgctatgctagattgtgtaccatggtgggcagtggtggccaagagagataggggccactccgccatggaggggagtcgcacccgcgctgtcatcatggaggggagccatgccctcgctgctggtgaaggggagcgtggagggaggagcttcttcgccgctgaggaacgtggggtcgccggtggcggacgtggtgctagccgatgagaagggaag

SEQ ID NO: 34709 - DNA, 543 bp, Zea Mays
cgcgctccggaggaatgcctggaagctctgccggaaacacgtcagcaaagtcacacaccacccggatgtcctgcacccgcaaggcagcctcaccctccaccaccatggagaaaaagattcccgacttccttgaccggcgatccggaagcaattgcgccaacaaggataacgtgaacttaggagaacttcccaagaataccaactccctacccgacggcgtctgcaataaaattgtcttccaaaaataggatataactgcgtgatactgggataaccaatccatacccaagataacatcgaatgcccccaaggaaatcacaaccagattggccgaaaagacctcatcagcaagaatgacgaaacacccctgacaaactgaacagctactaatggagccattagcagaactaaccaaaattgggtgacccaacctctgcaccaaaagaccagcccgcgacacaaagtcctccgaaacaaacgaatagctagcgccagagtcaaaaagagcatgggccacaaacgaatcaactgaaatcgtacctg

SEQ ID NO: 34710 - DNA, 353 bp, Zea Mays
gagaaaaaaataatttgtaatctttggaaaagcacattagggagtatctaaaaacactaacagaaaccaattttgaatatagaaggtttaactgagtagcaaacatgtagtgagatggtgtagaggaggcttaagtgggtttacttctgattttgccggtcaaagtttaagagtctaaccaagagtgtactaatgtatagacattgcatctcggtaccgaaaatgaaatcattagtaaacacattgcaacataggaaaaagtatcactatactaacatattttattatcctaatggacaaatgagtatggaaacacagatcttaaccaaattgattaagtgtgtacccgggtg

SEQ ID NO: 34711 - DNA, 299 bp, Zea Mays
cttaatcccgaaaaatgtgtttttggggtaccagcaggaaagttactcggatttattgtcagccaccggggaattgaggctaatcctgataagatcgaagctatcatgaaaatggaagcaccccgatcaccgaagaaggttcagcgacttactggatgtatggcagctctgagcagattcatatccaggctgggagaaaaaggtttaccattttacaagctactcaagaaagtggataagtttcaatggactccggaagcacaagaagctctagatgcactgaagaaattcttgacgac

SEQ ID NO: 34712 - DNA, 483 bp, Zea Mays
agaaatgtggcacagtcgcctaggccatccttcttttgatgtcgttcagcaagtactcagtagcaataaattaccttgttccttgtactcaagcgaaaccatagtttgtgattcctgtcaaatggccaagagccatcaattgccctatcaaagatcgttgagtaaatctatgtctccgttagaacttattcattcagatgtatgagggcatgccattgattcttttgggaattataagtattatgtgagctttattgatgactatagcaaattcacctagatttatcttcttaaacacaagtccgaggtgtttgataaatttcatgagtttcaacaacttgctgaacgacaactaaacaaaaaaatcctagctatccaatctgattggggaggagagtatgagcacctaaattccttttttagcaaaattggcatagctcatcatgtctcttgccctcacactcatcaacagaatggatccgc

SEQ ID NO: 34713 - DNA, 283 bp, Zea Mays
aacggctttggcgctttgtttgtactgtgctgttcggtgccaccgaacgaacgaagacgaatcagggccctcccttccctatcatgcactagacaccacctataggcattgctggctagctagggctcctcggaagaagaacgcttaatggtctgttacgcacagttccaattccaacggatgtcagactatatcagtcaatgacacacagtgatcagcacagcacagaagggctgttcatactagttctgggattttaattcaccgccggatcataaaaccc

SEQ ID NO: 34714 - DNA, 642 bp, Zea Mays
aaaagaatcaggcatcaccaccgccatatacatcacctggccactgagcaaaataacaggcaaccacctaaggaattcacagcaaaacagccagccaacaacaccacccttccatccacaaaagagtacctagttgagcctaaaacaagtgcaaaacatatcagctaagtacaagttgaaacaataaaactaatgatatgtgaatcacctaatcacttcacagtagtgttgaatcactcaaaaacttgaatacccgtgactgaaaatgttgtttcagctgaagcggataagaaaccacgcatgcccttttgatcctttgatgctagaaatgtcccaactatcagttttttatcagtagtcaatgtcattttttcaagcctttgccataattcggcatcagagttcaaagaagctataacaggtggaggtggttgttgtttaagttcgtttcggagatccatcaaagtagtgttgatttcatctcctatctttgccatgcgactctgtggtctcacatctctcttgactggtatggcatctcctcttggacgcttgattccagagctagatgagctctgctcgataacttgagatggaattttaggagatggtaaagtgtcagagtcatcacctaggtcatcc

SEQ ID NO: 34715 - DNA, 439 bp, Zea Mays
cggcgaccatctctccccggcggcgatcctccggcgccctgtgcctgcgctggtgcctctccctcgctcggtaagcagctctctccctctgtctattcaatccattcctctagctgtgagaggctgtgccaccccttttgtgaaattttccaattcctgtcaaatccagtaaatccaaatggtgaaatgtgttcaattgtccccattgagtatacctgcaggtttctagctccttcgggagggttttcatacctccaatggccatttccctataaccctaattcctcgccctccacgtgctcggtgaaatgcccaaaccagccaaaaatgctccaattgaacccaaatttttcaggcaccttcgcaacacttccagtaacatatttgccaaatttcacgccaatccgagattcctggcttcaatttcactcaattcccc

SEQ ID NO: 34716 - DNA, 459 bp, Zea Mays
ggcggaaaaccgaattgggggaaacgagaaattcgcgagctctagggaatgattcgaggtacgagttgcttcactggttgcttaattacctaacggagccgagggtgtgctcaatttataggctccaggggcggtggctggtgaatcggggatggcgcggtggcggccggagagaagagggtgtactggcgcaacaattagtggcttgtaccgtggcgagctcaccggcgatcaccggatatgcttaacgtgatctactgcgacgtggtaagatgcccgggcacgtggcaaacggcagtgagggatcaacggtggtgagatcctacccgagcgatcggtgaacaagggggaggtacggcggctagccggattggtgtccagctcatcgacgacgatgatctttctaccccgagacgttatccacttatcccgagcacgaatcgagacgccggtggcacg

SEQ ID NO: 34717 - DNA, 320 bp, Zea Mays
ggtagttatacctttagattgcctacacttcgacttttatgcttttctggttctaactaaactttctgcagtgctatcatgacacatctgcagtgacagatgagctagttcagattattctacagcctggtcttgatcctggagcagtggatgtattccttgagttcatctgctactctggaggacctctacctgaagagttgcttccattggtgaaggttaggatgatctcagttgtgtgattaatagttcgttctgattttggaaattatttatggttttcttttgttttgtgcagtgtccagttttggtagcatggg

SEQ ID NO: 34718 - DNA, 601 bp, Zea Mays
gacgtcttcggcgagtatctagcttggatcgggacgttggtccttcggttcccgctgctgaggaagtgcatgtgcctgagtttactgacgctgaccccaatgggtgtgctccatctgctgctgatcccaatgggggtgctccatctgctgctgatcccaatgggggtgttgtttgtgttgctgatgaaaacgacggggaggaagaagatgaggtccctttgactcggaagaacagtcgacagtatgtcgccagtggggaaagtagtggagttccttctcctgctctgtctgccctcattggtctacaagaattgtccctggcgaactttgatcaaactcttgaagatatggtccagaggatctgttatcagagccagcggatgatggtgcgacggatgtttgtgctgatgtgctcgacgccgggttggggtcatctcgggcagcgtcccgcgcctcatcgaccttagagcgcggtcttgagggtcaggaaactgacttggattgtcttgttcccatggaagtaactgagggaccctcagccttagaggcggctactgcagagaacttggtcctcaaggatggtgttgacacttacccagcc

SEQ ID NO: 34719 - DNA, 494 bp, Zea Mays
aacaatctccggaaaagccggagcgaagcaggaaaaagcgcaacctccagcgctccgagcaaagactacctcctgcaagccaggggcagagggtccgtctacccggagaactccgttgtccacctcttccacagagaaatggacacagatcactaggagaaaggaggcgaacaaggtcaaggatcgtcaaactgctcttctggtacctccgccctcaaaggagaacaggaagaagctcgtcactacgacggttccattctaccccgacgtcatcttcatcgggggaagagtcgaatcaactcccgtctctgacgatgaaccagccgcgccgggagaagaacctcttcagcgggaatctcgccgatgaaggaaccgacgccgaaatattcggcgacatcacaaaaccagagagcgggacccggcgcagcctgtgtcacgagatgaaatctcggagatgggagaaactccagaagaacgggtcttcagggaaagaa

SEQ ID NO: 34720 - DNA, 552 bp, Zea Mays
ggcgaaggtacctaaacttggtgaagggccctcttcggctgccgaatcaaggaagactgcttcgattgtgcagagcgttgaacaagcgactgtagtgtcgaaggtgcctatagtcaggccagccaaagcaaaagatgataaggccgaagagccataggtggagaaagtagtaaaaaagccagaaatcctgagcccaccagcagaggcagaactgccgaaggtgctaaaggcttctgccgcaactcccaagaggaggagaatggccaacgtgctagatgctgtgctggagactacaaaggccttgagccctgctctcacaaagaaaattgctgaaggtgccaaagcgcaagccaaagctgaaactgggcaagcagaaaccgaagctacgcaagctccgcaagctcaggctgaagccaaagctgggccctcagcgcccgtcgcagcgaagcctgccgcgcctgaggaagaaacagcaggacatattgcacctgaaactcctgttctcgaagctccaatcaaaactattgactacatctttcaacatgcttcggg

SEQ ID NO: 34721 - DNA, 410 bp, Zea Mays
atggaatttattgtcattctattgttttctttcgtttgtccatgggatggttcacagttttttttataagttttccgcatcttttacacaagggaatgtatcaggtgcaaaccaaccacttggtgtaaaccgtgcaaattaacacgttggtggagttgggagggtgtatttgaaaatatcattgttttcaggtagggcgaacagctggtcgttccagaggaccgaccaggcgcctaatcgtgattagggcgacaattaggacgcctaatcggttctggtcgacctctggtcatcccctaactgtcctatatatttctggacatatgtatatacaagaaatattgcgatatgcgttatataagtctgaaagtctgaaattgaaactgagtaacagactgaaaggcaatata

SEQ ID NO: 34722 - DNA, 630 bp, Zea Mays
agatagctttatctcgggggtgatctgtagtgaactcttctcaggacagttatggaagtaatgaccttcacgaccacattgatagcaagactttcttgaagtaatttcttgactttttccatgtttccacttttgtttcttggaactgatgcgacgacgaggctgaagctgtgtgcaggtgatagtccatccatcaatgtaacactcatttgcttctttttggagctgggcatccttgtgatgtttcctttttggataacctgccaattcatcgtctgacagtgtatctgctattagttgttcttgggaagaccattgactttttataccagaaaataaaattcggttcttctgttttgtagtttcactttcgttcgtactgatctggcgacaaggaattccatagtactcacaacaacaacatgttccatgatcatttgtctgttggtgtgcatccttttgttcatcagttgtttcatttctagtgacgtttcgacttgccaacacttgctggtatgaggaggtgagttacgatacattctgtattacaagagcttgtgcatgtaacagcttttctaagtcaactatcgagggtgatgttgtggttgatgtcatatggttatcggtagt

SEQ ID NO: 34723 - DNA, 744 bp, Zea Mays
caatagcactgcaattaccaacggtcacgcattctaccccagccctttgcacttccgcaaatcacctgatggtaaagttgaatccttctcagtcaatgttgttttcagcatcttcatcacatacccagacttgagtgctgacggcatggccttcttcatcgcacctaccaagaatttctctgatgcacgggcaggcaagtactttggcttgctcaacgaaaacaacaatggaaacacaagaaaccacatcttcatggtcgagcttgatacctacaaaaatgctgaggtacaagatatcaacgacaaccacgttggaatcaacatcaacggtgtattctccttcaaatccaatacatctggcttctatgaagatagtggtgccttccgggagctgacactgaatggaaacaagggaacacaactgtggatcgactatgacaagagtactatgcagatcaatgtgaccctggctccgatcaacgtgcacaaaccatccaggccactgctgtctacaacctatgatctctcaactgtaatctccacctcaacttcatacattggattcgcatccggagcttctcccgtgaactcccgtcattatgtgatgggctggagctttggcatgaataaaccagccccaccccttgacgtctccaagcttcccaagttgcctttccatggccccaaggcccagtccaagctcttggcaattgtcctgccgatagccactgcaacgttgatcct

SEQ ID NO: 34724 - DNA, 439 bp, Zea Mays
gagctatctgaccacaaaagaaaatttcaaggtcagtccagcaggaacacctggccaaacaatgctcaaggttcgcagttccgctctggaaatcagggtggaaataattatcaagtacaacgctctggacagcaaagccagagaaataatcaaaaccagaaccagcaaagaagcaactcccagaccaaccagaggtctggtggaaattcacagaaccgtcaaggtggcaccaacaacacgcaggccagaaacaacgcacctgtccaacccaatggatgtttcaagtgcggtgagctaggccactatgccaacaactgcccaaggcgcaaccagcagacaccccagaaaggcaatactcagaggaatgaccagaacacccccgctcgtggatcggctcaaaacaagacaccacagaaccagagcagaggaagggtcaatc

SEQ ID NO: 34725 - DNA, 357 bp, Zea Mays
ggacacgtacatccttctttacgtatcatgtaaaacaaaaaaacactgtttaaaataatggcatcaaaaggatatcgacaaatgtttgaatggattttttatattgacgtaaaaaccataaaactgactaacctgcagtatgggaaagaatatcatatgattttgtagttgttttctgcacatcataaccatcttcattgtcccccgactcagcacggaggacctcatcaattaactcgccaaaaacatcagatagattgtattgtttctcaacaatctgctgaagagtctgtttaataactgaacacgccttaccaacctccgtatcataatgtgacaacttctctatgaaaccca

SEQ ID NO: 34726 - DNA, 486 bp, Zea Mays
tatgcgccgcgaattgggtgacaaggtcttgcgaagcctgtagaaattttctccacgctcgggaaacccttcgcagttcacaaagctaatcgcccacatgtggcctctttagcgctggggcctggacattgtcgggccgctacccacggcccaagggaacctcaagttcaccttcgtcgtcgtcgagtatttcaccaagtggatcgagacaagagcagtatccacgataacgtcgaagactgcccagaaattcttctggcaaaacattgtttgccggttcggagtcccgtccgagctcacagttgacaatggcaaacaatttgacagccaagacttcagggacttctgcttctccattggcaccaagcttgccttcgcctcagtataccacccacaatccaacggcgtcgtggagcacgccaacgacaagattttcacgacgatcaagaaaatgctcctcgacgacaagaagggtaaatgggccga

SEQ ID NO: 34727 - DNA, 415 bp, Zea Mays
ctgtatccgtcccgttttcactcctatagcccgatatagaagaacaagaggccaaggtcgctcgtccaaaacagacgatccatttgctccttgaacacttcgatgtctgtcggtcttgctccagtgattatcacgtcatcgacatagaccccgaccaccacacgcgacactgaggcaccctttgtcgagtttgcgtagattgttttctagcttcgtgttccatatctgcggtgtctggtgaagccctacaacaccttcagtcgtaggacctaacaaccaatcgtgtgtggcgcggtagtcaacagtgtgtgtcatgcactcgccaccacggccagtgcagagcatgtccatctttcgccctacctctacctcagtgcgtgtctagagttggatgatgaccgccgcaacttggtcc

SEQ ID NO: 34728 - DNA, 702 bp, Zea Mays
aaatgtcacaagcctcgccataaagataatgcctccatgactttagaacaaaaaccaccacggcaaattcaagatcatgagttggataattcccctcatgcttcctcaactgccttgagccataagcaatccctctgccttcctgcatcaacacacaaccaagaccaatttgcgaagcatccgtataaactgtgaaacgcttaccgctctcaggcaaagataggataggggcgtccaccaacttgttcttcaatgtctgataactgacctcgcaatcgctggaccagacgaagagaacacccttctccaagagtctagtcaaaggcttagcaatgctggaaaaatttggtacgaagcgccgataatatccagcgagccccaagaaacttcggatttcagagacactagagggtctcttccactccaccacagccgcaacattcttgggatcaaccgcaatgccctgctgattaatcacatgccccaggaaagccacttcggacaaccaaaaggcacacttcttcaacttgccatagaactgattcttcctaagggcacctagaacgagacggagatgctgctcatgctcagcctcggtctttgaataaatcagaatatcatccaggaacacgaccacaaagtcatccaagaactcatgcaacatcctattcattgcttccataaaagcagcaggagcattag

SEQ ID NO: 34729 - DNA, 391 bp, Zea Mays
tatcctactgacaagatggcttcttcatctaatccgtggcaccgacgtttgaaacgcatgtacgaggatgaacaagtgctacacatgcttcatgcatctaccgttgcagacggggaagaaaagccacatgtgcatagaggatcggttccaggtagacgtattattcatcgggataggtcttcaggttatgctaggcttgtggaagactactttgcagacatccctgtgtacaatgacgacattttcagacgacggtagtatcctggttaccattgtttcattttcgtggcaatatgatatgtaatgaagtgttctttttcagattccggatgacgaaatccatgttcgaacacataacagaagctctacaagtggtgaacccctacttcag

SEQ ID NO: 34730 - DNA, 273 bp, Zea Mays
ccatgctacttcttcttccccaggcggcagaacacgaccgtgcctacgtagccgcggcggtgcacagggtcccaacggcggagccatggcggagcgattctccggcgagaaatgaacagcccagccaccgtctaatctccacggctcaccacacatcaacggcgcagggcgcgtcttcaacccttgacccgaactaggcgacccgcagcagcgctagagcgccacccggcggtactgcgatggcgtttcccacggctaaccataattgacgct

SEQ ID NO: 34731 - DNA, 634 bp, Zea Mays
accccagacttggcctctcgcgcatccaagcctgcggtggtggagtctgaccttcggagaagcaagagacttcgtgatgctcgggctgggttcaggcagggctcctgccagaaaaagaactgtttgatgtgtcagcacaagtttgagggcccccctccctttctgccaagaacatcagacgcctaggggaaagattttgtaacctgtcagaagaggacctatccgatattgctctgaagaagaagaagaatccctctggttgtgtgggctcagataagcccgaaaaaggagatagcggggatcagaatcaagattccacagatgaagacaactaacttgatggtgctgctccggttatggggattttgcaggacttcccttcgccaggctttttggctgtttcggccctggcgcttttggctggttgttgtggcaacaaactttgtgatttctggctgcgctatgttcagttctaacaaacactatttcgcccaccctgctgatgggtttgggtttcttttcgttgacaaaccagatcattcccatgatgaatagttacaactctgctactttttctgattggtctattttaagttttaatgttcgagggatcaactcggtcgttaaagggaat

SEQ ID NO: 34732 - DNA, 1034 bp, Zea Mays
gggatattagctctcagttgttagaggtggttgagaataaagtggcgcctaaatctataaaggagctgttgtagtttgtattagggttcatcaaagaaagttttacctggccgatggagcttccttggtcatcatggcgcaccttgcgccagctgacggaatcagctccccctccagctgatccccatatccactgagatcccttccccagtcccaagccttgctgcgatcaccactgcgcagtcctaggagcccacgacatatcaatttggtatcagattcctctgacgcatcgaccaacatgtccggcgttgatcacaatcctgcaaagacctctccaccatcaactcacacctcaacctgcatggacactggatcacgcttttggagaagcgcccaatcgaccagcagctgccggaatcttcagaaaccgacccacgtaccgcagcgcatgtcagggtcatgcatagcacaagatctgctccccgtgaccgcgtcgacgatgatggctatcgatgacccaatgtctcctttccccactacgacggtgagtctgacccctgccgtggatcaataaatgtgagacttacttcaagggcatgaggactacacccgatgagaaggtgtggcgggcatcactccatttggacggtgtggtagcagaatggttctacgctctggagcgggacacgggcgacgtcctcacttggtcccgcttcgttgagttcacccatatgcggtttggaccacctctacggaccaatggtatggctgatctcaaggacctttggcgcaccggcaccgtcgaagactatcaacatcagtttctgtccattctctgtcgctgcgaggatatgacacagctccagcaaactcagatgtttaccgcagacttgggtgaaccgcttcgaactgatgttgaactgctaactccaattacattgcagcgggccatgcacctggcaccgcctatgaacgtcgcatggatctgtcctcgaccccatcaaggacgccatatgctacatcaaaaccaa

SEQ ID NO: 34733 - DNA, 580 bp, Zea Mays
accctagcgccctgtcacttctacctctgtgcccctatctactcgtccgaccaccggtttgcgcaggatcttggcgagtcttgccaacattcagagtggtacatcggagctcgtctaggtgtatcggtgccatggcactgagatccctccggggtcttgaggtttcggccgaactgctacaggctggggttagggtcatcgcccgcttgccggtgagtgtctccccatctacttttgttccgtttgggtacctcggatgtgggtccagcgctcaaggtgcgcctgacaccatggtgggcggtgggcgcgtcgtggctggtgtcaccatgccggatggcgacgggagtttgaagataggtttatagccgtcaatcccacaatgagcggtcacgattagatctagaaaacattaagccacgaccattcgatgctagttgaacgtttggaattggaactcgcataccccttcgcttaaaagatctgagccgtaggagcccgatccatcgatcaggattgtttactgattcttataaagcgtgggctaatcctggcggtccgttttggatcggacagctctgag

SEQ ID NO: 34734 - DNA, 374 bp, Zea Mays
cacaaatctcctcatgtacttcggccatggcatcacctaggcccaagcatttaagcaggacatcgttgaccgttcggcggtagagttcatcactcattaaaacatacttgaaagttgtacaccaaacgttcctatctgtcctaacactgggatttcgtaggtaattaattatgggtgtcctccaatcattcgcatcggcttcgttatcagccgaatcaatcaggagaactttcctggccacgtcagacggtccggctcccacacccggatggtgtgaacctgaggcggatggtccgtgctggcagccccaatgttctgagccctgggaatctagcgcgacaccggttatcagattttcagtgttgtgaaatctc

SEQ ID NO: 34735 - DNA, 337 bp, Zea Mays
gcgaggagcagaggccgcgcgtgggctggtggcggcgctcagggctgagcggttcagctctggccgaaatccatgtcgcccgctgcgtaaactcctctagttcggctccataactatggagatttgctccctgctcagcacctcgcataaaatcgctagctctctgttcctattcctcctctcggttttcagtcacggtttggattgattccttcgattcttggtgttctgatgttaatcctgctggtggaagaaggtggaggtggcactgcttgtgcgcagtaaggttctcctgcgctccgttgtctcaccagtgcacctgtgtggtgctctgtct

SEQ ID NO: 34736 - DNA, 356 bp, Zea Mays
ccgatatacaatacacacgtcggcttgcctattattatcgcaatctgagacacaacatacactacaacatttttataaacatacgtatttacgcgtatattcgcacttcgaccaaatcatatgaaccgtgtatttcaataattatcccaaaacaactaactccgttatacacttgtatcacaaacccacttgacttacttgaagtgtctctcgaaatcgtgagcacaatcatacaccatatgcgaagcataatttaacgagcgcataatacgcatcgtcacgactcgacttataaatatagagaaagcgatgactactttggcatgtcagcacctctctatataagccaaaacaat

SEQ ID NO: 34737 - DNA, 688 bp, Zea Mays
aacctggagtttatttgcagtcttggatagaagaaatggcagcatatattaagagtttggacagaaagcatcttattacagtgggtactgaaggattttatggccctgggagaggtgagagactgggcgtaaatcctggagactgggcagcttcagtctgctctgactttatacagaactcagctgtcaaagatattgattttgcctcggttcacgcctatcctgatagctggtctgtatcattacattttcattactgaacaattttaattgtaccatgtcattgatgcatctttgctacaggctaccaaaggcaagtatggaagaaaaagtcaagtacctttctgtctgggttgattcacacttgaatgatagtgaatacgtcttgagaaagcctgtcttgtttacagaagtaggttacctccaacatgcagaagctaacagcacagttgatggagacattcttctaaaagttgtctatgataaactatacgattcggcaaaaaagctgcaagcaggaagtggcgctcttatttggcagttgatggtcgaaggcacgcagatgtaccatgatgacttctccatggtggcacgggatcgtccgtccacatataagctgatgaaggagcagtcatgccgactgcagagtctatatggaaaagagggagaccctacttggaaatgctca

SEQ ID NO: 34738 - DNA, 371 bp, Zea Mays
gtgaagcacattatcgtcgtacaacaccgggatatggaaggcacccaaaaagattgaaactgtaacatataaagcagaaggtgtagtctagcgtgcgtgtttaatcgagctgcagtataaataatattatatgttctcttgtacgtcctagaatgatgaacacaaagtgaagaagattacagtattgagtatcaaccgaatgccacgacctcctaatgtcccttcttgtttggttctggcgagagttctagcctaacggttcctagttcatctttatgcttgtcctgtggtgattacgaatcctagatagcctaacggttcctagttcatctttatgcttgtcctgtggtgattacgaatcctagattctg

SEQ ID NO: 34739 - DNA, 914 bp, Zea Mays
tgaacttcggcaccagtcatcattgcaggtgggcaatttgttactacgacacctttcgtaaagttcttgatatctgggtggaatggatggtaaggagggagaaattgtcgatgtttatcgaacagagaatatttgccacccttcttcaaccaaatgaatctaagagcttccttgcaaactaggcatgggaacttactatgaatacaccagacgcagaatagcccatacgtcggtaagtcatgcatggagtactgatacctaaacatgcattttgaagtttgtctttgtagctcggtaatatgtttatacccattactcccaagcacagaccaattcattaatcaaaggctccatgtacatacccattttaattcccgggtgtggaggaattatgaacaacacgactatgttctatctttgaaagcatacaccggggggagattgatggggataacaaacatgggcccacatgtgtacggggcaacaatcattccatagggattgaacccatctatggccagcgcaacacgtacattacaagcctattcaactttctcatggtgaatgacttcaaagtgtttccatgcttcatcatcgtatgcatgcaccatcttgtcaggattgtattgtttgccatttttgtgacatgtcatctatttcgcagattcctcgttcatgtatagacgctggattctcggtatgaacgagaggtggcgtaggattgtcacggggatgtcgagctgcctcttatgtccatcaccagtgtctatctccatgaacctagacgtttacacttcagacaatagtttgcctctacgtattctttcctaaatagcatgcagcccttcggacaagcaactgtggcctatccaaaaaacttggacaatccgaaatagatacatttgtagatatgc

SEQ ID NO: 34740 - DNA, 634 bp, Zea Mays
cttacaacgatatcggaacgatcgcatgcttgctgaccaggctcaaagcgaagggcatcgactatctccttccatttagggttgcatgtgaaggtgacgaagagatctggcgggccgtatactctgcagatggccatcgcgtcctggtagttcatcacatggtaccttcggccgcccgtaaaagatacagggacaataactcttccacccaccgagtctgcactggtgagacccctgccaatggcgtcagttatcccctgtacggattcacaacgcaattctttttggtggtccgctatgaactgcaatcgagacgcctcgatcgtagaatacgcatcgacagctagctggttgcttagcctaccatagcaggtgaatgggttcggttcgttgagcctatagtgtgaacgatgtctaacaaattcaagcattgtaacatacttgcggcatgcgacatcgccttctcccacgtcagcgtattttattccaaggtggtatccacgatcaccgtaagggaagagcagcgggtactgcaaggccatgtaggacgggtgcaagcacgaaacatgtttcagaccgccctctctagcgtgcacgaggacgtcatacttgtactgtgaagatgagcaatcac

SEQ ID NO: 34741 - DNA, 370 bp, Zea Mays
caagaccttagtcctggacatcaaaccttcagttatctgtttgcaagaaaccaaaatgagcaacatctccgattttgatatcctttccattcttggtgctggttacaataattttgttttcagtccagcacaggggacaagagggggcattttagtggcttggagagatggagttttcacccacagcattcatgtgatcagggagttctcggtctctattcaactgcaggaggcttcaggcccactatggtggttcacaggggtttacgggccacatcaagataatcttaaacaggcttttctacaagagttaagtgaggtcagggcaggctgtgatggaccttggatcttggcaggtgattttaatcag

SEQ ID NO: 34742 - DNA, 388 bp, Zea Mays
tgcgggcgcgccggaattgctcaccgtgcttgctgctccgccgcaggcccgccttctccgtggactgccatcctcgccgccccacctccggtaagatgtcacccacctcgtctgcaatgttctccactgcatgtaggttctttcgggtgggttgttggggctctggtgcgcgatttgcacgaactccagcgtgggtccgccgcgggagctcgcgtcgccgtgtgatttcgctccgccgccgggattcaaccgggttgggaggaccacccttggccgtcggatttaagtgtgcggtagagattaaatcaaggggcacgattgggttaggatgatgtgggccgtccagtcctgatctggcgggtgagattagatcttgcgttttaaaatc

SEQ ID NO: 34743 - DNA, 466 bp, Zea Mays
cctaagtcgagaataaaggaaaaggctcaaattcggtaggccgagccggtggggttgttaagtggggaggcatctggctcggtggaggaaaccatgggttttatcaaggacttggctgccacttgcatagcactaaaccagaccatgatggtggccgagctcaagggtgcaatagtgtgggcggtagaagataccgagggtgagtgtcctaggggtgaaagggtttctaggaccaccgcaggcgaagacattttaacgtctaggctaccgtagtcttttaatgtgttcccttatgttagtaacattggggatgttatgtcagctactatggagaagatatggaaggctatggtgaagagggtggcccctttgcacaccttatgggcctgacgaagctgatgcaggtgaaactggtgaagacagaggcatccaccaaggcggaggttggagtcgtcgtgtgtgtctg

SEQ ID NO: 34744 - DNA, 310 bp, Zea Mays
ctggttcgcgcggagataagatttaatcgtggccgttcgctcaatccgatggcccaaatcgtgcgataccccttcggctagcgcaattgcaaaagagaccctaacctctctggaaatcaacccgccgtcccccgccggatacgcctgagtctgggaaatatttcgagttagcccctgcgttactttgtttttgatgcccagcccagagaacaatggaaatagaaaattaattatagaaaatgatttttaatacaaaaataattcagaaacttgtttaattagtagaaaattcatattaagtccaaattga

SEQ ID NO: 34745 - DNA, 508 bp, Zea Mays
gtctgactttcgttagagaccttcggacgccgtacctaaggcccatatgtagtttggtgatgacccgtcttgtcccattggtgtaggctcgtctcattgggtagaccttctcttacactagtctctagtaaggttgctcggaagagacttggtcgtgtgccccacctcacaaagttacccaacagggacttggtcgtccgctcagcctcgtgaggttactcggcaaagacttgatcgtcttcctcaccttgctaacttactcgacagggacttggttatcggtgccgcctcgtgaggttgcttggctaggacttggttgccctcccacctctcaaggtttcttggcagggacttggtcgtccgctccgccgcacaaggttgctcggtagggacttggtcaccctcctcgcctcgtaaggttgctcgccagtgacttggtcgtccactctgcagttgctcggtagggacttggtcgccctccccacctcacaaggttgctcggtaggga

SEQ ID NO: 34746 - DNA, 1111 bp, Zea Mays
gtgagctttgctcctataaagatgccctcgtatctggctccaggcgcctccctacactaatcaaggctccttctcataccacgacaagctcaagagccccagaggctgtcaagataaaggagaagaagcaggtcggtggacccttggtggtgcagaatctgctggtgggatcacatcaggacgagcttggctggcaggtggttgagcgaaggaagaagacccaacatgtgcatcttcctcgtcgagggtcccttgtggacctccgaggtaggtgcttcaactgcttttcttcctcccatcttgctgcggtgtgtcgccgtcctacccgatgctttcgttgctttgagtacgggcatcaagtgagcacttgccctacgggacttgtggcgcgtacgaagcaatttggcggattgaagcacgttcagaaggaagacagaattccggtctggcagcgtttgactaggatggtgggggatgctcctctgaggaaggatggtcagggctcaaggtcaaggaagtcggtctggaaaaggatctccccactgcaggaggatgggaggtcggagtttgcatctgctgcatctgtcgaaggtgatagcggtggaggccatgaaggcttacgatgcaagcggaaccggaaccgttccaagcgttgacggggagagatgaagacggatgatcaccatcaacaagtatctccggttcctgttgttgaagcagtagtcccggagccatccctgttgagtgtcaacaattctaaggtttttgattccacactcaactccagctgtgttttggactactcggatgatttggcgagggaggaaattgctctccgacgagctctgtttgtctctgtggctggaacacgtccagtggtccttggttcagaaattgtggacgaagttgcacgccagtttgatattgcagtgaagaacatgtcaattcatcagactttgccagaagacttccttctgttaatgcctgatgaagatgctgcttctaaggttttcaatgatgggaaggcactgcgggggcctcgtttcaccttgctattcaaaaaatggtcgagatttgctcatgcttctgcctcttctttggtcaatttagt

SEQ ID NO: 34747 - DNA, 412 bp, Zea Mays
tttctctatggattgcctgccttctcgctgtgatctccatgttgaagagccgacgtctattggagaagatggatcctgctttcgtcgcacattgatttactctgtttcggtgaaggtggctatttcggttgcattgttggttgaggagcagcctctattttcctccccagaagatgatgaagatcgggataacaaacatcagcgtcagaggcagcaccttccgaatcatcagttctcttcggtccggacctccgtacatgcacggttgggaccgcgtatcgctccttcttgtgggggaggtagaccagttgatgccgctcctctcccgaattcctcggttgatgagttgcaggcgcctgttccctccctcccatgcaatccttcgtctcctgccatgggggcgccaattaat

SEQ ID NO: 34748 - DNA, 403 bp, Zea Mays
ctgcactctagaaaacacaggtacaaatattcacaatcagaaaaaacagagaagtcataaataatgttttctcaaaccgaaacttagtaccactgataaatttagtactgatacataattataattgttcgtaatagtcttccaggttatcaaagtagagacatgcatgtaactacatagagttcaagccagaaacagacataaaaatggcaccatggaatgcgtcaaattggaatacagtatcagtaactttgacacttcatgtggtgcctcttcaaatgtcctgtacactcaacctagcatcaatgaacactatcattaattatcacaaaagtaaatataggaactgtcgaactgcaaatactaatgttaatagaaaataatacactgcacacaatatcat

SEQ ID NO: 34749 - DNA, 406 bp, Zea Mays
aggaacttcctctgccccctggtccctcccttgctctctgtcatgcgcaattggttgtcggagttcccagcgccaccgccgaggtgcctcaccatgaaccttcaccctccggtgcccctacctcagttcagcccacaccattgggttccttgcaccctccccatttcctaggccatcctagccaccctaagacacctggagcgcccacaccccttgtctccggtgagcctctcgcagtggacgtgggcggcattgcctctggtgggcagaggaaagggccaaagccggttgcatgatccccgtgttgaccatgaatccaatagttggatcctaataaacccaagcctaaacctaaccatctgctcgacccaatggcctagccaccacactcgcacccgtgttctac

SEQ ID NO: 34750 - DNA, 530 bp, Zea Mays
gactgaatgagctttgcaatggtacagtgaccggattggatcaggtttagatcccctcgccgccgacgtgctgtgcgctcggattcgtggtcgccgttggtgattcgcgctcggatcagctggataacaccgggggtccgtaaatatcatgccgaggatacactccggccactattttactccagccactgtacccgagcagaccacggtcgatttggatgggttcgccggagatagccacttcgcggccttgctccacgttccttggcacattaatctcatcgccgtgactcacgttagctcgtctggtggtcgccgaggagcttgccacggtaattgccaccaatcgcgcacgccagtaaccttcttctccggccgccatgcgtctttctcaaattcactggccaccgctgtgggagcctataaattgctgacctcgcctgctccgctaagtaattgtgcaactagtgaagcaacccgtgtctcgaatcatccactagaactccccaatttgggatttcccccaaatc

SEQ ID NO: 34751 - DNA, 402 bp, Zea Mays
tgacgataaacttgcagctgcacttcaaaatgcattgcaggccaagaagctgtctgtaatggataaaattggtaagaaccacatgtgatactaataattttcttgtcactactttagtgacaagtatcataaaattaacattgcaggcattgtggaagattcactggccttatctatggcctgcaaacaaaccttaacatcgttgctacgtttactgtatgcttaccgcgaggaggctgattacagtgttctttcacacataaatactgtacgtaaatcttgtataaccaatcaattccatgatcttgaatatttttatttgaagatatttatcaagctatttcatttcgcttttcacaggcgagtttaagtattgctaaaatatcggttgatgctactcct

SEQ ID NO: 34752 - DNA, 420 bp, Zea Mays
cttgaaagcaaaaggaaggagttatctgaccacaaaaggaaatttcaaggtcagtcaagcaggaacactcgcccgaacaacgctcaaggttcgcagttccgctctggaaatcaaggcggaaacaattatcaagtgcaacgctctggacagcaaggccggagaattaatcagagtcagaaccagcaaaggaacaactctcagaccaaccagaggtctggtgggagttcacagaaccgtcaaggtggcgccaataacacgcaggccagaagcaacgcaccagtccaacccaacggctgtttcaagtgcggtgagctaggccactatgccaacaactgcccaaggctcaaccagcagacaccccagaaaaacaataaccagagaaatgaccagaacacccccgctcgtggatctgctcagaac

SEQ ID NO: 34753 - DNA, 973 bp, Zea Mays
ctgggagttcgattgtgtggacggaggggtcttcggaagaggacttggattattttgcagcgttggatgtggctgcggcagagactcctccacgtgtgatgggcgctgaggttcatcctggtgcgagtgctgggtgtaggcggcgaagagcggtggcgaaacggggagtgggtgaattgtcacgaggtgaaaggcgtcatcgtggtgagatggagggtggtcgtcttcgtgtggatgtgactggcaaacgggaattgttgtcctcgccggctggggcgtgtgtgggtgagggggagctgcgaagtctgtttgcgggtgaggaattgaggataatgttgttcaactatagggagatggatataatcccgaaggttgagccgatgtaatgtgtgatgccctcgctgtatgtatgtaactataatttgtatggtaaggctgcgtgccttcgctgatccggccacgcccgtaggcggcctgtgcacttgatcttgcgcatttattgagttggtccggctgcacccgtagtcgatttttgcacggaggatccgattgcacccttaggcgacttttgcacggatggtcttttgaggaagacttcgattttgtgcatttgttgtgcgggtccggctgcacccttaggcgacctttgcacggatagtcttttcaggaagacttcgattttgcgcacttgttgtgctagtccggctgcattcttaggcgacttttgcacggatggtcttttgaggaagacttcgattttgcgcacttgttgtgctagtccggctgcacccttaggtgacttttgcacggatagtcttttgagaaagacttcgattttgcgcacttgttgtgctagtctggctgcacccttaggcgacttttgcatggatagtcttttgagaaagccttcgattttgcgcacttgttatgctagtccggctgcacccttaggcgacttttgctcggagtgtcg

SEQ ID NO: 34754 - DNA, 437 bp, Zea Mays
ggtttggggactgattcacgttccctggaagaagttcacggccatccgaggaggaaacgaccgcggtggcggcctgaattcaccgtcggagcttcgtttccaccgcggttcggactcgaccgttgccagagcgcttcacaacgtgatcactggtaaggacccttgtgtcgagttcaccgttgcctctgcatcctattgtcgctggcacatttggcgctggtgaactcttgcgccagaacccggaactccggcggggattgaccgcgcttctaggtgtcgccgccgtgcggagctcggaggtaggagagaaaatcgtgaccgttggatctttgtgcaacgtccccgattagatttggggggatgtcactgggtgaccgtagatctgtgcacgggtggccgaaatttagccatgacttatccctttgtgcgatctaacc

SEQ ID NO: 34755 - DNA, 337 bp, Zea Mays
aattcagttgtttaatgtgctgatctatatattgctatgcgtagtgcgcatataagtttgaatatctataaaatttgcctcgatttaaaatctggacttagaatattacgcagtataccaacaatccaaaaacccttatttctgcattattctattattctagcaatggctggtgctttagatgcaatgaaacctgagaggtttggaggtggtgaaaattttcgtagatgatagactaaagtcaaattctggcttatgtcgttggggctgtagtgggtgatccgttcaataatgtcattcacggttgagcagaccaactcttatgcaacaacgcgtg

SEQ ID NO: 34756 - DNA, 293 bp, Zea Mays
attctcgtggtaaatatatagcagaactattagaatgcatgtgaaggctatattgtactgcatgtacatactcaaatcgctctaaatatttattttgcgttgaccttcggactcacggcgagcgattaaatggtatagtgggtacacagatgtgtcgagcagattacattattaatcgactgagttaaaacattggctaagtattggctgcgccctggtaacacgacgcaatatttatgtcgtacgatcttggctgcgtcatttgattgctatgtcacactctcgcttaatcg

SEQ ID NO: 34757 - DNA, 790 bp, Zea Mays
cccctggggtacatggtgctcgcagaaagcagtttcgaattctacccaggtagcatccctgacggcctcgctgaaggtatcccaccatgctagggccatcccagaaagctgatgagcagccaattgaacacgctgattttcggggcatccgatggcttccagtttcctcttgatcatgcgcagccagtcatctgcatcgaggggattgctagaccccgcgaacgtgggaggcttgagtctcagaaattctcccatcctgtcctgtggtctcccaccacctgggtgctggttttccagacttctagtgaggatttcaatgagttgggactgattggctagaacttgggccaaatctagtggtagtttcggaggtgtggggaggtgggtctcactctcttctccgccagcttctccttctgctcttaggggaaaacctgctccaatcccggaggcggtaggcatggttttatccgaagccatctgccaggggaaaagagttactactatgcacatgccaaaattttttttcaaccagttactttattcattacacaagttcattacagcatacaactaccataagttcattacacgcgagtgctatctagggtactcccgaactccttctctaaagtgtccccaaattccttgagaaggtcatcaaggctggctagggacatttcctcggtgtcggacgagtttcttattctggtagggggtagggctggaggggcttcttccttctgctcagtctgacatccttggcttttggtcttcttgcggatttttc

SEQ ID NO: 34758 - DNA, 433 bp, Zea Mays
gggatcctgcaagtgtgaaatctatatattctggacaaatggggcaaaatatgttacagccacaagtgctctgcctgtgctccattatcctcacgttattttttacccttttgcaaccgaccgctgcacagatcactgcaccatgggaaggtaaaatccttcttattcactgcactttgcatgcatacccattactcgacttgatctctgcataatcgtcatttgtgcccatttcacttttaccttgtaaacatggcccttagccccttactttggtggagaggtgtatacaattcagcagtactacttatattatcacaattgtttttcatgccttcaattttttctttgcaacattattctcaaactaattcatctgctctgcagttgatgccctcaaggctattaggggcagcttgatagatccacacgg

SEQ ID NO: 34759 - DNA, 458 bp, Zea Mays
aaaaggggaggcacgagaagtcctgctcgaggaagctcacaactcagcctactccatccacccagggactaccaagatgtacctagacctcaaaaccagatactggtggagagggatgaagaaagagatagcacagtatgtggcccggtgtgacacctgccaacgaacgaaggccgagcaccagaagcctgcaggcctattgcaacccctcccagtgcctgaatggaagtgggaagaaataggcatggattttgtaactggactaccccggacgcaaaaagggaatgactctatctgggtaataatagaccgtcttaccaaggtagcccatttcatcccagtgaaaactacctttggaggagccacccttgcccgaatttatctcaaagaaatagtcagactccatggcattctaagaaagatagtgtcagacaaaggaacccagttcacctccaaat

SEQ ID NO: 34760 - DNA, 325 bp, Zea Mays
caccggagtcgtcgacgaggggcaaccagaggggcagagctgatgttgcttgaggtcaaggaggattggacgagtgtagacagagcagattagaacaaagaagcgagacggagagccgaagaggcacgcacagtcgcacagattcggggaggcacaaaccctaaaccctaagcgaagaagcgagacggagaaggcgagaggaaacaagagatctagtaacaaatcgtaagagcaagagcaccgaaaagtcaccgacgaccaccactcaccagtttaggtttagggttaggagaagccgagaagtagtcgaacttacagacagggg

SEQ ID NO: 34761 - DNA, 302 bp, Zea Mays
atcgtttaccggactttgatgccatcttcaagcatgcatgactcatcatgccgcaaagacgctactgaggacttcgctccttggcgaattggtccgaggaagaccatgcctactcaggactccgtcatctacctcaagcatgcaagacccatcgaaggccgtgaagacgctaccaagtcccgaggaagaccttgccttctcgagacttcatcatccaccatgggcttgcaaagcctattgaaggccacgaagatgccactctaagagttggccggccctaagggcctgcgaggagatttgag

SEQ ID NO: 34762 - DNA, 441 bp, Zea Mays
gccgcgccgccgccgcgtggactgctcgcgctttcgggtgcgttgtttcgttcgtcgcgttcggggaatttgaatttggggacgggagagcacctgcatcacgtgtttgacttgttgcttgcgttagtcgcacgttttctgttgaattcagctacttgattttggagttcgtgcaggatggttgactcgtgctttgggcctctcgtcctttggcaacacgaccgagcttttggggacataccattttcgtagttctgttgctatgggttatacgcaaagtacatagtacatactccatacacgtttatatgaattctataggtaggagctggctatttcgtccagatattaaatttggcatcatgacgaatctgtgacacactgtcttagtgttaactgagttttggtcttaacaaatggagctactgtgctgctttatct

SEQ ID NO: 34763 - DNA, 319 bp, Zea Mays
gggaaattatcatgaattgatcgtttctgaatgaacgcgttttgggctgtggagatgatctcgttcattcttggcgcaggtctatttcctaaaatcttggttaaaattttcataaaactgttgatgagactgatcggtctaaacatgtcaatcctgtcagccccctccctcttttgcaaaagagtgatatttgcctcattaacaagatgcaggcttttgcatctatgattatagaaatcatgaatagcattggatagatcatccttaatcagctcaaagaaacacttataaaataaccctatgaacccatctggacccg

SEQ ID NO: 34764 - DNA, 343 bp, Zea Mays
cgccggtgagcatcgcgcccaacgccccagcgcacgattcctagctccgataggtaatacatgttctacggagcatattgaactgattacggtggagcttactggaggatatggtggcggtagcgatgctgccaacatggcactgcgggtctgcagcgtttgacgaagcctggcggcaaaatccggaccgaccgatgacccgtgcgcccgcccggatgttgatatgtgatccatgagccccgacggacctccatgacccaacaaagaggccgaagcgatggcgaggatgcacatcaacgacgacggtagaggtcgaggttcctttctgtcctctttccttttc

SEQ ID NO: 34765 - DNA, 506 bp, Zea Mays
agttctcattcatttctcagttcgcgggtggcgtctaaattggaaggtttgtcagagatgccatggccggtgatggtgcaagtagctgacggtggtagattgttatgtgacaaacaaattttgggggccacatggtcgatccaaacgtgtgaattctgcacagattttcgagtcttggatatcacagcttatgatattattattggaatggattggttagctgtgcatagcccaatgaaggtggactggggacatggctggttgttgattctgtatggcacatcgtcagtcttattacgcggtggtattgaggatgttcaggccactacagctgtgcggtctactactttggaatccttggctatatcatgggctgatatggggttgccgcagcagatggcctcgttgctctctgaattcagttcagtgtttgatccaccatctgggctaccgccttcgcgcgactgcgaccactcaattcctttggtggcagggtactctcctgt

SEQ ID NO: 34766 - DNA, 283 bp, Zea Mays
caaaccacatatggcatttccctgatccatttccctacaaacttctcgcttttgtcaaagaacctctttctgattgcttctagtatctttccatttgctctttctacctgcccattggccctagggtgcgccactgaagcatactagagttggatgcactcttgttcacataagttgaagaattcgacactggtgaagtttgaacatggatctgtgatgttgttgttgggtatcccaaacctgaagataatctcctggatgaactctaccaccttggttgagg

SEQ ID NO: 34767 - DNA, 451 bp, Zea Mays
ctggtgtgtggatcgtgcgccaggaagagatcgggcacgcggacccacggtgcggagagaattcctcgccgaagtagcatcctcgacgcgtttccgccgtgcgccgcgattgacttcgttcgttgtccatttcttgtgagtaaaccctgcaccatactcactcgtgccttgtgatggcgtagcacccagtgaatttgagtttggagcacgaggaacttgggttcacctcttcggtgatgcccaccaccacgcgtggcgctcgcgccaccgcgcctcgccggtgttgggtgggaagctcggttaaccatggatttagtagtggacggtcgggattagacgatcgcgtagcttttcctccgatcagatctgagacattgcgataggatcgggcgaacgagagtggatcatggctattttaaatccaggtcatagactacgaatcgggcggttt

SEQ ID NO: 34768 - DNA, 368 bp, Zea Mays
cacaccgcagcccgccccaccagagagtcgcgactaagcttgatgtcgccggttgctgaaactgcacaggtctccaggtctggacgagccctcgggtccccagggtaagccatgggcggcgaccaccctgtgagcgcgcgaaggtaggaggtggtgttgagcttgcttgactgccgtgggaggggaggcactggccttggctgaaaggagcgtgaagaattgtgaggagaggatggccttttaagcttggggcacagacgagctcgatgcccaaccccaaagcaacgccagcatcttgttggattggtgcacaccgccactctatggtcttgggcaaaacaattaaggcacctcccatctgcatgcct

SEQ ID NO: 34769 - DNA, 406 bp, Zea Mays
aagcgatcgaattctagataagcaggaatgcatgccgcgttaacagagtgttcaggtagaattagatagtgatcacaatctataaagggataaccctctggtcactcatataagggtgaggggtacccctacaaaaacatctcataccgtctctcatctgccacatcctagtagcacgtgaaagctcatagccctcttgtagcaaccacgtgctacaaaatcgacagtggaactcatcctccaccacccttagctcatttctaatctgtataccctagtgcaattccaatatacagcctcaacaggaagtagggtgttacgcattctagcgtcccaaacatatataaacaatcatgtaattcgacatgctcccgcacgtatcatcgagtcgcagtcaacgacacgg

SEQ ID NO: 34770 - DNA, 925 bp, Zea Mays
gcgcactcctcatcaacaggagtcctgtcttgggatgtcttcatcaggcagtttgaaaggagattctacccggtcaccttcctggagaaaatgaagattgacttgcagtcctacaagcaggagaagaagtctgtcacagagtatgaggtgggcttcaacaagatggtccgctttgtccctcatgtggcttataatgagatggagaaggcgagccagttccgtcagggtctgaaaccttctatcaggcatgcactaggagcctttctgttggtggacttccgtactacggtggagcaggcactgggtgtggagatgcaacaccagtataccatggagtcgtagaagtcttcgggtgttgatcagcctcgtggccaggacgcgaggaggggcaacacgggaggtccagcccacaagaggggcaagtctcagcatcagcgccaccatcctttccgtggcaaatcctctgactcgggtacttcgggaggaagtactcagaggtttcgagctgttcctaagcccgggctggggctggtgtgtttctgctgtggtgatgcgcatcgccatgcagagtgctagtggagtggcaggtgttctatctgcagtcaggaccacaaggatgtggtgtgtaggaggaatcctaaagggaagctcagatgggagccgatgacttcctcctcttctcagggcactatcaacatgatgtcaagtgttgagcagcagttttcagttcctcttcctctacagcagctttatgtgcctaggacttctcagttcgtgccaatgcagggttttcctcagtatctggccgcgcctactcctgcaccgtctactcctatgccgtctcagtttggagctccgcgtctgcctcacccggcggctcagtggggttcttctgttaatttcactctgggagcttcctcttctg

SEQ ID NO: 34771 - DNA, 793 bp, Zea Mays
cgcctccgaaatcctgctgccattgttgccgtgtgaagaaccttcgccgccatgccaacccgcgcggggccagccaatctgccgtcggagctatccccggtaagatacctagtcagctcgctttaaacctcgcgtcgatatgcacgcttcctggctcgatttcgctcgctgtagctcggagtgcgccacacgccgacgtacctccgccgcggctcatgggcaggccaccgtccgtcgccagagtgctgcgtggttcgactgtcggtaagaagtccctaatcggtttcccctatgtctttgctacgtgctgcgcacctcgaaacggggtttggtgcagggaggcgggataacgttgtcgccagccatggctccgtcgtgccttcgcgttctgttgtcggtcgggcgccgtggtgagagagaggggattggggggagaatggtgaagggcttgggctgttggatcatacacggacggccccgatctaaccgcgcatacccttcgctcaatagaatttgaaccgtagatcacgaattgggcggctcagatcggatctcgtgctccaacctgcggatcgattgtgggccgtggatcttagatccaatggccgttggcgcgtaccggttcacttcacctgagatctaatctgggccgatcagtggcgatcggacggttagatctctccgatacccctttgatcacccatttgacacataagccctcaggaaatttggaaaacaacccgtcgtccaatgcgtgggaaacctgtgtctgggctattttgcgccagagtcc

SEQ ID NO: 34772 - DNA, 451 bp, Zea Mays
cgaaggggtaccaagcctcctgaattgtccgatcgcgacacaagggttcagattagaaccccacgctcccgaaccggtatacgattgtgatcattgataaaaaatctatggcatagattaggtttaaaccaactcgcaactcatccctccatttcccgatcaacggtcgtgaatcccccagccaaacggatacacatggcctgattcgagccgttagcggctggatcaacggcacagacgtgttctcccctatctacggtgaaccaggcagcagcgccgctcacctgacgacgacgaacactccggagcggcatgccccctacccccatctatttcatataagaaagatgctacacgaacaggtaacaacggcgaatccgaagaggagaatcacactagtgatcgcgcagcaccacggtctggccacgatcgcactgagttctgcggcggc

SEQ ID NO: 34773 - DNA, 451 bp, Zea Mays
aagaaaaagaatttcatttccaaacttgaggaagatggaagaatggctaccaatcatgatgacatgcagcaaattcttgaagggtatttttgcaatctactgggtgctgatttgcagagacattttactattgatttgagtaattgccataaggctgcgatggatctcagtgctctggagcatcctttttcggaggaggtaagagacaccattgcttgtctctcgtctgataaggttcctgggcctgatggttttacaggaaaattttacaagacatgttgggacatcattaaagtcgacataatggctgctcttaactccctttaccttggaaatgcctataagcttgatttgctaaactcagcgtatctcattcttctcccgaagagagaggatgctacttcagctggtgatttttggcctattagcttgattcatagttttgctaagt

SEQ ID NO: 34774 - DNA, 444 bp, Zea Mays
cttgcatacttttactttttatataaatgcttacctttgtaccccaatgtctgtttaaaacctttcagtttacatactcttaaccacctttgtttcttcatgatccatgagcggtcattttattttgcatatccttggtaatcttgttgtctccttgtaactccacttggtaattaattttctttacttcaaccattatgttgcaaccttacctatcttacccttgactgttttctccacttcgccacctagcgagtcttgcctaaactctatccttatgcttttcattattatcaccttaacctttgacacctatatatcttacttgatgtttgtctcatacctgccctttaaaatcacctctctcctgtcttattctgagagctatactttacctatctttaccttggtcgcatcctcttctttggcttgcgagtttgtaac

SEQ ID NO: 34775 - DNA, 376 bp, Zea Mays
tccgcatcttcgttctgtagccgattaacatcttcgtcaacgactttgttagctattctaattacgtcaagtgcccctttcagagatggattggcttcagggtcatatggctctggagggggagagagctcagctacaccatagtacaagagtctgttagttccaaaactaaaataatttacgaagctaagtcacgttagatatacctataagtcttgcacgttcaataacttcttcagtttttctggcctcttccaaggcatcatgagactctttctcatttttcctaatagcttcgtcagctatctctcagacaccctttagccagatttcagaataaaactttccacttagtgcagcggcttcggccgaaggg

SEQ ID NO: 34776 - DNA, 315 bp, Zea Mays
ttcgataaaaatgagaagttcgcaggaaagtggataagggaattgccttacgtcatttggagcctgagaactcaacctagtcgagccctgcatggaaacactcgtttcttcatggtctacgggtcagaggcagtactgcctgttgatctcaagtttggggcgccaaggttgatctttgaaagcataacagaggccgaagcgaccaggctggaagatgtcgatgtactcgaagaagagcggctgaatgcaataattcaagcggcacggtaccagcagactctgagacgctatcacgacaaggccgtgcgacaacga

SEQ ID NO: 34777 - DNA, 322 bp, Zea Mays
cgcaaccaagagggttgttctgcttgttctgtggagaagataagggacacacaactaggacatgccaagttacaatacagaagcaaaaggaaatagctgaggccgaagcacggcagaatcatccgaagcaagtcctccatactgcctcgtgctattccccgtacattcctgagtatgtgggcaatcaacaaccattttcacaacccacagtgtcagtagcttcggcgagccactccccagctgcatgggccctgccaccaccaccaccagtcatggctccaactttgtctcacaatcaacagcctgaagggcatcaccaaat

SEQ ID NO: 34778 - DNA, 477 bp, Zea Mays
aaaatattcgttgaatgaccaatcaatgcataaaacgtcaaacctaattcgcttcagacgctaatatctaaacctcacccctttatgattcattctatcgtctggctaggcagttgcgattaccgctgaccacttgacttacctctgccatagccccacaaccaaagtccaaaaaaggtgatcacgcgaagcaacagaatgagcgccagcaacttataaacatactacattagatctcgtggataataaaatctacaaatttcaactaaagttgtcaccttataattggtgtgtacacaacaaatttgacgtgtacctgcgtagtttgacgaattttcatgaatcctcgaggctagttggatttttaaattctctcaaaaattgttagctgcctcatgaatattagagtcattatataaaagttgaatctcatcagtcgaatattcatcgttatatcgtctttattattttaatatt

SEQ ID NO: 34779 - DNA, 513 bp, Zea Mays
aacactggagcggcccaaggcgaggtgcttggtctgatgtaacccttctctaacatctcatctatctgcttcttgagttccaccaattctggtccagacactcgataggctcttttggaaatgggggcggtaccagggataagctctatggcaaattcgacttttctctcgggtggcatgcccgttagctcctcgggaaacacgtccggaaagtccgacacaaccttgatagcctcgagcgggttgggctccttactatcaactaaaatctggtgacagactccctccgctgatttaggcatccttagctcggccactacctcttctcctgacggggacttcaatgttacggtcctcttgtcacagctaacatttgcttcatacttcattaaccaattcatccctaggatgacatctatcccgggggtgtctattactattagatcactggggaaccctatcccccttatttccaccattatatttgagcatattttatctgtttgcaccttg

SEQ ID NO: 34780 - DNA, 290 bp, Zea Mays
gtgaaattttgcgaatatgttactggagatgttgtgaaggtgcctgaaaaatttgggttcaattggagcatttttggctggtttgggcatttcaccgaacacgtggtgggcggagttttagggtttcggcgaaaacactatgtggggtgggaaaaccctcccgaaggagctaggaacctgcaaggatactcaagaagcacataggaacactttgcatcacttggattcactggaattcacagaatttggaattgggcacaaaaggggaggaagagtattcactgcccaga

SEQ ID NO: 34781 - DNA, 427 bp, Zea Mays
ctagaattttcttacaaagtgggtattacaataagacttacactggctactgaaggaccaaaagcacccatgtgcatatgttatcgaactgttcttcaattttagcaaggattgactcatgaacgctactcacctccaataattattgggctgcgataacgctcatataaaacctctaatcgatcaacaagacatttatttatccaaagggaatggaatgcaacaatttataaagctaagcatcgatctgtcatacaacaaaaatcatgacaacaccgacagatactatccactaaccgttgaaaatttaaacttacttctcgcttgccactacatcactcctcaatcacacaaccatcacgagcatccttcacatgattatataatagcaacgtaaacgtcgtgttacacaatacatacatccttc

SEQ ID NO: 34782 - DNA, 701 bp, Zea Mays
aatgacgacattctctcgaacaaaatgaatgtcaagctctatgtgtttggtgcgccggtggtgcactggattccgggccatgtaaatcgagacgcggaatgcgaccgtcacggaggggaccttgtagagcagcttggcaaggaggtggcgaagccaggaacattcagcgatggcattggcgatggctcaatactcggcctcggcgctggacctcgatattgtactctgttgtttagatgaccacgagatgaggaagttgctaaggaagacgcagaagcccaatgtagaacgacgtgtatcaggcttctggcccagtcgacgccaaagtagggagtgatcgtagacgtcgcggcggtgcgcagctggacgccgaagccgatggtgcctttgatgtaccataggatgtgcttgacaattgtttggttcatgtctcgagatgcgtgcatgtgcagatacctattgcacgacgtaggcaatattcgaacgcgatgaacgagcgctggatgtgggcaacgcagtagacccggaccggcttagctgttggttcgctgacattcaccaccatagcctggtggaaacccctaggtcaaaactcacaatagaaacaaattcaacaataagtttcttaaacaactagtataatgtccatatgttgcgacggcacacaatcatatttgatggtattgattggggtgggtcaa

SEQ ID NO: 34783 - DNA, 290 bp, Zea Mays
acatctgtcacttcaatggttcgatcgggaacccgaagacacttcttcaattgtgacacgtggaacacattatgcacagcagacaaggtttcgggtaactgaagtcggtatgccactggcccatatctttccagaataagaaaaggaccaatatatcgtggtgcaagctttcctttaaccccgaaacacgatactcccttcattggtgaaaccttcaggtagacatagtctccttcaaggaaatataagggcattcgccgtttgtctgcataactcttctgacgagcttg

SEQ ID NO: 34784 - DNA, 347 bp, Zea Mays
gcaacaggtagagactaggaatacactcactgcatgcttgacatggaggcaaacaaatagacagcatctcatggaatggagttcacaagggaatactttactgcagctgtgcgtggaggtaactctcgggactcaatagcacaacgtggaggagggctggaggaccagcggctgcatgatcatgtgcacgtggactcacacccacaagcctacgcaggacccagcacaggggaaaactatgagtctacctgctgcatgtttgccagggagacagccagacagcagttagatgagatagagttcatcccctttcaatccaattcagggcagcaaagtatatcccaggt

SEQ ID NO: 34785 - DNA, 276 bp, Zea Mays
atatgtcacatgaaaggccaagaatctagagcccaagtcgaggacatggttgtagcaggtggagtagaagcaatagcaactgaacctgtaggtgctaaggtgcataaccagtaccacgacacagtgcatggaaatcagcgagcttctctagaaatttggcaaaacaatttttagaccgatgtgtattcttgcactgctcacaaggaactaaagaggaactcctggctgcataggacttatgagcagcaaccaacacactgtgagagccagaaccag

SEQ ID NO: 34786 - DNA, 489 bp, Zea Mays
gcccaactaggccgagtgggggtgggagcgtggcccagcctgcctgcccgcggtacaaacgacagggtgatagcatgagggggccaggcccgtatgtcggtgggagggggcgatggtgtgagcggggaagtggacggacacggttcaattgaacttgatcgatgctggtgagcggatcgccgatggttcctcgttgacgctctgattctctggtcagggagggacaggagcacaggggtggcttaccgagcacaattcacaaggtgatttgttcaatggggttgcgagggaggatgccatggcgaggtggtttgctgtcgtggctcggctattcgacggcgagctctagagcttgatcatggtcggggcgagtggtgtggcgatcggggtgagctggtgatgcctctagggggttcaattttgcacgggattcttagtaggggggcgaggatggctcatggatgatagtgggcggtgatgcttgctttg

SEQ ID NO: 34787 - DNA, 397 bp, Zea Mays
gggccagagccgcaagcatacgttgaccacaacaggacatgtcgccaggagcccgagcgatagctgtagacacaattgtatgccccttttcttgtaataagtgtatcatgctgtctaatgggacgaggcagctctagccagaggcgacctcatcaccggagcctccacaatagccggtatgatggaaacgacaggatgaggcgccacatcgaatagacaaatccgtacgcacgaaaggacaacgtagggtccatgatgacgggaggaagttgtgtcgtgtccgtcaagcccgaggctataccatgggaccgccaatcattatcgcagagacgacatccatgaacctgccacagggatgggagtaacgggtgtcgctataccggaaccactacttcac

SEQ ID NO: 34788 - DNA, 393 bp, Zea Mays
tcaaaaacgttgatgctttccgagctattgggcttcataaacgagagcaagactttgctctctcctaggatgttcatctgattaccccctttgggaatgagggtcattctgcatagagaattgatatatctataaaacttatgcagatttgtggactcccaaaatttactagtctcagatatatggagatcccgggcttcatctctggtgggttgacgaaagtcatgaattttaatcttgtccccagaaatgtcttcatcagagaatccaagaatgtgagcaaaccttcggtagctcaccttgtaccagctgcctttgatatagaaatttagataaggaaagttacagggactttcctcatcggccagcttgatccaaagagtggaataaaac

SEQ ID NO: 34789 - DNA, 372 bp, Zea Mays
tcattgttgtgctaaagctattatcttttgaacaaagggtgatcttgcgttgtgaacattagttcaaagtagtctttgttgtgtctaatctctaatgtttgtttgatgcacacctctcagatcgtgccgctaaaacatggtactaaaataggtgataaaaggcgctctttgctgtttttctaggctcgtgggtaagcatggtattttataactgtgtttgattctcaatagttttagctgcagatcatctatagtttttcttcctttcaatctttaacatggggccatgggcagccattcccctgtcagttcaggaatgcatcggtctttgaggaagactgaatgtagtcttcattgtatggaaggttgtcc

SEQ ID NO: 34790 - DNA, 480 bp, Zea Mays
tcagaaggagctgaatttgaggcagcgtcggtggcttgaattgattgaggattatgatttgtccattcactatcacccggggaaggctaatgtagtggctaatgtagtggccttgccgttgattactgatctggaccatttggggatcgctttgtgttatgtcggcaccgctagcgaggagactcggatgcttattcaatcctctctcatggagagagtgcgtgcggctcagcagcaggatcgtctattgcaggaatcaagaaagagggttggtgatggtaaaccgcgggagttcaccattgatgagaatgatttggttcgtttcaggggtcgtctttgtgtgcctcagaaatcagaggtgaagatggatatcttgagagaagctcataaaacgccttacaccgttcaccatggtgaaaccaaaatgtaccgagacttgaagcaaaacttctggtggaagcggatgaaggttgacgtttc

SEQ ID NO: 34791 - DNA, 679 bp, Zea Mays
gcctgtcttcctatgactccaagattgcagatttttggcaagcctccgcagcttgtctgcgagcctttgtaaagggcaaacagccataatcggctgctcccaggactgctgcacaacctccataaagccatcaagttttggccaaaaactttcgaaatgaaagcgacgtttacccatgaaggagtccctcaaacccagcaataaagggcaatgatctgaaatggaagaagccaaagcatgcagaatgcaatctgggaacagctggtcccaatcagtggtcacaaaaacacgatctaatctgacaagggttggcgcttcccgctcattagaccaagtaaattgtctacccaaaagatcaatttccaccaactcaagctcattaagaagacgacgaaaacggcccatcattgccctgtcaacattttgattatttttgtcttccactttataaatgaggttgaaatcccctccaacaacccatggtccaacacaggtaaggcgaatgctacgaagttcttgcagaaattgcaccttcaagatgtccgactgtgggccatagactccagtgaaccaccaaggggggcccctcactctgctggaactgaacagaaacagaaaaaacatccacccttgatgcaatagccttgcacacatatgcccttccaagccaccagaatgc

SEQ ID NO: 34792 - DNA, 361 bp, Zea Mays
aacattatcatcgatggtggaataaaggtaaaccctaattagtgtgggaaaagcccccgagtttacagaggatggccaaggtaccatttggttcagaaatagaatctatgtaccttaaagtgatcaccttcggtagatggtcttgaatgaggcccatgactcagcttattccattcaccccggaagtaccaagatgtactaggacttgaaggagaaatattggtggcatgacttgaaaagagatgtagccgctcatgtcgctctttgtgatgtttgcgagagagtgaaagcagagtatcaaagagccatccgttttgcttcaacctctgaaagtgcctgaatggaaatggcaggaaattag

SEQ ID NO: 34793 - DNA, 281 bp, Zea Mays
agtttcagcattgtcacctgatattgcagcattgttggatcagttccctcaggtggtttcagctcctgcaacattaccaccccctcacccctgtgatcatgcaattccactggtggcgggagctaaacctgtgagtgtgagaccctacagatacccaccggcattgaaggatgaaattgaacgtcaggtcaactctatgttgcaacaaggtatcattcgacctagttcatcctctttcagttcacctgcgttgttggttcgcaagaaggatggatcctatc

SEQ ID NO: 34794 - DNA, 495 bp, Zea Mays
gtcttctcacaaatacggagagactgtttccaacccacgacttagtgactttgtaagacagctctcaccactgcatcaatcctgtccttcacatttgatgaattcaacatgaaaagaatacaacacaggagacacacatcttagggcatcatatgtggcaactaaaccatggacctataattctaataaaggtaaacatggttcactaagcaaagcaacagcatatttcagtgctcgcttagtaccaatatggctgccattctctaatcaccgcaaattgctacatatataggccaaacaaggcatgcaggaatatattgagtacctttactcaaatactaaaacccaacccaaggggagagacatgccgaacacattgcttgaaagtagagaaaaggcacccaaaaacaaatccttacggtcttacctccacagagagacctttactgaaagactgaccaaagtgataatggctgtatttagtgtgaaaaattg

SEQ ID NO: 34795 - DNA, 311 bp, Zea Mays
cgaggaagttgtggcggaggcacggtaaaagctaaagtcatcatggcgtcattcggcgtgggcggcttgatgggacgtgaaacggcccactcaccgtatcataagtgggtggcgtgatggtttggttaaccaccatattcgtcattgacacctttccctcgcgtgctcccggtgcttcgtctcaagcggcgtgagccccataggacgtataatttctcttgcgacgcctaaggtgggagggatatcgatgcgacggtctctctggtgttgtccgtggggccccacattctaggtgccacttcgcttccctg

SEQ ID NO: 34796 - DNA, 383 bp, Zea Mays
ggactatgtatgcattttctatgaattaaacaaattctagcatttatttttaaatcaaaaatcattttctaattcctttttctggattttataatattctggactgggcgccaaataaatcgagacacaggggcctatgcgcaatgtttaccagactcagtgcacaggatctgtggactgcgggttagttctaaactaatcgaggggctcctatgcaaagaggtctggcgaaggggtaagaacctgccttggccgtcagatctcaaatcaacggcacctgcttgcctgcgccaagatccaaactctaccgctgattatcaaatcaacgcaaccaggccatcccctaatcccgaccgctgcttttagatcctgcggtcaggaac

SEQ ID NO: 34797 - DNA, 309 bp, Zea Mays
gaataagcggaacatggagatcgtggactcgtgtagtttctctgtaattccagttcagttggcaataaggctaaaggggggccctatgaaaacaagataaacaccccaaagaactcatctttgtcagcgagacagttcctgtattctagagaactcaaccgcacacagacagaaaccaccaaatgtaggttattatgccactgtgcggcataaaactaagcaatcactcgtgtcattgacgtgttctgcatgtaccatcgagttgcaatcgttgtctccttcctcagaaaagtgctatgtggccgccgc

SEQ ID NO: 34798 - DNA, 558 bp, Zea Mays
gctttcaagctacgtttctatcccaacttagaagtacaaaatattgcacaagaatgggttaaagagagccggaggctgttctatctaagaactgccaacaatgtcacaaataacatctataagggaaacactcctctatggactggaatggtacaaaatgaactctctgaagattgcaggggtttgaactacacttatttgaataatttgagggaacgcgtatcgtccaaatcaattgtaaatagacatggtaataaccgagaactgatcgggcatagtacgataaatcagcatgtgaaatcagtgccagctccagtacgtgttgttaatgatagtgtcaagtgtttcagcatgcctagagcctctaaggtggagattccttggcctgcctattcaccagcggaggatcctttgcttgataaatctaatacagaggtaattttggagcttgaggataaagttcatgatggtgatgacaaaaagaaaaaaactgttgtaaaaaaggtggtttcacctttcccaactaaagcggccttctctgaggaatctttgaaagca

SEQ ID NO: 34799 - DNA, 622 bp, Zea Mays
ctttcttaccatatgtttctaactcacatggtcaataccaggaagggtagtggaattgatctaccccccaattgacacagtcggaggatatttagacaaccacaacaacaacaagctgagatggatcctccaaatcctccaccagccggagctgacccagcagttgcagcccagatgcggataatgcaacagatggcggatactatggcagatatgcacgctcagatgtggcaggaatgccaagagatgcgccaagatagggaggagatgcgccaggaaaggaggggacaacaacaacaagcaccattgccaccaccgccaccaccacttccaccccgggacaagcaccaggaatttatgagccacaatccgcctaccttcgccagcttaccagatccactacatgctgatgattggttgaagtcaatagagaagatgctaaacattgcccaatgctctgactgggagaatgttctatatgcttctggtcgtctgactggtcctgctgctgactggtgggattcttatgttgctgcccatgatgctgctgacgctatttcttgggtggaattcaccatatggtttagaaactaccacattcttgctagattgatgaagatcg

SEQ ID NO: 34800 - DNA, 664 bp, Zea Mays
gccgaggtaggcgacagatggtgctccgaaagaacacttcgaacgcttgatgaacagctgatggcgttgtagctcctcgaggacggcccgtagatggcggaggtgatcggcccacgtgctgctgtaaatgaggatgtcatcaaaaaataccaggacgaaccgtcggaggaatggccggagcacgtcattcatcagtgcctggaacgtggcaggggcgttgcaaagcccgaacgccatcacgaggaactcgtataagccatcgtgtgtgcggaacgcggtcttgtgcacgtcttctggccgcatccggacctggtgatagcccgaccgtagatccagtttggtgaagaatttggcgccgtggagctcgtcgagaagctcctccacgaccgggatggggaacgcgtctttgatggtgagggcgttgagggccttgtagtcgacgcagaaacgccacgagccatcgggcttcttgaccaggagtacgggcgatgagaatggggagtcgctgcgacgcacgatcccctggtcaatcatggcgttgcactgccgctccagctcgtccttgtgtgcagccgggtagcggtacggccggacagccaccggtgacgcatcgggcttgaggagaatgcgatggtcgtgggcgcgcttggggggcaaacccatc

SEQ ID NO: 34801 - DNA, 502 bp, Zea Mays
catttttgcatgtattattagctagggttcctcttgttgctcttgttgggctctcttggcaaggtgtggtccagatttagaggatcaaatgatttacacacttcctctagcaattaacgaataccatcgtgatatgggggcatatactgacagtacatatatttcgtgacgtgctcgcatgcatgcacacgcaagctagctctacatgcaagaaatgacgaaaccgccgcttgcagctttgtcacatgacattcgtccggatcccgccggcgggtgcgaatccacgcacggcagcacgatcgaatgatgaccaaacacgcttgcattttgtgtcatcacccaagggattttattcttccttcatgcggatgcggcatgacgtcgttggcggagcgttccggcaagcgagatcggtgttacggctccttgtgccaaaccggacaacccgtacgtgtcgatcatgtcaacccagccgttttatccactcgcccgtccatatctc

SEQ ID NO: 34802 - DNA, 395 bp, Zea Mays
ggccggtccagataagcctcgccggagttggccgcctgccgcgtgatggccacgtgccttgaagctttaccacgtcgtagtaagccactttaggtagctagttcatcgccggtaatcttgccacagtgaaagccacgcatctcttgcgccagtgacctcccctctctctggcggccagcgcgccattccaaaattgggagccaccatccttggacactataaattggtgccccagcctactccgctaagtaattgtgcacccagtgaaccagccctcacctccaatcatcccccacagctcccaatttgggatttcccccaattctattctctgcgccaccgtgagcgagctcgccgtggccagccttctgcaggtccgttcacgtcctcctcgc

SEQ ID NO: 34803 - DNA, 298 bp, Zea Mays
cttatgcaggaattagctatttcccttttttctttgaatcatgttcatctttgcattagcactttctattttatcagccattatatggagcaattagctatttcctctttttcttcattgaaccatgttcatctttgcattttataactgcagtgtcctggtcagatcctctgattatcactttacacatttggatgtgaaatgggggaaagatgattatgaattcattaagttttcgtttctaacccaaagctgcgatattttagtcatgggtcctggcacactcgtagagtcatgg

SEQ ID NO: 34804 - DNA, 394 bp, Zea Mays
atcacggggtgaaagatctcgccgtggatgggctggaatgtactgtgtgcgtgatggttcataagtgcacaccgacgacgtggccgagcggcaatcaccggcgtgttcgccattcactgggtggacgccacgccttaggaggtttatcgtgtcagtatgagtcgaggtgactatccaatgaccgtcgtagttcagtcgctctgcggttgccacggtagatcgccgccgtgactcattcccctatcggctgccagcgcaattcgcccaaattaaacaacacctctcatggactatataaattgagcacgccatgagctccgtagggtagtcaagcaccaagccaccaagtcgtgccctcaattgatcaccagagctcgctaatttctcatttccc

SEQ ID NO: 34805 - DNA, 325 bp, Zea Mays
atcacttttgccatgattcttactatgtgttcacttcattgtattttagatttgttgtatcgttaccataggcaccttactagtgtgctaaaatgtagcacttgtatccaaacaaccatttagcaaaagtttcgagtacctaggaacgtggtacccaaggtaagtcggataaccccttttcggtccatttgtcgagcaagtctgcgagacgagatggacaaccaagtccctaccgagcaagtctgtgaggcgagtcggacgaccaagtccccttcaagcaagtctgtgaagcgagacagacgaccaagtcctcgctaaatagacc

SEQ ID NO: 34806 - DNA, 384 bp, Zea Mays
tgtcggtcgtctctttcttgttgcaatgaatccaaatcatctgattttctggaatgtgcgcggcctgaattccgcggctcgacaggatggtgttcggctaatgatgaactctgtcagtgctgatgtgatttgtgtccaagaaacaaaaatggaggagtgttcccggggtttcattctcaaactgctaggggccgactttgataataactacatctatgtgccttctgttggtgctagtggtgggataattattgcttggagatctaaacttggtgtggttggtgctagtcgtgttgatgcgcactgtgcttcggtccagttttgcccttctgatggtgggccctggtggctgacttgtgtctatgggcctcaggggaatgacaa

SEQ ID NO: 34807 - DNA, 375 bp, Zea Mays
tcctaacaaattcttcctttttattctcaaccttactaaatctatctctaatttccatatgtttcagtctcttccgggtgggagggggctagtggcaccgtgggccaggtacgaccagctagggccctcttctgggcctcgcttggcctggctcgagggagcgtagataggcccgtgacatgttacgtatttgcaaaaatgatggacggtttcctagagagaaaaaataagctccaaacatctagagtgcaaaaatattgcaaaaacatctagatggagagaggggtggggtggggagagagagagagtgagacggtaaggaagatgccttagtgtcaatcgtaaggcgggtaaggcacctcatttttttctgac

SEQ ID NO: 34808 - DNA, 277 bp, Zea Mays
caacactctgaccccatcaaaacccagccacttggactttgaaaaatctactgtgtctgaggctgatgtacccatgatgatgaagttgggttactttggagaagctgagaagaaacttattcgttttgccggagaagagaccactccagagcccaaaaatgacgaagtagtggttttcaagagctttttcagagcgggattgcggtttcccttgaacgaaatgattggggaagttttgcatgattatgaaatctatcttcatcagctgacccctaac

SEQ ID NO: 34809 - DNA, 306 bp, Zea Mays
ggcgagaggagtgcgtgttgacggacctaagtgggctcaatgatgagtaggggcaggaaatgcatgccgactacgctccgatgacaaagctacaacacaacctgcagctatttgttgacgacgatgacaatgtcagcgatccagtgcaggaaggtgtcaggaacgaaggagtcgcaaaggatacatatattgtgccagggttgggccgttgctcacttgcttgtctaggcctagtgggcgttatctagttaatgtgtggtctaagtttgcaatatggactgatgtataaatacgtgtaaacaacaa

SEQ ID NO: 34810 - DNA, 677 bp, Zea Mays
ctcccttgttgcagcttcagttaacccaaccacttgaataggcttactatgtctacaaaactcaagctcagttgcagaatccttggcttcaagctcatcgtcaccaatgatctcggcactctcatactcatagttccacagttcaggttcgtgttgtggtaatccgaaccttgcgcttccgaaaagcgtgacaggtggctcgactctgacctcgaaatcaaccactgctgcttctgcaccctcctccggtgcttggctgatatcatcagagggagcacaagcgctgaacacttcctcgcgcttctcgacggcttctactgtcagcagcactgcctgggccgagctggtaacggtagacattccatcagatatcccgagcaacttccagatgggatcgtcaggtccgaaccgggacagggagcagtgcttcctcacatagctgaggtccaccgccatgcacggcggcgtggtggagacgacccatttgggcttgaggatccccagcgcctgctccaactcctcccgggaggagtgcatcgacaagcagacgtgccagaccccgaactcgtcgcgcatcgcctccgtcagcaccggtttctgctgctgctgcgtcgacgcctcctccggtggcggtgggtcgtagtacgcgtaccactgcgaggagggcctgatgatga

SEQ ID NO: 34811 - DNA, 1118 bp, Zea Mays
gctggctcctcctgactggtgccttgtaacaataccggtgctccttgatactgaattaatacccacttgtgtttccaagccaatccatacccaaaatgaggtcaaaggtaggcagaggcaataccttgaggtccagagaaaactcacggtgctggatagtccaaaccacttgagacaccatcgagacacactgcatggcactgccatcagccaccgttactgaaactgcagcaggtaacaaggtgaggttgctcagtttgtccaccaagttctgactgatgaacgagtgagtattgcctgaatctatcaggatgttgatcatctgttgctgcataactcccaacatttggagagaccttttggctgtcccacctgacactgcttgggaagaaatagccaagaacaactgctcctcaacagcttcatcagagtgaagctcgccttcagtctcctcaatcggcaacaattcaaagacctcttgcatagcatgcagttggactgaagcagcacatgtatgacccttgaaccacttctcagcacaccggtcacacaaccccttggcacggcgatatgctcgcagtgccttaaatttgtcttccattgatcgaggtggaggtactgctgaacaatcctcgacaactcccattgtagtggacttgtcagccaccggggttgatgattgagaagttggccctctagaaacagattaagaccacccacccggatcatatttcagatagccccgtcatctcatcgtctctgccacctcctgcaaaaggacgagagagcacgcagtatccaaatcacaggggtgctgaatgagaacgacaacacgtatatcagcacgtaacccttcaacgaaacgagttgtaaaatacattggatcagacacatgttcataggctgataactgatcgaccaatgtagagaatctatcaatatattcagacaaagcagcagtttgtttgatatggaataattgtcgcaacagagattgatgctgatccctaccaaatcgaccatgcagtagattgcagaaaaggggccaactcactgccgtatattgtctttctacagactgaaaccagcatgctacggatggagaaagatgcattcac

SEQ ID NO: 34812 - DNA, 549 bp, Zea Mays
ctttgatattggatcagtctttgatgtttagtttgatattgtgtgtcttctgttgtaacatttatctatgtggggaccaggttgagagagaaagggggattactgtcaaagcacaaacagcaaccatgttctacaggcacattactgcatctcaggactcagatatgccaagatatttgcttaatctgattgatacaccaggccatgtggatttcagctatgaggtatccaggtcccttgcggcttgccagggtgctcttttagtagttgacgcagcacaaggagtacaagctcaaacaatagcgaacttttaccttgcatttgaatcaaatttgagcatcattcctgtgattaacaagattgatcaaccgactgctgatccagataatgtaaaggatcaattgaagaggttatttgatattgatccaagtgaagctctgcttacttctgccaagactggtagaggccttgaacaggtattgcctgctgttattgaacgcataccttccccgcccgggaaatgtgatgcacctgtacggatgttgcttt

SEQ ID NO: 34813 - DNA, 619 bp, Zea Mays
agtgccaccgacgaagtctcttataaattgagctcgtgactagcttcgcaatatcattgcgcacctccacaccaagtattgctcctagtcgattccctacgagctctaattttgcattcgccccaattcagttcaagcacacccgaaatccaacctcatcgtggccagcgcccctccggtcagtaatgatcaaattactctttgttttagttagtatgtgatctcttattgcccctggatgcaacaatttggagttttaccgaagcccatcgccggaacgcacccgtgcactgtcaaacaccgccatggcaccccctccgtcgccccacctttccgctcgtgtctagcccaaaatttggcgtgtgtgtcatctctagtaaacccaggaacctttctctagcttcaatttagccagcccagccctcgctgatccggaacactttgatccacttaatcacccgcgctgacaccgtgggcagaagggtgtagagcttcaattcagaaattgagtgaggggaaaggtgcggtaggtagctaatttggttcctgtcgcttgagaactccagtcatggcgttatccggccggaattggctcgccggggtgcggcgagagctgttc

SEQ ID NO: 34814 - DNA, 275 bp, Zea Mays
cctaaccatctcaggaacccatttgatagactactagataccactagtgttccccctccaaaaggtccttagccacccaaaaaacaaaatcccacaaacagactccacctaagagagagagatgagatttcattgtgattattgtgagagggagggtcaattggctgccttttgctttaggaggaagagagatgagcggcggggttctaagttgagcagagggaacatgaaccacccctctcatggtgttcatgatcctcctattcagagacatc

SEQ ID NO: 34815 - DNA, 323 bp, Zea Mays
gtcaacagtacgctccttgcgcggcggttcaccttcttcgcacttggagatcagcgcgccagctatatgacttgtggggccgggcccccgtgtcataggaagggtactccggtgtgcatcgggggagacttcccgtgacgtttcagggtgcgagcgggggagtctgcctttaaaaaggggttcatccctcgagtagcagccatgccttgcttctctcccactcgatgtgccctttcgccttcgagttctctgcgcccctttaccttcaaggtctctgctttgcattgccgtagtttgccatggccttgtaagcttatcccgag

SEQ ID NO: 34816 - DNA, 374 bp, Zea Mays
gctgaataggacctcgggtattagtcacccgaaggagacctgaaggacatcttcgcaaaagactcgcactccgacggcgacaactaggcggaccatcagcaggatcccatgtcccccggcctacggagctgaagcctgtcttccttcggaaacccatctggattcccaatgggtccagctttctgacaggttcatccaggaatgaccacagccaaaggcggggcctccttcgtcaaaggcagatgggaacctagggtcgggacctaatcctacaaaggtatcaggccaaatcaaggctctgtaacactcccccagctgggaaggacctttcatggtaatgggggtaccccgacccaagggcaactgtctagcta

SEQ ID NO: 34817 - DNA, 369 bp, Zea Mays
aaagacatgggctatttgttaaaaagacactgccgaaagggtacgggtgcacgtgagccgatcgatcaacgatcgagggcccaaattagatatgaataggtattgcacttcgatcgtaggattcgagaacaacagtctagattgttattacggctagattccatctcacgtgtgcacccacgatccaacgaccatggtctaaataccagaagaggtatcacccttttctaatctccaccgtttgtcgctggatcgatggtaacacgctcttcccttccctctccgttcatcctccgcggcaaacaggactcccacggcagcgccctagccggccaacgtgatatcacaccacgatgaaccaaacctgac

SEQ ID NO: 34818 - DNA, 445 bp, Zea Mays
ctggttgtctactatcatacagaagggatcactaaaaccctatacaatatgttctaagtgtgacctgtgcttcttccccacgtgtttaaccacactctgttcttcagcctagacactactaaaaagtattggatgtagctattggtataacaagtgggttttttgacatgtgtactgtggagcagtgtcaaccacgacactaaaggtaagtagtcatgagctggtttgctctcttcaatgtatgcagctgctatacttattggctggcagagcttaagccagccaactcggccagctgcaatggcaaatcaaatcccttcagcacattaggcaggacagaacaagatttatttaaaaaaaagaggggaaggggctctgtctcagcgatggctgataaaatcgatgatcgatactatttgagatagaaacatcaagtacaaatagg

SEQ ID NO: 34819 - DNA, 491 bp, Zea Mays
ctggacggtccagtgacgtgctcgaacagtccacgtgtatagtcggacggtcagaacatctctactcgccttggcgcggttttcggtggctcgtcgcaagggacgaagccaaccgccgctaggccggatcgttcggcctcagacctagactgtccgatcgtgcgcaggggcatgggttgttcccatataggtagcgaaggatgtggctagccattataggagttcatcggcatcccataaaggggctaggattgggtatgcccatttgcagccaatgggtcctgtaggtcttatttagtttgggcatcgtgtgatggaaaactggtaatagtagatttatcaaaggcacgtgctggcctcctatagtcctcttgtacaccccccctaagatttgttgcgtatgttcccgttgtttctctatgtaagatcgaagagcttggatgtcatcaggtttacttacagcgggtatgattgtagcaggacgaaaactc

SEQ ID NO: 34820 - DNA, 353 bp, Zea Mays
agcccaaagatcaaaggatctcgtgtgctccctgcgcctcgagcgttcctggacatagtgaatagcacagctctttcccaaagccctagcagccacctcatctccccagcagtgaaccggaattccctccactctgaccttcactttgaactcaaagttggtcttcctggcgtagaactcctctgactagtccccaaagtggaacacccgaccatgataggagaccgacctcctatctagcgcccattgcttggttcttgactcagagaagatgataaaaaattgctctggaaagtgtttgacaagttgatactgaccatggtgaagatcaaaagcctctctcagcatatccc

SEQ ID NO: 34821 - DNA, 430 bp, Zea Mays
ggaaaataaaaagaaaaaggtcaacatgctgtttgggccggttcctaaccaattcggcccactacccatgctctccccgctagcccatcgccaccgcgcccggactcactagcgcgtggggcccacatgtcggtttcccgggcaactacgtactcacccgcgcacgctcatctgtatcactgtcaagtcgggcccgtacgtcagccagggcacctcactcttcctttccccgcatggcttacaggtgggacctgcctgtcatctctatctcttcccccttcttcgctgtgtctgtttcgtatccacgtcaacaacccgagcgccatgcgcggcttacttccttgcttcgcgcgagttaggccacgaccccgactccgtgggctcggtggataaaagccgagcgcacgcgctccttctcccctatcccctc

SEQ ID NO: 34822 - DNA, 599 bp, Zea Mays
gaatggattaccatcctttttagcacggcgagttctagggccctgataaatggtgttcaaggagaaagcttcgaccacatgcgtggggtgagacaaggagaccccctctctcccatgttgttcatccttgcctttgacccactgcaaaggattttagaccttgcttcagagcatggcgtcctgacacctctccctcttgctgcagctaagctcagaacctcactctatgctgacgacgcggctatcttcatcaatccaacccgtaatgacctgcaagcggtcaaacagatcctcaatgcgttcggagctgccacgggtctaacaacaaattttgagaaaagctccatccaccccatccgttgtgaaaatgtggatttgtccaacatcctccagccgttcccgggatgctgcaaaaccttcccttgccaatacctcggccttcaactccacacccgcccactccaaaaaattcatgtccaaccactagtggagaagatcggacaacgacttgccggatggaaaggtccactgcttaaccgcgcaggacgcctcaccctagtatcttcagtgctctcctccatgccgatctaccacctaac

SEQ ID NO: 34823 - DNA, 552 bp, Zea Mays
ttcggttgcgagtttggggcactggacgcgccagcacggtactccggtgatggcgctgccgcggggaaagctctgcgctgtcgtctgcgtgtagtcgggtggagacgatggtcttcggaccgtttatctcgcaggaacggtcaggattagattaactgggtaccggttcgtctgatgatcggtgtccgttggatcgaccgtgggtggcacagattggatctggggatacccccttcaacgattgatcctgggtcgttgatcgaaacatccatggcccgggttagattagtggcgtgagagcatctaaaccgtggattcataatctgggggctgttatcgcatacccgttcggatttatggcgttatgatcgtggccgttggttcagatctgacgatccatatccactgataccccttcgacccgtacaaattgctaaagagcccctcggcttgttccgaataaacccaccgtcctccgcctatgtaaattaattgcgattgagccctgggtatttataaactagcccctgtactctttagaatttgcaacag

SEQ ID NO: 34824 - DNA, 801 bp, Zea Mays
tttaggatttttctacaatttataacaaatttcccaagttcttctgaaaaagaaaaagaaaaagattcaacaggactgggccggtttcagcccaggcgacgcaatccagagggaaaggcgcccgcgctggcgactttgcacaggggtccccgaggttttggctaactgaaaacgagttcctattactgtttcttgtgtcactgacagattgcagataagccctccaccttctatctcttcgcagacccaagtccacgacggcgttcacgcgcggagaggctccggcgaggtcctggaccggccgattggggctatgaccggcgctcagctttggcctaaaccaaattcactacctggagaacgtttcccctaacctaattgcacaaataaccaactactgagctctggccacggtgaccgaggacaaggcggcaagatcggcgtgttcccggcgaccagaggacttctagtgcaattgcgtgggtcggtgagcatcacagagttatgagaaagctcaaacgagggagagaggaggatgaactgaccggaaagggggctgcccgcggtgaggtcggtttcgggtggcggaaacccgaattgggggaaaaccagaattagggctcgctggtgatcggctgggggcaatactggttggggtggtgcgtgataatgtggtggagctagccgcgggctcaatttatagaagaagcgagcaaaggtcgtgaatttgggcgctgacgcgcggcggtcattccggcgatcaacggagaggctagaggaagtcatggcgatgcggtggcg

SEQ ID NO: 34825 - DNA, 965 bp, Zea Mays
attggaggaggttgttgaggttccgccagcatttcctgtgcttacctactcactcacaccgatagaccagctccatttgtgtgtcgaccacagggagtactacacaggtagacttccttacttatatactacaaagtttaagagactataattttgttgtattcattaattggatccaatacagatgccattggaattgtcacttccatctcggccgtggcgccgcaccgatccagagggcaacatacaaccagctctaagaggactatttccctgtgcggtgtcgggttcgttatacatatctgttacatttttttagccgcgtagggatttgtttcctctaccttcatatacatatgcttcattatatgactcttcctacatacttaaactaaaaacagcaacaacagttcggtaaatgttgttctctggggtgcgcaagctagcttattccctggagaacagatctacaacgatggtcagtcctctccacagatcctgatgtttgttggcacacttgtcaagaaatacgcgggtatactaactttggacttttgcattaagtgctttttgatagttgggacctaatgccctttgttttagatggactgtgcttgtctggaggctcaccctgtaagtggtacattaatcctgatgttcctgaagcaggtgccctcatggctaggtaatattctactatgcctgctgcacgtataagactgttgtttgtcttcgctctgttctaacttcagcttgactcattgtatgtgcaaaccagtgcgacgaaagcacatagtcccattaagtggaacgaaattctatcttcgaatcagcctatgtctcatgttcctgaggaacagaaaatcgcttatatcagagatctgcacccatttgagaataaggtatgttccatgtttcattcacttagccgatgttgccttaccaactgccatggtcttctgtta

SEQ ID NO: 34826 - DNA, 486 bp, Zea Mays
cgcgcagtgcacagttgataaccagatgagaagtggtgttgcgattgcggggttctaatcgtgttgattggaagtcggatcgtctgtgtgacatctccaccaaatcgatagttaccttcacctgacggaagatcgggcacccccgttcctatcaagtggtattcaaagactcaggtattaccatcaggcttaccctagtttagtttaggtttttttcatcctataactccagataattgccatacaaaaaaatttccgctgtcctagaacccttgtttagcctttgcaatttcgttttcagtttggctttgttcagttcgtgtccgtggtcgagtcgtgttgctggtttagggtgtatcttcgtcgtagttcaactgccctcgctagccgctatcccatccacaattacccagatcacaagtcgatccatccattaatcgacttgccctcgctagccgccgccgcgccagccctagatagattgca

SEQ ID NO: 34827 - DNA, 409 bp, Zea Mays
gtgttcacggcggcgcggagagtggatttggggggattccaaattagggcgctacggtggatgatcggaggcaagggtgggagctctggcttcgtgacaacctaacggagctagcggcacactcaatttatagtgtccgagagcggtggctctgaattttgaaggagaaggctggtggccggagagagggggtgagtcaccggcgcaggttatcgtggctttcaccgtggcaaagccaccggcgatggacggacttactgctatggttcactacgacatgttaaagctactaggcacgtggcgcacgaacgataggtggccaacgctagcgaggatcatctcggccgggccgcagaccaagtgggtacggcgactgggcggcttgatccatccccctttcagatctttt

SEQ ID NO: 34828 - DNA, 334 bp, Zea Mays
gttgatgttgaatgggcggctgggattaggccggggaaagggttcggtcggatctgataaccaccgttgatgtgtggatcgatggttggggattgaatccggcttgattgaatctgggccgaggatctcgagatcaatggtgctcggtgcatcgcagttcacataaggcaagttatgatctgggccatcggtttgtgatcgtgcagctcaggtttgatcataccccttcgtcgttgtcattatacttaagagaccccggaaaacatgctattcaacccgccatccatatgtgggaatctcgagtcttggggatttttgcagatctgcccccgag

SEQ ID NO: 34829 - DNA, 458 bp, Zea Mays
gaatggggggtcatacccatacaacaccttgaacggagagcatcccagtgacgagtgatgggcagtgttataccaaaattcagccaagggtagccaggctttccacttctgcggctgagcatgaacagcgcaccgtaaatacatttccaaacattggttcacacgttcactttgaccatcactttgtgggtgatatgctgtgctcagactcaatttggtgcccatcagcttgaacagttgagtccaaaagtgactggtaaatatcttatcacgatcactaacaatggacttgggaaggccatgaagcttgacaacctggtccaacagaatctgcgccacctgtgctgcagtaaacggatgtttgagggccaaaaaatgtgcatacttcgagaaccgatccacgaccaccaagattgtgtcgtaaccctcagatttcggtaatttctcgatgaaatcca

SEQ ID NO: 34830 - DNA, 442 bp, Zea Mays
gtcgagaggaaggccgaggggattaggaccaaagtaactcagatttagtggttaattaagtgatgcattcatctatagaaaaacggtagctctaatctctattaatggcggacgtaactgcagcaagaagaagctgtcacctgtcacgagaaagctccggtaccgtctagagctggggaacagtcacggcgaggtgtttgtgctttccactgagcagagcaagtcagcgcgggccacgaacgtgtgcgacacaggaccccggcaagcaacaggcgaagaacaatagtgttcgtgcgtggtctgtagcaggagatttaagcatgtcttggcaaaatagagctgatatgcaaattaaatgaatgagagaggaaggaaacgaaaaggagtaggggagaggccggtcgggctggcctggggccaaacggccgatcgtgcgggcgtg

SEQ ID NO: 34831 - DNA, 344 bp, Zea Mays
gcgattgcggggttctaattgtgttgattggaagccggatcgtctgtatgacatctccaccaaatcgaaagttacccctcctgacggaagatccataacccacgtccccattaagtggtaatcagaggctcaggtattaccgtcaggattaccctagtttagtctatgtttttcttcctataactctagaaaattgccatacaaaaaaattctgttgtcctagaacccttgtttagcctttgcaatttcgttttcagtttggctttgttcagttcgtgtctgtggtcgagtcatgttgctggtttaagttgtatctttgtcgtagttcaactgcacctttgccg

SEQ ID NO: 34832 - DNA, 442 bp, Zea Mays
gctatagtgaccttgccgtgtgtctgctggtctcctccatggacgtacggatcatatgcacgcacgcacgcacgcgggcggagaaccgaggtgaccatccacgcgcgcgggcagtatagtgctctgcggaaacgggccggaaaatcaatggagattacggggtggaattggaaaccgtaaccccccatagtcgccatcatcgatccagctaattaacttaagtaggcgacgacgaccctgcattgctagcgatatatggcggctagctggtctgtcgctcactccacggctgcatgcagctgccgtgcgcgacaatacaaaggtgaccctgcgcgctgtcgtcgtcggagatcaggcatgtaggttctgcgaaacttcttccagccgcgcgctgtagaaaagatggacagtgcgtgcacgcagtggcagtggcagtggcggc

SEQ ID NO: 34833 - DNA, 409 bp, Zea Mays
tgaatatctaactgattcgacacataaagcaattttgaagttcaacattcagactatttctttagaacatgaaaatagttttacacagtttaggactatgttcttaacacactaaaaaggtgtttctccataatcacagcttgtgataatcaatggggttagtagtttgtgtgtgcatgcattcagaaaaatgtaaagccgggaaatagaagtgctcgattacctgaatagctctcacattgaagtgaccaaggtccgcaaacattgcctcagttcctgttttacaaaaaatgcaatgcacattacatgacttgtggttaaaattatctatcggtgccattatgtaagaccaatttttctgccaaaatgttaagttgatctcttagggatcagggtaattgttatattg

SEQ ID NO: 34834 - DNA, 375 bp, Zea Mays
ggaaggtgaatctgaagatgattacagtgccctgccatctaaacccagccacctggagtttgggaggtccactgttaccgaagatgatatgcctaagttgatgaagttaggctatttcagtgaatccaaaaagaagttgattcgctttggcggagaggaaattactccgaagccagaaaaggatgaggtggtagtctttaaaagcttctttaaagcaggattaagatttcctttgaatgagatgattgcgtatgttttggagaagtttgggatttatcttcatcagctaactcctaacaccatcgttaggcttaacgtctacatctgggctctccgaagccagggggcagaaccgcttgccgaaggcttctgccg

SEQ ID NO: 34835 - DNA, 505 bp, Zea Mays
tgagcatggatgcaagggttaccaccctgtgtgatgagttgtgcaaattgaacctggaagttgtttcttctggcggcttaaactatatctcggtggagcccacattgcaagagaaaatagtcagggcacagattgaagacaagggtgttcagattgtcaaggaaatgattaagcagaaggcagaaaaatacaagtgcttccgtcaggacaacaagggaattttatggtttggagatcgattggttgttcccaaggaccctgagctcagaaagaagatactggatgaagctcatctttcaaaattctccatgcacccaggtagcaacaagatgtaccatgatctcagatccttatactggtggaccaggatgaagagggaaattgccaagtacatatccgagtgtgacacctgccagaggatcaaggctagtcatttgaaggcagcaggccctttgcaaccccttcacataccatcatggaaatgggaagacatttgcatggactt

SEQ ID NO: 34836 - DNA, 637 bp, Zea Mays
tatttgtatccagagagactgagtacaggagaggtccatagatcacaatgaactaggtcaaaagcctgctcagccctagaaaaagaggtgggaaaagggagatgggaatggcgaccaagttgacatgcatggcaaaggccctcaaaatgtccctattacaagaagattctaaagtgctggaaagcttgatcatgacgtcaggtcctgggtggccgagacgacgatgccaagtggtggaggtggtggtggagaccatgatgggaggtggagacgtgctggtggacgatgaccggagcgtgtagaggggatcgacgctgtcacatcgggcgagaggggtccgggtggccagatccttcacagaaaaaccggtagggtcaaactcaatggaacaagaattgtcggtggtgaaccgacagacaaaaaggagattgtgagtgatgtgaggggctactagaacatcgttgaggtagaacggtccagagagtaccaaggcacctatagaggtgaccggaagagtggaaccgttccgaacgacgatcgaggtagggtgtgtgggaggaggtggatgtgagcgagagagcatgcctgtggtgggggtggtgtgataggaggcatcaaagtcgatgacccagtcaga

SEQ ID NO: 34837 - DNA, 412 bp, Zea Mays
ggcccaaattctatcgagcgaaggggtatgcgcggttagatcggggccgtccgtggccagatccacggcagcgtgcctgatcccccacctccagccaggaacggcggcggcgtagggcaagccgcggcggtggccatggttggatcaagcgaggagctccacccagtggacaccatccaattgaaacgaatctacacgttgctgagactatggcgagcaggtttaggacatacttacccatagttaggacgtcgaggtaccccgaccacgggcgggggcggatccatggcggcccacgaacgacggtgaggaattccccgataaccagccggtttctaatcccagcgccgcaacgagcatgaccccgagcacccgacgaagccccaggacccatcttcgtgctccaaacggc

SEQ ID NO: 34838 - DNA, 288 bp, Zea Mays
caaaaacttctccatcatatgaatatatatactctatgttgcgatccggatagagagagaatataactgcaataaactccttgttgttgagatatgtatatgctgcttgctgctacacaattgctactacctaggcagtcgtacgttacaacaacaacaaacagcagcaaaacttgtgtgtgcaccatgaaacccccgtgttccatgatttttgggggcgcaggtttagcatggacactagctaggctaggctaggatatgttttgggtagggtccatatatatatac

SEQ ID NO: 34839 - DNA, 667 bp, Zea Mays
gtgagctaccaggggcacgagggaggctagaacaccaattaaggaagcttgaacgaacttgcagaaggctggccacggcgagttcactcacggcggtgcggagaactgaattgggggaaaagggaattcaggcgctatggtggctaatcggaggcaagggtgggtgctctggcttcatgataacccaacggagctagtggtaccatcaatttatagtgtccaagagaggtggcggctaattttgagatggcgcgctggcgaccggagagaatggaagtcactagcgtaggttgtaccgtggcattcaccgtggcaaggccaccgggcgatggacgacttgctacaagggttcactgtgacgtgtttaaacctcccaggcatgtggcgcacgatcagtaagcggccaacgccggtgaagatcattccggacagccacgttccaagtgggtacggcgagctcaacagtggctgagtccgagccaatctgagcgttaagatcttttactcccctcagttatccacttgcgctgggcacaaatcgcggcggccgacgcgaatccgggcgcaagatcaccggcggcgaggggtgatgaatctggggatctttttcagctactgtacaatgggaaactcattcagagcccctgaccgagcataattgggggcg

SEQ ID NO: 34840 - DNA, 455 bp, Zea Mays
ttgccagagatgcgctagagaccaaaagcagccttcatctctaacacaactaattcagcctacttggtcattaaagagatgggggaatgaatttgttgggaccattaccaccagctcgagggaacttaaggtatgttgtggtagcgatcgagtatttctccaaatggattgaagccaaaccattagctacaataacattagccacaatttagaagttttttggcaaaatattatatatcgcttcgtagtgccgaatgctatcacagtggacaatggagcgcaattcaactctaaagctttccgtattttctgtgatcaaatcagaacaaatatacattttgcatcagtaaggcatccagaatctagtggcctggtggaacgaacaaatggtgtcatccttatagggatgatgaggtcaatcttcaatctgccgaagggcaagtggccagatgagt

SEQ ID NO: 34841 - DNA, 883 bp, Zea Mays
gccacggctggagctcccgagcgacagggacacaattgaacccttaccgaacacttcacccaaatcaatttcatcgttgggactacgaattaaccggtccatggcgacagggcggatggttatagggacgaacacgttccgaccaaacgacggcgaggatgaccaaattgaggctggggaaagtttcacggggtcaccagggtctatgtacacactttggtttgggcagaacaagaaccgaagagcgggtcgacggtgaggggggtcacgggggcgttcttcagagcaggcacgtgttccggtgaaaggcttcggccgaccttcaattggccgcttccgagagaaataagagatcaaagaccgactagaacaggaagaaatttgataaatactgacccgaggagcgatggccacgggtgttgcttcacggtggagctaagaacagggagaacagaaatttgcggactgtgtacgctctccggttaaagtgagtcaattgcacaggcactcgtgcttgcgatgtggtgaagaagcagcgccagggctcaatttataggctgctggacggagacggatgaggatcacagatctcttgatcgcgctggcgagcataccgcgcggcggattccggtgatggcacggtggtcgccgtttaaccggagcctgccaccttagtgatttgctgccacgttgccgaggatatttaccgcggctgccaacccatcccgaccgccgtggcgttcttatcgccggcgagggctgacccttatcctcgccgtgatttttctgaagaccgatgaacagtgcgcctgactcagtgaagagcttatctaacagatcaacttggagctaaattttctctcaattctcaatgacaactcat

SEQ ID NO: 34842 - DNA, 590 bp, Zea Mays
caatttctggaaagtccaggggtctcggggtagaattcctaagacacagggaacaaccgaggtggatggcgggttgttttccagaaaggttatggactcatacgcaaaatggcatggtgaaggggtacagatcgatcttggccgcacaattggcaatccaaggtctggattagatctgcaaccatctgaaacatggtgcaacataggcccttggatatggatcaaacagctatggctcctaagtcgcgtggattgcatggtgaccgctcgattaaggatctacggcttggactaaatcgcccccaagccgaacatccatatgtgataaatgccacacgctggtcatccaacggtcgacgctaaccaaagctttcccagctggccccgacggcgccgcccacaaactacggcggagcttcaccggcgaaccatgcgccccatgctctagtgctcggtttctcaatcttttaggtgctaaacgatgtgcgaggtgaaaccaatcgacgaggcagggtctaaccgagggtggcggcgcagagaacccccaacacgaccgactacggatccgcggcggcgctaaggttcccgcg

SEQ ID NO: 34843 - DNA, 388 bp, Zea Mays
gtttcccatgtagcctcatcttctgaatgatgattccactgtatcttgtaaaacttgagagtttttcttcgggtaattatgtccttttgatccaagactcgagtaggatactcagaatatgtcaagtctggttctagggcaacatccgttacgtcaacggttcgatcgagaacccgaagacacttcttcaattgagacacgtggaacacattatgtactgcagacaaggtttcgggtaactgaagtcggtatgccactggtccatattgttcaagaacaggaaaaggaccaatataccggggtgcaagcttccctttaatcccgaaacgtgatacccccttcatcggtgaaactttcaggtagacataatctccaactagaaagtaca

SEQ ID NO: 34844 - DNA, 421 bp, Zea Mays
tgtggatgtacaagttatacacccagttatctattcaggacagccccctagttgatacctggcctataggttcatccgtccccctagcgcctaatttccagacaccctgcctgtgtgtcaacttatcatggtccattatatgtgttaggaaccacctcaccatcagcatgtttggtaagtagcgtttggggagctaaacccagactgcttgatttctgatgacccaagtttggccttctgtagtttagtagctttgtcatatgactgtacaattctgaacagtgtttactaggagttggtatgacattggctgctcaaaatggtctcacacaaccataacaggatcatacagtttgggtctagaaaccttgtccattgtcatgggtacaccaatactcaattagtttctcgtccaatcctg

SEQ ID NO: 34845 - DNA, 401 bp, Zea Mays
gcgggacgtcgagcaactcctgacttggggcactccggtcccatgtgacaaaatcccccattcccattcctatcgtgcaagccatcacacactccggacgttgggcccacattgcagactacgggcgcccacgtgacaaccacccttagttttgcacacaccggacccacgtctgctcgcgcaaaaagttgcctcaatttgacactggcaggagcatttggccacgattgctttctttgaagaaggaaggcttataagctggtagaagctatgttggctggccggtatggtcataaaaatgtgtaagccgtgacgacgacataggtcgcgtgggccgtgtttctttggtgcggcctaagtagctgccaggaggccgcacgcttcttaccctgaccaagctt

SEQ ID NO: 34846 - DNA, 368 bp, Zea Mays
ggtaaacgagcatgggcgttggcgggtatttgggagtgggtggcggctagattacgcgaaaggagagatagggttttggtctcgtgagtgcaggtgggccaccaattttgcgcgcaacaggccacgatgccacaaattgcacagtgctttttatggcgactgacaatgcgatgctataggtatgaattactgactcacaaagtaacactattcacatataaatataacgactaacactcagttggaatatagatatatgccgactcaccgtctatggcaatgtatatcgactaacaattcgatgctaattctctatgtatagcgacagtcgtccgacactaatttggtgttgtggtatagtggatgga

SEQ ID NO: 34847 - DNA, 349 bp, Zea Mays
gatttggctgctgtaacgtttgtggatggaaatttggaattaggttgcccagcgtcgcatcatctggtatgcttgttcgtgccctccatggaattgattgattcatggcaaatgtgctgccagtgccagtgctgtgggcgagggtgggtttctcatcgtcgctgggccttgtgggctgaatgtgacaggaattgggcgggtgtgtactgtattattggacggggatgctggaaatggccctcgcgcctcggcctggtgagctacatggccatgttccctagggtaggctttccattagtagcaagcatgatgcgatgattgcgtgctactcttttccctgctgttgttg

SEQ ID NO: 34848 - DNA, 653 bp, Zea Mays
atttgtagaagtaaatatgctagtaacaataattgttatcaatgcaaacaaaacaagatatattggttggggatggaaagagtagattgtagtggaaggaggtcaaagggtgagggacgagtgctcgtaggtgacacatggtgcccgtgcggtgggatgttgggcagtagcgatgatgcaccaccatggctaagaggtggttttgtccacaatgaggtggaggaactagagtagcaatctaagtagaagtgttcttgtggatccactggcattactgaggcgttgatgatagtttatgggataccaacttcaagtagtagcatatatgtagtaggtggaggtcaattgaagttatgtatctacgatcctcatagagaaggatgtagtatggtatcccgcggcatacaagggtggtgcttgcaagtggagttgtagtgaggtcaaacaacttgttgaagacgatgttgaatttggatctaggtcgaccggctatcgtcttgctgggttgcttggcgggcaggttggtcggtagcctcgcctcgctgtgttgcttggtgggcaggatgatgatagtttatgagataccaacttcaagtagtagcatctatgtagtaggtggaggtcaattgaagttctgtatctacgatcctcgt

SEQ ID NO: 34849 - DNA, 650 bp, Zea Mays
catacaatgccaaagcactgaaatatgttgtgttctgaaatatgacatataccaatggttcacagattgcttagtttctccagagcaacgccccacagatttctctctgtgtgtgtttttttctctgcaggtgatatcatatttcacaaaaatacagattttttctgatattgggcccctaactaatacatccactttggaaaacaactctttctctcaccatgcaatttctctatcctaaaatataagatatgctgggaattccagaacaaaatatggggtaaaagaaatgacacatgcatcctccttaatcatagggagatattgtgttacctatttttggctttgtgattgggttgactggaggcattagtggcaggtgcgcatgtgattggggcctaggggcattgataggtgaggagggggagttaataaacctacaatcctttataatttgtgacaagttggaatgcttcagttatttcaggatgaaggagtaccattgaaaagggaggagtttcttgtcgtgtataaatatgttagtttgttttgtgcgcagcaaaatatgttacttttaaaaattatgcaagtttatttcgaccatggtgttgaaacatgtaattcaactaatgttgttggctgaatagttt

SEQ ID NO: 34850 - DNA, 356 bp, Zea Mays
gtttataccttgattgtttggcaattatgtagaaatgcatgtgttgttttgcttctatttttatgactctttagcacatttttaggatgaagaagatgtaaaagctattgctcgtttatatgcagacatgggtgaatcctatgttgacttgattgccacaggtaaatttcatggattatgctgatcaccattgaaatccttctcttgccaatgatccatttatttacttttaatgtttgagctttaccaggctcagacgattcaattcaaatagtgaacgcattactagaagttacttctcttctcgaatttgccatttcctccatgacgtttaatttctggcattgccttaagcg

SEQ ID NO: 34851 - DNA, 573 bp, Zea Mays
cttatttgtacagttaacggcgttaaatggccgaaggttataatgtgctgaagggataaaatggcattttgtctgttgaacaatgattgaaaatggcgtagcggcgaaacccatttttatgatggcatttgggcgaaacccgtatttgataatggcgaatgggcaaataactcggccatggcggcgccacaacgcccgtgacagcgacaccgtcgacgtgcacagccctatcgaaccaaggatccacaccctcccccgaatgaccccacgccaaaaggagagagtcacgaattgatctaggggcaacttaccacgtattgtgtagcagagcaccacgacgacgatgcagggcggatccatggtggagacggttctccaacgagaaattactcgcaaccacgaccacaaacccgaaaagtgagagcacgatcatcacctatgcgcaccagtgaacgccccaagaggcctcacgctagtggtagcccgacacagtgtccataccacgatgctctacagatcggcggacggaagtgaaatctagcgagcgattcgccatccccaggcacccttcac

SEQ ID NO: 34852 - DNA, 443 bp, Zea Mays
tcactaccaccatggaatcgacttcctgtttgcagccgccggtgtggagtcgacttcctgtttgcagtcgccggtgtggaggaaggggcaccataggagctaggacagtggagccggtggcctcgccaacagcgacaagaagctgcccgaaagaggagccaaggcagatagcggacgcacgagaagtctccaggtttaccgtgtacggtcgtggtcctctattataccgaatcatttatcggacgttgctggacgccgtagcggacgtatagagcgctaaatatagcggacagatccatttagcggaccttgttggagatagcctaatctccgcaagggtagcgggctagcggcggttttgcactgtaggtgatgggataaataagattagttattgactgaggtgaaataaaaaatatagttgatgatagaacgaacacgtg

SEQ ID NO: 34853 - DNA, 613 bp, Zea Mays
tgaaaaactggatgaatttgggctgaatcaggtagatagagtttgtacgccgtggcaccaatgcgctggataatagtatatgagccaaaatatctgaaggcgagcttttgattgccgcgccgtgtcactgaagactggacatacggttgtagtttgagatagacacgatcacccacagtgaaaaccctctcagatcggtgcgtgtcagcatacttcttcattcgactttgagctctgaggagatgctgttgtatgagcttggagatcacttctctttcctgcatccactgttccagatctgtcactagaattgccgaattttgatgcagcccaaagtgcttaggaggatgcccatataacacctcaaatggggatcgatccagagatgaatgtgaattggtgttgtaccagaattcagctacaggcagccactgactccatttgcttgggcaggcatgaacgaagcaccgaaggtatgtctcaatgcattgattgacccgttccgtctggctatccgattgtgggtgatacgatgaactcatgcagagttgtgtgctagacagtgcaaacaattgttgccagaaggcgctggtgaaaacacgatcacgatctg

SEQ ID NO: 34854 - DNA, 322 bp, Zea Mays
gcaaaaccttggtattgttataaggtagcagcatccacttgttcttccagtgtatctccatggggctgaaattttcaagccaatccatacccacaatgatgtcataatattgaaggggaataactttgaagtctgtttggaaggtgacgccctgtgtggaccaaatgcagtcggccaactgagtggaacaatgtagagaattgccgttagcaacaacaaccttgagtgcattgggtagtggggatagtccctgtaatgactcggcgagggtagaactgatgaaagagtgagtactgccactgtcaaccaatattcgggcctg

SEQ ID NO: 34855 - DNA, 477 bp, Zea Mays
atccgagtcatggttgttggctccaaactcacattcatatccatgtagccaatgaaacacacgtgttgtagagaaaaatgcaataggttggcagattgcacccgcataaccctaagaataggggaccgttctctggtctaatggtagctctaaactagtccccagcagttcgatccctattcagcattaagggggtccctaaactaagtgacaagctagttacataactcagatttcatgataacaatagaagcaagaatctcgagtgggggtagaaggaatgtcatgtgtaacttaaagacatggtaaagaaatcgatacataaggattgaactgagagcaaactcttcctttgttaatggatacatgagatctatgctgcaaacactaggaaccaggtttatcagggtggccctcaccaagcctgaccaggtttatgagggcgggcctcaccggactgcactatagatagatgat

SEQ ID NO: 34856 - DNA, 274 bp, Zea Mays
tgagccattggatgtggagcggacgagtgggattagaagtagtgttctgatttggggtaatgaatcggagccgtagatctcagatcctaggatcacaaaagcataccggtttagtaaagacttcaatctatttgcatccgtccgatggtgatccaacaaccgtggctagctcataacccttctcggcgtcaatttcacaaaagaacccctctgtttttagggaataaacccgccatccaggttgactgttctctgtgtcttagttattttgcga

SEQ ID NO: 34857 - DNA, 309 bp, Zea Mays
aaaggataaaggaaagaccaaacaaaggctcaaacaagacaagggctagaagcatttctacgataaaaaagtcaacacagtggaacgtgacactcgacaatgctgagaaggcaaaccacctacctgagatgagtacattgttaggtataaatctataatggatggaacatgtacctatcatccacatggtaatcatactacacaagagtgttgacacataaggtattttgcacagagagtgctgaaagagccacaccccaaggcgcctaagccaagaagcagcaagactggcaagaaaggcaattcaag

SEQ ID NO: 34858 - DNA, 380 bp, Zea Mays
tgaagatatgctgttggaaccgactgttgatggtatgatggatgtttgctctgacgctccagacgtgggattagaggtatcccgggcagtatctcgtgcatcgtcgactttggagggcagtcttcggtgtcaagaagctggtcaggattgtccgactcccatggaggtggatgaggatccttcagcctcagaggtggctgttgcagaaaatccagcccccaagggtgatgctggcggttacctagcccccgagggtgtcaccggtaatgacctggctctggtgggtagcgcgagctgtaacccagccccgagcgtgttgccggtagtgatccagctccgatgggtagtgcgagctacaacccagcccacgagggtgtccg

SEQ ID NO: 34859 - DNA, 662 bp, Zea Mays
ccgagatccaaccctactagaggtataccatcttgtaccccgtcaaatgaaaacttcattcaggatatatgtacattcgcactggttttgttcaaaattcgtagtttttgttgccaagcccataggagtttagcagatccacacttgtcgttcgaggtatgaacttgttacgttgttcatcctccgatttaggcgcctggtgtaccaaactttgtctgttccacgtgatggaaatacacgaacaacagtaagcctaacattagccatggcagcaattctatttccccagtgttgttcattggactgttcttgatgtttttaaactgaagacaatgtatttctggcatttatgtggaatgttaccctttcgtactatatgagtatgcaccaatataagccattacactgaatcacttattttgtcacaattctttgtgcttgcatggagtacacgtatgttcatgagtacactcactaaatttcatgacatgttaaattacttatgacttcgattatgtgccagatcatgtgtctggcacaacttgtgtttgactatgattatctggctcattatgtaatgttcaagacttgaacttgtctttctgtcatgacattagttctatcatttctatctgcacgtactagtttcctttctatttctg

SEQ ID NO: 34860 - DNA, 502 bp, Zea Mays
cagagatggagtgatagaaaagttggcaatgttaaatctcaacttgcactagctagggggattcttcatcaaattgagattgctcaaggctcaagggagctatcgacagctgaaatgtggcttaaaaatggcctcagaaaacatgcacttgctctagcttcactcttgcgcactattgttaggttgaggtctagactgaattggctaaaggaaggggatgccaacacaaagttgtttcacctgcatgctaaattttggaagcagaaaaacttcgctgcaaagttggtttctaataatagcatctgtaccaatcatgaggataaagctaaactggttgatgacttctgtagatccttgctgggtactaatgtggccagaatgtcttctattaatcttgatatgctgggtactcataatcatgatttggctgttctggatttgcccttcacagaaacagaggtctgggagacaatcaaacagctgccctctgacaaagctcctg

SEQ ID NO: 34861 - DNA, 522 bp, Zea Mays
cccttgttaacatagtacttctatttaattattcattgcatatattttaacaaaagacactagtgtctattattttagtctacttggtggaccaaactgaaattgtcagactaatcaggttcgtttcctaatattattttgaaaacttcgatcctcactttgtagaacccgaaattccaaaaaccagaatagatcgaactgaattacccaaatagatcgaatgcccacccctactcgacgtaccatcttaggtgtgagcggacatctcgatggatttcattgggtgacttttgcaaggtagacaggtagtctgtcgtcatcgttgtcgtcgaccatttttccaaatatgtgcacttcattgccctcggtcacccatactcgattgcgtcagtcgctcgtgatttctttgggaacattgttcgactctatggcttccccacctctatcgtgaatgaccaaaatcccgtctttcacaagtcatatgtggtgcaacctcttcaagatggcaattatcaatctcca

SEQ ID NO: 34862 - DNA, 498 bp, Zea Mays
aggatgcaagatgtactgtcctttcacccaggagcaagattggaactgatgttaatatcagatactgaacagtgtcaggtctcgatagaaccagtgggtacacacactgatcccagattggtgaccatacttcttcagtttgcagagttattttctgaaccagttggcctgcctcctaatagacaatgtgaccatgctatccctctaatagatggagctcaaccttgtaatgtgaagccttatcgttatcctcctcttctcaaggatgaaatcgagaagcaagttaaagatatgttagagcaaggtgtgattcagaagagtcacaattcttttgcctctccagtgctgctagtaaaaaagaaagaccatacttggcgtttttttgtggactacagatatctcaatgccctaactattaaaagcaagtatccagtgcccatttttgatcaattaatggatgagctgtcagctgccaagtggttcatcaaactggactta

SEQ ID NO: 34863 - DNA, 551 bp, Zea Mays
gcggcggagacttctccgcgtgtgatggatgctgttcccggtccgagtgctgggcgtaggcggcgaagggcggtggcgaagcgtagggtgagtgaggttgagggtggtcatcttcgtgtggacagggctggcaagcaggaattgttggcctcgccggctggggtgagcgtaggtgagggggagttgcgaaatctttttgagggtgaagaactaaggataatgttgtttaactatagggagatgggtatcatcccgaaggttgaaccaatgtaatgtttggtgccctcgctgcacgtatgtaactataatttgtatgatgagtctgtgtgccatcgctgatccagccgtgcccgtgggggacttgtgcatttgatctagcgcgtttattatgccggtccggctgcgcctgtaatcggtctttgcgcggatagtttttcgacgaagtttttcgcacggatgtgcctgcgattttgcgcgcttgttgtgctagtccggctgcacccttgggcgacttttgcacggatagtcttttgaagaagacttcgattttg

SEQ ID NO: 34864 - DNA, 1143 bp, Zea Mays
gccatacagtgctgccgcgcccagagcccccacggacatggcagatgcagttgtgccgtacaaggccgaggagtccagcaggcgcaccacctccctgctcaggtcaggtatcatctctcccatcccaacgatgaaatgcgcgccgatcttcagagcaaaggtcagcagcttcatgaacttactcatgtaaggtagcaaggatttcaccgtctggttgtccacttgaatcaggtcacagccgagctgatcttccactacatgcatctctctacggaattcacatagcatatgcacccgtaaggaccgcatcccaggcagtattcttgtgaccagctgtttggaccggttgtccaggctaacaagataaaacatctgtggcactttcctctcctccaactgggtgttgtaattcatcatgtagtccattttcctgtggagttcagtcaaaaggtgatactcatagtacctcaagcttgcgatttcctccttgaggtcccttattccttgttccactctcttcaatctttgtagaaccatctcaacaccttttgcaatgcctaatatggaaggatcaaccacatctgtttcggggatgatttcatgttgctgctgattgtcagggttgacagcaagttcagttgcgaggtgctgtagatcatagtatctacggtgaagaacctcatggaaatcatcatctgatagcaattctctggcatgatctgatcctgattgtaagatgatccttttattgctttcaatggcactccatgtatgctcgtaatcatacatgctttctgcaggcaatgacaaaagaatttgcttcattctcttcagaggcagctgctgtgtttggaggaacctatgcggtatgagatattttacacagtctggcctgataatgctttcctcgaacatcaaacttgaagacaggtttagtatggttgggattattaacttgtggaatatcctcaccatgtcagtaacacttttgctggagcatgcaagcacatcgacggatgactctaatgtacttcccagcaccactctgacatggatactattgaccactgtataaataagatttttctccaagatgtagagtgcaccctgttgttgtcccatgcacatgatcttgttctgcaa

SEQ ID NO: 34865 - DNA, 711 bp, Zea Mays
ctggccgagcgaaagcgccgacgaggacccatacgccgcggcgctgttccggacgatcatcggcggcatgtgcctcgccgggatcatcatttctccctctcagaacctctcgaaccctaattcctgccgcctcagtagcttctttccatttgttcactggcacatgcgtagtatctatctcccgcctcacggacaaagaacaggcggcgccaatcctattcctatatggagatgtataccttgcctgccaagtaacaacacgaccaacaacagatctagcgatcgacaaggtagcccagacaaccttcgctgcgagctgacgactggcagtgagatctagcagaagagctacatatgttcgtgtgcctatgcaaaaatagaactccgatcgatctctggctgcatgcagctctcaaggcgtgcgtgcagcaaaaactttgcaagctcagaagggtagctagcaggaggtggcgagataagccgggaggagactagcttgagaagctataggcggccatggaaggggaggcgaggaggaggaggaagaggaggagaggaaaggggaacgggcggaggtggaagagaatgtggagaagggaggaaggagttattgcgaacgagttgaggtggtgcaatccacatttatgagagggcgtatcgtaattgctagccaggagagagagagagagagcgagcgagcgagcgagagag

SEQ ID NO: 34866 - DNA, 345 bp, Zea Mays
gacttcccacaattgaagcagccagttgatgaactcaggagtgcggggaaacgagcaccaggggcactcggctgagttgttgaggtgggggcagtggcagggaaaatgaatacagactgtttgaaggggtaggagggttgacgaggtgaagaacagttttgattgaaaggtcggatcaccaacctttgtcgctttttaggcccctggttggacgtgtcacctccaactccctttgatttgcctgggtctgcacacttagcttcaactgccagcgctgtgttgacagccctgctataggagagatcgaggcaggtggccatctttcgttgtagccggtcattgagg

SEQ ID NO: 34867 - DNA, 322 bp, Zea Mays
tggtattgaaggaattgctcgtcggagcaggctgtgcgccattgtccacctcgcgtcatgggcaggcgtcaccatggtccttcccctggtaagaatgcccctagaatattcaccatacgcgtgctacgattaacttcctctggggtagtgttaggatgcctggtggggtcaattgcggggtctccggtgaatactccaccgtgcgccaaggcagcgccaccgctacgccctgctctcgggggaagatggctctattgtcgctaatctcgattttgacgacagggattagaaattgggtaccgtttcggtcggggtggcgtgt

SEQ ID NO: 34868 - DNA, 483 bp, Zea Mays
gtgatcatagtgagatggagagtggtcgtcttcgcgaggacgggactagtaaacgggaattgttgtcctcgccgattggggcgagtgtaggtgaaggggagctacgaaatctttttgagggtgaggaattgaggataatgttgttcaactacagggagatgggtatcatcccgaaggttgagccaatgtaatatatgatgcccacgttatgtgtatgtaaccgtaatttgtatgataaggctccacgccttcgttgatatgagtcttttgtgaaagacttcgatctttacgtagttattgtgctgtttcggctgcacccttaggcaacttttgcacggagagctttgtttggaaaagacttcgattttgcgcacttattattccggctgcacccttaggcgacttttgcttggagagtctttttgaaaaagactttgattttgcgcacttattattccggctgcacccttaggcgacttttgc

SEQ ID NO: 34869 - DNA, 307 bp, Zea Mays
gcgcgacatgctcacgcttacttaactcggggtgaccactataccctactaacggagcaatcggcttaagtcagtaacggcttaaggcggtgcgacatgctcatgcttacttaactcggggtgaccactataccctactaacggagcaatcggcttaagtcggcaatgacttaaggcggtgcgacatgctcacgcttatttaactcggggtgaccactataccctactaacggagcagtcggtttaagtcgataatgacttaaatcggcacagtacactcgtgtctacttagtccaacacgagcacg

SEQ ID NO: 34870 - DNA, 453 bp, Zea Mays
ttgatttcctaattttctgtacaatgagtaatgcattaaattcatggccgcccctccatctaccaacatcttagccatcggtattccatcgatatgaccatgcacgaagagcggctttaaatggttgaccgattcttttggcttagtgaaggagacctctttaggaccaaaatcgaattgagcaacgacaaattcatcgtcaccgataatagtacaatcggttgagaacataataacattaacgtccatacctgagtgttttggtgtagctaagtagtcgaccaagtcctctcccagcatgtcgtcctcctccataggcgttggtgcgttatcggaggtgttcttgcatagagcggacgatccgaacttgaggggtcggatggtccacgacatctacggacaatccaacttttatagccggactgttcatcgtaccttcagagtgctgcaagc

SEQ ID NO: 34871 - DNA, 835 bp, Zea Mays
ggattttgtatattcaggagggtgatgccaacacctccttttttcatcagcaggctagatacagaaaaaagaagaatttcattcctaagctgctcgttggtgatcaggtggtcacctcccaagaagataaacagaaggctgtttctgatttttatgagaacattttgggtagggctgaggagaggagctacactcttgacttggatgagttggccatccacaatcatgatttatctgctttagatgctccatttcttgaggaggaggtgtgggctgtggtaaaagatttgcctccggataaggccccggggccggatggtttcacaggtcgattttataaatcctgctggaatattattaaagatgatgtgttgaggtctttggatgtcatccagcgtggtcatgtttccaaattccgcctgcttaacacggcttatatttccttactgcctaaaaagatggatgctgttgaagttaaggatttccggcctataagtttgattcatagttttgccaaattggtagctaagctcatggctactcggctggcccctttgcttccctcactggtttctgtgaaccagagtgcctttgtgagagggaggaggattcatgacaattttatgcttgtccaacaaattgtgaagttgctgcataagaagaaagaaccacatatccttcttaagttggacatctccaaggcttttgactctgtttcttggtcgttccttttggaggttttaaggaaattgggatttggtcagcgttggcgggatctcctctgtttattgctgtctacttcttccactcagattttagtcaatggagagcctgg

SEQ ID NO: 34872 - DNA, 438 bp, Zea Mays
cacatccttaatgtttggtccttctttttcacaaagatggcagggcagccccagggtgaggaactgggtcgaataaaacctttttctaacagatcttgcagttgcgtcttcaattctgccagctcatttgggggcattctatacgacctccgagagacaggggctgtaccaggttttaattcaatagagaattccacatcacgttctggtggcaaacccggcaactcttctggaaacacatccggaaaatctcgcaccactggaatattgattaattcttcaactaccacactataagcctttcctggcacttcttctagagaggacaactgaattgtcagcggactttctcccatccctgtttttatctgaatagtccgtttcctcgtgtcaataatagcttcatgttgagctagccaattcatacctagaatcact

SEQ ID NO: 34873 - DNA, 349 bp, Zea Mays
cctgaaactatttggaactggtagaaagagtggttcggaaatgtaatgtttgtttctgggtttcagactttgtaagaaaaccaagtctgaatttgggtatttgatgcaacctttggaatttggtagtttggaatccatgagtgttttgagaaaggttgttgtggcaaacttgtagagtaggtattggagaacaaactctattaggtgggatgcccctaaaaccatatgaaattaggagaaaaggtggtcaaaagtggagctgacagatttggatttcagacttagtgcagcttactaaatctgaattttagtgtttttggtgcaacttcgttgctccttggtggtcaat

SEQ ID NO: 34874 - DNA, 374 bp, Zea Mays
ggaagttgcaggggataagaaaagatgccgcttcaaatgcaaagattttcgtatgcccatgtcttccatatcaatcctagcattaatactatccttcgacttcccgggaatacctagtaatgtaccaagaattgactcacatatatttttttcgatgtgcatcacatcaaggttatgtcgcagcttcaaacctgtccagtaaggcaaatcccacaaacacgaccttttcttccaacattgtccatcatttgcatcccgctttctcttcttgttttgaggatgctttcctggtctaacatccttgacactgtccaactgctgcttcaattcaacctcactaaatgcctctggattgtcacggttttcaactttcc

SEQ ID NO: 34875 - DNA, 310 bp, Zea Mays
tgggggacccagaatggtttccggaggaaggcatgcttcagctccataggccgggggacatggggtcccgccggtggttcgtctagttgccatcgtagtgggagtctctagtgaagacgtcctttaggtccccctcgggtgactggtatccgaggtctcgctcagccgcggctacctcgccgtcgtcgaccttttccttgccagggcgacgatgaggtggggagccgtccttgaaagactgctcacgccgctcgctgatgcgttcgctgacgcgttttgcgagattaatgatctcgtggcactccacgac

SEQ ID NO: 34876 - DNA, 489 bp, Zea Mays
gtctgatggtgctacaccctacctagggttgcctcccttaggtcgtggaattagaacagggcgcacaccctgtcaatttcctcgatctagtgcgggagccatgagatccagaggtggctcacaagtttttcgtggtcgaggtggatctagaggatgtcgtggaggtcgaggaagggccacagttactcgtggtggacgctctggtgtcaacccaaccactgaccatgcccttgttcaagatctggaatatgaagaagaaaatgaattggacgctcgatctccagtgataaggaaatgcatattaatttttgtgtttactaactgccactatgtttaattcagcaatactagtattgtgaactgtttgctttataatgctactggtgaatatataagagtattgcttgttcattaaaatatataagagtagtgctttttctctgccttttattgtgtttcctgtaatcagtcatatataagagtagctgc

SEQ ID NO: 34877 - DNA, 400 bp, Zea Mays
ttcggatttgtgcacggtattggatggataacgccggggaaagggtaactcatacgtggcaccatctcctgagctcgaccggagttattcaccggcggccaccgtgactcagtgagctctcgcctcgctgtcgcacatgctttgattcgcctcactgtgcctcttccttacgtggttgccatgcgttaatagcccacctcgtagccgtggatcgatcaccggaccgccgtgcctatatataggacagggagccacgacgaggtgctcgctgttcttcaagtaagcttgagtacaaccaggaattcgcactgccctctccaccttctcctaaatcgattgcgcacggtgaaagcacagcctcttacggtcctatagccccgatcccatctcccaatttcgc

SEQ ID NO: 34878 - DNA, 335 bp, Zea Mays
tgaacaccacctattttgcagcatttcatttgtctaaaatctaacagaacaagtcgaccttggaaaccaccttgcaatgttattattctttctatgctgtcgttgacacatggcatttgccttttgtaatgcagataggcttctcagcaaaacgggaaacaaccatctatgcatgcaaacagaatagaaagcagcgctaaaacatgtaggaccaaatgaatcacgacaccaaatcaaggtaacaaagagaggaacggtggaaggactggctcacctggaacagcttcagaagagaccgacaggacagccagatgcgcgtgtctgcccttctacta

SEQ ID NO: 34879 - DNA, 364 bp, Zea Mays
caaaaggggacaaaataacataactcatttacctgtatcttcttgttgcctcacggactcagccgtgttctctgtcttcctctcgctctccatcttcctggtgtctgaattccattctcgagcaagtatccaagggaagagggttgggttcgtgacatttggtatcagaggataggttcccaaaaaaattcggtgagtgggatcattctggcgtcgaagaagtgacaaaccaagttggaactccgagtcgattcggccatggaggacttcacgaagaagttggagggattggaaactatgttgcagaagaccttcgatgctgtgagcggcttggagtcgtggcgaactagtgcaaaccagtcgc

SEQ ID NO: 34880 - DNA, 344 bp, Zea Mays
gccgaactaaatgtagaaccacgataaaatcaacgaatcaaatagaatgttagagatttagaacttactgataacagctcctccaatgcgattatttggtgcttccttcaaacgaagttgggcgaacggacgaagtgactcgatgtcacgaatgtggcggagagaatgaaggagatggcgatggaggactgaccggtgtgtggaggggaatgaggatcggccgattttcggtctctctacggtggagaagatgaaggtgatggcacgaatgcggcggagaaaatgaaggagatggcggtggaggactgaccggtgtgtggaggggaatgaggaccgaccgattt

SEQ ID NO: 34881 - DNA, 312 bp, Zea Mays
ctcaggtgtggctctccggggtcatgcatgtagagacgaacatgctagattgcatatacgatgtcgggcctagtgaaagtaaagtactgaagagcgttgaaaatgctctgtctctctagtatgtaggggggttgttgacaggggaaccatcatcagagacttttatatgcatgtccatcggggtcgcacatggcttgtaatccatcatataccagcgcgcgccaagatatctagggtgtactgacgctggtgaagatacaaaccattcgagtgaagctcgacaacaatccctagcaagtggtgagaacccag

SEQ ID NO: 34882 - DNA, 330 bp, Zea Mays
cactccttggcttcgaagagcccagataaagacgctgagcctaacgatagcgttaggagtcagctgatgaagataaattttgaaattttccaaagcatctgcaatcattccatgcagaggaaacctcaaccctactttgaagaagctcttaaaaactaccatatcatcattttctggcttcgggatggtctcttccccgccaaagcgaattagcttcttctcggcttccccgaagtagcctagttttgtcatcatcggcatatcagcttcggagaaaatcgacttcccaaattcaagtggctgggtttggatggcataatggtgttataa

SEQ ID NO: 34883 - DNA, 589 bp, Zea Mays
tgttcatggtgacaacgcgaactacggatgaaccgaggcgttcccggtgatcctacgtgttctagttcaattggccgggtcgagaagcatcaagagcacacaagaggactgaaacaagagcgaggagggcgtgatcggacctgtggagagctggccacggtgagctcacacacggcaaagttcttgactgatttggaggaaatcccaaattggggagttgtgagggacgattggaggtgagggctagttcactgggtgcacaattacttagcggagcaggatggggcatcaatttatagtttccaagggcggtggctccaaattttggcatggcatgctggcggccggagaggaagaaggtcactggtggctaagtcatggcgttcaccggtgcaagggttcttagatggtaagcccaggcgtgccacggttactattgcgtagtaaagagccatggcgtggcataattgaggtcgccggagtttccacgacgacaccggcggtccggccacgtcgcacggctacaggcgcggttgataagcttcaccccgcgaccaaatccgctccccctccgatcttttcacccgcc

SEQ ID NO: 34884 - DNA, 328 bp, Zea Mays
caaccaccgtattcttccctatctccggccgccgcgcgtcttcattcaaattcgcggccaccgcccactagctctataaattgaagcctcagcacgttccgctaggtagtcatacatccagtgaaccaactcttagctccaatcgttccccacagctccccaatttgggattacccccaaattgatcgaagaacaccgcggaaccaagcccgccgtggtcagctcagttcgggtcagctccttccctctgctcccttgtttaaacattcacatacgtctgcgatgctcgccaacccattcaattgagctaggatcccatgaatcaccg

SEQ ID NO: 34885 - DNA, 366 bp, Zea Mays
agatgctagaatatccaacagagaggcatgaaccaacctgaggagggctggccacggtgagagactctcggcggcgcggaaaacagatttgggggaaaagagaaattgagaggctatggtgaacgattgaaggcaaggactggttcactgggttcgtaacaagtagtcagaacaggccgaggcatcaatttatagaggacggtcatgaggagggcgaatttggacggggaagtgcgcgcggtgaaaagggggaggagtcaccggaggttgctaacgtggcgttcactggtttacgttctacggcggtcactgccgagtcttcatggcttgcgatgagtggggagatgacttaaggcgtgtcacaac

SEQ ID NO: 34886 - DNA, 368 bp, Zea Mays
gcagatatcaaagccttgatcacttcactttagaaccttcctgaagatgagaagcagactcacttcgagatgccagccaacgctgatgacgttgagatagatgctgtgcttagcctgctggcaggggaatcatctgactctacccgcaccgagccaatgactatcacaactgggcaggagtttggtgaagaagtggaaacttggaaacccgaaggtgctcgcccaaagcgttcacgccgagcaaaacgcccaactacacctatcaaggagaagaagaaaaagaggcggcttcggcgactgtcgtgcttgggtcaggatgccggcccttctgtgccagttcctgatgatatcctaacagaaactgttcc

SEQ ID NO: 34887 - DNA, 569 bp, Zea Mays
ctgacatcgggggccactgcatctgcttatcgcgcgcacactcacttcatttcccgctgacacctagggctcacgcgtcagggttgggcatcgtcaacagctcgcccgagcttcgcgcagatggtgggtgaaccgtacgcgacttcaccgcgggcaggggaagtggaggttgttgcacccgatggcgctacctgaggataaatcatcgcattcccttccctgaccacgtgtgcgcccttgccctgttccaccatccccgtgaatcacctgttggagcgtcgctgtggaccgtgaagggaggcggccgctgctgcacccgttcttcaccggtgaagcaaattggggcgcgtggttggccaatgacctttgttgtgccctagggagtgaaattgacgccgctgtggaaccaatcgaggtgcggaacaagcggaattcttcatcaaggtgcgacaaccgcaccatggccacacctcaccgtggaggaagcttggcgcaacgaaactcgtggtaaacatcccatcccttgcttgtacttcataccccatcgtgttgcaccaattcgaatggaa

SEQ ID NO: 34888 - DNA, 457 bp, Zea Mays
ctagggttagtgctgatgtcgtgatggtcctttatatgagcgtacttctggtgctagttttttagactgaaaactaaattcggatattcgccggatacctgcggggagtcggtggagacttaggggctagggtagacctgctcggagaagagttgcctactcccctagctccttcgaagtggacgtactcgatggtgaagtcgtcgtacgtaagagtcatatgtcgtcgtccaccgccttgtcccatgcccaccctcgcccttcgtcgaacactacgtcacgcatcgtgcgtatacgctgtgttcctgggtcaaggatgcagtaggccttcgagccctctgcatagccaacgaacacccccggggtagctccctcgaagtggacatactcgatgatgaagtcgtcgtacgtaggagtcatgccgtcgtccaccgccttgtcccatgcccatctgtcg

SEQ ID NO: 34889 - DNA, 294 bp, Zea Mays
caccaggcgagtccaggaaatcacgatcttcaccttgcatctctgcaccggagcgatggacttggggtggtaaccaccctgactccacctccggtcaaaggtacatctaaaatcccatcacctgatgtctttcattcccctgtgattcatgcgcaagatccttattgggtgtcttatcagtcacgtttagccgcaaccttaccccaacttaattttccctcatttgacggacatcatcctaaaatgtggaaggctaaaagtgagaattattttgatgtgtacaccataccccgg

SEQ ID NO: 34890 - DNA, 345 bp, Zea Mays
gccggggtgcctgtgggggcagcctaacgagtgtggggtgtatgcggagtcccctgtggagcgtactgagctaggcgtggtcctcctccaggatgagatagtgtaccctagggcaaaacgtagcaagggcgaatactgctgctaccctgcccctaggtaatggccttcctcttcatgtctcccagttgaacatgcttgtgttcaattgagctttatcaagaagtctctgaaatgatgggaaggtatgagcaaccagtgcatactgtagtggcccattgagtccttctatgaagtgctcttgctttctctcatcatcagccacctcatctggagcatatcttgata

SEQ ID NO: 34891 - DNA, 333 bp, Zea Mays
cctccacgagactgtcgacatgatcatcgccgagaggaccgagggacaagtggagtctccgcctttaccccccagctccgagcgatccagtgaccaccaaacttcaaggtctccaacgtcgacaaatatgaacccaagcaagacccgggtggctggctagctgtctacacaactgccgcacgggccacgagggtgacagaagacatcatgatagtgtacctgcccattgtcctagggcaggacgtgctgcaatggctccaacatctacctcgacactgcatcgatgactgggatgacttcacccaccggtttgtcacaaactttcaatcccga

SEQ ID NO: 34892 - DNA, 586 bp, Zea Mays
ataattattacatttcagcaatgtaatatgatggtgtatgttggcatgttatatttttttcaaatgtttctttgcctcagatgccatcacggattcgcgcacatgatggtgcggggacatcccgcggtgaggaggatattcccaacccgccacctgtactaccgactttgaccgcgtgatactacttatttggaattttttgagactcgaccaccgctcttcattaaagcagaggaaccattagaagccgacgaatgggtcagagtgatggaacagaagtttgggttaattcaatgcacagagacgcaaaagcctctgtttgccgcacaacaactaagagggcctgctactacctggttggcaaatttctccgcaatccagcctattggacatcagattacctgggatgagttcaagttgtcatttcaagagcattatgttccatagggagtactccagatgaagctagaagagtttatccgattgaggcaaggaggagatacggtgatgcagtacctcaacaaatccaaccatctctctcagtatgccattgaccagatggatatcgatttgaagaagaattgtt

SEQ ID NO: 34893 - DNA, 384 bp, Zea Mays
ttagttgaagccaagaatttggggcaaggaaaaaccaagagatatgggggtgaaggatcatctcaggggtctgaaaagcggacaaggttggtaattcgtcccttcaacccaaatcgttcttctcctcgtccacccacataccccttcaagcaaccagtgttcatccgtcccactcctgcccctgcccagaacaatcagccgagtgcccctggtgctcgtttccctgccctccccagttcctcaagtggctactttaattgcgggaagtctggacatttcatcaaagactgcctctatccgaagcagaacaaatcaaatttccaacagacttcggggaatgcgactcaaggaaagggaaacatggtcaaccctccagcgggcaag

SEQ ID NO: 34894 - DNA, 290 bp, Zea Mays
aaactgggatccagtcgggctcaggtcccgtctagagttttcgtccaagaaataccatgcccgagtattcccgcggatcggatagaagagtgcaatattctgtgtcaaccagagccagaccctgatgactagatagagccaatcattaggtatatcaagaatgaggaggaaccagatgacagaaatgcagcaaagcgcattgcaaggcagtcagctcattatactctcatcggggaaacactatacaggaggggtgcaacaagagttctgatgaagtgcattctttcagc

SEQ ID NO: 34895 - DNA, 428 bp, Zea Mays
gtttactccttggggagttatcctccatgtttgttgattctggtgctgttgagtcagatgataaaacacaactgtctcgaggagctgatggcaacagttcgaatcaggatcatggaagtaatgatggtttcttaaacaatagcggaaatgatttgtcaggaatcgatggtccacagtctgtcggagtgtttaaatcatcaacactgcttgcccaccgtgattgtgtaacaggattagctgttggaggtaaaaatccaacactgctaatagatatatctaaaacatttgctattttgtttgtcattttcttgtgttcagagggttttgtaatgctggctcaagaactgcctattttcattctttctttcactgcaggtgggttcttgtttagctcttcttatgataaaactatcaatgtgtggtcactg

SEQ ID NO: 34896 - DNA, 278 bp, Zea Mays
taccatcgtttgcattgactgaaccatcatccaatagtttgatgtatggtcgtacaaattatgattgtatctgaactcccgagattatcaagatcatgacattgttatttatagcagtataaactgctagacagtgcaagtgtttttccattttacccagtctatgccactcaatttcaattgttttgcagcacgatgcaatctggttattacaccagtctactgaaccaagaccctgaaaatgttttcatttttgaggaaaatatggacaatgcaaa

SEQ ID NO: 34897 - DNA, 331 bp, Zea Mays
actctgctgacgggcgacggccaggccatcctgcaggcggtgtgcccgtccactccggtggcagacagtacgcccgtgctgcggcatacactgtgctcatcatcactcgtacgttcccagtgaagcttctgttgcatgccgatactatgcaggctgcggatatcagggcgcaaggagattgcactggtgaccagcattagtggctccaaggattacatccgttatgtccctgggcccgcatgtcggggctcagcacccttgtacgtgccccctttagctataaaaggggaggcacgcaacgttacaagactcagacacacttagacccagc

SEQ ID NO: 34898 - DNA, 340 bp, Zea Mays
gagagagaccccgtcatcggcacacacgcttgcaccgtcacctgtgcctctgctctctgctctggtccggggggtcggcattgccatccgcgcacgtttgtgaccttctcgaaagttgggatcgttcggtgccccattgatttctcgccggagcaaagaccgactgctcgacctcaagcttgtcggggagaagtctccctattgcgcgccctcaagtaggtatgtcccacatgtttgccatatgcttctctccttattgtcgcgtctgcgtgctgtcttgtgctctggaccgcggacccgccatatcccggcgtggcgccgccacggtaacagaactcgc

SEQ ID NO: 34899 - DNA, 910 bp, Zea Mays
cgcgtcctgggtcactacctcgtgttcctgatggtggtgtactgattcaaagacccattgactggagctactaccagaatgcagttacatccagctgtaagctgatagctaattttgaaattttggctgttgattccagaatcgatgcatcaaaattttctcatgtaaactgaacttaaaacatatttctctacttaaaattattttgttcaccctttagattcttttgcttggtgggattgggaccgttgggagaaggaaattgactggatggctcttcaaggaataaatttgcctcttgctttcactgggcaagagtctatatggcagaggatttttgaggtatgtatatttattcttttttaagcattattcacagtcgataaattactagtatgttttttgtgacattagcgtgaaataatgcacaaaagcaacctgtaatattaggaagacattgaagcagatgggttgatgcataacagtaaatgcagtaaagtaggaaggcagtatggataagcaggcaaatacgcacatcacaaaatttcgacatgttatgtcatgttttgatgttttttcttggcaaaattattttggcacagttcttaaaattgacattttgtggaggaataaatggacccttctagggtagatgtaacctcaccggttcttcctgctgacactatctattattgtattttatgagaatattagcactcttttatctaatacaaaaacgattcaggttattgcaccttatcaaaaaaaaaatctcaggttatttctttaaatttactcaacctgttttgctgcaaatggtttgtgaatgactttgtttcatttcattaaattcttaaagaggtacaacattagcaaatcagatctggatgatttctttggtgggccagcc

SEQ ID NO: 34900 - DNA, 495 bp, Zea Mays
cctccctgcgcctccggagctgccattagacctagcccaagttctggccaaccaaacccgactcattgaggtcctcactagaagcctcgagaaccagcgcccgattggaggaagacctcaggacagaacaggagagttcttaaggctcaagcctcccacattcgccggatccaacaacccgcttgatgctgatgactggttgcacatagtaaagaggaagttagaggccatcggatgccccgaaaaccagcgtgttcacctagcggctcatcaactctccgggatggccctatcctggtgggatactttcagcgctgctgtaagagatgctacctgggcagaatttgaagccgcttttcgagagcatcatgcgcccttgggaatcgtttagctcaaagaagaagaatttcgggagttaactcaaggagggcgtttcgttagtgaacacatccacaaattcacagagctggctcgctatgcgcctgatgatatcag

SEQ ID NO: 34901 - DNA, 295 bp, Zea Mays
caaacatgaggaaaaacaaacaagtaatcaaataaaccttttataattcccaattcttacacattttataaatccatttacttgggtattacatttacacacttacacttaaaaattgcttgcacgatagtcgttgccgatagatgtcgtcctcttatattaggagaagataacaaggagtaatagaaatccccattagtcccagtaaagaaaaagataacattcaatcgataggagattccttggccagggaggcatcaacatcaacttaattatttgactaggtagatggccg

SEQ ID NO: 34902 - DNA, 722 bp, Zea Mays
tgtgggcctaggaacataacggatgttatacttggagcaactaatgctagtcgccagtgcaatctccttgcgtcctgatatccgcagcctgtgtagcattgacgtacaacaaaagccttcttggcaacgtgtgagtgatgatgagcatagtccgcgccacagcacgagcgtactgcctgccagcggaacggacaggcacgccgcctgcgagacgacctggtcgctgcctgccagcggagtggacagggcacattaaatgctgaaggggcacatcgcctgtcagcaggatagacaagcggcgcatctcctctgcaataaatgcagaggtagcatggcccagaggccttatgtcaggctctgcccgctggcttacgtcacgagcgataggccacgcggcagcatcgggcctccgcctgagcggggagcggaagcgcacaagataaagcctggacacgtgtcagtaccggacccccgcttgtctttgacctaggccagggtattccctgtcctgggaccttgctgtgggtgatccggacctcactcagggggggtccggatcctatctaaggggtccgtcttgcttacttgaggatcctggaccgtacttggaggtccgggttgtgcgtacaggggtccgacgctttctcctggaggtctggacccactaatgatattctagagtataccacctcttctggccacgtggcgtccttggtgccgtc

SEQ ID NO: 34903 - DNA, 286 bp, Zea Mays
ccaggggtagaagaggccaactcataatgagtcggctttgaggttgtgttgattcccccattacgaatgaaggatgaagttattccacttgatcaccgttgcttgctttttgtcgtgtgcttgaaagcttgtcagcattttagaggtaatgcccgagtgacgattgcaatccttacttttccgagttatgatctggcactttagaggtaatgcccgactgaaggagccaacttatactcatgccaacgtgccttcttgagtttcgaaccctaaatctcactttttc

SEQ ID NO: 34904 - DNA, 362 bp, Zea Mays
cccgagctgtgtctctgtacgtgtggaccctggtggtcagccgtacccccctctactgtgcatcttctcccaagccacaaccgaagatccgtgatgctcggcaccatgatccttgcaggcctggcgcaagtctgcctatttctgggtataaaaccgtgtgccggtgttcatcaccccttcctctacccagcgtccaagtctcatccctctcgccggtaattcacgtggccatacccagatttctgcggattggtggcgcactgccgtcggcgaaccgcacctccgatcacaccgcgccctcggggagctgaccattgtactttgtcggtgtccctggatcatgtgcatgaagctctgaacct

SEQ ID NO: 34905 - DNA, 755 bp, Zea Mays
cttctattccttctccgaatggctccctgaccacggcgcgctcgccgttcatctctgatgcggcccgtaccggccatggccggcgacgactgctaaggctaactatcggggaggcttcaccgacctaggacgatctaggaacatccattaatttgacatgaaccccactgggaaccgtctgcccatgatcagggcagaaaccgagttcatgagcacgcgttcctgccaaatcatggccgaattgagcaaacgggtgccacggtaagcttcactagcatgcagagccatgaaaacaatacttgaattggacaacgtcttactagagcgggctggccacgggtgagcggttctcggtggcgcggcaatcggatttgggggaaaatggcgtcgcggcgtgctcgggtggaattgaggacagagcttgcggctacacgtcagcaagaggttctagttttactgcgcacaatcaatttgagaggagggggcagagacagcgcgaatttggcttcgattcaacccacggtgtgtgtgatggtcgtgcctcgccgggaatcacagggctatttatagccacggcggtttggcgatcacctcacggccacggatagcatcgcgagctcatgccgaccacgtcggtaggagacacagtgagggagatcacgacatgagtgccaccgcggcaaaatttactggtcacggtggctaccggtgaggactccggttggactcggggaatggcgccacgtacgagttat

SEQ ID NO: 34906 - DNA, 579 bp, Zea Mays
aatatagtggtagaatgttgtagtagtagaactagcagtagtagtacgaggagtagtggtagtagggatattttgtcggggtcggttaataatgaatcagcccttttctctgtaatgatcctcctgaaggtaatgaaaactgctagttttatcctcgttggatgttgactttgtgttattgttgctctactcttgtggtctgactgcgggtattgagttttttgcctcgttcaatttcttatgtttcgactaatatctcccgaccgattctgtgtaggagtgtgttttctgtccgtctgagcctgtccgactgaatctatctgacttaacttgtctgacctaacgcttactcctttcgatctgaaaatccatttccctcatgctggagcttgtggcaggtctacagttgacatgtatatatacgcctgttgtctaacagtttctagcaagcaaaccctagctttgctctttcaccacaactctcccctctaaaattctcgtacctcggtgagtccatgcttgatttcgcgcctttgtgaggtctcatggtgcccaggaagaagaagcggggtggcgctg

SEQ ID NO: 34907 - DNA, 329 bp, Zea Mays
gaaaggagtagcacaatttaatttgatggcatatatatagaatgaaatagtagtactatcagctataactattgataaatgatgcagtctaagagcataccaatatgatttgccacactggtagaaactatgacttgtctgctgcatcctgcacatgagcatgtgatttgaagaatcgcaccatttgaagcaatcaatgggattttaggtctgcaagtaatgggtcttggatttactaggtactagcaacctcacaaccaaaacatggtgaccacaatatccaggattagatgagattagagtcaggtagttcaaaagtaagattagac

SEQ ID NO: 34908 - DNA, 328 bp, Zea Mays
atcttagtttattccaaaaatgaggccgagcacactaagcatttgcataccatacttcagagactgcgcgaccatcagttgtatgctaaattgtccaaatgtgaattctggctgagggaaatcaagtttttgggtcacaccatatcccagaatggggtatcagttgatcctgcaaaggtacaagaagtgatgaattggagacctcctaccacagtacgacagaagtgtagttttctcggatttgcagggtattatcgacggtttattccagacttctccagaattgccaagccaatgactgaattgttgaagaaaggagtcaagtatg

SEQ ID NO: 34909 - DNA, 330 bp, Zea Mays
atttggcgagcaaaaacacacccaaccaacaagtgatgcaccgtctcattcatctggtcacaaaatggacaagacactggatggggcaggttcctccgctcaagacgatcagcggtccaaacccgattatgatacaccaaccatataaagaacttacaacgtgacggggcccaggttttccagattctcttccaagggccaaacttggtagagcccacgaagaaggcctcatacgcagacttgctgctataacaaccatcttgtgtcaacttccacctgaactgatcaggaacatcagattgcagcacgacctcctcaacaaaatcccac

SEQ ID NO: 34910 - DNA, 403 bp, Zea Mays
gaagaagaagaagaagaggaggaggaggaggagaacatcaacgaggaagcaaacggtgaacagcaggaccacttcgtggggatatggcctgtcaccgaacattatacatcaatgtttgagatggggcacttccctaacctgctgcaggatgttctgcatgcgttgggaacctacgtccgacccatgtatgagacaaggtgagtgtgcggccccctcgggcttgctactacatcactcgcattcatgtcagggtgatggatgcaggtgatagagggttcaggactctatcagctcatgagtctctgacgtagctatccacctacgctgcttcggtcagtgatgctgctaggcaaactctgtggtccctcagccacacttaccggcaacagctgcacaacacgaa

SEQ ID NO: 34911 - DNA, 697 bp, Zea Mays
gttctggtagattgggaaggcatgaggatatcatccccatatatgtcatcccatgcctctgtagccttacctgccgccgcccgctggacccccaattcctctgcgactccgattcctcaacgacgagcgcagcaccaacctaatcgatcggcgaccttagcagaaaacaagagaggattagagagggattagtggattagagagggattagagaagaagatggagaatacctgcgcagccagagcaccggagaagagaggaagatggagatccaccgacgacggttatggttagggacttagggttagggctagcagatccaccgacgacgattagctgttagggacttagggttagggttagctgcttggggttgggagtagacagtagagttagatagatccaccgacgacggttagctgttagggacttagggttagggttagctgcttgagagaagaggtagatccacaaccacaagacatgccgggagcacaccgatgatggagctgagtcgagaagaccaccagcgatgcgacgacgacgacatagctacaagcacgggaagtcgggaagggagaaggagagagctagtccataccgacgtggatgacaggagggagatactgtgagccgacagtgatagatccacaccgacgaggcgacgacgacgactgagctgcgagcgagatgcggc

SEQ ID NO: 34912 - DNA, 443 bp, Zea Mays
tattgaaccggccgtggtgcctgagtttggcggggaggcttcttcagctgctgaatcaagagaacctgttcctcccacgcagaaggctgaagagcctgctataatgccgaaggcaccttcggttgagctagttgaaacaaaggttgacaaagataaggctgaaaggtcaaaaactgaagaagtaacaaagatgccagggattttaagtccttcaacagaagcaatagcgctgaaggcagaaaagagttctgccacaactcctaagagaaggaagatggtaaatgtattagatattttagaaacaaccgactccataagtccccctcccacagggaaggttgccgaagctgacaaaacgcaacccaatgctgatactaagcaaatagaagttgagactacaataaccaaaactgaaaccgaggcagggcccatagtgcctactg

SEQ ID NO: 34913 - DNA, 369 bp, Zea Mays
cacgtcgagcctacatcccagggggccaggtaccagggaggagtcggcaacgccacacacaacaggggcaaatagtatgcagataagtactaatactgctcgataagtagtactcaaaagtaccttacaaaagcaaagttattacatccgccttcaagcggggccctagccttatgtctacaggtatgacctactcgacatcagtagggtcacgcaggaagcgcacgaccgccatctccacagcgtacgacgtcttgtacgaccccctgggtagcgtcttcagcagccgggccagcggtcaccattggcccggcggcaccgaagccatcaaagccaaagagatggagccgcaacatggctcgcttccca

SEQ ID NO: 34914 - DNA, 326 bp, Zea Mays
aagattgcctagaatgtacatcaccatgctctcacccgctacatatatcatcaattctacatgactgccctatgcgtttaactgcagaagctgattctaattttctaccagtatttggatggtacaattattagaggttgaagcattgttgttagttgttactgaatcgcaccatccatcttattagttgctattttgaactactacatgttttgtactgagatttaattatacacaaaatcccaagatagcaatctgttatagcccttgaatcctaattgtagatttcccttgacagtaagcaaatttgctcagctactcaacaa

SEQ ID NO: 34915 - DNA, 534 bp, Zea Mays
cgagctctctgtctaaaattctaattcctgaatacaccaggggtcacggtgtaaaccatcccaagacacagagtataagctaggtggacggcgggttatttgtggcaaaggaaaggggcttaagtgcaaagtagcatgaccgaaggggtatccccggatcctagccgtccgatccacagcagacgcaccagattagatttaagcaagttactcatctgcgctcacccccgaccgtcggatcctagatccacggatgaaggacgctcctgccccgatctgacctagaccgttcattactgaatcgacgccacagatctattctcgcgaatcggtacacagtcgtctaatctccaccataggagacgatccaacggccaggaggccaccttctctcctctatcctttcttctaccctgggcaccccctctcctcactgcgacccgagcccgtcggagcaacagcccctcccccatggcggcgcagtgcacaacccggcaggagacttcactgtcgtaggcctcaccaatcccccga

SEQ ID NO: 34916 - DNA, 298 bp, Zea Mays
gtgcttgtcaaatcagaaaagcttcaaaatggtgctgtttatgcagttaaattgagtggcaaatggctctatactggtggatgggataaagtcataaacatccaggtatgttacttgctttgttgatctatagtcttccatgaaaaggtcctgcttagatctaactggtactttggtttctttcccttctgttaactccataggagttgttggatgatgagtcagaggtagaactccgagacgtcgcttccattacttgcgactcaattataacttcgatactgccctgggatgaaag

SEQ ID NO: 34917 - DNA, 317 bp, Zea Mays
tatgcctctgcgagggagcgtggttcttcatccactagataaattatataatcatctcccagagacttttcagtcctttgtctcttactcctccttaactccaaatctggagtctgatcaaggacacttgagggcagagaatatgtccgagatggaccatctgaggctactacttccttatcccgcataggaaaaatgctctcaaagaatgtcacatcccgagactccattatgacatttacagcgacttcgctcgtctcggaatggaccactagaaatctataagccgcactgttatgtgcataacccaggaagac

SEQ ID NO: 34918 - DNA, 881 bp, Zea Mays
cacctatgtgtttagtaagttcatgcttcactggatcatgagcaatctgtatagcactcaagttatcacataacagaggtgtagaagtgtcacaagtgacaccaagatcagccaagagccagcgcaaccaaataatttcagcagtggtagtagcaagtgcccgaagttcgacttcagcactagaacgagatatggccgcttgcttcttggatttccaggcaatgggaaatgatccaagaagaatacagtaacctgtagtagaacaacggtcaataggatcacttgaccaagcggcatcagaatacgcatgaagctgaagtgggctatcagaagcatagagtaaacatctggatcttgtcccacgtaaatatcgaagcacacgaagcaaatgaccataatgaactgaagtaggtgttgatacaaattggctcaacatatgaacaacatgagcaatatcaggtctggtgatggtgaggtaaacaagactacccacaatatgacgataccgagttgggtctgctagtggtgtcccatccttcggacgaagttttaaatggagatccatcggtgttgcaacagtgcgtgtatcagtaattccaaagcgatcaagaagatcttgtatatatttggactgagacagataaaagcctttttgagtctgctgaatttcaatgtccaagaaatagctaagcggtcccaaatcagacatatgaaattccttactaagatgctgcttgacatgagaaatatgttctgagttgtcacctgtaatcagcatatcatccacatatgctgtgttggtcccttgagatgctggcacatatggttggagccctctacctagtacatccggtactggcaccaccggcacgtgcattcat

SEQ ID NO: 34919 - DNA, 1641 bp, Zea Mays
cagcctgccgtagcaagtgaatgggttcggttcgttgagcctgtaatgggaacgatgtctaacaaattcaagcattgtaacatacttgcgacttgagacatcgcctcctcccacgtcagaatattttattccaaggtggtatccacgatcaccataagggaaaagaagcgggtactgtaaggccaggtaggatgggtgcaagcacgaaacatgtttgaggccaccctctctagcgtgcacgaggacatcgtacttgaactgtgaaggtgagcaatcgcccactattatagcagcaacctcaccattggccggtaggttatattgtgcatcatgtcgtgtgttgcagcctaacaatcgtaacgtcaccttttggttgcctgcttcatctaatcgttctttagcaaagcgaaatgctgcgaccagactattatgctcatctagcatgttaagcaataaacgggccacctctgggtccggacgatcatggacgtcagcctcattctcaaacatgcccaacctattttgtacctcgtgttcagtgtcatatatgtaaagctgtgcaaactgtggtcgcaatccatggctgggtagcagcgagccaatgcgatggtgtacgacaccattgattttgaatacataaggtgctgtaccgttatttatcgatctatcaacgacgacacccagtgaggtaaacgcgaaaagggaattgtatgagcgaatttgcctaaggaaccttttggcacgattatcaccatcgaatcgcagtaggtcacttaagggaggcggcggacatttgtaaggctccaaaacaatcttacctcctctgcaacaaaggttgtacacaagtctgcgctgcgtaactgtagaagcgcttttgacccgtccttgaaaccagaaaacggcgccacaatgtcggcactcgtctgatgggccaccatagtatgagcgatctttgtaggtctctacatgcaaatatgggtccaggatgcatggattactttaggaatacgtagacaaaataatctaggcaggcggaacataagcacctttaagcaactcgacatatgatcgttgaagaggcggtgaggctgcatccgtgctaactataagcagcaagttggccataaattcataggatttttgaacgcccatcagatatgaaagcaaaagatgtttttcaaaaaggtaggcggtagggaacagccattgctggcaccttgttcagcagacgcaagcgtacaacacatcttttgtctgcgatgttgtctgttagcggtggcaagcggcgcaggaaagtcgagtaaggatttgtcgcctgcaatcgacgtgcgcacacgtcttagtatgcgcatagagatgtagcagataaaggcagcagcaaaagcccgagaggcactaacctggccgctttcgacgtactggctgtgagtggaatggaactacataacgcgatgcatgtgctggcgccgaagtggatggccgatcaagtgtgttcatgtgttcgatagtagctgttcaaagacataacagatgtttggttggccatgcgaaagggaaagagacagattggctttaattaaggccatattcaacccaaagaacgcataatatcagtatagactttgtgaaattgcaaaacgt

SEQ ID NO: 34920 - DNA, 319 bp, Zea Mays
atctcatatgcaaggcccaacgcctggacacagaaacaaccaagcttatggaaagagcacgaaaggagcaactcccggacctcaggacagataatcaaggagccctctggttcaaggatcgcctgtgcgtgccagtaggagaaacacgagagaccctgctcgatgaagcccacaactcagcttactctatccacccagggaccaccaagatgtacttagaccttaagaccaggtattggtggaaagggatgaaaagggagatagcacagtatgtggcccgatgtgacacctgccagcgaacaaagaccgaacatcagaa

SEQ ID NO: 34921 - DNA, 517 bp, Zea Mays
aggaaatcccaagtaggtaaaagataagctcccaatgttgtagttaaaagtattggctagcaataccatcctctcgtctaacacattgatcgaatatatgttggatttatggtaattgacgtgcatgccagttgaggtcgcgaatgagttcagcattgcttagaggaagaagagatgtctcgggcacacttccataattagaatggtgtcatcggcatattggataatctgaaagtcctgaccacacctgttagctagtggcagtctgaggaggccaaggtccttagctttgttcactatatcttggagaaggtctgcaaccagaacaaagaggggggaagcgggtctccctgatgaactcctctcctgcaatggaacgttttgcctaggaccccatttaggaggatagattatgtccctgattccatgatcattaggatccacttcaaccacctaacgccaaagcccttgtgcttcaggatgttcacattaacactatgttcaagtttgtcaaaag

SEQ ID NO: 34922 - DNA, 553 bp, Zea Mays
ggcatcggcgatgccccaagaaggatctgtgggacgggcttcctgcagtccgtcgatatgcgagaggagagcgaattttccacagagagaggtgaagaatggttcccactggttgaagttgggttttgccagttcaagagtcaccgggatgtggttcttgacattgatcgtcgcatagggggcgacaatcacagcgggagcaggagtggtggcgtcggtcatggtgaccaggggggaggaggtgcggcgcaacagggaggagttggcgctgcgcacagcagggagatgggcgcaggatctagagagctgataccatgagcctgattagcaattgattgtaatcaaggggtcaccctgccttaaccctctcctgtgcctgatagactgaccgggttttccattcaccaaaatttgggtagaagaagatatgagaagattaaaaaccagattgcaccaaatctgtccaaaccccaaatgatgcagcacttccatcaggaaagcccaactgacagaatagtgaaggcgaagctgttatggctgggtgccaatgtgg

SEQ ID NO: 34923 - DNA, 590 bp, Zea Mays
gccgtcgctgctgggtcaccatccgccgtggccagggggctccatgcgatgatttctggtgaggcttcctctcccaggatcgatttcttctcctctacattgaccatagttgaatcgagctcttgtgcctgggagtcgaggcaaggcagtgcgacaatggcgccatggcggtgcacgctcgccgtcgtggcgtgggatactggatgaaagggagtaacggcttgtccgttggattcgagacatagggatgtgattggatctgggaaatgatggctccgggtcgttggatctttgtatctgtggctccgattgggtgaaggatgctccctccgcgtaattaaatcatgaccgttggtctcttgatggacagatctgagtagttatcgagtgttgggggcactgaggtctaattacgaccgtatgattcagatcgggcggctcatagtgaacgataccccttcggctgtgtggattcgcataagaacccctgctctttttgtaaattaacccaccgtcctagaactatagcagagagtttaatataggtccctggtatttatagtttgaaccccagctttctcagtaatcac

SEQ ID NO: 34924 - DNA, 586 bp, Zea Mays
gatcatcgggcgagatcacgatggggctgcgctgccgcgggtcaagcgcagcgtcggcctacgggaggtcgagttggtgaagacgcgctcgcgccatcggatcttcctagggaggtctagattgagtggtgtgtggaccgttgatgtcatgggtatggctgggattgggcgccaagcgtgcctattcggtatgattcgatcatgacccttgatatgtagatgggcggccaggattagaagaccgtgtaccccttcgtctattttatttggacggatagatcgtgatcggatgactggtgtttcgatcggctgtggtccgttgaatttagatctggcggtccatatcgtgtaccaattcacttaaagactaatctaatccgggacctcaattttggatccaacggccagaaaacgttcatagcctttcggttgagaccttttctataagagaccctgtgctcttacgaaaataacccaccatgcccgggtataaaaagatatgcacacttaagtcctagaatttacaaaataaaccctgaattcttctgaaatagtagccatagcccaaagattaaggagaatgact

SEQ ID NO: 34925 - DNA, 586 bp, Zea Mays
gattgaggtgtgcgggtatatgctgtaatatggttatactcgcaacaaagaaatatgtatgtcttgttaacacaacgtttaggttgttgtcgtataaccgtgtgaagaatgctcctgatggtcatgtgactaaagtgtgatgtagtggcaagcgagaagtaagttcaatatttttaaacgattagttgatagcacctatcgacatcgtcatgatttttgttgtatggcggatcaatgccttgtcgtcatagtctcggggaattttcggaaatgtgctagtgttttacggatggggtgaatgtacttgtgatgtcttagaataactgcgtgtcatacgagtatccaaaaatggtgaaagttggtgtatgttggtgattagaaaatggtcacttcgttagccaatagcaagcttatgccgagatttaaaatatgggcaagttaaattgaaatcatgcttatctagacgtgtggttaaataataataattttggcttgtgtagtgaggtggtgacaggccgaagtagtcatcacttcctctacgtttttaagtcgagtcaaaatgcggggtactagtagtacgctaggc

SEQ ID NO: 34926 - DNA, 337 bp, Zea Mays
caccaaataaaggtggttacaaagtatgctaaggggctgttacacagatgactatataaaagacgaccagacctgaactctccctgagttaagggcacaaccacaaacctttcagccctgcagcccctgctagacaccacatcttggcatcgtccctaatgtcttgagtaatcttagagatgtccggagtagccccatcaaagacacaagagtttctgtgtttctacaaccaccaggccactaggattacagctgaattgaatcctttcttttgtgccttttgaactatctttcctgacttatgccaccagtcttgaaaactatattccgcagttcc

SEQ ID NO: 34927 - DNA, 336 bp, Zea Mays
gtctgatgattctgggagttcgattgcgtggacggaggagtcttcagatgaggacttggattattttgcagcgttggacgtggctacggcggagacttcaccgcatgtggtgggtgctgaggatcttccgggtgcgagtactgggtgtaggcggcgaagggcggtggcgaaacggagagtgagtgaattgtcgcgaagtggcatgcgtcattgtggtgagatggagagcggtcatcttctcgtggacgggtctggtaaacgggaattgttgtcctcgccggctggggctagtgtgggtgaaggggagctgcaaaatctttttgagggtgaggagtt

SEQ ID NO: 34928 - DNA, 317 bp, Zea Mays
acaattggcgagtgcgatgtctgttcaacagatgaccactccacagatgcaaataattccagcagctcaaccgccggcttccaccgagggtacgaccatcccaagctctatcgcttcaacgggaaataaggtccgctatctagttgatgacatcacaaggcctgtggcatgcacactagttataagatatggtattaacaattagcgtacaaagaaagtagtcacaggccttgcaatcccaggacgcaagttccatggaaatgacattccagaagaatattgcagggtagaagtgacgacagtcgtccaaggatccg

SEQ ID NO: 34929 - DNA, 397 bp, Zea Mays
taaacttccagtggagacagatattgcatggacccgatcctatcgcttggtgactcatccttgaattgactagccacacaccggttgaattgagattagacatatgtatcaagcaacatatggcagaatttcagtttcttgccatttatacacctaggtgatatgtctggtgactcatccttgaattgactagccacacaccggttgaattgagattagacatatgtatcaagcaacatatggcagaatttcagtttcttgccatttatacacctaggtgatatgtctcacttgggtccttgtgtcatcaccatgtcaaattgtgattgatgttatcttgtgtatcactaaactcatgtgaacatggggttagctcccaaggcccatgaacttttcc

SEQ ID NO: 34930 - DNA, 492 bp, Zea Mays
caaacttagtaattgttgattgaaagaatggtatggggttgcaagaatatgaaatcaagccttgagtacccggaatgtcctctccatgtccttccatgccccctcttgtcattcagcgaacatcctctgctttgaagtccgtgggagcgatatggtcttcacaaaaactagccgccgagggtatattccatcagcgagatagtatcactggttgtacccgtggccattcaccgtgaagtgctcgtttagtccttccccgctaagcacgccaatgaacaactgtgattggatgagcatgttcgccacgccaaaaaagcatgacagacccacaagtcatatgaggcaacaacctcgagcatgatagtcgaggatctaatgttccctcttattaaggatctaatgttccctcttatgaactaccatctccatccaataggatagctcttttatttcgaatgtatgcaatctatacaccatatcatactaggaaat

SEQ ID NO: 34931 - DNA, 386 bp, Zea Mays
aagaaatagaattattagctttcttgatggtaatgtcggatataatcatattttcatggctaaggaagatgcgtctaaaatgacctttatatgtccaggctttattgggttatttgagtgggttgttatgacattcggtttaaaaatgatggtgccacttatcaaagggctatgaatttgatctttcatgagttgctaggaagcattgtggaagtttacattaatgatatagtagtcaaatcagctaaatttgattctcatataactgatttgcgcaaaacctttgataagatgtgtcgatatggtttaaaaatgaacccacataaatgtgcttttggagtgtcggttggcttgttcttaggattcattattcatgagcacaacat

SEQ ID NO: 34932 - DNA, 401 bp, Zea Mays
cgggttcactgatctctggtgagcaattcctctcccacaggtgactcaacgcacaattgcttgcccgagcctcggtccgtggccactaacgaacttccatgagtaccctctcggccaccgggcgaccgcgggtgctaggattatgagtagaggttccgccgagcccccaatggcgccctggctagatgatggtttttatcacggctaaggttcacgcgaggaggtagcaggggcagaacgagccatggaagttcctatttatctcccgaagtccaggtctgggacgagggggaggtcgcccacgaacccgtcgttggcagcggcatccacaccatttgttgagaagaagagggaaagcattgacttgcggtacccactttccagcgagcatggcacgcgcg

SEQ ID NO: 34933 - DNA, 293 bp, Zea Mays
tattccttccttttataccttaaggatgggactggttacaagtatctcttgcctaagggagtattaccaagaaaataagaagagtggataagaacatgtcgctctgactagtaatatattctctccgtgtcgttcattggttctataacctcgtacttgttgttccatcttggtcaagacacccataccttatgtgtgggtggagtgacccatgccattgtatgtccttggttctgatggggtccctgttggagttggttgcatggtgtcacactatgactcgtcgtggcggc

SEQ ID NO: 34934 - DNA, 712 bp, Zea Mays
tgaataatctcgtgttgctgctgtatgaaagagaacatgtagtcttgttgcactttatgatgctcgtcacgctgtctcagctccccgcgcagcctagccacctccaactcctgctccttgggctgatgagatgaaaggctcatgctacagaatgaagaactcatcctttgagctctcacctctgttgagtcaatcattatgtcgaaaagcgtgtacctacaagtgtttcgataacatgcttagggtatgatcatgttagtagcactcatggaatttaataagttaaagctcactgttcatgtgcgttctcgccaccactagctcgcatgattgcggcatcaaatggttcatgctgccaatcgaagtttgggccatgatgccaaaccatctcctccccatatttctcctatacaacatttgtaaagttagaaatgcagaaattgtgatagttgagcaatttacacttttgagacaaaactcactagccagtatgtgattatctagctgcacaactactaggggttactagggtccgatccttttcggcccactatgtacacatcgatgtcgctggacttttgaccggccttagcttcttgtatggacacattttacttatttttcactattttcaaaacaaaaggcattatagtctatcccttatagctcatccttcactacattgttctattttgattttttctcaattatg

SEQ ID NO: 34935 - DNA, 595 bp, Zea Mays
ctggactcgacctcgatcgagtttctcccgactacagttaaccatatttggacgcagggcccgcaacacccgaagacctcgtctagaatcgatgacgagacttcgcctggaatcgacaacaaagcctccgaccacaacgccctacgagaagatggggaatcattggccactggtgcgaagtcggctacgggtgatgactcagcacccccacggcgtacggggcccaaggccctggcgaagacaccctcgacggtcgccgaggggtgaagggtccgatatgcgagcgaaggcttcaaacactcgagggacccatttcctcttagctagggcctagacccacttgtaaaccccttggaggggtggacttttagatgtgtttgggtgtgcgtactttgttgtgtgtaatgaccccgctgctggggaatattccaggaatgcagtaggtaaccgggggcataatggtacttgggaccacctactcgcccggttacctataaatatccccgttctgtacacgcataacaagatgctatagtttgctacctatcgtttgtagtgcacctgagccctatcaacttccgagtttttgggtccg

SEQ ID NO: 34936 - DNA, 600 bp, Zea Mays
gcctgagtaagcactcgtcgatagccctccacgtctggggtttgcgggaggccatcggctatctgagccaagatccctccaacttcgctcgacgtgttcaatgctcgggcaaagtcggggtacaggtttcgggcgaggagcggattctcccatcggagcctagcatctttctcagctagctcccgctcatgttcccgagcttaacgacggtctcggtggtgggagttgcactattctcaatgtgttctttcatcaggggtctcccccatctttgaggcttcgtcctaagagacgggttgtgacgggtcccgctccctagcttcatggtgtcgtcgcacgtttcgacgtctgttcctccatcattatgcgtcgtgctggggaggctcttcccccagttcggtggattcgtcatcagagttgggcaacgaccctagtctcccctgaatgaagaggatgtcagggaagaaaggagtaggtgcatcggtatgcttcttctcatcctcctttgagggcggaggtgtcggggtgattgtccattatgcttttctgctccggtccagaatatacatttcccttcgccaggtgatccacatccactcc

SEQ ID NO: 34937 - DNA, 348 bp, Zea Mays
ctaaggccatggaggctgtgcctgcactgtgtaacctcctgcaaaattctgatacaatggtaagtatgattatatatgatgaaaagtgtgtgtgacaaaatacattcatgtgttgttgatccttgtggatgctagattcttgaatctgttgttccgtgcttggtatcgattgctgttggtgcttgtgaaaatgataaatacatgagtaagctcatctatgaaacgaatgtggtcaaggcaacattgaccttgatgtgtaatgagaggtggaagagcctcaatgatgccaccttagaggtatgtctcatcatccttccttgatttcgttgctatcttttagctttcttg

SEQ ID NO: 34938 - DNA, 775 bp, Zea Mays
actaatccctcaaccaattgcggagttctaactcaaaatcgctctgcccacggtgatggcgcaaactgaggataacccgaggcgttcctggcgatctaacatggtctaattcaattgactgggctgataagcatccccagtgcacaagagtgctgaaagaaggacaaggaagggatgaacagacctgtagatgtctggccatggcgagctcactcatggcggagttctaactgatttgggggaacttcaaaattggagcgctctggtggacaatctgaggcacgggcgggtgcgttggatgcgtatatacctaatagagctcactggggggtaatttagcggttccatcggcggtggtggctaattttgagaagacgcgcggtggccgggaaagagagtgagtcatcgtagcggtctgtcgtggcggtcactgggcaatgagctatggcagttactgggcagtcactacgactcgtgacgatgtggtaaatggactaaggcgtggcgcaaccgcggtgaatggtgtatattccggtgacggccgctcggccacgtcgtcggcgcaagtggatgagcgacagagcgcaacagtgcctccaagttcatccacgacaagatctttttaccccacgaagttatccgtgtgctaccagacgtgaatcgcaacgccggcgcaaatctgagcgcggggttgcctgcggcgaggtgcactgcacctatgatcttattcatttcactgtaccatcataaaccctatcaggacgcctgacagagc

SEQ ID NO: 34939 - DNA, 385 bp, Zea Mays
attgaagggagttaggagaagcgttcctggccgtgcatcttggatcaagggccgagaatgattgtaggcatcccagggatcgtattaaatcaagaccgcgaattcgaagatctgacggctgtcgtcaggtaccgactcataaaagcctaagtctaatctggtccattgatggaagattcatcggttgtgatatgacgatacccctttgcggccgatcaattgcataagagcccctatacttttgagtattcaacccgccattcaaaggagagtaagaagtagtacaattgggtccagaatttttacactatagcccctgcggtctcgggaattcatgcccgcagtccataccttgctggatctcaataaaataaaatgggaaata

SEQ ID NO: 34940 - DNA, 341 bp, Zea Mays
ggccgccgctggtgcgggatctgctgcgctcagctatcgatggtggaagacaacccatgaaccgtagatcgcattatcagtggccaggattagaagatagggccaacttgactagagcctatctccaccgttcgatcatttaccgacgtgtaggattagatcgcgttcaaaagtgacctggaccattgatccattatccaatggtcctcgctgctcaccagcacataacacaccaaatccaatcttcaccgctagatctagtctggacggcttgaaccgctcgataccctttcgtcgttcacattttctaaaagaaccccttcccttttgttatattaacc

SEQ ID NO: 34941 - DNA, 572 bp, Zea Mays
gttcttgacagtgacttcattcaaagctttgtaatcgatgcacatcctcttcgtgccatccttcttctccacaaataatactggggctgcccaaggtgaggtacttagtctgatatagtctttctctaacaactcatcaatttgcttcttgagttccaccaactctggcccggacactcgataagctctcttggaaataggggcggtgcctgggataagctctatggcaaattcaactttcctttcaggtggcatgcctggtaactcttcagggaatacatcagggaattctgacacaatcctaattgcctcaatcggattggactccttatcatctactgataatggtgacaagctccttcttctagttcaggtaagtacagcttggttactacttccttttcggatggggacaccaacttaactgtcctcttgtcacaactgacagtggcttgatttctatgtagccaattcatccctaggatgacatctaacccttgagttcccatgactactaggctagcggggaaggctatcccccttatttcaatccttatattcggacatatcct

SEQ ID NO: 34942 - DNA, 529 bp, Zea Mays
gacagaccggccacctggcccagatgcttcgcgacaccgacacttagctcactttccaaattctcttttgaaaagattttaactcgcgaattcagaagtgcatttagtcctcatgctaatgcaacatctatatgctctatgaggcactaagtttcacacaagtaattgtcattgacccctcttgataatacgactatctagcctactaatctagtcaatttacttctctaaacaccttaagaccgacaaaagtaaaaccctatgcaatacattttccttgactcattccataatcaatgtcaaaagtctccaagacatccaatataactcatctttctgtagtccaacatgtattcttatttctctaagaatctgttaatccacatacggttgtcattaattatcaaaacactacttaggggcctagatgcttcatagacccataggccatgagtggggctgaggcctaggacctgtaggtcttgagtgggaggtggatcgactctttaccatgtcgtggctcggtgcc

SEQ ID NO: 34943 - DNA, 304 bp, Zea Mays
ctttagcaaaagacgtttggcgaggtggtattcgggtgtcctatccatttgatccaataccgagggctcagattaggtttagatgccccatgaaccggtacgtggcataggcctttggatccgagatctatgcctaatatccttcgatgccattgatcaagcaatggccctcggtcccgcgatcaacggtccaaattcaaactatccattgcttcctctagatctaatactggccacacatatccgatcaacgatcatcacctcttcacctacctcccggcgatcataaaatccggactcccac

SEQ ID NO: 34944 - DNA, 275 bp, Zea Mays
ggatttagttcggggttgattggtggtgggtttcacttctgaaatcgctgcatacacccaattgttgtagttcttggtcgtggtttgagaaaaacttggtttgatctcgaaatagaataccacaacaaaaccccaaccgagatgagatttctgatttgcgcctcgatctttgtgttgcttgggttcatacttcacaaatagacatatttctccccgcgcaaacactctacaaagtttgagtcaattctgcccttttttgtggttcgacattatcg

SEQ ID NO: 34945 - DNA, 578 bp, Zea Mays
cctgccccaacaccctcgggggctgggtcgctcccagcaccaccctcgggggctgggtcctccatggcagccacctctaaggctgaagatcccacagccacgtccttaggagccaagtgactcggatcagcgtcttcactaggtagaccgccctccaaggtcgacgaagcacgagaaactacccgggttatctcttgcctggcaggatcacgcggcagaagaccatcatctcggacctctgaacagagagtgggattgtcacattcaggaggctctgatagaaggtcctcagggatgatctcttgcagcgcttggtcataatcagatattgacaacccctggaggctgacaagagctaacaaggcttgtatgggaatgtcgctgaccctgtggtgacgactattcttatggatcagcggaatttcttcttcttcctcctcctcttcctcatcaggcgcaccgctagtaacctcaacatcatcacaacctctgacattgtcctcgaggatggtgctcgccggaccatcaccgagggatagtgtggagaggccagcatcctgctccaagcatgacaaccg

SEQ ID NO: 34946 - DNA, 422 bp, Zea Mays
ccctgaacaaaaggtacagcttgtagaagaggaatcagaaacagaagacttccaaaatgaggagggagaatctttgttagggatagaggatgccaaaatgtcaggagttttttcatgtacaaaaccttttgatgtaagattccttattatatcgagagataatgtgtgatctaccatgttcttcacaaagaatcaaagtgttacaactttacattgtaaataactctgtgtcaccaggtatcaacactaatgggcatatttgagggtggtcctttggagtgccgggtgatggagaaagttggctgtatggactactctgttacagcatgggaacctgtcagagctgatatttaccagaggcaagttcattataagtttgacaagaaatcagcacggcacggaggagaagcaatgagcaccca

SEQ ID NO: 34947 - DNA, 316 bp, Zea Mays
aaggacagggcatatccggcttatctgtaccgaggtctagctgactcaacctgggttaccaacagaagaattcccgctgtagacttggtgaaccagcttgaaatgattcttagaggcaaggtatcaaatgttggtgccccagtggcatactcggcctggaacctgcctccttccaaggccttcactcattttgtgtcgaatccacctgttgctgatggcggtttgggccttagagtgcgaccctctgccgaagaagttagcgctttggttgcctcgctcggagaaattcctgatgatgaacggcaggtccactttg

SEQ ID NO: 34948 - DNA, 467 bp, Zea Mays
tcagattacataacttatgtctcacgtgcgtgcgtcttcttctctagaggcgatgtccatcgcaacattcgttgagctcacgtcctagtgatcatgctggggctaggggaattaaagtggtatcggaggctccgatcttcggtggcaacgctgcgctacttcgggtacttctccgacgaggtggagcttctacaactacggcgcgacaatgcttctctacgtggaacaccttctctcgctcgttcaggatcaggataagaccgagccggtgaggatgagccgatggcaagactgcagcgtggcgccagaatcggagacgtgccactcaatggtctgcacgcacgtcttcagggcagtgaaggggacatcaatgtcagcggtgatgtgcactgtgcggtcatcgttgccactctacgtctgctgcagtggagtgaagcgcatagggtagcccttgcagagagggtcga

SEQ ID NO: 34949 - DNA, 743 bp, Zea Mays
attccatagttttaacttctcccaactgaggagcaaagccagacaggttgacctgtcccagcagctgaaatcaaaagctcctagcacaacccaccaaaatgtggtctatggtttcttgatcttggtcacacataacacatttgtcaggatggcttaaacctctcttgtgcagacggtctgctgtccaacatcttccaagatcagcaagccatggaaagaatttacatttgggaggagaacaagttttccaaattaattctcaatactgagccttgatcgacctgatgaagaggccatcataagctgctttagctgaataaattccatcagtagcaaacctgaaaatatgcttgtcctccatgtctggatgaagctgaacagtttgaagttcatcccaaagatcaaggaggtcggcaaagacacctactgtcaaggcccctttaatatcagttaaccatttctgtctctcaaggcctcaagcacagttctgttgttcctaatcttttttggcacagctgcaagcagtcgaggagcaaggtcttcaatattctttccgtggacccaacggtcttgccaaaagattgataggatctgggtcctacaacggctatgtaggtcgtacgggcagtagatcgatggtcaggtcatatgtacccccagcaatacacagaaatcatggtcgcatatagggagcatgcgagcaagaaaaagagacatgggagatggccctagagagcagacta

SEQ ID NO: 34950 - DNA, 443 bp, Zea Mays
aaaaaagctcaagggggatatactcacatactagtcaccattggtaagttcacaaaatggatagagtacaatcccatcgcctctttgacctcatcaaaagtggtgcaattcattcaagaaataatgtttaggttcgggatacctaacaacattatcacagacctgggatctaacttcactagctcagagttctttgatttctgtgagcaaaggagcatccagatcaagtacgcatcaatggcacacccaagactaatgggcaggtggaaagagccaatggaatgatacttgatgcactcaggaaaaaggtgttcgacaagagcgaaaagcttgcaggaaaatggatcagaaaactaccgtatgtggtctggagcctgcgaacccagccaagctgggccttgcatggaaacaccccattcttcatggtatatggatcggaggca

SEQ ID NO: 34951 - DNA, 731 bp, Zea Mays
ggccatgccactaaacagtgacccccgttggcatccttgcgacctgtccaaagaaaactacgacgaatcttgtcaaaggccttaatcgcccactttggaagctcaagagccatagcacggtaaataatggtggtagtgaggacagactgaactaggatggccctgccagcctagtcatcaatgatttattctagaggttgtcgagaacaactatagcaggattgtccaggtggtggtgccaaatggaggaagagacgataaggctagcttgagctttattctaggggttgtcgagaacgactatagtaatatgatcaaggtggtggtgctaaacgaaggatgagatgataaggttagcttgagttgcaggggtggtgactagggggaaggtgttaagattattgccattattcaaacaaagaattacacacctggtttagaagtgcttaaaaaaccaagagtgtcaaatttgttggaacaactattgtcgcgcgtgaattaatgaaccaaaaggttacacataagtgatggtatggccagaacattatttcaaatgaaatttgattatggcgtgataagaatgaaagtacctcatgaaacaaggatactatttgccattgcctattgtgatgaagtaatgggtatggggaaggcaaaagagtagtataccatatttttataattgtgggaggccggactagtatctatctcccaaggtttaggagtcttga

SEQ ID NO: 34952 - DNA, 354 bp, Zea Mays
gcaacccccgacgtcgacgaaccaacgtctaaagacctcatcgacggagaccgcgtcttcgccctgcaggccctcaacaaataccaagctcaaaccaaggcctggcgtgacaacgcggtcgtcccaagagagttcaacacaggagacctcgtactcgtccggaccacctggatagagttacggggtaagctggagccaaaatgggagggtccattcatcgtcaagtcgaaggcatccccagcgcgtacaggctatcaacgcccactagcaaagacttagagcactcctggaacatcgacaatctacgcaaattttttgtttaaacctcagggcctacgcgcccttgtaatccac

SEQ ID NO: 34953 - DNA, 848 bp, Zea Mays
cgcgtggggccacctcgtcggatgaatcttcttcgttctgttaggattgtgccgcaaatccccattgccgaacgacgaagcaggatctccctggctctagggtatatataccggtggcactcccctccttgaaccccaagtctcgatggttagtatctacgcctcgccatgacctccgagcatgaggaaacgttggtgggagatcgaacgggaagcagagaatgggatgaacgggggagtctcggattgggggaggagaccgtagcatcgtggcctggatcatgacttgagcttatgggatcatccgtgtcgtgccgcacgttcctagcggtttgccggccgaggtcaacccctggagcttcatggcgcgtgccggagttggcggtcggcgtcacgccgtggaccgggtcgatcagcccccttttgcatcggtgagcccctttaacgtgttcaccatcttctatgccctctaatacgcgttactgtgtctcaaattgggggcgtttgtggtgctagcccgtgttcaccagaaccacaccatcgtggtgccgcacccttgctgtgggcgggagtctcactgccaccatcgccggtgcgctctattccattgaattcaccattgtccctatgctattttgcaccttcccttgcatgtggtagtgtgcgggatcgccagacgggtattgctccggcaatgtcgccgtcgcgtgggaaccgcgcgccaccaccatccgggtaatggtggggaagaaggtgctgcctccatcgatctgttcgcagacggctggatctaggcgtcaagtaccgcttcgggggagtgggatccgcacggtggatttggatccaac

SEQ ID NO: 34954 - DNA, 321 bp, Zea Mays
gactcaggcgaatctttatgtggacggcgggttattctggaattaccgaggggctcatatgctaaaaggtctaggtgaaggggtatggttctttctgagttgttggattagaaaccaagggctaggattagatctcaaataaaacgaatcggtatgcaactatggccattggatctgggatctatggtccatattcagcataactgcactctattcttgttcgcccgatcgcaaatccatgatccagaacccatcatgcgaaagggaatatggtgtcataatctcgtcgctccatcgcctatctgacggcctacctttctt

SEQ ID NO: 34955 - DNA, 286 bp, Zea Mays
caacctttggccacaaaggagaaggctgaaggtcaaaagaaacggagaattgttaatgtaatgcaagctatttagcaaacaccgccttcagcctcggcgtccagaatggtgcccgccgcaagtgcccaagccactgccgaagctaccaaacttgtgaccacaatgtcaggaattgacaagctcatatcaaatatggttacagttgtggctacagaggaaaatatggccgcagtgcctgacagagggaaagaagttgttgatgcttcttcagaagaaaaagatttcg

SEQ ID NO: 34956 - DNA, 374 bp, Zea Mays
cgggtgtgacaatatgggccatgaggagccaaggtctggaactagatgcaagatgcttttgtagcatccatgagttttcttatgagacgaagactaccggaaaggagcagtatcacaacaactttggttgttacagtttcgtgcctcggtctgaggtgagctacccagttcccacattttggaagaggtgggcgggctcctggatgcatgaatggttttacgtgaagaatgacctaagtcaagggaggatgtaagagggattattcaatggcctatatggtctcgcttcggcattaggaggccagccactgcccttgggaatgatatacaaacatgccaggcggctttcaatacagtgtgtacttacataggca

SEQ ID NO: 34957 - DNA, 560 bp, Zea Mays
atttggggggaaacgaaattgggtcgctacggtggatgatcggaggcgagggctggtgctctgggttcgtaacaagtagacggaactggccgaggcatcaatttgaatggggaagcgctcgcggtgagaagggggaggagtcaccggaggccgctaacatggcgctcacaggctaactatctacggtggtcactatcgagtccttacaacttgcgatgacatggtgaatcgactacgacgtggcacactttcggtgaacggcaatctccatggtgatgatcgtccggccacgtcgcagcacaagtgggtacgacgaccaggcggccacagtgccccgacttcatcccttgcgcgagatcttttaccctgagtcattatccgtgcaccattgggcacgaatcacagcgccggtgaggatcgtggcacgggatcaccgacggcggtgcactgaacctggcgatctgattcagttactgtaccatcgcgctcttcctcagttgttctgacagagcgacttgtgcttagttcttcaatttttgtgtggcaacttaatcatcatc

SEQ ID NO: 34958 - DNA, 293 bp, Zea Mays
aatattatatatgtggttgtgcaaaactccgaaatttgaaataggagacacagttgataattctacgctctacgcacgggcggcggactgcactactagttcatcggatgcgttagcgtgccactcctcatcttgtttccttgtacgtactagtgcaatccgtcagccgcacggctccagtccactccagtccagcaacagcgtcacctccagctccgaaaggcttatccttgcaacaaacatcgtacgaaaaaggcgcaggacaaaagaaaatggatcgaaatgcaacaaat

SEQ ID NO: 34959 - DNA, 661 bp, Zea Mays
gaagataaaagggcccaagaaggaccgaatcacctacagaggtgaccaagaaaaatttcttgttgctcacaatgatagatggagtggacggtagagaggggtgggaagaagagagtatacccgcatctagagtggtgtggtaagaggcaccagaatcaacaatccagctagtgacagcaggagtcagggccatcgtgctgaaggagctagcgagtaactactgatcccacccaccgcgccaggggttctaggacgaaacaaagtggggtgggagaagcaggagtgacagcagaggtgtcaggggcgcaaaggggagggagccgaggtgataccctggatcaggcattatcagatgagtcggctagggaggaggcagacacttgaagggtccacctagggacgggccgagccatgtggagatgcagtcaatccatgggttgtagagaaagggccaaggagcatccccctagccacccccaccaccacggccaccctcgctccgagcctccgacggcaaccaccaccccagacccccccccccccgacccaagttggtagggaggatgtgcagagccagaggagagagggacagatgagcacggcgacaaatcccccaaggctggagtagaggagggcgaacgcaaagtcgcccatggcgtgg

SEQ ID NO: 34960 - DNA, 432 bp, Zea Mays
ctaagatccagtgagaatctgcctagggttgctataacaaagttgtatagttattaaagaggaataactttgttataggtgtttgggtttggtaccacatggaattgggagaaaatggagctccaaagtgctctgtcagccgctctgaatgagctctcccatggtacagtgctgaaccagattagactgccagcgtggagttctcaccgccgatgactccctccgccgcgattcgtgtcaccggcatcgggattcgtgcttggtggatggatagcgtcgtgggtaaaagatcttcgtcgtcggtgagctgaacgccactccggctagccgcaatccctctccccttgctcaccgcccttgaataaaggttctcaccgccatcaagccttcgccgttgtccgccgcgtgtctcagactgtctaccgcatcacc

SEQ ID NO: 34961 - DNA, 294 bp, Zea Mays
ttcctagccaaagctgtgtacaggtccaggtcccagtcgagactacctcctgggggccgggtcaccaattctttcttaggtacactggtatccagcctcgacacgtcgagcatacatccaaggggggccaagtaccaaggagaagttggtaatgctacacacagcgaggacaaatagcatacatataagtgatgtttgattaatagttctcaaaagtatcttacaaaaccaaaagttattacatccgccttcaagagaaaccctagccttatctctgcaggtacgagctactcg

SEQ ID NO: 34962 - DNA, 435 bp, Zea Mays
gcgaggcagctcggcttcgatcaggacatccctgggacggttccccgtgcaagctcaggttgggagaaagcatgggagacatacaacatagaggccaagagttctgcttttatctttccaaatcacaagcctggcgtgacggttcagtatgcaaagtggtggaagccttactcatcagcatgcggtagtgccgttgctaatgctgcaaagatcaaagaaggccacgatcttgttagtccagtgaaaaggaaaatggaaggggttcttgctggaaattctggcaaaaaggtgcgtctgcgtgtggccactgctaccctgggctgcccgcccaatataccagcaggaattaacgtctacccgtcccagtcctcaggcagccatgctgcaacaagacgagctgcggcagcaccagggcttgttctccgcgcgtgtcca

SEQ ID NO: 34963 - DNA, 358 bp, Zea Mays
ttggtaatccgacctttcaatcaaaaccgttcttcacctcgttcaccctcctatccattcaaacagcctgtttttattcaccctaccactgcccccacttctacaaatcagccaagtgcccctggtgctcgtttccccgccctccctagttcctcaactggctgcttcaactatgggaagtctggtcattttatcaaagactgcccatatccgaggcagaataagtccagcaatcaatagaactctgggagctctaatcaaggcaagggaaacatggctaattatttagtaggcaaaaatgtcaagaagactgggcgaatttattacactcaagtggccactacaccggaaggagagc

SEQ ID NO: 34964 - DNA, 440 bp, Zea Mays
ctcgcacattcggttatgctagcgaaggcgttacgcacttggtcggatgtaattgctatgctggactggtgtgcgtgtagtcggtctttgcgcggacttcgcacggacaggtgtaattgttatcgcgctagcccggctgcgcccgtaggcgacttttgcatggatagtctccgcggtagacttcggtttttcgcacttgttgtgctagtccggctgcacccttaggcgacttctgcacggtgagtcttcgcgttagacttcgatttttcgcacttattgtgctaatccggctgcacccttaggcgacttctgcacggtgagtcttcgcgttagacttctatgtttcgcacttattgtgctaatccggctgcacccttaggcgacttctgcacggagttgtcgcacgcgagggtggctagcgctgagcctcgcggtgactt

SEQ ID NO: 34965 - DNA, 387 bp, Zea Mays
cgcatatggcaggatggtgtgaaatatgtccctgaaggcccactctgtcgcgggttattattgggcgtgagcagcattatcggtgccctcgtgtcgggtaagaacactcccttggagttcgcgttggtcttctatgtgtgcagtatcatcaggatcataggttaccaaccaatgtcggtggggcgagaaatccggcttggcgccaccgtgtgatgtgggcgccgccgcactccgtctgtatggtgagggttgggagaaaacggtcctgagcctttgacttcggaatatgtggcccaaattccaaacaaaataccccttcactcgattaaatccgatccgttggttgtgggctgagcgatcgagattgggttagggcgtggatgtctc

SEQ ID NO: 34966 - DNA, 3059 bp, Zea Mays
ggcggctcctcatccactcccccgcactgcggtcggtcggaagcgctcccatccactccgtatctgacttccacccatcgctccgtcggaggcgcctctcgagggtgacgtgaggcgtgtgagctctcccgtttgcttcccgccctggctcaatcggaggacggtggtgcgctcgaggtcataggagatcgaacagatggtgatttgacgaaggacacgaaggttattttacactcccgattgctataatgatcaggattgtcactttgtcagacatttctgattctatatcctggaaattgtttggagttttggactacggcttataagaaaactatgattacattaaatccgaattttgtataagcggtcgcaaacgtgccttagacttcctctgatttttgtaagaacaccttcaacaatcaacaataaaattaacttgctaactcatgaatcatgattcttttaaaaaatgaaattagagtaacttaacatactagtatatgtaactctctattctaaattaagagacattttgagtattctagatacatagtttttgctatacagatatacatgtcaagcgaatgcaaacgctatttccacttcacaagttaaacataaagttaagtatattttcactcattacggtaaagatgatcacatagtacatttttgctttagactagctaaacaacaaagaacagaaagtgccatgactgtctaatttcagaagggcttttatttctcttgagactgtggcatttttatttttgcatagggtgaaacaaacaccattatatgagatatgatactagtggagttaaaatcatttttaggtttattatttatcttaaatttgtcactaccaaaaggtctaacatatgggtgcataagtcttagaacgagcataaggatcaaacctaaattagttttatgtgagagggagcttgttttttgttctaaaatttgggtcaagcttttattttccatcttcctttaaagtatccaatatattttaaaggggtgaatgattatcacaagtgttattcttatatttatcttttttaccacaattagagtacaaaaaacctcatggtagctatattttttagttgatgtaatgtatcttaacatcaacatctttcaacttcaactcaatgaatttacatttatcatatgaagttggtttaacaatagcacaaacatgtttctcattttgttcttttcagttttaagttgttctaaagtaggaacatgcacatccattgttgaagtaagtttggataaattaagtcacatgatttgcatgagtcatctttagaaatcaaagttttaagtcttgcagtttcagcattttaagatttaatcaaagtatcatatttcttaatttttttatttactttctctagtgaagtaccaggttttttaactgcacaagctacatcattgtaacacgactctaatgcacgacctttacttacgttgtcaaactcgctatttgtggagctctttttacttgccgttaaacactttttacttgccgttaaacacaatccactcaaatggttcttacttttgggagttgcaccatcctcattgtttgtgtttgtgtccacatcactcaaattgatttgatcaaagaagaacatgatgtaccaccttgtggttcaagtagtctgttgttgctgaatgtgtttttttgtctcacttctttcaatttctttttcctgttcaccttcacccctgtcaatttactagaaactttgggcttttggagggaatatagttgagtggaccacactcaaaacacctttgaggatctccacttcttttatcattcttacattctttaaagcttcatcagattgagaagagaagtgtgctagttcttcttctagaaggtcctcaagctattcattagttagtgaagacaagaatgataacaaaaaaactagatggagattcaatattagacatgctaggttgagagatcaaatcaattgactaattattattatttctggccaaaatattcatgagttttcaatttaggttaacattagtaatataagtaactttcctctcctatatagacatattaaagctcgaagtaattgacgtgcatttttcacattagtataagtaacattgatatcacataggtcactaagaattttattatagtgagcaaagaaatcatctaataattcatcagatttcatctcaaaatgcatttaatcttttttgtacatgtcttggcgtacctctttttttgaagataaaccctcatgataatcaggaagtgctctctgtactcgatatatggatttatgatgcataatgggaccaaagtcgctccttacaagaattaagtgatgggtttcttgccatgatattaacctccacttgggccgtgtccatggctcttatctcacgttctcggacacctaataaggcttatataccttctcccatattgcaaagccctaaatttgaatataagatctaggttccatttcgctattgaccatgtttcgcctcaaaacaacacttgcacatgaacaaacacacaatcgtgttcgagcataagtccattgactcaattcaattaatccgcataccacctcaaatgtgtgtatcatgcgacaataacaaatcaccatgctataacatgcatatataagtaatacatgcacattacctataccaaaattttaatcattttgaaatatcaatttcatcttaaataaaattttcatcacttgatctcacattacatcaacctcttatgaagacaaatagcttgtcattaatcaagatctgaattgttggcacaacgttcctctttgcttggcgacctctcttaatgataacttcccaaatttctacataatttgaaatttgattgaatatatttttttctcttgtgaagatatccaaattggagccagtccattgtttgttttttctctggattcactacacaagtaagcattcgacacaatctatcaagaaagatcgcagagatcaacttaaggcttgaagacatcattaac

SEQ ID NO: 34967 - DNA, 467 bp, Zea Mays
ccggtgaccatcgcgtcgtgattcacgccggccgctgcgattcgtgcgccgtgacttgtggatagctgtgggcgagtaaagatcttgggaccagatcgactagcgctcggttatggctaagctcaccgtacccacttgctcgtcgatcgatcaggatagacctcgccaccgttggccgcttaccactgtgtgccacgtgctaaagcgctagaccacgtcgcagtgaatcacatcgtgcatgcccggtgatcgccagagagccgccacggtgaaagccactaatctcgagcgccagtaaccttcttcctctccggccgccagcgtgacttcgtgaaattggatgccaccgctgatggagcctataaattgccgcccccgcctgctccattaagtagctgtgtacccagtaaaccaaccctcgcctcgaatcatccactagagctccccaatttgggatttcccccaaa

SEQ ID NO: 34968 - DNA, 528 bp, Zea Mays
gttggactgaatcccccacagacttggagatagctgaggccagggttctgcttgctgaagttggtttgttgaaggagagaggtttgactgctgaagctgtagttgcagactttgtttttaagaacattcagccactgaaagacaaagcatacccgacttatttgtatagtggtgtcactgactcaacccgggttaccaacaggaggattcctgctatggatttggtaagccggctggagatgatccttagaggcaaagtgtcgaacattggtgctcctgttgcatattctacctggaattagccaccttccaggacctttttcagttttgtgtcccatcgtcctgctagcgacagtggcctgggtcttagagtgcgaccctctcccaaagaagtcgaggctctagttgcttcacttggtgatctcccccacgatgagaggcaagttcactttgagatgcctataaacccgagtgatgcggagataagtgccatgctggacatgttagctgaggattcatctgactccg

SEQ ID NO: 34969 - DNA, 360 bp, Zea Mays
gtcggagtatcatctttgagctgagcagttcgtgcgtcgctgttctaagcctttgtgcccttttgctgttatagatgagaggtcgggatcattggcagcggtggtgtgggccaatcctctgcccatggctccgcggacgccgcgccatgctggagcactttggttctgtggtagtgctacaccctaaacccttttagaaaaagcaaggcgcaaagcatacctacatacatacgcatggaatcatttcgatttgaaggcggcggttgacagccgttttcgtgcataagaccgtccgtccgcaaacaaagctagttgccacaccaaagaccaaacttggctcgtgtcgtgtctcagtgtctg

SEQ ID NO: 34970 - DNA, 396 bp, Zea Mays
aacccgcatacgtccggtgacgcgtgattttcgcgccttaaatttcggctccattagccattacgaaacagatatacgatttacgctaacattcgtactaatttacgatgtttaggttcacgtttacgctaaaatccattcgagccagaacctgcgcactcggtcgcacataattttcacgccgtaatctcgggacctatttgttgttacgaaacagataaatgatttacgctaaatttcgtattaatttacgttgttttagctcacgttttacgctggaatccgcccgagccagaacccgtgcatgatcggctgcacacaattttcacgccgtaattttaggcttcatttgctgttacaaaacatatataagatttacgctaaattctatactca

SEQ ID NO: 34971 - DNA, 291 bp, Zea Mays
aagaagcaaaggaatcactcggtgatgtcgacatgggtaaagctaagcgttgtggccatgaatggaaatgtgcctgttttttctgagttgcgatgaatggaaatgtggccggccgatgaccatttaaatacaatcaaatcaagaactgaatcatcgtttactcgaacttcgaggagcaaagaggagtcaaaagtcgccgcttcgtgttcggcgattgccgtttcaattctacagggacagggacagttgaaaagacacaactgttcaactccacacgcgactgagttaagg

SEQ ID NO: 34972 - DNA, 729 bp, Zea Mays
cgacggtctcaccgccgacaaccgatctccgccgtgattcacgccgccgccattgagatttacgccactggtgacccgataaacttgccagctattaactcttcgcctgaggatgactccggtgactcaccgtcgtacccccctgctttgcggcttgagcagataagctcgccgatgaaccgccatcttctggccttgtgccacgtacctgagtgtttccaccgtgtcgccgtgaacctttgtgactctccgtggctcgccggagtaactgccacggtgctagacacccagccgctgcgccagtaactccctgtccctccgaccgccgcgcgtcatcgtcccaattcccggccaccgcttccgcttagtataaattgagcccacggtcagctccgcaacatcatcacacgccccaccatctagtatcacccccaatcttgcaaccgtgagcgccaattttaagttttccccaaatctgttctgagacaccgcgaagagcacctcgtcgtggccagtgcgatataggttagttgaactaaattgccaccaatcaccgggaacacgttcatctgtccgcggtcactgcggctagagcgaattggatcaccatttctgaaattaagttaggggaagtgattgggaatggttcaattccatgcccgctgctcgggggcaccagtcttggcctcctctggccggtctacgtgctcgtcggagctcggctgcgct

SEQ ID NO: 34973 - DNA, 280 bp, Zea Mays
gcaaaagtcgcctaagggtgtagccggactagcacaacaagtgcgaaaaatcgaagtcttcctcaaaaagactatccgtgcaaaagtcgcctaagggtgcagccggactaagcacaacaagtgcgaaaaattgaagtcttcctcaaaagactacccgtgctaaaccctacaccaaactgtccacgcaaagaccgactacaggcgcgccggactaacataataaacacactagaccaagtgcgcaacgcctttatgagcatagccggatgtgcgaaggcgc

SEQ ID NO: 34974 - DNA, 628 bp, Zea Mays
gtagtgctgattgtagtattcttaagaggcatgttacaactggtgcgagtgtgggaagaaagaggggggtcctgtccttttatagctcaagggtagggccttacagaggagacttgtttcctactggtgggggcggtaaggacatgatctattacccctgactgatgtagtacctttgtcgtcgttcatacgatcatgcatagccatactcgtagcatggcataccgctctatccatccggcatacgggtccctgtagcgagtctgatgctgatgtcctcgtagtggcgctcgatgggtcccacggggcagtctcatggtgtggtcatgtctggcacaacctctcctttcgacatgaaccctgcatcaccctcttgcatgcgtaggcatacacccggtatggcatgttgtcccatccttcccggtatgtgggtcactgtagagactctggtgcttaggtccccatgaatggggttgactggccccacaagacagatgggatacaccagagaccacacacagtagtgtgtcttcatgttgacaagggcctctcggtgcccctctggtatgccgcgctcatggtctggacgtggtttggtgacgacgcgtcttgtcgtggctgacgtggg

SEQ ID NO: 34975 - DNA, 310 bp, Zea Mays
gaggcgcgaagcgcggcgagatctgcgagggcacgtccggctcgaataatttgtgacggcgattcctgtggcgtgccccggaatactgtgggtaggcggaggacgaggctgcactgtgcaatctgaccaccagccgaagccgagggtccggggtcatctttcccgtctacagtgccggcgaccgcagcggtggtgcccgctcccatctgcggccaccaataaaggctgcgatgggcgggacctaggccaacacttgaactggtggaaaaggctgcctccttttctaactcaatcatctttacctgtcgtg

SEQ ID NO: 34976 - DNA, 524 bp, Zea Mays
cccaagggtgccgccggacatttacatcacaccaccaagcgaagggcaataggccacattacaatacaagtcgtagattacacacacacagcgaaggatcaccagtctcaccgcacaaataaatacaattgcgccctctactaccgcacgacaagcgagggcatcacacattatagatcggctcaaccttcgggataatacccgcctcccgataattaaacaacattattttcaattcctcacccgcgaacaaattccgtaggtccccctcaccaatactcgtcccaaccgccgaagacagcaagtcacgttgattaccccgatctacacgaagacgagttcgctccaaccccatctgatggcgcctcccacttcgcgagctctcaccaacactatgcttcgccaccacttttcgctgacggcattcgatcctcaccccagccgtgggatccaactcttcgcccatctccagccgcggcgaagactcctccgcggccacatctaacgcagcaaaataatccaaa

SEQ ID NO: 34977 - DNA, 517 bp, Zea Mays
acccgaacggtccaaagtaaggggccagacggtccgcgactgagccaaattgtctggggttgtacccgaataatttgaccatgtatagtgtgacctgggtggtctgtgcgcggactcgagtagggtcacacagttcgacgaaatacgacaaacggtcgacgctatagccgaacggtctttgctgaccctcaaacggccctactgtgttaagagttggtcacgtgttaggcaacgactgctgcggtggcgctacgaacgtattcatcgacataccatacaatggctaggtacatgatgacccatttgcagtcgatgtgtttggtgtgggtggttatttatttggttcatgagagggaaaactcaagacagtagatttttcatatgaatgtgtccatcctttaatagattcatctatatactgctttaactgatcccctcgctgttctataaaagccataagagatggatttggaatacttacaataggagactgagacggaggtaggggagattccac

SEQ ID NO: 34978 - DNA, 369 bp, Zea Mays
gcttggaatatcagattggcgtgaaatttggcgaatatgttactggaggtattgtgaaggtgcctgaaaaatttgggttcaattggagcatttttggctggtttgggcatttcaccgaacacgtggtgtgcggagttttagggtttcggtgaaaagactatgtggggtgggaaaaccctcccgaaggagctagtaacctgcaaggatactcaagaagtacataggaacacttgctaccagtaggtttcacagggattcacaagaattggaaaaaggcacaaggggaggaagaggggggcttcactggtggcaggagctcagagagaaagggggaaagagagagagaaggggatactcaccagagaggga

SEQ ID NO: 34979 - DNA, 426 bp, Zea Mays
gcgctctccagcaccacgccgacagcggcatggccgtcatcgaccgtttcgacatctacatctttgtgaacagcgatgcctaccagttgctttgcgccctcgaggttgtcttcatcatcggctgcatggctgacgacacgggcaaccataccaggactggtgtaccagcctctggcgccaaccctcgctactgctaccatgccggtgaccgcagcaccccaatccctgcccatctacgatggcagcggtgaccctctgggtggttaaacgacagctagcggttcttttggagccagcgcaccctggagtctgacaaggtctggctggcatcgtatcacctcacggaccacgcacatatgtggttctggtggctgtaacgcgacgagcatcaagtcacatggccacagttcaagatcatgtgctagc

SEQ ID NO: 34980 - DNA, 273 bp, Zea Mays
ctactgataatgctgacatcacactcggtatgttttatattaatgcaattcctgcaaccatattatttgattctggtgctacacattcatttatgtctgctcgatatgccaatacaaatgagataccactgctaaatatgagaaaaccaatgatagtaattacacctaaagggcctgttgaggcaaatcatatgacacacagattgacattaaccattatgggaagagagttctaggctaccgctatagtattgtatagatctgatcctcgtt

SEQ ID NO: 34981 - DNA, 314 bp, Zea Mays
tgcgtggcctgcttgggtggagcacgccagggctcgctggaagaatccgtgcgggcgatgccccccttggcgatctcgccgccggggagttcatgctgttcacctcctacatctcttgcgggttggcgttgccgatttcgcccttcttcctactgctgctagaggagttcgggcttcagcttcaacacctcacgccccactccatcctccaggcagcaatcttcgttcacctctgcaagatgttcgtaggtgtggccgcctgcacttccctcttccggtacttcttcgtgctggtcaagtctaggaaaactagg

SEQ ID NO: 34982 - DNA, 294 bp, Zea Mays
tggaagactcctgggttattaggacatcctattgctcaggggaagaaggattccctcacctcttacggagttgcgcgctacgcatggggatccgcaagaagcccgaatatgtctggaaggaataccacgaaaatggagtagaaaagtgctctatggcagtctacctgggagaaagccaaagctacccaaaccaccctcccttccaagtcaacttcaccgagcaccgcttcctagacacttgccaaagtgtagcccgaaaagcccttaaacagctatgccaaaactacagccaag

SEQ ID NO: 34983 - DNA, 361 bp, Zea Mays
ggaaaacctctcccatggcaaaacggtggacgatgttgaagacgacaggcatggagttgtcagaaatcgacgttgcaccccctatctggcgcaccagatgtcagtgttaagtaccagcaacacgctacgggggtggccatgtagcgtttttgaggaaggcaacgacgatcgcaactcaatggtacatgtagagcacatcggagacacaagcgattgctcaggtccgggccgcttggtggcataatactctacgtcatgtggtttctgtctatgtatggttgagttctctctggagcacaggagatgtctagaggaagaagatgagttatataggtgtctatctctttttgtagggtccccc

SEQ ID NO: 34984 - DNA, 673 bp, Zea Mays
gtgcaaatactacgcaatgagatgggattcgtgattatataggagttataatggttgatgtgatgagtagtttagcaaatgctagtttgcgtggaggatgtatcgttaagacatgagtgtcggagttcatttatattagtggtcgcgccacattgcttgaagtgtctcgagtgcataccgcaatatggttgtattcgtgccaaggatgtataggttttactcaattagaagtctggttgatatggttaggaaattgtttcggcttgggtagtgaggtggtaacatgccaaagtagtcatcgcttcctctacggttaaatgggaatcatgtgtgatgatgttacttatggggtgaatacgtattgaaatcttttatgttgtgcaatatgactagaaatgtgaaggatagatagggtgtttcagaaatgttagcaaataggtcggacaagcatgatagaggttgagtcacttatgttataaaattgatgctcgacatgttaggtaccctaaaaggtgatgttttaggtgacttgtgtgttatccaatttaagttgagaaatgggtaagagaagctaattaatccgctccgaaccatgtttcgagttgcaatgtctaaaatggtttgctaagttttatactgcgttagccaactcatgtaagtaggagtcgattgc

SEQ ID NO: 34985 - DNA, 452 bp, Zea Mays
gtacattataggtgtcacatggctgcattttgacaaccaagtgccaacctttgatcagattgtctttgacaaaaaagacttgagaagcttggctagctaatacaaatggctcatttgtccgaagtagacatttaaagttgacactaacaagtccataaacatccttctttatccctcttttttattgaatacgtcaacccacttgcaacgaaataatggcacacgtcttcccccaagaaattgaagctctattatctctgttaatatgccataatattctacattctcactaattgtactgccctctgccgaaacaacaactccgctgttctgtgtgcatcgatttttgtcacgactctctatgcgaaatctgaatccattcatatcataacctccaaaacatgtattgttttgcaaagggcccctagataaggatagaaggtcttccattt

SEQ ID NO: 34986 - DNA, 393 bp, Zea Mays
gaagaatttatccgattaaagcaagggggagatacggtaatgcagtaaattcaaccatctatcctagtatgccatcaactaagtaaataccgatctgaagaaaaagaattgttttatgaggggacttaatgataggcttcaacggaaaatggcaacaaacaatggcagcgctggcagcggaagccaaaaatgtcgggcatggaaaatcaaaggggtttggaggtgaaaggtcaaatcaaggacctaagaagagaactaggttggtgatccgaccttttaatcaaaatcgttcttcgtcttgcccaccttcgtatccctttaaggagcctgttttcatttgtcccaatactacccccgctcctaccgatcagccgagtgcccctggtactcgtt

SEQ ID NO: 34987 - DNA, 478 bp, Zea Mays
gacgaatcaacatcaatggtgtggctctcaaaggctttagtcaatgcgcacatcatctccttcaattccagataggagacacactcaccattagtagtcttagggcccttatccttatccgtttgggtctttggtcctgtcattgtttgtacaaaacagagacaaaaggcaacaaacaaacaatgtgaacctacaactactctcagggtgatggtggaacacaagttatgaaagtgtcttacccctctcttacaagtttcttaccagtactgcaggtggcaaatggtgcccgtgtgactgcccaaagagcgtgggtgtgattgcaaaggagtacctgttctgttcgacagaaaggtggatctttgggaaggctcactaaatatatatttatggcacacaagtcagtaacagatagcaatgctgaataagtgttccaagtactcatcctagttgctggcctagagaatatattagaaca

SEQ ID NO: 34988 - DNA, 289 bp, Zea Mays
aggagaacccaaggaaaagacgagtggatcagggtgcatgtttgtggggagcggtggtagaggtgttggggtcgcaagcgcacccgaagacgcgaaggtgctcataggtgggggtggtgctgaagagggtgaagaacggagtgggatggctgaccgccttggagggaagacggttgaggaggtaggtggtagtgttcagtgccctagcccagtagcggatgggaaagagaagcctagaagaggaggcaacacaacatattggtggtggtgcgaatcatgcgctcggcct

SEQ ID NO: 34989 - DNA, 389 bp, Zea Mays
tcccctcggtcagtgcggcggcgccgcccagaacggcggtggttcatggacggcattcgcccaaatccagtgctagggccactaattccccaattatgccgacctacgcaatgccacaagtgcgacaaagagggtgaacgacataccagtgcaagagacaatcttagggaaactacccacggcgagaggcagattcgcggcggccctcctgctccggtaagagattcccaagttcctcgaggtccaccgcccaaattgagggcccccgcagcttcacggatccctggcgaacgccctcgcccacacgcgtagacccgtgctcgtgtacagaggagaatcaccggcagcggcgcacacacctcccttgagctcccctcacgacgacgaac

SEQ ID NO: 34990 - DNA, 447 bp, Zea Mays
gcggataggcttgctagaaagggtttgcaacatccagagtgctgccccttatgtgatcagcagcaggaaactatcaatcacttacttgtctcttgtgtcttttctagacaagtttggtttgagctgctgcggttagctaagctgcaggagttgatgccacagaccgaggagcagttttttgaagaatggtggagaaacagcagccttaggtgaaaggtcagactaggagaggttttaactccctggttattcttggggcgtggatgatttggaagcataggaatcaatgcgtctttcaaggaaaaaaatcctagtgtcgctgctgttcttctagctgctatggatgaggtcttagtgtgggtttcagctggggctaaggatttatccttcctccaaattactgcccccctggctgactagggtgatggagttgtagggtgtgtgcgg

SEQ ID NO: 34991 - DNA, 588 bp, Zea Mays
tgaataaggtaatagaacttttggataattgtctttattgcatcttgtgttacatattatatgtctaacatcttctttctcctaatgtgtagcaatacaaaggaattgccaagtttaaagatgggcctctgttgcatgaggaagaaaaagccatcatgtatgaagatattaggaacacaggagatgatcattgggctccgtctagtggtactacaccacaaagtctagagggtgaaaccactgagaacactgatgacaaggatggagactatgaggccaatgatgagaaggatgaagactatgaagaatgtgaagaggtttcacctacaactgctaaaggaaagcgtcatgtttttgttggtcgaaaggacaagggtaaaaagcctaggtcattaggaggacattgggtgcaagatcaattgagcaaacttgtgacagcaagtgagaagagcacatcatccgttgagtctttggcaagaaaggaggacaatgggtgctcaattagagatgtcatggcattggtgaaggagtgtggtgcagctccaggaacaaaagaacacttcatagcatctcaagtttttgtcaagt

SEQ ID NO: 34992 - DNA, 273 bp, Zea Mays
ttcggatgcgcagtgtgtgcctgcttggttctatcgggcaggcaaaggacgacgccatgatgtccgtcgattctcggcagctttgagttaccgactctctctagccgtgtcttgccttccaactgcacagtgtggcgagatggccggccgcgcaatcatagcgagtgctgcgcatagccgccaggcgccagggacgtgttgttgttagcatgtggttgtggccttcctgaggcacgtggtggattggcggcgcagttcagttcaggcgtcacc

SEQ ID NO: 34993 - DNA, 355 bp, Zea Mays
tatgcaccaatatgttaaatatagagcgcgacgcaaaagcgtgcacccgtgcgtccacgtcagctgccaaaaaatcggtcgttagatcctgcttggacggctacggacaactcccatacatgtgaccatccaatacacaaccccacaccggtagcttccagattccaaccgtccaatacacagccctatacctgttgcttctagaattcacccgacgagaccttggaggaggaaaccagacaatatcagcctgatggaggaggaactcaaacgcacggccacaccctcatcgcttgtgtcatctctgcccaggccgtctttgacaagccgtccacgcacctaaaatgaactcgcg

SEQ ID NO: 34994 - DNA, 569 bp, Zea Mays
cttgagtgatttgggggaaatcccaaattggggggttctagtggatgattcgaggcacgagttgcttcactggttgcacaactgcttagcggagcaggcagggtcaacaatttataggctcccacagcggtggccggtgaatttgagagagaagcgcggcggccggagaagaagaaggttactggcgcggtgattcgtggcctattactgtggcaagctccccggcgaccaccggacgagctaaggtgagtcacggcggtgaggttaatgtgccaaggcacgtggcgcaaggccgcgaagagtccatctccggtgaacctatccaaatccaccatggtctgcttgggtacggtggccggagtaaaatagtggccgaagtgtatccacggcgtgatatttccttacccccggtgctatccaattgatccgagcgcgaatcaccacggcgatagcacgaatccgtgcgcggctcgtcggcggcgaggggatcagaacttgatccaatctgttactataccatgggattgttcttcagtcagcctgatagaccaagtttagggcgaatttcc

SEQ ID NO: 34995 - DNA, 379 bp, Zea Mays
cgaccgggaagtcttctcgagcgcatgaatgaggagaatgcgcacaagagacttgtgttgatctatgtggatgatctatgattctagagggctgctaggagtaaataccatcagtccggagtggacaaggtgttacatagtgacactagatcggtccggtgcaccactagaccttgcgacatcagctgccacatcatgtagctattggagtaagtgttggtgcataaactagttgttgtactcgacaggtccgatgcacaccagatagattcgatgtgttagacactcttgctcttcaagaacagacctctctacgtagattcgatgtgttaggcactcttgctcttcaagaacagacctctctatgtaagtgacctgc

SEQ ID NO: 34996 - DNA, 724 bp, Zea Mays
agatgtgacctgatgaataaatataaacagctggactgaaccaaccgaggaacgattgcgtggacgctggatcgtagatcagatcaattgcagtgaacacttctctaatcacgtttaatttacttctgaattgaccaatcaaatcacatgagtgtactgctgagggtatattcgcttttagtgtccatattgttttttagagaaaagggttcccctgcttttagtgttcatatagttaggttgtcattgtcactaattttggaccatgtgtataattttaacagttgtgtaaccattatgaattatatacagtaactggttgctaccttttctgaatttgaagtcgttattcatcaagaaattgtgcggttgagtttttcttttttgaattcagaagtaggctgtttctatgtttctgttgtagcagaaactctccctctttccttccttatcctgcttggctgtcaaaatagtctagccatacttcctcaacctacctttgtgtcagttggcaaatgggaatgatgcaacgcagtcattttgctgtagttgcatcttttgttcttattttaccagcatcttagatctgtaaatctatccacttttccattgcacgtgctcatgttttcggtatatagcagcatgggcttctcaaattacaattggccgacaaatcctgttgctatctgcataccaacttatgtggagatcttttatacacata

SEQ ID NO: 34997 - DNA, 507 bp, Zea Mays
cgaaggggtacgcgtgcgcaaaatcggagtcatccatcagcagatcgacggcgcgctcgaatcgacatgcaccactggcaaacagagcggcgctcgcatccgaccgcggcggaggccatggccggagttgccgtccacggtataagcaccctaaactccaatgctaatcggttcgacgcgttacgggaaggaaagtaaacataaaggcgtggttcataccggaaatcgcagggcagagatatccccacacgacgaagcacggatcctcgctggaacacgccccggcgagcaattcacgccaagctggagcacttctttggctaatagcggcagaatcacaaccagtaggccaaatcggagcgccacagtacttcgcgcggcatcaatttcagtcacaaaacgagttgcacccatggaggcggtgcggtcttgtttgtcgtggtggttttaggagggtttgcgggtggaatccttaacgaaggcacccgcacctttatccttgccgag

SEQ ID NO: 34998 - DNA, 321 bp, Zea Mays
aagccgaagctaagtgctgcaaaataatacctatgcctctctcgtgctctgcagcttcttcagcttgttttgcttgtactccggcatcgtgaatgtctttctcacttttcttcataatttcgtgagtcatttctcggccaccatttacccagatgtcattgtaaaattttccgctcattaaacttgcttcagctgagggatcctttgtgtcatccacagagaaggcagcttcggcttgggccagagtcttgacatggtcacaccctgccttctccaggatggctgaaattcctctcgcaccagagaacgcgcagacatccc

SEQ ID NO: 34999 - DNA, 445 bp, Zea Mays
aaaaaggcctgggcgaaggggtacagggggatatcagccgcaggatccagaatcgagggctaggattagatctggcgcccaacgaaccggtatgcgctattggccgtgggattaaaatccgatggcccagattctatgaaccccgatataaccacaaccgcatgatctgagatctatggctcccgcttgatctattctgtgccgtccgatttccatctaacggccaaccccttttcttctaccacgggcagaccagaccaccgcacaaacaccgccacggcgaggtctcctaccaacggagctaatctccggacttcgggcacgagacccaaattcaaccggtcctcaagctatgggtatgaaagcgggtctgggtgagtggttcgtaccgaggattgtccacgctagcgagctgaccacggagaggaggaggttccgccctgac

SEQ ID NO: 35000 - DNA, 370 bp, Zea Mays
cagcttctgcagtcagacccctctccttcaacaatccaacttcagctagcagaactcctgcctcagccacatcctggtctgtgggggattcagtctagctcggagtgcgaacgttcggttgtctccctgaccgtggggggagagaatttccgtgattctcaacaataaaccactccaagcgccatccttaaatgctatctttgagggggatatcgagataatcagtttttcttccgcggcgcatttctaagctcgcgcccccaccagctgatgctgtcctctggccatcccaggccgacagtgatacaagtatttccacagcccaaagtgtggcaggatgccaagaaaggcctcacataaatgaacaaag

SEQ ID NO: 35001 - DNA, 272 bp, Zea Mays
ctggtagatgttgttgttttgataagtattgacaagcttcgcatctctggactaactcgatggcgtcactttttgctattggccagtagaaaccagacctgaagaccttcccaaccagagtcctggacgctgcgtgtatcccgcattgcccagcatggatctcatctagcagttgtttcccagtggctgaaagaatgcacttcatgagaactcctgttgcgccccttctgtatagtgtttccccaatgagagtatatgagctgactgccttg

SEQ ID NO: 35002 - DNA, 457 bp, Zea Mays
tgcccctgagtgttaaggtccacctgtcaggactcaacatttgacgcccaccgtttgtgcgaagactaaacccacgatgcctcccaagaaaaacacctgggccaactcctcacacaaggattaggcagcgaatgctgccctcaccgctagcgcaaaaaaggcaaggttgttttctctgacgacatcccacaaccatccacaaacaatatcccccaagccgccaccgagctagaagacaaaaaccaccaacccccaagcaaaaatggttgtaatcccctgtgccaagtgtccacacttccagctctgaaatcccaaatgactcaccaccccaacccacatagccacccctacaaatacaaaatatggccagacttgaccagaaacatgtcattagtacccctaggcttcgcaccaacaacaaaccatcaggtccacaagctagggatgcccacctcag

SEQ ID NO: 35003 - DNA, 347 bp, Zea Mays
cagtgcaaccgtgtgagtatggattccaagattgccaccctgtgtgacgagttgtgcaagctaaacatagaagttgtttcctcaggtgccttgagttatatttcagtggagcccactttacatgaacaaatagtcatggcacggatcggtgacaagggtgttcaagtcattaaggaaatgatcggacagaaggtgaataaatacaaatgcttccgtcaggacagcaaaggaattctatggtttggagaccgattggttgttcctaagaacctcgagctcagaaagaaaatattggatgaagctcacctttccaaattctccatgcaccccggcagtaacaatatgta

SEQ ID NO: 35004 - DNA, 347 bp, Zea Mays
ccgctggcaaagatctcctgcagcaggcaggcaatttctcgccggaacctcaacaccgtcgtgtctctgccgcgcgccgtggcccctctcttatgcagtccgtctctggtgagtaagcctcgctcggtattcgcttcgaccatgtgatggtgttgcacctagtagatttaagcttcgggcactgagtgttgggattcaaatccgtggaaatggcgtcgccgtgcctcggtcgggcgccgtcgggttgacgccggtgagagaaaagggttggggagaatcgcgtgtgtcgtccgattttaacggacggccgggattagagctggcgtacccgttcgccacaagtgaac

SEQ ID NO: 35005 - DNA, 337 bp, Zea Mays
cgatgataggttcgggagatggcttttgggcttctccttgctcagttccttgctcctgaatcaacaggtactctccatctgcaaggttgcaatctaatgaatgcaatgcataagttataagtatatctatgtaaatgctatgatatgcaacttcttatgagagttagcattactaagttttttagttggggctataaatcccttcttgttaatttgtaggtaatggcaattagatagggtgaaattataaatggatgattaccttggttaattacaaggttttggacatactttaggttcactggttatttcccttaagtttaaggattatctcttt

SEQ ID NO: 35006 - DNA, 709 bp, Zea Mays
tagggaacagccattgctggcacctttttcagtagacgcaagcgtacaacgcatcttctgtctgcgatgttgtctgttagcagcggcaagcgacgcaggaaagtcgagtaaggaattgtcgcctgcaatcgacgtgcgcacacgtctcagtatgcgcatagagatgtagcagataaaggcagcagcaaaagccctagagccactaacctggtcgctttcgacgtaccggctatgagtggaatggaactgcataacgcgacgcatgtgccggcgccgaagtggatggccgatcaagtgtgttcatgtgtttgatagcagctgttcaaagacataacgaatgtttggttggctatgcgaaagggaaagagagagattggctttaattaaggccatattcaacccaaagaacgcataatatcagtatagactttgtgaaactgcaaaacgttgggtaacggggcctcgacgtcaacaccatatatggctaaccggtcactgccacatctccgcgaaaaactaacagggtcgtatggaagggaggatgccactgccacatctccgcgaaaaaggaggcagcaagcgcagcaataggaccaatgagaaagcagcaagcacgcaacaccatatatggctaactggtcactgcgcactgcgctatgcgaaccacatagaaacacaacaacagtactgctagctagatgtgcaaaac

SEQ ID NO: 35007 - DNA, 450 bp, Zea Mays
ccagaatcagaacatgagtacaggtatatttttttcttttctgtatggttatatctgtgttcattgttgaatctggtggactatttccttgatctggtgaggagcataacttactttgcctaatctgattagtctaatatcttcaattcctggcagatgtggtcgtaatcgtcgcggtgtttatattaattggcttattctgcatgcaacactatgggacagataaagttgggtggctctttgcacctttggtgctcctttggtttattctaatcgggagcgttgggttagtgaacatacgcaaatacaacagttctgttctaaaagcatacaatccagtctacatcttccggtattttagacgaggcaagtctgagatttggacatctcttggaggagtcatgcttagcatcacaggtatctcttggacatctcttggcaattcaactt

SEQ ID NO: 35008 - DNA, 568 bp, Zea Mays
ttgtatgtccaaatgtcaggatggcagccttcctcgaccatctcattcatgacctgcaaggcatgcaagatcagaccctggcgacagagacccttgacaagagagttgtagacgacaaggtcaggcttcagatcttttgcttgtgcctcattgaagagttctagggccctctcaatgtcaccctcggcacacagtccgttgatcagtgagcaatatgtgacccggtctggtacaaaacctttaaagacagcatctttcagaagctcagtagcttcctgcagcatgccgctcttgcagtagccatcaatgatggtgttgtaggtgaaatcatctggtatgcagccctgattcatcatcctaccaaggtactgtgcagcttcctggaccttggagtccttgcaaaggccacgcatcaatgtgttgtaagtgacaacatctggcgcaacgtaggcacccatcctttccactagcgcaacagcctcttccaacctgccgtcttcacagaggccacggatccatatgttgcaagtgaacttgtttgctgacatgccccgcttgaggaccttgg

SEQ ID NO: 35009 - DNA, 437 bp, Zea Mays
atttcattctaattccataaccagagtctgctcatatttttacactactctattgaaccaagaacctgaagatgtatttgcctgccaagaaaatatggagagcgaaaatgaggtcatggagtcaccaccattgaatgattcaaattcacagtcaaaaccaaagggtcgatccaagaattttaatgaagctgaagacattttgttgatgtcagcttatcttaacatacgtaaagatgcaattactggaagggatcaataagaaggcaacttttgggaaagagttgagaagtactttaacgttaacaggacatttgagtcagatcgtaactggtcatcgttgaagcatcggtggggtataattcacaaataagttagtagtttccaaggtttccatgacagtatcgaaaggaaaaatgaaagtgggaagacaagtgatg

SEQ ID NO: 35010 - DNA, 375 bp, Zea Mays
agccgagtctcaagcaaccaggcacgacatttgcgtgttcttgccaatctgtcactatcattttctcataccctaaatctttctttggaaaccttacttcctcaaagcttttcccttatcatcttcggagtttctgaaatgactggagagggaaagggtgacgagctcgtgttggtgaaatactatgatgcggcagagaagatccaagatgaaaagattattgaagaaatcatggttagcctatatgatgattctgatggtatcgaagaattcaactttgaagaggataatgcatatgtcgaagatcggccatcccgcggtatctccggtggttggagttcctgatagtcttcgacgatgcgaccactcggacaa

SEQ ID NO: 35011 - DNA, 438 bp, Zea Mays
catgaatcaaaggatggcagataccagacgatgggtcctatgggtgtgctcctaacacttcaaagccgaagttgtgtgtaggtccaggtcccagtccagtagtaggtagtctcaaactgtagagactacgtcctaggggccggaccaccaattttatctttggcatactggtatccagcctcgacacgttgagcctacctcccagggggccaagtaccaaggggaagttgatgacgctacacatagcaaggacaaataacatacagataggtttaagttccaatgctacctcattagtggttcttagaatatcttacaaaatcaaaagttgttacagtcgcttcccagcaaaacccttgctttgtctctatagttcgtcagcaggatcgcgctggaagcgctcggccaccagctccacggcgtcttgtacactctccc

SEQ ID NO: 35012 - DNA, 528 bp, Zea Mays
cacgtcatccaagtaaaggtacggtccaggtaaatatgtactagctcttttcttgtctgcgaacaaagtaagaaaccctttctctaataatcaccttaaaaggttcgatttcaatgtcactccaggataaaataaattatgtatggctacggctacgggtgatcagcaagagcaaggagaatcaagaattactctgacaatgtctgatgaaagcagacaatgatgaccactactaaccgagaatccgagagaccgatatgaatgtgcatgaagcatcacgcacatgagtggacgagtcccagcctcccagcataattgaggtacctgaggcctggcccatgaaactggtcgggcctacaaaatgctatgaccaataaacccatcaggtatcagccacatgatgctgatgaacaaccgtaatatatggcccacaagaaatggctaacctgatgaatagtcaatgatctctagtgtctattatttgccttttcctctgtacctgctagtggttctagatgccagcttttt

SEQ ID NO: 35013 - DNA, 2542 bp, Zea Mays
caactaatatctctagataaactcaactaggcctcttatccttaggcctgcgcctgtaagtggcgccccacataacataaccattctattgttttcttttgtttggccatgggatggtttgccagttctttttataagttttcctcatcttttacatgatatttactaatgatggattttgtagtgcagacgaagactggatgtggtgcacttgtattatgtttgaacataagtgttgatccacctgatgtaattaaaatttccccttgtgcaagaatggagtgctggataggtaaacttttaattgactatatatttccaaatttcaaattagttgaaaatacagtaaaataactgtttttaaccatttgagtgaaattgtgtctttcttttttatgaattgcatttctgaatgccagatgagagcatattgttaattagaagtacataacgaagttttttagtcccaagtatgttggtggtaggctggagatggaacccaacatgaacactatcaagaagggaaaaacttatacaaatgtataatttaataattatatacacaagacatcaacagtatagtaatattattaaaggatctagagtctttttctggtccattcttgtagatagctggtttccatgtgcttccatagttccatctaaggatattttttgcgagtttgctcgtattcagtcttcccaataactttttctttcagtatatttctaatctgaagtaaatcacagcaaggaagctatctggcacctcttttctcaaaagacactgttaaaatttatattctgaaaatgatattgttttgctccatagtttttagatgaatctatccaccttttaaatttaaagttgagaaatggcaaaaggaagtgaaattttctaatataagatactgcacctattggttgtggtaaacttatttattagtccttgggcaacggtggtaatttatatttgttgataggtttgtactctattactgttattgcactcagtgcagttgctttgtgatattttcataaatctgtttctttctttacagatcctttctctatggcacctcctaaagcccttgaaagtattggaaaaacattgcattcccagtatgagcgcttgcaacctaaggtaaagaacttcttccctgtttaacttcaatgttattttggtgaggattatttgcatcttcatgttttatacctaatgacacttgaaggctcgatacaagcttcagctggatccaacagtggaggaagttaagaagctttctaatacttgccgcaaatatgccagagaagagagagtccttttccattataatggccatggtgtaccaaagcctacatcaaatggtgagatttgggtgtttaacaaggtaacattatgaagacactgtaatacttgccgcatgcattatttatgatagttgtctctgataaaatggttgttttttttgcattttgttgcagagttacacacagtatatcccactttcaattactgatcttgattcatggctgaagacaccttccatttatgtttttgattgctcagctgctggaattattgtgaaagcctttctagaggtatgatacatgtttcaaatgaacatttgtttctcttgtgcttgaagttgaaggtcatatgattttgttcttggactgtgtagtattcatagtgacttgtttatttcagcgcctagactggagttctacctcctcggcatcttcgcagaaggatttcattcttcttgctgcctgtgaagcacatcagacgcttccccagagtgcagaatttcctgctgatgtgtttacggcttgcctcacaacgcccatcaaaatggctttgcactggttctttctccccccttcttttttgtgtgtgtactgttccttctctccttttcttagcatgttgtgcttacactagtacatgcctataaaccatgcaggttttgtaagcgaacatcactccatggtcctctggatcgttctcttattgaccaaattcctggaaggcaaaatgaccgtaaaacacttcttggagagctcaattggatttttactgctataacagatactatcgcatggaatgttcttccacgtggtacattgtttatgagagaaataatgtttttggggaacaagaaaactagagaagattattaaatttcaaaataaatgttagcctatatttggtttatgatacatgtttcactgtgcagatctgttccaaaggcttttcaggcaggaccttcttgttgccggtctcttccgtaacttcttgcttgctgagagaatcatgcgatctgcaaactgttctccagtttcttatccgttgttacccccaacacatcaacaccatatgtggtaactaacctgactcgtccttctttttgcttcaactactttttgtacattttgtaacttgctaaatcccagggatgcatgggacatggctgctgagatttgcctttccaagcttcctcagttaattgctgatccaaacacagagtttcaggttttc

SEQ ID NO: 35014 - DNA, 331 bp, Zea Mays
gaaagcgtcagttagtgttaagttctataaacagagaaagactgaaatgttcaggtgaggtacctcttcaagtgagagctttatcgggcctacgccatttgacaactgccgcgtaagcttgttgtaccgtccccacaaatctttgaagtatttaaacctattttgcagatacttaagtggaatagtcatattcgtttgtttattaatggattttgtaacattctgccaaaaaaggtgagtgaattctgttacatagatgccgttctcaacctctttgaaacacgcatccacgaaaagtgtgtccaatacatcaggccatgccatgtccaac

SEQ ID NO: 35015 - DNA, 346 bp, Zea Mays
gacggatcgggcgccgttaactccgcatcgaatggttaggttagatcccgattctgatattgtgtcaaccgttgatccagccctgtacggtggatatttggcgacagtcgtaactcggccgaatcgattcgcgatcgttgatgccaaatcggacgagtgaagctggggctcggttatgaggagcgcagacggtagatcttcgatccaacggtggggatcgtgtaccgtttcagtttatgtaggatctaatccgggccatcggttctggatctagcggtccacaaaacaggataccccttcaccgtgccacaattgctaaagaacccctgagtaaaatagaattcaa

SEQ ID NO: 35016 - DNA, 281 bp, Zea Mays
ccgctgcggacgccaaagtcaacaaaggacgacatggctacagtctaatccacctctgcccaccacgacgctggtcagagtatggatatggggcactgtaccccctctcctgcctctattccaaggtatggctacataccagactcggcctcggtcacggcctcgggagaggtttccgcctttcccgagcccagcctcggccaaatgccccgacaaaaacacacgcgtgcgctgcctgttctccacgaatcacgcaacagtggctatagagacaacaagac

SEQ ID NO: 35017 - DNA, 559 bp, Zea Mays
caaaggtgataataggcaaggatataaaggaagaggtaaatgtgcataaaaaaccaggaatctaggtacaatcaagaatagaaataagataagtcttgcaagaggtaaagtataggatataaccacgggtgagataagtaagagaccacgcttgaactaaggtgggagattggaggttttagataatgaacatagcgtaatcaccaaggtaagattgagagatgagaagggtaaaggcaataagaaacaaaagcacaacaaaggatgaggttacaaactcgcgagccaaagaagaggatacgaccaagagaaagaaggtatgagacgaaagaggggcgattttaaagggcaggtatgagacaaacatcaatgtaggatatagaggtgtcaagggtgcatatgataataattaaaaagcataacaaaggatatagttaagacaagactcgtgaaacgacaaagtggagaaaacaatcaaggatcagatagataaggttccaacagaagggttgaagtaaagattcattaccgagtggagttataagaaaacaacgagatt

SEQ ID NO: 35018 - DNA, 364 bp, Zea Mays
agtggaggaggtggtgcagactgaaccgggggaaccgagacaccagaatgttgtagcataagagccatgaatgccttgctctcagcccgatcctggagaagctgctgtagaagagaatcctgcctgtcctgtatggtctgaaacatcgagagcatcctctcgaataactgctgatgagctgctgcctggcgggtctgctcggctgccaagtgagcctgctgctgagtgagtgtctaaagaatcaaagcaagtgcggggtcaatagcaggaggggcagcaggggtagcactagaactcccagcctcatgatcatgtgagcatggaggcataggaggcggaggcggaatcccaaaaacatcatcat

SEQ ID NO: 35019 - DNA, 291 bp, Zea Mays
ttgtatacgtgtcgatatcaccaccccagtgtacatctatgggacctcaccagaagttggggatctatgttggttatgaatctctgtccataatcaaatatttagagcctagaactggggatctgttcacggctccgtatgctgataacatctttgatgaagagcatttcctggcattagggggaggattgtaccttaataataaagaatgccaagaaatagaataaagtgctagtagcatccaatcgcttgacccacgcactagagaaaccgaacttgaagttcaacgaa

SEQ ID NO: 35020 - DNA, 537 bp, Zea Mays
gcaaagacacaagtggtaaaaaactaaaatgtgttgaatgacctcctcttggtcacaaaagcacaatgttccggatgagggaggcctcgcttctttaacctgtcagctgtccaacaacggtttccaatggccatccaaagaaaaaccttgcactttgtaggcgcccaagacttccaaagcctcttccaaagttcgaaggagatagaaccattggagaaggccctaaaagtaaggatccctgctgacaaggcccctgggcctgatggttttactggtcgcttttacaaggtatgctggcccattataaaagttgatatgatggctgcaatctccgctatttggggtaggaagtttgataattttgggtgccttaattctgcatatataaccatgatcccaaagaatgatgaagctgaaatggtgaaggatttcaggcctatcagccttgtgcatagtttcgctaagttgatcacaaagatcctagccaataggttggctaaaaggcttaatgagatggtgtcacctaaccagagtgcg

SEQ ID NO: 35021 - DNA, 513 bp, Zea Mays
ggagtatgcatgtagtataataataatatgatggaatggagtacatagtgattaattaaggaatgttcgagacttaccattgcagtctgtagggcgagggatgatgacattccactgcagcacattacttgagtctttaccaccgcatgagacgtaagacgtaggcagatcaaaggtagtgttccttgaaaccatgtacacatataggcatcaaagacctttttctaattcatgaattggccagatgtcgatggaatagaggagggcgttgcagcatgaggcagtagcattttgtggtgccgtctcctggcaggagtgcagcgccacgctagtaaagtcaaggccgcaactcagcgaggagcaagcaggtgatgacgactgcagcagcagcatgatggtgacgagcagtgaaacggaggaggaggccatcggctgctctagtatgtactagtgggtaggatagtggcgattgtgacccggccgtccctatcgattgaggtgctagtccatttt

SEQ ID NO: 35022 - DNA, 314 bp, Zea Mays
cgggattttaagtccttcaatagaagcaacagtgctgaaggcagaaaagagttctgccataactcctagaagaaaaaggatggtaaatgtattagatattttggaaacaacggattccataagccccgctcccataaagaaagttgccgaagctgtcagagcgcaaaccaaagctgatactaagcagatagaagttgaagctgcaatgggaatagatattgggcctttagagcccgctgagaaaagtctgccgaaattgaagaaatggcaacagaagaaaaggctacagagcaaattttgcctgaaaaggttgc

SEQ ID NO: 35023 - DNA, 367 bp, Zea Mays
ttattaataactacaccaacttgcagggatacccacaccttggtgacaatcattacaaagatccaacttcagtacatgtccatcataacaagcatccaacataaaataagcaaactaactctaactaatactgactagactaagatactgaactaagcattattacagactctgactctattggtctagggatccaaatctatccgggtcctgcagtctggggtaccatagtcgaagcgaccatggggcggcgaacggtaagggtgctgaatcccaacaggggcgggagaaccaccatccagatagtggcgtgctgcacactcagaacgcaattctgcaacctcaacctgaaccttgcccaactcgt

SEQ ID NO: 35024 - DNA, 686 bp, Zea Mays
aaactgagtggagacccaagcgaagaagtgagacagggtgggataagtgtcggacttctgacgtaaaggaaaagtccacatataatgcgagaagtcatcgagaatgagtaaataatacttatagccagaaatgctgattacaggggatgtccatgcataacattgtatcagatcaaaagtgtctgctgctctagaagaggaggtgaggaatgggagcctaacatggcgacctaactgacaagcatgacagaggtgctcaaaagatcccctacaacatcaaccagaggtgctgctggagagcttggacatcacatcgcgaccggggtgaccgaggctacgatgccaaatcatagaagaggcgaccgctgcaagaacaggtggggcagaggtcgatgtagtggaagcaggcatgcgaagtgtgtagagcggcccgcggctgtcacactgagcgagaagggttctggtggcaagatccctcacagaaagaccaaacgggtcaaactccatggaacaagagttgtcagtagtgaactgacagacggaaagaagattttgaatgatgtgggggcaacaagaacgttggataaacggaaaggaccgggaaggaccgcgtcacctacggaggtgacgggaagggcagagtcgtttccaaccacgatggaagaaggaagggaagggtgggggag

SEQ ID NO: 35025 - DNA, 849 bp, Zea Mays
aaaacttccaagaaaaatgatctgggacattaggatgtagaactataccctcaacaagctcccaaactttgaggaattctatgaaaacctgaactgttagagcgcccttgacatcaaccacccagcctctgttggataatgcctggctcactgtacgcttcttaattactctctttgggattgctaggatcagatttggagcaaggtcagccacactctttccttgcaaccaattgtctgtccagaatttggaagaaataacattcccaatatttacagttacggccatttggaagaatgcttgggcttgcttaggattattaacaagaagaccaaaccatagttttgagggatcagttttcataaaccataaccagcggatacacaatgcccaactcatcctttccagataatgtactccaagactgccaaacatgtaaggtctttgcaccttggcccatgagactaaacaatttcctcccttggcctgttcttgccctttccaaaggaatccccttctccttttatgaacagccttaaagaaccatttgggcagattcaagacgagcatttggtgaatgggtgttgctgacattacagatttgacaacaaccaacctgccaaccttgcttaggaggggggctttccatcctggcaatttattggcaatcttgtcaatcagaggtgttagaacagcctttgaaggtttatgaatagaaaggggaatacccaaatatgaacaaggtaagcttccaatggaacaagaaagaattgccgatgttctcccaatatcttcatcggagcattggattggtatggctgaacttttaatcaaattagtcttcagac

SEQ ID NO: 35026 - DNA, 321 bp, Zea Mays
cgctggtgagttctcccctagtctctctgttcttttctccagtgaagaatcacctctcacccctacacgaaatctccacatcctgtgaaacacatgtgaaatttgtgtgtgccaatgtatccactgtcctctagtgatgttcccctgcaggtgttgagctccctagtgatttaacacctaaaataaacatttcaccatctaacccaaaccccgtgaccaatgttgggtgaaatgcctaaactagccaaacaagctcaaatcgaccccaactttttccagcacactccagctactactagtacctctcatatcaaatttcac

SEQ ID NO: 35027 - DNA, 496 bp, Zea Mays
caacatttgcagaaaatacaggggtcttgggggaactttcccaagacacagcgcacagctatataggatggcgagttgatttctataaactacagggactcttttgaatgtttgctcggccgaaggggtacggggcgatcaccgtcgttggattggatatgggcgcgccagattaaaacactactccagcgaactggtactcagtgtgaccccttggattcaaatccgacgacctagattttaaacacacagatctcaccgtagccgcgggatatgagatctacgattcattttccccacacgcgaggggttacggaagatctaatccaagccgcataatgtcgatctaacggctagaggctttccccccactcccctttctcctaccggcgtcaacacgacggcgcctgactgaggcacagcggcgccattacctcggacccgaatcccatcaccctgtgcccgaagctcaaatctactaggtgcaacaccatca

SEQ ID NO: 35028 - DNA, 445 bp, Zea Mays
tgcaagatgcagcacgacgggcactttctcagtattgctcgttgttcagcggggtagctgatggcctcgacctgaagtactaccctcgccgtttgaccggcagtgctagaggtgtgattgcctcgccagttggtgagggcaatcctaggctgaacagcatggtcaacttggctatcgtgctcaacacagagttggaccacgcccttgacgagttgggcaaggttcaggcggaggttgcggaattgcgtgctgagtgcgcagcacaccactatctggatggtggttctcctgcccctatcgggattcaacacccttaccgttcaccgccccatggtcgcttcgactatggtatcccagactgcaggacccggatagatttggatccctagatcgacagagtcagagtctgtaataattcttagttcaatgtctcagtctagtcaat

SEQ ID NO: 35029 - DNA, 422 bp, Zea Mays
cacacacttcacatggcctaatgagttgagtgggagagcgcatgtgggcttctgttttcctcctcatatactagacttgagaaggtgtatagaactttcttatttgattatggtagctctaaagatttccactaccactctttgcctagattttatttactttgtagccccttttttgaaaacattcacatttagatctctataagttttattttatttttagaccctatctcagcattgtttcttgtagtgatatcgcatcaaccaccatatcaaggccaacaaccccctagtcgtgtttgttcttcctctcaaccaaagcaaacatcaaaggaacgaatatgttatctacataataggaaatggctgagaagtgtgtcatgatacttgccaataagaaatatgcaatcaatagagaaagt

SEQ ID NO: 35030 - DNA, 424 bp, Zea Mays
gcatgagttcttggatgactttgtggtcatgttcctggatgacattctgatttgttctaagactgaggctgagcatgagcagcatctccgtctcgttctaggtgccctaagggagaatcagttctatggcaagttgaagaagtgtgcattttggctgtccgaagtggctttcctggggcatgtgattaatcagcagggcattgcggttgatcccaagaatgttgcggctatggtggagtggaagagaccctctagtgtctctaaaattcgaagtttcttggggcttgctggatattatcggtgtttcgtaccaaatttttcgagcattgctaagcctttgactagacttttggagaagggtgttctcttcgtctggtccagcgattgcgaggtcagttatcaggcattgaagagcaagttggtg

SEQ ID NO: 35031 - DNA, 550 bp, Zea Mays
gtcctctttcttggaaacttaagttgctattgaagtcctacgactgtttgctgaacaggtgggaaacgaagagtcgccctttgccctctttaatagtctgcttgcccttggtcgtctacctcacttgctcttgttcttatgcgctccacttctccttttcctactggctcgagagaaccatggccggtgggaaaggaggcaagggcaagcgtaactcagcgtacgggaagcgcaagcgttctacgcgtcatctaatggaggactttagtgactcgaagtattatgaggaggagttctcctccgtgttcgatgactctcctccatcgacctcccccgtgccgtcattcgatgactcgaacgattccatggggctgtcagtggccgagcgtgcctacatttggtccatcgagcgagcagaacttggggggtcggatgactcagagggggaggactcatcggaggaatccgaggaggaggactccgaggaggaggtcggtggcggaggcggcaacgggggcaatgctagtgtcggcgcagatggttgtggcgg

SEQ ID NO: 35032 - DNA, 317 bp, Zea Mays
ctttctataatggatttcctaaatctggcagaaaaagaaaaagagaaagtatgaatagtaacgagctcaattcagcccgatacgacccacgcccaggcaaaacgcgcccgcgcgtgcccgcatggcgaattgcacagaggcccccggcggtttgaataactggttaagagtcctgtgcactatttactcgtgtcactaacatttacatcgagaccccctttctgtttcttcgtagtgctaagtccacgatggtggacagcgacgagtgtgtctccgacgagcctgtactggctggagaacgcaatgatcggcgctcc

SEQ ID NO: 35033 - DNA, 292 bp, Zea Mays
gagaagcagaagtccctgaagtcctggctatcaaactgtttgccattgtcgactgtgagctcggacgggactccgaatcggcaaacaatgttttgccagaagaatttttgggcagtcttcgacgttattgtgcatactgcccttgcctcgatccgcttggtaaaatactcgatggcgacgaaggtgaacttgaggttcccttgagccgtgggtagtggcccaacaatatccagcccccagtgttgaagtggccatgtgtgggcaatcagctttgtgaattgcgaagggttgc

SEQ ID NO: 35034 - DNA, 532 bp, Zea Mays
aaggaaccctagcaagcagaagccgccgccgccgcgggcaagctataaatacggccctcctgaacgtttctacttccaccatctcttctgtccgccgccgccgccgccgccgctaggaaacgacgtctcgtctcgtgccttcaatctctccttttgccgtcgtcctgtgtttatcgcttgatttcctctgttatcccgctttcttcctctgtaagggcaaatgatgatgcaaagtcatgcaccactctgaatgaggggattatcctctctttgggctgacaaacggacttctacccatttttcgtctgagccttgtgattacatccgatttctttattgtctccctggcttttcttttttcttgctgcttactgtgacactgatcttattgcgtttgattaatggagctgtggagtgatctcggagaactagatgatgtgggtctgccgatccaaccatgatgcggactgaattttatttgaggtcaaatgtaatggattctgatggttctcgagtttatctcccttctgac

SEQ ID NO: 35035 - DNA, 715 bp, Zea Mays
gcaccatcacacatgacctcgacttaaccgcagaggaagcgatgactacttcggcatgtcaccacctctctacagtccaatcaatattaactacatcgatcgaacctcatatcgcgtaactcttataatttattatctcaaatacaaccataccacggcatggacttgagactctttgatcaagttaacgcaatcacgactaccatacacatgcgtaccactttttccaccatgtacctttaatctacgtcaaaaaaaatactcgtgcacacacctacttacaaacctatgcacaacgacaaaaccaatgaccatctcactacaacacctaacaagagctgtgaataaaatcaaaaggagcatcgcaccacttcatcacacccattcatctcctataggcgcactaattcatttcttgcggcatactcactcacaatcaatccttactacagaaaatatacctatttcttatttatgcgcataacataacaattcgtgagataaaatgtcattataaacacattacacataattgcatagcaaacctacttgtccactcgaaaacatctatccgaagcaatgaacacaaccgtacactacgtgcaatgcgaaattcaatgaacgcataaggtgtattgactcgacttataaatatagaggaaatgaggactaccctggcatgtcaccacctctctacttaagccaagacaatttc

SEQ ID NO: 35036 - DNA, 484 bp, Zea Mays
ggtgaaagccactaagcttgcgcgccagtaaccttctttctctccagctgccagcatgtcttcgcgaaattggatgccaccgctgagggagcctctaaattgccgcccccgcctgctctgctaagtaattgtgcacccagtaaaccaaccctcacctcagatcgtccaccagagctccccaatttgggatttcccccaaatcaaccaagaacaccgtgcggtttgacctcaccgtggccaaagtgtttcaggtccgttcatgtccactgtcctcttgtttcagcacccttacttgctcctgatactcgttgacccatccgatttagctaggcggtcctagatcatcgggaacgcgtttactcatccgatggtccgcgctgtttctgtggaccggatgatttggagctccgttagtaaaattgagtgaggggaatggttaggaggggtccaatttggtgtccaccgtgcgagagcaccggtcgtt

SEQ ID NO: 35037 - DNA, 300 bp, Zea Mays
gccctcgcttgtacatatataatggcttgtatgatgaggttgtgtgccttcgcacattcggctatgctcacgaaggcgttgcgcacttggtctggtgtatttgttgtgtcagtctggcgcgtatgtagtcggtctttgcgcggacagtttggtgtagtctttttcgcacttgttgtgcttggtccggctgcacccttaggcgacttttgcacgaatagtcttcgcggaagacttcgattttttgcacttgttgtgctagtccggctgcacccttaggcgacttttgcacggatagtcttc

SEQ ID NO: 35038 - DNA, 441 bp, Zea Mays
cactgaccaaaagagtttgacacacttgaatgaccaaaggctacacacaccctggcagcagaaagtttttaccaagctactgggattacaatacagagtggtgtacaaaccggggggctcagaatcgggtggttgatgccctttctaggcgaccccatgaagaagtattgtgccattctatgtctgtcctgcagccgacatggtgtcatgatgtcagtgagggatattggaaggatgaagcagctaaagttttgattgctaaactaactcttgatcctgatgctgctcccaattttgagtttcgagagggattacttcgctacaagggcaagatttggcttggtaataacactgggttgcatacacaagttttagcagcaatgcatagttcacctattggtggccattcaggttttccggtgacttatcacagggtgaagc

SEQ ID NO: 35039 - DNA, 473 bp, Zea Mays
cgtggagctgtagtcgaggtgtcggagtgcggagctggagtcttggcgttgagccacggcggcgccgacagctggtcgtcgagatgcatcgcaggagcatccaccatcgggagaatacgaacagctcgtggcttggaagccttgttctctattggaagacaaggtaaagaaacaaagatcgtggagtgcaggaggtgtttttttgcaaaatagtcaggtaccgttcgattcaatatgtatgatctggatgttatgtgtgcatgattcaatatgtatgatctggatgttatgtgtacacatgtgtatttattggctatgtgcattcgatactttgccctctcggacctgcccctgctccagccgatgggcgccggctcctctcatctcgctgctctctcatccccttcacacaaccgtcgcccagttgtcaaacctcgtcgagctcctcacgcccaggttattctccaactcgc

SEQ ID NO: 35040 - DNA, 308 bp, Zea Mays
gtcgaaggctgctttggtcatgggatcgcacgggcatattcgcccttgaactcttgtgatgttattgcatctccttaatttggtcatggagagagccccctttttaactgctcttggtgtcttttcagtgtttggtgcgaaaaacgggctttgatatgtgtattttgggaccttgcttgtcacttcccgatcgtgcaaagggcggctcttaaagcgatttgtgagtttcaacatgcggtcttgtgaacctctaacccacactgatgctaggtcatccacccttatttttcctaccatgcgtatcctcg

SEQ ID NO: 35041 - DNA, 363 bp, Zea Mays
gggtaatgtccacatattcttttcctcatagttgggtcttctcgatatgacacatgatggtgggggtttcaactctaactctgtgttggtcagttatgttgtagcacatgggttacctgtacctaggggcgctgacagtggggccagaatcaccaacaccgaccacgtaggcgacgatgtgaaggaagctaaactatcatgcatttcttgatttcttggggctcaggtgccatctttgagtcttgtgtggttggacggttacaagagtagccatatggtcatttgagaagaatctttcaagtgcttgagcactcacctttcctcctgcccaagcaccccattgccttccctcgagagcctcac

SEQ ID NO: 35042 - DNA, 528 bp, Zea Mays
ggagaagtttgatgagccatatgatgactgactgaaatgtattaaagctaccagtgacaagctgcttaggacatactcccgggccgaagatgatgccctttccgcagccttcgggggccgggggaagaaaagactgaacagggtatttgatgcgattgactttgtaaaccctgattaccgctacccgctgcgagggcaaggaacaaagagaaagactaccgcttcggccaccacagttgtgccgaagggcaaataggtgaaggttctgacccaccggccgcgttatattgaactggctgtggtgcctgaatttggcgaaggagcctcttcaactgccgaagcaagacaagctgctccgattgtgcatggcgttgaagagccaactgtagtgccaaagttgcctacagtcgggccgatcaaagctaaggatgataaggccaaagagccaaaggtggaggaaacaatgaaaatgccagaaattctgagccctccagcagaggcgaaattgccgaaggtgcaaaaagctcc

SEQ ID NO: 35043 - DNA, 976 bp, Zea Mays
ttggaacatgttgtcctatacagtctatctattatagacgatgttgcgaggtcctgctctgctgtgcggaggatggtcgtccttctgctggtcttgcagctaagagatttcttgttcaatgcaaggaggtgctccttctcctgctggattaagttctttatcctggtctggacctcgttgtagtgcctattggctgctagagtgtctctttgcttctgcaggttgctgttgcgcatgcgaagtctcttgagtaggagctgctgcttggtggtgataccaatgtctaggctagcctacatgtcttctcaatgtcttcaagtggcattcctaggtggtgttggcttcctatctctaggttgaagcctggtggggctagtggcatgtttttgcttaagtcgggccaaattctagcttagtaaggttgactttttgggttgggtggtgtcattcaagctgtctgagctggcggtatgaaccttgccattttgctcagtggtgatggttaactgtttatgcttcatgaggaggtccccgccttgtggctcgatggtggattttgggtaattgggtggtgcgttgtctacggtgatgactacctttgcctttttggcagcgaaggaagcccctgcttcattgtcgtcgactagtgaaggagctcggtgttcttttggggaggcattgtgagttttgtcttcgtcgcacaaacagtgggcgccacatgttgggtactaacacgtggtcaggtgagcccaaacactcggagatgaaaggaacgagctcaggtgtatgataagatgtttggtagagaactatagcgtctcgttatgtgtgtcccgcctagctacaggacaagggtatttataggaccagccggggataggtggtctaaagtacgtccctatccccattcaccaactatatccgaggaatattcagtgtaacaaggtaattacaacactgtattccctaaatgagg

SEQ ID NO: 35044 - DNA, 466 bp, Zea Mays
cgaacagcagcagtattagtggtttctggacatttttcgtgggaaattaatgggaatcagtttgggaatcatgtagaactttggcatacctttccaacgagtatttatacgctcaatttagagttataaattaaaagatatcaccatttgaatccgggtatgtggctgtccaaaaaaacagattttcaggtggacgaacagcagcagtattagcagtttctagggattttccgtgagtaattagtgttaatcagtatgagaataatgtatggctttttcttacctttccaacaagtacttatgcgctcgattcggaattatattttaaaagttatcactgtttgaatccgagtatgtcgctgcccaaaagagaaaaaaacagattacagggtttatcttgtggaccgttttggggtagttagatgttggaatttaatcataaattgtatacaaaacttatggggaa

SEQ ID NO: 35045 - DNA, 432 bp, Zea Mays
gtgaggtggccgagggtgtaggggaggtcgtgacgatcacgccgatgtgcggatcatctccggagatggttggagtaggccggtccacgtgcacatgcggaggagctcgtcggcggtgagggctctggcctatccagggcggtagagttcaattaaactggtcagtgagcttcactaggtgctagggaaggcgtaggcgcgaggaattgaactacggcttaccgcttagtcgtggccacgcgcgccggcggggaaaacaactccaacgagggtggaacggcttctccggtgaagtggcgtccggtttcttgcttcggggagctctacggggctctggggaagctagccgaggcacgagatcgagtggagatggctagaagtggtctgaccatggtggctgagtgctcgggctgcttggcgggcggcgcagag

SEQ ID NO: 35046 - DNA, 409 bp, Zea Mays
cttttagattggttggataagttatgtaacctgttatatcggtcatgtttggtgttatcatcaaggataatgggtattggtgttaccgtacctagggacatagttgagataggtgtaggtacatggggtaggtagactaaacaaagttttgctttcttggataaatgttttgggcaacctatatcacaagctaggtcatgatttcacggacgagtgggtttaggtttagaaccaatttatagaaatatggtgtagttaatacttgtaacatagattagaccatattagattaggtagggtctagattagattggatataactagattagactagattaagtcagatagatctaccagagtaggatgtatattattatgagatgttagaattctttaaaataggatagat

SEQ ID NO: 35047 - DNA, 294 bp, Zea Mays
aggatctcgtacagatccatcgtgctgcggatccggtcttctccctcgtgcgtgaggcagatttgggcagcgatcgcggacggggccattgccagggggagcacatcgtgcgaggtgcatcggggggagcggtggcgcggtcgcattgcgcgaggagagtggcggcgaggttggggcaagcgagcgggggacaatgagggatggttggtgatagggagaacgagtggacgacacaccgagggggcacagcggtgacacacgaagtcaggagtggagacgtagatcgcgggcgtg

SEQ ID NO: 35048 - DNA, 291 bp, Zea Mays
aaggaatttatcaaccgtagggccggttctgggttcgccggtagagggagcatcgcgcggcagacccttgccgtcgactgacctgggcggcagaggaagaaagggcctggaccgttgatacttccttgggcggccgagattagaagatagacccccatcgtccaattgaagctgagccgttggatacgtgggctgggggtttgtcatggcgtgggagagttggggccacggatcttagatcctacggtcctggtgtcgtaccggttcgagtggggaatgatctaatctaag

SEQ ID NO: 35049 - DNA, 307 bp, Zea Mays
cagccagccaccagaggtagtatattatcttcttctgtttcatcataatcccccgatcattcctagggtccgattatatatatcacttcattacaatacggcccagaaactctcacgttccggcgtttcacccgtggcatccgtgtagtggctccttcctctggctcgccaccagctttgttgcctgctcccccgttgtcttgggtgtcggcgctgacattcccccgttcttgaaacgccgcttgtccccaagccggcgcgtgtggaaacctatcttttagtgccatcaagtcttcccaggttgcca

SEQ ID NO: 35050 - DNA, 390 bp, Zea Mays
ccgggttgagtaagcgcgagcatgtggcaccgtcttaagtcgttgccgacttaagctgattgctccgttagcagggcatagtggtcaccccaagttaagtaagcgcgagcatgtggcaccgtcttaagtcgttgccgacttaagccgattgctccgttagcagggcatagtggtcacctcgagtcaagtaagcgcgagcatgtggtaccatcttaagttgttgccgacttaagccgattgctccgttatgagggcatagtggtcaccccgagttaagtaagcgcgagcatgttgcaccgtcttaagtcgttgccgacttaagccgattgctctgttagcagggcatagtggtcaccccgagttaagtaggcgcgagcatgttgcaccgtc

SEQ ID NO: 35051 - DNA, 1519 bp, Zea Mays
tgggacaagggtactctagatcaaagtatgcacctctagaccccgcatatgtcgtccggatctcaaatcggacagggccccgtgccgccacgtctacagcacattacagacggagcccggaccccctccatcatgatctgggcccaccagtcaggagaagaggcgtgaatatgccatgttaccacatgttctcagacatgttccatgcctaggcagaggcccagtactgacgcgtggccaagtgcgcctgacctaagtcgtcggcctgacgtaagctatcgggcagagcccaacgtaaggctctgatatggggcccactaatatgggggatggatgggatgcttacttgcccatgtcagtggcaggtggcgtacttccccgcattaaatgcgtgcgacgcgtctagtctgcagcatatggtatccactatttccccacacgtttccaaggcaagggcattgactcaatgcgtcgctttggcacccttcattatgacctccattattcctcgtgcattactaaggaatgaagagacaggcaaaggagactgaacaacactgcccattgcacccctatgcatgacagcatatcaggctacgtctcaacctacaccaagttctgtgtttgggacaaggtaacaggataaggacgccaggagatcacacaacagccaagaggagatacgagctcaagaagatctagcaccaccagtcctatccaaacacctcacacttcatattgtaatgattcatgggcccacctgccggggcccagctcccttgtagcaagcccccttggactataaaagggagtgcacttgcattgtagcaggagaagcgacacacacacagactctcgactctcaagcaatacaactcataatggttgtagggtattatgctccagtggcccaaaccactctaatccttatgttcttgtgttcatccaagcggtcaggaaaatccctaagcctcctcctcatcttaggatcagggcgggtgcactcctccacccgaccggaggatttctcgtgtgacatttggtgcaccaggtagagggtcaggatcatgagcctaacaccttgattgatataacatccctcttacccactggcgagcatggtcggggcaagtccgctggcatttggcacaagatggagaagtgacgcctcaagaggttcgtcgtcgatctcaaacgatgtctcagcaagtgtgcaaccgccaccaaatggagagttgtgggaacctcacccatggcaggaggagctactgcggccatcctcccggtagtctccaccatgtctaaggccacctgtattggcctccagataggggaaatagtgcatgaggtcatcattgtcggccagcgaccgagcacgggcgaggctgactctagcccttaggcactgtgttccatggtatgtggagtcgtcaccccaaccccgggggtgacttattctacctaccattgggtttcaggaagtcgtaataacaagggctatgcctttgtaaacattctc

SEQ ID NO: 35052 - DNA, 670 bp, Zea Mays
accccctcgagacctaacagcttcaccaacccatggcgtgccacgcaaattaatgacaccgccgtatgggagggagataacggcgccagtccaaccgtggttccacgacgattcagctccattgaagtgtcgtggagcaccggctggggtcgcagtagtcaatccgggtgctgcgggtgtctaaaattgcctcgcgtgtgggcaatttctcgtcggcgctcctcccccgccgcggtatcgcccctcgtcgtggccagcatcgtctcagccgccatcttcggtgagttcgcttccagggattttccccgctcttctacttagcctagcgcccttcgggtagaagttttaggcacggaatcactaggtggcgtgtgtcagcaatggcggccgtcgtgactggcttcggcgccgccgtcttgagagcagggtagttgacggagatagctggccgtagatcgatagatggacgaactagattaaaccgaagaaaactggttcgactgcttcatccgggccgtctaaattgtttgggacggttgagatcggaactcagttgttttaaatcgtgaccgtagagactcgatcagacgactctggattataaggaagtttgttaacgactgatataatctggaccatgcattttagatccgacggtccatctccaccg

SEQ ID NO: 35053 - DNA, 293 bp, Zea Mays
cccgcagcctaccgccttgaattgccagaatccatgtcagatatccacaatgtgtttcacgtatcccagctccgcaaatgcctaaaagtgccagaaagtcacatcgaagaagaggcaattcagattcagaaggatctacagtaccgagaaaagccagtaaatattcttgactcagccgtccgaaagacccgaagctcagaagtaagactatgtaaagttcagtggagtagagaaggagaagaagctacctgggagagtgaggactatttgaggagggaatacccttacctttt

SEQ ID NO: 35054 - DNA, 505 bp, Zea Mays
cagtggcccgatgataggggctgaggactctcggaacgtacgcaaaaggaaatctggagagaaaccggtcgtggaggaggcacatgccggcgcctcgccatgtgaggctggctggtgcccgaggggaaggccatgcacaggcagggaatccatcccatcccatctccttgcgagagagagctcaccgatcgtcagtcactcacgtgggcgagtttaaagcgcgatcttggtaaccaaggtccggggtccgtatagatgctgtgacccaataatgaagtagtacgatgtattgtacgcagcacgctagtggtggcagtggcgtccaacccttgaaagtgaggcttacccaccaccggcttgtacgatgattagacctgcttgttgttgctgctgctaattagagacgtctgagtgaccattgacacggtgtcactatgcgcaaagccaatggcttttacgacccccattccgttgcaatccagcctcagaaaggccctggtagtgc

SEQ ID NO: 35055 - DNA, 326 bp, Zea Mays
gtgccattgctggtgtaaaccttcccattgatccggtgtgctaaatttcaaggaaaaacgttctaccccacacggataccctagcgagtcacttcgagccgtcgcattggggattgggatgatattccggccagtcgtcgacaagaaggagctccccgctcatatcccgccggccaacagaccacgaccgataccctgcccaaaatccacaaccgaccaacactatacgatgctgggacccaggcgaagaaggttacagcgccataccagaattcaaagcgtgagatccagccatggcggcgcgctgcacagcggcgttcccccgg

SEQ ID NO: 35056 - DNA, 500 bp, Zea Mays
aggagctacgagttcaatcagaagttactctctgtcaagcacaactgataaacacccagagcaaggaagggatgataacaactcaaccatgccggctggaaacttgttttcgtctgatcgcatgcctttagttatcttactgagtaggaagggtcaatatggcattctttatcgcaagtgaacaagttctgactatacggcagcctctggtggacagttctaaccggaactgtttgggttataacatggaaacctattgacaacctactctagtgtgggtgtttgattgtgcatctgcttccaaaatgtatctggttacatttttgcccccgacaaaaaatactccatttgctagatgtgctgatgcatgcagtttatgaaacaaatttggacttggcataaaatctgaggctgggagcagtgggacagatctgttactttttcggtttatttttcttatggatgtttgtaccattgctgaagcatggatggaagattca

SEQ ID NO: 35057 - DNA, 558 bp, Zea Mays
catgaacggtggaatagagaacttaatcttagcaaatggatcatggtctggttcaggattatgatgatgacgtctaccattacctcccataccttgtcgattacgtgcgaggcgttgtcgcagcggtgcataaacactgtcgtcatcgtcgacgtcgtccacaggagagtgagctggggctagagttggtggtgggagacgagcctccagtacgtccatgcgtgtaacaagtttagcaactcgtcgatcaagctgctcataggatgtcgccgcagagtccaggtattttttaaaagcttcagtcatcgcgcacatcatctccttcaattccagctgagagacacactcatcgtcgttaacctaggctccttgtccttgtccatttgattctttggtcctgtcattgttagcacaaaacagagacaaaaaggcaacaaacaatgtgaaccctacaactatctctcagggtggtggtggtggtggtggaatacaaattatgaagcgtcttaccccgctcttacaaggttcttaccagcactgcaggtggcaaacggtgac

SEQ ID NO: 35058 - DNA, 340 bp, Zea Mays
caaccgcaaattcctgctcagacctgggtttatcggcctgacgctgcatgcgaagctgagctcggaccaggtgttggtggacaagatcctgcatattagaacattcctataaccattttgacagctgaccaggcacattctggtttggagatacgcccagagaatgtggtttacggccatataggacttcaaacggagatgaacccaaagccgaatgaaaagtagtgttataccagtattctgaagtgggtaaccaagaggaccatttcttggggcaagcagttacaaaacagcgcagaaatgtctctagacactgattcacccgttctgtctgaccatc

SEQ ID NO: 35059 - DNA, 419 bp, Zea Mays
accgctccacaataatgcattcggcgagtgttagggcgaaggcgaaaccagacctcgatcgacaactttgtaaactctcttcggccacaactaaccttgaccgaatgcaagaccagactaaggtgaaggctaatgtggcggctgaaggcgaaggcaacgacgaggtcccctcagtcgtagaaagagcgaaggccaacacgggggctgaagacgagggcccgcgtcctatgaagggctgatcaaggaagcgaaggcccctctcagcgagggctgcgggaaaacctcctcctgacgaaggccccaacgacttcgcctcaatcaccaagaacgggttcgcaatagtgatacctgtggcctggaaggagacccacgccgctcccgggtggccccacttgtcagtggttgctgagggtagagaa

SEQ ID NO: 35060 - DNA, 314 bp, Zea Mays
caattgagatcgaacgcccgagataaccccaaggcgaaacggtacgactcccctagtcacaaccactgatccccagaacgacggccaacatctttcttccacctcccgcaacccacacgcggtagcaccgccgatccgaggcctagatttcgccagagatgcgctcatccgagcttctagggcctaatccgagcgctaccgggaggagggcaaacgctggtgtgaacatgaaggggtggcgtaccagtgcacagcgcggcgaaaaccccatccgcagagcagtgtgatcccctgacgaagcttcatcgtcggca

SEQ ID NO: 35061 - DNA, 471 bp, Zea Mays
tgcttgtggagataagttcaaacctggtcatcttgctaaatgtaccaagaggggacaacgcaactaaatgtggtagttactgaagaagattccacagtgttaactgatgaagttctacgacaattggagcaggaggatgagaaggaagagatatgttgcaaagtgtccttgcaagctatggttggtaaggataatgagaacaacatggtgttaaatgcaactgtgagcaaacagactttagtgatgttgattgactcaggaagttcatcaaatttcatcagtgctcacatggtgcatcagttggggttagtagaggtggtctgttctccagttaaggtgaaggtggctaatggtgaaactatggtgtgtgatagaatggtaagaggagtggaatggtgctctcagggtttttcattttgtactgatgtgagagtcctacccttgagtgcatttgatgtcattttgggctat

SEQ ID NO: 35062 - DNA, 271 bp, Zea Mays
ctcacatccttagttaaggtcttatgccgatggcccatgtatgcaagttagcctgtgcagatgatgcagtattttgctgcctgcctagagcctagtgcctttagatcaatgataaaaatctgctatacaagtaatataggcttcagctggatgatctagagatattgttgccaaatttcaaatgacatgtatcctgcgacaatgcttgtttgaccgaaagaacaaaagagtagttaggtagaagttctgcaaataaattagttagagaaac

SEQ ID NO: 35063 - DNA, 292 bp, Zea Mays
cgtcggcgtcgatacacttcccactcatgacctacagacccttgggccgcatagcgctcatgacctacaagtccctggactgtggcgcattataggcctatgcacccctcgttatgcggtgcacttatggcatatcggactaggcctgagtgcgcagacctcccacagggcactacacaataggccacgctgagccctaggctacggaatccatgggtcgacatagcctgaatgatgaaacctaggaccatcgccacccccacgtcatccaccacgacaaatatacaacaac

SEQ ID NO: 35064 - DNA, 561 bp, Zea Mays
aagaagtcgaagggatctttagcaaaattgacgaggccgaaagggtatagggttatcacaaccgtccgatctgaaacgaggcgcccagattagatctctattaactcgaaccggtatgcagcgtgagatgtccaatctgagatcgacggataaggatccatctaccctaactcgattgtgggccgtccgattaaaatccacggtctcaattgatctgattgaatcgatacacagtgtgccactccctgtcgtccattctcagatcgacggccaccgcactgtcaacgcgaggaaacgcatatgctaatcctatccgtccctcaggacatcgacggtcctcggacgtcttctatctccggcacgcagacggcgacgcgcagactccccccacgacagccgatcaccggcgatgacgcctaacggcaacccagtgcccaaagtccgaatcgactagcgcacagcccctacgagattatggcgaactgattaggaggtgaaattacctcgattctcggcgaaaatatccctgtgcacggctcccgcgacggaactcgtcacgaa

SEQ ID NO: 35065 - DNA, 1524 bp, Zea Mays
ccattacatttacaattcatcgtttcttttattctttaactttctcctttgtagccgaaggctgttctttcctttgtaaaaattttgttagttctgatactagaggacttagcagcttgaagggcggggattcagtcattaccttcagaatttcggctacttcagcggcagagggcgttggaggagcttcttctcctgtctcatctaccttcggctcagaatagggcgctgtgtcaagctttcgctttttagagattgtcgcctttggctcaggtgctgtttttgttttcttcaaaactttttcatcttccttcactagccgagcagcttgcctactcaggatgttgacaatccttttcctttttaccccttcggcccctttgtcaagcctctcgtaatccgggtattcgaagtttaatgcgtccatcacccaattcagccttcgtttcggccgggtgccgaaggtagcattcattaattggtcttccttcttggtgtagttgccaagaatttcgttacacattgtttcgatcatttctagccactctttgcatggcttcttgaattgcttctcaaatttaaattgataagggagccgaacaagtttgtactttttgcccccctcttttttcttaggcattctccaaccactagaggtcggaaatattctatttgccaagtactcttgtactagacctctagtgctgatttcggcagctaccactctgaattccacttcggctggctggcatggggagccaagctgcatgtggcacaagggccttgtcatcccgaagcttaatttcaatggactcatgaccatagtcattagcttctcccttttcttcttgtccgcttttatgtaaaaccattcgcttgtccaaccggtcggcaacttggtacgatagccaattatcagggcctttgtatctttttgatatgcgaagttgtagcagccgaagttcttatgaagaccatctgctctggccttcgtttgatagtgtagctcatgcacccggcagaaagcttcggcattaggactcataccctggcttcggaaagcccatatatagacactaagtctaacgattgcattgggtgtcaactgatgaaagtatatctcaaaattctttagaacttctccaatcatctcatgtagagggaattgaagccctgccctgaagaagctcttaaaacaacgacttcatcctcccttggttgtggaaccacctcctccccggcaaaacggacaagcttgctctcggcttccccaaagtagcccaaatttttaatcataaccatgtcgtctgccgtcacagtagatttaccaaatttaatgtggctaggtttcattgggctcagaatagtgttgtcctcctcatcttcatactcacttcctccttcagccacgatctatttagctttagcagtggggtaccttcggcaatagcctcctcttgcacaacaagacccgatcgcctcatcacttctgatattggtgctgtttcggtcgctttggcctcg

SEQ ID NO: 35066 - DNA, 407 bp, Zea Mays
accatctttgtaatgattattccaaatcattgtacctgaggtagattgtgtctattgaagaatttatgcaaatttttcatcaacggtgcttcattaagctttgtgagattgatgatacctaggccatcttgagtttttggtttgcatgcgatttgccaggttgtttatggtggtcttttgcattaatatgttagctcccctccacagacaatgttttctgtatttatcaatctacttgataacttatcttgggagttttacaatgcacaagtaataggtgggtagcgacgagaaggatgaattgaccatctgtagtctacctgtctgtgataggaataaggaggttgttgacgggtgttttcaatcttttgaattaggggcatgaatgtctcttgctttggtttgtt

SEQ ID NO: 35067 - DNA, 274 bp, Zea Mays
ggaaattcccggtacaatacgggataccgtaaatacgggcgggaaacaccctcaaccgttttcggacccgttcccggacatacctatcccggttcccgtaccgttttcttattttcccgggaaaacgaaaacgaacggttcaaaacgggaatacggtacgggatgagacggtgtttttcctgatcgttttcatccctacggacggtgatcatcatatcgtagtatgtgtcgtctatggcagtatgggctccaagcatgccgatctagaccagtt

SEQ ID NO: 35068 - DNA, 316 bp, Zea Mays
aatttcgcaagtcacatgaggcaactgcttcgagcatgatggttagggattcaatgtcccaccctgtatattgtcctctccattcaatgggatctaatgtcccaccttgtaaattgtcctctccattcaatgggacagttaatccacttttagtgcatgcaatctatacttcctgccataccgggaaatctcctcgttatctaaaagccatgtaagatcatcaatagtaggacgacgaatatactcctccctaaaatataaaagaacacacctctagaaactttcgagacactctaaggctgagttttcccatttt

SEQ ID NO: 35069 - DNA, 404 bp, Zea Mays
agcaattcatgcagccagagcctcaatcacctgcatctccagtcctagatctctcctcaggtctctctccatcaagctcctcatctctacctaaaatgggtaatactactccttctcctgaacatgttgatttaccccttgcgcaacgtagggatcatagaatcaatgctggcaaacctccatctcgctttggctttgagtatgatatagctaactacatgtcatacagtaatgtgtcgcctacatatagaaccttcatcgtatccctgcaggctgtgtccatcccgaaagattggagatgtgcaaaacaaaatccaaggtggaaggaggctatggaagaagaattacatgctctcatgaggaacaaaacatgggaacttgctatgctccctgttggggcgaag

SEQ ID NO: 35070 - DNA, 349 bp, Zea Mays
acattagggttgttgggttttgggtttctttttgtgatactgaaggtcagttgctgcgtaggttctgacgtccgggcctgcgcaagcatcccccgatgatgttgatactaatattttgacggctgcgaatgcaacaccttttaatggaaatgtgtctgagggttctgaacctgggtcatggtcctcggacggggatgattttggtagccctttttcgtggattgaggagtcttctgaggaggatttagactactttgctgcgttggatttggccgcattggagtctccgcagcaacctgatgcgcgcgaagtgtctgccaccctggacagggcgatagtcgaagaacca

SEQ ID NO: 35071 - DNA, 391 bp, Zea Mays
gcgtcgtcgccgcaattcctcgctggaatccgaatttggccgtggaaccgcgcgtcttcgtgggcaagtcacggcgctacgtgaattacggtatggtttcctcccctgtgttcgcgcttatccctatcgcatattgcacctctcgggtggggttttggggcgctgtgcgagggtaatcgaactcgacgacgatgtgctgtcacggtggagctcgccgtcgccgatggtgaggacggggggtgatgacggttgtggtccgtccatttgttgatgagcgcctaggattagatctggcataggatggtcctcgcccatcgatcctgcaacgaacggctgcgattagaagccaagttaccctttcgcaactttgtctggtgacggctggatcggg

SEQ ID NO: 35072 - DNA, 398 bp, Zea Mays
ggaggctaccactcatattcagctttggctccttggtgccctggtatcccactcacagtttgatgttgtggacttcctgatctgtgagatcgaggacactgttctggatgggattcgtgctcgacggcagctaccctatgctcactacttatgccacatctttgcgcagctgattcagccacctcgatttcagagcacccttgaggcctcacgccttgtgtttggatcttaccgtcctgctcctgagtttccagtgccagcttatgctcctgtgtttgacactcaggccgaggatgctgcacttcgacaatttgacacccagggtgcagcagctgatgatgatgatgatgatgattttgggattcctcctccgcctccgcctcctatgcctccacgct

SEQ ID NO: 35073 - DNA, 348 bp, Zea Mays
gcaagagataagtgaatgaacaagtgcgaggctagaaaagaatgtggaggagcttcatgagtccaaagagagatgctatgagaaatccttggattgcgctaagaaactgaaggacaactttgccaaggtgggtgcatactcatcggagcaaaagtttattcgaggcgatcctgaaggagtcattgaatggatcggcgaagagggtgaagcttttaaagaaattcttagcgaccgtggggatttttgtgccttcgccggtgctcgaggggttgcggcaattctggagaaaactggttgtgaacacgttaaagccgcaacccaggcagaagccgtcttctccatagacaa

SEQ ID NO: 35074 - DNA, 342 bp, Zea Mays
cttgtttacctatgcttcggtagttctctcaacatttttcttctgtggctgtaataaccttgttagctctgatcctagaggacttagcattaagaaaggtaagggtgcagtcattacctctagaatatctgtcacgccaatggaagctgccgaaggggtctcttctaaatgctttggtagagaaggtccctcttcttctccgcggtcagtagacataaccttccttttatttggtgttgaaggctctggtgtgaactttgaattctttgtcaaccttttcttcttatcattttcaatagatctttgcgcttgccttttcaagacacctacaaccctttttct

SEQ ID NO: 35075 - DNA, 1279 bp, Zea Mays
tccgacctgtcgggcgcgcacatctgctcctcttccaccgccatgtgggcccaggttgacaggtccatcttctaccccaacatcggtcgaccgttgcaacgacccgcacgacgaatccgcgatttctccggccagctgacggatgagtcggccacgaacctggcgggattctcgggatcggactttgcctgtcctcgtgccccgtactatataaacccagcgcttgccccagctcatcatcacatcacggtgagggagaaggaatcgccgccgcaagacccccagacatcgctgccgtcgctcgagcctcaccacgcgatccggtcgtgacaatgtagagtcattcggtcccgtgcgtggttcgcccaaactggaagtaggccccgggggaacgagagtccttcaccggagtggggcttcggtgccgtgccgcggtggagcgaggacgctcttcccggcgccatcctgatctctggtaagtaccctggtctgtctggtacatccgtgggatcgtgtgacaccggccgggtagcagttggttcaacggtttgccggtgattgctcaccggacctcgtccacgccgcagggccgccatgggaggtagattgacgccggcccattgtgattttgcgcgtgatgtagtcgcccagcttgggtgcaatcgtagcttcgtctagagcatgtccactcggagtttgggagctcggtgtgtggaacgggtcttccccggcgaggccaccaccgccagacgctcgccggtgttgggagttggcctggagtatggtgacgatcgcgccgccgtcggatcctggatggagggcctagattagaagtagagtaaccgattggccaggggttgcgctagcggttggatcgtgatctggcggctggggttgttcgcgagtttgaagagggtcgggtttaactataccatagatgcttgatctgatggcagggagtggataccggttcataccagtcccaatctaatccgagtctttggtccaggatcggatggctcaggtttgatcataccccttcgccttgacatttattctaaagacccccttggcttttctcaaatcaacccgccacccgagtcagtgttaagatcattacagagaagacctcggatttacaaaatgaaccccgaactcctgttaaattgtgcctgcagtacacttattcgctggaattaataaaatagacctagaaaatgatttcttgtgtaaaggaaatactaaatgcttacaaaattcataacttctacgttttaac

SEQ ID NO: 35076 - DNA, 292 bp, Zea Mays
caagtttgccacttgaagctagaacattatatcgaatattgcaacaacccagaaaagaaagataaatacatcataaagttacagatgccaaattaccacagttcgcatgtaagtctgtaagacttatttgatctagtgaaacctagttctttctcagatgaagcaacttactgactagttataaaggtgcatcatggaaaccaacgattaattgagatcaggggcgtcttatgaagagtatagtgcacattactacggcactaactaaagttacttcttgaacaggaagata

SEQ ID NO: 35077 - DNA, 326 bp, Zea Mays
cgagaccgagagcttcactagcgtcagaggaggtagaaacatgggtcagagggacacgaatggacctgagatcggctggccatggcgaggtgtctcacgacaacgaggctgatcgaattgggggaaaataggaattcgggggttgtggcggctaatcagcgatgaggagcggtgcactagctttgtaacaagatagcggagcaggccgaacactcattttatagagatcactcgaaggtttcgcgaatttgggacagaatgagcttgcgatcgaagcgaaggtgagtcaccggagttcgctcaacgtggcattcactagggtagag

SEQ ID NO: 35078 - DNA, 274 bp, Zea Mays
attaacaaacacatccaccacaataatcggacctggtacatatatgtttatcgatgcgctcttcacacaataatttgctttttaaattagacatcacatgagcaccactaattttacccgcgaccataaccatacacatttagaccacaacaagcaattcatcgtgattacgagcttaaccgaaccatctaactagagcaacgacatagcccgctaaataacatacacgtcggtttgcctgtcactacatacattacaacctctttataaacac

SEQ ID NO: 35079 - DNA, 382 bp, Zea Mays
tcctccaccgaccccttctggtaaaccgtcatcaggttgttcatcgcctgcgaatattcatccgccccaaacttcttcatcacagcatccacaaactcctcccacgttactaatccatactgcaacttaaaaatctgaaaccatcgtgaagcattcccctccatatgcagtgaggctgatgttacccagacagcttcagggactcgatacatcgcgaaataatcagcacacttcctcaaccaaatcttcggctccaatccatcaaacctagggaaggtccacttcggtatagatacaggtggatactcccccgcatctccaccaccattcccacctccccgatcgcgaacaggagaataaccgcgataccttcgattggcgt

SEQ ID NO: 35080 - DNA, 794 bp, Zea Mays
aggatcgagctttactgtggcttgaacacttagagaatgtactgcccgcgtgtatggcagaaaccgtgatgtcgatcccgtgttcccagtcacttacgcccgaattggtcaacggctactacgatgagctttacgagcatacagagctgctaaaacaacacttgaattggacagagtcttacaagagggggttggccacggagcgcggaggacttaggcttgccggtgacagaggaaaggggaaaactggtgttgcggcggctctgggtgaaattgggggtggaaattaaggctacacggccataagaaactatagcttcaccgtgcagactcaatttgggagaagggggcagagacagcgcgaattttggattgcgatcagctcactggtgaagaggtaaacacctcgccgtggaccaccgtgctatttatagccccggcgacccgacagacgatcttcggccacggatagcatcacaagcgcatgcataccatgtcggaaagagatacagtgagggagattgaggcatgggcgacaccgcggcaaaatttactggtcacggtggccgccggtgaagactccgggtgggcttgggagatggcgccacgtacgggttatccctccccggcgttatccactccataccgcgcacgaatcaggacggcggtggcatgaatctacgcgcggagaggtcgccggcggtgagattgccgcgctcgcggtctgatccacttcagttactgtaccatggcgtccttcattcagttggcctgacatcccaagtttatgttta

SEQ ID NO: 35081 - DNA, 282 bp, Zea Mays
gaaagcaaggaaagaagagaaaaactgccgcttcggccaccactgctgtgctgaagggcaagaaaatgaaggttctgacccatcggccgcgatatattgaaccggccgtagtgcctgaatttggtgaagggacttcgtcgactgccgaagcaaaacaagctgctcccatcgtgcagagcactgaagaatcgattgtagtgtcgaaggtgcctacagtcaggccagccgaagccaaggatgatacggccgaagagccaaaagtggaaaaaacagtgaaaatgc

SEQ ID NO: 35082 - DNA, 612 bp, Zea Mays
gttacatggctagagcctggatcaattagtgccaatttttttggatcagtcaacaacaaagcatgggaaaggacaatgtatgaagctcttactgagatgaattgggtgcaaggcatatggggtgccattacagtaccccatgtttagggctggacgaaaaactcaaagctcgttagcttgctcgactgtccatcttggcttgactcggctcgttgtaattttctaacgagccaagcttgtatttcagctcctaagagataacgagccagcccaagatggctcacaagtcgctcgtgcgccaaatgagctgaagcgtcaccagaaattacccgcaaaatgacacagacagcccaatagctggcccaatgagaagcgaagttccttgtctattcctaaccctgagccaccagccgctgcacaatgcgcccccatggttcactcacccatatcccctctcacttgccctcttacctatcccgtctttgatcgtgtgaaccaccacccggagcccaccggccacctgctgctctagtcgtatcgtcccactgctctcattgcagccttgaagctgccagaactcaccgaccccaacactatggatccacattcgtg

SEQ ID NO: 35083 - DNA, 303 bp, Zea Mays
tgggaaatgattattggattgattattgagggagcccaaggctcagtacatataggcaaggatgtcccagaaacaggaaagtgctaatctagagaatcaggaaagtgctaatctagggacaccttgccaatcagatccaatactaccaaaaagggagagaggctgcagccgccactgcagcagcaccctctagggttgcagccgaccaccctcctgggccaaccgaacaccctcaaggcccatgggcctatacagcatgctaacactgatgataggccaaacctttttgtaaaatctaccttt

SEQ ID NO: 35084 - DNA, 364 bp, Zea Mays
aagaaatttgggattataatactcccaacggtggccttcaccagttcggtatcccgaatgagggaatcaccaaagtcgtactgcggacgaatgaattccttttatttagcattaagacgaattccatgccgttaaggaacttcatcttctaactttacccctctccatgtttgctctccctcatttctccgtcagaatgaaccctagtcactcaacactgttgccctcgtcctccccgaccttgagtgcctccgccgccagccgtcgttggacgccccccttctcacgtccccctatactgttgtgcacctgagcctaggctaaatgttttcttcgacctgtactcattaaaactaaattgtgc

SEQ ID NO: 35085 - DNA, 278 bp, Zea Mays
tcccttgctttcgtgtgggataacattaatctaggtacacaaactcgataatgtcaaacaccctatttaatctctttttgccccgagcaccgaaggcagttatcatagcttcatcttcggccttcgagtatgctccaagcagctcatcgctagttgcctctatagcatctagctagtcatcattcggttcatcaaactggctcctgtatcaaaaagtatacttcagatagaccaaaccattttggctggagccagcggcagcctcctgcggcatctcc

SEQ ID NO: 35086 - DNA, 411 bp, Zea Mays
gccatttgcatgtgtcactcttgagtgctgctccctgcacttgacacacggtccatgactccatcgactgaattccggcggacgacagtcgacagaggcacatgtccgcttcaagtgctggtgctgctccttccagcgtctacaaatgccacgagatttatatgacgagcctccttttcctatagcttccgcaactacccgcttccattcccctgccatgcgcctcaccttagccgtggctgtctcgtcccccatgacatcctcgacgcaccgccccagctccgcggcgcgcagcacacaaccaccgtccacctgcgctgttagcaactccgtcgactagtgcacgaacaacagttgctgggggcgtaggtaaaggaagaagagatgtcgtggggaagaagaagataggag

SEQ ID NO: 35087 - DNA, 393 bp, Zea Mays
ttgggaggcagcatgttattgtgagggggttgaaaggcgatggcggccgagggtgagacggtggcactggagttcatacccatcgctgagcgatgcctccagtacctcggcaaggtgtgtatgtgtgcgatggctactctactttcctggattcactcagccattctatctcctgatatcgtccatgtcactgatctaggtgtcgtgtgctgctgaagctcaagaaaaaggcggtcaaagaaggtgccccatttcttcttgtttttgctttgacacttatcacaggaggtcaagaggattgcatgccgcttggcattatggtttatggttatgagaagcacctcaataactgtgttctgatttccttgtttttatgataaaactgcataaaga

SEQ ID NO: 35088 - DNA, 390 bp, Zea Mays
cgtccatcagggatctaaggcctagattaaaacagcgaactggtatgctattagacccactcgattccaaatccacagctcccacgcaaccatgccatcaacaaatccgaactgcccgcagagacatcaatggcccagttcacttctggccgaaccagaccctaatcgtggcagtcggtggacggatcagcggtctagggtgcctcgttttctttgatggccgccagcagcagagctctactcccgcggcggcgccataatctctggtgacaaattcccaatgcacaatcgccctaatgtctacccaaatcagtggtacttatcacagacatggagaagaaggcttggaggggtttcttaccggcgattgggcggcggttcgatctggcg

SEQ ID NO: 35089 - DNA, 586 bp, Zea Mays
ttagcaagttgttatgtaaagatttgagatctaggccctgcaaattaggctgtcaggcgcactgaatagggattccattgtacagtgattgaaagagatcgtagattcaccctccccccctcaccgccggtgatcttgcgtcgggattctcgtcgccgttgcgattcgggctaagcaaagtaccggatgtggctcagggtggtaaagatcgtcgtgtggatgaacttgagctcctgttcactccagccatcgtgtcccgccacggacgatcgcgttggcatcaccggcgttcgccgttatccagccaggctatgtgcctcgacgctttaccgcatcgcggtgagtcaccataaaccgctccttagtcctggctcgtcgtcggtgggtctgccacggtgaaggccacgaatcaccgcgccagtgactcagttcccctcccgaccgccagcgcattttgtccaaattgaacaccaccgctcaagcacactataaattgaacacaccgacgggtccgtagggtagtcaagcaccaagccaccaagtcgtgccctcaattgttcaccagagctcgctaattccaaatttc

SEQ ID NO: 35090 - DNA, 374 bp, Zea Mays
gattactttcaccgtaacgattcggctagggagactcgggggcgtcggatcatgatcggacgcgtaggatatagctggggtattttaaatcggggccgcagatcaccgatccaacggctagtgtaacatgcgggttctgtatgatgatagaatagaaccctattctctgagtctctaacggctagcgtaatctgcgccgtccggatctaatccaacggcccacatctacggataccccttcgcgacacatttttattaaagaacccttacaattttagagaatagaacccgcagtccatggaccatattctctgagtctcgataaacttactctagaacccctgaccttcttggaaattgaggcccagtccata

SEQ ID NO: 35091 - DNA, 295 bp, Zea Mays
ggggcgaggttttacccctcagcgccccactgttagaggaagagagagatatgataattgttgtcgcttactttattccttcctcccctggcattatatagctaaggctgcctagtacatcctaacaaacttctgataagataagggagctatccatctaatctatcaagatcttaacaaactttagataagataagggagctatccatctaactaactctcatttgttcttatccttatctatattttagattctatctaaactgagcctaacaaatctctcctaaattatagg

SEQ ID NO: 35092 - DNA, 375 bp, Zea Mays
attctgctgcattgtttgatgctgggaataatagctgaagagcgtacttcagttgttcacctccaggggcaatgaggaggatccctgcgcctgctccctgcagtttcagcgagccatcgaaatacattcgccatacttcagtagcctctgggttgtcaggaacttattgctcggtccactctgatacgaagtcaaccagcgcttgagtctttactgctgtgcgagaccgaaactctatgtcgtgagctcccaactcgcaggcccacttggctattcttccaatggcttctttgttgttaagaatatcccctattggaaacccggtgactactatgactttgtggtcgtcaaagtagtgatggagtttgcgagcag

SEQ ID NO: 35093 - DNA, 377 bp, Zea Mays
caaaggtagaattcatagtttcatcttcagctttggtatatgcccctaacagttcatcactcgttgctttaatggcatcaatccagtcatcgtcaagctcaccaaattgatttctgtaccgacaagaatacttcaaatgaaccaaactgctctttccaacattctgacttgtataagccccaacatcctttgacatttcccactcggcagctaggggccataccatgaaagctatgtgctcttgcactaagtctctagtgtcgatgtagttgcacacaatgttgaacgcgactaggcaggattgagatttttttgtattcacaacagtcggtcttttcaacccgaagttggatcgaatgggccattggatcacatcc

SEQ ID NO: 35094 - DNA, 355 bp, Zea Mays
taaaggcgtgagtgcatgagagatggggttatgaaaaatgtaacaaaattatattcctctagctactctttgatcaacgtgttcttcacgttgctgcctatcccttgttcccttctatctctactgatttctggaattccgctgtcgttgttggagatctcacaatttggtgtgttggtgttgaatcgagtaggtagacatgtagacgacattgatgttgtcacagtacaccaagatggcatgacgtattggagagtggagctcacaacggagaatggtgcaacctgaggccttgaccacaccatggtacttagcctctgcactggataggtgaatgtgagatattgaagagcac

SEQ ID NO: 35095 - DNA, 439 bp, Zea Mays
ggcagacgacatggttatgatgaaaaaattgggctactttggcgaagccgagagcaagctcgtccggtttgccagggaggaggtagttccgcagccaagggaggatgaaattgtggtttttaagagcttcttcagggcagggcttcgattccctcttcatgagatgattggagaggttttcaaagaatttttagatatactttcatcacttgacatccaatgcaatcgttagacttagtgtctacatatgggctctccgaagtcagggtatgagtcctaatgccgaagctttctactgggtgcacgagctgcactatcaaacgaaggccagagcggatggtcttcataagaacttcggctgctacaacttcgcatatcagaaagatacgaaggccccggtaattggctatcgtaccaagtggccgaccggttggacaag

SEQ ID NO: 35096 - DNA, 341 bp, Zea Mays
ggaggagtcgctcctgcgctcgtggaccgtccggcccagggtcgcggaccatccgcgactccacgaatagtaccaccagacggtcctttccaatgtttggtgcccagatcggcgctaatagtgtcgtataaattgattgagagattggttgtctgtttgtttctggtttccctctagtagcctgcagtgatccaccggtggcattttcgggtggtttctcatgtaatttctagatgcaaccactggatccttttttgctttcttaaaagcagagtaataactcattcaaaaaaggtaaaatcggacttgagagatagaatgtatatgaatcctgccattgc

SEQ ID NO: 35097 - DNA, 281 bp, Zea Mays
cagtttaggaacttgtcactagagtgaggcgacagagtagacaacctcaatttggcgaacaacagaaaccacacttctctagaaaagacacaggagactaaacagtgttggatagtctcctcagcctgatcacacaaaggacaagcagcagggtgaggcaccccacgtttagcgagcctgtccgctgtccaacatcgattcttgacagccaaccaaatgaagaatttgcactttaatggcgcccaggtcttccagatgcgtttccagggaccaaatttaac

SEQ ID NO: 35098 - DNA, 591 bp, Zea Mays
ggtcgctccaagtcaaggggcccatccgatgaattattttgcaaatactgcaagaagacgaaccatgtaattgagaactgttacaaactgcagaacaaggagaagaggaacaaggagaagggtaagaccggaggtactgtctctgttgcatccgaaaataattctgataatggtgatgttcttattgcctctgctggttgtgctgctgatgatgcccaatggatcctcgattctgcttgctcgtatcatgtttgcactaaaaatctctgttcagtacctatgaagctgtgcagaacggaggcactcttcggatgggtgataattccccttgcactgttgttggcatgggcaccgtgcaaatcaagatgttcgatgggattgtacgcacattgactgaagtgcggcatgttccatccatgtccaggaacctcatctctctgaatactctggacacaaaaaggttacaagtataccgccggtgacggtgtcataaaggtaacaaaaggctctcttgtggttattaaaggtgatttgaaagctgaaaacttatatgtgcttcgaggtagttctggctctgctaatgctgttgtt

SEQ ID NO: 35099 - DNA, 477 bp, Zea Mays
tttaggtgtttgggggtgatctctgacctaataaagcgttagctcggcctgtttattcttcatacagtttatcatttgcgtgtagatttgggcatatgtgcctcaggaagcaatgaaggtccatttcgtgaattcgttgctgtgtaaattgctaatcccacgttaagtgtactcatgattcgttgcctgaggtccaggcgaaagacctggcgcttagttcttagtgcaaatgttgagtggataaggtgattttaattaagaaaaggtgtatcctttggcaacaagattggcttcagactcgttgattttggaccaaactgtggctaagggaatcctttgccaaggcccatccatgtgctagcgctagcgatctgtactgaacaagggaggaccaagagcaaaagtatacggctaaagaagctagctttgttctttgcttgcgctggtaacttagcatttctcaaaagggtggaatca

SEQ ID NO: 35100 - DNA, 303 bp, Zea Mays
aaggcgaccggaaaggaacaatatcataacaactttggatgctacgacttcatgccttgctctgaggcaaattaccctgtgcccacatttcggaagaagtggctaggttcttggatgaaggaatggttttacgtgaagaacgacctgaatcagagggaagatgtgagaggtgttatccaacgtcctatatggtcacgcttcggcattagaaggccatccatcgcacttgggaatgaagtgcaggcgtgccaaattgctttcaacaccatatgcacctacattggcacgagagatttagttcaa

SEQ ID NO: 35101 - DNA, 533 bp, Zea Mays
gcccacccacactcactcgcctctccccgctcagttgcgcattcagccgagcaccaccgccctctccctcgctctgcgagcgcgcccaggaagaccgccgtcgttcaccgtgtccgcgcacccgttccgccaccacagttgggcgctcgccgtgccctttgcctcggtaagtcccgcctcggtgtccgcaacttgggatgtgcctcaatttacactctccctctctggttcccactacctgtgctcaccggagcattcctcgcgtagccggagagccgccaccgtcgacccaagccttcgtcgtgtctctgtcgtcgttcaaggttcccagagtctcttctcaaggtaaccaacctgtcctgcccccattttatcctttccctattcttgtctgggtgggattgctcgccgaagtgtagttgcgccgccgccgagccattccaccgcgaacagttgttcttcggcgcctctgcgccgttgttgtggccatgaccgcgttcgctatattcccccaaacctcctagagcctttcc

SEQ ID NO: 35102 - DNA, 464 bp, Zea Mays
ctgctgatgtgttgtttgactgcatgtggggaccgcatggtgtatccatggtgaagcagaggtccggtcgaggcatcgaacaagtgattaatatcgattttcgcttttcattgatttacttttagggacacacttgtgtaggctaaagttgtgtttgtttgacaggcacatttatgaggcggaggctggtgggtctgatgactcggacatggaggttgacctgctactgtcgatattaggtgcggggctggtgcgaaggcgtcaagattgaaggcaccttcgcgtcatgatgatgatgtatcaaaagatatggagcgggtttaggcaacttggggctaggggtttcttttgaggacatttgttgtgaggttcagggaaatgatactgacaaacttcctggatgcctacaggtttcgaagtctgggcatgagcgggaggttattgttatttctaacactttgaaa

SEQ ID NO: 35103 - DNA, 531 bp, Zea Mays
tccggccgctgttccaaccactccaatcatgaacgcatatcattgttctgacctggcccctgcctcgggagaaatctttgtctcgcccgagcctggcctcggccaactgtaccaacaaagaaaggtgtgaggccgcctcctctcccgccaaccccgctgaagacaggatggctacaggaacaataggaccagtgtccaatctactttccgccatcttggatgacgctagaaccagatcaccacgctcctccgacatgctgagcactgttttatacaactacgattcgacacacgtctcgtccaggatgggctcggatgcctgttgtgctcccgacccagtctagactctctatctcataaaagacaacacaaagtaccagggccattcctccgaccataccgctacagggctcgggctcacctccggtgaccacgacaataacgtagcaacacctgcacgcctgggtttcctccttgcgactataaaaggaggagcccagggccttcagaaggagagggaagaacacaaca

SEQ ID NO: 35104 - DNA, 359 bp, Zea Mays
cttatgactcatgaactcccggtgcttatcacggggtggaactggtggtggaggtggaggcaatggtacttgttgctgttgctgttgttgttgcagcagctgttgcacccttctctcttggcgtatctcttctcgctcctggcgcaactcctggcgtatctcttctcgttcctggcgcatctcctggcgttcttgctgcatctgagcacgcatatctgccatagtgtccgccatttgttgcatcatcctcatctgagctgcaatcagtgggtcaactccgcctggtggagtattacgaggattcatctctgctggctgtggctggggttgtctaaatatcctccgagtgtgtcgtctgg

SEQ ID NO: 35105 - DNA, 317 bp, Zea Mays
ttaaaatgaaaggaattttttggaattgtagaggtcttggggatttggctaaacacaattacttatctcacctttctagagaacatagactcgactttattgctctcatggagacaggtcgtagtgcattctcagagtctactttgagacatttttgtagtggcgtcgatttcctctggcaccttatgccacctagaggaagatcaggagggatgttgttaggggttaacccgggggtgtatgacattggagctattgatgaaggtaatttctattgtaagttccggctccgaaacaaagaggacggattcatttgg

SEQ ID NO: 35106 - DNA, 501 bp, Zea Mays
gttgatacatacattaagattgagagctctcgtttagatttcatacgtaagaatcaggatcggttaagggcagacctataccagggcttggtggatagcatgttagacggagatattagagcagaaaaggttgggaagcgaactgtgttgtcgacgtcgtttattggtggtcctcgtgacatgaaacgtcggtatatggatgctatggctctggtgcgtaagtttggtaaaccagacatctttcttaccatgacatgtaaccccaactgggatgagataaggagggagcttctccctgggcagacaccgcaagatcgtcctgatcttgtagtgcgtgtctttcatgcgaagctacaggagttaaagcataggctgactaaacaggatattctcggtaaggtccgggcctacgtctacgtcgtggagtttcaaaagcggggtttgccacatgcccattttctactcatcatgcagaggaagtacaagctcacgtgccctgcg

SEQ ID NO: 35107 - DNA, 576 bp, Zea Mays
caaacaactaaccaaagaaattctactgtcttacaggtgaatattttccacaaattccaaattcccaaagcgcatcacccgaatgaggaaaaagaacaaaaagaataacctccacttctcctctttgcaaaccgggtatcacactctacctcccttaaaaagaattcgacctcgaattctgacgcttctatcagaacgacaaaagggaaaaaaattaatgaatcaacaacacttacccacaacaaaaagttccggatatttctgccgcatcagctcctcaagttcccacgtagcctcgcactcaaactgattagtccataagaccttgacatacttaattgatctcttcctcaaaacacgctccgaggattccaagatacgcaccggacgacactccaaggtcagatcctgctgcaccgcaattggttccatctcaatctgatggttcggatcccgcaagaacttcctcagcatagagacatgaaaaactgggtgtacccctgccatggaatccggcaattgcaagtgataagccaagctgcccacctgggccaagatagtgaacggtccaatata

SEQ ID NO: 35108 - DNA, 412 bp, Zea Mays
atgggtctggtgaggagagacctacatggcaaaaaagaagtatgtttctaaaaaattatgtgctatgatttttatgaatattttttaatgcagttatgttttgtagtgactattatcacataaagaggcaaattgaatcagaactgattcaatctggtggcattgcatcgtcaaagccttttcttgacctctcaaaaccataacatttacttaaattgaaggatcgtttgaagaaatactgccaaaaggtactgttcccaaattcactggtaaattctcttttggcgagccttgcatggatgttcttacgccacaatgcaggcgcacaaaagagttgttgataaaccaattactgaagttagagaagcgggaatatgcatgcgtgaaaattctttctatgtagacatagtgc

SEQ ID NO: 35109 - DNA, 629 bp, Zea Mays
gaacatagcgtaatcgccaaggtaagattgagagatgagaagggtagaggcaataagaatcaaaagcataacgaaggatgaggttacaaactcgcgagccaaagaagaggatacgaccaagagaaagaaggtatgagacggaagaggggcgattttaaagggcaggtatgagatgaacatcaatgcaatatatagaagtgtcaagggtaaaggtgataataacaaagagcataggaaaggatggagctaaggcaagactcacgaaatggcgagatggagaaaacaatcacgggtaaggtgggtaaggttccaacagaatggtttagtaaatgaaattattaccgagggaagttataaggaattgatgagatcaccaaggatgtgcaaaataaaatgaccgctcatggatcattaagaaacaaggatgatcaatggcatgttaactgaaatgtcttaaacagacattagggcatgaagataagcatacacgaaaatataagagtatgcaagactcaaaagatacgagcgtactaagaccaaggtaaaagaaattgtcgaaagatagcgtcttaacaacagaataagaaaggatctcagaagacaagaagatcatagacacataaactaaa

SEQ ID NO: 35110 - DNA, 458 bp, Zea Mays
ctttgtatgtgggaggtgtttacaagtggtgtctaccaagtggtgaggtgctaatgagatgaaagtgatggggatcccccttggccttatatacacgaccgtagggcacttcccgcgtacacattgatcacactcttccagcttatctcctagctgataacaaacaaacttcgctatcccaaggaaaacctagcgcctccgctccgagctatctccagcgtttgaggatgtcgggcgcgggaaaagcgaacagcttcaactggatcacacccaagccacgagtaattcgagcgtgggcccatcgcattcctgggtcggcccatttctgttgttctctttgcccggcccacgacgtggcgtcactgcggggcgattgacatgtggccccgagcagagttttcacccccgagtggacccgggggatatccgtcccccataagtggtgcaccggatcattt

SEQ ID NO: 35111 - DNA, 345 bp, Zea Mays
gtccctactgcagccacgtcgtgacgctacacgtgttcgttcagctcgacaatcgccatcgtcgtcgtttgtcgaagccaccctctaccttctctactgttacgaataaggtagaagaaatctattttttgtttgtacccctattctacctatttattcacgatctagcccctgcgctaaatttgtttattagttgatattctaattgaaaatattttaacttcgtaaaaatcagattaagcattttaattattatttcctaccaattcttatgttctcataatttatttggatcatgtttgttataatcaatttatttatagattttttaaataaggagataaa

SEQ ID NO: 35112 - DNA, 301 bp, Zea Mays
tgagagtgtgcttaaattggctacaattccgattcaacactcaagaacgaagcatattgatataaggcatcatttcttgagagatcatgctggcaaagcagatatttcaatatgttctattagcagggacgatcaattagcgaacgtatttacaaaacctttggatgaatcaaggttttgcaagttgagaagtgaaatgaatttgatttatctctcaaatgtggctttaagttgagggcacatgtatagtcatgcattttagccctagtgcatctctctaagtcatgtattgcctattttt

SEQ ID NO: 35113 - DNA, 341 bp, Zea Mays
tcgggatcccttggattataaatgaacgaccaagattttatgaggcttgatctgctctgaactgcacgatcaagatctaaaggcacagatctcgccgacccaacaagtatgcgtgaccaattccatgcgttggcggttgaatcaacggtccagacacctcctatgccctgatctaatcctatccacttaaccacgatccaacggtccacggtgaagcactgctcccacgacggcgccatgtttgctggtggcaagctcccaatctacaaacggcccaatatctacccaaatcggcgctacatattgcaggcatggagaagaaagcttggaggggtttctca

SEQ ID NO: 35114 - DNA, 335 bp, Zea Mays
ctgcactgcgaccctcgttgtcggtaagtgcattcctcagatctgcaagcatctagtgtccacgtagcaccatctaggtcagagttcatgggctggggcgggtaaaacgcgaggtccgaccatggcgccgccgtggaatgttacccgccgccgtgttcagtcaccgggttggggaggaaggttgtgcgtcgtcgatcatgtggacgatgaccccgattagaagatgggtatcccagattacttcccttgatgaggatgttgtgcccccaaatggtattcctcaccccatgcatggccatacagtgagtgggaactagaacatcccccatcattag

SEQ ID NO: 35115 - DNA, 378 bp, Zea Mays
ctctatctgttgacatgttcagagtttcatgctgccggtggacgaagaggtgctgatgttgaggtcttattccccgggtccaatgtggttggtaatggcagtgcaactgcaagtgattttgttcctccggtcacctcaaatgttgatagcacaaaccctgcttcggcattatcagttgctaaagactcaaaaagtcttcctgaaaaggctattgcggcactccctcctgagcttagtgcacaagcaactgacccaaaaagaaaggcaaggtcacaggacccaggatggaagtttgggtggtggccagacacaacaaagaaggattttgtttagtgtattttctattcaaagattgttccttccggaatcaaaaggttc

SEQ ID NO: 35116 - DNA, 408 bp, Zea Mays
aaggacgaaattcactggctgctagaagctaattttattagaccttgcagatacgtagagtgggtctccaatattgtgccggtggagaagaaataataaggtaagctcagagtatgcattgattttcgcaatttgaatagagcaactcctaaagatgaatatctcatgcccatagccgacacgttgatcaataatatgtcaggaaattgaattattagctttcttgacggtaatgctagatataattagattttcatggtcgaagaagatgcatctaaaacagcctttatatgtacagacttcattggtttatttgagtgggttgtcatgacatttggtctgaaaaatgctggtgctacttatcagagggctatgaatttgatctttcacgagctgttgggaaacact

SEQ ID NO: 35117 - DNA, 468 bp, Zea Mays
caagagcggtggctctgaatttggaagaggaaagctggcggccggagagaggggtgagtcaccggcacgaactaccgtggctttcaccggggcaatgtttcaggcgatggacagactacgtacgacgatctgccgtgacgtggtaactcttctaagtacgtggcacgactacgaacggcggtgaactccagcgaggacacctcggtcaatcgcgcggcaagtggcacggtgaacagtccggtgataaggctccaactcttccctgcgatgagatctttcaccgctagtcattatccgcacacgaattgcgacgtcagcgaggatcgcggtgcggagttcaccggcgacacgttcactgtatcttaagatcttttcgttcactgtaccatggctatcttcgtcagtctgtctgaccgagcaacttgcagggatttgttctcaattttttgtgtggcaactcactaatcc

SEQ ID NO: 35118 - DNA, 657 bp, Zea Mays
gaattcactgagctgattgtacaacatttgctgagactatttaagcccatacaacgccctctgcagcttaatgttgtacatgttgcaatttgacttggaatctggaactcccagtccatctggagccttcatattgatttccgaatctagtgacccatacaagtatgccattactacgtctgtcatctgcatttttaagtttaaacttgttgtcagtgatattagatattggaacgtcgtgccactcataattggggaataatttccattgtaatcgatgtcgggcactgtgggagctgaaatttaggggatcatttttagagggtggtgaaagtaaggtttatggcgatgatatagaagaacccgttgttgcttatagtcttaggttatgtttggttcgcaacacatttttggaatctagctattcccattacccaagactatccggttggatgggattctctctacacactattggatgcccgagatgtaaaatacatagtgtttggttccttatctggattctcatgccatgttctcaatatctcactggacccagttccatgtgactaaattttagtcccatcacatcgactgtttaatgctagttacaacatgaccagccccatccccgacgatgtggtgcacacgggcggg

SEQ ID NO: 35119 - DNA, 271 bp, Zea Mays
gctcggcaagggcgcttcgggcgaacattgtcagacctctgaatatccaaggctttactagcttccgggagaggcgccaccaccaatgttccagcaggagcggcatcagaagaatcctcggctaacatatcaagcatggcacttatctctgcatcactgggatccaaaggcacctcaaagtgaacctgccgttcatcatcaggaatttcttcaagcgaagcaaccaaagcactaacttcttcggcagagggtcgcactctaaggcccaaac

SEQ ID NO: 35120 - DNA, 524 bp, Zea Mays
caaccgcaccctccaccaccatggagaacaagattcccaacttccttgaccggtgatctagaagcaattgcgccaacaaggataacgtgaactttggggaacttcctaagaataccacctccctacccgatggcgcatgcaataacactgtcttccaaaaacaggatataactgcacgatactgagataaccaatccatacccaagataacatcgaatgccctcaaggaaatcacaacaagattggccaaaaagacctcatcaacaagaataacggaacacccctaacaaactgaacagctactaatggatccattagcagaactaaccaaaattgggtgacccaacctctgcaccgaaagaccagcctgcaacacaaaattctccgaaacaaacggatagctagcgccagagtcaaaaagagcatgggccacaaacaaatcaactgagatcgtacctgtcaccatgtctccttgctctttaccatccacagtgggtagcatataagctccggaaatacccgcg

SEQ ID NO: 35121 - DNA, 324 bp, Zea Mays
gtggcaactactgctgagctgtctcctcctggggtgtctgctgctcctgatgagcacgccatgcacctctacgcctgttctcagatatctgtagaaagcacacacacatcagatctgactctatagtttttcagcataagaaaagatatacggaaaacttcatagcactgaacaattgatcatcttcactgacagcttctcagataaagtggaaagtggaaataaagggattgcccatctaaacaactaactttattaataactacaccaagtggcagaggatacccacaccttggtgacaatcattacaaagatccaacttca

SEQ ID NO: 35122 - DNA, 411 bp, Zea Mays
ctactccagttctggctttaccacagtttcaggtgccctttgaagtggaaactgatgcttgtgcagtgggtattggggcagtgctgatgcaaaaacataaacctgtggcttatctaagcaaggctcttagtgcaaagaatcagctgttgtccatatatgagaaagaatttctagcattactgttggctgtttccaagtggcgacaatatttacaacatgcagaattcatcatcaagactgaccataaggctcttagcttcttggaggatcaaacattgcattctgaatggcaaaaaaaggctatggctaagcttatgggactccagttcagggtggtgtatcgaaaaggcaaagagaatatagctgctgatgccttatctcgagtgggacatgctatggtaatgcaaacta

SEQ ID NO: 35123 - DNA, 643 bp, Zea Mays
catcgggtttagtatccgtgggcaggcggatatctcatgcccgttgccatctctattcacgttccatgtttcaaaccatcgtcccgccccatcgttcccgaaacttgtgaagtgtcgatccgtgcatccctgtatccgttcctcaaccccttggtaccaggaatattgtaacatgacaacccctgccatggcggtcacctcaaccctctgttttttttttataatttctgcagctttgtagttaatttgcattgctttgcttgatatgtgttgcgctgcatgggaaaataagaagggagaaacacatgctagatgtaagagagtccgaccatgaaacagcacctgctctctgctcataaatgaacgccgccttgcaatgacaaaagtgagcaaaaattgaaggaaagcttcacttaaacatcctcatcttaaccacagtttgtgcagccacacatttcctatcactccatcactgcacatatgacataacacaagcacacagcagatcaaaagaagagcagcacaaagtgagtgcttgttcccatgtgcctaagcatgaaagatgggcaccttgccaaagttactgtgcatctgtgcctagtacacattttaggtgtccttgcatcactgtgcctctcctgag

SEQ ID NO: 35124 - DNA, 586 bp, Zea Mays
cggcgaagggcggtggcgaagcgtagagtgagtgaggtggagggtggtcgtcttcgtgtggacagggctggcaagcgggaattgttgtcttcgctggttggggcgagtgtaggtgagggggagttgcaaagtctttttgagggtgaggagctgaggataatgttgtttaactacagggagatgggtatcatcccgaaggttgaaccaatgtaaggtgtgatgtcctcgctgtatctatgtaactataatttgtatgatgatttgtatgatgaggctgtgtgccttcgctgatccggccgtgcccgtaggggacttgtgcacttgatctagcgcgtttattatgtcggtccggctgcacctgtagtcggtttttgcgcggatagtcttttgagggagacttcaattttgcgcacttgttgtgctagtccggctgcacccttaggcgacttttgcacggatagtcttttgaggaagacctcggttttgcgcactcgttgtgctagtccggctgcacccttaggcgacttttgcatggatagtcttttggggaagacttcggttttgcgcacttgttgtgctagtccgg

SEQ ID NO: 35125 - DNA, 304 bp, Zea Mays
agttgatataacgataatacttatgaatgtttgtcgactcccaatacttcccagactcagaaagatgaagatctttggcttcatccctagaaggctgccggaaatcatgtatcttgatcttgtcgccagagatatcattgtcagaaaaaccaagaatgtgagcaaatcgacgatagctcaccttataccaactaccttcaatgaagaagttcagataagggtagttgtaatgactctcctcgtcagctagctttatccataaagtggagtagaattgagcaataacttcatcattccaatcata

SEQ ID NO: 35126 - DNA, 685 bp, Zea Mays
gctgtacgcaaatcttttgtcagtatattgttctgcatgtgtgtgcatatacatgcaacgaacatcaaatctgtcatgattcattttattttattttatttggctgacccactttacccaaaataattagagcttacagcctgcctaccactattacccgaactcctttagtcccattgcaccttggaccgagggtgccgcgagttcgcaatggacttgggacttctccactttctggtgttgtcgtggagtgccgccctcagggcctcttttttcaccagctccagtataccatcgatgttatagaatatgctagcatgtccgattgtaagccttgctccacgtctgttgacacctaagcgaagctcttcgacaattgtggtgccttggtcggcaacgtgacggcctaccggagcctcgtcggggctctcaagtacctcaccttcacctggtctgactatctacgttgtccaagaggtctgcctttcacatgcataactagcgggagccacacctcaccactaaaaagtggattcttcgctaccttcacgacaccctcgaccacgaccttcttcttcaaccctctttggcctccgagttggtcatctacaccgacactaattgggtcgattgtctgacacgtgtcggtccatctcaggctacaccgtgttcttaggcaccaacc

SEQ ID NO: 35127 - DNA, 572 bp, Zea Mays
gcgaggtgctttgtgttatggattctttggctgaagtgcctgacttttaagaaacctttgtcgatgttgatcaaagtgatgctatcgatgccctgctatgtatggcttctactgatgctagcatatttaaatcggacaaggagcttcaggcagccagtactttgctgctgcctgtttttcttccttgcatgtatggttcctaagatgaggtcgtgaacgatgtcgtgataactattttttggatcggctgtgggatggttcatggctgttgatcggcaagggaaccagatgaagcacctaatatgagaatattgaagaagtgaaaaggtatttgtaaaggatatataccagaggcacccaaggagtgtcaacaatgaagatgttggctagtgggaccaagcaattcaggccgagtcggagaacttagactcggactggataacttggatctggctgcgggactcggactaggattctggggacttggccgacatgtcagaaccaaaccagcctacgtggacagagaagggaagagtggaagacaacattttctggcctgtttatggtacctg

SEQ ID NO: 35128 - DNA, 483 bp, Zea Mays
ctgaagaaactctggccacagcgcctgggaaaggaaaagagaaagccggagatatctcggaagaagaagacttcaattttcaggacatacttgggcaagaattgtcaaaggctgaaaaagaagagttgaaggaatatgccatatcttgcgggtacagacccggggcgctgctctttgggggagttaacggggaaagcttaggatgccttcgggaccgcactggggcgaaagttgtcggcactctatcgaagagtattggccttccaaaggttgaagcagacctcagtaggtaccggcggcagcatatcgctggtactatgctaactttaaggtaaaattctcaactttttattgttttgttatgaagatgttatttgatgaaggttattttgtcagagcttactgctgagcaaagtcctgaggatgcaacaagacctcaaggacaaaaagaatgaaattataattgagggcctggagaaaaag

SEQ ID NO: 35129 - DNA, 442 bp, Zea Mays
cccagatccgtccgattctaaatctacggtcctgatccgaccacgtggcgagcaccgtccgatcaagcgatctacgaccacgatttaaagcgccaaagggttggcttacttctaatcctaaccgacccaaccctgaaattgatcggtgctaaacttagaggggaggatggcgaacatgcagaaaaagttcctaccagccattggggtggtggtgatgctgatcatggcatggtgtggttgtgcggcggagggagaactccggtgataaattcccaattcacgatgcgacaatctctacaatactcgggtacatactttgcgtggatgataatggggagccggaggggtttctcaccgaaggatgacgacgcgcacccaggtccgcgtgatgatgcggttgtgccgcggtgaaggcggaaactgcagtcgggtcacagctccg

SEQ ID NO: 35130 - DNA, 627 bp, Zea Mays
tcttttactaaaagacactccgtgcaaaagtcacataagggtgcagccggataagcacaacaagtgtgcgatacgaagccttttactaaaatacactccgtgcaaaagtcgactaagggtgcagccagataagcacaacaagtgcgcgatacgaagtcttttactaaaagacactccacgcaaaagccgcctacgggtgcagccggacaagcacagtaacgcgtaacgcgaagtctaccctacgagacaaccccgttcacggaatcgacaagggtgccgtcggacgcttacaacatcacaccgctaagcgaagagcaacatgccacatcacaatacaagttgcagattacatacactcagcgaagggtcaccgaacccacctcgcaaataaatacaattgcgacccctactaccataggacaacacgagggcaccacatactacatcgtctcaaccttcgggatgatgcccgcctccctataattaaacaacattattttcaattcctcaccctcaaaaagattccacagatccccctcaccaatgctcgccccaatcggcgaagacagtagctctcgtttaccaaaccgatctgctcgaaggcggtcccgctccatccccatccga

SEQ ID NO: 35131 - DNA, 544 bp, Zea Mays
caattctcaattgaaaaccaaggtcatcatggcacttcatgccagtgctctaggaggccactccggtttcccagtcacatacgcccggatcaaacagctgttctattggcctcacatgaaacaaatcattaaggactatgtggctgcgtgtactgtatgtcatcaggccaaaccagaccggactcgctacccgggattgttgcaacctctgcccgttcctacccaggcgtggcaggcgatctccatggatttcgtcgaaggactgccttcctctggccaatacaacaccattctagtggtggtcaaccgtctcactaaatatggtcattttgtgccgttgcgccatccttttactgctcttacagtggcccaagctttcatgtctaatgtctaccgacttcatggtatgccggagtctatcgtctctgaccgggatcgcattttcaccagcaacatttggcgtgaattgtttcgtttgtcaggcacacagttacagatgagttcatcctaccacccacagaccgacggtcagacggagcgggta

SEQ ID NO: 35132 - DNA, 279 bp, Zea Mays
agtagagtgggcaaagatagggggatgacccctcatgaattctgcccgcttgtctctaggcacttatgacatctgggcttgcactggaggttgaggtggtggtggctgctgctgaacctgctgcatcgctgctaatgtctgaccaattgcctgaactgcctgggtctgcatcaagaacatctgctcaatagtcatcaggggtggcggtggcaaatgctgctgcggagctgcctcctcttggggtgcctgctgctctggctgagcacgcctcgcacctct

SEQ ID NO: 35133 - DNA, 390 bp, Zea Mays
aataaatggtatacagagtaaggttagcgtataacctctactgcagctatcaaggccctcaccagccccgtccctgtctccatagatcctaagcgagtgtctccaatcttacaggaaatcaattgtgctccaggtgcaactccattcagcagaggttcctgtgtaagaactcaacagaatagtgccttcaaaatttttaatgcaaatgaaaagccaatagttaggtaacatacatctggatgaaatgcagctgcaatgcccgcgacatgagtagcatggggagagcagtcagttactatactgacaaggttcccatcattataaacatttgctacaaaagagcaagcatccaatttgctgaaaattgcatatttgcgttcaagcctgcag

SEQ ID NO: 35134 - DNA, 291 bp, Zea Mays
gtgtcacagggccggtttcatccttcaagagtttttagtccttgtccgtttatttagggctcatgcttgacccgagtcactcgcccacaacaatagccctcaagcctcagaaggagcgtggtgctcctttggaggttttgttccattttttgctatggacacatgagaggactcgatgagtcgagctccagagcctccaaaggaacaatgggtttgtttgaaggatctttcatacgaactatgtgctcagcattaggctgtttattctacaatctcgttttatctcgtttt

SEQ ID NO: 35135 - DNA, 496 bp, Zea Mays
catcaacacatcgtccaacggcgaattaccgatcgacggctatgatgcgctaggccgaacacaacgaccgcccgatcccaactcatctccctagaccccggtggtccagaacaacggcgctcgcatgcccggcggcgccatcactgaaaaactcgactcgacgcctaggcaccgcatcttcctaacccgagctggctacacgacgctatggactccacgaatctaacaaagggcttaccagagcgggagatgacccacagacgggtgcccacagcggacagcggattcgcagcacagatcgatgtccggcgaggaattctctcagcgctatccaagcacgcccgccaattcttctctaccgcaggtagcagcggccgtagaacccgacgaagatggcacccgcggccaagagaacagaggggcgagttcgctgtggtcgcagaagcttcaaggtgatgtggccatggctctcggtcggtgcgatgacaagcggacc

SEQ ID NO: 35136 - DNA, 286 bp, Zea Mays
gacaaattcgtggtagtcttcattgatgatattctggtatattcaagaaataaagacgagcatactatgcatttacacatagtacttcagcaactgcacgatcatcgcttgtacgccaaattctccaaatgcgatttctggctaagagagatcaagttcttaggtcacaccatttcgcaggatgggatagcagttgatcctgagaaagtacaagaagtgatggattggaagcctcctaccaccgtgcgacagattcagagttttctgggattggcaggatactatc

SEQ ID NO: 35137 - DNA, 339 bp, Zea Mays
cgctgatgaagtacatggggtgctggactggatgtgcatgcccttcttctatccgctcgactactaacgtagtgcttaccacgtgagtcgtgcatgagatgcataacaacaattcttcagccggttggtcggtggtggctcggttgggtggtttgaggactggcggggtggttaggattttcttgagtgcttccaatgcctcttgagcttcgagggtccaatggaatctatccaccttcttgagaagtttgtagaacggcaagcctctctcaccgagctatgagatgaagcgacttagtgtcgccatgcaggcagtaagcttctagacctttttctgct

SEQ ID NO: 35138 - DNA, 333 bp, Zea Mays
cggctacgtagtcatgccatcacttccaccacacacccctaagtaacaaaacaactctaaccgaacttgtcatttggccggtcgattcccaacccatttttcataccaccactacacgacatgcctaatacgttaaatgactcgttcacaattcacctacatctttaccaaaacattcccacatcgcttgaaactcaacctaagcttcactacacaattttaggacatctacttaattcacgaatatcatcgtcacacacaccgactcgaattgaattaaccacacatgtctatcacatgaatggagcatttcaacaaatatcctaaaacaaa

SEQ ID NO: 35139 - DNA, 687 bp, Zea Mays
gtaaaggatctcaacaatatcaacttgcctgcacaatgcttgacatcaccaccatctcatggatggagaggacaactataacagaaacactgacgcccaagcgggcgagagggtgtggcacaaatgttttattgctagtgccaatgaggacccgaagtcccgaaccacatcttgggtggctaatttaaatggtaaccctcaaaattatggcctacctatttcaattccaatccaacttaacaaccaaacactcaacatgaattgggaccattcccattccacaaagtggggctcaattcatgggaccaaagcttctccaatcccatattgctccacctcttcttagtattgcattgccaacccttgactccaatatccctttgcctctactgccacttctctcaactatgagaatgaatacaaggacatggtggatctaggtgggaagttgatgccaacaaaggatctcggcactaccaatttggccaccacaatgcttgacatcaccatctcatagctagagacaccaactattacatgatttcagagacaggtgggtgtcaacaaggaggtgcaaatgttggccgtggcagcaccagaatcaccaaaaagtggagcttacggggcagaatgtcatcatcactgaagacgagggccacatctgtgttgaacaattcagacgatgac

SEQ ID NO: 35140 - DNA, 313 bp, Zea Mays
ccgaagttagggtactaccaactaaaatttgagaacaaagcatagtaaaagagatcagaaaagactttaatttaagttgtaagagcaacactggacattcttcagataagaactcaaatcgagtcacacacagatacattgagatagatgatacaaattgattgtaacatactaataataagcagtggtcaaagtggacctaaacagattaattgaactgggttgggatgagaattgtacctacgacgtcctagcggtgaggtgtgaggactcgttgtcctcctcgctcttctgcgtgcgcactcctcctctg

SEQ ID NO: 35141 - DNA, 507 bp, Zea Mays
gttttgtttagttgtagatttctaaaaatctaattctagatgtgagaaagctgttgtgagctaatgactgtcgaaaagctgaaagttatttggttgaaacagctatcaactatagatcaagagtataatggtttgacaacatggaaggagggacatcgtttaagcctctcgaacgaactgattcgacaatattgccgtcatcggtaaggggcaatacgacattgccatggggggcctacacccatagtgctaggctcaagcattgtggctataatcatgctcagtccaatacatacatggtgtcctacacaaatagtatgtgtggcggtgacatcaagcaaaatgataggtgttgggtcgtcgtctttcatgaggacgaagcctcacagtcaccgaacatcaaacactacaccataacctaaaatatgcggcttactatcagtcgcaaaaagccctttcaacgtcttactatccgccgctaaaaacatatgccgactacccatatcc

SEQ ID NO: 35142 - DNA, 356 bp, Zea Mays
tcagactcaaccaaataggggtaaaacatggaatagatgaactaccaataattctactctttggataagttcaaaataccccgaggaacgtactcaacacttctagaaaggttgggaagctcaaaatcaacatatcgctattttggagctggtttgagcaaaagaagaaatatgagtgaaagaatcaaaatgttcatgatccatgacttagactagatggaaaaccacttgagatatttttctaagtcataggatctctctcaagttttgccaaagcaacttggagaagattgttcaaagatcaacaaaaagtcagaaactcaagttctgaaatcaccaagtgcggaccgtcctcg

SEQ ID NO: 35143 - DNA, 475 bp, Zea Mays
gtggaacatgctgtttacagaaagggagttggtgactcccttttggtggtgggagtatatgttgatgatctcataatctgtggaccatcagtagtaaaaatagaagaattcaagaggcagatgatgctcactttcaacatgagtgaccttggtttgctgagttactacttgggcatggaagttacacagaaggagggtgagatattaatctgtcaaagttcatatgcagcaaagattcttgagctgtgtcatatgactggttgcaaccccactgatactcctatggaacaaagaataaaactcactgctgctaagaaagggactgaaaaggatgttactagatacaggagtgtgattggtagtctgagaaacctagtgaacacaagacctgacttatcctttgctgttggacttgtgagcaggttcatggaaggtcctaacaaagagcactggacagcaattaaaagaattgtga

SEQ ID NO: 35144 - DNA, 517 bp, Zea Mays
atattgatgtcttctccaatcaagaaaaggtagtatgtactgtacctactagcgttttagcttgactaaaggtcaggtccactttcttcacagcatgatatcttcgcgcaagtcatgaacccactggtggatgacttcctgggcggaaagagtggccttctggttgcaatgggtcccacaggctctggaaagactcacaccatctttggttccccaaggaatcctggtatactacccctcacgctgaggagaatcttcaacgcacaaggcgaaagcaaggtttccaggaaaccaacgcggtaaaatatgttgttttacatgcagtccttagttacatttgcaagctatggtatggaaggaaccttatcttgacgtttctttttctatgacaataacaggtcatttttcttctcgatgtttgagatattttctgagggaaaaggggaacgcattcttgacttactgtctgatactgtggagtgtgttcttcagcagtcagtgattaaaggtcttcaag

SEQ ID NO: 35145 - DNA, 342 bp, Zea Mays
ccgggggtggtgtgagaggagagtggggggagaggagagatttcttccagtcatcatatgctcagctcagcaggatcggaagaaggctggcggagtcagatatctatgtctcgagaagagaatcaaatgacgacgagatgcttggaaaagaagaaatcttgttattatgcgcttgtaacagttcctgattagcgttaccaatgttctcaagtttggtacttgaaaacagggagcgccgccactgtgcaatcccaacccaaattccaattccgatccatcatatcgcatcacatcacaccaatccaattgtcatctcaactctgaagcaaattttgttttttc

SEQ ID NO: 35146 - DNA, 284 bp, Zea Mays
gtgaaagcttaaatgcgatagaaatacaaactactatcgatcgacattttaccaaggcattgggaagtgcgtaagtttctccttaatccttattagagccccacacaaggaaagcccaaacaagggtcaagctcttaatcggataacttcatggatagcctcgatccttcccacacgtaagtgagtctccagtgtggcctctctcagatgctattcgccatcttccctatcgagttcccacttgaaacaccgtaggcctcattccctccattacacaatggtgg

SEQ ID NO: 35147 - DNA, 336 bp, Zea Mays
gtggatgttgctttggaaccagatttgacttattcagaacatcccattcgagttttggatcagaaggacatgatcactcgaaaaaggaccctcaagttttataaggtacaatggaaccagcacacagaagatgaagctacctggagactcaagatttcttggaaaagaattttcctaggtttttagcttcatgtaacttataagatatgtatatttgattgtaaagttggaatgaaccccataccaccccctaccctgtaagacaaataaggaaataaagatgtgacgtgtttccttttccactacttgccctaggaccttaaatctcgggacgag

SEQ ID NO: 35148 - DNA, 473 bp, Zea Mays
gtggggtactatagagcaccatccaaactctggtacttggaggggacaaaaacagggtcaccattagtgatagacagattggaccaagactccaagagtcaactagagtcattgtacagtgacactcaacataccagcctactggagcagatcaataacatattgttgctgtgacacgagcaagacattagaagagtgtgacaaagataccaaggaagtggtggagagtgccaagatttgtcatggcgaacttggaactgagacgatcagtggtgcgtcgtagtagagcatgagaggacatcatgagtataatgtcatcgatgtagagcaatatgtaggtgatgtcatctcgatctttataaataaagggagacatgttggacttcgctgtagagaagttgtgtcttcagttgtcggtggcgaactgctgataccacacggaggtgcctgctcgaggtcgtacaacgacttct

SEQ ID NO: 35149 - DNA, 433 bp, Zea Mays
gtgatctgtcgttgcaacttgcgttcgtttgggagattcgtgccacgagaagtgtgggtaacgtcgggtgtggtgagaatatccaacgcggggtgaatccggtcgctggccgaaccgctcgtcgtgtcccgccgtggttagccgcactggcatcacctccattggccattatccggccaggctacatgcctcgacaccttaccatggcacagtgagtcatcgtaaaccactctctactactggttcgtcgtcggtaaggccgccacggtagatgccaccaagctctagcgatagtgctctcctcactctccggccgccaccgcgccaactcaaattcatgagccaccgcccccaagtcctataaattgagcacaccgtcgggtccgtaaggtagtcaagtactcaagacaccaaggcgtgcctccaattactc

SEQ ID NO: 35150 - DNA, 297 bp, Zea Mays
gacacaatatccgctctagatgagaaaattacctcccgaacaacatcccgccgacccttcatattgagcccgcgggcattccagatcaaaatagttgatggattcataagagaaactgcataagaaccaccaaaccgggggctgctaagatgccttctagggagatgtactccatcccctcacccactgtccatccaaacaacaccgataaggctgcaagctgagaatctgatatggggtcaaggaacaatttgctatatgcatcttggacagatggctcaaccctttcctcgggaa

SEQ ID NO: 35151 - DNA, 321 bp, Zea Mays
gtccgatctcgccctctgtgttattgttccaacacccttccatgctcttgatgctcaccgaaccgtccaattgaactagaccgccacccatcgccgggaacacgatcaaatgtccgtagtctccgctgttctcgtggacagaagagaatagatcaccattcgtgcaattaagttaggggaaacgttctccaggtagcgaatttggtttagtccgaagctgaacactggtcttggcctcctccggccagtctgcgtgctcgctggagctcgggtgcgcacaacaccgtcgaggacttggccgtgcaaagaattagaaaccga

SEQ ID NO: 35152 - DNA, 376 bp, Zea Mays
aactcttgaaaattccctctttttaagaaactagctgactcatcatgaccacgaaaagctaagccttgcatcaaaagaaatcttgtacaatgtaatgaacaagtcaatcggattttatagagctcttcaggctcacgagtagcactagacaagacataatgtatgctttgtctttgattattaaaatcatcaaaatgcaatctagcatgttgtggatgctattaacaccaccaacatgggatctaaacttatcaaccgcatcttccaattattgtacccaactttggtgaaagcttcatacttttcaccctttcctagttgcttaaaaagaaagcaataaaaacaataggatgcatcctttgactcattgtactcc

SEQ ID NO: 35153 - DNA, 565 bp, Zea Mays
ttgtctgggacttgaattggacgagccgaccaagatcagtccggatcagctttggctagccaaagccatctcatgcgcagtgcccaccccatctcttgagaaagaggtgtctcatatggcaggattttacggaaacaccaaataccaactgagatccaacacttgtgcagggtatctgacttggaaaaaaattaggacaatggtgtttgagtaacacatgtaagactttccacaattgcattcataccagggtgcacacgacaaaacacaatatttggatgaacttgacaatatcaggaatcaagatatcaccaaaaatattggagagattctaagcttccatactttcacaaggaaagaagagaacaatggaaggaatgttatttctttctcctttgatgaggggattcttttcgaactgcacaacagacagtatagcttcgggtttttttattgaacgtgcttagcacgtatttcataaagaaggtagaaaagttacatggcttcccctattgccgggtgagctgcccatccacacgtttcaccggcgcaaggagcgagagag

SEQ ID NO: 35154 - DNA, 397 bp, Zea Mays
gcggtcgagcgaagggtgggtgtcaccagcagcaacacaaggttggtggtgatgatgtccagtggaaagaggtgaacttaccccagcggaggttggtggtgatgatgtcccgcggaaggcgatcggtggaggggccgcggcgatggagatcgcatgcagcgccgccatctgtgcaagacgagaggaagaacgagccgggatagtcgcccgacgtccacacaccgggcgtgtttccacgtggaaaatgggctgacatcgggccaatatccccacgaacctgccttccaaacataccggagccatacccaggggagattctcgcatggaccgccagcacagggaaaacaacgaattccccgcgaggaattggcctgccaaaattgccctacgattcggg

SEQ ID NO: 35155 - DNA, 425 bp, Zea Mays
gtgatggatgcagaggataggggattcaggactctgtctgctcatgagtccctgacaccgctatccacctatgctgcctcggtcagcgacgctgccagacggaccctatggtcgctcagccacacctaccgacagcagctacaggacacgaggttcaggaatctccctctgcgtctgagtggaggaagccagaccagcatcgttccaggtggagctggtgaggagcgcctcaacaccctagctggtgtggtggccggacacaacaccgatctgaacagtgccaccctggatctctctagggtgcacttggagctagaggatgcccatgccaggattgcaaccctggaagcccaactgcaaggacggcatccgcccgaagctcaggtccccgccatggcgttgtctcctccccacaagaggctgcg

SEQ ID NO: 35156 - DNA, 389 bp, Zea Mays
gaacaccactactttccccactagatatgtaatgtcggctgttcttccgaatcagagggatttcgtcctcttcttcatcatcctcatcaacaacacggacatcacacccattggggtcagtttcagtaaaatcaggcactgacacttcctcagcaacaggagcagaaggaccggcaccctgatccaagctggacacccgacgaagacgtctcttcttctttttctccccctcagcaggaaaagaggcttgatcgcctcggcgagaacgtttcgggcgaacattgacagacctctgagcatccaaagctttgtcagcctcagggatgggcgccaccaccaatgtttcagcaggagcggcatcagaagaatcctcagctaacatatccagc

SEQ ID NO: 35157 - DNA, 311 bp, Zea Mays
aaagccgaagcacgacaggaatcagccaaaataggtcttgcataccacttcatgctattcaccatacatccctgagtatgtgggcaaccagcaacccagagcttcagttgctttgacaagccactcacaagctgcgtgagcctcgttaccaccaccaccactcatggctccaacctcgtctcacaaccaacatccagaagggcaccgccaggcacaacaacagcatgatgtacgctaaaaatgaagcttagacattcaacaacactgcactagagttgagacatatttactaaagcaatacaggggctcaa

SEQ ID NO: 35158 - DNA, 292 bp, Zea Mays
gcgacatgtgtccagacccagcttggtgcgaacctgtccacacaacgtggccaggcgaagatctggtgcagccaagcggcctactgtgcgcgacgtaagcttgcgggatgggcctgacgtaagaccactgggccacgctgcccttgcatttattgtggagaagacgcgccgcctgactaccccgctgacaggcgatgtgccccttcggcatttaatgcgccctgtccactcaactggcaggcggtgcccaagccatcttgcaggcggcgtgtccgactattcccgttggcca

SEQ ID NO: 35159 - DNA, 420 bp, Zea Mays
cacgtttacaagtgtcacatctagccacatagcgtgcgatttcaaccttcatctttgtccaccaataatgctgttttagatcatggtacattttagtgctcccgggatgaatagaatagcgactaagatgtgcttcgtccagaatttgctggcgaacctcttcattttaggcaccactatgcggttgttgaaccatacgacaccttgactatctcttcagaagtagttggcttttccagcttctatcttctcatgaatgtgctttatttcctcatcattcttttgggcatcaattatcctttgtaaaaggactgactcaagctgtagttgatttaaggttccttgttggatcattcctagattcatattccccatctcctggcataatgtaatgtcagaagtcctcattgttagacaatg

SEQ ID NO: 35160 - DNA, 385 bp, Zea Mays
caccaaccacgcctatgcaagtaactgtcacagagaataaatttgctaagccgtacagaacaatatagataccagggagcaccaggaaacactcaccttcagttgtgtatccttagtaatcctgctgcggcctgcagcttcaatggcgtatgctcaactggacaaaagggtctccaacactgtgtatatatttgatgtttttgtaggtatgcaactatatctatatattattaatatgtttgcaccacacaaatctaaaaaatggaagggaagtaaacacttattggttgatatttctaaaaatgggaggttattacatcacaaatcatcactcaaaggcatgtttttatcaactacataatgattagatacacatataatcgat

SEQ ID NO: 35161 - DNA, 293 bp, Zea Mays
aaattccttgagaagatcatcaaggctagcgagggacatatcctcgatatcggacaaattttctatcctggcaggagctggtgctgggggagctttcttcctcctttctgtctggcatccttggcttgtggttttcttctggattttctttgtgggggcgagcttcttatcatagtccatctttaaggttcgataggcctcacgggtgttggcctcctcgccttctgctatgtcgagacactcttggagagatgccttctccttcttaagctctttgacttgctgctctaggc

SEQ ID NO: 35162 - DNA, 451 bp, Zea Mays
aaatcatgctaaaagggaggaaagaccatgtagttctgcgtggcaagtctttagtaaataaacaggtagactctttgctttcatgtgataggtcgggtgcatgatttccccattcgcacggcacaacgttgctctccggcctaccaatgctcctagctcatctttctaccaatgccagatgtggcgtcacagctcatgtgcttccaatgcgtcacggctcacggctcctggaagtgccacgtctgccataagctcaatcaacctgctgcgccaccacttggattgtcatgtaggtgaacaccttgccacaacacatacgtaatacacactttagaaaacccttggtcgaggagaacacccccgaaccctttgagaacgacagctagattgagggagcgtaagggggtggttgggggccttgcccacgacttagcaagagtgaagggttttc

SEQ ID NO: 35163 - DNA, 340 bp, Zea Mays
caaatttgtagttggtgctgtggacaacaatattgatgcaggcaagtgaccgagttgttacatgaaaaagagagaacgatgctctccaaatcgcgctgtcagaacgtttgatgaagatcgccatggtacagtgacaataaagatctccggtgccatgcgctcgacgccggtgatcctccaccacaattcgcgccggcctagttgattcgttccatgggaagagtagataacgtcagggcgaggtgaaaatatccagtgcagggtgaatccggtcgctggccagaccggccgtcgtgtcccgccgtggtcaatcacgctggcatcgccggagttcgccgtt

SEQ ID NO: 35164 - DNA, 759 bp, Zea Mays
gtttggtgcaagaatttgtgcaggtgtgctctacttgtcagcggtacaagtccgagcacctccatccagcagggttgctcttgcctctgcctgtgccctcagcggtctgggccgacattgcgctggactttgtggaggcgctacacccgcgtgaacgggaagacggtgatcctgttcgtggttgactgcttcagcaagtactaccacttcattccactcgcgcacccgtgcatggcagagatagtggcccaggcattcttcaccgacattgtgcacctccacggcgttccgcagtccatcgtctccgaccgcgaccccgtgttcacctcgacattctggcaggagctcataaggcttatgggtactaagcttcacatgatgttcgcttttcatcccagtcggacggccagacggaagccgccaaccgagtcatagtgatgtacctgcgctgcttcactggagatcgcccccgccaatggctgtgctggttgccatgggctgagtacacctacaacacttcgtaccagacttagcttcgggacacaccgtttcgggtggtgtatggtcgagagcctccttccatccacttttatgagccgggggagacgagggtggcagccgtcgcccgggacatggaggctcgggaggccttcctagaggaggtctggtaccgccttgagcaggcccatgcgacccagaagctttactacgatcgacaccaccgtcaagtctcctaccagccaggggattgggccctcc

SEQ ID NO: 35165 - DNA, 322 bp, Zea Mays
aaaaacaaagagaaaagaaaggaaaaaaagaaaagaaaaagataaagaagtggaactgctcgtggccgcgaactgcatttccagcccactcacactttctctccgcgcggcccactccttatccagccttttcttttgtttgatcacacttgcgtgtgggtcccttgcgccagcagtgttcctgttcttcttcagtcacgcgtgagcgccgcctcagtccagggaggaattggcctactagctcaaatggccctagcctgtgcctctgcgcacctgttcgttgcaacggcctccctaatactcgtcgcgtccctcgctgtta

SEQ ID NO: 35166 - DNA, 455 bp, Zea Mays
cgttgtttcttcatctcacggaagaatcgagtcgtatgcatattttggaaattcccactcgtatgctggtgttaattactttattacggcttgcgttgctgtttattggatactggaggcctcaatgtatcttttggtgtctcctaaatacgaaatttcataccgtggggatggtgtaccatgtctcacagtatttcgatttcgactacactgtgtgaggctaagggtttgcaggcagaatcttatgttgtatgttagtgctatactgctattagccggctactgttttgttgctggtgatttttgtgaacgacctggctgtgtcctgatttatatgccgtgaatttattatcagatagcgtttgctaatactgaattgattaggtggttggatgttttattttccccaaaatgcttaaaaacaatgtatgatgcacacacaaacacactcacag

SEQ ID NO: 35167 - DNA, 330 bp, Zea Mays
ctctaactaagactgactagactaagacactgaactaagcattattacagactccgactctgtcaatctagggatccaaatctatccgggtcctgcagtctggggtaccatagtcgaagcgaccacgggacggtgaacggtaagggtgctgaatcccgacaggggcgggagatccaccatccagatagtggcgtgctgtgcactcaacacacaattcctcaacctctgcccgaaccttgcccaacttgtcaagggtgtggtccaactctgtgttgagcacggcggccaagttgaccatgcggttcagcctgggattgccctcaccaattg

SEQ ID NO: 35168 - DNA, 531 bp, Zea Mays
gattataggaaacctggtatcacaaaatgtcatttgctagcccaatgacgtcttcatccactagttgtactctaataccctcacgtgcaattacaatgcccttgacatctaggaaacgtcttttgtggtataaaaggtgatctattgttttgaattctttatattccaactttttagcaattgtacggtggaaaaaaggtgccttacaaccttaacctatatttggacagttctctcacgcaatttggctaaatttcccatggtctttattttactttgagaaatagtgtggcataatgatgtatggtgttatatttgagtggacataaacaccatctaggtatgccttgaatagaggggattattggaaacctggtatcacaaaagtcattagctagcccaataacgtcttcatccactagttgcactctaataccctctcgtgcgaatatagtgccctcaaaatcatagaaacgtcatttgtggtttaaaaggtgatctattgtttgaattctctatattccaactttt

SEQ ID NO: 35169 - DNA, 445 bp, Zea Mays
cctacagcctcctaaaagcataatgcatctatctcaattggtttgtcactacagtttactaggttgtataatccaggtaaacatgtagcaacagatattacaataacaggtgcaatgaagttcgagactccagtaacttatattgataaatgtgcacaagtataaaaaatgaaaggaaatcttttgtatctcaacatactatttcttcccccatcagttaactttgggtgcaatgaactttgagactccagtagtttctattgataaatgtgcacaagtataaaaaaatagatatgaaagggaatattttgtatctcaacatactatttcttcccccatcaattaactttgccaaatgaacattgtactccccaatattcagcaactccgaacgaataaggccaaaaatgatatcaatgttaaacttcttctcttcatctgaata

SEQ ID NO: 35170 - DNA, 340 bp, Zea Mays
aagggtatagccccggcacaaggcttatcgtcattgttagccttcttgccgcatttgtatttattgtaatggcacctttgttgaggaccatcctttcttttataactcttctgctctggcctcatcttttacgaagtccacgtctttatgtcttcccctatttcagttagtgataatgtcgctcttccaccatctctcttctatgtccacctactattcttgaagctcctccaccagatggtgttgatcctccatatgttgttcattagtctcccccatgtcggctacctatctcccaagtctatacccattgtccttgagttctcactcctaattcctc

SEQ ID NO: 35171 - DNA, 379 bp, Zea Mays
gttcgattaccttattactacaagtttaagaaacactttaaagaaccctgccaagaatggttagacacaatcgagatttatgtgcaacgatatcctcggaaattattctaagaaggaagatcagtttgatgacagcagccttcggcagtcgccccaaacgaagattgaatcgggtgctagatgccttgaattttgagtatcctgattatgagcaactaggcggagatgccgaagtcccgaagagaaaaagaattgccagcgcccttgacaaggaaagcaccaaattggccaaaaaggaacaagaaatttccaaaaaactgagcccagagccgaaggtagctgctccaagaaaaagaaaagctgcatctccaaaacttgc

SEQ ID NO: 35172 - DNA, 467 bp, Zea Mays
caagatttcaaaagctatcaggggagcattgtattctgtaattggtaaatacctcatcaataaaagatttcgttcttaagggcactcgaactgtttgttatcaatgagcacgcttactcgacttagggtgaccactataccctactaacggagcaatcggcttaagtcggtagtaacttaagacggtgcaacatgctcacgcttactcgacttagggtgaccactataccctactaacggagcaatcggtttaagtcggcagtgacttaagacggtgcaacatgctcacgcttactcgacttatggtgaccactataccctactaacgcagcaatcggcttaagtcggcagtgacttaagacggtgcaacatgttcacgcttactcaacttagggtgccactataccctactaacggagcaatcggcttaagtcggcaatgacttaagacggtgcaacatgctcaca

SEQ ID NO: 35173 - DNA, 475 bp, Zea Mays
ttgtgttcgtaggggaagctagcgtggactcactccgaatggtgaaccgccgggactcattatgtcactcaccagcatgcataggcatacacccggtatggagtatctgttgcgcactatccgatattcgggtcactgtagaagcttcggtgctgaggtctcaatgaacagggtcgaccgacccctcggggcagtggggtgcgccaggggtcgtacttgagaaggcacagtcatgtcgatagtgacccctcgacgtgcccttgacctaccgttcacatgcctagctgcggctcgggttgacgcatcttatcttagtcggcgcagactcgcgatgctagacttaggtttccacctcgcagacttgcttggtaggtacctggtcggtcgtcctgcctcgcggtcttgctcggtagggaccagatcggttgccccacctcgcggacttgctcgacaaggtcctggtcggttgccccgc

SEQ ID NO: 35174 - DNA, 296 bp, Zea Mays
tttctttttctccggtttccaaggatttctccttggcaggctttgaaggcccagcttcagtcccggcctggctctttgcagcttcggcttcagttagttttgtttcagcctgcgtttttgaagcttcggcagttttccctggagtagagcttgaactctttatcgtctctagtacatctagtacattgaccatccttttcctcttgggggtcgttataagatctttttgtgccttcggcactatcacttttgccgaagggctcagaactgatatttttgtttcttcgattctaggt

SEQ ID NO: 35175 - DNA, 893 bp, Zea Mays
cagagttaaagcaaagatgaagcttcaccttatagagacaggtgatgactctttcagttcttatgagctaggatggtgcctttctttctcgactaaaggctactggtttaagtgtagcatgtctctactgaacatgtgattatgtagtgcagagaaatgttggaaagagactgcaaataactcaatgcactcgctatgttagcttcataagtggaaattgattatacttaaatcttggcactgtagtgctcatgtgttgtttagcaacttttgtttactgtttacatgctattcaaatggcaattttatcctaactgatagatctactaaggcacagtcccctttaatgttctaagctctgtgagtccatctaattacatgtgtgtacatgcacctgccaccttcgatccctttcaaagattattatgtgtacatgagcacacccatgttttttactggatatgtgcctgcagtcaggtgtactttgcattgaatctttgtagctcttctattcttcatcctccccacaatggtgacatttggataggcagtgcaagtgggatcaggatatgtgatgctgagacagttaaagttatgatgaagaatcaacagaattgcagtatgattgggaaactggtttcagaagttggactatgggttagcctctcaataacttagttttaaatggtctacgttgacatgtctttgtctaaaattttattggtacttgcattatcaacctaccaagaaataaagtttgttctgttttttctgctcctttgatctctttgctaaaattcatgcggtgatttgtgttccaggccaatcaagaggctgaacagagctatgcaggcgagcatgcattcattatattcccacagttgatatttttt

SEQ ID NO: 35176 - DNA, 312 bp, Zea Mays
ttgcaggctagtatgtatctattaatatgaaaggtggataatataggatgaatatatgtatattacatagcgtttggatctctgccgtttgttgttctgttgacattgatgcttagaatagcgagtcggagaggttgaagagaaattatcactttgtaatgttttacatataaataaactgatatgcttccatgtgctgattatgtggtccagttttgtgtacgaatattacatacttaacgttttgaattcctgcatttgttgttctgatgcttaggcggccgattagtgggattgtgggagaggtttaag

SEQ ID NO: 35177 - DNA, 300 bp, Zea Mays
acccgacctgaagactttctcaaccatggtcctggatgcttcatgcactccacattgcccagcatggacctcatccagaagttgctttccagtatctgagagaatacatttcatgaggactcctgacgcgccccttctgtatagcgtttccccaatgagtgtatagtgagctgactaccttgcaatacgctcggccgtatttttgtcatctggttcctctttattccttatatatctgatgatcggctccctccagtcatcaggatttgattctggttggctcagagtattgcattcttc

SEQ ID NO: 35178 - DNA, 1446 bp, Zea Mays
aaaatttcagatttagatcccaaatggagcaaggatgaacttacacgcttttatgaagcctaccgtcaacatgggaaggattggaaaaaggttctaactgtttgtttccctttgttcttttccatgatttgtaaatatcagtcaaggtgtcatggctgtgtgaactttgaccggtgaatttgcttatgcagatcagcatagcgataggcggtaagtcgtcggacatggtgcggtctctttacagtgcacatcgggtgagtctgaactttgtagctctttccgaagtgcaccatctctgcatccactgtttaatgggcttgtcacacttaagacagtgttttttgttgctcatataagatcatataacatgttgcagagatagtacttatttggatgttcatgttttaatccatatcttcatagcaaataaatgtatctaagcttcagttcagcttgaataccatgttgcaccttatgatccttgtagattgacacatttcatttcttttggtagactttcttatctcttccagaacatcaagctactgccatggggtttatcgcgctggtgactggtcatcacaatgcttcggttagcttatctcggttacttgttcgaattactatttttttggatatgcagaatgaccctcaatttctttcatttattatttgatcaagtgaacatttgttccatatgaagctacgatgctaagctcgttataatgaagatcagcacacctgatcatcattgttccaacatatccatgccaattttatattaaataagaatagccatacagtctctttgtttcatgatttaagcttgcttggcttggtgcagttctccaaagctatcattaaacatttttttaccattctctcgtcataatatgttgttcacaacaataaaatcatgatcatagtaaagtactttgaaatatgaatgcaacagtaaccattatcataacactatctacataacattagagtaataatcagtcaaatgtcaccaactttaaattttaaatgtgtttgccccaaaagaaagcgaggctgtactctagtgatgatgatgtttataacatcaaataacgtccaacctagagccgcttgggtcattttgacataattgggagttcttaggctcagaagcacaatttcatacaaataggtgaatcataaaacacgatgagatgaaaatgcaatgtgggatagacaagacaaaagaagtgaattggccttttttcgtacaaaacatggtttcatccaaataaaattggccttttttcgttgtctgacttgagatgcttgaaatggcaggagaaaaccacgagtcatagaggatatgatcacatagccagagcatctggaaaggcaaggaaacatggagaacaacagaaatcaattgatggacctgacctgcacaactgtcatgaaggggaa

SEQ ID NO: 35179 - DNA, 426 bp, Zea Mays
gaacaacacaataactacgtaaagatcgaagtctttcacaaaagactcgtatcaacgaaggcgcagccttatcatacaaattacggttacatacacacaacgagggcatcatatattacattggctcaaccttcgagatgatacccatctccctgtagttgaacagcattatcctcaattcctcaccctcaaaaagatttcgcagctccccttcacctacactcgccccaatcggcgaggacaacaattcccgtttaccagtcccgtccatgcgaagacgaccactctccatctcactacgatgacgcctaccactttgcgaaaattcactcactctccgtttcgccaccgccttttgccgcctatacccagtactcgcacccgggagcccctcggaaccctccacgcgcggcgaaggctccgctg

SEQ ID NO: 35180 - DNA, 1014 bp, Zea Mays
acaaagaatggagttaagataagactcacacctagcgaagacgaggttccgaccaagggcaggataagtaaaacacttccctcgaattgagatgagagagggaactttaaataacagacataagatagtcatcaaggtaagatggagagacggcgaaggtaaaggtagtaacagataacaaaggatggagttaaaaactcgcaagcgacaaggaataggatacaaactgagggaaaataggtaaccttcaatgtttaaaattgtgacgaaagagagaaggttttggagcgcaggtataagataggcatcaaggtaaggtatagaggtgtcaaagatgaatgtgataataatgaaaggcataacaaaggatagagttaaggcaagactcgcgaaatggcgaagtggacaaaataatcaaggtaagataggtgagggtgcaatagaatggttgaagtaagaattcattatcgagagaagttataaaggaacaatgagatcaccaaggatgggcaacataaaatgatcgctcatggaccgttaagaaacaggggtggtcaaggacatgttaactgaaatgtcttgaacagttattggggtatgaaaataagcatacataagaatataagagtatgtaagactccaaggatacgagcatactaagaccaagggcatagaaattatcgaaagataatgacttaacaacagaatagaaagggatctcaaaagacaggaagggcatgaaaatataaactagaatgtttatatgggcaacagagttttcagggttaagtatttgaattaagggataagggtatggaagaatccaaaagatgcagcaagtcaataccaatggaatagatatggtcaaatggtagcaatttaataatggaagacaaaaagaatcccaaaagacaagaaggttatgatcagggggcatctacaaagatgtcgcaagcacaagagtgagatcagatctaatagaatgaataggtgaagcatagacaatattagaac

SEQ ID NO: 35181 - DNA, 559 bp, Zea Mays
gcggcatgcgcgcactgtagcggatacataatcatgttgttgcgccttgatgtgatcgctgtcttgttagccagcgtgctcttgttgccatgacgtggtgtaggtatgcacatgaaatgcgggtgttcccttcctattttcgggcacttttgccttatctacctgggattagctcaggcgagacggacggagcggtagcaacctcgggcgaggcagagttctgctcgaggtgggagagtcttggggagaggccttggtttaagaggtacctcggttgtttcccctcgggttcatccttacttctctgagtgcgttcttcggggaataattcgggtatccctaattatcaccgccgacagtcacggtttcgaaatcgcctcttcgtatttgcatgggaaggcttacctcggtttgtcccttccctagtccccaccccactcatgtgttgtgttttttccttttttaagaagtcttcccacaatataggtgcaagagttgtctcagttatttcttcccggacctcagtcatgttggatccatcatcactgtttgtcttttt

SEQ ID NO: 35182 - DNA, 421 bp, Zea Mays
aaggggtaccaggcgatttaatcaaagccatccgctggccgatcaatggccatcagcccataacccaccacagtcgttcatcagagaacgtgcggtcaccgcatatcgtccaactcccgtcaccgagccccaacggcgcacgcgcgacccacggcggaggatcactggagcaaggtatatacggctaccaggcgtacccaaacctcagcgttgctacgaaagaagaaaaagagcaacaacagggagtaggaataggggtagttcacctaaggccgaagcgcaaagtcccatgccccaccatgggttgcggaccgcatgccgcccgtggatttcggtaaggaataagccaaactctggccacccgcgttgcccgactaaacactgaggacacatggcatacaccagctgtggcagaacctcc

SEQ ID NO: 35183 - DNA, 530 bp, Zea Mays
cacgccacgagcgtcggtcggctcggccgatgctccaccccgtgcccgagcccaaatcatcgcctataagaagcctcgaccctctgccttgtcctcccgcacacccatactcttccaccggccaacgagtgccagtaatcgcctgaaaaccaagcacaacgtcccgcaaggtcaccgacgcgacgaccaccttagcccggtcgctccagcccaactccgccgaatccagttccccagccaacttccctagaggctagcaaagcttcccagccgctcgaaccaaatagtacctcaccggagaagccagaataccttgccggacctccttcacccactggagcacgtagacaaggcaatctacccgtccattcttccattccttgcgcacacaccctcaaggccacctagtaaacctccatgtgcggtctgattgagctctaccaccttggtttggccagtaaaggctgcaccgacgagctccgccgccgagatttgtggccaggccaaatctgggcaccagagacgacgac

SEQ ID NO: 35184 - DNA, 392 bp, Zea Mays
gttggaacatgcaaaggttgtaacaaaccagtaggcagttgtttttcacttttagcctgctggcacactgaacactgtttgacaaaactctccacatcagtcttcagcccttgccaccataacatccgtttaaccctttgataagtagtagtaatacccgaatgtccaccaaccactgagtcatgaaaagcagaaatgactttagttctaagagctgaattctgcccaatccaaatatgttgctcctttctaataactccttgatgcaaagagaacactgcctcatcggggctatgcaccgcgagcttttgtagcaattgttgagcctgtgaatccactacataggaattagtaacctcttggatccaaacaggttgtaactccgtaactgt

SEQ ID NO: 35185 - DNA, 319 bp, Zea Mays
cagacacacaacttggcttcccagactaaaacctgcaggtcccgtgcatgtatcaaaggatggctaatgacagacgatgggtcctatgggtgtactactaacgctccctagccgaagctgtgtttaggtctaggtcccagtcaaggctgcctcctgggggccattcccaaatcttctaggtatgctggtatccagtctcgacacgtcgagcctacatcccagggggccaggtattagggaggagttggcaacgccacacacaacagggacaaatagtatgaagataagtgctaatattgctcgataaatagtactcaaa

SEQ ID NO: 35186 - DNA, 464 bp, Zea Mays
acaacccgtgcgtggcgcacggaatccgtggtcctcctccacctgggatccgcggggtcgaccctataaaacctagacccgagacatcactaccctcccaacccaaccggccgtgggaatcgagctcatcgcagagggagagggagaggtgtgagtccgccgagaagccgccgcacccctgccttgtctccatgcagcttagtgtccgctgtgtggttggagtgattcgtctagatacgaggatcgtgacgaggcaagattgaagccagaagagcaaccagtaaccaatgaatttctcgtcgaagttcccctccgtcgtggtaccactcctcaccgtggtcaacgcactaccgaccaccatctccattaggtaaaccccgtctgtgtgtgcattcatgcccgaatcaatttacgccaattgggttgggtggtgtggccctctgtcgcgttcttggccagctccg

SEQ ID NO: 35187 - DNA, 504 bp, Zea Mays
ctcctgccgacggcctggtcatcgggcgctctcgtgcccttcccggcggtcgcccctgtccccctctcgacctgctcgggtgtggcgcccagtcagtaggggggccgcttctctgtctggacgtgcctaggtgtggcgtccggtctccagggagtcctcttcggtgtcggctcctcttggtgcaatggaggcagtccttcctggtgggctgaagaagcgtactcgtcgtggacagaggtggaaggttgccggtgctgtttctagtcaggaggtgtctgttcattcgcctggagggcctgctcgtgttgtgaagttccttcgtcgctccagggaggttgatcatgccgaggctgaccttcgtcgagtgctaatcgtctctgttattgggccagggagctctgattgcgcggtggtggtgttggagcagctcgcctcaagggtttcgcttgaagctgacgcgctccacctacgacgtgctgcgtcgaactcattcctcgtcttctt

SEQ ID NO: 35188 - DNA, 286 bp, Zea Mays
gaagactatctgtgcagaagtcgcctaagggtgcagctggactagcacaacaagtgcaaaaaatcgtggtcgtccgcgaagactatccatgcagaagtcgcctaagggtgcagccggactagcacaacaagtgcaaaaaatcgaagtcttccgcgaagactatccgtgcaacaattgcctaagggcgcagccggacgaagcttaacaagtgcgaaaatgactacaccaaactgtccgcgcaaagaccgactacatgcgcacgagaccaacataacaaatacaccag

SEQ ID NO: 35189 - DNA, 275 bp, Zea Mays
aagcgatcgcaagcatcggtcgtacaagagggacaaggctccttaggcacgcgaaggcgtagatggcggcaccatcgacaagcgcaagactactcgggacgacatctgccacggttacctgccacaactacggcaagaccggtcgttcgaccaaggactaccgccaagcggagcgcggaagtcaggcacacgtcgcacaaacgcgggagggtgaaaggccagctctgttcctagtacacgggagcattgagctgcactcctctcccgcaccggct

SEQ ID NO: 35190 - DNA, 379 bp, Zea Mays
ggcacgaaatgagcatactttgagaagcggtccaccacggtaagaataactgatttgcctccaacctttggaaacccctccacgaaatccatggctatatcgctccaaacccctgaaggaaccggaagtggttgtaacaaacctgccggatgaaggtgttcggacttattacgttgacagactgaacagcccttgacaaaatctcttatgcggctggcagcaaggggactatggaaggaagccctccagcggttgagggacttttcgatgccctcgtggccttcttcatgaactgaagctaacaacaggggccacatggatgaggcatctggcacaaaaaattttcccttgaacagtaagagaccatcaacctcggacc

SEQ ID NO: 35191 - DNA, 353 bp, Zea Mays
ggagatattagagagagggaagggaagatagtgcactgggggagatcagagagggaagagagcacactgagggagaacagccatccaaggtgtccgcaaagcatcgctaaggcgacactcacggcgctaaggcgacaccttattgtctaaggtggacgccttagtcatggacgcaaggcgaggcggatgccttgcccctaaacctcgccttaccgcttaaacgacgccttaacaactatggttctaacaccccctgcagtctcaactctatcctgtacagatgttgagaccggatcaaaaattggtgaaacactcgacgacagtcccttggtgaagatgtcgacgaactgcag

SEQ ID NO: 35192 - DNA, 414 bp, Zea Mays
gtccgcaccatgtggaatggagtgtcactgctgctgggcacagattcaaagacacctgccaagtcgtcgcccgcaaggcattgagggccctgtgtcagatctatgaagaagaagtggccgacaccctgctcagattctttccgccctttcagagagaccatcctgtttggatggtcaggatgcgtgcattggaagggcagcagctgcttgaggacgaccccacagtcgtgtacctcactacatacctgctcaccctggatgcacagtatgatttcttggctcggcaccactgtcagatgattgcccgagcagaagatgcagagaagctcaaccgtaagctccatgtggatctcacctcagctcaagcccgtgtagctgccttggaaagtcgtgaagccattgctgttgaagccc

SEQ ID NO: 35193 - DNA, 307 bp, Zea Mays
agagatgttgctgcacatgtagctaagtgtgatgtgtgtcaaagagtcaaggccgaacatcaaagaccagttggactattaaatccgcttaagatacccgagtggaaatgggaaaaaataggcatgaatttcattgttggactaccccgcacccctgctgggtatgactctatttggttgattgtggacatattgacaaaagtggctcatttcatacctatgaggaccaattacacgggagccaagctagcagaattgtatatgactcggatagtttgtctacatggggtgcctaagaagatcgtgt

SEQ ID NO: 35194 - DNA, 392 bp, Zea Mays
tacatacagtgagggcatcacacactacattggctcaaccttcgggatgatacccatctccctatagttgaacaacattatcctcaattcctcacccgcaaacagacttcgtagttccccctcacccacactcaccccagccggcgaggacaacaattcccgcttgccagtcccatccacacgaaggcgtccaccttccacctcaccacgatgacgcctaccacttcgcggcagctcactcaccctccgtttcgccaccgcccttcgccgcctatgcccaacactcgcacccggaagatcctcatcacccattacacgcggtgaagcctccaccgtagccacatccaatgccgcaaagtaatccaaatcctcatctgaagactcctctgtcc

SEQ ID NO: 35195 - DNA, 310 bp, Zea Mays
cctttctctgaaggctcattcgtcaggattttctcccacctccgagatttcatcttgggatacaggctgcgccgggtcccgttcccccgcttcgtgatgtcgccaaatatttcggcgtcggttccaccgtcggcgagcttctcgctgaggaggttcttccccaggcatggttggctcgtcgttggagatgggagatgatttcactcttcccccgatgaagaggacgtcggggtagaaaggagttgctgtggtgacaagcttctttctgtccttctttgagggcgaaggcaccagaagagcagcttgacgg

SEQ ID NO: 35196 - DNA, 296 bp, Zea Mays
tgcgttagatgtggctgcagcggagacttcgccgcgtgtggagggttccgaggatcttcctagtgcgagtactgggtataggcggcgaagggtggtggcgaaacacagtgtgggtgaattttcgcgaagtggtaggcgccgtcgtatggggatggagcgtggccatcttcgagtggaccggattggtaaacaagaattgttgtcctcgccgattggggcgagcataggtgaaggggatctgtgaaatctttttgagggtgagaaattgagcataatgctgttcaattacagggaga

SEQ ID NO: 35197 - DNA, 606 bp, Zea Mays
ggcggaggtgcgcgtcggcagcagcggcctccccaccgtcctcaactccgtcgtcaacacgatcgaggtacgtacgcgcgccattgctttgcacccgttacttcctgcctatatatccgacagcgaaagacgatcgattctgaaccttggtcggtgcgcctcttgttcgacccaggaagcggcgaacgccctgcacatactgcccagtaggaagcggatcatgcccattcttcacgacgtcagcggaatcatcaagcctcgcaggtagttgagtaaaacaatttgttctttttgtcctcaagcaagtcaaactattttccatctatatcgtgttggtttggtttgtgttggtggctcgattagtagtcttctaatgagcgagtgagagagttttatttcttttttaaaaaataaaaaataaaaaatgttgagcgagagagatttggtagtctgggactacaaggaatcaggattcgatttctttgcttcttcgaccagtcaacctcacgttctttacgtttatgcaggatgacacttctgttaggtccgcctggatcaggcaagaccactttgttgctcgccttggccggaaggcttgacaaagac

SEQ ID NO: 35198 - DNA, 838 bp, Zea Mays
accgtagctcagacccgtgttgtgttcccgccatacgggacccaaccgtcagtcaacctccacacatgccagcctcccttctgccgccaccatgtgggcccacggtgacaaactctccgtggcgttgcaactgaactccacgttggtcggagtcggagctgctcacatgctcacgtgtcaccatgaactacctggagattagccaccgtcggtgagggaaacagagaaggtcaccgtcgaagcagagaagaggatcacgtccgccgccgaccgttatcgtgtacgtcgatggtctgcgtggggttggtgcccatggtcgtgccgagggaaggaggatctctgctatttaggcctgggggtgagcgtttcgtcgccgtagaaggaaactcatcacgtagtacttgcggctcgacgcaagcagccctaaactaatttgtcgtgttctccacaatgtttagcaaagtcgttgggtcgggacagtgcatccgggcggactccggttggcactagccatggcgccgccgactggttcataaccgccgccgactggttcataaccgtaaccgaggtggaagaaggcaaaccagtcgtttatctagatacctgttggatcctttgatccataccattgatccacgatcgaagcgtcgtgggtcgggcagtagtgcttaaaatctgaaccatagatatctagatggagggatgggtttggatcatagcgtgggcaaatgtggaccattgattcgggttctaggggagagaatcgcataactattcggtcgtggtacctggccgtcgttcgtttgatgaacagacacgattagatcttagggcccgt

SEQ ID NO: 35199 - DNA, 318 bp, Zea Mays
acgcaaattgaagttgcacactatgtggctagacgtgacacttgtaaacatgtcaaggccatatatatgaagactgctggtccattacaatccttacctataccaacatggaaatgggaaggtattgtatggactttatcatgggattacccaggactacaaaagggtatgactctatctgggttattgttgatcagcttatgaaaatttctcattttctgccagtcaagacagattacccagttactgtctatgcccaattgtacattgattcgtattcttagtctgcacgatgtttcgaagaccatagtgtcggat

SEQ ID NO: 35200 - DNA, 559 bp, Zea Mays
catgaccaaatttcaggccaatgatacctggagcaagatttcgccctcctccaaagaagaagaatcagcaacagggattcatgggtcagaaagcatttaaggtggccctaccatgtgcaaaggctggaccaggaagttcaacgagtggtacagctcaagtgaagggaccatgctacaactgtggatagatggggcacttcgccaagttttgtcctcgccctaagaagaagaacgacgtctatcccgctcgagtgcatctcaacactgcatacgagattgctgacggagaacttgtgatggctggtacgtttcttgtgaacgatcaccccgcagttgtactatttgattccggatcttctcattctttgatgagtactgcttttgctcaccgctttgaccattcatcagtagaagtgggtcataagtaccggataagcttagctagggctaaggttttcacaaatcgtatagtccaaggggcaaccctcaaaattgagggaagagaatttcgagcccaattgatagttattctaggattatccttagatgtgatcatggg

SEQ ID NO: 35201 - DNA, 273 bp, Zea Mays
cggttttgggctaagtagatgtgggaatttaattatctttggaatacaaaacttgtggggaattttatgtagatgcttccggagtttttgattgatatcactgctgttataattttaaagttatgaaattatcaaccagcgccgctgcaatttggtggtgatggggagagttgtcgctcgcgacgggttggaattgtgcgtaggtgcggcgttgtttattagcatttgttatgtgaatttgtgcactaaggtgtgtgtcaaaaacaggtggtg

SEQ ID NO: 35202 - DNA, 321 bp, Zea Mays
gcttaatcgaatgggtctacgagcaacagggggcttgagggaggctagaacaccaatcagagaagcttgaactgacctgcagagggctggccacggcgaagtgttcacgatggcgcggaaaacgtatttgggggaacacgaaattgggaggctctggtggatgatttgaggcaagggctggtgcgttggatgcatacttacctagcggaactcactgggtcagcaatttatagagtcctacggcggtggcatctaattttgagaaggcgcgctggcggccggagagaggggaagtgtaacaacccatgtgtttattgtctg

SEQ ID NO: 35203 - DNA, 805 bp, Zea Mays
tactgttaattctatcttgcgccatttttcagttctgacagtattattattttcgtgcaggctaaagatatggtggaatttctcgtattggtaaaccaaataatctgcaaatttaaatcgtcagctagcgccatattggaggaaatatttcctactattgcaagtcgtttgtctgcgatattatcacaagatgcattttcagctggtcctgcaagcaatactgaggtaatgttgattgcctctgtaaacaagccactgtgtatattactttattttctagctgcttatacttaatatacttttttatgtttctgctgtctctatattgcaagaatgctgcttttaaatgtgctaaccttggggatatattacattatttgctattgtttatgtttgcctgcttatgatagtgcaactctagctataacatgtggcaaatgccatacagttcaacaaagcaaatatttcttgcacgactctctaacacactaaaggaacaaaagtgacatgataggctgttgcccaatatacgtccttacctatttacttatttgtttggcatcaattccattagcttaggttgataggtctgtacaggtacagccatacaggatatatttcttttcgtaatatatctccgactcaccactacaggaaatgcgagaactgcaagagctgcagaggacattatacacattcttgcatgctatggcaacacatgatctttctgcagttctccttactcctagctctagggagtatctggagaccataatgcagttgcttttatttacctcatacaaac

SEQ ID NO: 35204 - DNA, 317 bp, Zea Mays
attccttccgtcattaatcgccatcacagtttcagtttcctcattaaattcaagagagcgtcaattgtcatcaaatccgctttaatccagctaatctcctctcctccagtctctataaaacccaacaacccctttccctcgccaacaacagaaatatcacttcctgttcgtcttcccattacgccatcctctgctagtgcgaacccagtcgcgcgtctacttgcttcgttcatcggcgattgttccaagaggcacgctcgcccttcttctccatttccgtgccctggcgcccaccgtccatacctccatgctgtccc

SEQ ID NO: 35205 - DNA, 353 bp, Zea Mays
gtagcctgtcctttgattaggtagagagacaaggccgggtcgagagcatgggagcgtgttcgagcctgtcctgtatagaggtgcagatgagacgcttccaagtgtcaagtcagagttgttgaaatagcgctcggtatggtgaaaagatatggggtaatctggtccggacgtcatcctagacgaagcaaggaagattggacaccggtcttattgttgttgtagacatactgtcttcagcggggttcgcaggagagtaggtggcattgcgtgtttcccaattggggtagttggccgaggccaagctcgggcgaggcgaagatttctcccaaggccgaggcggggttagacattgc

SEQ ID NO: 35206 - DNA, 272 bp, Zea Mays
gggagatgccagaggctgctgctgggtctagccaaggtggcttaatttacatgaagtatacgttcaaatacaagaaccaatttgatgagccaaacgacgactggctagatgccattgaagcaaccagtgatgaattgcttggtgcttattcaagggccgaagatgatgttatgacagcggccttcgggggtcaaggcaaaaagaggctgaatatggtttttaatgtcatcgggtttgtatacccagattactattgtccttcacgaaagcaa

SEQ ID NO: 35207 - DNA, 368 bp, Zea Mays
ttacctcaagatggcccgacactttggtctaactcttcttgagaaaacctaccttgagaatgtgacttaaactttcaacacatgaaagttctattcatagcttgaagtcattgctcatagctcgattagtatctcaactcaatgcaagtactctctccttcactttacccatggttgctcggtcgccaacccgtcagtggctcgtcaccttctcttagtccctcgagaatcccttttctttctcactccaggtcatattatatcttgaaacaacatttagaattcatttgaagtcccacatcaacattgtctatgtccaagtcatattccacatattgtccatcaacctttcaccaccttgtttctct

SEQ ID NO: 35208 - DNA, 293 bp, Zea Mays
cctgacagcggcataatgacgatctaggaggtgggcatggccgatgagcataggcgagctcaatagggccgagcttgacctggtagggggagaacgtgatggggagggaggaggtcgatgtgcgagcagagagacgatgctaggagagggtggcatccattaaggagatggggaggagatgagcttagcacgaggggcagcagccaagaattccatgaagaagagagcatgtgtgtggggagaggattagggactcatcgaaacagcggtggcagataagggagagagatgat

SEQ ID NO: 35209 - DNA, 535 bp, Zea Mays
ggagattcaaccttcttgggcacttctttttccaggactggagcgatttacaaaggttcttgttcaatactctgtctcgcttcagcaggccctgtttcaatgggcactgaaggcccagcttcgacttcagcatgaattgtagtagcttcggcagtctccttcacaggagcaagagttgatgcccttgttgattccaagactgcgtccagcacgctggccatcctccttctcttgggagttattgcaggagctttggataccttcgacaactctggctctggtaatgggctcaacatttttggtagccctaccggcttctccagttctggtccttcgaccattttctcaacctcgacaggacgctttggcattccggctgactcggttttctcctgcccttccagcatttcagtcgattctcccttggaaccgataggagtgaggtatcctggcgcagtggtggaagacgttccctcagcaagtttcggcaccatggcaatttcaatatttctaggccagtgcgtcaaaaccttaa

SEQ ID NO: 35210 - DNA, 562 bp, Zea Mays
gaaagaggctagtcgggcaatgctaaacagtgatcctggaaagtagtgaagaggacccaaaatcttcattgcgaactcatgttgaagggcggtaatgatccgatgcagaaccaaagaagatgcaatgagcacaatatcatcaacatatagtaggaggtacatggtgtcaccgccacactagtagatgaacaggtagatgtcaaacttcgttttgggaaatcccagcgagagcaaataagtggtgaaccgactatactaagctatggggcatactttagggcatggagggatttgttgagtttgcataccatggaagggtgtgcaggatcaacaaaaccagtaggttggctgcaatagatggtttctataagagtcccatggagaaacatgtttttgatgtccaactgatgaatcggccaagagagggagagagccaagtgagagcacggcacgaacgataagagtcttcaccacaagactaaaagtctcatcataatcaactccagagggttgagtgaagccttgaaggacccagcgagccttgtaccagtccagagaacca

SEQ ID NO: 35211 - DNA, 377 bp, Zea Mays
attgggtcgtggacagtagcttatcggagggcttgggggctgtgcgacgtggccaaacggtcgtggttgtcagaggtcgccagtggtcctttaccacatagtcgtaaccgtggcatgctcagaattactctccctgcgtttgtaggccgtcgagcgccacggcgtgctcgccagtgcaatgccttgtcaccaccgccctccaaatcccttccaaattcggagtaaccatggccaacctctataaattcagcacctcccttgcttcgactcatcataacgaacccaatgcaactctaacctcgcccggtcatccaccatagcccgagcaattccgttttcccccaaatcggttctccgtgccgcctttagcatctcgc

SEQ ID NO: 35212 - DNA, 459 bp, Zea Mays
cttctatcggaacgacaaaaggaaagattaatgaatcaacaacacttacccacaccgaaaagttccggatatttttgccgcatcagctcctcaagttcccaagtagcctcacgctcagactgattagaccacacaaccttaacatacttgattgatctcttcctcaatacacgctccgagaattccaatatacgcaccggacgacactccaaagtcagatcctgctgcacaacaattggttccatctcaatctgatggtccggatcccgcaagaacttcctcaacatagaaacatgaagaactgggtgtacccctaccatggaatccggcagtagcaagcgataagccaggctgcccactcaggccaagatagtgaacggtccaatgtatctcgggctgagctttccagagacaccaaaccgaacaactcctttagtaggtgataccctgagaaggact

SEQ ID NO: 35213 - DNA, 635 bp, Zea Mays
cgagcggcggacaccaaatcggacctaccccgagcatttcccctaacttaattgtgcaaatggtggcctattctatcctgcccacgagaaccgcgaaggccatgagcatttgatcgcgttcccgatgattggtggtctctcagttcgaattggtgactcggtaagcatcacagagctatgagagtgctcaaacgagggagagagagggatgagctgaccggattggggctggccacggtgaagctgttcttcgcggtggcggcgacaaatttgggggaagtttgaaattggtgaactctggaggatgattgagggtgggagtgggggctctggtttcgcgatgaggtaacgcagctgcccggaccataaatttatagagggcttcgacggtggcgctcaatttggccgggcagagctggcggccggagataaaaaaaggaccctggcgccgtgggttcgtgtcctcagtcgtggcgagctcaccggcgatgatttaacggctgtaaagagtcacgatgacgcgacagaggtgctcggatacgtggcgtaaagccgagcgacggtgatccccggtgggcttatctgttcaagccgcacggcagaggggaagtactggggggttcaccggagtgccg

SEQ ID NO: 35214 - DNA, 274 bp, Zea Mays
atctgttcttgtgatctatgtttgtgatctgtgttcgaaccctaaaccctaatctactctactaccttgtgttctgtgattttagccgcccgtgagggaccgatctggtgctccggctctggtatgttcttaatccggtgcttgttcttgtgatctgtgtatcgtaaccggtgcttgttcttgtgatctgtgtaccaaccctaaaccctaatctactataataccttctctgattatagccgccgtgaggaaccgatctggtgctccgggtttg

SEQ ID NO: 35215 - DNA, 695 bp, Zea Mays
acggcgagatcggcatgcactctggcgcaaaggttgtgcgtagcggtgggggtggggcaatgtaggtgtatgggaggtgatgttgtgtgagggagtagggcatttaagcgagtggtttgaaagagaactagcaagcggttgtcgagctccttacgatgtggctaatccaagcgggactggaggttacagggaggaagatggtgggtgggcttcgtcgggcagtcctaagcgtgggacaagaagcttgggaggttcggctgatgggtcaggcacgcatgaaatggtcttgcaggtgaatatacgcgaggtattcgggcacagaggcggggtggttacagctgcgtccgagtgagactagcacgtgcaaaaaggacaacagtttgaggagatgaagccgacacgcgagctcggaatgacaacgagaagaacaagtgaggggaaaacgattgcgcgcacagcacgtgaggcactacgcgatgaggcgaggcaatgtggtaggtgagggtagatgaggtagacccgagcagcacgacgttcacgaggagaagatcggtttgacgatctcgcaaaaaaagggtgagacccagaaaatgatcgacgagaggaatatttatataatattcggttctcgaaataattttggtttttgcaactactaacttttaggattaaattaatatatatatttggctagg

SEQ ID NO: 35216 - DNA, 545 bp, Zea Mays
ggcaggaggggcagcaggggtagcactagaactcctagtctcatgatcatgtgagcgtggaggcataggaggcggaggtggaaccccaaagacatcatcatcatcatcatgggctgctgcgccctgagtctcaaactgatggaaggtggtgtcctcggcctgagtatcaatcactggagcagatgctggcacaggatcctctagagctggacggtacggcccaaagatgaggcaagaggcctcaagagtaccctagaactgtggaggctaaatcagctgagcaaagatgtgacacagatagtgagcataaggcagctgtcgacgagcacgtagaccatccagtactgtgtcctcgatctcacaaatgagaaaatccacaacatcaaactctgaatgagaaactagggcaccaaggagccaaagctgaatatgagtggcagcctcccggtaacccatccgtggcagaagcgtccgtctcatgagctgatatagaaacctggccgctggggtgaaatctgccggagaacgtcgcgacccatctgaga

SEQ ID NO: 35217 - DNA, 442 bp, Zea Mays
atcagctgcgcgaagatgtggtagaggtagtgtgtatagggcagatgacgttgagctcatagtccatccaacaatgtgtcctcaatctcgtagatcaagaagtcgacaacatcgaactcagagtgggaaaccagtgctctgaggagccataactgaatatgagtggtggcctctctgtataccatcctcggtagcagggtgtgcctcatcaactcatagaggaacttctccactggggtgaagacagcaggagagcgtcgagatccatctatgaatggaggtcagaaaagagcggcggtgtgagtggtgccgggagctactccatcgtgaggacaacaaggagggtctgaggtaccatagcacaagctgtgaagcctcgtcgtcgacttagcgaatccaaataactcctagatttgagctacatgcagagtgatgtcctcat

SEQ ID NO: 35218 - DNA, 906 bp, Zea Mays
gagggagagggaagagagaggagggagagggaagagagaggagaggagagagggaaagggaagagagaggaaagagagtggagggagggagagagagagaagagagaggagggagagggagtgtataggaaagagagtggagggagagggggagagagagaggagagagagggaaagggaagagaggaaagagagggagagggagggagggaagcatgcatacaacgccatttcctctgccatagttaccgtgttaccgtggtcataatcgccttcacggtgtacgcaagagagacatgaatggcatagaaagtttggatgatacccataaagaagaagatgatggcccaaatagttcagtggcaaatacgagtcatcgtcaatagcgcgccacacacattccatagaattacgatggtgtgttgacggttgccgatgcacatttcgtagaactagatgcttgattgttgtctgttgatacgtttagcatttatttcttgaattgtgattagaattagcacatgatctctgatatgggtttttagtgagacgcgaaaaaaagactaagtaaagagatgcgaacgggtgagaaggaggacacacggagagtagcgggcgagcctagttggcaccccttcccttcacacagcatgtgggccgcacatcaagcagctgcctacgactctccatctctctctctctctctacgtcctatacgactcctcctatacgttctatacgactctccatctctccctctctacgtcctatacgactcctcctctctccctctctatacgttctatacgactctccatctctctctacgttctatacgactctccctctctccctctctatatgttctatacgactctccatctctctctacgttctatacgactc

SEQ ID NO: 35219 - DNA, 317 bp, Zea Mays
ttcttgtcgaagacctttttcctgagtgcctccagtatcatcccgttggctcgctcaacctgcccgttggctcgtggatgtgctacggatgcatacttgatctgaatgttcttttgctcgcagaagtcgaagaactctgaacttgtgaagttggatcctaagtcagttatgatgctgtttggtatcccaaatctgaatattatgtcttgtatgaattccacggccttagtagaggttaaagaagcaatgggcttgatctctatccatttagtgaatttatcgattgctaccaatacatgagtgtatcccccttgagc

SEQ ID NO: 35220 - DNA, 697 bp, Zea Mays
aagcaggacccggggggctggttggccgtctacacgaccgccgctcgggccgccggggcgacagaagacgtaatgacagcgtatttgtccatcgtcctggggcaagacgcactgcaatggctacaacatctgccccgacactgcatcgacgatttgagtgacttcagtcggcggttcatcgccaacttctagtctctctctgacaagccggcgtagccatgggacctcaaatccatcaggtgccagggaaatgaaacacttcgttcatacctcaagaggtttcagaccatgaggaaccgcatccccaaagtcgccgaggcagcggtgattgaagatttctaccggggatccaatgactcggccttcgtctgagccatactgcaaaaagcgcccgccacctccgaacaactgtttcgagaggcagacctctacatcaccgtggatgagtgggcccaggacctcatcggaggtacgaaacatgctccacctgcgtcacagcgcgacgcgaagcagcaacctgataggcgcttggagaagaggcctcatgaggaggtacacgccgccggaccacccatcgctcaagcccgtggtgcgcccagcggaggtgaacggacactggatgacatcctcgacgcccagtgcctgtaccacaaggacatgcgccacaccctacagaactgtagggatttcaagcact

SEQ ID NO: 35221 - DNA, 285 bp, Zea Mays
cagggggatggcccctcatgaattctgcccgcttgtctctgggcacttgtggcatctggacttgcacctgaggttgaggtgggggtggctattgctgcacctgctgcatcgctgctaaggtctgaccaattgcttggactgcttgggtctgcatcaggaacatctgctcaatggtcatcggtggtgacggtggcaactgctgctgagctgcatcttcctagggtgcctgctgctcctgctgagcacgccttgcacctcgatgcttgttttcagacatctgtagaa

SEQ ID NO: 35222 - DNA, 415 bp, Zea Mays
catgatgttaaagaaggcatggcaacataaagtacaagatgatgaagatgggagaatggcataacaaatgaggtcacctaaccccttcattgtctaggagtccttgaggatgaagtaatcatatatgcttgccctagtatctgatggggtacttcgggagaaagccatcggagagtggaaggagcatgctaaccatatcttccattctcctatgtcgatggagatagttgtttgtacgtaccttttcgagtgggcttttcgggctacctgcctcaaattttcttagaggcttactacattattacttgatcacccttgaccatctcaaccccaactctatcgtccctctcaatctttgtccatttctataaagttttccttagagaacctctaaacttttattcttcaattatct

SEQ ID NO: 35223 - DNA, 701 bp, Zea Mays
cctgctctcacaatgaggacgactcacgaccttggcattttgaagaccaggtacgagtattgtggaatggccattaacattgccagcccgggtcatctgatgatggcgttgtaggcacattcgaagttggccacctcgaagcggaggaactcggtgcagaagtgatcaggcatgttgtaggtacatgtgccctagtgagtactctccctgacccgttatgatgccaaataagggattgtttgactcttgaagttatgcaatggagatcccaagttcctaaagtgtcttcaggaaagtgatggtgacactccttccatcgtcgatcagcacactcttgactcggctcatgcagaccactaggctaacaagtaatggatacttgcctaggtgatcgaacttgagccattggtcaactcagctgaaggagatcggaatctcagaccagcggtacagcgttggtgggtcggtcatagctaccgggacttaagcggccagacaacttctgctgccttttgttctctttggagtcgtgctctctaaacattaagttgaccactctatcgatcttagggaacatttagctattgtcttcccatagtcgtggttgtggtggtgggttatggttctgccttgcaggtggcggtggtagctctgggaatggtcggccatggccgattgagttcttgaactccctacagtta

SEQ ID NO: 35224 - DNA, 319 bp, Zea Mays
agctccagctgatttcaagtggcttgcctttatcctatgacatgtgtcacattccaatacatatcgggctatctccctcttcattctggtccactaatacaagggcttcatatcatggtacattttggtgctccctggatgcatggagaatttggagagatgggcctcatccaagattttcttcttgagatctttatttttaggaaccaccaatctgctttcaaaccataatataccctttccatcttagcggaaacatttatacttctcggtcttctgacagcgattctccttgataatctgcactcccttgtcactg

SEQ ID NO: 35225 - DNA, 421 bp, Zea Mays
cctgaatttactgacgctgaccccaatgggtgtgatccatctgtcgctgatcctaatgggtgtgctccatctgtcgctgatcccaatgggtgtgctccatctgtcgctgatcccaatgggtgtgctgtctgtgttgctgatgaaaacgagggggaggaagaagatgaggtccctttgactcggaagaacagtcggcaatacgtagccagtgtggaaagtagtggagttccttctcctggtctgtctgccctcattggtctacaagaattgtctctggcgaactttgatcagactcttgaagatatggttccagaggatctgttatcagagccagcggatggtgacgcgatggatgtttgtgctgatgtgttcgacgccgggttggggtcatcccgggcagcgtcccgtgcctcatcgacct

SEQ ID NO: 35226 - DNA, 382 bp, Zea Mays
cgcttgtagacatgttctaacttgtgattagcagttggtgagcttaggagcaatcgaggtccagttcggccctcgccccaacaaaaaacaatggagcacatccacccctagtcgtgtggcgccacagccacaaagcaatgcgcaaccgactccctcgaccacctccaacattatgtcgtcacatacacatcgccacgatgagctaaggaacatgaggcatgaccgccgcgaagtcagtgaccaacacgcgcaagcatgtcacccacgagaatgcattcaacgaccaacgtccacaaccttagggacataaagatcatgcaaccgtcgaggatggtgcacccgatgttggtgttggcacaatgagattcgaaagacacaattt

SEQ ID NO: 35227 - DNA, 554 bp, Zea Mays
gttctgtcatggaagggtagctgggaggatcatcttgcattggcagagtttgcttataacaacagctaccaggctagcatcaagatggcaccatttgaggctttgtatggcaggcggtgtatctcccatctatgctgggagactttgggagagagatccctggttggtcctgattgggttcaacagacttctgaaaaggttcgggaaattcgtcagaatattttggccgctcagagccgtcagaagagttatgctgatgtgaggaggcgggatttggaatttgcagtgggtgaccaagtccttctcagggtatcacctactaaaggagttgttcggttcggtgtctctggaaagctcagcctgagatacattggaccgttcactatcttggcccgagtgggcagcctggcttatcgcttgcaactgccagattccatggcaggggtacacccggtttttcatgtctctatgttgaggaagttcttgtgggattcggaccatcagattgagatggaaccaattgctgtgcagcaaggtctgactttggagtgtcg

SEQ ID NO: 35228 - DNA, 347 bp, Zea Mays
gaatatggttaagatagatatggatgagatagactacatgatgtaggtcaaaagtttgtttgatgttaggtggggataggcagatgttacaagtatggtttgcagttgttgtgctggtaaatgttgctgttttgataagtattggtaagcttcacatctctggactaactcggctgcgccactttttgccgttggcaagtaaaaaccggacctgaagaccttcctaaccagagtcctggatgctgcgtgtatcccgcattgcccagcgtggatttcatctaacagttgtttcccagtggctgaaagaatgcatttcatgaggactcctgtcgcgccccttctataca

SEQ ID NO: 35229 - DNA, 519 bp, Zea Mays
cacagatttcccatgtaaccatctatcagtccaaaacaacgtattctggccatctcccacaaaagagcaaacaaagactgagaaaaatgctgctgcatttggatgtacctgaaagtcaaaatctgaccatgaccgttcaggctgggtctttttaagccacattcaacgcatattcagagaccagcctagcacctccaaattgtggattccgaggcccccctactgataggtctacaaaccttggaccaaccaacaacacaatggcctcctctaacatctgtccttcccttccataaaaaccccttgcgaatcgtgtctatagctctaattacccatttggggcagttaagggcaatcaaatgataaatagggattgcagtgagaaccgacttaatcaaagtagctcttccagccaggctaataatagcagccttccaacctggaagcttgtcagcaattttatcaatgagctcattgaaggaggatctcgggagtttcctaattgacagaggcaaatcc

SEQ ID NO: 35230 - DNA, 272 bp, Zea Mays
gaagagttggagccttatcaccgggctgttcaccgcgccacttgccgcgcgatcggccgaagtgttctcgccggagttcatcgcccttttatagccgtgccacgtgcctacgcttgttaccgtgttgcaagacatcggagtggatagcccgtttattgccagggtctttacctcgttgagcgccacagtagctgtgctccggtgaccgcaagttcatcccatctcaaattcgcgaaaccttcgagtggtctctataaattaagtgtttagtg

SEQ ID NO: 35231 - DNA, 317 bp, Zea Mays
ttccaaatctatcttcatcagataacccctgaagctataatcaggatggggatatttgtctgggctgtaaggagccaggggctggagctgagcgcaaagtgcttctgcagtatgcacacgcttttatacgagacgaaggctactggcaaagaacagtaccataacaacttcggttgttatggatttattgctcgccccaatgcaagccacccagtgccaacattccagaaaagatggcccggagcttggatggaggagtggttttacgttaaaaatgatttaaagaaaagggaggatatcaaggaagttatccagcg

SEQ ID NO: 35232 - DNA, 387 bp, Zea Mays
ggaggaggaggaggaggaggagaaggagaagagagaattttcttgtgcatccagagcaagattcgcacgatatgatgaatccctgttcgcccccgacatcggacaaaaagtggaggccagccaaacaattgcaaaacaagacaagcaaaaagaggctgtactgacatttccaccaggacaatactagctgcagccccgccatggaaagaagacaaagaaagcagaggcaaaatgatttcgattccacttgcgaagttgcgataagaacacgtgcagatgagattgggctgtggagtgtggaaaagatgaaggaggggggaaaaaaatcttctgatagcacagcatgtgtcaagtgggcaccttgggtgcttggctccaaggatctcc

SEQ ID NO: 35233 - DNA, 501 bp, Zea Mays
gtttcttgcaataccatcctcaatgctcttgttgaggaaggggaatcaaagcatgtttggttgttcttgagagagagtttggcccgtaagtttcctttgggtgttaccacttgcaatattcttctgaattccctatgcaccaatggagaatttagaaaggctgaagatatgcttcagaagatgaagagctgtcacatatctaattctgtcacatataatacaatcctacattggtatgttaagaagggaagatttaaggctgccctgtgtgttctagaagatatggagagggatagtgtacaggcagatgtatatacatacaacatcatgatagataaattatgtagaataaagaggagtacacgtgctttccttttgctcaaaagaatgaggaaagatgacttaacacctgatgaatgtacctacaatactttgattaatggtttttttcgtgaaggtaagataaatcatgctcgctatgtcttcaatcatatgctgaga

SEQ ID NO: 35234 - DNA, 360 bp, Zea Mays
tagaagacataaatattgcaagggtcaaaggcgataatatacaagggtctaagaaaaaaagatgaaggtatagaagagtcaatggcataattacaacaaagaatggagttatgtcaaggcttacacgtggtaaggaagtggatattgccaagggtaagataagtaaaacatcgctctcaaattgggataggagatttaagatcttagagaacggacatagtgtaatcaccaaggtaagattaagagatgagaaaggtaaaggtaatacccaactggagcacgaccaaggatggagttaaaactcgcaagcgacaaggaatagaatacgaccaagggaaaataggtaaaacacaactataa

SEQ ID NO: 35235 - DNA, 456 bp, Zea Mays
ccatgacccgcctcactgccctgtggagccggaacatcgacgccaccgggtcaacagactttctgctccctcgcgtcaaacatggccgggatccgcggagctctcggcgtggggttgttacaacaacctccccgaggtgttcaaccaactggggggttcggttgtgatctttccagacccgctgttgccctggcacaataaaacttgtggccgtcgcgccccttggtcaccagagggaaggtcatgtgtgctggggtccgccgccggggaaaatcccgtctactctcaaattggggggggcgtagcttgtcttggagcttcgtgtgattaccatgaacctgcttgggacctcggcgggtggagattggagcggtggggttgtgaattgctcgccggtaattagctcggcgccaccgtccgcatcgctgcgtggctagcgtcatgcgatcaccgata

SEQ ID NO: 35236 - DNA, 399 bp, Zea Mays
tcgtatacagctcactggaactctccagacgaaggcaaactgagaagaaaccgcgcccgtcgatgagaaatcgtgcacacagtttttttataccgacgtggatgaacgcggtcgcgcgtttgcgtcgcgctttatatataagaaattggaggacgaccagaatgtattagcgtttttcccaccactgtaataacaaatttcattacggcagtaacgaaactacgacctttaacagatttaagataccaatcactcgtcttatgtattttactcgatcttttaccaacatcacaccaatacacactagcacatctcaagacgaccaaaagcaaggctggctggctgcgtggctggtattcatataattaggattgaactgcaaacgtttggtcatgatcg

SEQ ID NO: 35237 - DNA, 579 bp, Zea Mays
atcttctttctgttcgtcggttcaccactgacaactcctgttccattgagtttgacccctctggtttttctgtgaaggatctggccaccaggacccttctcgcccgctgtgacagctcggggccgctctacacgctccagccccccaccgccggcgtgtctccacctcctgtcctggtctccaccacctcctccaccacatggcatcgtcgtctcggccatccaggacccgacgtcatgaccaagattaccagtagtctagatccttcatgtagtaggggacattttgagggtctctgtcatgcttgtcagttaggccgacatactcgtctcccattcactacttctcgggctgagcaggcttttgacctgattcactgtgatctttggacctcccctgtactcagtctttctggttataaatactatttggtgattttggatgatttttcccattttctctggaccttcccgcttcggttgaagtcggacacattcaccaccctcacacacttcttcacctgggtatccactcagtttcgtcgcccggtccgtgccctgcagtgtgacaatggccgcg

SEQ ID NO: 35238 - DNA, 388 bp, Zea Mays
gaaaatttagccgtccccttttatccctacttgtccaaccaaacacatcctaaatcatgatctacactgtagtggttcatttctggcacggcaagcaggcagtgtaaccgaatattacgagtagcctgagcatacggagagtgaattgagcaggagacatgtctcgggcatgctcgacgaggtgtttgattccctagagccgtgcaacggtgcaagcaacaagtgactccagcgtccagtactcagaaattggtcgttcaaaattctgaaaccatttccttcgcactttctcttttggttcaaaacattgatgtcctgattgtaaatgaccaaatgactagcatgtattgcaatgctcttatagaacaagtcctgcccagactgtttg

SEQ ID NO: 35239 - DNA, 550 bp, Zea Mays
gcgtgacgcaggtcgttcgcaggatgagcgaggggtagaagatgattagctacctgagtaagcagccactggtaacattctgcgtctggggttcacgggaggccatcgactatctgtgccagtactcctccgacagcactcggcgtgttcagtgctcgagcgaaatcggggtataggtttcgagcaaggagagggttctctcgccgaagcctagcgtcttgttcggctagctctcgctctcgatcttgagctcgtcggcgatcgcaacgacaggagttacgcctttctcggtgtactcgttcgtcgggagtttcccccacttccgaggcttcgtctcgggacacgggctgcaccggatcccgttccctggcttcatgatgtcgccgcatgttccggcgtctgtttcttcgtcaccgggcatcacgctagggaggttcctccccttgcatggtgggctcatcgtcaaagatgggtgcggactccaatctcccctggatgaagaagatgtaagggtagaaaggaaccgacatgatggtgttcttcttcctgt

SEQ ID NO: 35240 - DNA, 538 bp, Zea Mays
tactagaaagcttaggcctctaatttcaatcttagtctaagggcatgagtgagtggctataagttcacctcctggtgatcgaatttaatagtttcttcttcaagggatagtttggtatattatatttttccacaaatgactttgttatgaaggagtgagatgctccagaatcaaataaaaccgatgcaggtatggagttaataagaaacataccatacaccaagtcggcatcctcaggaactgattccgctgtcacatgattgactcttcctatactctggttctgcggactcttgttctatgcagatccatgagcaggtatgttctggtcagtcctctagttgccgttcttctagggtgtctgttgattacgtcttgggcagttgttggcatagtggccaagttcaccacacttgaaacagccattggattgcactggagtagttgtgctgttgttcttggccggtgtgttcatggcgcttccttgacggttctgttgttgcccactagacctttgactggtctgagtgctgcttct

SEQ ID NO: 35241 - DNA, 407 bp, Zea Mays
ccagatcatctcgggctcggtcgtggatagtttcaccgtacccacttgctcgtcgtgcgaccgggatagacctcgccgccgttggccgctcaccgttgtgtgccacatgctaaagcgctagaccatgtcgcagtgaagcacgtcatgcatgctcggtaatcgccggagagctgccacggtgaaagccactaaccccgagcgccagtaaacttcttcctctccggccgccagcgcatcgtcgtgaaattggacgccaccgctcaagcctgctataaattgccgaccccacctgctccgctaggtagttgtgcaactagtgaagcaacccgtgcctcgaatcatcccctagaactccccaatttgggatttcccccaaatcactcaagaacaccgagcggtttgacctc

SEQ ID NO: 35242 - DNA, 457 bp, Zea Mays
gcttgctgagcctcctgagcatcgacgtgatttactcgagcccttccttgatacggggtcttgttctgttggctgatggaggagggcaccttgggggtggatgctgaggtattcttggggccattcaccgagttggagtaagcaggtcctgatggcttcagctggggacagttgttcttgaagtgactgggatctccgtagtgccaacacccattcgccgggggttggttgcttgcaactgagggggtatgaaaggagctctgactctgctgactgaaccgtgacggggtgggtccagctggtctactgaagcttggtcccttgggtggaaatccaaaggatcgagttttctggtgccgatcttgctgctgagcccggaggacttggaatttcctcttgagatggcctttttcttcctcctttgccctttccacttgcatggctttgttggagaggt

SEQ ID NO: 35243 - DNA, 542 bp, Zea Mays
ggtggatctcatacatctccggcttgcggcctataaattgcgcccgggttctgcttcttcaccacatcccgcacctcagtgactgagcaatcggctgaatttcaccggagctcacacgcagccccaaattccctcctcctctgttcttgctccgccgcataggactccaccgtggacaacactcttcgggttggtagtttctcaattactctctgttctagctcgtgtatagtctcctattgctctctgtaccgagcaattggaatttggccgaagtccatcaccggaatgcgcccttgccttgtaaaacgccgccgtgaccccccctcaccgtcgacccgctcctcggttcttgttctgcccaaaccaaagtgtgtacgtaggccctggtgaacccgtgaacctttacccagcctcaatttggccgtccccgtcgctgtttgatcggaacatgttcatcctcttgtccatccgctcggtcaccgtgaactgattgattcagtgtcccctaggtgaaattgatggaggggaaatggtcgggg

SEQ ID NO: 35244 - DNA, 376 bp, Zea Mays
attttttagcttagccacaattctcgttgaactggatgagtatatactatcttgttccaagcattttgaaccacttcgaagaaacctggtagctcagtccagtaattttcaaaacaaaagcaatttgctttaggaatggaaatatcaatttgtgccacacaagggatgtgatcagaggtggtcttagctaggggaataagcaaggtattggggtaggtggaggcctagttgatagaagtgaaacaccaatcaagttgaaccaataaggggtccgactgcatattactccaagtgtagcttccgccctttagtgggattttaatgattccaaggatgttgataattgagtttaagagattcatgtgtgacctattcc

SEQ ID NO: 35245 - DNA, 537 bp, Zea Mays
gacggcgggttgatatatgtaaagagtagggtctcttttgaagttttacaggccgaacgggtaccgtgcactcagggctgttggatccgcagcggagggcacggattagatcgctacttcaaccgaagcggtacccaaccggatccatcggatcgctaatctacggccaggattttatgtggtcggaattaaccagtgaccgttggatcccaatccacgacacggatcccatcccccccgaagcggtgtccaacgcccagatccagccgtccgcgaatagatcaacggtgccgaacccatctctttcccccgtcactaactcacggcggagcaggtcaccgtacggcggcgagttcaccagagatcgcgattccggccctcccatcctccatttcctaattcattcgctcctcgcccaattggtgacattatgaacctgtttcccccaccaatttgtgtcgtcgacgagcgtagagttcggtccacggcgctgcacgagtcctacggcggaaaccatggctggcgactacgttcttc

SEQ ID NO: 35246 - DNA, 433 bp, Zea Mays
gtctgttggtacgagtaaaccttctccttctagtgatcctatagacaaggtcccttgcgggggtgctcctgcacagtaattgtgtagtgaaaacaaattttgattcgttcgaacagaaaacacttttcattgagttgatatttttcattgagatggtgcacggtaaagttatgtatgcatgagcatgtcgcactgacttaagacgtttctgacttaggctgattgcttcattagcagggtatagtaatcaccctaagttatgtatgcatgagcatgtcgcaccgacttaagacgtttccggcttaggctgattgctccgttagcagggtatagtaatcaccctaagttatgtatgcatgagcatgtcacactgacttaagacatttctgacttaggtcgattgcttcattaacagggtatagtaatcacccta

SEQ ID NO: 35247 - DNA, 467 bp, Zea Mays
ttttttgattcctaagccctaacttcactttttcccttcgatccactcctctgcttccttgagatttcgatcatgctcgttccattggaaaaattgcgatggcgccaaagcggaagaggcagagcatcgttgctgcaatcatcccacctatcgaccccaacagccagctgccattcgctggtaatcatatgtctatcatttctgaatccgacctccttcatctcgttgaagttgggttttgcttccaaaagagctctgctcttggcggttttgccacggcgtcactattccgacagaggatacccatgaatctgtcgtttacgttccttttcttattcgtggtcttgctcttcccatctccccctttttccacggtctccttgatttgtacgagttgaacttgacgcatctgaaccctaattccattctgcaaatttccattttcatacatctgtgcgaggcctttc

SEQ ID NO: 35248 - DNA, 377 bp, Zea Mays
gattttgggtgcatgtatcgcaagaaatgaattagtgcgcatataggcgatgaatgggtgtgatcaagtgatgagatgctccttttaatttcattcatagctctttttagatgttgtagtgagatggtcgtcggttttgtcgttgtgcatgggtttgtaagtaggtatgggcacgagtatggttttagcatagattaaaagtatgtgggggaaaaagtggtacgcatgtgtatggtagtcgtgattgcgttaacttgaacaaagagtctcaagtgcatgttgtgctatggttgtattgagatagtaaattataagagttgcgcaataggaggttcgatcaatgtagttaatattgattggactgtagtgaggtggtg

SEQ ID NO: 35249 - DNA, 534 bp, Zea Mays
atttggtgcggtctagcttaatcgaatgggtctacgagcaacagggggcttgagggaggctagaacaccaatcaaagaagcttgaactggactgcagagggctggccacggcgaagtgttcacggtggcgcggaaaacgtatttgggggaaatacaaaattgggaggctctggtggatgatccgaggcaagggctggtgtattgaatgcgtaataacctagtggaactcactgcggcatcaatttatagagtcctacgacggtggcgtctaattttgagaagttgcgctcgcggccggagagaggggaaatgtactggcgcgggtgatcgtggctttcaccgtggcaaagcctctagcgatggacagacttgctactatggttcactgcgacgtgttaaagctcctaggcacgtggcacaccgtcggtaagtggccaacgccagcgaggatcatctcggccggccgcagacccagtgggtacgatgaacccaccaatgaccgagttcgagcctatctaggcgccaagatctttt

SEQ ID NO: 35250 - DNA, 309 bp, Zea Mays
ggaaacaactggaagggttatccgaaggaaaattgtaaaaatgtgtaaagtaagatggagtcatcacacaatagatggggctacatgggaaacaaaagatgatcctagagttaactatcctagtcactgccaccaaagccttcctttcaattaagcgactctagggtataaattcaaaccttgtacaacttcctactcacatttcatcgaacgctaagccagtagaggccctagtcatctgcaaccagtgttgctgcagccattgcctaagctactaagagtgttccactctcaccaatgcattctcac

SEQ ID NO: 35251 - DNA, 325 bp, Zea Mays
aacgatcccttggggcacatggtgctctcggaaagcggtttcaaactctgcccaggtagcatctctgatggcaacgttgaaggtatcccaccaggctagggccatcccggaaagttgatgagcaaccaattgaacacgttgattctccgggcatccgatggcttctaactttcttttaatcgtgcgcagccaatcatcaacatcgaggggattgctagatccagcgaatgtgggaggcttgagcctaaggaaatctcccatcctgtcttgtggtcttccaccattcgggtgttgattctccagacttctagtgaggacctcaatg

SEQ ID NO: 35252 - DNA, 276 bp, Zea Mays
gttgttacgaaacagataaatgatttacgctaaatttcatattaatttacgctgttttagctcacgttttacgctggaatccgcccgagccagaacccgcgcacgatcggctgcacgcgattttcacgccgtaattttaggctccatttgctgttacaaaacatatataggatttatgctaaattttgtactcatttacgctattttagctcacgttttacgctggaatcggcccgagcaaggacccgcgcacgatcggttgcacgcgattttcac

SEQ ID NO: 35253 - DNA, 479 bp, Zea Mays
aaatcggtcaagaacaccgaactgtgtgtgctcaccgtggctagctctctacaggtctgttcatgtcttcctttctctcgtttcaacatccctgtatgctatagatgcttagcggcccggccaattgaactagatcatgcttgatcaccgggaacacttcggattgtccttggtttgcgctgtcaccgtgggcaggaagattaggagctagaaacttgcaattgatcgaggggaaatgatcgtcaggggtagaattgtgtgtcagctaggccaaagcatcggccattgtgtatcttggccggtacaggctcgccggagacttgcccatcaccgtccaccatcgtggacccaacactgtgaagaaatagaactgcaagggtctatctgcaaatgtcaaagacacatgtgaatagtgctaagggctctttacaggtttttcgaacagcaagggtccctgtgcaaagacgccagtgcgggcg

SEQ ID NO: 35254 - DNA, 362 bp, Zea Mays
agccaagcgattggtgtaagccagggaaagttccaaaaccagcacgctacatttactttcataattattcaggatgactgatataccttgacaacaaaaacaatcagtacttcaggggaacaagatatattaattgtcagcaccaaggacacgttctagtgccctatccacaaaatattcaaatacaaccatcacaaacacatagaattcatagtacattcagtatttcacaggatgtcaccgcatcgaaacatctcggttggcaatgttttccacaggagccagtgaagaagaaggtcgactcgaagcatcaggggcagccttaacgtcgacaacaatgtcatcagaaaccactactccgg

SEQ ID NO: 35255 - DNA, 531 bp, Zea Mays
aattcctaagacacagagtgactggcgccaggactgcgggttaaatctctaaaaactgaggggctcaatcgctaaacctaccggccgaagcggtatcagttgatatggaccgttcgatcaaatgcgagcggccaagattaaatcagcgcccctcgcaaaccggtatgcttctacagccgttggatccaggatcgaggatccagatttaattatcccaagttctagtctccactgtacgatgcgagattgacggttcagatcgtgttgaacgaaacggtatgctatgttctaatcttttccgcccatgtacgatccgatggccatgatttctccctcacattgcttcaacaggacatcggagccagcaccaggcacaccggcggcgccaccgaccgtggcgatccccctgcccaattttggtgaccaagtccaatcgcgactctcccctgggcgcaacctgttgcctaacacatggcgaacctgaccctaagctcaattccgtggatggggccctgcacacactagttcttc

SEQ ID NO: 35256 - DNA, 313 bp, Zea Mays
cggtaagcatcacagaactataagaatactcaaacgagggagagaaagggatgaactgaccgaaatggggctggccgcggtgaggtgggtttcggcgcggcggaagcttgatttggggaaaaaccaaaattctagctcactggtgatcggctgggggcgatactgggtggtttggttcttgactaccctacggagctcgcggcggggtcaatttatacacatcgcgagcggtggtcgcgaatttggacgagacacacggcggccggaggtgaagaagaacgcgggtgcggtgaatacgtgtccagtgtcgtgg

SEQ ID NO: 35257 - DNA, 1213 bp, Zea Mays
ccagccgaaccatcaactcacgctgctgtaaccatgactgtaggtccatatgagcagtggcatctgaaagtcttaagcccaaatttcgtggagtgtgtccatataaaacttcaaaaggagaacgtccaagtgaggaatgaaaactggtgttataccaatactccgccactgacaaccaaccagaccatttggacggacacgcatgaacaaaactgcgaaggaaagtctccaaacattgattgactcgttctgtttgtccgtcggtttgtggatgatatgaggaactcatcttcaatgtggtaccagccaatcgaaaaagctcctgccaaagcttacttgtgaaaatacgatctcggtccgacacaatagcttgaggaagaccatgtaacttgtacaccgcatcaatgaagagctgagccaccttcaaagcagtaaatgggtgtaataatggaataaagtgagcatacttcgaaaatgtgtccaccaccaccataatagtgttagcactgcccgaccgaggaagaccttccacaaaatccatactgttcacctcccaagcctgaccaggaactgacaatggttgcaaaagtccaggatatttattccgatctggtttggactgttggcatattgtacaggatgtcacataggctctgattattgctttcattgatggccaggaaaatatctgtttgatcctgcgataggtaacaggaaaccccgagtgtccttcaactgggctgtcatgtaaagctaccataatttgaagctgaagagctgaattgtttcctatccagatacggtccttgtaacgtataagaccatttttaagagtgtaatgccctgaactgctgggatcaacagataatgctgccagtaactgctgagcttgcgtatcctgtttgtaagcatccactatctgaagcgtccattgaggaagagctgaagttaatccaaacaattcagatgatggccttcgagacaacgcatccgccgctccattatcaacacctttcttatagacaattttatactgcagccctagcaacttggaaaacaccctttgttgccacggagtagatagtcgttgctccgtcaaatgagacagactgcggtggtctgaataaatgacaaattcaactgtctgaagatactgacgccacttgtcaacaaccatcaatatagccaaatattccttttcataagttgataa

SEQ ID NO: 35258 - DNA, 282 bp, Zea Mays
aaaatttaaatcttaaattgatttgtcgggctcctccttattaagaggagtaccctccaaaaattaacgtatgctgtttaatgtggagagcacacagcattcttctattctcagtcctatagtaaggctatctccaacagcccttaggctatcggctatctccagcagcccttaggctatcataagcagtctctttgctgctataaataaaaggtgcattgtatatgcaccaaatgctggcctaagaatatagggcggaagaatagttagctgtgtgctcac

SEQ ID NO: 35259 - DNA, 501 bp, Zea Mays
ggggtgtccttgctgcaaggcgggaccgaggcggggctattctccggcgagggatctatggctaacgagggctctattccatccgaagcacgatactagccgtcgagaggaacatggcgaagctaggggagaaggtctcaccgggagcgaaggtggggacgaggtcggacacggtgttgggcgaatcgctggcgttgaagtccctccggtgagaaactgtgtagcctccggtccacaatcccaccaggcaaggccatgacagacatcctggtggccttatttatccgcacggcccatccccgagggatctacatcgacgagccagagtcttccccatggcgaacatcattctcacacttccacccatggcggtcgggtatgggatgactcgaattcgggtgccagctcgatggaaggaggggagggggtacagagacggcttttaatagggcagaggagcgcccaggttgttgcgaggcgtgcaccacccgcggaatccgc

SEQ ID NO: 35260 - DNA, 432 bp, Zea Mays
gagcacagtgaggtagagttgaggcgcgagtgacacgacaatgaaagtaccacgccacggtgagcaccggtgaaatatctcaagatggacctcggcctaatctgcgagaccgtgaatcgactcaaagttatcttgtcgcggccgtctctatctccaattcacttgaacacatccgaatccatagtaccgcggatcttttcttcagatatttcctgagccactggtctttgttgttccactgaaccgacctcctttcaccccctctttctcttgattcttgttaagaacaggtttatttctattaataataagtgttcgccagacaatggtcttcgaatttactataggattcatggatcaaaactgcatagattctcagatctggtgctctcaattcgactgcatctcactgagaccatactgctctgaatc

SEQ ID NO: 35261 - DNA, 701 bp, Zea Mays
aaaaaagattggtgataggtggtggtacaatgcatgcaaaaaatgcacccgcacaactgtggctcatggggattcctacaagtgcaacgatcaagtttgcgctaccattggcacgcccaaccaaaggttaggcaacatctcttcgcttcaattgcctccattctacctttgcctcccaatagttctcgctgttttgactcccactcacatctaatatacagcggctacttttctatgcatcaccctgagtgaacgtttccatttcctatacacacggcctacccattttcactaagctgactcggtatcgccatgtgttttaggtacaaactgcttctcactgcaggggacgagacaggtgacacagacttcatcctctttggtcggatggcgcaacgcatcatcaagaagtcgtgcgatatgctcattgccaacaatccgatcggctttattcctgatccaatcacagatctgctcgagaagacgtatatatggaatgtgagtttctctgaccacacaatcaatactggaaatatttgtttccaggtcaacgcagtcgtggcagagataaatactgcaaaggactccatacaagcatcttcatcggggacaaaacagtcagaaactgtgctattgcaaggcgcacccagtggcattgaagacactcctaccaaaggctctaacttggtcatgtcttcaac

SEQ ID NO: 35262 - DNA, 419 bp, Zea Mays
aagggacatgaaccagcaaccagacaaacactaggagaagaggccccgagaggaggtacataccgccgggccacctgccgctcgagcccgcggcgcaccccgcggaggggtaaggacactggatgagattcttgactcctagtgctcgtaccacaaggacatgcggcacaccctgcagaactgcagggatttcaaaaactccatcaggcatgtccgaccattcgaaccgctatcgcttcccccacctcgaggagagcctaatgagcctaggcagcctcagcagtaggaaggaagtagaggcggagccttcccacgcatcgacagggaggtcaatgtcatattcgaaggccatggggcgcaagaaagcaaaaggcaacaaaaacttaactactgacaagctttagtggccacaaacagcg

SEQ ID NO: 35263 - DNA, 334 bp, Zea Mays
ttgtcgactgtcagcttggatgggactccgaaccgacagacgatgttcttccagaagaatttctacgcggtgtttgctgttattgtggagactggtctgccctcgatccatttggtaaaatatttgacggcaacgaaggtgaattttaggttcccttgtgtcctaggcagtggtccgacaatgtccagcccccatcgctgaagtggctaggtgtgggtgatgagcttggtaaattgcgaaggggagcctgagtgaggagagaatttctggcatgcttcacatgatctggtgactcagttggctgtgcatattattgcgggccaatagaatccct

SEQ ID NO: 35264 - DNA, 329 bp, Zea Mays
acgagatctgcttgctgctactctaacaccgtcacatttctctgtaaatgtttgtgtcggtgtttagtgtccgatcacacaaccgaggtatattcttggtgcttttgggtagaatggtgtcgtggattataactcgatggttcgtgccggggcacgaggaagagagagtcaagcgatttttagcaggttcggaccgtttgagtagcgtaataccctacttcctggggtgactttgtatgagggatgtgtttacaagtggtgtctaccgaatggtgaggtgctaatgagataaaaatgatggggatcccccttggccttatatacacgac

SEQ ID NO: 35265 - DNA, 346 bp, Zea Mays
gtgggccagtacttatatttttaaggatgccctaagagcaccctattgttggagaggcaacgttacttttagcatgcatgcatcataaacacaaagaggaattaaaaacttgagctaacccacttcctttaaaaccatccgggctctcataatctttacctttgattccctttcgcagatgaattcacccacccccgctagtggaggagacactcattttagttccgacttcctttctcgcgatggctttccttccatcttgtgggaagtgcttaactccgccggttaccctactccccctttgtacacggtgcagttgtatgaggagcatcgggtacctcgttgt

SEQ ID NO: 35266 - DNA, 525 bp, Zea Mays
tccaaagccttcactcattttgtttcgaatccacctgttgctgatggtagtttgggccttagagtgcgaccctctgctaaagaagttaacgccttggttgcctcgctcggggaaattcctgatgatgaatggcaagtccactttgaggtacctttggatcctagtgacgcagaaataagtgctatgcttgatttgctggctgaggactcttctgatgttgctcctgctgggacgttggtggtggcgcctcccccagaaactgatacaaccttggatattcagaagcctgtcagtgttcgcccaagacgcccttcccgagccaatcaacttgatcctcctgctgacgagcagaaaaagaaaaagagacgtctctggcgagtatctagtttggatcgggatgttggtccttcggttcctgctgctgaagaagtgcatgttcctgaatttactgacgctgacctcaatgggggtgctccacctgctgctgaccccaatgggggtgctccacctgctgctgaccccaat

SEQ ID NO: 35267 - DNA, 1184 bp, Zea Mays
cttgtttattgatatcattttcatgtaaaaaagctgactacttttacgtttgctaatgatcaaagtttggaaactttggctgcacacattcttggacaatatctctgtacgttctattaacagtacattcatattatttccttgctaattaggatctagcagctttcaactgataacacatgatttcacagctggaggtagaatcagttacacgcctatctcaatttcacggttcatagcacttgcctgttcatggatttcacccaacgagcaatattattggcatcttttgcttcttttcaatttaatttacatctctattttattttctcctgtctgctgctaggcgcgtgccggcattcaagaagttcatttcctcccattcaatccaactgacaagagaacagcacttacatacttagacgctaggggtaaaatgcacagggttagcaaaggcgctcctgaacaggtatatacattgcatgttcgattcctttataaaatgctacctgaaataaagtgcagaaggcatagtatggagactatttgaaaagcacagtagccaaatatggtaatatctatagcaaagcttcaatatatgttgagatgaattgtgcatgaaacttatttggtgcattttatcttcttgggctactaccgccataacaaaaacaactgaaggaatatgaattccttattgcacattcttaatgtatatgtggaggccacccacctagtcttgaacctgggcagttcatgtgagtatgtggctaaagggttcatgactcccctctcttaagataaaactatgagatgtctattgtcttctccctgtggtcattttttggtgtaggtgtatcaactgtaatgataacttttcagtactagtttatgtgtattttgtttgcctctatcaatctaattctgcatcttttcaactaaagtcaattttatttgtgctccttaattcatcactttttggtatttgcttcgttgaaatgaatataagtgagcaatatcactggatgcagtcgcatcattgatactccagtatacctatatttcatcaaatattcaaatgctcttgcagatcctgaacctagcatcgaacaagtctgagattgaaaggaaggtccatcattctattggcaattatgcagagagagggctacgatcgcttgctg

SEQ ID NO: 35268 - DNA, 521 bp, Zea Mays
gaatgtgttgcgcgatggtacagtgtactgatcaggacaccaactcagagatctcgccgtcggtgatccgccgttgcaattcgtgctcgcctaaaagattcgtgccacgagaagtatggataacgtcaggtgtggtgagaatatccagcgcggggtgaatccgatcactggccggactagtcgctatgtcccaccgtggttagtcgcgctgacatcaccggagtcacagttatccggccaggctacgtgcctcaacgttttaccacgtcgcagtgagtcaccataagccactctctgctactggttcgtcaccggtgaggccgccacggtgaaggccacgaatcaccgcactagtgactcattccttctccgaccgccaccgcgcccaacccaaattccctggccaccgctcaagcctgctataaattgagtgcacccgcggctccgtaggataattacgcatccattgccccagtccttgccccggattatccaccagagcctcccaatttctctcttcc

SEQ ID NO: 35269 - DNA, 461 bp, Zea Mays
aacaactcagccagtcagccgggcctggtgactcgcagaaggcaaattcagtagtattttataaggccaagatgcttgttcagatggatcaggtagccgccggccgccaccgatggaacgtcggagtgtgaacaagcagcaggctgcttctcgtctggtactctggtgtatataaaatagaaccataacgagcaccgtgttatgggcatctgatcgttgactccatttttctttgggtggccacggctgtcaatggacgaccaccaagaggcgcctcctcctccttctacttctacggttctacccccattgcttgctcctccctgatcagacacagaccattggcacatacttcgtctagacgggagtagtgcagtgcaggacacacagcttcagcgcggcatctggttcgttcccatgctagttccaattccaacacgaagccatgcagccactccacg

SEQ ID NO: 35270 - DNA, 275 bp, Zea Mays
tgtgacctgcgcaaggtgtgggaggtccgtgcgctcatgaccaagcccgacgcggccgccccaggcgaccctcgaccgtgttgccaatcaggtacaacccatgaaccctaaccctaaactcccttctcctcctccatgccccttgatcgactggttgatggaccccatgcatgtcggggtgttattgaccgtgtcatagaacctgaggttgctggggttcaatgtcggctaggcaggggatggtgggggcaaccagatgacagaagccatacttg

SEQ ID NO: 35271 - DNA, 437 bp, Zea Mays
ggcagacgcaaggggtgggcaatgtgggccacggccccaccttgatttttataaactcttatacatagacttagatatataatgaaataaataaacttttatatagtaggttggactaaatttaatgaagactaagctttgatctaactttttctcggtgcttcactactcagcccactccccacccgagtcgtggtgctcgtcgccacgtcgggatcctgcaccagtataactactttgccttctaatccgcaccggcagatgggtaggctattagtgggattctaccttggcatcacagcaacccccgccctcgctatctcacaagggtcccgtcgcgccgtcgcaacgcgacaatgtttgtcgcttgctgccaccatcttttgcctcgtcgtcgccatctaccgtcgcatcgtcgcctgccctcgctatcccac

SEQ ID NO: 35272 - DNA, 424 bp, Zea Mays
ctatgggctgcttgggccgcctttcatatgttttacccaccataacatctctcccctcctccaagaatagcttgtcctcaagctgaaaatgggggtaggaagacgtgaactgttgcaatggctcccaagtatcttctatcggctgcgttccactccattgtacctgaacatgccagacacttcgttgtcttcttgctttgagcaccttctctggtgagggcagcagtcgaccattctccattgctggaagagcaggaggtagcactggtggggcgcctttgtatggtttgaggagaccaacgtgaaagacgtcatggatgcgtgctcccgttgggagttccaggcggtaggcggtcatgtcgattctttctgtgacacagaagggtccagcatagcgaggtcccaacttgcctttgggtcggcg

SEQ ID NO: 35273 - DNA, 333 bp, Zea Mays
gttatatgagaattcagcatacggcaaactggactcccagtttctgtcaaacgtcaacacacaggctcttaataaatcctcgaggaccttgttgaccctttccgtttgaccatctgactaggggtgataggcggtgctgaaatctaacttggtgcccatagcttgctgaaggctcttccaaaattttgaagtgaactgcgttcctctatctgatactatcttccgaggaataccatggagcctgactatctctttaagatatatccgggcaagggtggctcctccaaaagtggttttcactggaatgaagtgggccaccttggtgagacggtc

SEQ ID NO: 35274 - DNA, 439 bp, Zea Mays
cgaacgtggacaagaccttcgcagtcagactccggtcgggacagccgcagtcagcagcaggtgcataagattgccaaccagcaccccgcttgtgaggcccctcgccgtcaagattttccccctagggccacggcaatggcactcgtggtcggggccgaggacgggcgcagcagccgcgcagattttactgcctgtttcacggcaaagactgcacgcacccaacgagagactgcccagaaatgaaggccaccagggacaggatgtctcgggcgcaaccagtcgacaacccaagagttgtcgcgcacacatatcaacaccacctctcagcatccacctaaccacgcataccaacaccaccaggaggtacaaatcgtaccacctccgctcccgcctccgcacccgcatcagccaaacatccaccacccaaatcacccccaag

SEQ ID NO: 35275 - DNA, 1352 bp, Zea Mays
ccacgaagtccgccgcgaagtcgccgaagtagtgtcttgtctcacgttcaccccgtcctatacactgtggttgtggatgtcgacttttgccgttttggaagtgtgtagtgatgcgtcgcctgcgattaacctaagttctagttaaatttctagctctagtgctgcttggtaatggggtctgcatgcaatatggtgttcacatgtgatgatacaaaaatgtcaaactcagacatagataaagtgaaattgtttctccttttgtatttccttacaaattgggtattacagaaacttaggttaaaattattcactttgagttattccgaaccaagcacctaataataacttagattatacagaacaatcaagtcgcatggctaacgcctagtcagcgtttgaacttcggacagtgagttattccgaagtccgtggccttctcgatgaggttggtgagcgagtgctcgtactcgaattcagtgaggtcgcacaacatcttcccagcatcccctcccgctgtcgccccgtgttctgttctatagctagaaatacggtggcgatgtgccttgtacaagatgcaaaggcgtcaacgtttttgtttgttactttgctgttttttgaaattgacgggacctgaacattgtctagtcatgagaacacaaatcatccgcagattattgccccgaaatttgtattgctcactgtctgggagagtttgtccagcattccacttgaagcaaattggttgcatatttgaatcctcaacccaatctgcacacgtgtctatctacaattgacctggtacaacaattcaacaacgacgctaagtcactagtttaactacattgacggtttctagagattcgtcagatacaccaatacagcatcaaagcagcacaatactacagatgtgcgggtaaggcacatatgtattgtatgcagcctgaagattttggtcggatgtgcctgtcaatctaccaatttcgtcataaatggacacagatgcaacatgtatgcagccatcacttcgtttggtaacgctagcacccatatcacagatgtttgcaaaacatgataggatgcaaatcttacttattatggaatgataagagagaattagttcagcatcaaataaagcaaggcacttcttcccattaaacttcacatggaatggagaccccattaccaagcaacactagagctagaaatttaactagaacttaggtcaatcgcaggcgacacatcactacacacttgcaaaacggcaaaagtcaacatccacaaccacagtgtatagcacggggtgaacgtgagacgagacactacttcggctacttcgcggcggccttcgtggg

SEQ ID NO: 35276 - DNA, 417 bp, Zea Mays
gatcaaatgataataactctgaaaggtcaaagccctgaagaaacaaaggcagaagacgacgtcaggatgaaggaagggtacagatgaattaaaagaacgttgcatacccgtcccgaggcaagggtcaacatctaacatggggttgaccggctcatgaagatcctgaagaacgaccagagtaccaacggtctcggtcaggacatcaatggtgcccaagggtgagcagcctcggggcacttgctcctctccgctagatgcttcgacgacagcggcctaaagagtgaatgaagcatgaccaatagtaatgcgtgaacatcaaaaataagatgcaagcagttaaacgtacccgagaagtggtcaaggcttcacgaactgaagatgatgatcgtgcctctctaagtgttctcttggcaacca

SEQ ID NO: 35277 - DNA, 368 bp, Zea Mays
gaagcttcggaggaagattcaacttgcaaccaagaaggttgttttgcctattctattgagaagataaggggcatacaacaaggacatgccaagtcacgattcagaagcaaaaggaaatagctgagtcataagcacgacagaatcagccgaagcaggtcctgcatactgcctcgtgctattccccatacattctcgagtatgtgggcaaccaacaacccacagtattagttgcttccgcaagccactccccagctgcatcggccgtgccaccaccgccaccactcatggctccaacttcgtctcacaatcaatagctagaagggcaccgccaagttcaacaacaacgtgacgcacgtgaagagtccgaa

SEQ ID NO: 35278 - DNA, 288 bp, Zea Mays
tcgccggtgaccgccgcctctcggccttgtgccgcgtggctctacctttccaccgcatcgtcgtgactctctatggtcgtctaatcgtcgccggtgaggtcaccacgacggtagacacgaatccactgcgccaaggttcttctctatctccggccgccagcgctgctcgaccgaattgatcaccgccgctcttgctccctacaaattgagcccacggttagctgcgctacatcatcacgaaaccaaagccccaatcccaccctcaatcgttcgctagagctcgtgaat

SEQ ID NO: 35279 - DNA, 800 bp, Zea Mays
gtcatattataaagttccagggcaccgttgtaattagtttgcacaggatgtggatggcggctataatataccagagtctagggtctcctttgcatgattacttgcgggtgacggaatagggttacttggcgcccaaccactagatcaacgcgaactgctagaccagtgatctacggttgggattcaatggtgtgaaggggtacctatggcatctaatcagagcctcccgaacggagatctaaggtccaacgatcgtcgtcaacctacagtgtgctcgacggtggcacaatctctcctcacggcggagcaaccatcggtgtgatcgattcctggcccctggtgccccacagctcgatctaaacctcgctacttgatgtggtgcacacccccaacacataccccgccatcatacctccgatttcaaagtgtcgcgcactgctgacgagaattggcggccaagcgacgtggattgttcaccggtgagtaatctgccttgtggcgcgggtgatcagcccttgatttccttgcgtatgcgcccgccgtgctccgtggtcttcccctaggccactatcatggccaggtttccctaggggccacaaatcaccaatggcgagcctcccttcacattctcctcacagctctcccacacacggtgctatcggtcggtgattatcacagaggtggaagaggagccgtataaggttttcgggcaacttatagaggcggggtggggagggttttgaccccgagtccaccgccagcggcaccagcgcacccaccatgcgcggccaaggttgttg

SEQ ID NO: 35280 - DNA, 377 bp, Zea Mays
aaaaagtcctggttcggtctagcacggctgataagggcaaggacaaggagaccatcattggcgatacacgagaggctgatgaaaacactaaaatttcttgcaggaaagtggtgacaaaagacccatgatggagaagagtcattaaagatcaccatcacgacctccaatgccgaggggcagacgcagtgaggcagacaggtgcgactcttgttctgcgcatcgcggaaggtccggcatgtaggcgcggatggtccgggacaccccccgaatagtccaagtcaagcgaacggtctggcagcgcccaggagcaacaacgtacacgtacctttaaacctcgacaaccagaaataggtacatggaagacaaacacatttaag

SEQ ID NO: 35281 - DNA, 498 bp, Zea Mays
atcgatattccaggaatgctccaggtcctcgccggatggcgttgttagcctatacgcgctgggggacgccttcgtcttgacgatgaaaggaccctcccactttggctccagcttgccccgtgcctctgtccgagttgtccggacgagtacgaggtccccttcgttgaattctcttgggacgactgtgtggtcgcgccatgcctttgtttgagcttggtatttgttgagggcctgcaaggcgaagacacgatcttcgtcgatgaggtccttggaggttggttcgtctacgtcgaggacggctcaagcgcttgtccgtggtgacccatgttttatttcctgcggggtcatggcctccgatccatatagcaggcggaaaggagtgaatccagtcgcccgacactcggtcgtgttcagcgcccagactgcttcaggtagcagatcagcccatttacccttcttgtcgtcgagaagcattttcttgatggtcgtgaaaatttt

SEQ ID NO: 35282 - DNA, 412 bp, Zea Mays
gttctcctgattattagctggtgcgccaggattttaaacagcagctagttttctcaaagatccttctctttgaagtttttgttgtttgtgctactagtctcctaagaatggctaagatgacaggttatgcggtttgcatacagtattattctttcttttgctcatatttacttaaatgcaggccaactatgttgtgggattcatttcctaaggaattgcagattactatcatggtagaagtagccgcacgcaccatctttgagttattggttttgcatttagctagtgatattaaattcatgataggtgccacctacattccaagaagaaaacaatgactagtagcctctccatgtatttcattttctttttagagttatattggtccctgagacccgtgtgtaacgtgttc

SEQ ID NO: 35283 - DNA, 546 bp, Zea Mays
cacacctgccccctctttagattgtgcatgccctcatggagtaagctcaggaaacatcttaaccagcacattccaatcttcccaagaagtggcttcatctttttttgtccactgaaccatcacctaggaaatggcatgattccccttcttcacaagtcgtcggtccaagatcttcaccagcctcagtgctccttgctccagatttagtgttgttggtaattcagagaaaactggtcgataattgggtgtaaagggattcaaccgtgaaacatggaaaactaactgtattgaagccccctcaggcaactccagctatacacttcactatcttgaaagggccaaagtaccgaaaagaaagcttaggacaagagcgaaacacaaccgaatgctgcacatattgttgtaacttgagtaagaccatctccccaacttgaaaaattcgatcagtcctcaatttatcaacctgttgtttcattcgattttgagctcaggccaactacactttcaacatctccatatgacggaatcgagcctctagcatttcag

SEQ ID NO: 35284 - DNA, 359 bp, Zea Mays
cggttatacacttaatcaattcggttaagatcagactcctctcatgttttgaggatgcaaatttctggtgctcattgcaggctacaacatgggttttctttcccctggttgatagttcatgcatgcacactttatttttttagtcacccgggtacacacttaatcaatttggttaagatttgtgtttccatactcatctgtccattaggataataaaatatgttagtatagtgatactttttcctaggttgcaatgtgtttactaatgatttcattttcggtaccgagatgcaatgtctatacattagtacactcttggttagactcttaaactttgaccggcaaaatcagaagtaaac

SEQ ID NO: 35285 - DNA, 288 bp, Zea Mays
ccagagttcgggtgaacgatttcaggtgggagtgggtgttaaggcttcacgatgacatggcgcagctacccgggggctcaatttataggcgtcgcaagcggtggccgggaattttacgaagggcgcgcggcggtcggaggtagaagaaagcactggcgcagtgaattcgtgtccaccgtcgtggcaacctcgccggcgttgataagatagtggtagggagtcacggtgacgcggtgtaaagatagagccacgcggcgcacggccgggaggcggaggtcaccggcgggc

SEQ ID NO: 35286 - DNA, 533 bp, Zea Mays
gtgctccagcgccggtgatcaatccatggagcgacagagcgccattccatgcaggtaatccatgaacagctccctggcaacgtagagaagccccaagaaccaatagaagctcgaacgacgacgaatcagcgaagacctcccccgcggcggacctcccgaccacccatctcacccgcgcaagcacacgacgtaggcacgtattgcgggtgaaagctcgagggggaaggccggaaggcgattggcgacatgcggtaatcaaggccgggcacgacttataacacaggccgcacgaatcaatgggataggctggcggcggtggaccgagcactcacgcgacggctccaccccttccctctgttctggttacggaatgccggccggatagaaggggaaaggcggagacgggtgtccccatttatctccccaaggtcgtgcaggtaggtgggttctgcggggttcgcggtcaactgatcacgcgaagatcacggtggggcaggtacgccgtccgcgctccgcgcgatgggaggaagagc

SEQ ID NO: 35287 - DNA, 305 bp, Zea Mays
aatttttgaacttggtttatgtgttgccattgtttggtgtgcaatgtacgatgcaacaattcagatatccattgggttcaacaagtcatacaagccatcaaagtcagagagaaatgggtgatattgatccaaatgtggaaccagaacaagattatctaggagggcaaagagaaatggttgaatggaatgttgagaatgtccaagcagatgatgataattctcgaggaggagggcagaggaggaagagaaaacatgtgaccattcctctattcagatctccattaagtcgattgttgttgtcgcca

SEQ ID NO: 35288 - DNA, 284 bp, Zea Mays
cgaagatgacgaagatgatccgcccaagacttgttgtagatcaagatatcgtcgaagaagacaagtacaaagcggcgaagaaaggggcgcagtactgttggaacttgcaaacacagtctgacaagcttaaacgatgggagagtgaaaaatggtttgatgcgagtagatgtagttcacaagggcaacaatgtttttctccgtcccccgcaatggcatagtatgggggtatttataggtaaccgagtttatccccaggatattcccccctagggggttatggcggg

SEQ ID NO: 35289 - DNA, 817 bp, Zea Mays
ctatcactggttgggccttgaccatgtagtttacttctatgtactcataaagtaccttgtttctcaattatcgtatagtagggggtacaagcgggtgagagagggatgagctcccaagtctcttatgcatgggtggacctaaagactacgggactgtagtcctgtctaagccttggacatcgtggtggctcatgcctgggctctgacctccgggtcttctggtcttgtcaagcgtgtgtcttctgtcttctgccttccatttggcccctcattgttgcggtcgacatcctccttttataggccagggaggggatcggccatcggtaacttcctcgagaaggagctattatgcccgggtaaaactaagcattttacctaggtgatgttgcgttggtcgtatgcgtcttggttgcccggtcatatatgatcgtgcttatttatgatgggtggcgtgggggtgaagagtctttggttccatcattgtcgtcctagcgttgtatcgacccctagctaccatagcctgggtctcagcatagctcgtcgtgttgcggagtctgtaggcggtcagcactgaggcgtaggcttgatcggctatgagtgggtcgcgatcctaggagcctgtaggttatgagtggaacatggactgattcgccctctatggctcagcgctaggtgcagttaatgtggcacagtgggttagtcctattaggcgcagtcgcgcagaatccacttgtcacagggcaacccctgccccctttgatcgtgaggcattgccctctatggattcatcgtgttcgggcctgatggcccctcttcc

SEQ ID NO: 35290 - DNA, 434 bp, Zea Mays
ggcaaagcccgctaaataacatacacgtcggcttgcctattattatcactatctaaggcacaacatacatcacaacatttttataaacatacatattcacatgtatattcatacatcgaccaaatcatacgaaccgtaaaccactaatctctaactcgaaaccatcatgcgcttacttcccaaatcatgaacacataacacgtattgacccgactcaagatatagaagaagcgatgactactttggcatgtcaccacatctctaattaagccaaaacaatttctacttatattgaccgaacattcgtgtcgagcacaccttatattaccttgtctcgcatacaaccatgttgtggcgtgcactcgagacactaccgattaacttaacgcaattaccactacaatgcacttcaatatacacgtttgacatcacag

SEQ ID NO: 35291 - DNA, 322 bp, Zea Mays
caaatcttctgagtgcctcactgtacctgttgaacaagccaccaataactttggtaactttgccaactattcccacatgggcgaaggtactcaggcacaagtttttgcatcctcatgtaggcatcgcatagattgggtcatagattcaggagcatcaaagcatgtgaccagcatgtccacttctttcaaaacatacactccttatacacattctgagtcggttcaaattgctgatggtacatcccaacagatccatggtatagggtccatagagtgtacaccatctctgagcttgtcatcagtcctgcatgttccatctttt

SEQ ID NO: 35292 - DNA, 404 bp, Zea Mays
cacttgttcagagcgcctgacagaccaaattacaacgccaagatctcagatttttgtgcaagaacttgccaatccatccatagcaaacttgtagccctatgatccagctacaattcgactatggcaactatccttaatcgagcaacatatcttactcaaaatcaagccctaagttcatccaacttcattgtcactgaaagttcagatccaaggctgactgacagcacaactttgggctcatttttctccaaatttttatgtaaacaaagtttagttacttaagcaaagttgttctcctattatagctctataaccttgatgtattgacctagggcaaattattcatggattcaaagatataaggctccaaagatgccctaagttcactgaatttcagacataac

SEQ ID NO: 35293 - DNA, 299 bp, Zea Mays
tgtggctggccaacccagtcgtcgtgccgaaggccaacgggaagctacggatgtgcatcgactacaccagcctgaataaggcatgccccaaagacccgtatccactgtcgcgtatagatcagattgtggactctacttcggggtgcgatctcttatccttcttggacgcttactctggtttccaccaaatccggatggctaaggaggataggaagcataccgcttttgtaacagtagatggactatactgttatgttgtaatgccctacggtctgaggaatgccttgccaacctttgtt

SEQ ID NO: 35294 - DNA, 323 bp, Zea Mays
tttggatataccccctcctgttgttaaccttttgcagcagtatgctgatgtttttcctacagacttaccaccgggtcttcctccgcttcgtggcattgagcattagatcgatctcatccccggcgcttctcttccgaaccgcgccccgtaccgtacaaatccagatgagacgaaggagatccagcgccaggtgcagacgctgcttgataaaggttacattcgtgagtctcttagcccttgctcggttcctgttttactcgttccaaagaaagatgggtcatggcgtatgtgcgtagattgtcatgctattaataacatcacag

SEQ ID NO: 35295 - DNA, 318 bp, Zea Mays
cggattaaatgtagctccgatcgaccaacgcccgcacgatctaggatcaacagtcgcggttctatttagctaaacgattccctctctcctaatctcagccgtccacgtcaagatcaacggccacagtacttcttctccccctcgcaaacacccgatcctctaggaacacgcgcacggcggcgaccccgccggagggaactcaatccggcgctccaccactccaaactcaaattaaacggcgcaacacaaaattgggaatatgttttagcggtctagatgattctcaccggaaacctcggagtgattcctccgaccacg

SEQ ID NO: 35296 - DNA, 461 bp, Zea Mays
gtttgatttcccttgcagatatcttggaatccctctctcccttcgcaaattgtccaaagaacagtttcaacctttcatcgataggtttgctgactgcctgccaagctggaaagcagaccttatgacaagggccgggacaaaagttatggtgcagcatgtgcttacaggtatgtttgtctacttaacaatggccattgatattcctccttgggctttacatgctattgacaagatccgaaggggatttctttagagaggtcgcaaagatgccaaaggtggacgttgcttgatagcctggggaagggttgtcggcctctacatttaggaggaattggaatttctagcttaaaggagttgtgttgggcccttcgcatgagatggctttggttgcataaatctgatccaggacgttcttaggcaaacctccctttccaagttccaagaaaggcaaaggctttttt

SEQ ID NO: 35297 - DNA, 340 bp, Zea Mays
acgtcggctccatggcgcaggccttcttcatcgacattatgcgcctccatggcatgtcacaatccatggtttccagccgcgacccggtgttcacctcaccattctggcatgagcgcatgtgactcatgggcactaagctgcacatgtcacccgccttcgacccccaatcggacgaccagatggaggcggccaaccatgtcatcattatgtacctctactgcttcacgggcgaccgtcctcaaaaatggtttcgctggctaccatgggtgaatatgtgtacaacacggcataccagtcctcgcttcgggagagattgttccgggtggtgtacggttgtgac

SEQ ID NO: 35298 - DNA, 513 bp, Zea Mays
ttcgggaaacccatgcttcgggccatctcccggcagacgggtaattctttgttgtccgggagacaatacaagaaatcatcttcatccataccgttaaacactaaggccccctttggatacttcagttcccgagcatagtgtttggcttcaaaaatttcttctttggataatttctttcccgcagcatgtcgaatgatataatcaagatcctcggaggatgcttcgggggtaagagattcggcttctttggccgcacttttttcaaaaactatattagtatctggaatcatttctttggccccttgttcggttgttgcaagcttcgtctcaacaggcactttgggccctgcctcggcttcatcctggttttttatagcttcgacttctatttgctcagaaccagctttgtgttgcgttttgtcagctccggcagttttcttcgtggaagaagggcgttttgaatccagtgtgtctaaaatatctaaaacattcaccatccttttccttctaggg

SEQ ID NO: 35299 - DNA, 359 bp, Zea Mays
gaccgttcgtcgtcaaataaaaaagaatggatagagtattaattaaaaacaattttaatatttttataagaaaacatataagttgcacatggatcttggattcacatcttgtgtgtagagcaataatattcgtcacccactctataataacttaacaatcgttagattatctgtgatttttctaatccattttttaatcattctagcgtgggcgatcatgatctaggatgagcaattgcattctatacctgtggcggcggaatggttctacgcactggaacacgacaacaacgttcgttgacttcaccaaccttcgattcgactcaccaattcgctccagccccttggccgaattaaat

SEQ ID NO: 35300 - DNA, 821 bp, Zea Mays
ggggatatcgccaacgccagggagctgtttgatggaatgcccgagagggacgtggtcacatggaactcaatgcttgctgggtatgctcagcgtggggacatggagagcgccaagaggctgtttgatgtaatgcctgtgagggatgttgtgtcttggaactcgatgctggatggctacgcccagactggggacattgagatgacaagaatggtttttgatggcatgccaagaaggagcacggtgtcatggaatgttgttcttgcgctatacgcaaaggtgaaggactggcatgagtgtttgaatctgtttgatgcaatgatggctgtggggggaagcaaaccaaatgagaagacatttgtcagcgttttgacagcctgtgggcacctgggtgatcttgagaggggaaggtgggtgcatcacttggttcatgagagttgggagagacttcttcctgacgtactacttcttactgctatgatgacaatgtatgccaagtgtggggtgatggggacagcaaaggagatatttgatttgatgaccgaaaggagtgttgcatcctggaactcaatgatcatcggctatggattgcatgggtacagtgagaaggcccttgagttgttcatggagatggagaagaatgggcctcagccaaatgagacgacattcatctgcatcttgagctcctgtgcccatggaggcttggtgcttgaaggctggtggtgttttgataggatggtcaggttctacaatattgagcccaaggctgagcactttggctgtatgatggacctccttggtcgtgctggactgctcagagactc

SEQ ID NO: 35301 - DNA, 529 bp, Zea Mays
ttttttttgaaagagggacgcctcggatgtcggatagtggtggtcaatccagtgcggtgcggtgcagggatggggaattttgtcgccgggacatgagaccaacaacagcagcagctccttgaatagagtgatggagcctgggctaagctgtgctgtgcagcctgtaggagtacatcagccaccaaaaaaaaagattcccgagtggtgagcactgtacgtacgtgctcgactgctcgtagtcaagcgtggtagctctcctagctagtccctagacggcaaaggagtacgcacagagctaggcctccctcagtggcagcagccccccttacacgtactacagcgccagtacgtactacgtagtactatacgtacgacaaatctgcgcgcacgttcggtcttgagaagtctcgcggatgcagccagggcctatccctcccgatcggtcccttttcttctcgtttcaatttctcttccttcttttgtttagcaacgaataaagataaacaccggatgagaacactgatctctc

SEQ ID NO: 35302 - DNA, 316 bp, Zea Mays
ttggtaaatacctcatcaataaaagatttcattcccaagggcactcgaactatttattatcaatcaacatgctcactcgacttagggtgaccactataccctactaacagagcaatcagcttaagtcggcagtgacttaagacggtgcaacatgctcacgcttactcaacttagggtgaccactataccctactaacggagaaatcgccttaagtcggcaatggcttaagacggcgcaacatgctcacgcttgctcgaattagggtgaccactataccctactaacagagcaatcgccttaagtcggcaatgactt

SEQ ID NO: 35303 - DNA, 406 bp, Zea Mays
cttaagtcggcaatgacttaagacggtgcaacatgctcacgtctactcatcttagagcaaccactatgccttaccagccaagcgattggcataaatcaggaaaaaactccaaaaccagcacgccgcatttacttccacaatcgttcaagatgactgatacaccctgacaacagaaacaaatgttatagttgtcagcaccaggggcacattctagtgctctatccaccgaatatccgggcacaatgatcacacacacatataattcacaaatacattcagtatcttctaaacacgtcaccacgacgaaacatctctatttggcaatgtctttcacaggggcaattgaggaagaagggcgactcaaggcatcaagcgtagccttgacgtcggcaacaatgtcatcaag

SEQ ID NO: 35304 - DNA, 307 bp, Zea Mays
gagaccatggatgcgtacacctcatcttgatgattttgttcggttgttaacttgttccatttggattctagatgagttgtttttggcatcatgaaatctgagtcgttcgatgttagggttgcaaaaagtttctttttctctcccttagtcaccgcttttcgtcatgactccttctctctcgcacattcttcttccccacatgcctccttccctggccatacactccctccatcctaggatgtcgtcccctcttcctatctccacaagaccacaaccctaggtgtcgccctcatcccaccatctcttg

SEQ ID NO: 35305 - DNA, 329 bp, Zea Mays
gcgaagtatgccctcgccggatgccgtccttgggcgatcagttggtgagaagtcctaccttcgccttggatctgcggggtcggaacccggcagcgtttatgcgtgaagtggatgccgaggcctcaaggattgtagggcgatacgtgccgaggacggagaccttgcggagttgggatattcgtggttctaatgttcgtttgaaccacgtttttgagttgaaccgtctgccatatggcggttacccaggagacgacgacgctggtgttgtcgaccgccggggaaaaagggcggccgctgcggtcgacgagggcccttcacggggagctgtg

SEQ ID NO: 35306 - DNA, 694 bp, Zea Mays
acatgaaaatagtagattacttctcttggcccaagtttgtgctaaagctttagtgtagttactttttccagtatcaaacttactttcatatgatatatgcctattacctctttaatcactactggtgattggaacagtgtagaacatttatcaactgaaccatactgttgtaaagtccaggtaactgctgttggaattaacactgaatgggggttgctaatggcaagcatatctgaagattcgggtgaagagacaccacttcaggtttgattttttgttgttgccagcttttgtgcgagtttattgacttgacatgcctttgttgttctggtgcaggttcgtttgaatggtgtcgctacttttattggaatggttggactttctgttgcccttgcagttcttgttgtacttttggccaggtaaagttgcccttttattttagtgtgctaactgtctactttctttatccgcatctatctgtatcaccctgttctcttgtaggtacttcactgggcatacttataatcctgatggatctgtgcaatatgtgaaagggaatatgggtgtaggccagacgattcgtggaatagttaaaatattcacagtggctgtaagtattctgttctctgtttatgcatactgctagtgtttgcgatttttgtctcaccatcttgaggtgtaaataggtcaccat

SEQ ID NO: 35307 - DNA, 455 bp, Zea Mays
agcaaatcagtgagtgccatgctctgcaagactccagaagaagtagttgcagagaggcataaaaacaaaacttctcaggacacccttgagcactgcacaaagaaagggacacaagcacatcaaattgttgacgaccatgtagctgattttctgtatgagaacaagattccgttgaatgttttaaactcaagaagttggcatattatgttggagtctattggacagtacggtcctggatatcgtggcccatcgtatcatgagctagggtaccttggcttgaaagggcagtgaagagaacatcgacattgagagctaagcacaaagaggcttggaaggaatatggttgctcaatttatgtcagaagggtggaccgacacaagacaacgtcatttgatcaacttccttgccaatagtctagcagggacctacttcctaggttctgttgatgcatcaag

SEQ ID NO: 35308 - DNA, 507 bp, Zea Mays
gctcggatgcggcacatggcgaagacgccaagaaggcccttggccagacgaatgaaaagtcctcggcctccaccccgtccctggcccggaccacttcctctcccgctgcggtccatcggacgtgaggcagcggcgacgtgagaggaggatgggtgatgtggaggctgaggaggtggctcatcaaaagaggcagggcctccaaaccctgagggagcccactttgtacgagcagctgggttggtggaatcaacccagtagggtacgtagcgggagtgtttgacaggtttttcgaagtgagtctgggtgaccacttcgatcatcttcataataaagggtgcatgaagacacccattgagaggagaccaggaagcacgaaggatctcttcccagatcatgtcaaacacattgatgcgggcgagactgttgggagcaaggaggagaaggaagacccgactctccccaaggacgttcatttgattcccgccctttgggagaacggtcatcttg

SEQ ID NO: 35309 - DNA, 351 bp, Zea Mays
ggaagatcagtaggaacaatctaaagggcatcatcaggggtgatctcagccccgccagcaggcagcaggctcctcgcttcaagctcgttggcctctaaggcgacatgtccatttacagttgtgaaagcatgtacaaccgtcgccccatcggactgaggaggggacgacccaacgtggacatccatggaggcgtgggaaagggagcccatctgaacaccctcgggggctaggtcgtagcttgcactacccaccagagctggatcactaccagcaacaccctcgggggctaggtaactgccgacaccaccctcgggggctgggtcttctgcagtagccacctctaaggttgaa

SEQ ID NO: 35310 - DNA, 527 bp, Zea Mays
ccggtatgcatccatttcatccatggatacaccaacctttgggatatttgcatgccatccaagttcacctctagggaagaacagtggatacgatagtgcatcgtagcatccatggtatgagcggatgccgtggcttgacatatccttcccatgtagcataacactcttgctgaactggcctcaccgttcgctcccctcgatccatacagcagccacctccgaagtgagaggcgtgttatatgtcttctggttcaaagtctggtcaaggttcaatgcgatatgatagtcatcaaggttctcaacatggcccaagctcctaaggtgctcggagtacgggtttccatggagtatgccaactatctgtttaataacctctttgtctttctgaagctgctcttcacgacacttacggtaccgatgctcgagactgggatcatcatcgtaaaagtaaagctctagatgtttatgctccgacccaccttccttaccgaatgacttgatattgtggtacatcatgccttgtgctc

SEQ ID NO: 35311 - DNA, 503 bp, Zea Mays
tgcacatactttcatgcatgacatgcaccaggtaagtttgtaatggttatggtagaatgaatgtgtactggatgatcagcttggtgtcaccaatctccatgcatcttgttcagcactcaattccctcagcagaagcccatgaggtcacaactcatggtatccatttcagccccaagtcggcatggtgaaatactgaaatggaattggtctttggtgcacgtgttgcagctgtgtaatttcttgttatgtccaccatttaagagcctgatatacagccttagcataagaaaattgcttggttcttgagtacatggacaccatctgccacagtgactagtcgagcacttcatggctgctgttgcttggacttcatctggcctcttatgccatgataagaaaatcattgggtcactttccgcaattgacatgaaggtagtgttggtcataaatatcaactggtataccatctagtctgggacatatatgaacatgtacattgggag

SEQ ID NO: 35312 - DNA, 387 bp, Zea Mays
atcaacatgtcggtgtggagagtcaacgagtccaccgcaaaattacgatggtgagacgacaataggcgtgggatagcaagggaaggcgacgatgtgacgatagatggcgacgacgaggcgaaaaggctatggcggcaagcgacagtcattgtcgtgttgcgacagctcgacgggacctttgtgagatagcgagggcaggtggcgctgtggtgccaagacagaatcccactaatagcctacccatccgccggtgcggattaggaggcaaagtagctgagctgcatacaggaccccgatgtggcaacgagcaccacaactcaggtggggagtggactgagtagtgaagcatcgagaaaaggttagatcaaagtctagttttcattaaat

SEQ ID NO: 35313 - DNA, 428 bp, Zea Mays
gggacctcaaggacgtcttcactggagattacgactctggggatgacagcgaccgccacaagaagttgtacgtcatgtacggcgggagctgagaacttacctcctgcaggaacatcaagtccctacgccgtgaggtcctgtcggcaactccaggggtcccgaaggctgccccacatcaacgatggaggagcaccaccatctcctttggggcacccgactgccccgacaacatggcaggggtcggcatactgccactcatcactgcccctgtcatcgccaacatgcgactacaccatgtgttgattaacggtggaccaggcctcaacgtcatcagccatgctgcgttcaagcagctgcaaatcccggggtcacgtctgggaccctcacgcccattctccggagtgggcccacagccggtgtatcccctt

SEQ ID NO: 35314 - DNA, 375 bp, Zea Mays
gggtttcctcccaagggaccaagcttcaacaagccagtagggtccgctccatcacgtttcagccaatagggtcaaagttcccaccatgccccatctattgcaagtaaccaacctccagccaatgtttgttggcactgcggagaccccagtcactacaagaataattgtcctcagttgaagacatccgtgcctacctactccaactcggtgaatggccccaagaatgctccagcacccatctccaaggcaccctcctccaacagccagctaagcaagacccagtttcatggcagggcacgagtgaaccacgtcgacgctcaagaagctcagcaagccccgggagtagtgctcggtgagttcctagttgaatttacc

SEQ ID NO: 35315 - DNA, 307 bp, Zea Mays
agacaagcatctaggatcaccaactattatagagcacgagcaagctttaaatacgcaattattcacaactttagataccaaatacttgacttgtggaggtacccaagtcctgattgctccatttcttgcacatcttccctttttccaccttgagactatataggatcactaaagaaacagttagtctcaaaagacacaagttatgtgtgctccccctaacgttgtgcatcaagtatttgaatgacttgcaccttgcacattctagcatcctcagaactagagggaatcacaacataccttggtctag

SEQ ID NO: 35316 - DNA, 290 bp, Zea Mays
caaagcctttcatcttgcgacattattctccgacggtgagatcgccttggacgaagttttggaattgggcgtcgaggtgaagagcccgcgtctcctggtttccgaggaactgattttccagggcaatctaggcttgacgggcagtaccgccacgctcacggatgatgtcttgaagttcgacggagatggttccagtcacctaggagaggacaatactgtccatgcgatctcaggcagggtcctcggggaagacggtgttgctgaggacatgatcagcaagggagaagcgc

SEQ ID NO: 35317 - DNA, 303 bp, Zea Mays
atctcggggggctgggagtgaaggacctatatgcgcaaaaccaatgattgctaagaaagtggctatttaaattaccaattgaagatggcatgtggtagaggatgctgcagaggaaatatttgaaacacaaacatataggccaggtccagaagaaacaaggggattcctaattctggtctagtcttatgaaggtgaaagaatttttttgagtctggggacgttacgggtgaataacagacttaatgtgcgattctaggaggataaatggttaagcaattttaagcaggaacatagatatccttg

SEQ ID NO: 35318 - DNA, 915 bp, Zea Mays
tgcccatgctgtattagattaagctttgttatacgataaaactaaaaacgtgaatgtcatatatagtgtttcaattgagttagcccgtagatttaatatgtgtcgttcgcaatgaattatcagtagggcctaaatggtgagttatgtgtgaactgtgttagagcccttccgagataaatagatttaacctatgctgtgttgtcatacaaataacctagaaaggtggtatatgttaataattggaaggacagttgttcaaattggtcagttcgattaagaatgatttttgcgtgtgaggggaggtggtgacataccaaggtagtcatcaattcctctatgtttataagtcgagtcgagtcgatgcgcaatttgtgttcattaaattatgctttgcatatagtgtaatggagttagttgttttgggataattattaaaatgttctgttcacatgataaatatgtatgattgtaaaaacattgaagtgtatgttgtgtctcagtctgcgatcataataggcaagtcgatgtgtatgtcgtatggcgggctatgccatccctttggttaatcgactagttagatggcgttggttaagctcgtagttacgatgaattacttgttgtggtctaaatgcgtatggttatggtcgcatgtaaaaattagtagtgctcatgtggcgtctaagttaaaatgcggactaatgggtgaaaggcgcttcgatataaatatgtgccggatttgatgattgtggtgaatgcgtttgttaaatgaatgtggtaattttagtgcactaaatgatttggataaaatttgtaagtctacttgttagtgctcaattgattgttttaactctaacaaatggtaaagtgttagaatgattcaattctctagatcatggcaattcttgagttgtatag

SEQ ID NO: 35319 - DNA, 526 bp, Zea Mays
gtcgtaagtccgtgggaaagacatcaacatactcttgcaaaaggttaacaacagcagggggtatatccaaagacggtgcatcatcaagcggaacaagcatatgcgagcatacaagtgcataacaggcatatgagcctcatgtaaatcatcaaaatcagcacgtgtagcaagtaaaacaggagcattcaatttgatttcagatttaacaggtgcgactgatggagatttgacttattgtgcagttttagcagccctactaagatcatcttttaaaatttggtcaggggtcattggatgtataactattttctggcctttaaacatgaaagaataatgattcaaacgaccatgatgtaaactatcagtatcatattgctaaggccctagggcctgtccctccaccagcgccagtacacctttgacatcctcgagcgctctggcctggctgattgtaagccctgttcgactccgctggacacttagagcaaggtctccatggacgcctgctcttcggtggctgatctaa

SEQ ID NO: 35320 - DNA, 632 bp, Zea Mays
aactgaacagctactaatggagccattagcaaaactaaccaaaattttgtgacccaacctctgcaccaaaagaccagcctgcgacacaaaatcctctgaaacaaacgaatagctagcgccagagtcaaaaagagcatgggccacaaacgaatcaattgaaatcgtacctgtcaccacgtctccttgctctctgccatccgcagcgggtagcacataagccccggaaataccagcagaagaggaagctcccggagtgaaattaacagaagaaccccactgagccgccgggtgaggcagacgcggagctccaaactgagacggcataggagtagtcagtgcaggagtaggtgcagccagatactgaggaaaaccctgcatcggcatgaactgagaagtcccaggcacataaaactgctgtggaggaagtggaactgaaaactgctgctcaacacttgacatcatgttgatagtgccctgagaagaggaggaagtcaccggctcccatctgagcttcccattaggattcctcctacacaccacatccttgtggtcctgactgcagatagaacacctgccactccactagcactctgcacggtgatgcgcatcaccacaacggaaacacaccagcc

SEQ ID NO: 35321 - DNA, 515 bp, Zea Mays
gtcagtgaagatgatcttttgttcagtgctatgaagatttccgtatatcttttcttatgctgaaagactacagagtcaaatctgatatgtgtgtggtttctacagatgcctgagaacaggcgcagaggtgcaaggcatgctcagccggaacaacaggcaccacagtaggatgcagcccaacagcagcagttgccaccaccacccccgatgacagttgagcagatgttcatgatgcaaactcaggcagtccaagcaattggtcagaccttagcagcgatgcagcaggtgcagcagcagccacccccacctcagcctccagtgcaagtctagatgccgcaggtgcccagagacaagcgggcataattcatgaggggccatcccctgtcttttcccactctgctgatcccatggacgccgaagattggttgcataccgtggagtgtgagttgcacacggctcagtgcaacgatcgtgagaaggtgttgtatggtccccgacagctgaggggagcaaca

SEQ ID NO: 35322 - DNA, 320 bp, Zea Mays
gggtaatagagtgcaatatataggaggttgggaaccaatgaaagttgattccataattatcaggttatgcatgcatcatgtttaaaagtatactaatagctcttcctctcttatggagatatggcgcgcactaggaaaacagcacgcaaatctatgggaccttttcgcgtgccacgacatcatctagctcccaggcacgaagggagtagtagtggcagtaacgacccaattggagacctagaagccagggtggaacaacttcggtcagagttacgccacaggaacagggcacgtgagcaggacagtcaccacatagcgga

SEQ ID NO: 35323 - DNA, 335 bp, Zea Mays
catcgttcgacatgcttcggggaagaaattgtccgaagatgaaatcgctgaagcaaggcattatgctcaaaaactgaaatatcctaaaggagccttagttttaaatggaagcaatgaagatgatttcttatactgtctcccggacaacaaagaaatatccgtttgccgggagataggtaaaagcatgggattcccgaagctggaagatggcctttcaattttgtcaaaggatgttcttgccgataccctagcatacaaccgtataaaggtataaaagtttacttttaagttggaaactagcatatttcattgtcatacttaattctttcttaatt

SEQ ID NO: 35324 - DNA, 799 bp, Zea Mays
tgaatccggtggtaaaaaagagaatggcttctcctaccaaaaatttcattgttgcagaccctagttatctgcgaacacttagtcagacacatgctagctggatatttggagcgatagctgagctcattgataattccagagatgctggtgcatcaaggtatgctcatctttcaggattctgtaatcagaatattttgttcttttatttttgcaatcagtttgggtcctgtttataatctgtgtaatgtgttgtgctgtattagcctttttaaaattgaaatattctcatgtgagtatgtggctgtaagaggttctcagtttgtttatatttgaaagaaaaagaaaatgatctcttaacagaaaaatcaaactctagtttaaagagtcaccatagtgtcaacatgttctatttgtagttttcagaattctcttgcatgagacaccaaactgtcttgtatgtttgtagtttattttctattttcagttattcctatttcaccatgctaatcagtgtttttaaagcgtaactgcgtaaggtgaggcaaggcgttggaccgccgcctggacgcctaggtggcgcctaggtgggcaaggcacctaggatttctgggcactggcctaccgcctggacgcctaggcgacgccttagaaacattgatgctaattacttgtttcttattgttatttatatcatggaaggttgagtatttccatcgagcatttgttttcaaagaaagcacagaagaaaattcctgtcttatctgtaattgatgatggacatggaatgacatatcctgac

SEQ ID NO: 35325 - DNA, 691 bp, Zea Mays
gccaggtcgagaagcatcacaagcacacagggatgctaaaacaagaccgaggagggcgtgatcggacctgtgaagggctgaccacgacgagctcacacatgcggtgttcttgaccgatttgggggaaatctcaaattggggcattctggtggacgatccgaggcacgggctagtgtattgggtgcgtgactacctagtagagccgatggcatgcttaatttataggacccgagggcggtggcgcgtgaatttagcatggcgctgtggcggccggagagaggggagagcactggtggcttaatcgtggcgttcaccggtgcaatggttcaaggattgtaattctaagtgtgccacggttactaccgcacaatagcgagccacagcgtggcataaccgaggtcaccagagtttccacggcaacaccagcggtctgaccacgttgcacggctataggcgcggtgataagcttccaccgcgaccaaatccgctcccccgcgagatctttttaccccccgtggatatccactgtgtgccaagcacgaatcacggtgactggcacgaatccgagcgcacgggtcaccggcggcgagggggactgaaccctgagatcttttcgttattgtaccatcaggggcagcttcagttgttctgacaaagcgttttgcagcgcaatttgcttcaaatttcatgt

SEQ ID NO: 35326 - DNA, 804 bp, Zea Mays
tgaataccatttgaaggaataatattgcttggacatttctctatagatattgatgtcacttgaaggttttgatattcatttgcattgttatcttcttcataagtcatcctcatgagcagctcaatatgtgactcaaccaaatagatttgcttaagcctccaagttcgggttgaaccctctttaagcttcttcacacgcattaagcggttatcttatcgaggttgttcttgtagcttgttgcaatccaaaataaattaagtacatgggttcactttgctcatgtacaaactcatatgctaccactagtttcaatcaacaaaaataaccaatagtggtagaacatgaatttaaatctttcatttaatatgcatgatactattaagtatgtactatatgcactaaccgcatactagtagggatgatatgatcatgcacatcacaatgatacctttgctatgttggagtagagaatagtcaatattctttcgatttagttctccaatagcaatgtgaagtccaattgaatagcttggtgaagaccaattatcaataagaaatccattcttcatcagtatgaagttgagaacccatttaagatcaagtgcacaattgaacgttgtagttcacatgcatttgttcctccaataccacttgtatgtgagagaattatgaatttgcatgaaatataggaatatcacttgtaaggatgataccacttgttgagatattggtccagaaaattcctttgtttatgcaagactgctactcacggacggtccgcagtgggagctcggacggtccgtg

SEQ ID NO: 35327 - DNA, 753 bp, Zea Mays
cgagatctttcctatcacttatcagttctgctcccgcgttgtctgtcgaatcgtcggttgcgatgcggtttcgatttgtgcaggagtgcttggatatttgttgatacatttggtttgtttgtggtagaaacattttccattttttgtttgtattgttacatatatgtttttttttgtggctagctcgtgagaataggtgagatgactaatttcccttttagcaatattaccagcagaaggatgatgttgtcaaaggatctcaatctgaaccagagcttagagtaccaatagattttgttgagatatcaattttgaagatgagtgggaccatatggatgtcgttgtcgaagagcgtatttagcattattcccagctggaatacagcaggagaaatcctttgctaattctcgaagttttgacatcggtcaatgcctaccactgttatttagtggtccaatatgtggggtctgcaggcatggtgctctggacctccagtagtgaatgtgtttccaccaaaaggtggatgggtaggaatagtctcacaaaccaactggttcttgatatttctggatgttaagatgtggtacagaattgcagtggaccttattgtgagggacatcatggctaaatattttggtggatttttaattaaacaaacccactctggttgcggaagttcgtgttcacaacaagcaacttgacatcgaagtgatacctggaacaagtacagcttgtgctgccgtttgggctctg

SEQ ID NO: 35328 - DNA, 328 bp, Zea Mays
gtttatatacatgcatgcttccggtatatagaggttgatgctaattttttagataaaatgatagttgaaaggatgagctggtagtatgctttttgtacagtgtacttgcacctgtccaaaattttctctcacccgcttctcttcatgcttctttctgggtctacagttcaatataaagagaaacacccttaagtgagagtacttgttatagttcggtctcttttttcgacgctccttttagtgcttttctttgagtttcattcctactcgttcaaccacacaagatgagtaaactgtggaacatctcatgttcatgaaaatgatctct

SEQ ID NO: 35329 - DNA, 1159 bp, Zea Mays
aagccatcacacactctggacgttgggcccacattgcagactacgggcgcccacgtgatagccaccctaagttttgcacacaccggacccacgtctgctcgcacaaaaagttgcctcaatttgacaccgggaggagcatttgaccacgattgctttctctgaagaaggaaggcttataagccggtagaagctatgttggctggccggtatggtcataaaaatgtgcaagccgtgacgatgacataggtcgcgtgggctgtgtttctttggtgcggcccaagtagctgccaggaggccgcacgcttcttaccctgacccagcttaggctttagggtcagtctcccttgctttctctgcccagcgagccctcgccctctagctcttcctgctagcgccgtctccatcccgtgctctcctcttcatcgtcaatctcagccatctcaggagcacccgctcactcccagacgcccgcgcaaaggaatcccccacgatctccctccaaacttcccactccctccacgatccccccctctagctcatgatccctctgcccgccctcacccccgcctgccacacccacgggcgcaacaatccaacaacccacacttggccccgctatcccgatccgtcgccataaatccgctagctcctcctcgagtcctgcttgatctccccatgctcgaccggtcgaccggacggaagggcagccccgaccgtgaccacagcgcgatgtgcgacgagtgagggcggtggtgggggttgcgaccaacgacggagagccacacaaagaagcccgtcggcgatgttttcctcaaggttcgctcgctcattccttccttcattatgctattggcgtgtgatcctagctagcgctctcttgatttcatccttatccacgtgaatcctggatcacactgcatgcagatcggattactggaaggccagaccagctgctcgcattcactggtgcacggtgtgggagctgagagttccgttcctatggccgggccccacctctcttgggcccttgtgcagatacgcagaggtagtgtcccctaatttgtttgtcatgtcccctaatttgtttgtcagagctacttgaggatgtcaatgaggtatggctctgctggttcatcagtattcagtaattacaaggcat

SEQ ID NO: 35330 - DNA, 501 bp, Zea Mays
tgtacgcttgcatggtatgccttctactattgtttcagatcgtgatgcaaagtttttgagtcacttttggcgtacactatggaacaaattggggacaaagttgctgttttctactacttgccacccccaaacggatggacaaacagaggttgtgaatcgcacattgtctacaatgttgcgagcgatattgaagcacaatttgaagatgtgggaagagtgtttgccacatgtggagttctcgtataatagggcggaacactcaaccaccaaggtaagtccttttcaggtagtgtatggctttaaccctcgtgcgcctattgttctttttcctctacctactatggagcgtgtacatagtgatgctaaggagcgtgctgattttattttgaaattgcatgcttcaactaaagagaacatagaaaagatgaccgagaaatataaactggctggtagtcaaggtagaaaggtagtaaaacttgaaccgggtgatttagtgtggtt

SEQ ID NO: 35331 - DNA, 361 bp, Zea Mays
ttatttttacattttatttttctggccgatcgctgggatcggccttcaccagcacgtataccgcttcctatactctataaagctagcggataagactagcctcaacccggtttttgaggcttctacacggtcatagccttccacgtcagttcctgagatttgctcctgtccatctgcattccacctgttagtatcgacgagtgaaattttgcacgagtcatccatggggaccacttccactttgtctccatctagttggatcaggcattggtgcattgctgacgagatacagtagttggcatggatccaatctcttcctagcaagacggtgtacgtagtatggctgcttgtaacaaagaat

SEQ ID NO: 35332 - DNA, 552 bp, Zea Mays
ttatttagtatgctaggttgaggtggagattgactcacacaagcaagaccaggagcacgtcccaactttgtctattgaagcaacactcattgataactctggactatctaacagtatagatgctgatctttcatccgctaatgcagtcaatttgaaaccgaagccaaaacgaactcgaagcccttgtcttggttttcatggttatgtacttggtggaaaaatagaaaatccaaaactttggtctagtgagcatgtaagagatataatgcaagggaaattctattaccaaacattactattacagttcaactgtataaaagctgtcttttgactattctccttcttgtaacagcctaacttatacacgcttgttgttctccttaaagatgccaatgggaagcttattgactgtgaatcatgccaagtgggcattcgtaatgtggtcatggcacacaagcaaatgctcgtcaatggatgtcctgttgtgctaagaggtgtcaacagacatgagcaccatccacgccttggaaagacaaatttagaagcatgcat

SEQ ID NO: 35333 - DNA, 491 bp, Zea Mays
ggggggaagggaggttttaagttaggatcacaagggtaaaggcaatagcaaacaaaacacattaaaagatggagttgaaagttcgcatgcagcaaagaataggacacatccaaaggaaaatgggtaagatacaactttcaaattgagatggaagagagaagattttagagggcagatataagataagcaacagggtgggatgtagagatgacaaaggtaaagatgatatccataaaagcatgacaaaggatagaattaaggtaagactcatgaaatggcgaagtagaggaaacaattaagggtaagataggtaaggttccaaccgaatggttgaagtaaaaattcattaccgagggaagttataacgaaacaacgagatcacctaggatatacgaaaataaaatgatcgctaatggatcgtcgagaaacatgggtggtcattggcatgttaactgaaacgtcttaaatagacattggggtatgaagataag

SEQ ID NO: 35334 - DNA, 292 bp, Zea Mays
agtctatgttcctgagcatgtctggctagcactttcagagttgagttatttcttccgtcagctttgtgcaaaagagttatctcggaccgtggttgcagatttggaaagattggcacccgtgttactgtgtaagcttgagaagatattttcacccggcttcttcaatccaatgcagcatttgattctgcatctcccctatgaggcacgaatggggggccccgtgcagggacgttggtgttatccaatcgagagatgtctaaagactattcgaaagaaatgtagaaataaatgc

SEQ ID NO: 35335 - DNA, 402 bp, Zea Mays
aacgggtccagatctccacactatatatatgaaggggtatgaccgattcagaacacaatccaattaccttatttatcttcatgtcttaggtctatagcgtagctttagttgtagttccccaatctcaatctccatctctcttcgactctacatcgtctagaggcgctttgggtggcctgccgaccccgaaacaactctacagtctcctccccaacggggtctctcccgggagacgagatctagtttaacctgagagctctctgcgccatcgcggatggttcgccgtccacccgtggatggtctggtgccttatcacagaccgtccggcacaccactggctcgtagagcagaaatagaggtcgagttcaagaccgcattatagagccaacctcaagatcttgc

SEQ ID NO: 35336 - DNA, 419 bp, Zea Mays
gggaactaccgatcgatctcggcttgttgcacggctgccctctccatagaattgcagaggttctggtacattgtcttcgcctccagctcgcgtggctccaagatggatcaaagcatcatggctgttgcggccatgttctgtgtgggattgagaaagtattgtgcgccgtcactgctctcagcgagctggtcacataccttccccgacatcgccgaagacacggttgagtttttgcatgagggcgttgaactcttcctactgctgataaagggaggcctcgcgagcgaggatgcacgcttggcattggcgcatgtagtcttcttgattgggagcctccttgtccccttcgtcattgtcattcggcggcggtgttgccacaaagcatgccctttctggtgcttcttcggcgtcggagttag

SEQ ID NO: 35337 - DNA, 560 bp, Zea Mays
tgtacacatggaccttccaaacctcaggtccttatgaggcgtcgttcattttatatttaagccgtatggattttacaagaatggaggggattgagggttttgacgggacttaatctctctcaattttcatagatttggggtatagaggacttaatctctctcaatctacatagatttggacaaatcggcctaacatgtgcttccatccatcgatgacacgacagaacgaacgaaaaaaaatatctccccacctaagaaaaaacaaatgtttcagattagttattgactatcttgagcatgagtagttctactttgagcagttatgtcagcttgctcgcacagagcagaccatcgtaattaaaccaagacaatgacgtcatacacactcatagataatgcattctgatagcaccgtgaagtgtaatcatggttcctgattggttagttaacccctcttcattacatgagtaatcatgcttctaatcaagcttaaacaagaaccgatcgactcgcgccgggatacattcatagatagatagtggcaaagataatagtatttt

SEQ ID NO: 35338 - DNA, 449 bp, Zea Mays
cccgccacaacaacacttacccctctctacgactcatcggggttgtagtatggctctaccctcatatgggaatgaacactttttggcctccaggagggcgaaaagaattaatacacaatatggagcgactagggtagtatgagcatgccacaaaatgacatagctcatcatccatgggcaagaggtcggcatatgaagcccggccacccacaccttcaggcccaagggctagagggctaccacccgtcactattgatacaatgagagaggaaatagcttaagcagttcgagataaaacttggagttagcatgagcaacatttctagcacaattaggagaattgaccgatagagaagcttttcacattcacttgttttcattatacctaaccggtactgcatttgcatgctatgccgccttgccacctaactctatctattcatggggag

SEQ ID NO: 35339 - DNA, 293 bp, Zea Mays
gcgacgacgatcaatggtgggcgatgggcgatggtcaagaagataggcaggtgaagacgtgttcacaacgcctgacacccaaagtttatcacccgatctctcgatttcatgtagtaacaagtcgatcatgcttaaggaaaaatgttcactgatctttggtctagatctttgcaatagggattactaactaaaactcactggattaatcaacagaaggctccaatgttctctagacgaactgacacccgatttttagttaactaaaatcgggcgccatggtacattaacctcac

SEQ ID NO: 35340 - DNA, 742 bp, Zea Mays
gagatgtataaggtggcaaagaagactacaaagcgagttgtgagtgaggcaaagggtcgagcctatgatgatatttaccgaagactaagtacaaaggaaggggagaaagatgtctataagatagctaggattcaagaaaggaagacgagggacctcaaccaagttaaatacattaaggaataaggatgagatggatcaactcttagtgaaaggacaagacatcaaacagagatggcagaggtattttgacaatctcttcaatggtgagaatgagactatggacatccaattggatgactccattgatgatttaaatagatgcttcgtacgtaggatccaagaatcagaggtcaaagaagctttcaagagaatgaaaggtggcaaggcgatgggcacggatggtatcccaaagatgcgtgaaaatgccttggggatattgctatcgtttggctaaccaggttgttcaaccatatttttcgatcaaacaagatgtccgatgagtggaggagtacattagtatcaatcttcaagaacaagggagatattcagagttgtaccaactatcgagggattaagctcatgagccacactatgaagctatgggagagagttattgagcatcgagaggaatgacgcatatcaccatgaaccaatttggattcatgcctagaaggtcaaccatggaagcaattttcttaataaggcaggtcattgagcgatataaggagcagaaggacttgca

SEQ ID NO: 35341 - DNA, 273 bp, Zea Mays
cacgatatggttcaagaaccggatatgtgttcctgagatcgacagcctccgtgagactatattgaaggaagcccatgactttgattactctattcatcctagtagcactaagatgtatcaggatttgaagcagaagtactggtggtatgggctaaaaagagatgtggctgcacatgtggctatgtgtgatgtgtctcaaagagtcaaggccgaacaccaaagaccaactggactattgcacccgttaaagatacccgaatggaagtgggaaga

SEQ ID NO: 35342 - DNA, 331 bp, Zea Mays
aattccactgccttagctgaagttaaagaagcaatgggcttgtactctatccacttagtgaatttgtcaatagcaaccagtacatgagtgtatcctccttgagccttcttgaagggtccaatcatatccagtccccagcacgcgaatggccatgttacaggtatggtttgcagttgctgtgctggtagatgctgctgttttgataagtattgacaagcttcacatctttggactagctcggttgcgtcactctttgccgttggccagtagaaaccagacctgaagaccttcccaactagagtcctagatgttgcgtgtatcccgcattgcc

SEQ ID NO: 35343 - DNA, 540 bp, Zea Mays
tggacgtcgaattgagaggcgtaaatgcggtgaccacagccacgaaattatgaggtggtacgaaggcgctatcaaaatttcccaagctttcacacagaaggagagtctggtcatttaaaaaattgactggagaaacaacggcgctatgggttggtgatgactgatgagtgaatgcgaacacacaacaaggcatgggattctacacagtctacactctgagctgcatgcatgtccatccaaattaaaaaaaaagtgactacaatactactagtcactaggtgaagctaataccttgatcatcagacggtggtggtacggtgggttccacttgtacctgagaagagcgtgtgatccaaagggataggcgtgtgcttaagactgacccccactttggaataataagacttgcatgctgcacattactttcttattgtaatacaatccaaagatctcgcactttctttacacaagaggatcatggcgaaataattgcgtaggggaacgtatcgtaaaagaaccgagtcctatggaaaagatgac

SEQ ID NO: 35344 - DNA, 495 bp, Zea Mays
aagaatgcaaggcattagatcaggcagagttagacccgaaggactagagggagccaattatcaaatacatcaaaaatgaggaggaactagacaacaaggctgttgctaagcgtattgcaaggcaatcaactcattatgtcatcataggaggattgctgtacaggagaggggcagtaggagtcctcatgaaatgcatccattcagctatgggaaaccatatgcaagaagaaatccatgcagcgcaatgtggaatacatgcaacatcaagaaccttagtagggaaggccttcaaagcaggtttctattggccgacagcaaagaaagatgcagctgatctagtccatagatgtgaatcatgtcatttcttatctaagcagcaacacctaccagctcagcagttgcaaactatcccgataatctggccctttgcatgctaggggctggacatgattggacccttcaagaaggctcaagatgggtacacccacatactgg

SEQ ID NO: 35345 - DNA, 525 bp, Zea Mays
tgagccccacctcctgggcttttttaatcaaacaagacagaccatcggctgctatgttgaagagcagggggagaaagggtctccttgtctaacccccttatgagtagagaagaaagggccaatgatgttattggtcctaactgccactttgccccctctcactgttttcatcacccaatctccccacttttcagcaaaccctttcaactctagcattttgtataagaaatgccaattgactttgccataggctttgtcatggactcacctttgttggccgtatctcagcagtatgtgtctgttccaagtgtacacatgttaatatgctccgactcaacgtgcatttcagttttgtctgttgggatgcaactaatgtcttttgtcactgctcccagagttgaatgtcttgtgtatggtcatgagctaatagctggggaatacaaaagtagaagtcaaagattacaatgtgaaagtgctactgcctgattggctttggtttttggttggcaggtggatatccctttg

SEQ ID NO: 35346 - DNA, 276 bp, Zea Mays
gcaatttccttttgcttttggatcgtgacctggcacgtcctcgttgtgtgacccttgtcctcgccatagaaaaggcagaacaacttcctaggctgattactaatccttcctccactgaagcttcttcctcctctacctctcggagctggcggtctgtaagaagtttgctgcatgctcgaagactgtgagctatgatgactgctctgagcattgttggccctttcatcgttggcattgtaattatggattgacctggcatgcctaggatgaagcctt

SEQ ID NO: 35347 - DNA, 371 bp, Zea Mays
cagccctgccgttctgaggagacgtgtaggggcacaacacacagaggtggaagccgcgagagaggaaaaagtcacgggacgcattgttatagaacttgcgcccgttgtcacactggacactccggatggtgcgatcgaactgagtggatacccaagcgaagaagtgagacagggtgggataagtgtccgacttctgacgtaaaggaaaagtccacaaatagtgcgagaagtcatcgagaatgagtaaatagtacttatagccagaaatgctgattacaggggatgtccatacatcacagtgtatcagataaaaaatgcctgctgccctagaagaggaggtggggaatgggagcctaacatggcgacctaac

SEQ ID NO: 35348 - DNA, 357 bp, Zea Mays
aattagtcctcacaggaatgaagtgagccacttttgttagtctgtccacaatcacccaaatcgagtcataccctgcaggagtgcggggtagaccaacaatgaagtccatgccaatttcttcccacttccactcaggtaccttcagcgggtgaagtaatccaggaggtctctaatgttcagcttttaccctttggcaaacatcacacactgccacatgtgaagcaacaacccttttctgtccataccaccaatacttttgtttcagatcttgatacatcttggtactgccaggatgaatggagtaggctgagtcatgtgcttccctcaatacggtttcacgaaggctatcaatcttag

SEQ ID NO: 35349 - DNA, 317 bp, Zea Mays
gaactaactgaatgactaactatatccatactagcaactatgcgttacttgaacactgtatcatactgtctgtctgtctacctctattgttcgcggcacaagctttatatctttgttgccaaatcggtagtaacaaagcttgtacctgacaaaaataggatgatataaggcacgggattcagaaacatattgtcttatctcacaatgtaaatgtttttcccccaaatctgtgctaaaagttgagtattttcagaggaatcctctctggaaatagctagaatgtcagctttcactaatactcttggacaattctaata

SEQ ID NO: 35350 - DNA, 633 bp, Zea Mays
ctgagggcgaggatgttgtgggacgtcatcgagcacggaggagcagatattcatgaagagatgatggcactcgacgctctttgcagcgtggtgccatcagagatggtgtcttcgatcgccgataagcttacgacaaaggaggcgtggaagaccattgcagatctgcgagtcggcgatgatcgcatgaagaagactgctgacgtgctgcttcggacgaagttcgacttggcgacgttcaacgacggtgagtccgtcgaagatttcgcgctagtctgaatggcacggcagcggaactctccaacctcggagctagtgttgaagaggagaagatcgtgaagattgctcacggcgttccgctgcggttcaagcaaatcgtcctctccatcaccactctcttcgacctgtcgaccctctctgtgtctaacatggtggggagactgagggcagcggaggacgccttcgaggaggccccaggatcactgcaacacagcggtcgactctacctcacggaggagtagaatgcccgacgcacgaaggaggtcgagtaccaccctcgaagcaattccagtggatgatcagggtgccatggtggaggatttcgtggccatggtcatggtcgtggtcgaggagggc

SEQ ID NO: 35351 - DNA, 296 bp, Zea Mays
caaagaatgcagtgtgttggcaagtcaaaacaacactataaataaaacaggtgaggagcatacattcaagacacaaaaggatgcacaaccaaaccaacagacaagtgaccttggaacatgttgttgttgtgagtactatagaatttcttgtcgccaaatcaatgcaaatgaaagtgaaactgcaaaacagaagaaccagattttagttttctggcataaaaagacaaatgtctcctcaagaacaactaatagcagattctctcatacctaatgcactgtcagttgatgaattgcaa

SEQ ID NO: 35352 - DNA, 340 bp, Zea Mays
acaagacagtacaccataatgactgtatgcctacgcaaactgcaggtgacgtagggctcatgacggacaaagccgcgccacacacggcaacgccatgagactgatctatgggacccgccacgcactacaacgaagatatcaatatggattcgctacaaggtcctggacgacagatgagcaaggcggtacaccatacgggagtatggctacacatgaccctacagatgactcagggataccacgttattccggggcaaccaatctctcactctctctagtagaaaacatgtctcctctgtaaaggttcttcccttgagctataaaagggaagaccctcctt

SEQ ID NO: 35353 - DNA, 448 bp, Zea Mays
cgcgacacctcttcgtcctccgactcggccgtggcgacacaccatttccacggcggcgccatcgccggggagttccaaacccgcaacccacgcctcgaacttcgatccctacggtgctacgcgtagcagagagtgaaccaaggaggatggcggtggttttacctcaaatcagggcgatgactgctctgcccacgagacaatgcggctccacgacggaggttgaacgatgtcaaggaattaggggcactctgttggactatcccgccagaatgtgtcacggacagcttcggtggttgcccacgaacaccggatgctttgctacgaccagccacccccgaggtatggttctagccggtggcggctctctttttccccgctactctctcggttgcgctctcgtcgctaggcagccatgaagaaagaggggcgatgaagatgtggtgcccct

SEQ ID NO: 35354 - DNA, 449 bp, Zea Mays
ccgcagggggtatagtggaccagagctgttacatctgaagatctcgcgccgagtgggtagatccttcacagagcagccaaaaggatcaaattcaacagagcaattattatcagtggtaaattgacggacagaaatcagatccttaatgagggagggggaaactaaaacattgtgaagagaaagattatagggaagacgggtggtgccagtggagataacagggattagatgaccgttgccaacgacaatatgagtaggaagatgctgggaagaggggggatgagatattataccagcgtcagatgtcatgtgactggaggcaccagtatcaaagtgccactcttgttgaggcggctgctgaagagtgacagtttggaagttggcagcgagggtgtgttgatcccagacgggtgcaggcgtagaaggatcggcgtaggcagggggcggcc

SEQ ID NO: 35355 - DNA, 433 bp, Zea Mays
gtgcagccggactagcacgacaagtgtgcaaaatcgaagtcttcttcaaaagactatccgtgcaaaagtcgcataagggtgcagctggactagcacaacgagtgcgcaaaatcgaaggcacattacatccgtgcaaaagtctacatcgagaaactgtccgcgcaaagaccgactacaggcgcagccggaccgacataataaacgtgctagaccaagtgcgcaacgcccctatggacatagccaaatgcgcgaaggtgcatagcctcatcatacaaattatagttacacacgtacaacgagggcctcacaccttacattggttcaaccttcggaatgattcccatctccctatagttaaacaacattatcctcagctcctcaccctcaaaaagacttcgcaactccccctcacctacactcgccccaaacggcg

SEQ ID NO: 35356 - DNA, 285 bp, Zea Mays
ctggtggtggaggtggaggcagaggtgcttgctgctgttgcttttgcgcccttctctcctggcgtatctcctctcgctcttggcgcatctcctggcgttcctgccgcatctgcacgtgcatatccatcatggtgtcagccatctgttgcattatcctcatctgtgctgcaacagctgggtcagcttcggctggtggatgctgtggaggatccatctcaggttgttgttgttgtggttgtctatatatcctctgagtgtgtcgattgggaggtagatcaattccac

SEQ ID NO: 35357 - DNA, 329 bp, Zea Mays
agaatcccttgccagatcctggagtctgctgcttattctgaactggggtggtagcaatcctctgtgggcaaacatttgcataatgtccagtcttcccacacttgttgcaagtagtgcctgcactctgtcctgaaaacttcgtcagggtgctagtgggggtagcctgacaggtcggtggagtcccctgaggtgagtgctaagctgggcgctggcctccgccagtgcgaaatggtgtaccctggcatgaactttagcgtggacgaacactgctgcttccttgtccttgggatatagccttcctcttcaaatctcccagctgaacacgcttg

SEQ ID NO: 35358 - DNA, 428 bp, Zea Mays
gtcgaccaagtcctaatcgagcaactcagcaaggcagaagggtcggtccaatactactaacccacatcagcacgacaagacatgtcaccacctaaccacgtccgggccacgagtgcggcataccgaggggtgctgaaaagtccctatcagacacggcgatatgcccccgcgtacagtcttaggcgtaccctcgctgacttctagggccaggtagccccaaccatgaggaccttcagtgacccacataccggaaatgacggggcgatacaccgtaccgggtgtatgcctacgcatatagggaggtggcgcaaggctcatgatggaacacgaagctacaccacgcacaacaccaaaaaacactgcaagtctaccctgtgggacccgccaagtgccactacatcagcatcgaactcgctacagggacccgt

SEQ ID NO: 35359 - DNA, 418 bp, Zea Mays
ggtgagcacagggagcgtaacaccgacgagctagatcggccggagggggccaagaccggcgctcccgagcggcggacatcacatcggaccaaccccgagctttttccccaacccaattgcatctaagaccaacggaggagctccggccacggtgaccgagaacttggcggctagatcgtcgtgttcccgacgataggggacaccctagttcaaattgatggctcggcaagcatcactgagtaaccagagtgcttaaacaaaggagagaaagcgatgaattaacctggaaaggatgggccgcggcgagcttggttctacggtggcggaaagaaatttgggggaaaactcgaattcgcgctcactggtggatgattgctaacgattagcgggggctggccagctgatgactctgcggaac

SEQ ID NO: 35360 - DNA, 754 bp, Zea Mays
aaaaataggttcactccacaaaaagttagctaaatggtctagatgtaggaccccatacgctcgaacccagatgcaataaattagcgaatttgagagccaaattcaccattacgatgaagctcttcaaaggtgcgccatcaactcaagttcgatggattttatgaaaattgcccaccactattacttaccccacgtttcacatcacttatttctttcacaagtctacccccaccatgatagttagtcgtgcccctccaccgaccggatgtgccctccacccatgcctttaccagtagtgccccgccttgactggtgtgcgttgcccgtgtcgattcaccatacaaccataccgtactcttgaccaatcatgcctcacccatccctatcgcccgccctaggtgatcttctctctctcccttgccccgactgaccatgccctctctccctctctcctaactgctagctctctacgcacctagacatgagtgtcacatctgccctagtcactagcaacaaccctaccttgctcatgcatcaacaacaaacttcaatcgtcggtgtcactagccacacatgcttcgtgtgtgccctagatcgagaggtagaagaatagctacccgcacaccagacatcttcttttcttagaaaaagaagaatgtattaatatttgacatgtggggcctatccttggggaaaaagaggccattccaattaaaatgtccttgtgtggatatggagttggtgcctaagacaa

SEQ ID NO: 35361 - DNA, 572 bp, Zea Mays
tccctgactaatgttctcgactgagggttcttttacagtaatcatgtgaattacacctctaaagggtacatcaacaaactcttcttgcttgggtggtgggggaagctattggtttgcttgctatggtggaggaggcaggtctaatctgtcttggtgctgcaggcatggttgatggggaagactagattgtggttttgtttgtgctgagggtagtatgggtgtttgttttggtagtagtggtggtggtatgggtgtggttgctatgtatgagcgatggatctttggttgtctgctcgggcggctttggccattcggtcattggttactttagtctccaggcagttcattgttgggtgatctgagtcttcaccgtggaaaacatagtaaaatgttcttggctatagatggccctggcctctgcctcttcccctggttgggttgctgttgcggccttgttgcagagggtagttttggcatctggatggacctctcctggttgttgctggtttgcaatgttgttgacttgtacctggccgtgctcgtggttggctatgtcttgctgcgggggcctg

SEQ ID NO: 35362 - DNA, 402 bp, Zea Mays
ttaaaagaaaaatcctgcttgtgttggtattttctagcccttgagtgttctacccttgaatttacacctacagaacttatagacccccacagcttgattgctagacggctagaccaacccaagtctccttgtgcacttgttgtgtaaaaaaatcgtttggtgtctagttgcgcaaaccatgtccaagccatgtttctttccatagaacctatcccgaatcttcataaactttctggtgctcatcctaattcgatctcatgtgactacctctcctttcgcatggatctggtgatctctttccttgtgaatcatgttgtggctttatcatccgaatccctggatcctttaatgattctgccccgttatctggttatctgctataacccgttctcaagtatcgga

SEQ ID NO: 35363 - DNA, 306 bp, Zea Mays
agaatatcaatgcacatttccgtaagactggtgctaaggtagtattcatggcctccagaaaggtgttgggtgcgccagttagtccgaaagccatcacgcgaaactcaaattgacccaaatgagtttgaaaagctgttttcggttcttcgcctggtcgcagacggatttgatgataaccagccttcaagtcaagtttgctgaaccacttagcttgagtgagttcatcgatcagctgatcaaataccggcactggatatttgcctttcactgtgatagcattgagataacgatagtcgatacaaaacc

SEQ ID NO: 35364 - DNA, 296 bp, Zea Mays
gtggtccatgtgtcgtgcgatctagctagtttaatcttggtaagttcttcttgatctgcatgcataggtcttttctcaaaatatgcgcacaccaacactcaatcgtacacctaattaaatacacaaactcacctttcctttttgggttcgtcccgctccggagaccttttaaagcaaactaacaaaccattacacgtacatgagttgacatttatattgtataagaatacgggctacgtactattgcactatgcttggacccccatagtgaactatgctagctaccagggctgaac

SEQ ID NO: 35365 - DNA, 308 bp, Zea Mays
tgctgagctggctcgcttggtcgcggccagattcattagagaggtgttacatcctgagtggttagctaaccctgttcttgtactaaaaaagaataaagtagattggcgcatgtgcgtcgactatacagatctcaacaaacactgtctgaaggatcccttcggacttcctaggatagaccaggtggtggactcaaccgtcggatgttctatgttgtctttcttggattgctactctgggtatcatcagattatcttggcaaaagaagacgaggaaaaacagcattcatcaccccgttcggagccttctg

SEQ ID NO: 35366 - DNA, 468 bp, Zea Mays
ctccctgccgcaggccttgctggtgacaaatgagatctcctggttccccatttactaacactcgagtagaggaggaacacaatagcttagcaattaaattacgccagagtagaccaaatcccacatgttcaagaacttcaaggaggaaaggccacgaaactgagttgaaggccttgccaatgtctaacttcaacaatattctaggaattttctgcctgtgaatagcttttgcagtttctcgaaccatcataaaattgtcatgaatacttcttcccttaatgaatgcactctgattgggggagaccaaattagggaggatttcagcaagcctcttggccagaatcttggtgagaatcttggcaaaactgtgaattaaactaatcggtctaaaatcctttacctccacagcctcagccttttttggtaagagagtcacatacgccgagttaaggagataaagcttggaag

SEQ ID NO: 35367 - DNA, 467 bp, Zea Mays
gtcgtgtggaacactctcagttctcgccaacgctctagatggtaggttctcaccatcctctcaggctcgggacgacgatcaggttcaggagtcttgagttcatgtctctcggtatcgagtacgacatggtactcttcccgcccgtccctctcgagcatccaagctcccatcactgcccttctcatcgcacgaagcaaagatagagcaaccgcaatcgtgccccacagggcactccatgcatagaaggagccacccagggtgatgacggcattgagtccctctctagagacttagccgacgtcaacatttcacccagagtgccgccaaccgcacctgcgctaacattcctggcactacctgctccaacgtgggagtcaccattcccccacaacgtcgagcaaggggcatcagctgcaccagccctctcacccgcgggtcaagaggagtcagatgcaccttggagagac

SEQ ID NO: 35368 - DNA, 424 bp, Zea Mays
ctctaccattcaaagtgaatactcatgaacaataatcatcttaacaatcaaatttctagtgtgatcatgatcatattcaatgggattaacaacaagagaaccatcatcaagagcgaagctgatagtaccttgagcaacctttgattttgcattggccaacttgttctggtaagcggtgcacttatcaagatgtcgattcagctgtgatgttggacccccaggtcgatacacatacagtttgtaacaaaacttgcacttggccttcgtcaccatttccccaaacttctttgattgaacttcgaccaccttaaaatacttccagtaatctgctcgcttcgccctcttgaccttacactttgaaggagataatggaacatcaccctttgcccttttgactcctctctttgcattatgaacttgtgcc

SEQ ID NO: 35369 - DNA, 320 bp, Zea Mays
gggccctgtgccgctgcgccgaccgtctggggaggaagacgccctctgggccgtccgttgtgtaatgagcgacttagattagatctagccgtgggtccgacatgaaccattgatcacagatcatggggctcagatagcacgggctctttaaccacgatgacctgatctgagccgtccggatcagatcgtgcggccctaatttctccataccccttcggccaacctttttgctaaagagtccctgtagtttatagaaatcaacccgccatccatgtgtcactattcactgtgtcttggcggtcttgcgagttagccccctg

SEQ ID NO: 35370 - DNA, 680 bp, Zea Mays
acttcagatggatggaatgcacttctcaataaggtatgttgcttttgtgagaagcatgacattatagtgattgaaatggataaggactacgtgaatccaaaaaaggcacgacaaaggacaggtattagcaatgagcatcattataggatagattgttttttttgctgttctagatctgctacaaaaggagttgaatgatagattcaatgatgtcaactcagagttacttttatgcatgtctgccttgaacccagagaatatgttccatcattttaacactgaaaagttaatcaatttagctaagtgctatcctgctgattttagttacaaggatatggaaactcttgagcgtgagcttggactatatattgacaatgtactgcatgatacagaattctcaaacttgcaaagtattggtgatttggctaaattgatggtgacttcaaaaaagaatttttcatatccattagtgcatcgtctcattaagctagcgctaacactccctgttgctacggcaactgtagagagatgcttttcagctatgaaaattgtgaagaatgccttgcgtaacaaaattggtgacaagtatatgagttattcactagtatgttttgtggagaaagatatgttgaacacaattcctaatgaagtgattgtggagcgttttcacaagatgaaag

SEQ ID NO: 35371 - DNA, 294 bp, Zea Mays
tgaaatgctcgagtctaattttgatcccaatttggtaacaatacacatagctcttatgtcgtgtggtatgacaatggcattgggatatggtagagaactgcacagctacatcataaaatgctggcctggtggttacccagctactcttgcaagtgctttgatagatatgtatggtaaatgtggtaatattgaggatgctaggttggtcttcaagtccatggttccaaaggacgtagcagtatggaacgcaatgatgagttgctatttgcttcataggatgcctaaggatattat

SEQ ID NO: 35372 - DNA, 380 bp, Zea Mays
cacctcaaagtggacctaccgttcatcatcaggaatttctccaagtgaagcaaccaaagcactaacttcttcggcagagggtcgcactctaaggcccaaacctccatcagcagcaggaggatttgacacaaaatgagtaaaggccttggaaggaggcaggttccagaccgagtatgcgacaggggcgccaacatttgataccttgcctctaagtatcatttcaagccggttcaccaagtctatagcaggaattcttctgttggtgacccaggttgagtcagctagacctcggtacagataggccgggtatgccctgtccttcaatggctgaatgttcttgaagacaaaatcagcaaccacaacctctgcagtcagacccc

SEQ ID NO: 35373 - DNA, 819 bp, Zea Mays
ataagcagacccatatcttgatacaacgatcggctgatgactccgagattgaagccgttcttagcatgttagcgggggagtcttctgagtcagcgcagcttgagtcggggggcggagccctcgagaaatcgggtgctaccaagaaaaaggtaagtagccttgcgagtcctaggcgcaaatggtccagccaatcggatgccccgacggatgctccaaaggtcaagcagaagaagagaaagcttcgtcgcacgtcggatatgctgccggtgcttgcacaagccgagctagcacttggcgatgatgtggtggatgccgatctagttgatgatgtggaaggtggtggtgttgccagaccagccagatatgttgtagaggaggcggaggaggatgaagatgaagaggaggagctcccgctggtgcgtcgtgaggtgcgctctaaagctcggagtgatgcttcatcccttgcttcttcagtgaggatgacgaggatccaaggcttgagcatgtcagccgtggactgtagccttgaggaggctgtcccagaggcctttcttcgtgatttaccagaaattcgggttatggatgtttgcatcagccgctcggaagagccttctgcggttggtctgttggttaggccagagataggcccgataatttctcatgaagccttcgcagtggttgatcgcccatctgacctaaccccagcccccgagggtgcctcagcccccgagggtgtagcggtaggatgctcgcctgctgcttcgatggaagttcaggttggatcaccgctgccccgggatgatgacactatagcggcag

SEQ ID NO: 35374 - DNA, 397 bp, Zea Mays
tgtccggtactgcttcatcttccgtcataccccttgcgtcattataaaacatgcataggtatccacccgatatggggtattgtctcgtcctttttggtgtatgggtcattgtagagactctggtgctgaggtctccgcgactggagttgatcggccccacaagtcagtgagggtatatccacgggattacatgggggtgttccatcgtgtctgcttaaggccttttggtactgtaggtacgatctagtcatggtttggtgacgttgcgttttgtcgcggaggtcgtgggccgacaacgttggcccggattcgttccttgcagatctgcttggaagaggtttgttcgttcgcccacctcgcatacttgctcggttggggcttggtcgttcgccctgcc

SEQ ID NO: 35375 - DNA, 320 bp, Zea Mays
tgctctcagtcccaacatttggcgcccaccgtgcttgcttcgaagaccaacctgcgatggctcctaagaaagtaaccaccagggccaactcctcctcggactaggccatgaaggcaaccctcgcttccaataaaggcaaagtcaccttcgccgacaacatcctacccctcacagctgagaacaccaacgggtctgaggcagaaaacaacaaacacccttgaactgaagacccgcctaccttggagggcagcattcacacctacagctccgagagcatacctgaaaaccctcccaacatgcattacctcaacattcatcac

SEQ ID NO: 35376 - DNA, 401 bp, Zea Mays
ctcaattttgggatttgttaggtagaagagtataatgtgaagtcgatggacttatgtacagtgaaatgctaaagtaggcattgatgcctgtcgatgcttcacgtccaaaacttgtgatcagtttgtgacttcgaaatagagttgaagacatgaacaatatggttgaccaatgttgcagacacacatttcatggtacgacatgaactatctaagaaatttagagaccataaagtcacgagcactgacagatgataaaatggaaagataaagggaaacatactccaacaatattccaattactaacacaaccacttgacagcaataatcaagcattactctatttaacatcatcggcaaagacacacttttatctgttccggctttgaattacactgaagtca

SEQ ID NO: 35377 - DNA, 803 bp, Zea Mays
ggtgaatccagtcgctggctggaccggccgtcgtgtcccgccgcgattagtcacgctggcatcaccggagcttgtcgtttttctggccgtgacacgtaataaccactcctccgcgtcgtaaggtttgtggcaagccgtcggttatcgtccgcagaccagttccctcttgcgcgccacggtgagcaagccactgtgaaatatcctagtcgtgttgtcagaacttcaaatcgtgttgtcagaacttctaatgaagattaccatggtacagtgaccaaaaaagatctatgatgccgtgagctcaacgccggtgatctgccgccacaatttgcacccacctgggagatttgtgccgcgggtggagtagataacgtcagggcgatgtgaaaatatccggtgaggggtgaatccagtcgctggccggaccggccgtcgtgtcccgccgcggtcagtctcgctggcatcactggagctcgtcgtttttccggctgtgacatgtaataaccactcctccgcatcgtaagggtcgtggcaagccgccggttatcgtccatagaccagttccctcttgcgcgccacagtgagcaagccactgtgaaatatcctagccagataaccgtgatctcaatcccaaaaatcttgtccagttctatcgggacctatatattgaggatgccctctactccgcttcttagttacacgtacaacaaatccccagctagctcctatcgtgcaccaccgcgccccaatttcgcatttcccccaattcacttttccgcgccttcgtgtgtcgtcgcgccgtggac

SEQ ID NO: 35378 - DNA, 490 bp, Zea Mays
cctgaggtccgggagttgttccttacgggctttctccacaagtcttgctgtctctgagtctagacgttgagctttgcaaatgaggtcctccagcattggtttgacttcgagactgtcgttgtttcccagacatgcatttagttgtgctgattctttcttccaatcttctagaaagttggttccttttattccgaatggttttcgactgagggcgtcggctaccacgttggccttcccggggtgatagtgaatttctaggtcgtaatccttgatcagctctaaccatcttcgctgacggaggttgagatcttgttgagtgaatatatacctcagactcttgtgatcggtgaagacgtggcatttgtttccgattaggtaatgcctccatatcttcaaggcatgcactatggctgccaattccaagtcatgggtggggtaattctgttcgtgtggcttgagtaggcgtgatgcgtaagcaatgactttctcg

SEQ ID NO: 35379 - DNA, 325 bp, Zea Mays
ctaaaattcgtatccatttacgctgtttcggaccacgtcttacgcttaaatccacctgacctagaacccgagcacgatcggagcgcgattttcacgtcgtaatttaggccacattcgttgttacgaaatagattgatgatgtacgataaaatttgtacccatttacgttgtttggttcacgttttacgctgaaatttgaccaagccaaaatctgtgcacgattgaatgtgatcaattttcacgtcgtaattttcggaccccattcgctgttacaaaacagatatatgatttacgctaaatttcgtactcatttacgttgttttag

SEQ ID NO: 35380 - DNA, 322 bp, Zea Mays
aaccaatatctcaacaaattcaatcacctgtcgcagtatgccattgaccaggtgaatacggatttaaagaagaagaactgttttatgcggggactaaatgatcggctacaaaggaaaatggccacatgtatagacctcacgtatggaaaggctgtcagcacagccttatctgttgaagccaagtacacaaattctgggaagaataagggattcagtggtgagaggcctaatcagggccaggcgaagaagcaacggtttgtgattcgaccttcaaaccaaaatcgccctttttctcgtccaccctcatttcccttcaaacagc

SEQ ID NO: 35381 - DNA, 383 bp, Zea Mays
aatttatagcaggcatgagcggtggccagtgaatttggattgggcacggtagcgatcggagaaggaatgagtcactggtgtggtgattcgtggccttcaccgtggcggcctcaccggcgacgaaccagtggcttacagtgactcactacgacgtggtgaaacattgaggcatgtagccaggctggataacggcgaacgccggtgatgccaacgcgactaaccatggcgggacacaacggcggtgagaacagtggccggagtttatctctagcgcgatatttcttaccgaggagcgcttatccgagttcggtcgggcgtgaatcgcaacgccggcacagatctaagcgtgagatcatcggcggcgatgtctctgagctggcggc

SEQ ID NO: 35382 - DNA, 535 bp, Zea Mays
ttggaaagtgcaggggctacggggtaaaactcctaagactcaggaaacagtagagagggacggtgggttggtttctgtaatttgtaggggcttatttgccaatcggccgagccgaaggggtatcgggagtctacaaccgtcggatcaccagtttgcggcccagattagatctaggtttttaaatgaagcagtaagcaacgctgacccttagatcagatatcaacggtcactcttctatctaactgagatcgtcccgcgtccatcggattcacgatctacggctgcggttagatgcggccgaattggtatgaaactctaatccgagccgtccaacgcacatccaacggtgcgcatcaggtcttcctccccctacctagctgagcgacggtgacaaaattttcccacggcggagtaactccggcgagcccccgtgggccgcccactgccccaaaaccctaaccgagacatgctatgcgtagtgtgggtcgatacaaacggcagagacgagtaattaccggcctcgagcgcgagatgt

SEQ ID NO: 35383 - DNA, 340 bp, Zea Mays
gctcgtgggtggtgcgagtttggagatgcgccgtgggaggaagacagagtacctcgacatcccacttaaggacaacatcaaaggatggcgtctggaatggtttattatagagaatcatggcaattatctccccctcgatcagggagatagccagatgttcgcgctccaagttggactgaatcctccacagacttggagatagccgaggccagggttctgcttgccgaggttggcttgttgaaggagaaaggtctgactcctgaagttgtggtcgccgattttgtttttaagaatattcagccactgaaggacagagcgtacccagcttatctgtatcgtg

SEQ ID NO: 35384 - DNA, 294 bp, Zea Mays
aggccgagaggtgaagtccatgcgacagagccaccgatagctcgcgcgcgcagcgcccctcacaaccacaatcgacggatgctggacgagattctcgatgacccatgtccttaccacaaggagatgtgtcacactctgcataactggagagacttcaagaacttgcccagcgatgaccagccctttaatcactccctcctcctctgccccggtaggatcaaggcccgcaaactcagcagtaggggtgggtggaggggagtttcccagcatttacagggaattcaacatcatcta

SEQ ID NO: 35385 - DNA, 655 bp, Zea Mays
aggcgactcgctcgctcaaagtcaaagaagcatgcatcgccatcaccccatcagatcgtggtggagacaacccgacatggacatccattgaggtgtgggaaggagagctcacttggacaccctcgggggctgggttgtagctcgcgccacccaccagagctggatcattaccagcaacaccctcgggggctggttgcagctcgtgctacccaccagagccagatcactaccggcgacaccctcgggggctgggttttctgcaacagccacctctaaggctgaaggatcctcagtcacctccatgggagtcgggcaatcttcaccaacttcttgacatcgaagactgccatccaaagtagacgatgtgcgagacactgctcgggatacctccaatcccacgtctggaatttcagagaaaacatccatcatgtcgccatcagtcggctccgacagcatatcttcaggaacgacatcctcaagggcctgatcaaaatctgttatggacaattcttgaaggctaacaagagcagatagagctggagaaggaatatcactatcccccctactacctctgtaacaccggctattcttatgaattagcgaaacttcttcttcctcttcttcgtcctcatcaaaaatacagataatagccgat

SEQ ID NO: 35386 - DNA, 1033 bp, Zea Mays
ggtttggtgggatttgtgtctgttgagaattcgcttgtcacaatgtatgcaaaggctgagtgtatggatgcagcaatgagggtgtttgggtcatctaaggagaggaactccatcacatggtcagcaatgatcacagggtatgctcagaatggagaagccaattgtgcagctaggatgttcctacagatgcattcgtcaggatttacgccaactgaattcacctttgttggggtactgaacgcatgcagtgacatgggcgcattagtggttgggaagcagacacattgtttgatggtgaagcttgggtttgaaacgcaggtttatgtgaagagtgcactggtggacatgtatgccaagtgtggttgtattggtgatgcaaaagatgggtttcatcaattatatgatgttgatgatgttgtcctttggacagcaatgattaccggacatgtgcagaatggggagcatgaggaagccctgatgttgtattccaggatggacaaacagggcattatacccagttatttaactgtaactagtgtacttagagcctgtgcatgccttgcagcactggaccttgggaagcaattgcatgcacaaatattgaagtgtagatttagcttggggggttctgttggaacagctctgtccactatgtattcgaagtgtggaaaccttgaagatagcatggttgtcttcagaaggatgcctgatagggatgttatttcatggaactcaattatttctgttttttcacaacatgggcgtggaagtgatgcacttgacatgtttgaggagatgaagctagagggaacggcaccagatcatataacattcattaatttgctatctgcttgtagccacatgggcttagttgacagaggctggttttattttagggcaatgaccaaagactataatttaattcctacacttgatcactatgcttgcatggttgatattcttagccgtgcaggccagttaaaagaagcaaaggacttcatagattcgataactattgaccatggtacatgcc

SEQ ID NO: 35387 - DNA, 349 bp, Zea Mays
gcaatctacgttctggatttaaaacactcaagaccgcatctgcaccaactatgatcaatccagtggcccagattacttctacaccgtgtcatgctctggaccgtcgatctatccatcgaccgcccacaatgtctcttcctaaccgaagtgcccaggcggcaaagctccgcccaatctccgatgagctcgccggagaaatccaatccgccgcgccagtggatagttcgcgcccgcatccacgtagaaccaaattcgctactacccgatctgattgagatgagttttatctcggattgcggtcacagcggcatggaccaccacgatccgtgactatggtgtagcggcggcg

SEQ ID NO: 35388 - DNA, 514 bp, Zea Mays
acactagagacaaattttatgtcagtaacgatctgcacatgaaaatatctgcttccctccacaaagttgttgtacagatatagtttatataacacatagaggatgacaaaaaggaataaacatagcaataaaccctcgggtgcaacatgcaacgttaatagcttttctgctgcaatctcagcatttttttttcaccttctcactatcaatctacaattctacattctctagacctccctcaatctatagttaggacctgttgcatctgtcatgggaatggcattgtaacttgtaagcagtataacattttatgtatttgtttacacattcaatagatggcaatgtacaggtgccatttacaaagcgagtgtaccaacagtaaaatcaatgatggaaggttttaagtagggtagaatcatgaatagtagtacagtttttttaattatcatccacagcacaagtaataagcacttcccttccatggattaggtgcagtgacattaagggatgttac

SEQ ID NO: 35389 - DNA, 279 bp, Zea Mays
ggtgcactggacgcgtaacaacctaacggagctcactggggcattgatttatagggtccatcagcggtggcgcccaattactggttagcctccatggctcaaagcgacgtggtaaaacagaccaaggcatggcacgaccgaatgaacggtggcagccatggcgatgaccgtgcggccacgtcgtcgggcaagtgggcacggcgatagggtgaaacagtgccccaagttcatctcatgtgcgatatttcttaccctgtgtagttatctgcactccaccgg

SEQ ID NO: 35390 - DNA, 370 bp, Zea Mays
gcatcgcaaagaaataaactgcaataatttacatattcaattcaacattacacactccaaatattacatagttttgttacaatagaaacctaatcttccttcatttgttatatacatcaagcttttcaaaatgtttattacaataaaatctattcctctttaagaactttctctgcaacttcgttcagcaatttgttgacgacttcgtcgacaatggattcagccatgtttatgatgtccagcgcttccttcattttaggatcagctaggggatcgaacggttccggtggtggagataattcagctgaagtaggaaaaattaattagtccgaagccacaaaagcaaatgccgaagctaaaaaccaaaaaa

SEQ ID NO: 35391 - DNA, 393 bp, Zea Mays
ctttcagagaagatgtaccatttgtccttgtgtcacagcgaaagagcttgccacagtacctacacttggctctgtcttcccctccttcagttctaactttgctgaaatgttcccatacatctgaccttggagcaatagctttccttttcttgccatcctcctctgttggtgcatcattgggctgctcttccttgcctttgtctgcatctgtcgctcttggttcttttgcgttcacttcattaacagcaacatcatcagtgtcccccatctacaagataaagtttgaaaataaaaaatcagaaatctattaatagctcaaagaccacagtttacatcaacactacacagaaaattgagatgagtagagtagagtagaggtgacgtacattggct

SEQ ID NO: 35392 - DNA, 499 bp, Zea Mays
caaaagatcaccacgaaggcggaggatgatgcaaagcaaagaaatgatgcgccaggtgagatgcaaagtgttcttccccagactgatccgggggaggaacacttcctgaaggatcctagggcagaggatgagacgaggattgacccggatccccctggtagggaggcggggcaaactgctcacgatcatcaaagtatgtttcttcttcttcatcatcgtcagctaacataaaaggcaccccgtaggcctgctggtgccactcattgatttctggaggaggcggatggagaggcacgtcaggcgagcgaggggcaaaaggcatacccatagaggaagcttgacgacgaagattgtcgtcagtctccctctgacgccttgccagctcatgcacatctgcagaaatattccggcacatagaaaagaatgttgcaatcccatgggccaggcgggcacccatccctcggccacgacctcaaccacgaccacgaccacgtggcgt

SEQ ID NO: 35393 - DNA, 370 bp, Zea Mays
cgcagttcacctcaaaattttggaagagccttcagcaagctatgggcaccaagttagatttcagcaccgcttatcaccctcagtcagatggtcaaacggagagggtcaacaaggtcctcgaagatttactaagagcatgtgtgttgatgttggacaggaattgggagtctagtttgccgtatgtcgaattctcatataacaacagccatcaggccagtatcaagatgtcaccgttcgaagcattgtatgggcgaaagtgccagactcccctaatgtggtccaatgtaggggaaaggacactggaaggacccgactttgttaaagaggccgaagagaaggttgccctgatccgcaagaagttacttgaagc

SEQ ID NO: 35394 - DNA, 820 bp, Zea Mays
aaaaaatagggcagcaacaaaagtgatacaatccatccacaataatgtcacaacaagttcaaactggagtaaaaaggattaaacagatacatagtagcactgaaaatgggacataatgctacaaaaaattacagatcctagtgactcatcctagtgacccaatcatgtttcattgtaagccagttgaagcgttcttccggtgtatccaaagtcataaacatctccctctctgccctcttgaaaaaaacttgagatgctatgaagtgttcttttgttcctggaactgcaccacactccttcaccagtgccatggcatctctaatggagcacccattgtcctcctttcttgccaaagactcaacagatgttgtgctcttctcacttgctgtcacaagtttgctcaattgatcttgcacccaatgtcctcctaatgacctgggctttttacccttgtcctttcgaccaacagaaacatgacgctttcctttagcagttgtaggggaaacctcttcacattcttcatagtcttaatccttatcatcattggcctcatagtctccatccttgtcatcagtgttctcagtgggttcaccctccagaatttgtggtgtagtaccacttgacagagcccaatgatcatctcctgtgttcctaatatcttcatacatgatggctttttcttcctcatgcaacagaggcccatctttaaacgtggcaattcctttgtattgctacacattaggggaaagaagatgttagacaaacacaagatgcaataaagacaattatccaaagttctattaccttattcaagttcttc

SEQ ID NO: 35395 - DNA, 339 bp, Zea Mays
aacaagataagttatgcacaaaagaacttaccgtggaagtggttttggcacgcttcttgcgtaggttgtactgaataggtgcagttctcttgtcacgcgtaggtttgtccggggaacaagaatcagtgaatgaatgtgctaggttgggcaaacttatgcaggaactgcgccgaaaaagaagagtgatttaatacattaaaatggaggcacgagggcagatagcaacagtaaaatggaggaactaagcagttcacctagatctggtgtttggcgcgtggtgtgcagagtcaatggtcgagcccaccgcctacttcacttcggctaggacgacggagggag

SEQ ID NO: 35396 - DNA, 407 bp, Zea Mays
aaaaaggtttagccgcgggtgcatttcagttgaaaattaagtttggtattgcgatgtgtagttatttgaaatttaaatctggtcaatgttgtggtgtattggttttttttgaaaggaatttggcattgtgcacctgcaaattggaatgaagtgcgctggaaacagcaccagaacatgttcccaagccgtgctgacgcttgaacatttgaagatagagatctgatgatcatgcagcatattgcttttttataattaatgtccaatgacctgtctttgttatcgtatataaacataatactgcatacattcttcttcatgaaggggacaggtttggtacaacgacaagagctgtctcaggttcaaaggctttgccttggtttatatcttcttcagcaccgggtctgccc

SEQ ID NO: 35397 - DNA, 283 bp, Zea Mays
cgaaggggtatcgggtggttagagtcgtccgatcagaaagcaagggctcagattaaatcttttcctcgcctgaaccggtacacgatgattaccataggatcggaaatccacgaccgttatttaatggggagaaggggtatcgccacgatttaatctcgaccgtacattgcaagatctacggttcccaggtcatcttccacctctcgtctgaaccgtggggcgagggaaaaccacgacggttgcgctattgccgtggtaggtgatctagcatcctggtggttcc

SEQ ID NO: 35398 - DNA, 344 bp, Zea Mays
ggcatgtcagaacaatccacaatcctagtcaaaacaaagacaaaaacaatcataatcaagggcagcatcacagctcccagtcaacaggggcgcaatagagctccttcagaccgccagccccaagaggcagcggaggacgaagctttagcggaagatacaactctcaaccaagaagacttttctgcttattctatggagaggacaaggggcatacaataagaacctcccaagttacgatacaaaaacagaaggaaatagctgaggtcgaagcacgcagaaccaaccgaagcaagttcttcacaccgcttcgtgctactccccatacatcccagagtatgtgggta

SEQ ID NO: 35399 - DNA, 446 bp, Zea Mays
aattggagacctggaagccagggtggaacaacttcggtcagaactacgccacagaaacagggcacgggagcaggacagtcagcgtatagctgaattgtcaactgatgttagccgctcgcaatatgagatttcataacgggattcggccattgattgggccatcaactcacgtttgatcgcttgggaccgcaaagccaaagctcgagctcgtgtggcagagcttagtgcggccctcgacagcctgcaagtgtactgtaatactttacatgaagaagtacatgtactgtatgctcgattgcacccgaacgtgccttccgacgttgctgcaatgggagccagaccatcgggaacagcaaatgaaggacctgatggggagttggacctttttaggcccactccttccatgaaccttgctgacgaacggtctcctgcagcaggaaatgaag

SEQ ID NO: 35400 - DNA, 288 bp, Zea Mays
ttcggctacatatttcgatggaatgagtatggcaaagctaggatcctcagggtacaactgataagcactattcccgagccaatcttggaactccacacactcctaagcactattcctaaaccaaaatcaggagtagctccctggaccaaaagcaatcccccacgactgggaaaaaagatccagggagcctttgcggctaggggtcgggaaagaagaaatcccttggcttcccataactggataaacatgagggcatgaccactttctttgtcttcatgcagcaataac

SEQ ID NO: 35401 - DNA, 382 bp, Zea Mays
ccaccacaaaacctcccgccgccccacggaacacgggaagagagagagagagaggagcaaagtcagcaaacggtgcagtgtcgaacgcaagggcggcgagtagtaacaacagcacgagcagcggcgagcgggcgagagcgccaccaggcaccagcagacccctcttgtctctctcaccacgcttcctctccctcgttgctttactacgccttctctcctttgtctcttccctcctttttcacccggcgacgtcgagcgagaacggccgggccccaaaagaggccgcattcttggtgctttctgaaccttctttactttgtcctcaaatggcctcctcgctctcttcacatctcccttcaccataggcacaggcacctctccc

SEQ ID NO: 35402 - DNA, 303 bp, Zea Mays
cttttcggtgatctgccaacaatggtcaaggttcacaaactcctcaggagggatccttcctttcttggtgaattttcatttggatggcattcctgtgcatgcttgggaggttgccacggtggaacggctgctcaatccctttgcttcggtgttctgcgtgcagtcggacctggatgaccgcacctcttttcgttgttctgcatggtgtgttgatcccgctttgattccagattcaagggagttatggattacagaacccctgcagtcgccagagaatgctggtcaagggttcagaactctaat

SEQ ID NO: 35403 - DNA, 277 bp, Zea Mays
ggaacatgcaagctctgcaggaattgtcagagatcgaaatcaatcgtcacacaccagtgtcttccttgctggaactgggcaagctgacgaatttgagaatccttgggataaactggtgcatcatcgacgcagatcatgatgcaagaaaggtccacgcggacagtttggttacgtccctctgcaagttaggcgtgctcagccttcggtcgatacagatccagagctaccacacctgttctctggacttcttgcaggattcttggttcccacctcctcg

SEQ ID NO: 35404 - DNA, 765 bp, Zea Mays
ggtccttctacgagaagccaatgagtctggtctgtttgtcgtttggggaagaaggagagcgggggtttttgcaagaaacaatccacatcacatgacaggctgcggggggttaagtgttaaagtagcggtgaccatcggatcgtggttggagggacaggatgggagatgtgcatatgtgcacagccgtaggcatgtgcataagatacgctgcctttaaactattctataaaacttttgtacaactctaatgagattttcgcgtttcaaaacggtgttaccttgcaaaaaatagcaaacgtagtagattaaccgattttttataatataagaagatcaatcgatttgttgtatatcagcagtgacgtgctatgccagaagacagacgtggtgttgcctgttcccaatcaggtccccatcggttcaggaggcaggagtcaggacaggacgtcagaacgtctctctgcgtagatccctgaggtggggtcgggcgactggccactggccacaccggcagagctccactcgttcgttggcccgcgacccaaatccgctactagagtcgaacgccgtctcaactctcagactatccgcagccgttccccctatatttttccccctaaatcttactatgcagccacgtcagcaagattccctcccctaaatttactcgttccgcaaccgttccccctaaatattcccctacatatccctctactcattaaatatacatttccctacaactaacataactaacttgttttttca

SEQ ID NO: 35405 - DNA, 849 bp, Zea Mays
agaggatatagccaagggtgaggtaagtaaaacactgctctcacattgagataggagattggagattttagagaacggacatagtgcaattaccaaggtaagatcaagaggtgagaaaggtaaaggtaatacccaactggagcacgacaagggatggagttaaaaactcgcaagcgacaaggaagagaatacgaccaagggaaaataggtaaaatacaactataaaattgagatggaagagagaaggttttaaaggacgggtataatataaaaatcaagttaagatatagaggcgacaagggtaaagatgatgatcgtgaaatcataaccaaggatagagttaaggcaagactctcgaagtggcaaagttgataagacaatcaagggtgagataggtaaggtcccaacataatggttgaagtaacagaaattattaccgagggaagttatgaggaaacggtgagatcaccaaggatgtgcgaaatagaatggtcgctcatggaccatcaagaagcaagggtgatcaagggcatattaactgaaaggttttgaacagtcattgggatatgaaggtaagaatatataaaaatattagtatgcaagattccagtagtacgagtgtaccaagaccaagggaatagaataggctaaaaaataacggcttcacaacggaataggaaggggtctcagaagacaagaagttcacgggcatataaactgaaatgtctaagttggcagtagaaattcagatgtaagtatttgaaacaagagtattaaagaattcagggatatgagtatgtcaataacaaaggaataaggattgccaaatggtagaaatttaatgatgga

SEQ ID NO: 35406 - DNA, 954 bp, Zea Mays
ctatatgctcatatatgtcgatgatattattattatcagctcttctgctccggctactgacaagttaattgcacaattaagggatgattttgctgtcaaagaccttggccaacttcattatttcttaggtattcaagttcatcatacatctgatggtctgtatctcactcagaagaaatacattcatgatttattgtgtcgaaccaatatgcttgaggccaaaggcgtatccacaccaatggtatctgccgaaaagcttgtgaagacagggggtatattgctctcgtctgaggatgctaccagatacagaagtgttgtaggtgctctccagtacctatccttgacccggccagatatctccttctgtgttaatcgggtttgtcagtttatggcttctcccacagtagatcattggacagcagtaaaaaggatcttacggtatcttcgggcgaccatggacatgggtctttggttcaccagatcatcatctttcctcttaagcgcatttagtgatgctgattgggccggcaatcttgatgatcgacgtagtactggcgggtatatcatttttcttggtggcaatccggtctcatggagttccagaaaacaatcaactgtctctcgttcaagcaccgaagctgagtataaagcggtcgccgacgccactgcagaacttatttggattcaagtgttgatgcgagaacttggcattactctcagccgtgcacctagtctctggtgtgataatattggtgcaacatacttgtgtgccaatccaatctttcatcgccgcatgaagcatgtagaagttgattatcattttgtccgggagagggtcacccgtcgccaacttgaagtccgctctatatcgtcgaaagatcagctggctgatatcatgacaaagtcgctctccagtacgccattccaagttatgcgggacaatctgcagctagc

SEQ ID NO: 35407 - DNA, 504 bp, Zea Mays
gcttatcttcttcccccatcttcacgcaactgagtctgccgtcctcgcgggattgttgcgtgctgcgtgtcgtgatcctctcgtggctggcaataaaacccaattgcgtcgtcctgtaacccatcggtgctggcgggcggaaccacgaccactatcggggctacggccgcacagatttctcctcgtgctgtctgcccatctcacaaccagccatcttctcctccacggtactccctccgcccatcccctacctacaactcacatggcgctctcctcactccacgaacggctcctccacccagtaccctagctcggcctccatggcatgcgacatctcaagcgctggctctctctctccattcaacactctagtgccccgagctccctgcaccgaccacttttccccatggccgccagctcctgcgcctccctctgctccacacggccagcatggcagccgtatgctgaagatccatggcgagctccctcatgccctcgacttcc

SEQ ID NO: 35408 - DNA, 388 bp, Zea Mays
agggggtatggaaagagctctgactctgctggctgaaccgtgacggggtgggtccagctggtctgctgaagtttggccccttgggtggaaacccaaatgatcgagtcttctggtgcctgtcctgctgctgtgcttggagaacctggaactttcttttgagatgccctttttcttcctcctttgccctttcaacttgcatggctttgttggaaaggtgagagaaattgaggaagtcttggctagccagaattgtcttgagttctggcctgagtcccttcaggaaacgggccatcttcttgcccttggtactgacgtcatctggcgcgtagcgggctaactctgtgaacttgtgcatatattcgctgacagatcttccatcttgagtcag

SEQ ID NO: 35409 - DNA, 534 bp, Zea Mays
caggaacgccaggagatgcgttaggaaagagaagagatacgccaagagttgcgccaggagagagaagagatacgccaggagagaagggcgcaacagcagctgcaacaacaatttcaacagcaacagcaacagcagcaagtaccattgcctcctccaccaccaccagttccacctcgtgataagcaccgggaatttatgagccataagccatcgaccttcgccagttcgccagatccacttgatgcagatgattggttgaagtcaattgagaagatgcttaacatcgcccaatgctcagactgggagaaagttctttatgcctcgggtcgtctgacaggtcctgctgttgactggtgggattcttatactgctgcccatgatgctgctgatactattacttgggcagagttcagtacgcagttcaagaactaccatattccagctggattgataaagatcaagaagaaggagtttctatcattgaagcaaggcaacatgtcggtcagcgagtatagagacaaatttattcagctg

SEQ ID NO: 35410 - DNA, 290 bp, Zea Mays
gcagggtataacaatcacccttagtcatgtatgcatgagcatgtcacaccgacttatggcgtttccgattttggccgattgctccgttagtagggtttagtaatcacccttagtcatgtatgtgtgatcatgttgcaccgacttaaggcatttctgacttaagtcaattgctttgttaataggctatagtaatcacccttagtcatgtatgcgtgagcatgccgcaccgacttaaggcgttttcgacttaagccgattgctctgttagtagggtatagtaatcaccctta

SEQ ID NO: 35411 - DNA, 545 bp, Zea Mays
acagaccaaatagttcattacataaaagatagttcagcccctacggccactttccaagcaaccaaacagcaaacttctccccctttttggcagcgagcaccaaaaataggagaagggatgaccacaaattaccgcgatggagagggatcaaagaaacgagcagccagattcacagcgaagttttcctccccagggttagcaggaggtgtgttaccagatggatcctgtggaggaggataagaagaagaggggcccaggtcaccttggtaaggaggagggccaaactgatccacatcatcagcaagaaaatcttcctcaacttcatcatcattagcagacataaatgggacaccataggcttgttggtgtcattcatttacatcaggatggggtgcatgaagggacacatcaggggagcaaggagcaaatgggtgacccaaagagactgactggcagcacagattgtcatcagtctcccgctggcgcctagccagctcatgcacatcagcagagatggccagacacatggagaaaagagttgtgat

SEQ ID NO: 35412 - DNA, 586 bp, Zea Mays
ctccgaagtctacatatgataggtacatttcacttataactcttttgcttttaatgtcggagtataatgactaattaaaattttattttgtagtagccttgtacttgtgtcagttagtggcatccaatcttcaagtgtgccaagtggagaaggtggaccatccgctgttttagaaacacaaggtgcagctcctagtggagaaggtggaccatccgctgttttagaaacacaaggtgcagcgccaagtatagaaggtggaagacctcttttattactaggaccatccagtgtagcgccaaatcttccaactactccatcatgccatggcactggtcctagaatgcttaaaaagaagttcacaccaaaaaaaaaggaaggcatgagtacctgatatgtaagatttgaaatatgttgtgtgaactatgtgttatttgagaccatgtgaagtgtaagatttgaaatatgttgtgtgaactatgtgttatttgagaccatgtgaagtgtaagatttgacatagaactgttgagctgcattcccagttgagaccaacaatctgttcatttgttatctgttttttgatctgct

SEQ ID NO: 35413 - DNA, 317 bp, Zea Mays
ctcgggctacaggcgcatggactgcgggctatttcttctattttccagggggtctttaggaaaaatacccagccgaaggggtattaatgtatctcgcctgttggatcagatccaagggccaagaacagatcacgtttacacaaccgcgtcgtgcacctatcgccctacgattaagatccgacggacatggtttaatgcgatttgaaccatccacaaccccacgatcagcaatctacggttcagatcaagtccacccaaacggtagactacatataatcctgcccatccgttccctatccaacggctcatgccacact

SEQ ID NO: 35414 - DNA, 666 bp, Zea Mays
gggaaatctatgcgaagctcttcctctctctcccaagtagcttcatcttcaccatggtgactccattgaaccttgcacattttaatcaccttattccttgtaactcgagtcaaagtgtccaaaatcttgatgggatactcagcataggtcagatcatcttgaacactaaggtcttccattggtagctgctcctcaggtaccctgaggcacttcttcagctgagatacatggaatacatcatgtacatctgacaggtgatcgggtagcttcagttgatatgcaacttctcccactcgctttaagatcaagaaaggtccaatgaagcgaggggacaactttcctttaactttaaatctcctcataccccggattggtgacaccttcagatacacatgatcaccctccttaaactcaagtagtctccttctattatcagcataactcttttgcctggattgtgcaatgctcaaattttctcttatcattcgaacttgttcttctgcctcttgaataagttcaggtccaaagaactgtctttctccagtttgatcccaatacagtggagtcctgcattttctgccatatagagcctcaaatggtgacatcttcaaactggcctggtagctattaaaactcagcatagggtaagctcttctcccaactgcc

SEQ ID NO: 35415 - DNA, 295 bp, Zea Mays
gcctgtagatgaaaaaaggaagtgttggcatctccctctttcagatatttgatccgcgatctaagtctagcaattgtcctttccagagaagcaagccctaggcagtggtgcttaagccttcctttcagccatatctcgtccccacacaacagtctattgtgttgagcaatctcaagtctgtgcaaaatttccctggccaagctaagctgagatttaatatttccgatccttttatgactccacgactgcaaagcctttgcaagccttttcaactttagagccattctttccaagg

SEQ ID NO: 35416 - DNA, 646 bp, Zea Mays
atcaaggacaaggtggaagtatacgtcgatgacatcatagtcaagaccaagagagggtcgaccctagtggaagacttggccctggtcttcgacaggctgcgggcaacccgcacaaagctgaaccccaacaagtgcgtctttggtgtctccgcaaggaacttgctggggttcctagtttcgtaccggggcattgaggcaaacccggagaaaatcaaggcgattgaagcaatgcgtcctccggcccgtatcaaggacatccagaaacttgcagggtcattagccgcccttagccgcttcatttcgaggctggctgggagggtgctgcccttcttcaagctgttgcggaagtctggtccattctcttggactgaaggggaagaacaagccttccaagagttgaagcagcacctggtgtccctaccaatactggtagccccagagcttagggagctgttgtatttatacatcgtggcggctgccgaagcggtgagcatggtgctagtcgtcgagagcatggcacaagaagcccaggaacccaagggctcgggaccggctacaggggtctggaccgttcagaagccggtctactacgtcagcgaggtcctccatgaggcaaagaccaggtaccttgagacacataatcttc

SEQ ID NO: 35417 - DNA, 326 bp, Zea Mays
atcgatagggacggtcgggtcacaatcgccactaccctacccactagtacatactagagcagccgatggcctcctcctctgtttcgctgctcgtcacgatcatgctgctgctgccgccgtcacatgcatgctcctcgctgagttgcaggcttgacttcaccagcgtggcgctgctctcctgctaggagacggccccacaaaaccctactgcctcatgctgcgacaccctcctcttttccatcgacatctgaccaattcatgaactagaaaaaggtctttgttgcctatgtgtgtacatggtttcaaggaacactacctttgacctg

SEQ ID NO: 35418 - DNA, 470 bp, Zea Mays
gacgtaacctccatccccgattgctactcctcgtacgcggggatataaccacatgccgcccctcatctctgggccatatcagccatctactcgaagaccttatgccatgaacacaacgagcacagaagagattaccgccgcagaggaacccggttacaccgttgttgaaagcctgctgacggatcagggagattcgccaagaccacaggaagattctcatggcctaactgagcattattggtgattggtgtgctcaagatctagtggacgtcgacgatagccgcggggctactgcgcgacatggtttccagcatctacgacgtgtcgctcggtaagaacctgtcccactaatttgtctggagctctagagcatttagcacttaatcgcatgatgaatcgagcaccagaacgccgacgtgcagacagagcgccgcctcaggtcggagcaaaaaggtaggagaagatctcag

SEQ ID NO: 35419 - DNA, 326 bp, Zea Mays
ctaggccaccctcactcatcgacactgccaggctgcctctctatgccatgcccacacaccgtcgtcgtagcagttgccgctgcagctagttgtccaaggtcacaaccattcttgtcgtcgagtttgctgggcaaataccgccttggtttccccgcatccacaacatggttccattagcatctgcaaggtatccattagcatcttcccaagtatcattgccacagttctgcatggatcgaggactgccaccgtcgaaccccattcttgaggcccgcaccaaccatcgcagccaccttccaagctttgcaccaaggtaaggaacacac

SEQ ID NO: 35420 - DNA, 422 bp, Zea Mays
ctgctggcaatactgattttgtggcggcctcaaccgttatgcctgccgatgataatttatttggctctggatctgagtgttttgagtctgatagtgaatctgggagttcgttttcctggacggaggagtcctcggatgaaggcttggattattttgctgcgttggatgtggtcgcagcggagtcttcaccacgtggagggtgccagggctgctgaccttcctagtgcgagtattgagtacatgcggcgaagggtggtgtcgaaacacagtgtgggtgagttttcgcgaagtggtaggcgcagtcgtatggggatggagcgtggccgtcttcgagtagaccgggttggtaaacgagaattattgtcctcgccgattggggcgagcataggtgagggggatctgcagaatctttttgagggtga

SEQ ID NO: 35421 - DNA, 319 bp, Zea Mays
aaaataaagatatctcgtctaatctgatctaatcatgaaccgtccaagctaatctatggatcgtttagagcgcggaccgtctagatcatatggaccgaccgttcgaccttccaaggtgtcatatacggtgctgagcatataggactgtggatcattggctatcggacacgtattctgcaggacgaggagcaggacagagcagcaccgaggaacacaaaggcaggtgttgggttacagcgtggagaagattccatccagcatagaagcacctgtgacagcgcgtcctgttcccctctctctcctagtcgtatttgtatac

SEQ ID NO: 35422 - DNA, 304 bp, Zea Mays
tgaggttgcgggttgattgtttgggaacttgaggactcatatgcaaaactcacaggccgaaagggtatcattgggtctcggccatccgatcaaatatcgaaggccaggattagatcttggctttatcgaaccggtacgcaatccaagccctcggatccaaaagcaacgtcccagatttaaaacccctaagaccagatctcacccgatcaatccaaatcggacggtcgagattcagaacgctttatcgttatcccatgacttgatctcggccggtcccggccaaatcaacggtcgtagtccatcg

SEQ ID NO: 35423 - DNA, 422 bp, Zea Mays
cttgtagacaaatctgcatattttctttgccatgttgatgcaagtgttgaatttcttgatctttccaatgtccgcgaacaagaaatccaagcatctcattagatcatgatccctcccatgcttgtagacaaatctgcatattttctttaccatgttgatgcaagtgttgatttattgatctttccaatgtccgccaacaagaaatccaagcaatgggcagcataagatgtccaaaacaaatgtgggatcctctccattagaagcctcctgctgccttgaacttggctccattgtcagtgacaatctgcaccacatattccttctcaaccttatcaatttgcttccccaacaagtcagccaaaatatgtgcatttgctacctcacttgaagcatcaacagaccctaggaagaatgtccctgct

SEQ ID NO: 35424 - DNA, 347 bp, Zea Mays
ggagactcagtaacgcaatatctcaacaagtttaatcatctctcccaatatgttatcgaccaagtggacacggatttaaagaagaaaaattgcttcatgaggggtttgaatgatcgactccagcacaaaatggccacatgtctagatctcacctatagcagggttgtaagcacaacactgtcagtagaagccaagagttcgggagaaggaaaaacaaagagatatgggggtgaaggatcatctcaggggtctaaaaagcagacaaggatggtaattcgtcccttcaacccaaatcgtttttctcctcgtccacccacatatcccttcaggcaacaagtgttcatctg

SEQ ID NO: 35425 - DNA, 348 bp, Zea Mays
ctcatgcaccacattcctggtctctttagcatccttaaaaaattgatcgcattctgattggtctgtgaacctatagatgtatttatccccatatatactgctctgcaagatcagattggacttttgtttatctgtcggcattttaatatcaagagtatatatggatctcgacatcacaatgtcgtggtttagtggtgtcgcttcaaagggctgctcttctgtcgtactgctaagcataaaagcaatgtgtttatcagttttgtttgttaggtgcagtaagcaagggattaagttgtcgtcttgaaaggataagtgggccttcagcgggtggatgtgatgaatctcact

SEQ ID NO: 35426 - DNA, 341 bp, Zea Mays
cccgtgttcttcttcacttccgaccgccgcgcgtcagcgcccaaattcacagtcaccgacgttgagccctataaattgaagcccccgctagcttcgcaacatcatcacccacccagccaccgagaatcgctagcaatcgtccaccagtgagctcgaatttgggatttcccccaaatcagtcgaagaacaccgtgaaactaagttcaccgtggtcagccctccacaggtcagcccctgtcctctgcttcctcgtttgagcactctcacagctctgtgatgcttactgaaccctcaatttgcacggagtagccttagatcgccgagaacaccttcatccgtcc

SEQ ID NO: 35427 - DNA, 484 bp, Zea Mays
aagaaccgagctcgtcgtggccagcaccgttcaggttagttcatgccgccctctccctcgtttgagcactctcataactctgtgatgcttgctgaaccaccaatttggacagagagcacaccaatcgccaggaacacgagcaaaggtccttagccttcgctgttctcgtggacagggcagagtaggtcaccaaccgtgcaattaacttagggaaaatgctcggagtaggtctaatttggtgtccgccgctcgggaacgccagtcattgccccgttaggccgatctactagctcaccggagctccaccgtgctcaccgtcgtcgtggacctccccctgcgaagaattagaatatggagggtttatgtgcaaaccgtcagtgacacaatgaaatagtaaaagaacccgttcccagttagccaaaaccccgagggcgtttctgcaaaatccccaccgtaggcgcgggcgcgcgcacttctgctgtgg

SEQ ID NO: 35428 - DNA, 718 bp, Zea Mays
aagcctagttgttaagaagaatttagagataattaagctcaaagtcgggctgtcagtcaatccctggactgaattttcagtaacagtgtgatgggatgaactttgagctcgattttgaatgggattcagtgactatttgatggtaagcattgtggcaaagttgaagattaactatagctctacaactttggtacagaggtttgatgaagttcacatgcaaattttagagaaaatgtgacctaaacatgatctgttaggtgctctgatgaggtctcgccttggtacagtagaccaaagtggatcaggttgccagcgcggcttgctcgtcgacggcgacctccctgcgcgaaggttcacgccgccgccgtgattcgtgttcactggcggttggatagctacggcaaagaaaagatctcatggcgaggaagggataggatcgcgtcgtggatattttcgggttgtcgtggcctcgcggtatcccgaccacgtgcatcgacaacgtggccgtgcggccgtcgccgtagtttgcatcctccatcgtgattgtgccacgcttccggtcagtgaccacgtcgccgtgaactatgatcattacccagtgactgtcgtggcttctcatcccgtgaactgccacgaatcatcccgccggtgactcgcttcttctctgaccgccaccgcattcaaccccaaattcccggccaccgctcacttgatctat

SEQ ID NO: 35429 - DNA, 530 bp, Zea Mays
tttggatcgattttggttttacggcttcacccgctgccgtggccggagatctcacatcactacaccagccaattttatcaagctcgctcgccgtcacactgcgccaccagcggcgatcccgccatggcctcctggctcaaggtcgccgaaggtacgaaaccccgacggcccaacctccctcgcactactcgtcgcccacacagatccatccctctgcgtcggcgaagatatgccgttctcctctcaatcccacaactctcgtactttccccgcgctgattactccgtgagactagtattgcctccatctgtggtaggtgtgctctgtttgatcatattctgcccgcctaattgcacctaactgaaacccagcactgtttccgtctgcttgattgcaccgtgaggagtttgctataaggaatctgagcatggtgatcattttttggtaatagacttgctcgaagtcgtcgaccggagggccaagatcgtggcaacagaactgtcggatgagcagtctacctctcagccttc

SEQ ID NO: 35430 - DNA, 624 bp, Zea Mays
gtgtttcattagatgtggctgcagtagagccttcgccgcgcatggaaggttccggtggtctcccgggtgcgagtactgggtataggcgacgaagagcggtggcgaaacagagagtgagtgaattgtcgcaaagtggtaggcatcatagtattgggatggagcgtggccgtcttagcgtggaccagaatggtatccgagaactgttgtccttgctgattggggagagcataggtgaaggggagatgcgaaatctttttgagggtaaggaattgaggataatgatgttcaattacagggagatgggtatcatcacgaaagttgagccaatgtaatatatgatgccctcgctgtgtgtatgtaacagtaatttgtattatgcggctgcgcgccttcgttgatccggctgcgcccgtaggcgacttctgctttgtaatatacttggacttttgtgcacttattgtgctgttccggctgcacacttaggagaattttgcacggagagtcttttaggaaaagacttcgactttgcccacttattgtgctattccagctccacccttaggcggcttttgcacggagagtctttttggaaaagacttcgattttgcgcacttattgtgctat

SEQ ID NO: 35431 - DNA, 271 bp, Zea Mays
ttgggatgaatagaatagcgactaagatgtgcttcatctagaatttgctggcggatctcatcaatcttaggcaaaactatgcggtggttaaaccatacaacaccttgatcatctcttctgaagtagttggctttgctggtctccattttctcatgaatgtgtttcattccctcatcatttctttgtgcgtcaattattctttgcaggatgactgactcaagcttcaagtgatttgaagttccatgctgaatcattcccaggttcaacttct

SEQ ID NO: 35432 - DNA, 343 bp, Zea Mays
aaatacctaaaacatctcgtgctatttcaaagtctaattatttattctagagcaaccgacatcacttatttcgtcgttatcctattaccaacatccaccatcagtcctccttgggccaaaacatcatgactcatatgatcactatcagagtcatcactgctagagacaaccaaccaatgtttctttgtagttgatgactcattccacctaggagcatccaatgttattttgtttcttgagccaggggcgtcctcttttgcggttaccaaggcttgccaacttcgctctattttcttccaaagacaggcacgtgcggttgttatgtccatttgcaacacctcat

SEQ ID NO: 35433 - DNA, 386 bp, Zea Mays
gggggctgggcagtggcttgcgtttcccacccgagccgagtcatccccggcaacatcctcgggggttgggcaagtgtcaacaccatccttgaggaccaagttctccgtagcagccgcctctaaggctgagggtccttcaattacttccatgggagcaagacaatccaagtcagtttcctgaccctcaagaccacgctctaaggtcgacgaggcgcgggacgctgcccgggatgatcccaacccggcgtcgagcacatcagcacaaacctccatcacaccatcatccgctggctctgacagcagatcttctggaaccatatcttcaagagtctgatcaaagtttgtcagggacaactcttgtagaccaatgagggcagacaaagcag

SEQ ID NO: 35434 - DNA, 744 bp, Zea Mays
gcttcggcttttgctatgttttcgaagaccaacctcggcgccccgaatttgagatcggcgggtaatactgcctctgacccatagaccatgaagaaaggagtatttccatgtagagcttggctaggttgggttcttaggctccagacgacgtagggcaattcccttatccactttcctgcgaacttttcattcttttcgaagacccttttcctgagtgcctccagtatcatcccgttagctcgctcaacctgcccgttggccctcgggtgtgctaccgaagcatacttgatctggatgctcttttgctcgcagaaatcgaagaattctgaactcgtgaagttggatcccaagtcagttatgatattgtttggtattccaaatctgaatattatgtcttgtatgaattccacggccttagccgaggttaaagaagcaatgggtttgaattctatccatttagtgaatttgtcgattgctaccagtacatgagtgtatcctccttgagctttcttaaagggtccaatcatatccagtccccagcatgcgaagggccaagttactggtatggtctgcaattgctatgctggtagatgttgttgctttgacaagtactggcaagcttcgcatctctgaactaactcggctacatcgcctttcgctgttggccaatagaatcctgacctgaagaccttcccgactagtgtcttggatgttgcgtgtatttcgcattgcccagcatggacc

SEQ ID NO: 35435 - DNA, 310 bp, Zea Mays
ctaacaataacaattgcaccatcatatatatatatatcgatgtagcaatacattcatcctaacattattattatagattccccaagacatatcaacatacataaaaatatacttattagcgactgctcctatatataaaaatgaagcgagacgacgtgtgttttgtggggggaaacgagatcagcaactgagtttggcagaaatgatgcgaaagaaatcctattgccaagacaacaataaggtgttgtttggtttatggacggtaacataaatgacagggataatgattcatagcggtaataattatttt

SEQ ID NO: 35436 - DNA, 290 bp, Zea Mays
ttaggtggtcctagtggatcgggaaagacaagtttagctcagaagatggcaaatataattggctgtgaagttgtaagcttggaaagttattacaagcctgaacaagtgagagattataagtatgatgattatagctcattggatattgctttgctcactgaggtgatgtattccctttttggtttctatgctaatatacacttcaaacgcttcaaaatttctgaacatgcaagcttagtaaatactggtggttaggcagctattgaatttccatctcttagtatcaatgc

SEQ ID NO: 35437 - DNA, 909 bp, Zea Mays
ccggaatagcacaacaagtgcgttaatcgaagtcttttatttaaaaggcactccacgcaaaagtcgcctaagggtgcagccggaatagcacaacaagtgtgttaatcgaagtcttttatttaaaagacacttcgtgcaaaagtcgcctaggggtgcagccggaatagcacaacaagtgcgttaatcgaagtctctcattaaaaagacactccgcgcaaagtcaaccacgggcgcagccgaatcaacacaggcgtacgaatacggcgaacaggccacattaccatacaaattacagttacatacacacgacgagggcatcacatattacatcagctcaaccttcgggatgatacccatctccctgtaattgaacagcattatcctcaattcctcaccctcaaaaagattccgaagatccccctcgcctttgctcgccccaatcggcgaggacaacaattctcgtttaccaacccggtctactcggagatgaccacgatccatccccatacaacggtgcctaccacttcgcaaaattcacccacactacgttttcccaccacccttcaccgcctatacctagtactcgcactagcaagatccccggcaccctccatactcggcgaagtctccgccgcagccacatccaacacaacaaaataatccaaaccttcatccgaggactcctccgtccaaggaaacgaactcccatattcaccatcagactcaaaacactcagacacagagccaaacaaactatcatcggcaggcactacggttgaggccgccacaaaatcaatattgccagcagcggttgcttgagaaggcccaaacgtcggaacctgcgcagcaaccgaggttcagtatcacagaaacaaaagtttacacttaaatccctaacccctagtccac

SEQ ID NO: 35438 - DNA, 700 bp, Zea Mays
caagagcggacctagaaatggcggtccacgacgcgacgacacacggaggtgcggagaaccgatttggggggaatcccaaattagggcgtggtggtggacgataggagctacctaggggtgggttggacgcgtaacaaagaggcggagcaaagggtatcttcaatttatagatcccgattgaactgggcacgaattttggattgagatcacgattaccacggccaggatatttcacagtggcttgctcaccgtggcacgcgagagggaactagtccacggacgataaccagctgcttgccacgacccttacgatgcgaaggagtggtcattacgtgtcatggctggagaaacggtgagcttcctgtgatgccagcgtgactgaccgcggcaggacacgacggccggttcggccaacgactggattcacccctccccggatattttcaccccgcacgacgttatctacctctcccgcggcacaaatctcccaggcgggcacgaattgcggtggcagatcaccgacgtcaagttcacggcaccggagatttttttttcactgtaccatggtgatcttcatcagacgctctgacagaacgatttggagaacttcgttctccatttttcatgtgacaactcactcacctgcctgcatcaattttgtcgtccaaggtacaaactacaattttgttacaaagatctt

SEQ ID NO: 35439 - DNA, 498 bp, Zea Mays
gttgtaaccctcttaaagtacctgcaggtgcagatccattttctgaacccgaaggagatccagcacatggttactttcgttgctatgtgtgaggggtacctgggcttcgaacccaagctcaccttgtggtggtacttattctgcattgagctgttgcggaagagggaggagcaatggataacagaagcatggcctatcggatgcgcagcatctgcctctacagcgaaaggtcacgaaagtacatcctgattcccctttccttctctaacaaggacttgtataggcgatggttctatctgtgggatgccggtcgagggccttttccggggccatagctctatggtgtcggccaaagcactccatccgaggctccatctaattggagctacaatgtcacgcctgaggagaaaatctgagtctgatgccatcttgcgggggtgttcttcctctgagagaaaggtgtcataggcacggacgtcatcagagcctatctttcgc

SEQ ID NO: 35440 - DNA, 642 bp, Zea Mays
gtggctcttgaatttggaatggcgcgctaggggccggagagagaggagagcactggtgcaagagatgcgtggctttcactgtggccagaccaccaacgatgaccggatatgctaaggcaagtcactgtgatgtggtattgcgcttaggcacgtggcacccgatcagcaggcggccaactccggtgaggttatctggaccggccgtaaggcaagggggtacgacggctagggcgaaacagtgtcccgagcacatccgcaacacgatatttcttaccctgagcagttatctgcacttcaccgagcacgaatcgcaacggcggcgacaatcacggcttgggatcaccggcagcgatacactgaatctggcgatctttgttatgtcactgtaccattagaacaccattcagagcacctgacagagcggtttacagcgaccagatctccaattttcatgtgataacttgctaatccacctttaacaaagttgtggtcctataatccagatttaatcttgctatagccaccatacttcaattctcactaaatcacgctcaaaatagccctcaaacttggtcctagttcactgtcagtccagtttcaaagttgtactcgactgatagaccaacttcaggtctgtttttc

SEQ ID NO: 35441 - DNA, 361 bp, Zea Mays
ctcggcgccaagggggaaacagggacggccggtgtgctgggacgacaccatggcgcggcgagagacgaggttgaggatggccggaccaagactgggtcgatgatctcccatggcgaacaccaccagagagcgacggggtgggagatcggcgagggcgcactagagaacgacgacgttggaggccatggcgtgctccacggctttagagggggcgacgactatggatggggaaggtcaagggaactcagccgagtgctcgacggatgtgaggccatgggctgggcgagaagagggagccgccatgggggagcgtgaacctccctggtggccgacgagcagggagagagagggttggcgtggg

SEQ ID NO: 35442 - DNA, 398 bp, Zea Mays
gtaccccatgtgttgtagactaggcgcgttgtgtgcattaaataaggggtacgccacatgccactggcgtgggcaagtgcacatcccactcgcacctatagttggtgggacctaggtcaaagacttatgtcagacgccgcccggtggcttacgtcaggtgtcctcagccacgtgtcagcaccagacctctgcttaggtagggagtaggcctaggaagatgtggtagcgtggcaccctcggatccctcctgacttgggatccagaccatgcttgagggggtccaggactcatctacaatgatccggacatgtggaggcaccagacctcacccgacatggggtccggatggcacacgcggggttcgggaccactcccaaaagtcaggaactaatctcgta

SEQ ID NO: 35443 - DNA, 659 bp, Zea Mays
ctcgaccagactcagactactcccgcgaggacggcgggttattttataaaagcgcagggactcttttgaaaagctgcagctgcgaaggggtacggttaactctcggccgtccgatcaaatatcgaaggccaggattagatcttggctttattgaaccggtacgcaatccaagccctcggatccaaaagcaacgtcctagatttaaaacccctaagaccagatctcacccgatcaatccaaatcggacggtcgagattctgaacgctttatcgttatcccatgacttgatctcggccgatcccggctagatcaacggtcgcagtccatcgtgcccactcgccatcccaagctccgcggcggcggcagctgcgcctcccaacacggcatggcacgccgacgaggagaagcatcagccaccctggtgccccaatccatacgagagtaagcgcagaatgggcagaagatcatggcggatccgaacgaatcatccttacctgaactggcgcggcacaaccctccgcacacgatgcaccatggcccacggcggaaatctgttttccggtgagaaattcaccgagcaccagggacttcctagtccagccaataccgcagatcgcttccccgaaggtcgacaaatgggccgaactcgctctcgcttc

SEQ ID NO: 35444 - DNA, 424 bp, Zea Mays
cacaccgccggaccgcccacttctcgcgcccgaggaggaactcgcgggggcgaactcacactggacaacatcatcgatgcccagtgcccgtaccacaaggacatgcgccacaccctccagaactgtagagacttcaagcactccgtggggaacggtcgacccttccaacctctaccacctcccccaccacgaggaggacctggagaacctcgacaaccccaacagtaggaggggggaggatgcggagcattcccgcgcgttgatggggaagtcaacgtcatcttcggcggacatgggtcgcaagaaagcaagaggcactcaacgaccgtcagatactggtggcgaccgctagtcctctcgccccgtatcgatggtctgaacacccaatcaccttcactcggacggatcaatggctcaacttcgg

SEQ ID NO: 35445 - DNA, 386 bp, Zea Mays
gtttgggcaaaaggaggtggtagattagtgaagttaggtcagatgaataaaggggggacaagaaggaagactgaggtgaagggagtagtggagcagggacactggagtaaggagagacaagtgaaggagtatagaagggtaaatggattgtgctacacttgtggagagaaatttgagccaggtcatcaagctaaatgccctaagagggtgcctcaacagctgaatgtgattaccaaagaagatttggagatggtgctttctgaggaaatgttggaaagggtagagcaagagaaagggcaggaggaagagttgcataaactgtccttacatgtcgtgagtggagctgacacttcagagtgcatcatattcagagccttgatccagaa

SEQ ID NO: 35446 - DNA, 426 bp, Zea Mays
caaacaggtcgtaggcgagtttgggtcaccccagaatggagtcaggaatctgctgtaaaaatttgagctcaaacggagcaccaagcgaaaagttatgcccgttttatggaaggtacctcaagtcatggttttcaaaggcacaaatcggcaggaaccgaagcgacggctatgaagcacagggtcagttttagagataggatttgttttatggatatgatcggtttagatataggatcagttttgtggatatggtcagttttagagatagtatctgttttggggatatggtcggttgtagagataggatctgttttgtggataggatcggttgtagagataggatatgttttgtggatagggtcggttgtagagataggatctgttttgtagataaggtcagttttgtaggatggaagtagatggaca

SEQ ID NO: 35447 - DNA, 667 bp, Zea Mays
gtcgagttctccgagccacgtgcttgtgcctatcttggcgtggacgaagaagtagacagcggttggtacctagattccggagcgacgcatcatatgaccgggcgccaagagttctttgctgatctgaacactagcgttcgaggaacggtccgtttcggggacgcgtcgaaggtagagatcaagggcgttgggtctatcatcttccaagccaagaccggtgaacagagggttcttcatggcgtctactacattccggcgctgaagaactctatcctaagtctgggacagcttgatgaaggagggtccaaggttgtgattgaccatggtgtgcttcgcatttgggacaagaaccggcgtctgctcaccaaggtacatagagggaagaacagattatatattctgcatcttgaggctgcacaacctatctgtcttgcggcgcgcaaggatgttgaggcgtggcaatggcatgagcgtttcggccatctgcacttcgacgcaatccgacgactcagcaaggaagagatggcgcgcgggatgccggtggtcgaccatgttgagcaggtgtgtgacacctgcgttaccaccaagcagaggcggcgttcatttccagttacagcagcataccgtgcccagaatcagcttgagctggtgcacggtgacttgtgcg

SEQ ID NO: 35448 - DNA, 432 bp, Zea Mays
gcggaggggtggtagggctagtctttcttggtgttttaggcgtggctgctgggggaaagtgtgattgtagtttggttgatgttgggggtagtatgggtgttcgttttgatagttagggtggaggtatggtgtggttggtaagtgtgagtaatggctctctggttgcttatcgtagcggttctggccatccagtctttgatttcttttgtttctgggcaatctttggttgggtgcccggagtatttgccatggaagatgcagtaaaactttcttggcagatgggggcctctacccccgcctctgcctcttgttgcgttgctattgggccttgttgcgaagggtagttttgcagctagggatggtcttcgcgttggctgttgttggtttgtgatattgtggacctagagttgttggccgcactcttggcagcag

SEQ ID NO: 35449 - DNA, 469 bp, Zea Mays
cgggagcaccatgtgccccaagggctcgttcagctcaaggaagacgaattccgggaactgactcaagacggaagatctgtcagcaaatatgtgcacaagttcacggaattagcccggtacgcaccagatgacgtcagtaccgaagtcaagaagatggcccgcttcctgaagggactcaggccagaactcaagaccatcctagccagccaagacttcctcagtttctctcacctctccaacaaagccatgcaagtggaaagggcaaaagaggaagaaaaaggccatctcaagaggaaattccaagtcctccaggctcagcagcaagatcggcaccagaaaactcgatcctttggatttccacccaagggaccaagcttcagtagaccagctggacccaccacgtcacgtttcagtcagcagagtcagagctcctttcatgccccctcagttgcaagcaaccaacccccgg

SEQ ID NO: 35450 - DNA, 309 bp, Zea Mays
gagagcactcccccgatttcgatccatcaatcatgttgtcatccctaactccttgaactaaagaaaccaaatatgcctctaaattggcattgtgtgactaaaatttacccggtccgcaaacgaccttttgcttgcacacgtatctcagatctgtgtttgctccttgtctcgttaaggaataaatacggtaggtttctttccatgttgagctcttcctgctctgcagagtgcagacgttgcttcgtctgtgcggtttcggaagatatttgatccatcgtccccatccaaaggttatctccagcaccagcg

SEQ ID NO: 35451 - DNA, 364 bp, Zea Mays
ggaagtataccagcaggcggtgcctaggttagatatgcacgtcatccgtaccgacgaaacgactggagcttcaattcgttttggctacatatatatgtaccagtacggcagtaccagatagtatgatgaagcaacaatttaggctttacataaatgggctgtcttcggctcagcagtcattccataatcctgtcaatcgggtggcccgtctccatccatctcttcccctttttttaaacgctgacgatgactgctggctgctgcacccccttcctcctcgtgaccacgctgcatgcatggctgatggctcccggccctcagctcggccaccactgcatgtatgcatagccgccgcggcgtcgcc

SEQ ID NO: 35452 - DNA, 482 bp, Zea Mays
tgccatttcatcgccatgagcagaggaaaaacgtgcgaccgccatggatccggccggtttctctgctaccagcaaagtccggttcaacggaatccgcgatttgacctccgaaccccgtccgggatcctcgtggagctgcctataaaacctagttgtgcgcccttcctgctaaccacttggggccgcgccgtttccgccgtgaacgcagaaagaagcagacgtcgccgccgtcaggtgctctcgttgttccctgctagccgggacccctctgtaggcacggggttattcacggacgtccttcgaagctatgcatggcatcggcgggtcgagtgtgtcctcggcactgctctaatggctcaccggagcacggcagtcaccgtgggatcggtcctcgccgttggcaggcttactcactacacgattcacggtaaggtttccctcaaactgttcacctccatccatagatcgcatagcaacagttg

SEQ ID NO: 35453 - DNA, 328 bp, Zea Mays
gccgtgggaggaagaccgactacctcgacatcccactcaaggacagcatcaaaggatggcgcctggaatggtttatcgtggagaaccacaggaattccctccccccacggtcagggagacagccagatgttcgtactccgagctagaccgagtcccccatagacctggaggtggctgaggcaggggctctacttgctgaggttggattgttgaaagagaggggtctgactgcagaagctgtggtcgccgatttcattttcaagaacattcagccattaaaggacagagcatacccggcttatctgtatcgaggcctcgctgattcgac

SEQ ID NO: 35454 - DNA, 398 bp, Zea Mays
gtaaatagctctagcaccgccactatagagcttctgtgtactagtggaagtccatgttttgtactgtttggggttccaccaaccctccattagctatgcaaaagctaaagaacgagccaaaccatcaaccccacatcgcccccaaatccttggcacaccaatgaaggctctattttcaacctctaaaactaataaatagctactaaaattaattataaaggttccaaacacctcttgctaatactcaaactaattgttagctaactcataactaaccattaatttattagctagttcgtgctcagttttccccctccgctagcaaactggcctcagatgtacacttccacttctatcgtgcttccgtccactgcaccgtgactggcagagcccccccc

SEQ ID NO: 35455 - DNA, 390 bp, Zea Mays
ctgggtatggggccttggggcgtcgggattggccaacatcggccatggccgccaccgcgtggggggaaagtagcaccgccgcaggtggcttctagggttgaagacaagggcgctcatccgttggatcaaaaccggtggttgagattagatcttaggtgatgaatgaccgtgaccgctagatctacttgaacggtcggatttgaaccgattgatctcccatcgaacggtttgatgaggaccgtaggatcggatcggatggctcaaagtaatcaaagcttcataataaaatctgaacccttgaatttcaatccaacggtggaaatcgcatactgcatcataagcatctagatctaatcctagccgcaggtcttagatctaaaggctcataac

SEQ ID NO: 35456 - DNA, 556 bp, Zea Mays
gtccgtccaggtatccagggccagcaggaggggaacgaggaggcgtgtgcggcatggccgcgtgggggcaaccgctggaacagcacagcacagggcatgtcggtttcttctttcgttccgggcggcagggggacctagctagacaatgccacctacactactatgagctacgagcccgtgtgcccgcctggttactgttccggcatgcagctcgcgtgtcctgtgccgaacaatccggagcatttgggcatcattacattgttcagctagtagtacctagtacgtatcaggcagcagaggctaatcacgaatagtaatagtagcttgagccccccgccccaccccgcttactgatcagcagtagtgcccacgtactcacacgctcctggcaggcagctagctggtccgcccgctgctactgacggtagcgcgcagctgcagcacgttggtctcctcgtctgcaaacaaaacatgcagggtggctgtcacacgacgacgtactactgtgagcttcgtatctgtacgtatgtcaagcgtacacgcagcgggggcaggg

SEQ ID NO: 35457 - DNA, 678 bp, Zea Mays
ctactgagcacagttgtcagctcagattgctctgcgagcgcaccggctattggatcttcctgcctttctgctagctgccggtgccgactctgaggttcacctctcctatctacctagacttctcactcttttgactaccagcggcagatatgttgaggaatgggtccgagttatctatgctattgtatggatcgaccctaatcaccactggatgatattccgatttgagcgagaggatgttaccattcatgccagtcagattcgttaggtgtttggattcaacgagtcatcgactcatcttcacagcatgtgctatggcacctctgaccctcctcgtcgccctcacggcggagttgctcctggtacagctcacatcacggctttgttccgaccgcccttctcagatgggtcgcgacgttctccgacagatttcaccacagcggccaggtttctatatcagctcatgagacagacgcttctgccacggatgggttacagggaggctgccactcatattcagcttttggctccttggtgccctagtttctcactcagagtttgatgtcatggattttctcatttgagagatcgaggacaccatactggatggtctccgtgctcgtcgatagctgccttatgctcactatctgtgtcacatctttgctcagctgattcggc

SEQ ID NO: 35458 - DNA, 515 bp, Zea Mays
tgatccaccactaccgtcatcgtcccctgcccaaccgtctccgccttctcaaaccgcaattcttattgtacatccgtcatcacctcaaacttcaaatgctactcctcatcctctttctgactcatcgtctccaccacaagcattgccatcagggctccaccaccttctcttcctcatcctcttggtggcccactatctacactaccagcatgagatccaccttctccacagtcatcaagggatccacggccatcaaagaaattttaattttctaagggatttttacgtttcagccactagtctgcacactttacttagttctacccccacctcaattcactcctcagtttttccctcccaccatcgttctgcactcagaaatatccttacggatgagttccgttcgttaacgctgcctggcatgtgggacctgcggcctgacatgtgggacccatcccttttctcgccccgaatcagaggaaatagagccgacagcagattaccagatccccgtg

SEQ ID NO: 35459 - DNA, 417 bp, Zea Mays
ctttgtttttaagaatattcagcccctgaagaacaaagcataccctacttacttgtacactggtgttaccgactcgactcgggttaccaataggagaattcctgctgaggatctggtgagccgactagacatgtcttgagaggcaaagtatcaaatgttggtgctcctgttgcctactctgcttggaatctgccaccttctaagtcctttttcaatttcgtgtccaatcctcctgctggtgatagtggtctgggtcttagagtgcgaccctctcctgaagatattgaggtcttggttgcttctctttgtgatcttccgaatgatgagaggcaagttcattttgagatgccaacgagtccagatgatgcagaaataaatgttgtactcgatatgttggctggagaatcttctgactcg

SEQ ID NO: 35460 - DNA, 278 bp, Zea Mays
aattgagctaaaacatggccctgcaactcccctttcaaacctttcacaaactgagaaacaaaaaacgtttctcccatttcaggattgtgcaatatagtagcatatctagcttcttcaaatgcatgaatgtactcctccaaactagatttctatgataaatgcagtaagcccctcatcgtctgtgcattctcctcggccccaaacttctcttgcactgcttgagtgaattgtgcccagtttcctagcccttgcctcctcttgtacacctgcacccatct

SEQ ID NO: 35461 - DNA, 444 bp, Zea Mays
gggtgttcagaccatcgatacggggcgggaggaccggtggccgccaccagtatctgacggtcgttgagcttctgttgcctcttgctttctttcgacccatgtccatcgaagatgacgttgacttctccgtcaatgcgcgggaatgctctgcctcctcccccttcctgttgttgaggctgtcgaggttgtccgggtcctcctcgaggtgggggaggcggtagaggttggaagggccgaccgttcccaacagagtgcttgaagtctctgcagttctggagggtgtggcgcatgtccttgtggtacgggcactgggcgtcgaggatgtcatccaatgtacgttcacctccgcgtggtgctcctcgggcgcgagaggcgggtggtccggcggcgtggacttcttcatgaggcctcttctcccaacgcttgtcgggttgttggttcgtg

SEQ ID NO: 35462 - DNA, 403 bp, Zea Mays
ttcatgtacctccattgtgtatccctgcaaacttttagctccttcgggagggcatttccacctccaatggccatttccctaaaaccctagctccccgcacaccacgtgttcgatgaaatgcccaaaccagccaaacttgctccaattgaacccaaatttttcaggcaccttcaccacacttccagtaacctacttgccaaatttcacaccaatccgagatcccaggctcaaatttcaccaaaattcccgttttgcacgatcatttccaagccgagtgccctaatttctttttcttcgcctaaattcaaaccaagcacacacttcactcatattgacctatctaaacctattcgtgaagtatcggctcatttccatatcatctcgtgcctcatttcaaattcca

SEQ ID NO: 35463 - DNA, 285 bp, Zea Mays
aagaactgctctgaggaagaataattgcctagggcaagcttccattatcaataatgtgtcatcagcatattggacaatcgggaaatcttggccacagttctcagtaagaggcaactgaagtaggttttgctgtctcgctttattgataatactctgaagcagatctgccgctaaaataaacaataaaggcgagagagggtctccttgtctaaccccacgcttgcaatgaaatgttttcccagggacgccattaagtaagaccgatgacgtgccagactaaaggat

SEQ ID NO: 35464 - DNA, 412 bp, Zea Mays
ctggcagcaccaacccgctagggaggacaaaaggcatgaactctctggcgacaagttcgccggggaggatggcgccggcacaaatccttctgctgaacgccggcgcatcccatccaagtaggtggcacaccatgtcaagcacccgctcagtctgggcatgctcgagatgaacttacaaggccatggtaaactatggcgacacaaagcagaaaccttgaaggcaaaggggcgcagagagctcaaaggcgaaagggcaccgtgagtgggaaagaagcaagacatggctgctactcgagggatgaacccctttttaaaggcagatttccccgctcgcgccctgaagtgtcacatgcaaagtctcccccgatgcgcaccagggttcccttcctatgacacgggggccaggcctcac

SEQ ID NO: 35465 - DNA, 307 bp, Zea Mays
ggaaatcacactcaagaccatcaacacagctctcaatcatcagggacacaacaaagctccttcaggccaccatccacaagagggagaggaggtagaagcttcggtggaagatttagctcccaactgagaagattgttttgcatattctgtggagaagataaggggcatacaacaaggacatgccaagtcacgatacagaagcaaaaataaatggctgaagccgaagcacgacagaatcagccgaagcaggtcctgcatactgttttgtgctattctccatacatcctcgagtatgtgggcaaccaac

SEQ ID NO: 35466 - DNA, 384 bp, Zea Mays
gtgtccagtgtgggtataggattgatcgccgagtcttggggaagctttctccaccaccaatttgaggaacggtcgggcggaactcaagcaatcgtgcaccagaccttggtgcctgcgttctgccgtgggcaggtctttgtgcggggtgattcacggtgagtacctcctctggtgaatggttgttgcctccgctttgcgtcgtactattcaggcctgggagtggggcacggtgggttggaatccggtgctccggcatgcatcgccgtgacctccgcgtgcggtcatgggttgccgtgacctggtaaatagcggaaggtaggagaagcactgatagccgtcgatagtgagtggatggcgcagattagatcctaggtacccccttcg

SEQ ID NO: 35467 - DNA, 511 bp, Zea Mays
gcagcatcctcctccgctttcttccttctttctccttgtgtgttgtgttggggtgtctctcccctttataaaacccaactacgactagggaaacgaaaggaaaggaaaggaaaggaatgcaaggaaggagagacacaatcggcggcaacagcgattgatttcgtccgccgcacctctcctctctctccgccgccgtcgccgccgccaacaagggcgaaaccttccgatttcttccacttctgctgttagggttccgcctccacctgctctgctctggtgagttgttatcttccctccgtttctctttcttctctttttcccccctttctggtgatgatgcatgcacacatgatgagattgctctgccgattgtcagtcctctctccctcagccgcaaccgcaaccccgccaagggacaacgcaaatccttcctcttatcagcttcagtcactactacacctacctgtaccacactgttcgtcctcctcggttcttttgctcctaatccttg

SEQ ID NO: 35468 - DNA, 493 bp, Zea Mays
ccatatgagttatccttcgatacacagggtttagggtttggggtttagagtttcgagttaagggtttgtgttttagtgttcagtgtttagtgtttgggcaaattttttctgtctctagacatttattaaggttttgataaattgttctatctctaaaattttacaatggtttgcatttaatttttttatgatctttgtattttactattacttggattacattttaatattggttggacacaattcgcattcttgggttttttgtggaaaccatttaatgctaacaaatgcataggtgtaagcattcgatacatagggtctaggttatgatgtgtagggttggcgttagggtttagggttaagtgtttggggtctggtgtttagtgtttagggttgacggttatgattaagtgtttagtgtttggacacaaatcacaatcttggttctttagtggagaccataatggtcaaaaagccatatgagttatccttc

SEQ ID NO: 35469 - DNA, 687 bp, Zea Mays
gtcgtataggacgtagagagagagatggagagttgtatagaacgtatagagagggagagtcgtatagaacgtagagagagagatggagagtcgtatagaacgtatagagagggagagagggggagtcgtataggacgtagagagagagatggagagtcgtatagaacgtatagagagggagagagggagagtcgtacggatattatcgagttgtgtacccctttcatcagattggaacaaaagattagaacatatatacaatatcatactaagttcttacataatacgccgtccatcatactaagttcttatatataatatcatactaagattagaacatatatagtaatttatacttttctactcctcgtcgtctatcagtgtcgtccaatcgatctcctcatcttcatcgtcggagatgttggtgatgacgagcacggagacaacctcgcgtgcagtcgtcggagccgaggagcccacctcatggtggtgagtagacgggcctgcggcggcgacacgttgacggcagcgattcgagagaactctgcatgcgcgcatgaaaaaccggcgtacgacgacatgatgattgagcctcgaccggcgccggagctcaaggtggcggcgatgcatgagccgcgccgttgccagccgccccgcaagggtacgtgccttgaggcgcgctgcgag

SEQ ID NO: 35470 - DNA, 385 bp, Zea Mays
ggataagggacacacaacaaggatatgccaagtcacgatccaatagtagaaagagatcgctgaagccgaagcacggcagaatcagctgaagcaggtcttgcatacagcctcattctatttgccatatatccctgaatatgtgggcaaccaacaacctatgacatcagttgcttcgacaagtcattctcaagctgcatgggctcagttaccaccaccaccaccattggcaacctaccttggctcataaccagcagccagaagggcatcgccaagtgcaaacagcgtgacactcgagaggagtccaaggctcgcacagtcaacagtactgtgcccgaatcgatacacatttactaaagcaacacaggggcttgatcagaaagtttcc

SEQ ID NO: 35471 - DNA, 486 bp, Zea Mays
atcgattataggaaatggttaaccatttccctttcaggttagcgctttgatgctttagatcttgatcggaggagagctacatggataggggaccctagctaacggtataggggttatgtaccagcgatgaagtaggtgatgtcctccgaccacggtgcaggcggatctatggcgaaggactacggcgagaaattcccattggtccgaggacccatcctgcttgataatgccacggatagctccgccacgacccgtggatgcccctagaccatgctccgaaggcggggatgcggcacactaatgggttgaccgtggcggcaatctccccccccccccctcactcgatggcgaggctctcagctttcggtgacgctcaacatgggtaggattaggaggcgagagggcgtggtttcttatatacatagagaggcaggttcccctagaggaaggtaacggtcactagcgaggatctcagccggattctat

SEQ ID NO: 35472 - DNA, 414 bp, Zea Mays
ggacactataataaatcagcggagtatccagcaaaaaattaagaacattcatccaccaccttctctgaactgaatgttatctgcttccctcctaccagtctgcctctgctctgcttttgactgctagatgagtgacccacctgcacaccaaatatcttgttcgttggtaggtgtgcccaattaatcctaaaaacagagaccacatattattccaatcgcagcaaaagataccagtctgccatcacaacgacaaacaaacatcgcaatcacaatcagctagataccacaacatcggcatcctcaccggcctacggcatgccgttccagcctcacaagtcacagctgcatcatccacacccactacaaaactagccttcttttgacaccttccttcaagaagcagcatggagaaat

SEQ ID NO: 35473 - DNA, 541 bp, Zea Mays
gcgcacccggaataacgttaatcgaagtctatcattacaaagacactccgcacaaagccgcccacgtacgcagccggaacaatacaagtgtacgaatacggccaacaagccacaacaccattacaattacacacacacggcgagggcatcgcctatcacatcggctcaaccttcggaatgatacccatctccctgtaattaaacaacattatcctcaattcctcaccctcaaaaaactcccgaagatccccttcgcctatgcccgccccattcggcgaagacaataattctcgcctaccaaccccgtctactcgaagtcggccatgctccatccccatgcgacggcgcctgccactccgcgaaaattcaccctcacactgttttcccaccacccttcgccgcctacacccagtactcgtaccaggaagatcctcggcaccctccacacgcggtgaagtctccaccgcagccacatccaacgcaacaaaataatctaagccttcatccgaggactcctccgtccaaggaaacgaactcccag

SEQ ID NO: 35474 - DNA, 316 bp, Zea Mays
ctgagcttcctgggcatcgacgtgattcactcgtgccctcccttggtacggggtcttgttatgctggctgacggcggagggagccttgggggcgtatgccgaggtattcttggggccattcaccgagttggagtaggcgggtcctggtggcttcagctgcggacagttgttcttgaagtgacttggatcaccgcagtgccaacatgcatttgccggaggttggttgcttgccactgagggggaatggaaagagctctgactctgctggctgaatcatgacggagtgggtccagctggtctactgaagtttggcccc

SEQ ID NO: 35475 - DNA, 338 bp, Zea Mays
gttatgttggtctggtgcgcatgtagtcggtctttgcgcggacagtttggtgtagtctttttcgcacttgttaagcttggtccggctgcacccttaggcgactgttgcatggatagtcttcgcggaagacttcgatttttcgcacttgttgtgctagtccggctgcacccttaggtgacttttgcacggatagtcttcgcgaaagacttcgatttttcgcacttgttgtgctagtccggctgcacccttaggcgacttttacacggatagtcttcgcgaaagacttcgatttttcgcacttgttgtgctagtccggctgcacccttaggcgacttttg

SEQ ID NO: 35476 - DNA, 302 bp, Zea Mays
gtcgaaggcagttttatgtttatgttactctcttatttatctgttaataataattacatggccaagtggcctagtgccgccgaactagaaggcatgttggagagtaactgactccactacctcccttctcctaaagactagggcaaagccccactaggatagactcgaccagttgcaagttgcatgggcactactctagctctgcctgacgaaactgaacttgggaaaaacacagacatacctctagactcgaaattggaaagcctaccactaacagaaatagatgtggagttatcaatagc

SEQ ID NO: 35477 - DNA, 646 bp, Zea Mays
cacccacacgaccggccaaccaggtgagttaagcgtagccaaacgagaccacccaaacaatcgtcagaccatttacgatctcctgcacaaacgtttatgatggttacattcccgttttacgcaaactaacacaactcagcgcgacttatggtccacggctccacgcccacgtttccgccccagtccgcacaccatggcccaccagtcgatcaacggagtctgcatcctggccagaccccaccgcatgccccaaacctaaccactcgcccgaacatctagcaaccctaattgatttcctcgtcgctctcgccgtcgtgtgctcccacaatcgccatctccaagcgccccccgcccctgcccacaccgccgtcttcgtgcgtggcgtctcgatcccccaacatcgtcgcacggtattgcctcatccatctgccatttctcgtcttcgtgcactcttctgtcgtcactccacatcaacagtgtcgtcagatcccactcccgctcgccattgctcggcgatttggtgcggtggctccacgaccctcgcctccacctcagacggtcctacgcctctcggcgctgctctctggccccaggcggcacgccattccctccctcgttccttgactgcaagttgccaaaagcgacc

SEQ ID NO: 35478 - DNA, 497 bp, Zea Mays
aaaaaacagcggaatgccgacgggcccagcagcccaataggcccccgaggctgaatgggatgccagtgaagattacgacgccgataccggttaaaatttgaattttgaaagttggaacggtcgtgcattccgccgccatgaaccacaccaataggatcagagctcgagaatcgatgaggcacaacacccgaccgagaggatgaagacgacaagcccagatgattgaacgccgagattctagggtgagactgataacgcccagtagcgggagacctccaaccgttgcaaactgaggccagtttatcaagggaagaacccagacgtcctagtccgaggctgacgctcaaagccactgggagacttaatgatgttacgaatcggaatagcattggcaccagtgagagggagcttaacaatatccgcaaaggataaactctttttgccccgcacctgctgccaagaagacgcttcttcctccgaaaagatcttgaattcat

SEQ ID NO: 35479 - DNA, 632 bp, Zea Mays
gggacacattatatagggatgaagagtgcccaggttggtgcaaggcacgccaaaacccacgagatcggcgtggcaggttcggtgttaggaggttgaaggaggttctgacgaagttggctcgtgcatcattggcacatggcgaagggctgacaacccgagtcagtgcgcggacgtggaggagggaagaagagggactgaccgggcggtcccgcccaccagagcgtcagccggatgagtgaagagctagcagcgggccccacatgtctgtgtcacgcggagaaaggggaaaaggtggcactagagcgtcagtcggatgagtgattgcgtgggccaccaggtggcataatgggccagcacccagggagtcaactgggccgacgtgatgtggtttgggcctaaattagggtttcctctctcttcttttcttttctttttctggtttcattttctatttcctttcaaattcaaattcatgtccaagttcaaacgttaaaattaaatacagaaaaaaattctagcatgaatgcaaggattttattttatttagtatccttttattattttttacctcacttaattaattaaatgctcatgattatgtagaataagaaaataattcacaccatttaaat

SEQ ID NO: 35480 - DNA, 419 bp, Zea Mays
ctgccagagagccggttgctagagaggttgagcgtgtggaggaaggaaaggttggacaggctgtggctgatcacacctgtcaggttggataacatgagctccagcgccgtgacacgcccagggtgccgtcgggagccgcatgagacacctttccaccggcagatgttattcttcatgctgctgttggtaggcgtccatgcagcaagcaccctgctcgggtcgccggagatgccggccttgaatgcaagcagtgcttgctcatcagtggactgagcttcgcaaagatgaagggtctgaatggcatggatgagacaactggttatgagcaggtatctgcagttgctaatgctaaagaggtcatgcctcctcctgctactgccccacatagttgctttgcttgctgttcaactgtgtgtttg

SEQ ID NO: 35481 - DNA, 450 bp, Zea Mays
ggcgcacggagctcctagatcccatcgcggtggccttgctgcaccttccatggagccggagaggggcacgaggctatgggcaggctgggctccagcggcaggctgcggaatggtggagggaagagcgagggaagaaggcgactgggaggaagtgatatgcgcaggagggcaagtgcgtcgggtaccacccccttccctcccatcctcctttatctccctctccaagcgatgattgcggggaatggtagagaaggaggaagacgtgggatgggggcgcgatcatcgcgcggtgatgagggcggctcgcgtggtgatgagggcgatgacatttttggaaaggaagggcggcaagtgcgctggagacggacggtggcaggggagggggcattgatggagatgtggaggcagaaccgtgcaccatatcctgtgaacgtctacactactgtctta

SEQ ID NO: 35482 - DNA, 464 bp, Zea Mays
acttgtgtcgaagcatgcttgaaaggggatggggttgaacaccgatggttctcccctagcaaatgacggagccaacacctcctgacttgatgaagatggcgcatcctgacttataggttatggtgccagcaaagctggcaagattcgacccatggcacggggagctggtggagccgacactccccatgctatagaaggaggagccagtagagtcggtgctagggcgacgtgtgttgatgcctcgagtgtgaggctaatgcttgtcagatcgctcgcgagagtctctacgtcatcgaccagcccgggagcgtcgactgggcgtggggcgctggccacgatgtggttgcggttattccgtctccgtctcttgcggcaaggaggatgggggcagaagtctagttgctcctgtgtgtcagctaggtgcctgtggcaaggtgggaggagcaccatgtcgtactcgatgc

SEQ ID NO: 35483 - DNA, 921 bp, Zea Mays
cttttccttccctagtagcaccatcaatgttgccctagcccccctctgccgcatcgcaccctacctccaccatggttcttgagcctccctaccgtgtgcacgtctcccttcacaccgtccatctcctctaggccacattcatggcccttgatcgagtcatgaaccctattctccgtgactacatcgagctctaatcttaggcgagctgccacactaccgggccgtttgtgtttcccagcatcgtgattgtctacatgacgattgaggccttgtcctcttccccatccatgattgtcgtcagcatgctcaccgctaacgactacatcacccttccggtggctctaagggggtgacaccgctggctctctcatccttctccatatcattgccaccgcctcctcccactaattgggttgccgactaggcgcctcattccataccacttctgaccccgagttctgtctttacctcatcctcctagccccacattcccttcctccatcattgcggtaatgggtcgactctacctatcaccttagtaggtgacatggtccttcctagtcctttgtacctcaacaacattcttgtggcccccaacatcatccagaaccttctcttggtccatcacttcaccactgacaaccattgttctatgaagttcgatccatgggggctcaccatacgggatcttactactcgtgttgtggttgcccactacgatagctccggtcccttatattccatttgcttccctggcccaccttcgtcagtccatgtttccacactatatgcccgtgcctccactgttcttgcctccacttggcacgatcgtcttgcccaccttggccacaccattctctctcgactctcggccacctcgaccattccttgtcctcgcgacaatgctatatcgctttgtca

SEQ ID NO: 35484 - DNA, 428 bp, Zea Mays
ccgcccgcgtattcgcgctcccattcgataggtatatctgtagcgaattagggtttgaaccgccgtggtgcgcgggatttactcgccggcgatggctgcgccgggcggtgttgcgccaccgtgtgagcagatcggagttagggaagggctgcggtagccgttgatcgggcaaaggacgggcccgattaaatctggtggtgctgattcgagaagaagatccgggtcgttgatcggctcacggacggagacaaatagggtgtggctgttttaaatccgtggccgtaggagcgtgatctggcgggcagcgtctcgtaccggttcgttttgagtaggatctaatccgcaccatccgcgcgtaatcgggcgacctaaatctcaccgtacccctttctgccatagtattttgcaaaagagtcactggtattgtt

SEQ ID NO: 35485 - DNA, 407 bp, Zea Mays
tgcacttctgtggcaatttggcaaattaagagtgaatggtctctgaatttcagcccccaaaagattggagaagaacccatccaacacctcctgcatctggtcatggttagtaacaatcctgccctcatcctccaaatgagaaataaaatttctcttctttctaaaacaggcctgcatatggaaaaaccttgtattcacatctccttccttcaaatagtggatccgagacctcaagcgagcgattgtcctttccaaggaagtgaggacaagacaatgctgtttcagtttttgcagtaaccaaacctcttcttcaaacagaatcctaatatcctgagcaatctccaatctgtgtaacacctcgcgagctaagcccaattgggtcccaacattgcccaccattttgtgcc

SEQ ID NO: 35486 - DNA, 326 bp, Zea Mays
atgaagccttatcttaatgattttagaactgctattactttcttgaacgcttccaatcaacgtattgctgcatataaaatggtctgtttgagtcaaggtgttcgccctcgtaagtttggtgttgacatggatgttagatggaactctacttactagatgcttaagcatgttgttccatacaaaagcacattttctatctttatccaaagtaatcatccattgagttcagatggttctcctttgttaacagatgatcattggtacattacagataaggtgttgtcttttcttgaactattttatgattcaactgttgcactgtctgg

SEQ ID NO: 35487 - DNA, 292 bp, Zea Mays
gaaacgtgatatacccttcattggtgaaactttcaggtagacataatctccaactggaaagtacaagggtatccggtgtgtgtctgcgtaactcttctgacgagcttgagctttcttcaaattatgaatcatttgttgaactttctcttttgtctcctttaccatatcaggcctgaagaaatttctttcactaggttcagaccagtttaacggagtatgacatcgtcgtccatataaggcttcgaagggtgccatcttaatactctcttgatagctattattatatgagaac

SEQ ID NO: 35488 - DNA, 387 bp, Zea Mays
tcggatcctgcttcttcaccacatcacgcacacaagcacttgagcaatcgactcaatttcaccagaagaactcacatagtccacaaaaccatttcgccctgctcttcgcgctgccgtgaagaactcctccgtggccagcactcctcgggtcagtaactccccgattgcttcctgttctagcttgtttatagcttcctattgctcttggagccgaccagttgaagtttgccagagtcccatcaccggaacactcctctgctccgtagaacgccgccgcgacaccctctctgtcgacccgcttttctactcttgcctagtccaaattcaagcgtgtacataacctctggtgaacctgtaaagcttccccaagcttcaattttgtcatcc

SEQ ID NO: 35489 - DNA, 358 bp, Zea Mays
gtgttgccgccgccatgacacatctcaatcgctcgccgctcgtcttttctcctccgcggcgcgcaattgctatccccctgggcctcggcggggagttcgcatggggaatctccgggactccgctgctcgaggtcgacctggtgatgggcgaatcgcttttcggtgtttcctccatccgcagatccgggtgcgtcgtggatggagcacatcaactctcgtatgccggtaagaagtcgtccaacgagttctatttcacctcctccacgtgtagagtagagcggagcaaggtttggggtccttgggcaccggattgcggactgcgaccatggcgccaccgcatacgctggagcaccgccgc

SEQ ID NO: 35490 - DNA, 557 bp, Zea Mays
gccattgaccgatagcgccgtgagcgagagtgctgcgcagagaacgtgaagagaggctcgccattggtgattcgtggccccgggggagtttggccgcgattgtggcctggaggaagaccacggagtgtggcgggtgcatacgtgaggaagtttcgggctgatcacctgcgctgtggggcggattgctcaccgacgatcgatttgcaccgctgggccgtcagtccttatcgacagagcgcgatacttcgaaatcggaggtatgatggcagggtatgtattggggatgtgcaccacatcgcgtagcaagttgtagattgaattgcggggcaccaagcgccgagaatcgaccgcaccggcggtagctccaccgtggggtgggatgacaccaccgtcgaacacactgtgaggagtcggcgatcgttgaaccgtagatctccactcggacggttctgattagatgccgtaaataccctttcgcacctttgaatcccggccataagtcgcgaatctggcggtccgcgttgatctctttgtaatggcacgtgcgctagtggcgg

SEQ ID NO: 35491 - DNA, 319 bp, Zea Mays
caaaccctagccgccccctcctcaagccttctctccaaggtgccattcctttcccgctcggatctacgtcgcgttggtgcaagtctccaattggattttggtggagggaagaagaagggagaaaagggggaggattcaaggtgattttgagattgtatcttgtttaattatgttgtaatccaattgattatatgtttaccaatgcgaatcggtataggtgttgtcctgaaattttgtgggtgggcgaatagcagtagttctagtgatttctgggaatttttcgtgggtaattattggggatcagtgggagaatcatgta

SEQ ID NO: 35492 - DNA, 303 bp, Zea Mays
attcggttgttgtctagtgagttagttgctatagctagggaggagctacattgtgatgcaaatgaagatgatatcttagttgaggaggcgagcacttcaatgggttcgaaagtcttaattataagacgaatgaccttaattgcctttgaggatcaatggtagaattatgtgaggtcggtgataaggactcaattctattgtttgggcatgcttatatgcaaggtgtcgattgatcctacccttcatgggtatttagttatttactagagctggacaatccaacactacacaaccctccattac

SEQ ID NO: 35493 - DNA, 471 bp, Zea Mays
ggaggacttggacctcttgacgatgatggtacgcgtggttgggttggtgatggatttgctcgttgtggtatggttgttggtggtattgctgggggtgataggtttgcgcgacgactcattggttgttggctggctggggtctagccattctgtccttggtggccttggtctccgggcagtccctggtggggtgtgcgcagtcttcaccatgaaacaggcagtaaaatcttcatggctgctggggccggcctctgcctcttcctctcgtgttgttgtcgtggttttgttgagaggggtactcatgatggcgaactgtgtctccagcggggtgttggttggcgatggtgtgcacctgttgctggttgcaattttccctgccggagtcggactgcgccggcctgacccatgttctgctggaccgcggggtgtccttgggtttccactgagattctatcttgcgctggtgcagtt

SEQ ID NO: 35494 - DNA, 303 bp, Zea Mays
acacttataagaaatggtggatctcactcatagcatccaactccgatgtaaggatatgtcaagggcaagatcgtcgtagatgtgaaatacatcactgaattctactgcatagaccctagatttttcaagaaaatcatgttcttcgtatggtaccatgaagtgtgtggcactttgccttcgagatattggtgtggtcatagcaaaataccatttgtggaaacattggctctgtttacccatcctcttaagcaatgcactagatactaaaggctgccctagcacaaattgtttattatttggaac

SEQ ID NO: 35495 - DNA, 319 bp, Zea Mays
atttgttgatgcatggaaattctctggatcgcgccagtttatttcgaggagcagctgagcaaggacaaacagtaatagcgacacctttgagctcccaacccccattgtgcggcggtagctgattttcgtcattttgatattgttattaatgtcctctgattctcctactaatatttgacgtaaccgtaccaaattgaactcgaaacacatcacattgcatgatgcatgcataacagataacactatgcatatatttaggtggtagagatcaacttgtagccacaagtttgcaagaacatgcaccacacctaaccccgac

SEQ ID NO: 35496 - DNA, 317 bp, Zea Mays
ctgggtgggccgctactaggctggaggccgagcagcccaccggcaagcgctggtaaataaccagctagggcacctcctgcctgtgcgtcaaaaagggacagagagcggcggcgaaggcacaacggcttggccggcctgcacggccgcctcttgtgtttctctctgttcaacggcctccgaatttggtgcccggtctgttccataagtatgggtgtgtttcccctctctctggcgttggctgagcagtcggatgttcttcttcctccctctgtgtgtgctgctccggtaagaactcaaactaccagttcgtttcctgg

SEQ ID NO: 35497 - DNA, 535 bp, Zea Mays
agcggggtaagacgcttcataatttgtattccaccaccaccaccaccctgagagatagttgtagggttcacattgtttgttgcctttttgtctctgttttttgctaacaatgacaggaccaaagaatcaaatggacaaggacaaggggcttaagcttaacgacgatgagtgtgtctctcatctggaattgaaggagatgatgcgcgcgatgactgaagcttttaaaaaataccaggactctgcggcgacatcctatgagcagcttgatcgacgagttgcagaacttgttacacgcatggacgtactggaggatcgtcccccaccaccaactctagccccaactcactctcctgtggacgacgacgacgatgacgacgatgtttatgcaccgctgcgacaatgcctcgcaagtaatcgacaaggtatgggaggtaatggtagacgtcatcataatcctgaaccagaccatgatccatttgctaagattaagttctctattccaccattcatgggttcttatgatgctgaagcttac

SEQ ID NO: 35498 - DNA, 293 bp, Zea Mays
cgagctccagcggacatggcgctgatacatataggccggggaaggagagaagataacagggagaggaaacgaaggggtcattgcaattaatggctagtggagagaagaagaaaaatgggaacaacgatttacgatggtggcattctccactgcggtagacgagagggcggctgcgagtggaagagaaaacggaaggccagtgcgtggttagcggcggcgttctcctgtaacgtaaacgtgagagccacggagaggcggagagcaggcagagcataggacggtcctgggccgtg

SEQ ID NO: 35499 - DNA, 565 bp, Zea Mays
gctcaccagagcagcagcagtcggagttcgtcggagacagggcagcgacgcggcgtcgggacacacccacgtccagggaggtgaggcttgcacacggcgcagcaaaggcagggaggaggttgtgcacgcacgggggttccatggtgtaggaggctgctgcgatttgtggaggaagagagaggaaggttggatccggggagagagggagagcgcttgaatatagcatgtgagcgggcgggtgccggacccagtgagtcgtgggcgcggcatgccgggtcaagaggagggagtagttacgtgagggagatggtactgaggaaggggaccaacgggacagcatgcctgggcgactgacagcagggcctgcgaccagggagcggttgagcgcgcgacgatgtacaacgaagcgaggcaaggtttatgagggtagacaaaggtagctgttgaggggtaagcggggatagatgtggtagacgtgaacagcataacactcacgaggagaagagtatgtttgacattctcatgaaaaggtcacgagatctagaacatgaccaacgagaggaag

SEQ ID NO: 35500 - DNA, 934 bp, Zea Mays
gtaggtgccgagggaatcttggggccattcactgagttggagtaggcgggtccgggtgccttcaactgggggcagttattcttgaagtgactggggtctctgcagtgccaacaggcatttgctggcggttggttgcttgcaacagagggggcctgaagggagctctgactctgctgactgtagcgtgacggagtgggtccagctggtctattgaagcttggtcccctgggtggaagcccaaagggtcgagctctctggtgacgatcttgctgctgagctcggagaacctggaatttcctcttgatgtgccctttttcttcctcttttgccctttccacttggatggatttgttggaaaggtgagagaagttgaggaagtcttggtggtgaggatggtcttaagctcgggtcttagccctttcagaaaacgggccatcttcctggactcgatgctgacatcgtcaggcgcgtaatgggccagctccgtgaacttgtgcacatactcactgacagttctcccaccttgagttagctcccggaactcatcttccttgagttgaactatcccctggggtacatggtgctcacggaaggctgtttcgaattctgcccaggtagcatctctgatggcctcgctgaaggtatcccaccatgctagggccatcccagaaagttgatgagcagccagttgaacacgctgattttcggggcatccgatggcttccagtttcctcttgatcatgcgcagccagtcgtctgcatcgaggggattgctggaccccgcaaacgtgggaggcttgagtctcgaaaattctcccatcctgtcctgtggtctcccaccacctgggcgctggttttccagacttctagtgaggacttcaatgagtcgggtctgattggctagaacttgggccaggtctagtggtagttccgg

SEQ ID NO: 35501 - DNA, 439 bp, Zea Mays
gtcggatggtacacgagggggaatcattcaatgatcgaaaatggtacacttctcagatccagagtttatggtgatctcgactgccgaacaaacggcacatgcatacgtctacgtcatgtggtttagcgtccagagcgaagaggcctaattaatcccaaggcctatcttccttcaacttgtcatccctgattgcaattgcattggtttcctgccggctgccgccgagggatcgtctcttgttcctcgcagtcgcagcgctacacaggagcggggagcaagtatatgtatggcggaatgatgagacaacagacagacgcgaggaggaagaagaagaaaagctcgtagtagaggcggattgtggtcaccaccgtccagtagctctccatctcgagacattaatgggcgtagcgcaggcatttattgcctcatcagagagccg

SEQ ID NO: 35502 - DNA, 320 bp, Zea Mays
atcagagggagtcatgatgactgcagtacatgtagcattgataggtagtaacccttggtaacgcgggagtaatggtgagtaactgcacggcccacgtatcgtggactgagcatgctgcctgtcagtggaatggacaggcgcacgtcttatccgtaatgaatgcgaaggcacgcgtagcccagaggcgtcatgccaggttccgcccgttggcttatgtcgcgcgcagtatgccacgtggcagcatcgggtctctgtctgagtggggagtaggagtgtatgtggataggtccggatcacaccagattaggtctggacacgtg

SEQ ID NO: 35503 - DNA, 384 bp, Zea Mays
atacccttttctggaaggacagatggttggaggggagatgtattaaggacatagctcctgcattgtttgatttggtgcccttgcgtcttgccaacaaacggttggtcaaagatgctctgcctaatttccattggctctccgatgtgcaaggggcaatcttagtcagagtcattgctgaattcctggaactttgtgaagtgcttgatgtagttgtgctccagcctggaataagggatcgacatttatggaaattcaacgcttcaggtgattattcatctagttctgcttataatgctctcttccttggttcagttcagttcgaaccagcagagcgggtgtggaaatcttgggctcctgggaagtgcaagttctttttatggcttg

SEQ ID NO: 35504 - DNA, 371 bp, Zea Mays
tcgggcacagagcttgtttgcctttgtcgctgtcagatttggaaatcagatacacccgaaaacacgaagattgtcataagtgaggggcatgccaaggagcagttcgaagggtgtgagaggactggtagctcgacatggacgtcggttgattaaataagttgcagtttgaagagtttcgcccagaaagatgttggagcatgagagtgcaggagcatggtcaggatggagtcattgagtgtgtggatgatacgttaggctttcctgttttgagatgaattgtatgggcaagaaaggcgtaactaaatgccatgagcgttgaagaatgtgcgaagggagaaattatcaaactccttgccattgtctgtttggag

SEQ ID NO: 35505 - DNA, 365 bp, Zea Mays
tctcggggatgccacgatcacggcaatgtggtgaatcaggcgactacgtgtcccttgctgcgctcatggcgagcaccggtggcgatattttaccgaccgcgcgggcaagtgggtacggcggtgactcagccctcgctaagaccttcttccacgagatctttttaaccctcatggttatctactctttatcggcacgaatcgtggcatcatcgtgaatcgcagtgtggaggtcaccggtgatgaggtacactgaacttggcgatctgagccaatcactgtaccattgagctagtcatcagtggttctaacaatgcgatttgtagtgcttcgttcttcaatttttgtgtaacaacttgatcttcggc

SEQ ID NO: 35506 - DNA, 423 bp, Zea Mays
tggctgccgtacccacttgccccgcaatcggtcgagatgaccatcgccggatttcgccgcttgctgcaaggatgccacgtatttggaggcgttaccacgtcgcagtatatcgcagtagatagcccatctgtcgcatgagactttgccccggtgagcgccacagtagttttgctccggtcactcacctcctctccggccgccagcttatcttccccgaattcgaagccaccacttgcagacgctataaattgagtgtgtggcctgctccgttagcttgttatgaagccagaacaccaactctcgcccccaattagccaccgtagcccgcaaattcggtacttcccccaaatcggtctaattcgtcgtcgttggcatcttgccgtggccagccatccaaaggttgatttgctcttctctgattcg

SEQ ID NO: 35507 - DNA, 489 bp, Zea Mays
gcaatctccattttttctgcgggtggagcattggacgcagccacaccacatcggctggttctgacacaagtgtggacagtcgccgcattccatgaggttctctatcctgcctctgaggctgagcctgagcccaagcctagcagtgatgtgaggagccaggggtggcaaggagggcgcatgtgatgaggtagctcatgttccccttgcagccagcgacaatgctagaagagctctggcgcgagaaggttgggttccttacggtaacctaccagacccttatcttccctctgtggttctcgatttgttttgtgctcgctcccgcacttagttttctgcaagctcttgcctccttcctggctccagcactctgtttttgcactttactgcccacacttgctcctgcacgcttgcccgcacttgctaatgttccattagcctcacggagcctaaacaacatgtcagggttctgattgccactaatcgagccta

SEQ ID NO: 35508 - DNA, 477 bp, Zea Mays
aggcatacgagagcacttaaacaaggtttgaattgggcagagttttaccaacacaggctggccacggtgaacttggtttcacggtgttcttcgactgatttggggggaatatgaaattggagcttgctggtgatcagctgggagcaatactaggtgtgggggtgcgcaatgatgttgcaaagctagttacgggctcaatttataggcagcttcgtcggtggcactcaatttgatcgaacaacgcggcggccggagataagaaaggactctggcacggtgaatacgtgttcaatgtcgtggcagtaattccggtggtcgacgggaagctagagggagtcacggcgatgcggtggcgaggttgggacacgcggcacaagaccggagaacggcagttcaccggcgagcatatctgctcaagccgcacggcagaggggaagtactgggggttcaccggagtgccgtccagcgcatgccttt

SEQ ID NO: 35509 - DNA, 477 bp, Zea Mays
taaggaacctcgtgctggcaatactgattctggaaaggtgcaccctcagtctatagtgtcattgtttgagtcacaatggagtacccttcaaatggtggttctaagagaaatattgatatcgtcgatccgggcggcagatccactctcatcatggagcgctgcagctcgtcttcttcgatcattttacccactcatcacaccagctggtcagagtggcctagcaagctcacttgcaaacgctgctgacaagcttccaacaggcacacgctgtgccgatccatgtcttccttttatcaggtatgcttaagctcatcattattatcttattgttatatttgaaagaaaaagagaatgaatactgttgaaactacttttaagactggaagatgctcatggtaaaattagtctttactatcttctgggattttttaacttataattttttttcccaggttgcattctttcccgcttcaccct

SEQ ID NO: 35510 - DNA, 372 bp, Zea Mays
ggtctggatcgactcacgcgaaggggtatgcctcgcttaatcctggccgttaaacagaagatcgacgatcaggggcatcccttcactctctcctctctcccctgttcactccggctggtggtgagcctacttgcggcagcgccattattggcggacattggccccgcattctattataccgcagctaacgcgacttcgttcaaatcaaagtggaggaggaggcgaacgcgtcagtggattccttaccggtagataagtgggcagatgtgttggtcacggcgtcccaaggttcgacggcaggaggctcctctagtgagcaattcaaacgacttcgaggattccctatcatgaacaaccgcaatcgcgtctagc

SEQ ID NO: 35511 - DNA, 857 bp, Zea Mays
tcgacgaaggagaaacaggtagaacgcctgaaagggattgcaaaatcttattcatgaattccttagccacaccaccatcgtccgtagcttcctgagtttgcaataggtgctttcttctagtatgaacttgggttactttgcaaggtgtctggggtaaaacaggtggaagctgcacaatagccatagaatctggtacattttcacaactgtgagaaaaccatccatctgttggatcgctgagaccagaacatcattattagcatcctttgcgaagccctccacttgaatcaaagttggagacattattaccagagaagcagcagcagacgaagagacaagatgggacccaggcgcctccagctcaacatcccaagttgggagagcaaggccatcaactggagtaacagtcaccacccttcccgccagattcaaacttggagactttactacggctgacggctcagcagacagaatcctcgcagaatgtgctccgccgtctccatcccccatagatgagcaagaataccctaaagattaatatccagcagcgccaccaccggataccattgcctgacgagaccagcgcttgatgatcaaccgaatggggggcacatacaaagattgtcctccagatagaacctgatcatccatcccaacattcggaaatagagcgatggaggaatttggtgcgaccatgcgtaggtcgatcacatcagcatcaaggttaaaactcaagcttagtgcgatcaagacctccgtggcgccaccagaaccctccagatcaacagctgagataagaagagtgcggtgaagatcttgctcagcctgccaaattttccatgagtgtttgatgtaac

SEQ ID NO: 35512 - DNA, 422 bp, Zea Mays
cggaagtgcgacaatcagaaaggggcggcagagtaaatgtcgcccgacctagaaataaacccatggggagaaactctccccgggtgctcgggggctactgtcagggaaaagatccccaggcgcttagggcccaccggtcagagagagcgcacgagataggagcctccgaactacttggggccacccgtcagcgagggggtaagggaatcgtctacccaagaagcacgcaccccagataagccccgaggcaccgagcctagggttgggcgtggaggagcagcagaagggagccatgtgaatcgaaaggaaaccactcgagtgggttcctcgcctggctcgagaccgacccgccataagtggttggccacattaagtacgcctgacaccaggtcgtagtacaaccggtctacctcccaatcatg

SEQ ID NO: 35513 - DNA, 361 bp, Zea Mays
ggaaaactggaattatcgggctacagtgggtaatcggaagtgaggagcggtgcactggcttcgtaacaagctgacggagcacgctgaacactcaatttaaagggatcactcgagtgtttcgcgaatttgggatgggatgagcttgcgatcggaagggaggtgagtcaccggagcacagctaccgtggcgctcaacaaggtaaagaccctggcagtaaacaggttgtccactgcgacttcttgcgacatgataatgagcgtaagcacgtgaacggctacaaagagcggcgaactccggcgagaacacttcagccgatcgcgcgacaagtgacgcggtgaacagtccggtgataaggctccaa

SEQ ID NO: 35514 - DNA, 575 bp, Zea Mays
cggcggtctcatttttgaagtgctgtgagagtctagggggcagagactggagaggcggggactaaatttgaagcacgggatcgctttcccctcctgcgcgtggctgttagtttcaaagtgctgcgactttccgatcgattcaaaagcgtttcgagtttcgattcttcgaatttgtggagattcagaggcgatctgcacttccggtcgctatctgagtttaaaattgactgtgtagacatggtttgcccgtgagatttaggtatgaaggaccgggctgtccgatccttagctgttttgcttggtcagaaaagtccatgcatgatttgtctcagctgtttggggtagtcgctgtctaggtggataattttaggtgcgatacatgcttcattggtggcaggatttttgtttgactcagtatctgttaggaatgtagggtctatttgagggttttttttatattacgtctggattctaatgattgcgcgtcccacacagaaaaatgctctgttgtgctttcttctgcacaactatatttctttattatgtgtgctacaatttttgttgtatgaaatcat

SEQ ID NO: 35515 - DNA, 363 bp, Zea Mays
gccacctccccgtcgatcgatccctgaggatctccggggtaggtgttttaactgtctggcctcctctcatcgggcggcggattgccgacgttcggtgcgctgcttcaagtgttgggggctcggacatcgtgcagttcagtgcaaggttcgtgctgcgccggtgatcaaagctttagtttcggtgtgggatcgtcttggccctcagctggttcacaagcctttggactttcctagacgcgccatggagtggcgcaaggtctcttcgccgatcccggccatccagaggtccggtgtggctgatcctaccttgggtggcacgaagaaacgccgccatcgtacgcggggtcgaaggcctaagaccgc

SEQ ID NO: 35516 - DNA, 570 bp, Zea Mays
ttgcgtgaagattcgcgtcgccgccgtcctgattcgagcaccgggcttgaagataacgactgggtggagaaatatcatctccccgtgcgctggacgccactccggctcgtcgccgtgcctccccccctgcttaccgcccgtggaaaaagctttttcaccgccgtcgtgccttcgccgtggcctgccgcgtggctttggtttccaccgcgtcgtcgtggcttctcacagccatcaaatcagctccggtatgcttgccacgccatttgccacgaactcaccgcgccagggattcttccctatctccggccgccgcacatcttcatccaaattgagcaccaccgcccgcgaacactataaattgagcccccgggtagctgcgctaagtcatcccgaagctatagcacccgctcccacccccaatcctccaccagcacgcgcgaatttcccattctccccaaatccggtctccgccgccgtgaagaacagctcgccgcggccagctcgattctggttagttcgtgtccttctgttgcttgttctagcacccgtaggcaccccgcgaactcctcg

SEQ ID NO: 35517 - DNA, 576 bp, Zea Mays
ttcgcatgggagccgtcgcaaatgcctgggatccccagggaggtgattgagcactgcgtgaagattaaccctgacgccaggccggtgagccaaaagcctcgtagatagtctgttgagcggtaaaacttcatccgaaaggaggtccgaaaactgctagacgctggcttcatcgaagaggttcatcacccaatatggctggccaacccagtcatcgtccccaaagcgaatgggaagcttcggatgtgcatcgacgacaccagcctgaataaggcctgtcccaaggacccgtatccactaccacgtatagaccaaatcgtggattctacatccgggtgcgatttgttatcattcttagacgcttactctggattccaccaaatccagatgtctagggaagataggaagcatactgcttttgtaacagtagatgggctctactgctatgttgttatgtcgtacggtctaaaaatgccttgcctacgtttgtacgggcgatgagtaagactttcagggacctgattagggacaaagtagaagtctacgtcgatgacatcgtggtcaaaactaagaaagggt

SEQ ID NO: 35518 - DNA, 575 bp, Zea Mays
agtacatttacctaatgaaaattacataacatataatgcagcaagtaatatatccaatatattaactgaatcttttcttcggaaaacaatgctcactgagtggttcactaccaattcaaatacaaatgcagcgcacaatctaacatatattgaattcccatctaaatggcgttgggacgacaaaacaagaacctggaaaccgagacatggaagagaaagaaaaattggtcgtatatactatgtacatccatctacaggggaaagatactatttgaggatgctgctaatgatcgtcaaaggtgctcagagctatgaagacttaaggacatataacaatatattacacccaacattcaaagaagcatgtaaagcacgtggccttcttagtgatgataatgagtggtataatgcttttgatgaagctgccagatgggcaacctcggatcaactgcgacatctattcgttactatgcttctttattgcgaagttggagatgagtatacattttttgaaaaagtatggcaactactagcagatgatatccaatataatatgagaaaaacattgaaccttc

SEQ ID NO: 35519 - DNA, 537 bp, Zea Mays
ggactgcgcgtcaaataaaaagaaactcaggggccaccgcgtaagtttcccccgacacagagcacagtcaccctggactgcgggtttatttcaaataagtggaggggctctttataaaatttgccacgcgaaaggggtatccggtgatatgggtcgtcagatcgaccacggagcgccccgattagatcccgatttccccaaaccggtgtcacacagcagccatcggatcatagatccaaggtcacgatcgtaacacacgccagtcgttggattactgatcatcgaatgagattgatcggcccgaagcggtaccccaaaggaaatccgagccgtccatcagttgaccaacggctccagttttcttccccaatccacagtagaacacggcggcaccggtcaccaggggcggcggcgccatggccggcgatgagccatacggccaatcaagcccccaaactacacaccagacgcccctacgcgaagaggagaactaggcgaatcctatggttagcggcttacctccaatcgatggtcaag

SEQ ID NO: 35520 - DNA, 373 bp, Zea Mays
ccgaagactgacaaaattgaagaaccgagaattgaagggacgaaaacatcagaagttctaagcccttcggcagaagtggaggtgccaaagacacaaaaaggtctagcagcgacccccaagagaaaaaggatggctagtgtactagatgtgctggagacaataaaagcttcaagctctactccagggaaagttgccaaggcttcgaaagcatagattgaaaccgagacaaagctaaccgaagccgaagctacaatgagccgggctgacgccgaagctgggccttcaaagcccgccaaggagaaatcctcggaaattggagaaaaggcagcggaggaagaagctatagaacatatttttcttgaaaaagccgccg

SEQ ID NO: 35521 - DNA, 411 bp, Zea Mays
cgcgggaacgtgtgctcccatgctcggtttccgccgtgcacgtggaccggccgttctcggggtgttcgggtcaaattggtgtatgttccgaggccttcgtaggtcagtgaagcctcatagatagttagcttgagcagtcttcgccggccatggccggtacggaccgcgtctgggacgatctgcgtgcgcgccgtggtcaggggcagtcgcggggaagaaatagaaagggaagggcctttctgtgatttgtcagtgacacatcaaaacagtagaagaacctgtctccaaatagataagaacccgatgccctttctgcaaagccgccagggcgcgggcgcgcgcgcgttctgcgtagacttgggccgcctgggctgaaatcagcccagtactattcataagtttttctttttc

SEQ ID NO: 35522 - DNA, 303 bp, Zea Mays
ggcagtggagcagctaaggacgaagagaattatagtagtatagtttgagaaatgtactcatgtaaaataaataagaaagtcgagttgtaatactgagtatgtataattattactgttcagcaatgtaataaagatggtgtgtgtttggcatgtaataattctggatgtttttcttcctcagatgtcatcgcgaactcgtgctcatgatggggcgggaacttcctgcggcggggaggacactcccaacccgccacctgtacctcctacactggctgaggctatcgctgccttggtcaacgctac

SEQ ID NO: 35523 - DNA, 357 bp, Zea Mays
ggacgcgcggcggtcggaggaggaagaagagtactggcgcagtggcttggtgtccagcgccgtggcaattgctctggcgatcaacggggagctagagtgagtcacggtgatgcagtacataggtagagacacgcggcggacaacggcgacggcttaacgatggtgagaatccttatccgagggcggtgagtaaggggagaggtaccgcggctagccggagtggcgtccagctcaccggcgacgaagattctcttaccccgcgatgttatccatctgccatgagcgcgaatccttacgccggtgacatgaatcgcggcggaggagcgatcgtcggcggtgaggtttattgaacctgat

SEQ ID NO: 35524 - DNA, 334 bp, Zea Mays
gaagacgatgtcctggccatcagatgcaccaggaacggctgcgattagatagaagataccccttcgctcagttgcatcgcatccgtcgatgttcgatcgggcgatccacgatgttttggccattataagatctgagccatccatatttaatcctagggatcctgcgcgataccggttcgtcatgcgccggatctaatctggacggtagatattaaatcgtgtggctctggttggccgataccccttcgcactagaacacttgcaaaagagcccctatttgtatttaaaaacaacccacgatccatagtcctgtaccatgtgtctcagtattctt

SEQ ID NO: 35525 - DNA, 366 bp, Zea Mays
ttcagagttcacctaattatattgcaatttctgaatgtcactgcatctgaaactaaaagtggagtttgtgcagctcacaattatctgtcagattcactagaccagcaagctggtattggttggccacttgctagacatgatgagatggtttggccacaaacagctgtggtcagttacaacaaattagtcgaggttcaaagtaggaatcctagtatctggcctatgccatggttttctttcaccatcatgagtggaggtactgcagtttggtattgtgacacctgctggacgcctccatctccacctacatatccggaggaaaaacatcaacgcccatatggtgctccttgtcggattgccttgttg

SEQ ID NO: 35526 - DNA, 483 bp, Zea Mays
gcgggatgggcctgacgtaagaccactgggccacgctgcccttgcatttattgtggagaagacgcgccacctgactaccccactgacaggcgatgtgccccttcggcatttaatgcgccctgtccactcaattggcaagcggcgcccaagccatcctgcaggcggcgtgtctgactattcccattggccaacagtacacctgtgtcatggcatgcgccgcacccatcatgactcgcgcgttaccgagggcgctgcagcaagatatcaatactgtacgtactacagatattatggtgcacagggattacacgggcatggcaagcagtagttccatccttccatgtgtccctgggcccgcgtgtcggggctcagaacctttgtacatgcccccctttaactataaaaggggaggcatgcaacgttgaggggacttagacccaagtcatccaagacaactcaagctctcaagcaatacaacacaca

SEQ ID NO: 35527 - DNA, 368 bp, Zea Mays
cggccaggcagcgaagagcggatcgacaatgacggtggatggggcgacgacgaggaggtggacggatggggcgacgacgaggaggtggacggatggggctgtggcgacgaggatggggcggtggatgcggcggcgaggtggacggatggcgcggtggatgcggttggaggcggtggatgcagcagtgaggtggacgatggggctgtggcgacgaggatggggcggtggatgcggcggcgaggtggacggatggcgtggtggatgcggttggttgtagaatttattttaggtttagagttaaaggcgatggtgtatatagattacgctagaatttggtggcggggtggctgatttggtgtgattatttg

SEQ ID NO: 35528 - DNA, 682 bp, Zea Mays
ctttcaaaaattgagttgtgccagcagtagtagctttactcttctttttctcgaacgtggacaccaattttggtatagcgaatttagatttcttttatggtcgtggatcccttgatggctgtggagaaggtggatcccttgctggtggagtagacaacgggtctctaagaggatgaggaggagaaggtggtggagtcctaaatgttgatgtttgtggcagagacggtgggttagaaagaggatgaggagcagcatgtgaagattcaggaggtgatgatggatgtacaataggtactaaagtttgaggaggcggagatggttggggatgcgacggagatggcattggtggatcaaccaattcgacatcccttcgtggccaaaggatgaaatttttgatggcttgtccaagtgtctcgatacctttgggcctagggatgtctagcatatcatcctcggatcattggacggtcgtcgtcacttctaccctgcaataatcatctggaatgtcgcttccatgaaactagcgtcctgtgatcacaacgccttgtcctactttcttcgtatgatgattgttaataccatatcttataactagtgtgcacgccacaggccttgtgatgtcatcaactagataacggaccttatttcccattgacgtgatagagcttgggacgatcgtaca

SEQ ID NO: 35529 - DNA, 460 bp, Zea Mays
acccaagtacccaatgatgtcctcatcaaatcaccattgatcattcattcattccagactcgatagttggagataagtcgcagaggacagaggtgaacgatggacgagggacggagggagtaagggcaacgtccggtgttcagcactccaacatggtgaagaagcaaccaacgttcgggtgtccgatgacctagtgaagaagcaaccggcgtctagtgctggcaccgccaccgaggacaaggagactagagaatggtgtctggtcactaggttttgcatcatcgtgctcgggcactggattagaacaaggcaacaagctgaaccgctgaaggctaaagcgggtgcgccttggcttgatgccttgatgggctcatctgctcatgggtcgttgcatagttggacttcaccttcacgtatcacgtccgacgtctccactctagcactctccatgcctccacag

SEQ ID NO: 35530 - DNA, 607 bp, Zea Mays
ggaagaagatgaggtccctctgactcgaaagaacagtcggcagtatgtcgccagtggtgaaagtagtggagttccttctcctgctttgtctgctctcattggtctgcaagaattgtccctggcgaattttgatcagactcttgaggatatggttccagaggatctgttatccgagccggcagatgatggtgtgatggaggtttgtgctgatgtgctcgacgctggattgaggtcatcccgtgcctcatcgaccttagagcgaggtctcgagggtcaagagactgacttggatcgtcctggtcctatggaagtaactgagggtccatcaaccttagaggcggctattgcagagaacttggttctcaaggacagtgttgacacttgcccagcccccgaggatgttgtcggggatgactcggcccgggtgggaagcgcaagccactgcccagcccccgagggtactgctagagatgatccggctcaagtgggcagcgcaaactatgacccagcccccgagggtgtccgagcggggtctccctcttgtacttccatggacgttcatgcgggatcacctccgcactccgtctgcatggtggtagcccaagct

SEQ ID NO: 35531 - DNA, 299 bp, Zea Mays
gttgatgtgtgattcaattttgtgaggttgtcgtgctgggcgcttagggttcaggtgcagagcacgtggtggaaaaggaggaccttacgggtttatgtgtgttaagcaagagattattaccgttctaattcgctcttccttgatacgcaaaataaatgttgccaagcactgcattcctatgtcctgacgggatcagtgtctggactacctctgcactttctgttttgatgtttttgcatggaaacgtgagtttcagaaatacctatatcttccaaatgtgtcccctacctcatttagct

SEQ ID NO: 35532 - DNA, 305 bp, Zea Mays
caagatttcagttgggcagatacagaatcaagaacatcctgtgattatgaaaaaatcagcacgaaatccagtttgctagcatgaacggtaagaagcgaaagttgactcacctgaagattggagagaaataaaggaagacccaaagccggacgaattggtgcactgcttgatgaggggatgtcaacaggaacgatattgagggcactactcggagagaccttagcctcatcagcaggtggcaaactcctgacgtccaggtcactggcgtctaaagtgaccagaccggcgagagcagcagataagtg

SEQ ID NO: 35533 - DNA, 277 bp, Zea Mays
agggatcttccatgacaacacgcacttttctcgcctcccactccgatctggctgactccttctccctcaggcctcgacgccacgacggaagaggccctctcggctgccacggttgtgcaagatggatgaagggcatgactggattatatagagctggtgcgagcccgtacctatgctcatgggaggtcggttgatgcatatccatcggctgggttcgttacgcagaacacggaataatcccaacaactgagctatggtagttatgcctgagtacaac

SEQ ID NO: 35534 - DNA, 454 bp, Zea Mays
cacctgaatattccaatgtgagtacaacattcaatgtcaaagacttgcttccatttgttggtgagcctgagtcgaggacgactcctcaagagggggaggctaatgagaacatgcctagcattcactcatcttcaaatgaaactccacttgatatagctggtccaattacaacgagtagagctaaacaattgcagaaggaaattcgttctcagtttaacgctaaccttatgtttgataatcagtctatgttgaatgagcctatgcttttgagttcttgtttcaatgtccttaggaatgatggagtgtatgaaccagcatgggatcaagatggattcaagcctctggacatttaaaccaagaagcctatggtgtgcatgaataaaatggtggttcatcaccttagcatgggaatgcaaccagaagctagatgactgacacatggtatgaattccaa

SEQ ID NO: 35535 - DNA, 373 bp, Zea Mays
gtcatggcagccaccgtcgaggcctgggcgccgtcgtggccgcgtctggatggacgggatcatctgggccgtcagatccttgagaaacggttaggatcacaagtaggatactgattcgaccgggtgaatggcggccgtcgatctagagctggatctggcgtagtaggatccttgtcgttgaatttagatccgacggtgctaggcgcgtaccgattcatccaaggaaaagtctaatcctagcggtcgagtgatgatccaacggcggagatgcacccgcacccttcggcatggcaatttcgcttatgagcccttcggtttttacagaataaacccgcggtccgcggtgcagtgtactgagtcttggtgtaaattg

SEQ ID NO: 35536 - DNA, 589 bp, Zea Mays
ggcagatccgcaccacgtcgtggctagacatcgtcgcgccatcatcgccggtgagtcctcgtccatcatgctcgcttcgttcttctctgcgggaaacgctagccgcatcgggtagggtgcatgggaccgccatgaacgtgagtcaccggtgcttccgccatgggggtgtggcggcgccacctgtgttgaccgggaaagaagaagggtccctcaccctcgatctatggatggacggatatcattgatcctgggcataccgtttctagaccgttgatccagagataaacgcttacgattagatcctgagtatccctcacttgagtcgatctggtccattgatatcaggatgagcggatgctgttagatcgcgcgttaataaaaccccgaccgtggatctcggatcctacggtggacagaacgtaccgattcgtgttataggcgatctaatctgggcccttggttcttgatcaagcggccccatgcactccataccccttcgccgtttctgagttataaaagaacccctgggatctccatgaattaacccgcagtcccaagcagttgaaaaaaaccttacactgaggccctg

SEQ ID NO: 35537 - DNA, 306 bp, Zea Mays
gtagaaactggatctgaaagcttttcccaccagagtccttgatgcaacatgcacaccacactgcccggcatgaatttcatctaatagctgtctcccgctggccaagtggatgcacttcatgaggactcctcccgcgcctcttctgaacagcaaaccccctatgatggtgtagtgggctgactgtcttgcaatgcgctctgctatagccttgtcatccaggtcctcttcattctttatgtacctgatgattggctctcttcaatcattgggatctgcctctggctaactcagggcgttgcattcttc

SEQ ID NO: 35538 - DNA, 447 bp, Zea Mays
gttaaatatagtttttttattcatcgtggtgtaggatagagtgggtccaaaatataaattatgtgatatgtgattcgtgttttaaagacgagatgtgcgaatgatcggttagtgtttcacttgtctagtcagtaaacgttgtcataaataattgtgctaaaattggtcatgagaatgcagtggggacacgtatgtgcgtgtgtgccgtggtgtattatagtggtggtggcgtaagatatttgattgaggtgtgcgggaatatgccgtaatgtggttatactcgcggcgaggaaagatgtatgcattgggtaacacgacgcttaggtcgctgttgtataatcgaataaaggatgtattattgagcttgagtcaaaatgtggggtaccagtggtacgctaggcaggcggtgtccaaataaattaactggttgatgtgatggttgtcgtg

SEQ ID NO: 35539 - DNA, 368 bp, Zea Mays
tgcggcccgtcacggcctctattggtcattccggtcttgaggcccaagcatggcgaccttgcatcggaggcccaagcccaacacaactagcctcaattcagtacacctggtagctcgacagcccggtaataattagcaacaacgacatacacgtagaagcggtagttgagtataagtgcagaaacaacccagccccagtagtgtgtagctggcggcaagtctctcgagcagcgcaatggatttttattgcctctcacttacaagtacaattgtagtatctattcatgtatgcacacactcacaccaaaatgcacaccaactttcccatatcgtacacaagcagaccatgactctaccctcccctaggc

SEQ ID NO: 35540 - DNA, 456 bp, Zea Mays
gaattcttattgcttgtgacgaagactattttgatattgctccaattacttacacttcaatctactcaatatcagttagggtcagttccagattggaggacgtggtgtgggacttaacggctgtttatggcccccagcaggagaatgaaaaaattatctttctatctgaactgtgtaccatctctaacctgatgagacctgaatggttgattttaggagacttcaacatgataaggagagtgagggaaaaaaacaagggagcaatcaacaaaagagtaatgaggaagttcaaccaaactattgacgctctacagctcctagagctagacctttttggaaaaaaattcacttggtcaaatgaacaggatgatcctacgatgtctcggatagatagattaatggcgacaacagagtggcatgctctctttccatcggctaatttgcaggcaatctgca

SEQ ID NO: 35541 - DNA, 321 bp, Zea Mays
ggtcttttgtgtctaccatccttttttattcatagtgcttctctttgtcgcaatagcttgctttgttgttaactaccgccaatataaatacaagtttcgacatgcgcaaattatgaaaacactttttttggttcataacatttcctaatgtgcaagaacaagagaaacagaggtctggcaaccatgacctcaaaggaagggtaggcacacacctggccgatcgagtccatgtgtgcaacgaggatcttcaaggctcacatcaccgacgccattgcagcaagcctaacaacagtcaaaacatgcattaggatttaggagtca

SEQ ID NO: 35542 - DNA, 289 bp, Zea Mays
tgagcacctaaatccaggaaggtcaggggctaaatcataaactttctcagacttagtaaacaatccaagtggacagcgggttttattttcaagaaagccaggggctctttagcaaagttgtcagccgaaggggttttctcatatctcagccgttggattttaatccgagggtccggattagatcgtcatcacttatgaagcggtatgacacgctaaccgtaggatcaaagatcgactgtccagatttttaaacactaagccccattcacattcgtccgatccgagatcc

SEQ ID NO: 35543 - DNA, 357 bp, Zea Mays
gtgggttctagtggtaccatggcgttggcccattgaatccatggaggagcaggtgctccatcaccttgtgtgggcagtggtgccagaaaggcaagatcatagccatctgtccgttttgctggtattgcggcatctttgacctgttgtggtgcaggctgccgccaccaccaccatgatagttttgttttcatccaattaattttgttctctttgttttgttcatactcatttgtgctataataggaagaggcaggccgcaggtgtggtttggtagatatccagaatgatatgctggagcgggagacatccctgacataacattgggagcagaagagaaactgtggacatcactgcaac

SEQ ID NO: 35544 - DNA, 608 bp, Zea Mays
tccatccctgatttacatctgctatctatagcagctaggatatccacagatggcatattctattgcctaacacccgcccgcagtcgcagcgggaggctcccggacgcaaaggctggatcgaaattctcgaaagagtgctgtcggaagccctttagtcatgatgtcggcgaactggtgagaggagggcacatggagaacccgaatttcaccaagggccaccttttcgcggacgaagtgaatgtcgatctcgatgtgcttcgttcgcttgtggtggacggggttggccgtcatgtagacggcgctgacattgtcgcagaagacaattgtggcagaaggcagctggatgtgtagctcctggagtaactgtcgaagccagcagcactcagccacaatgtgagccacagcccgatactcagcctcggcgctagagcgggacaccgtggtctggcgcttggaggaccatgaaactagattgtcgccgagatagacacagaagccagaggtagatcgtcgagagtctgggcagcctgcccagtcggcatcagagtaggcagtcggcttggtgacagacccggtgccaatgtgaagacccgaggagagagtcccct

SEQ ID NO: 35545 - DNA, 374 bp, Zea Mays
gttaggacagtagttggcatagtgtctcggttgtccacacttgaagcatgccctgttggtggatgtgttaggagccacgggtcctgctggggtgcttgcttgaggagtagcctgtttctgttgagtctgttgcccagaaccgccatgagttggtgtacttggagtggtagtatagcgaggatgggaactacttctagcctgtccttggttagcagtccttcttttctctccaaacccacacctcttgttttctacagcaatcgtcttgtcaattagtcgttgaaaggacggaaacgtgtgcggtatcagttggtattgtagcggtccaatcaaaccttccaggaagagttcctgcttcttctcatcatcctcaa

SEQ ID NO: 35546 - DNA, 533 bp, Zea Mays
ctaaacattagtccctagaaaccaaacagccccttagtcacatatgctttaggtctgcaaacacatgaccccgttagcatttaaccatgtgctagcgcatgtgcgcaaagggctgatatctggctgctggttctgctgctgctgcagaccgtaaaaagcgacagcatcttagaagagctaggtggaccattgcactgctcttttttatccagtggcacagtagtttaaacgactagagctggtacggaatcacactagtgttatcagtgccagcacaatgcagttcatctcatgtaccgggacagtagtgactgggaagttcagtttgaggtactgtactgacgagtttgcctcttaccacagcagaagctaggtacgctggctgcacctaccgtagtcaggtacctccgctgaacgcgagcgtttatgtttgatgtactcgtactctcactcctaacaaacattaattctgtagtggtgaagttcatctttatgatgtacacctcttgtacacatggagacgagacgagcga

SEQ ID NO: 35547 - DNA, 428 bp, Zea Mays
tcacgacaaaattgggattttctgggtctggcgatgcgaggcgagtgaggtgctgggttttgatgggaaacggggtgcggtccaacgcctcatgccacgcggatcggacggtagttcaccagctggtgccaggaagtttggcttctgttgcaacgcctagctcgggttatgatgacggggatgagagatgacggctaggccccaccagcagagatgatgtgcaatcaggtgactggctcaagagtcaagagccccacatgccaggtaacacgggcgcgcaggtgcgaccactgtgggccaagatcaggggcgcaagcaggccgtaggcgtggtcttggtgggccgaaatggccacttggcccaaaccaaggcctatccttccttccccacattttcttttcttttttttattctgttttgaatttctt

SEQ ID NO: 35548 - DNA, 331 bp, Zea Mays
cgaaggggtatggtgcattatgggtcgttggatcgactacctacggatcagattagatattcataactgtgaaccggtacgcaactcaagccgttggatcaaagatctatgttctggattttattagggtgcgatcagatctagttcatccgatatctaatcaacggctcggatttaacctaacgaaaggcattcaacacttaatcagggtcgttcattctgatcggatggccaggattctacagctctgaaggggggactctgattaaatcggagccacacattctccgatcaaaggttagcaaactctcttccctcccgagctctggtc

SEQ ID NO: 35549 - DNA, 425 bp, Zea Mays
ggctactggaagcagtgaacgaccggggacagcgcgaggattaggaaacaagttagagcccggtgatgtgaacgtgagacagagaaagcacgtggtcccgggatcagatgcgcccgctttctttgttctatttattatcatcattttgggtgcgggtccgactccgacttcgccgtcaagattgagctcatttttccactaaaatttcagttgttttatgggtggagtcgtttgtggtgttaccaaaaggtgacggggggtggggctgtggctgggaagaacagagatgaagatgtactggagaccggagcagagaggcaggggcgcaggcgcagcaaagaagaaaatggattcaggaatgcaactcaatcaacaaaatggattaaaaaggaagctttcttcagtccccttctaaccaaacaaac

SEQ ID NO: 35550 - DNA, 452 bp, Zea Mays
acaccaaatactcttctctccactccacgagcatcaccagtaaggatgaaacggtcagtaaaatctagtaatttttttgtaccgcttatcaaattttatcgatccagtacatttccggtaacacttatcggattttcccaatcatttttgtattaatcaggatatatagaaaacggtgagacgtttttaccgtccatttttgaaattttagaaaaatccgacatattttcgtagttttaccatattttctcggcccattcacgatagcccaactgaccgagaaatattggcactttcagtaggcctaccggcccaccagagtcacgcagctagccagacagccaacctccagcatgtaacacctcaggtgtttatcgtctgctcgactacgagtgcggactttaacacgtgatagcggtgaatgtaaaggccactaagttttaatcatcttc

SEQ ID NO: 35551 - DNA, 522 bp, Zea Mays
cacaacaaagaagctattggaaggatagccaagtgggcgtgcgagctaggagctcacgacatagagttccaacctcgcacggcaataaagacccaagtgctggttgacttcgtatcagagtggaccgagcaccaagtcccagacaacccagagattaccgaagtatggagaatgtactttgatggctcgttgaagctgcaaggagcgggtgcaggggttctctttattgctcctgggggtgaacaactcaagtatgcactccagctactatttccaacatcaaataatgtagcagagtatgaagcactgatccacgggctaagtatcgccgtatcactcggcatcaagaaactgatggtatatggagattcgctagtggtcataagccagataaacaaagacttggattgcttgactgattccatggacaagtactgtgcagccgtgcgaaaactggaggaccaattcgaaggattggagttccgtcatgtggaaagagatcacaacgcagcagcagacgcg

SEQ ID NO: 35552 - DNA, 366 bp, Zea Mays
caccgaaggcagttgtcatagcttcatctccggccttcgagtatgctccaagaagctcatcgctagttacctctatggcatctagctactcatcattcggttcatcaaactggctcctgtatcgaaaggtatacttcagatagactaaaccattttggctggagccagcggcagcctccttcggcttttcccatccgtttgcaagtggccacactctgtaagcaatatgctcttggaccaagtctcttgtgccgatataagtgcacactatattgaaagccgactggcatgcttgcacgtcatttccaagtgcagtgggcggcctcctaatgccaaagcgagaccatatatggcactgaataaccc

SEQ ID NO: 35553 - DNA, 364 bp, Zea Mays
acttgagatagctctatatatagatctgtaaacacttgaataaatgcaagcagaataccaatttattctggcttcccagaggaagccagagtctcctgggatcttctccctgcgcgcgacccagccagggtcacgacggcgccccagcgccgccacccttctcgctcccaatccccaccctacaacctacgcaatctgcccggtaggatccgtcattctaccagcagacctccagcttcgttagtccagctgaaatatggctatgatgcctatgaattagcataagtgcattgttttggggcaccatcatgctattattgttttccagaatgagtctagtctaaagactatctatggtagattt

SEQ ID NO: 35554 - DNA, 407 bp, Zea Mays
tcctgacccttaagactgtgctccaaggtcgacgaggtgcgggacaccacccgagacaattccagctcagcatcaggcacatcaaggcaaacatccatcatgccaccatctgctggttcggacaacagatcttctgggaccatatcctcaagagcctgatcaaagttggccagagataattcctgtagaccaacaagagcagagagggctagagaaggaacaccactgctttcgccactgacaatatagcgtcggctgttcttccgagttagagggatttcatcctcctcttcctcaccatcatctacaacgcggacagtacaaccattggggtcagtgtcatccaggttacacccattggggtcagcgtcatccaggtcacacccattggggttaatagcaggcag

SEQ ID NO: 35555 - DNA, 313 bp, Zea Mays
tgttgcggcgcctgttctggcgtcagcgtgcgtcgcactggggtggctcctcccccagtatgctgggttcgccgtaggaaatgggcgcgccctccactcttccctggatgaagaggatgtccgagaagaaggagctaggtgtggtgctgcgcactccatccatctcttttgagggaggagtggtcgggatggtcatcggtggtgccttcaaggtcatgccagtcctagaggcacttgcttctcttcgctgagtgatccgagtccatgcccgagtgggcgatgtggagaacggagtccgtcaggccggaggcga

SEQ ID NO: 35556 - DNA, 520 bp, Zea Mays
taccaaggatccatgaatagaggaacctaatgtgttggttcaacctggttttgacagcaaaacacaagcagctgagtcacccctttcaagataaacttcagttctgcattttcccccttctctccttttggtcagtgaaaatatatccaacgtgatccattttccagctctccaggtctcaactcgttttatctacaacacagcagaaatatctagagagggtggtgaggagagatatttgttttccagacgtctgaagccttaccgaactggttcagttctgttgcagctcaatttcatcacttctattctccattttccaaacaaggacaaacctatatccctcaagcaattttattccttaactataggtctataagtttgctataatcctccagggccaaggataccgtaatcacaaactatgccccgccaaagttggctacaattcacaaaacccatcttcagttaactccaattgaacctgaaccacacagcctgacatagaagattgcaacac

SEQ ID NO: 35557 - DNA, 277 bp, Zea Mays
cgcggagatcgacaatcatggcgggaggcggtttggcggtggtccgaggactccgacgaatagttcatcaggaatggggcagcgtttcccacggtgacacgagcgacagctccctcacacacaagcggacaccatcggcaaggatccatggcggctgcagcccactgctcctcttctctctcccgtactcacgttcggcagcgaggccgagcacgtacacaggcaccccggcgaccaaacagagtgcccagtcaagaccttggagacgacgaatcac

SEQ ID NO: 35558 - DNA, 349 bp, Zea Mays
aaacagagaatggaggataaaaaaactcaccagagatgaagaagatagtcgaggtggtgcggttgaggatagagcgaggcgcagcaacagcagggacggctccaactcttccttctcggttgctacagagatgaaaacatcgtctcggtaactgacatacggaggaaaagggaggagaaatatggagcactctagaaactctctcgagacaacgggagggaaattatacaaagcgattaggaaaccgttgctcgaggaccggaggtggatggagtaattgtatgaagcgaagcacagattaattatttataagtaatacaaaatagttttaatgcataaaaatgtttag

SEQ ID NO: 35559 - DNA, 842 bp, Zea Mays
ccggtataaatgtgtatatcgattgcgcccttcacacactaatttgcattttaacttatacatcacatgaacacccctaattttacccgcgaccataaccatgcgcatttaggccataacaagcaaatcatcgtgattacgagcttaactaaagccgtccaacaattcggctaactagagtaacgacatagcccgctaaataacatacacgtcggctagtccattattatcgcaatccgagacacaacatacactacagcaattttataaacaccatattcacaagtattttcgcacatcgaccaatctatacgaatcgtaaaccactagtctataattcgcaaacactatgcatttacttcccgaatttacgaacacatacatatttatcatacgaaccgagtattttcaatatttatcctaagacaactaactccattacacacttgtatctacttgacttacttgaagcgtctactcgaaatcgtgaacacaatcatacactatatgcgaagcctaatttattaaacgcacaatacgcatcgtcacgactcgccttataaatatagagaaagcgacgactaccttggcatgtcaccacctctctatataagctaaaataatttctacctaaaacgaccaaacattcatgtcgagcacactttattttaccgtgtctcgcatatagtcatatggtggcgtgtactcgagacacttcaatcaacgtggcgcgaccactaatatatgaactccgacactcatgtcttaacaatacatcctccacgcaaactggcattttctaaactatcgtcacatcgataaatatactttctatataatca

SEQ ID NO: 35560 - DNA, 575 bp, Zea Mays
cctataaattgaaggccgggactgctgcgctaggtcatcgtgaagccgacgcacccgttcttcccctcaattacccaccgtagccggaaaattccccttttcccccaaactggtctccgccaccgcgaagaacagctccactgtggccagcccattctggtaaggcaccgtccaattcgcgcattgttctcatgtctctgtatgctggtgatgctttccaacccgtccaattgaattaggtcgccacccattgccgggaacacgagcaaaagtccttagccttcactgttctcgtgggcagggcggagtaggtcaccaaccatgcaattaacttagggaaaatgctcggagtaggtctgatttggtgtccaccgctcgggaacgccagtcattgccccgttaggccggcctgctagctcgccggagctccaccgcgctcaccgtcgtcgtggacctccccctgcgaagaactagaatatggagggtttatgtgcaaactgttagtgacacaatgaaatagtaaaagaacccgttcccagttagccaaaaccccgagggcgtttctgcaaaatccc

SEQ ID NO: 35561 - DNA, 405 bp, Zea Mays
ggggggggcatgatttccataaacgcttccatggctcaaaggtgatggaaccagagaataaaattttgtaacaagatttagaagaaaactgcccagatgactcatgcctccatacatgttggccagtttctggaatcaagacaacctcacgaagagagtcccaaaggagaaggtattgttgcattccaaccagagtaagaggtaacctgatatctctgatccactaaccattattaagggcttgagccaccgttctagaggaggtcaactgcttgtccacctttgagaatactattggagctaaattcttgatgaaattcccactcaaccacctatctgtccaaaagagagtatcattacagtttcccacatgggagatcactgaaatggcaaccaacgtctcga

SEQ ID NO: 35562 - DNA, 477 bp, Zea Mays
ctcttacggtgttcttgcgcgaatttggggaaagttcaaaattcgcacactctggtgagcgatcgaggctaattcttggtggctggatgcttaactaccttacggagctcgcggcggggtcaatttatactatgggagggcggtggccgggaattttagcggtgacgcgcggcggtcggaagagtaaaagttcactggcgcgcgtgaattagtgtcccatgccgtggcagtcactctagcgatcaacagggagctagagtgagtcacggtgatgcggtagacaggtagagacacgcggcggacagcagtgagggcttaacggcggtgaggaccttatccgagggatcagtgcgcaagggagaggcacggcggctagccggagtggcgtcgagctcaccggcggcgaagattttcctaccccgcgacgttatctatccactccgggcacgaatcgggacgtcgacggcacgaatcgcg

SEQ ID NO: 35563 - DNA, 376 bp, Zea Mays
cacccattcatctacattgacgcggtggatctccactcgctgctcacttttacgtccttgatcccactccactatgtgggccttcgttgctcctctttatcttgctctctgctaacctcacgcatcgccgccacgtgccaatgctatcctcgtggcgagctcattgcccacccgcctttgtccaccatcatcgccttgggcccttgcccgaactctacggttacctcctctacctccatgaccccttcccacacctccttgaccatcgaatagctacattgcctcaccgaagccaccagtagccttcccacccttggtgcgcatgcaatgcccccttaatcacaccatctctacctcagagaacccgactatgagc

SEQ ID NO: 35564 - DNA, 312 bp, Zea Mays
tgcctccttctgaggaccacgatgtgttccatggacgactcgtcgggggtctcataggtggcccatgaggcatattcgtgtcttgagtacctaggggatatccatccgccacagtttctaaccccacagccctgctagctctcactgggaaataccccaactcctccatctcttggacccttcgcttcgatgtcttcagccgccctacatcatagttctccctatccgacgccataggggccccaccctctcggggtcagggcgatcatcgttgcagcgacgatttcaccaggcaacggtggcgacgacgta

SEQ ID NO: 35565 - DNA, 279 bp, Zea Mays
gcgggagtcgctattcaggcactttaataaaatcattgtgtcacttcgttaatgttaaataagtgatttcctatttatttgtcggtcattcaattaacaactcaattgaatcaaatttataatgttaattatgtgtttgtcacgcgcctttcgcgcgtctcaccgcgtgttgctcgtgcatgttgcacgtgctatttcgcgcgtgtcgttcgcgagtgtcgcgcgtgctgtccgcacgcgttgtcgctcgatgttcacccgtatcacatgttatccgcg

SEQ ID NO: 35566 - DNA, 380 bp, Zea Mays
cactatttaacagaaacctagggaaggggttcttttagaaaatgtgaacgacgaaagggtatcgagcggttcaagccgtccagattagatctagcggtgaagattggatctgacgtgttatgtgctggtgagcagcgaggaccattggataatggatcaacggtccaggtcacttttgaacgcgatctaatcctacacgtcggtaaatgatcgaacggtggagataggctctagtcaagttggccctatcttctaatcctggccactgataatgcaatctacggttcatgggttgtcttccaccaccgatagctgagcgcagcagatcccgcaccagcggcggccgcccccaacggcggagaccatcaccggtgctcccg

SEQ ID NO: 35567 - DNA, 635 bp, Zea Mays
ccgtggccttaataataaggctaggcgagattatgtaagagacacaattctatcctccaaagctgatattatttgcctccaagagactaaagtggcgtcgttttcttcccatctgctcctatatgtgtgtggttcagattttgataagtttttgaccctgcctgctgttggtactcgtggtggcattctaattgcctggaagggagcagtttgtcaagtcatctcctctcgtattgataatttctcggtttcacttcagtttgctgggatggatggtatgaattggtggttcactggtgtttatggcccgcaggaagatgagaggaaaattcaattccttcaggaacttcttgatttcagaaccctttgcagtggtccttggttgttgactggggattttaacatgatctatcaagctgctgacaaaaataatgctaacctaaatagagctttgatgggcagatttcgaaggtttcttgatgactgccttcttaaggaaattccactgcatggtcgcaaatttacatggtcaaatgaaaggtcttctccaactcttgtacgacttgatagggtgttctgttgcaatgattgggaagatttctttcctaattcactcctgcaaagtgcatcctcgg

SEQ ID NO: 35568 - DNA, 678 bp, Zea Mays
cgaccgggatcatatcgtctcactcagatggacggcacggaaattcggaactcatggaacatagaacacctcaggaagttttacccctagctacatcccagaagctattgggacgacgatgtattctgtaaattgagaaatatatcatcaataaaaaggcttcaaaggcactcaaattgttcgctattaattggcatacttactcaactcggggtgaccactatgccctactaacggagcaatcggcttaagtcggcaatgacttaaggcggtgcgacatgctcacgcttactaaactcggggtgaccactatgccctactaacggagcaatcggcttaagtcagcaatgacttaaggcggtgcgacatgctcacgcttactaaactcggggtgaccactatgccctactaacggagcaatcggcttaagtcggcaatgacttaaggcggtgcgacatgctcacgcttactaaactcggggtgaccactatgccctactaacggagcaatcggcttaagtcgacaatgacttaacgcggcgcgacatgctcacgcttacttaactcggggtggccactatgccctactaactgagcagtcggtttaagttggcactgacttaaattggcacgacacgattggcacgtttgcaatcacccatcttagggcaacttctat

SEQ ID NO: 35569 - DNA, 390 bp, Zea Mays
tggggcatcatttataagaagatcagggtctatattgcaagaatctgtgagcccccatacatatgagtggagtgcgggttgttttcaaatattcaggaggactcttttgaaatgtttccacgcgaaggggtatcatcgcatgagaaccacacgatccgcaacccacggatcagattaactcgccgccctcattgattcgacatggagcaatggctgttagatctgacatccacggaccaaggatcgcccacactgcgagttagcttcagccttccgatccccgatcgatgacccagaactgatgagcctgaagagttaccttcttctaatctagaccgcccattgccggatcaacaaccccaagcacgcatcggtacattctaatccccg

SEQ ID NO: 35570 - DNA, 525 bp, Zea Mays
tgatggccttgacctgaagtactaccctcgtcgttcgaccggtagtgctggaggtgtgattgtctcgccagttggtgagggcaatcccaggctgaacaacatggtcaacctggccgctgtactcaacacagagctggatcacgcccttgatgagttgggcaaggttcaggcagaggttgcggaattgcgtgctgagtgcgcagcacgccactatctggatggtggttctcccgcccctgtcgggattcagcacccttactgtttgccgccccgtggtcgcttcgactatggtaccctagactgcaggactcggatagatttggatccatagatcgacagagtcaaagtctgtaataatgcttaatttagtgtcttaagtttagtgtcttaagtttagtcagtcttagttagagttaattggcttgtcttatgttggatgcttgttatgatggacatgtaatgaagttggatctttgtaatgattgtcaccaaggtgtgggtatcccctgcaacttggtgtagtta

SEQ ID NO: 35571 - DNA, 425 bp, Zea Mays
ataggttgaaattgttctatgaaattaccaaattgttttctggaacacaatatgtaacagctaatgacttctttccaaagatatgtgcaattagaggacacatgagcaagtggctagagtgtgatgatgagttaatcaagtccatgtcaaatcgtatgattacaaaatttgataaatattggactgacattcatggtctaatggctattgctgttgttcttgatccaagatacaaatttggaatgttgaaagcatgctatacacgtctatttggtgcacaaagtagagcaatgctagagatagaaaatgtgaggaaattatttgatgaactgattaaagagtacaacaacaaatgcattaaacctgttactagtggtggacaaaatgcatcatcatcttgtgtttctaatgcttccacatatacg

SEQ ID NO: 35572 - DNA, 334 bp, Zea Mays
ctcgatccacttggtaaaatattcgacggcgacgaaggtgaacttgaggttcccttgcgtcgtaggtagtggcccgacaatatccagcccccagcgttgaagtggtcatgtgtgggcaatcagcttggtgaactgcgaagggttgcccgagcggggagaaaacttctggcaggcttcacatgacctcgtgactcgattcacggcgcaaattatagcgggcagtaaaatccttgacggatcaccttggcagcgagggccctgggccctgagtgagagccgcaagttccgatgtggacttcgcgtaggatctgaatgccttcggtttcggtgatgc

SEQ ID NO: 35573 - DNA, 277 bp, Zea Mays
ggttggccccgaactgtcgtactctcggttgcattagcgtttcaagaacagaaatccaaacataccgaaatactgcagcaaaataatccatatagcctcatagcgatttcttcttattaagccgctgcggcttcgaggccaatcaatatatccacgtcgttccaaatatcaccgccgtttatttaaaatatcaaagccgtccacgtgtcctgtgtcaatctagcctccactcccgttctaaagcacagtgcccgttctaaagcacagtgatgcttct

SEQ ID NO: 35574 - DNA, 894 bp, Zea Mays
tgatagctccctaggtgactcgtgtggatagcaatgttcagccatgaaaccagagaggcgagacgggtgcccaaagaacgtacccttgactgggatgtgagtctgggcacctcgtggccctaactcatagtcccagtgctgatgttcaacgcggcggccgaatggcccattggcgtggtcaaatctagcagatgggcgcggaggcgctaactcgtacgggccaaagatgcccggttggtcaaagttggttggtcgaaattctctctctaggaacttgccaaccttcaacatctccagcgtcaagtcttccaccttcttcgcgaggtctggcttccatacttcaacgttcgtcttcatcagctccagcgcaatgaggcgctcctcaccacacaaagcggcgacgtcgacctgctgatggatactgtcgcagctatgtgtgaaatgttggtagacctcctcacaccgcgcctccacccactggtcgatgctatcgtagtgcccaaaaatttgttgtgaggcaggtttccatcttatgcatttcatcgagcaccttgcggacggtggtgtccacttattccataatgccagatctggtgcgccacggtacctcactgagtggatctaggctgctagtctgataccagatgttatcaacctcgctgggagaggaaccagcgtagatttattctggcatggagaaggggaaaagggaagaaggagatgtcaggaggtaggcgacaacaataattgcatgttatctgatgtatgatggtttgtttcgttcgcgtacatgcataagaatatgtcacggactcagcctccacagactaagccagatctgacccaatgcttattacacgacccattctggcccattcagttgcacattctcgc

SEQ ID NO: 35575 - DNA, 321 bp, Zea Mays
gttgtgatggacgatggtggccacgagcgggggttgcgatggctcgggagggcaaggatcgatcaaggtatacactgacgacgtaggcaggacagggagtcagcctaccccttgcacacaattgacgacgtgggggcgccatccacgacataggatctccaactgccaaatcggtggggaacggggggcatttccaaatgaggcctcggcgacccgtggatggtggcgacctatgtcgagcgcatatggtgcacgcaaatggcagtatgggggcaccaatttccaaatcggtggggaacgggggcatcatttcaaaatcag

SEQ ID NO: 35576 - DNA, 356 bp, Zea Mays
gagacatcaacttgattgtcctcctatcacaactgataactacctgatacttatctagccaattcatccctaggatgacatctattccctgagtacccattactatgaggttagcgggaaacactatcccccttatttccacacttacatttaagcaaatgctatcggctcgaatgttaccaccggctgaatcaatttgaatgggtgttgacatggtagtgattggaagatcatgtgcttctacccaagatgcagtaatgaatgaatgcgttgctccagtatcaaataacacctctgcaatatgggagtcaactggaaacatacctactgtcatgccggggttttcctgaacttct

SEQ ID NO: 35577 - DNA, 328 bp, Zea Mays
agcgtggctacatgtaatgtctaatcccgaccttggcttcgggagaaatctttgcctcgcccgagcccggcctcggctaactgccccagtaagggagcacgcacattaaatgccacctactctctcgcgaacctcgcagaagaccatgccaagcactatttcaaccactccgactcgagaaacttggaaaacatctcatccacaccctgtaccggctagggctcagacgtctgtccatgctcctgaacccagcctcagctgtctacccaatcaaaggaacatgctatagggatcagacgtccttctcctgaccaaaagacaacacaag

SEQ ID NO: 35578 - DNA, 622 bp, Zea Mays
ttctggacaaccatgatattcaggacattcaatcgcaatgcctgagaacacatatcgcttttgtttcacaggacactgtaagtctggtgcatgcatgatctcccattctattgatgtctcctcaaatgctgttatcttcccagattagatcttttgtaaatataatgcaagttgcatttttaagatttgtagtttgtttgctactggtgaaacagtattgtcctgcggttttatcattgtatcatgtgaatagtagagatggaaagcaagtcatattttcatgtcaactgatggatgaatctaatatactaagtggttcaagttcttgatcagaaattatatgttcaagtatgaaactcttagctcattttggtgattgttgttctgcggtctgccgcatcacattctgtgtttgaaatgatattttgtcaacctttcatctgcacttctaatgaaaaactagctcagtagtgctaaatcatcaacacaagatacaattctaggcatctttctgttttgcatgtagagctatgcatgtttttcattatcatcgtgtttgtgcatcactcgtttcttgtttatttcatagatgctattttctgggacaattgctgaaaacatt

SEQ ID NO: 35579 - DNA, 535 bp, Zea Mays
gccgacggcaagggtctgccgcgcggtgctccctctgccggcgaacccagaaccggccctacagttaacaacttccttccccaaaacgtgctatgcgcagatagaaacaaagcgaaacggattctgggtcacttaccacaatgcgcgcagaggggacgacgatccacgacgacaggcggaatctcgacggcggcggaatcttggcgagaaattcaccgagctctgccaccgcattcatagttctggcggtagcagaaggttcgtgatgacccacgatgaccggctacctgacatcactccacctcttcgtatgaatccctcacctctccctgtacttcgctggcaatggtggctgcggcagatctcccattccactctctcactgcttggtgcatccgtatggttgaggcgggcaaagggtatggcggtgattcacagctggacaccgcgcgcaagtcattggagaacccggctcccaccgtgcggcagagacgacgctcacaccctcacacacgacggcgcactgctttttttt

SEQ ID NO: 35580 - DNA, 335 bp, Zea Mays
cctgactgccaagttcaagtatgtaagaaaagttctgaaagactggcagaggtcgctgccaaaaattgacataacggtgaagaacatcaagttgctaattgaacttattgacaacatggaagagcatcgggatctatctattgaggaatggaatttcagagaaattctgcaacaaaaggtggcagattttcttaatattcagaaaatctattggaagcagcgtgcggctattaggtgggttactgatggagacatttgctctcgcttctttcacgcccatgtcaccattaagcacaggaaaaattcaatttctacattgactgatgacaatggga

SEQ ID NO: 35581 - DNA, 323 bp, Zea Mays
atgggacaaaataagaggtgaaacaggcaaatttgctggattctacgctagagtcctaagggaaaaccagagtggcctaacagataacgacaaggtacattaacattcctttttactacttaatgtctgctgacagtttatgtgtaattactgttattcgtgatctgacaatttttataattcttgtgtagacttcgaaagctgcaactctatatgctacctcacagaaaaaaagccttttcatttcatgcattgctggacgcgcctcaaaaatgaaccgaaatgggatgccatggttcatggaaccccctggagaggcaatg

SEQ ID NO: 35582 - DNA, 505 bp, Zea Mays
accgtgcggtgttcttgagtaaattggggaaatcctaaattgaagctctctggtgatcgattgaggacaatacttggtggctgggggcatgatgatcctacggagctcatggtggcctcaatttataggaggcaagagcggtggccgggaattcgagcgacgacgcgcggcggtcggaggagtggaaggttactggcgcagcggattggtgtcctatcaccgtggcagtcattccgacgatcaatggggagttacaatgggtcacgacgatgcggtggaggtgccaaggcacgtggcacaagatcgtgaggaggcagtcaccgacgaggttatccgaagtgaccgtggcaagcttggtacggtggctggagtagtttaatggccggagtttatccacgacgaggattcttactcgatcccaggtgctatccacacgatccgagcacgaatcacggcggcatgagcgagaatccgtgcgcggctcgtcggcggcgagtttctgaac

SEQ ID NO: 35583 - DNA, 292 bp, Zea Mays
agtccaaatgaattggatttccaaattaaaagctatgtatccttgttcgtagacaacaaatgaaggaaaattctacaacacatgacacattcctgccatcaatgaaagattgggcacatgcacacaacaaatctaactattacattagatgccaaagctgaggtttaaaaaatacatattttcagtacctaatgtcctgcaagaaccagccaaccgctacagcctgtccctcattctcctttggtttcaacaccaacagaaaatattcattatttctctgctactatctaac

SEQ ID NO: 35584 - DNA, 488 bp, Zea Mays
attaagggcaagatttttcctccactgtcttttagttactttgatttcccatgaggcagtttcaactgttcgagggtcggtgttagacacagcctgagactgaagcttagcggtgtacccatgggatccctattttgttgtgttcaatcctttgaatcatctatccaaacattgctaagcctattttaggacctatccttgaatctggactaggtccaaaaccctagttacctagccgacggtacttggtcggatgttctggagcggtggaaggtgtaggcttacggtatggaacaaggctaagcggctacccagctctggaccaccccagagaacgtggactctttcccttaggctgggatcttagtgatccgttccttatccatcatcaagtgaggccccgaaatatgtgcaatgtttgggtacataacctggatttcatgattacaacagaaatttggatccgcgtaaggggcagagtaaacgta

SEQ ID NO: 35585 - DNA, 340 bp, Zea Mays
cattaccaaggctagtgtgaatgccgtgcttgtcaagctgcaaatggatagtctgagtgatacctagggattcgactagtgaggaatgtaccatagtaggtggtcccacattatgggtgcctaacttgttaggggcatctcaatatataacccttccttacttgacccagtccagactcgatgacaaatgagctcaattgatcatgtggcctaccactcgaagggttccataagggagtgataggtacggtctcagagacacacttgatcgactagccaggagatcccacacgtaaaagtgtggttagtcaggttccctatcaccatgttgtcaattatc

SEQ ID NO: 35586 - DNA, 582 bp, Zea Mays
tcggagggggcatcgtagcagtcatggtaggccccttcgcgctgggacacagcgctttcgcatcgtgacgaggatccaacagccgaagcagggccttccacttcttccacagggactcttgacggtccttttccatcactgtcgacacaacaacaccaatgtttcttctgtaaggaaatattttaaaatcgcgagccaaacgggacgtaaagtaatcttcaccggtggcccggggaacaaggtcttttttatgccactcacccttggtcaccttcagcattcacgaagatgattcccggaggcgggcgaagtcatgacctccccaggcctagcacacgtctccgccaactcctcaacaaaacaccttaaggccttcggaccctccaatgccctcatcataccttgcacatccattttctttttccgggtcgccgtaattatggccttccccttcgaggagccttcgtctgctcgggtcttcaccatcttccctcggtcatccttgacatcggcagaaccccccacagggtatggaccataccgcaggccattcaactcaaaaacctggttcaacttgacatt

SEQ ID NO: 35587 - DNA, 412 bp, Zea Mays
ggctaggtggcctccacctagctgggcagacatgttggtagccgagcggccaccaccctccttccatccttcatacaatggtgcacacgcctcctccaagttggttcatggtcggtttgatccattggatgaaaggtgtgtttttttcttagcccttagatttgtgcacattgattgatgaggtgttgtcttatagctcaaatatgtggcatccatgtgtagtgacatccaagttgtctagttctcatcatgacacttgtgcagggtgaatgtgtagtggtactagacaagttggggggcaagcagccatcacatggttggtcgggcatgcccctccatggtttgacaattattcttcaagtgttgtctattctcactcctttttgctatattttgtcacatgcatccaaat

SEQ ID NO: 35588 - DNA, 456 bp, Zea Mays
gtgctctgcgcatgtaacaagaaggcagagcggggagggcactcaatttatagaggtcagcttcggttgctctgaatttgggacggggatgaactcatggtgatgtcgttcaatgtggcgttcgtctaacgtggcattcaatgtggtaaagtctcgcggcagtaaatgggctgtccactatgacctatggcgatgtggtaacctggtctatggcgtggcatgaccgagataatcgacggacaccacgacaacggccgcacgaccacgtcgccgacaagtgggtacgacaggcttgcttcaaggcccaagttcacctcctcggcgatcttttcaccctccccgtcgatattttcacgttacagcgcgcacatctcaaccatcgtgcggatcacggcgcatgatcatcggcgtcaaagtgctctaaatccttgatcttttccagttactgtaccatgc

SEQ ID NO: 35589 - DNA, 337 bp, Zea Mays
cgctgttcgtgagccacggatcgtcgttcgccgtgcgctcctcggagacggcgggatgcaggagcaactgcatctacttcgtcggcaacaaatggtactgctccctgtgcaacagggacgccggcaagacctggggtgtgtactccatggaagaccgggaggtattgtttgagcacgctgtaaccgagccgggaccatgctcggcggcgacgtggttcttacctagtgtagtctaggagcatgtataatttcgtcagcaccccggagaatgcggaggccagcaaaggtgttgtttcttgcatagggtggagtgacgcctaaaaatatttgggcccca

SEQ ID NO: 35590 - DNA, 278 bp, Zea Mays
gtggaaagtggggatgaagactctgaggatcgaccgtggcgcccaagccatactatcttcggaaaatcaactatcaagcaaagtcatattgatgccatgagggggagatattttcgcgacatgtctattgtcagagttggaggagacagtactgtccctgctccgaagtaaaacgaagttgttatataccgaagcttcttaaaggcaggtcttcggttcccgctgagcaagtttgtggttgaagtgctaaagatataccaaatcttccttcattagat

SEQ ID NO: 35591 - DNA, 348 bp, Zea Mays
atgattggatgaagtcagtggagaagatgctgattattgttcagtgctctaaccgggagaaggttctttatgcttctagtcgtcttactggtcctgctgctgattagtgggattcctacaccgctgcccatgatgttgctgatactattacctgggcagagttcattacacagttcaggaactaccacattcctgctgaactaatgaacataaagaagaagaagtttgtgtcattaaagcagggcagtatgtccatcagcgagtaccgcgatagatttatccaactctcaagatatgcaccagatgaagtggctgaggacgaaaagaagcaggaacacttcattgaag

SEQ ID NO: 35592 - DNA, 613 bp, Zea Mays
ggctgatatgcgtgcccagatgcagcaagaacgccaggagatgcgtcaggaaagagaagatatacgccaggagttgcgccaggagcgagatgagatacgccaggaaaggagggcacaacaacagcaacaacagcagcaacagcagcaacaagtgccactgcctccaccaccaccaccaccagtcccaccccgtgataagcatagagagttcatgagtcataagccacctacatttgcaagctcacctgatccactggacgcggatgattggctgaagtccgttgaaaagatgctgaatattgcacagtgcacggaccgggagaaggttttatatgcttctggacgtctgacaggtcctgctgctgactggtgggattcttatactgctgcccatgatgctgcagatactattacttgggcggagtttagtacacagttcaggaactaccatattccagctggtatgataaagatcaagaagaaggagtttctgtcgctgaagcaaggaagtatgtcagtcagcgagtaccgcgacaagtttattcagctatccagatatgcccctgaagaagttgctgaagacgagaggaagcaggagcattttattgaagga

SEQ ID NO: 35593 - DNA, 278 bp, Zea Mays
gaagggcagtgaacatggaccctggcactggttcatcaatcgtgattcactagctccgtgacgtggctgagcgatcgacgttgtcatggctcccggtgatctcggttgcaccatgccatagaccatgttaccatgtcgtcgtaggtcatgtgagacatccaattaccccccatcgagaccttaccccattgagcgccacgattgatgaactccgatgactcatctcttcaccgccctgagatcatctttgtccaaaactcagagcacccatagccggc

SEQ ID NO: 35594 - DNA, 448 bp, Zea Mays
cccaaaataggcccatggtctctttaaaaatggcacatctaccgaccaagtctctatcgagcaaccctgcaaggtggagtgaccgaccaggtccctgccgagcaatcttgtgaggcaaagcgaccgactaggtcctcgctgaggcagagcggtcgaccataaccccaccgagcaacccagcgaggtagagcggacgaccaactcctgactgagcagctcgacgaggtggaggtcccaatctagtactgctgacccacatcagctatgacaagacatgtcatccccaggccatgttcggacatacgtacaacacaccgaggcacgctgggaggaagctatcgacatgactatatgcccccacatacggtctcaaatgtatccccactgccttgcagggctaatcaaccctagtcatgggggacctcatcaccaaagtctctacagtgac

SEQ ID NO: 35595 - DNA, 498 bp, Zea Mays
gcgggttctatttcaagtaaacctagggtctcttaagcaaaacgcgcgccgcgaaggggtatcttgtgatcacggcccgcccgatcagattctaacggcccagattaaaacggaccaacccaaaccgggatacacatagcgagggcaatggtatactactgaaacccgtactcaccagcggtgacgctgcagaagcctcctaccacggagttccccgtcacgcgatggagtttgaatgaccgcgaggacccccggttggtcttcttcacccgacaggctacgatcacgcgtggcccaacggtggttcttcctggtatttcgacggcgcccgcccaatggcgtccagcaccatagcatgatcttcacccctcggtctcgctcacgacgacgggttcatagaggtggacacaagtgaggtcgatggcgcgaccccacatccatggcgaaactaagtcagcgatacccaagctagcgcccagatgccacccctctattctg

SEQ ID NO: 35596 - DNA, 520 bp, Zea Mays
ctggctgctggggaatgtgtgtcattcgaaggctgcattgggagcgcaacaaggtgatattcggcgacgtcgctgcattgatgtgtccatcaccatgtcaagattagggggagattgttagcactaatcctgacatgcgtgcgttgggtcggttagctcctagaattgttagctgctgcatgggcaaatgcaaaggatgctcaccacattgtgcggatgagcggcatgcgaggtcgttgtgatacgtcattggaggatctacatgcggttagtttgttgcgatccatcgtgcggcgtcgtgcgcgcgcgacaagctggcaagcgtggagtttgtgctagcatttccgtccagctatataatcctgtgtactgctcgattgtggttatagaaaacaatacagaggctgcgtttgtgtgcagtcagggagtgtgagcgtcatagccattatttgttctagctactgttcatcttcctttagcgtcctgtgttctcgagtgttttgagcgcctgagattccca

SEQ ID NO: 35597 - DNA, 611 bp, Zea Mays
aggtgagagcaccgatcaacatttccaactacaacgagtcttcaaactcgggcgtatggctagaagattattgcctcacgtatcgtgtggcggggataaatgatgactacctcatcatccatttccttcccatccacctcacgaagggaacgagggcctgactcgagcacctgccagccaagacattcacgactgggctgacctatggaaggcctttattgagaattaccaaggcacctacaagtgactaggatgctcctcggacctaaagaggtgcacctagaagagtggggagagcctctaggattacatccggaggttttctcaaaagggaaacgaactccccgatgtccatgacgccgacatattcagtaccttcacctatgaaaccactaatgatgcgctcgtcaatgagctttgatgagggagacaaaggacaaccacagacctgttctgtaagggaaagggccctgcaatgcctgcgggcctaacggcgagaagagggagcgtcgggaacaccctgataggcatggaaggaaccatcgtgcccaactcaatgaagaggaagtcgccaccatgaaccgaccacccaggccaccgaccaagaacga

SEQ ID NO: 35598 - DNA, 480 bp, Zea Mays
cggtaaggaaacatgaggtttgtatacttagcatcttatatctacacttgccattgaccattagtgaacatatttatattagagttttctatatcatttcataggcggtagatacatcaatttgcatggaaatttgagccctcccaccaattgagacactaactttttttattgccactgcaagcatatgctagtattacaactaactattgcaatatattagagcgatatgcaggagaatcacaatggcacaaaaaatattgtagtatcatctgaaatgcaagtagtaccttgcagcatgaaagagatagtatcaagtgacatgaaagaagaggtatgcaacctttgaaaacaggcaaatagatgtcattttggtgtttgcaattctaatcagaatatcataaatgtatatacttttgtttctattttcaggatcattcctctccaggttttcttgcagagaacttatttgctgacttg

SEQ ID NO: 35599 - DNA, 329 bp, Zea Mays
taagaattaggacttgttggtaatgattgtaatgtcaacgtggatggcgggttgattctgtaaaactgcaaggactcttttgcacattcgctcggccgaaagggtatcctcgcatcccagtcgtttgatctaatcgtgatgccccagatcagaccctcacttaattgaatcggtacattgtgtatatggttaggtcccgatccaatggccggaattaaaggcgtgaaggggtcgtgaccagaagcatatatcgggcgatctaccactatcatcgaatggaacaaatagttatgagggatctaataccacccatccattttccgatctac

SEQ ID NO: 35600 - DNA, 572 bp, Zea Mays
tgctgttcttgcttggcctcagctacactaaccccacctacgcggccgccattcagccgtctattcctgccttcaccttcatcctagcccttatcatggggtcagtctctcaatcgcgacactctacacaaattcacactcatacttgtttttgaacttaaaacaccccgtgtgtttcaggaccgaaacggtgagcttgatctcaaacgagggcagagccaagataggtggcacagtcgtttgtgtgctgggagccgttctcatggtgctctatagaggcccagctgtgtttggtagcagcgagcttgagcttgatgtttatagtcatggtgttatagctgacatgacacagcctgagcctgccggacctctaatatctttgttcatggcctttgggctggaaaactggcacattggagtgctgtgcttgatagggaactgtctatgtatggctacttatcttgctttacaggtattagtaattttcaggttgctgagatacttaggttgatgtctaacatttgggatgcttgattgtttggtttgaggatgagtccgttcctcaaatttag

SEQ ID NO: 35601 - DNA, 361 bp, Zea Mays
ggaggagttaccgaagttatctatcgtggcattcaccggggcactatcacaggcaatggatagactacctacgacggtctactgcgacgtggtaacaccactgactacgtggtgcacgagcggcaagcgaccaatgccggcgaggatcatcacggtcggccgtagagcaagtgggtacggtgaaccatccagtgaccgcgttcgagcttatcctggcgccaagatcttttactcccctcggttatccactttgcaccgagcatgaatcgcgacgcccggcgtgaatctgggcgcggggtcaccggcgacgagttcactgaacctggattctccttcaggtcattgtactatcagaactcca

SEQ ID NO: 35602 - DNA, 314 bp, Zea Mays
caatagctaccaggccagtttgaagatgtcaccgtttgaggctttgtatggcagaaagtgcaggactccattgtattgggatcaaactggtgaaagacagttatttggacctgaaattatacaagaggctgaggagcaagtccagcaaataagggagaatttgagaactgcacagtcaaggcagaaaagctatgctgatacccggagaagactgctcgagtttaaggagggagattatgtctatttgaaggtgtcaccactccagggcatgagaagatttaaagtcaaagggaagttgtccccttgcttcattg

SEQ ID NO: 35603 - DNA, 1409 bp, Zea Mays
ggggcttcggcggaggaccacctcgccgccggctccgacgccatggtcgtcgaggcattcctccccgggccccatggcggtgggacgaccgcttcctccacgcgagtggtgagtcagtagccagtactgcggccttttcttttcgtttcttttcgtttcttcattcacagacctcaagagccgggcttgtgttttcatcgctccccgacacattggagattgaactgcttttacctcctagattagagaactgcattagttttgctacaatgagcacccattcaacacctatttcatagttcttcagtattacatctgacaactgggtggaactgatcttttgcaaatatggcgacttggaaaactcaatagttttgtgagcaattttttaggtactcttggatatgcatatgctctaagcactcattcttatgtgcaatgcacaactgggtcactaggttaaacagttagacaaagccaaattcaccatgaacattcctctttctcatagaggtgcttttggtttaactatggaatgggcctatccaccttttgttgtatgtcactctaggataggacatacctagtggtttacttgtgtatgtgaataatttacagcatggcccatgttttgctggatcatcatgagtaaacagtggcattttttttgtagattttgcaagccaaggaagttaaagataaggccagtaagatagagaaacagttcggatctgattttttctttgcaaatcaacctgattcagagagtatgttggctatggcctttaagcaagttgtaattcagcggctctcaaactttcggctcgaggtcttccccccaggttcagagagagacttccaagattttggcaaaccccgaaaggtgtgtgcaaacttgcaaagttcacaaattttcaataatatttgctgctccatttacttcttgctcatttgttaatacacaccaggggtctttggattgtagtatcagctcatcagatggaaaacttctgtcttctcttgctgaggccattttctcctgtgtcattgaggatgtcagaaaaaatcattttgggagcataggcagtttttttcagaagcgacagctcaactgctcaatggattcctcagtttgtatacacaaaacttctgaggcagaagtagtgaaaaatgctaagaggtgtctggagatcgttagtttaatgaagtcttctcatgaagtacgtgaaacaaagaatggatggtggccacctccacatcatgaaagtttggtgaagattgggggtcctgagttagtgctttgggccaatgagtacattcctacttataagctgcaaattaatgccaacgcattggagaattctaatcttgaagttgaaggtctttatgagttagaaagtaataggcgg

SEQ ID NO: 35604 - DNA, 372 bp, Zea Mays
cactattacccgttggcaaagacgcaattaacctagttggcccaattatagtcgcacgacgaccatgtgagcctcaaaattatctcgccttacttaacttgggtggaggaagccactataaaagggagagctacccttccatcattggactagtcttttagggcgattgggtctttccatgagttcggtgtgcttaatgaaatgttgggctctgggcaatcctaatttgttgggcctcggccaaccccacctaggctggatgtatcaactatcgactagtgtgtcatgtgcgaggagcagaccacatcgacttcataatccacaacctccacctgtatttgcaagattcaacacttgaggttgggttgcatc

SEQ ID NO: 35605 - DNA, 545 bp, Zea Mays
gttttataatgttgtcaatctccaatttagtaaacggggagtctaactcgtgaagttgctcattactggttaaaagttctgagaggtcaaaagcaatgcctgagaaatcagacgatcccaatctgcacttgaaagcgtcccagaggagaccagatttatgttcatgctcaaagagggtgatcccattgtcgtcagtcaaggttgcaattgaatttttcctgtgcttaatggtggcatgggcgtggaagaagcgagagcaaatgtctccatcagtaacccacttaatagccgcacgctgcttccaatagattttctgaatgttaagcaattcggccaccttttgttgcaaaatttctctaaaattccattcctcaatagatagatcccgatgctcttccatgttgtcaataagctcaattagcagcttgatgtttttcaccgttttatctatttttggcagcgatatctgccaatctttcagaacttttcggacatacttgaacttggcagtcaggtttttagctttgtcggggaggctagggagc

SEQ ID NO: 35606 - DNA, 322 bp, Zea Mays
gagccctgacgtagtccagaagatggcccaggcgatgatgcaacttctctagctcagccccacaactgccaggagagacaaacaagatgagaaacgagataaagaagccacggaaaggtcggagggcaactgacttaccaacgacacgaccgtaggcttcagcaagctacgtgcgaagtagctcggcctaggcctcggtggcctcttgcgttgcacgagagtcgtcgcaactctctggagacgcctgagggagaggaggaggagataaggagctcggccgtagcagcccgatgggtggcgatgtgacctcctgatcagcggt

SEQ ID NO: 35607 - DNA, 651 bp, Zea Mays
gtcagaattcgaccgataagttccgtgtagcttggattctcacggccattgccaaaaggcacaaacctatatgtgactgggtactgcagcaggtttatcgcagcagcaaacacatcgatgcagaaacctcccaccgttccagtttgattgtctactgatataaactgacggtagcttaccctgtcgggaactccaatcctcagctcattcccgttgttagggaacacccatccccggggcctcgttacagtctcgcctggccagatggcagcgtggagctcctggtttgcactgacattgaatggtttcttgtacagagtctcaggggacacaacggacagcccagagtagttggaccaatagccaatcgtcctcaaaccagaccctactacgtttacaatgtcatatgcaggctggataaggttaccatctgagtccaactttacagggccagtcgcacccatgaaactcacgttgcggattctttctagcaacagcgtcccctcgtcgaagacgctcagtgcgtccagattcagagctcctcctacaaccgcacgcagtctggggtctggagagaaggaaatgtttccgccactgttgaaaaacgcatccaacccatgggcaagcatccagacagtgtcataagcatag

SEQ ID NO: 35608 - DNA, 463 bp, Zea Mays
gcgaattaaagtttggggctcggggtggcaggaatttgtgcgctccggcgaagctccgccgtgggggtgctgtgcggcgccgacggcgcagtgtttgtttgggggaaaggagaaattgggtcctggccgtaggatttggatggacggtggagattagtttggggtgtaccgctttaggcgattggatccgtgccgtcggatcggtatcctgcggattagaacagaacgtgtttcattaagttgtagccgtcgatctccgatctagcggccaccagcgtataccggttcatgtaacattaggaatggtctaatccgcgccactgattctaatcgtgcggcccatatataaccataccccttcgctgaagccgttttacaaaagagaccccacgaatagacataataaacccgccgtccagtggaactattctctgtgtctcggttatcttgcgcagagaccctt

SEQ ID NO: 35609 - DNA, 281 bp, Zea Mays
cagacatgatgtgcaatgacgatgtcaagcatgtagagctagcctcggttgtggtggaccttggcaagcaggcagtgctcctcgttatggatccacatcaccccgtattccaccagcacttagcacccgatctcgttgagttggccaatggagatgttggttgtgaggcgcgataggtagtagacgttggagatggcgcggtgctcgccggtcttgtaggagaatagcacagtgccgatcccctcgatgtgggcattggagccattgtcgaatcacactga

SEQ ID NO: 35610 - DNA, 773 bp, Zea Mays
gacctggatatacaacatagagaatctcatagttcccaaagactgatggttttaaagaaacttttttgctccacaagctttcaaatgctgaaaatgctgtagcattgtcgaacttcacttgcactggaactagatcaacaagaaccattgttttgtcaggttgatcacctgcaacgttcgcacccattacacggacctgcctctgtgccatgtttacccctgaagctacctcttcagcaaaatcagagaccaatggaaaaaatgagtaaaggtcaacgcttagacgaattccaactctgattggtagcacacatgcacatggtgctcccgcaggtggatctgttagaggctctgggcatgataaggaattgcaatctgcatttggcaggttaaacatataagcaagcacaaatatcatacgccatacagttattaccagatcgaacatgtaagttttggattgacaaccaaatgaggacatctacagaaaactgtacctatgcttccattatcttaaaaagtacagaaaactttacctgaattaggtggtggtggaggtaatgtccaaataggatgcgctgacggtgcttttggctctggtaggggagggattgaaggaagagtaggagaaatatgatttcctgtggaatccagcagttctgtaaatttctattgacaagaggaaaagacaacaataagtgaagcaaagagacaaggcactgaaagtacttttcttcgcgttcgcaggacccctcgatgaggctggtgaaggg

SEQ ID NO: 35611 - DNA, 345 bp, Zea Mays
ggctttttacaattttgatccagattttgccagcgataaaagaaacgttcgtattggcttggcaactgatggtttcacgcctttccatatgaccgatgcgtcgtattcatgttggcatgtcattgtcatatcgtacaaccttccacctgctttttgcatgaaatatgagtttatattcctatgtcttgttatacctgggcctgagcatcctggcgtacgcctcaatgtgatgcttcaaccactgattgaagagttaaagaagttatggcaaggagtggaagcttatgactgcttcaagaagcagaaattcaatctccgtgttgtgtatctgttctcggttcatga

SEQ ID NO: 35612 - DNA, 366 bp, Zea Mays
gcaatctccaaccttgcaggctcatagtattgcacataattctcaaagttttctttagtataaagatcaataccagccgagaccaagtcatactccaaactgtttgcagcaacaaactcaacaaaggttgcatcaaacctcttaaaccctgtcatacagataattgtcttctcctcaatgtcaaatctctgtagtggcaaggaactgtctgaccgccatcccattgtaggcagtcttctgtcccataaactcatatagccatcatgccttgaatttggaaattaaaccctccatcaccatctcattctgaatatactcccaatcaatcacctagtacttgtggaagtaggtatccatcaaagttcc

SEQ ID NO: 35613 - DNA, 355 bp, Zea Mays
caaaagtctcctaagggtgcagccggaatggcacaataagtgcgcaaaatcgaagtcttttccaaaagactcttcgtgcaaaagtcgcctaagggtgcagccggactctccgtgccaaagtcgcctaagggtgcagccggaataataggtgtgcacaatcgaagtcgctcccaaaagactctccgtgcagaagtggcctatgggcacggctgtatcaacgaagtcgtgcagccttatcatacaaattatggttacatacacacagcgagagcatcacatattacattggctcaaccttcaggatgatacccatctccctgtagttgaacaacattatcctcaattcctcaccctc

SEQ ID NO: 35614 - DNA, 395 bp, Zea Mays
aatttctgtgtttgatgtaaattgtacatatctgttgcagttactttttttatttaatccctggtttatgctttttgggtgtagaatgatatggaagttcctcaccagtatgtttctagggggatgcataccaaaagtagcaacggtaatagcctgagcctgcagagttcattccataagccatctaaagcaaatcaagctttgaagaggtctacaagtcaaaaggatttctttcattctagagacagcagctccgtgaggtctacaagtcaaaaggattgtggcggtcgtcacggcgaagtcgttgtagacgtaggcgagaagatgtactaccagccactgccatcccaaagccaacgaggttcactcactggtgctaatccgtacaatatgcc

SEQ ID NO: 35615 - DNA, 277 bp, Zea Mays
actatgttaaataagtgagctagcaaaaatgtggttgccccctggttcttattttaaactcccttttctattttctttaactttgagtcaaagtgagtttaaatggtaaaccctttcttaatttggtgtactgaggggtgtattatttttaaataggctagggagtggttaagtacctctctaatttttcttaacccagtctaaaagtgtagctattttcccttctttatttatcctttggtcagtttactaattaaatctaaactttacaatcttc

SEQ ID NO: 35616 - DNA, 555 bp, Zea Mays
ctgcgacattgttgtgctgttgtgtgaggtttgagatttggcctcttttggatacttgagtatctgtttttaatctgattatttcctttgattcatatgtactgtaggagcctctttgagtacccagtcacgtgctggttgatgaattctttttttgttaatttgtgaggcttttttatgtgttcgagggttagatgaggttttagtctatccacgaccgtttttctaaatttatccttgtatatcctaactataatattaactactctccgcagtatggttgttcctatctcatttgctctgtaccccaccactgatataatattattttattttaactgccatccttttctgtattttatttaattcagaatctccatcaacagtagacacctggagcctgcgccctcagctcttcttcttcgctccctcctagctcccctcgtcatttatcagtggagacgtggagtagtgcacattgcacaagcaccatccatatcgccttccacctctgcgagctcgccgccaccatgggacccgcgcacccgaggcccc

SEQ ID NO: 35617 - DNA, 319 bp, Zea Mays
atttatttacgcatgtgttttgccacaggtggttgtgggctccctctgtctagtgtgggtgggcattagacattttcaagaatttaccacggtgaaagaaaagcttagtctataatttagaagaatatcgaggaataacccatagaggcattggtttgcatagtttggattaggctaacatagctatcaataattttgaacaagttttattccatagttgaaaattgggatgttacaccaagccaggatccaccaccactacgatatgtctctatatcccctctgttctacatgttagtcgtgaacatgtattgtcggg

SEQ ID NO: 35618 - DNA, 787 bp, Zea Mays
ataaaaatttgagaacaaagcattgcaagttgctctatcaggcgctctgatgaatgctttcgatggtacagttactgaacaagatcaggttcagtgtatctcaccgccggtgaattggtgacgcgatcctcgccggtgcagcgattcgtgcgctctggcgtgcggataatggtcgccggtgaaaagatcttgcgcagggatgaagtcggagcactattacgcccagtcgtcatacccacttgcgctgcgacgtggccaaacggtcctcgtcgtggagatcaccattcaccatgattgcgccatgccgtaatcaattcaccacgtcatcgcaagctgcaaggactcagcagtgaccgtcgtagagagttagccagtgagtgccacgttagcgaccttcgatgactcttcccccttctcaccgcgtgtgcttccctgtccaaattcaacctcctcgcgtcagtcttctataaatttgatgcccgagtctgctctgctaggttgttacaaagccagagcaccagccctcgcctccgatcgtccatcgtagcgccctaatttcgttttccctccaaatccactctccgcgccaccgtgagtcacctcgtcgtggtcagccgtctacagatccgctctcgccctcctggtttgtgtttcagcactctagcatgcttgtgatactcgtcgaccccgccaattaaactataccgcacctagtcatcgggaacacctcgattttccctcgggtcttgccgtcgtcgtgagcagaagaactccgggccggactcat

SEQ ID NO: 35619 - DNA, 630 bp, Zea Mays
gtggatctatgcgtggaaaccttcaacacattgattgtcgcttatgggagggctagggctaggcaactcaaaaagtgtttctgttatggtgggcgtccagtacaggcgccgcaacaaggctggtagtcctaattagggggctgaactggcttaggctaagtgggctattagcaaggccctttagcagtagaataaagaggctaaaggctttttaggttaatctgtaataggaggttatttataccttaattggaatgaaatgagaacaaaatttgatcaacatattgttgatcagccgccgccctgccctagttttctcctctcctgctgtcttccccctggctgtgagaaccacgacctcctctcatcgccaaccgctcaaggagcggccacctgccacacacagctacaacctaaggagaagagggcataccaatctggtatcggagatgccgggcaacgatgacaacactgccagcgaagtcgcatctgctgcggcgccaaacaccaccagcgcagccctggagcagaagctggacaccatgacgaaggcccttgcagatctcgccaccagggtgttcaatctggcgctacatgtgacagaaatcgatgggcgcacgactcccatag

SEQ ID NO: 35620 - DNA, 322 bp, Zea Mays
cttatggcattagctcaatattgactgcgccctgacaacacgacataatatttgagccgtatgaacttggctgcgtcatgtgattgctatgtcgcactctcgtttaatcggaccactcccgttgagttggacctccatcgtcgagtcgcatatttttcgcatgccctgtaggcaatgtttgtctgtcgtgatcatcgagtcacagttgcactggttgtgaacgttgcgtggacttatcgtgtactccgaccatcgagccacaatgcgcctgttgcgcttgttacggaggcttattgtgttgtcgtagcccagatggccgcac

SEQ ID NO: 35621 - DNA, 390 bp, Zea Mays
tctcggggacgcctgcgaatatgatccatcagccttagtcaaagcatatgttctgattgcagattcacgtggtctgtgataactttcctccgattaattcaccctgatggtgatttgcctcacgaagaggttcatcttgatgatgaagttcctagcaatgcgcgcaatatcattgtgctgggaatacagaacaatgaatcttttgttttgggaaatgacggagatcattattaaatgtgggagacaaatatgtcgacacctatcttgcctctctagattgcaaagggatccaaaacaaagtcctaggcatgagtgtttgaagctctcttatcgggtcaatgataaatgcaatcgaggctgaaccaataatcgcaaagtgaaagtcacgag

SEQ ID NO: 35622 - DNA, 389 bp, Zea Mays
tggactattctattgtcatgcaaatttttattcagctactactttgaggtaatattccctcaaaaatgcgctgaacacaatcctagttacaactagaaaaaatctgtttgttgttgttagttttttactctgcttcctgatgcattgtttcttaaacaaaatatatacagattaagccacttgtgggaccaacgaaagaaattatgaagatcaatgtgaacagatatgagtggcatgaattttttccacaaggtcctctatatgttatcttgatttttgtgttttttcctttctgtaatagtattatattcgtccagtcaaattacagtcaaacaaaaataatgataccatatgtctcttgcaccagtcaagagtaatgctggcgctat

SEQ ID NO: 35623 - DNA, 617 bp, Zea Mays
tctatccttcttgtgtcgccctttcggcgactaacaccatgcttatcgcttctacagccgccgcaatgtataggtacagcggttcccctggctccggagcaaccaggatcggcagggaagctagatgctgcttcaactcatggaaggcttgttccgcctcttcggtccaggcaaatgggccggatttctataggagcttgagaagggcagtgccctctcagtcaaccttgaaatgaagcggctaagggcagccagtgatcctgcaagcttctggatgtccttaatacgggcaggaggcctcattacctcaatagccttgattttctctgggttagcttcaatgccccggtatgaaaccaggaaccccagcaacttccctgcggagacaccgaagatgcatttctctgggtttagctaggtgtgggttgcccgcagcttgccgaaaaccaaggtcaggtcctccactatagtcgacccttctctagtcttgaccacgatgtcatcgatgtagatctccaccttgtcccgaatcaggtccccgaaggtcttactcatcgcccgaacaaatgttggcaaggcgttttttagaccgtagggcattacaacataacagtaca

SEQ ID NO: 35624 - DNA, 271 bp, Zea Mays
ccactatataaatgtacctctcccttttatagcttaaagggagaagatagagtggtatgtgcctttagagcaatggtcctacctaataaaggctcaactattcttatcttattctatacatagagtcagatgtggtgcatgttttgatcgtgacacggtgttgagctcatcaataatcgtcatgtcgcagtggtagatatgtctcatcgtagtgataggtactaaagccaaggctcaactattcttatcttatcctagacatagagtcata

SEQ ID NO: 35625 - DNA, 441 bp, Zea Mays
gtgaagatggcctctcccgacccacagggggagttagtgaagctggcctctcccaacttgcaggggagttggtgaagccggtgttggggcaacatacactgatgtcgatgcttcggccatgaagctaacgcgcaacaggtccctctcaaggtagtctacgtcgtcagcctgcttgggagcattggatggcgtggagcgccgaccatggcggggttgtgattattccatctcctgtggcgagagggatggcgatagaagtctggatgttcctcctctggctaggggagcaggcgtggcttcgctcccctagctgggagaaatggtagtcggcatcagatgggtgtctggtgggaggagcatcatgccatacttgaagccaacagtcatgaactcgagactcccgaaccagatcactgtgtctagacatctctcctcaggcta

SEQ ID NO: 35626 - DNA, 336 bp, Zea Mays
tcgggctcatgaatctccctttcctggtaccatgctgatcttgatgccctgctcccaccttggtcgggattgcatgttctagtcttgaaatggtaaattgccaagcatgaccagactattcattttctgttgcttcatgtgctcattatgaaagaaccttctggaggattatgttattgtggtgctggtgcttaaaagttgaatttgatacttagagtggatgacaagctcagagcaatatgagtgattcgtaatatacaaggacatccatgctacttttgttagctatcacatcatttctagactataagggggagcatgggatatctatcagaa

SEQ ID NO: 35627 - DNA, 274 bp, Zea Mays
gcggtggattcgttgaggtgtcgcttgagggcggcggtgcgccttctaaggtgtcgtttctccgcttgttcctggtggaacgcctgggccctaggactgtggcattggccacattgtggatcacgaggcggagttcaccggtccactagtagagatcttatcatcgatgacgttcgtatttcgtcacggaatatgcaggtatcgtcacagataaagcttttgtgacgattttgtgacaattacgaattggtcataggggtcgcgtcacattttg

SEQ ID NO: 35628 - DNA, 1111 bp, Zea Mays
ctgggtcgcagcttgcgctacccatccgagccgaatcatccccggcaacaccctcgggggctgggtaagcgccagcaccatccttgatggtcgagttctctgcagcagccacctctaaggctgaaggtccctcagccacttccatgggagcagggcaatccaaaccagtttcctgaccctcaagaccgcgctccaaggtcgatgaggcgagggaagctgcccgggatgaccccaacccggcgtcaagcacatcaacacaaacatccatcacgccaccatctgccggttctgataacagatcttctggaaccatgtcttcaagagtttgatcaaagttcgcgagagataattcttgcagaccaacgagggcagacaaggcaggagaaggaacaccactactttccccactagctatgtaacgccggctgttcttccgaattagagggatttcgtcttcttcttcatcattttcatcaacaacacggacaacacacccattggggtcagcgtcagacgcgtcacacccattgggatcagcttcagtaaattcaggcacgggcacttcctcagcaacaggagcagaaggaccgacaccctgatctaagctagacacccgacgaagacgtctcttcttctttttctccccctctacaggaaaagaggcttgatcggctcggcgagaacgttttggacgaacattgacagacttctgagcgtccaaagctttgtcagcctcagggatgggtaccaccaccaatgtttcagcaggagcggcatcagaagaatcctcagctaacatatcaagcatggcacttatctctgcatcactgggatccaaaggcacctcaaagtgaacctgccgttcatcatcaggaatttcttcaagcgaagcaaccaaagcactaacttcttcgatagagggtcgcactctaaggcccaaaccgccatcaccagcaggaggatttgacacaaaatgggtaaaggccttggaaggaggcatgttccaggccaagtatgcaacaggggcgccaacatttgataccttgcctctgagtatcgtttcgagccggctcaccaagtccacagcaggaattcttctgttggttacccg

SEQ ID NO: 35629 - DNA, 493 bp, Zea Mays
cttgatctaaagtacttacccttgtacctatgttgcctatttaaacagtttagtttatgtgtccatgaccttcttgtcttctgagatcctttcttattttgttgttaagtcgctatctttcggcaatttctatgcccctggccttagtatgctcgtatccttggaatcttgcatactcttatattcttatgtatgcttattttcataccccaaaaactgttcaagacatttcagttaacatgtccttgaccacccgtttcttaacggtccatgagcgatcatgttatgttgcccatccttggtgatctcgttgttcctttataacttctctcgataatgaattcttacttcaaccattctattgcatcctcacctatcttacccttgattgtttctccactttgccacttcgcgagtcttgccttaactctatcctttgtcatgcctttgttattatcaccttcaccttaggcacctctatatcttacatgat

SEQ ID NO: 35630 - DNA, 1229 bp, Zea Mays
gttgaagtctgaatttcagactgacagtgtaaccacagaaactttgggtacaaattcaaacatgatccagtaggaatttggctatagctgctgtggaaaaattatagctgaatctttggtctacaactttgctacagaactctaggtatgttgccacagaaaattaagagaaatttaaccctaaaggttgtcaggccaactgaatgaaggacgccatggtacagtatctgagaggatcaggacgccagctcaactcgccgccgacgatccccaccgtgattcgtgccgccgccgtcctgattcgtgcccggtgaggaacggataacgccggggatggataaatcatacgtggcgccatctcccgagtccagccggagttcttcaccggtggccaccatgaccagtaaattttgccgcggtggcactcatgtcgtgatctccctcactgtgtctcctaccgatgtggtcaacatgcgctcgcgatgctatccgtggccatgaggtgatcacccgaccgccgcggctataaatagccctgtgattcccgacgaggcacgaccatcacacacaccgtgggttgaatcgaagccaaattcacgctgtctctgctccctcctctcaaattgattgtgcgcagtaaaactagaacctcttgcgaccgtgtagccccaagctccgtcctcaattccacccgagcacgccgcgacgccattttcccccaaatccgattgccgcgccaccgagaaccgctcacccgtgaccagcccgctctggtaagacgctgtccaattcaagtattgttttcatggctctgcatgctagtgaagcttaccgtggcacccgtttgctcaattcggccatgatttggcgggaacgcgtgctcatgaactcggtttccgccctgatcatgggcagacggttcccagtggggttcatgtcaaattaatggatgttcctagatcgtcctaggtcggtgaagcctccccgatagttagccttatcagtcgtcgccggccatggccggtacgggccgcgtcagagacgaacggcgagcgcgccgcggtcaaggagccattcggagaaggaatagaagtgtgagggtatttctgcaagatgtcagtgactgttaaaacaatgttctggactccttcggaatattcaaacctgtagggttttatttgcaaagtcaccatcgcgtgcgcgggcgcgcgtgggcgcgtctctgttcc

SEQ ID NO: 35631 - DNA, 605 bp, Zea Mays
ctccggctatcaccaagtgtgcatggccaccaacgacatccacaagacggcgttccgaacacacgaaggcatgtacaagttcctggtgatgtcgttcggcctctccaacgcgtcagcgacattccaggcgctcatgaacacggtccttcattcgttccttcgacgcttcgtcttggtcttcttcgacgacatcctcatctacagcagcacctggtccgaacaactgcatcacctgagggttgtcttcaccgcgctcaaggaccactccttggtgctcaaaagatccaagtgctccttcgacgcagcgtcggtctcctaccttggccacatcatctcgacggaaggcgtggccatggacgctgccaaagttcaagtagtggtcgattggccgccaccacgatcggtccttgcactacgcgggtacctgggacttgcgggctactaccgcaagttaataaagtcatatggtgaaatagcaccacccctcaccgcgctactcaagaagaatggcttctcctggaccgatcaggccacaacagcattcctccacctgaagaaggcactcaccacagctcttgtgctcacccttccagactttggacagg

SEQ ID NO: 35632 - DNA, 551 bp, Zea Mays
gcctgctcgtgtgggttttggaggagggttcctgagtgccatgtcgtcgggggtactgatacgataggatagattcggggctaaatttgtgggcgccgtctctaaggatgatttggtgatttgggcattgggttccgtctgcgctccttcctcccaattttgggttccctctgaactctgaattctccatacatggccgcatcgatctattacgcagttggtagaatcggcctttccagttctcagtactcatatttgggctcatcccatctggggagcgtcgcgccaccatttcgtgctacatctccgtgtaccatgtacaatgatgagcctgtttggatcccgtggcactaagtactagtttttatttatgctgcgtccaacgggactacgggaggaaataagcttgctagagccgcgtcatttctttctgcgtgcctttccaggagctgtcccggtgtaaattttgctcatggttaatgcttactcgttgtgctattagaagcttatgcaatcatattccgctgtatcttggagctgcctaccgattt

SEQ ID NO: 35633 - DNA, 466 bp, Zea Mays
aagaggaccatgcgccatcgtggaccatccggcctaggacactaatcgtccggaacgatgcagggaaggagtcgctcctacaactgagcatgaggaatttcttcttaaagaatactatatgaattaagaagtgggaagaggagttccactgacaacaagctcacaagcacgagttgatgggaaagtggtacctctggcactttaggatagatcgccaccaaaaggtcatctaggagaatgaaatagactatgacaccttgccagccttgctgcaacaacccctaactgtaagtgacaccgcatcattcaacaatcttcaatctattaaaatttcttttgatggtccgattaatagtctaggcatagtactggacagtccagtctcttcgcggaccgttcgaccacacaggtcggactatccggagtaccgaaagccacctgtgaccatcctagtacaaaaagccgc

SEQ ID NO: 35634 - DNA, 619 bp, Zea Mays
cgggtcgcggccgtagaccacctgaatggagtgtcgcagagtgaagactggtaggcagtgttgtaggtgtactcggcccacggcagtcaacaaagccactcgcgcaggcgatctccggtgaagcagcgcaagtacgtgccgatgacgcagttagcagcctccgtctagccatccaattgcggatggaatgccaagaaattgtgttgcctaatggccgttacgcgcatcagcttgctccagaaggtagacatgaagttgggatcccggtccgagacgatcgactggggcacgccatggaggcggacaatgtcggaaaagaatgtctgggccactgattcagcagtgtatgggtgagctaaggcaatgaaatgacaatacttgctgaagtgatccaccatagtgaggatgacggatttcccgcgaacacgtggtagtgcctcgatgaagtccatgccgatgtctgtccagacacccaacggaattggtagcggcagcaggaggccgcccaagtggaggtgctcggtcttgcatcgttgacaggtggaggaggagcaaacgaagtcctggacgatgcggcgtatgtcggggaagtggaagtcacaccagaggcggtggaggg

SEQ ID NO: 35635 - DNA, 271 bp, Zea Mays
agaaaaagtaagttgtggtaagaaaggttggagcaaggaaagactccatttaggacggtggatcttgatttatctgaagatctagtttgacttttatccttctttgacgaggttgatccattccttccctggtcttggtacttccattcaagttaggaacatatacttaagataactatgagtaggatatacaacattgatattaggttggaatgggggtcatcatgaacatgttggttaggttgtttgttcatggccgagttggtctcat

SEQ ID NO: 35636 - DNA, 1367 bp, Zea Mays
aaggcatcaattgcccaaattaagcttgatgaatactaccatgccagaaacatctgttcagatgattcaaaccttggtaaccacttcttgaacaataacttgcagcaaggagttcaagcttccctccctcagtgcctgtttgctgctggagatcactcggtagaaacctatgaattttgtggcaacagttcaagtgaattgacacgagttgaattgctaaaaacttttggcaagtccacattctattatgatgtcagtaccaaagatcaagatggcaatttagtaagctcaacttctatgtcgatccgtttggctcctttgcttttatgggtgcacttccatacaatatacatgctactgagttttgtaagtaaagttgagtctgatttgtcacatggagaaaagcatggtgacgaaaaaggaagcagattgagtaccagcacaaactcatcctcaatcggaagtctaaaagttcagatattcctatcaccggcaagaatcaccctgtgctttccatctgagttttcatgggatttgagccacccatctgtcctggataagttcctggtgatcgaccacacttcatgtctgaacatggtagaaactgtatcataccctcaaaatgagtttcatcttagcaagtcatgtacctcaatccatttggctgtagggaatgtagacatatatttggttaagccagtcaataatgtattggttggtagaatctgttcttcaagtaggcaaactttctctacaatgaagattctttctgttactggaaccagttataatgactctggcatcacactgatcaggagaaagtttgctgtaactggccctgagattttgaacaatgcttggagtttgccaaagctgcatgatgaaaagatttctaaaaaacagaacagcaaatgggctggcatttccccttcttcaacacatgatcttgtggagacaggatctagtacgcgccaggagctcctaaagagcactgaggtcttatttcatgttcaactttcttgtgtctcagtacaaattagtaaaaaggattgcgagttactaaataagttgctagatcatgtcattgaggggatatcaaatcaacaaacaagcatttctggaaattccaaggaccaatctgttctgatcaatgatatctgcattcaaacatctgtcctttttgaatgcagtatcttggaaatttgcactgaattgaatgaaacagtggaagttggtcctttattacagtcagaactaaaaggatcctggaactctctgaagttgaaagtttcaaaattttctcttttctcctgttcaaatgttggaggcatcagcagtgccagttttctttgggtgaatcatggtga

SEQ ID NO: 35637 - DNA, 586 bp, Zea Mays
gatgcagtggtccatcctgttttgatcctatttctagcattgcttgtataccttcctgatttcatccacatgttagattgtaaaacttgttatgtgtagcctgtaatctagaatgtttatatgctgcatattctatattaagccattgcaaaatacagtgggaattctagaatagattaagtgggtatgcagtgaccggtaagtgctgtggttatttttgcatgcatgttgcaaatgaatcatcaggtgttatatgattgcacacctttgcagacttgaatgtaatgttttggttacttgactataattaagcatttcggcccaatgtttaaaaattagaatgaccctgcaatgattttctactatggttgactaaccttgtatgtagtggtagatgctattgtcattttcactagggacagcaaaataaatatcatccagactctcattacatattttcatgctgcatctacatgatccagtgctggctgcagtttatatatcgaccaatgcaagaatgaatatatataggttgtagatgatcttcttggttcagctgttcttgcacgcataattaatatctttg

SEQ ID NO: 35638 - DNA, 319 bp, Zea Mays
ggtaccatagtcgaatcgaccacggggcggtgaacggtaagggtgctgaatcccgacaggggcgggggaaccaccatccagatagtgccgtgttgcgcactcagcacgtaattccgcaacctccacccaaaccttgcccaactcatcgagggcatggtccaactctgtgttgagcacgcatgctgttcaacctgggattgccctcaccaactggcgaggcaatcacacctccagcactgccggtcaaacgatgagggtagtacttcaggtcaagaccatcagctaccccgctgaacaacgagcaatactgagaaagtgt

SEQ ID NO: 35639 - DNA, 662 bp, Zea Mays
ccgcctccatcgatgacacagcgaaggtggcccttctcgctgagaagaagggcaaggtagcccttgttggcgacgtccctcatgaggccatcgaggatggaacagtcaacagcaagcgacatcgctaagagaacccgcccaccctagagggcaccgttcgcacatgcagctctgagggactacctcgggcacctccgccaggcttcacccccaagaggctgacgacatcatcgaatacggtgaagtccttgcatcttagccgaggaccagctcaagttgcaagaacttcgcatcaagaacaatcacctacagaagcaaaaggaaatactcgcaaccaagcaccaacgcatcaccatgtaggccaaggtcaggcagatgaggaacagaaggccaaagagctagaacaactaatcgcagatatgcaaggcaaagaccccccacctgcagcaaaaccctctccacataccagtcctacccccaactacttttcaaggactaaactaccttgatgaacaaagccctctcgctccacagctccaagcctcaccttggcccaacaacttcaaggcaggtacctaccccaagtacaacggcagtaccgacccaacacagtacattatgagctaccaagttgcggtcacatcatctggaggagacgacgc

SEQ ID NO: 35640 - DNA, 801 bp, Zea Mays
gcctacccttggaagaactcccactgccctatttatacacctaggagatgtatactggtgaagcctgggtcgtcgtattcccaggggagatgtcttggcgtcctgtgagtgatatgatggtgtactgcgttgttgacttgtgcttgctgatttcctactgagagccgaggccgaggacgaggggttggtcgtacgcccgagcccccaggggagtggtcgcccataccatagttgttgtaacagcgctgcggtatgggtaaaagccttcttacggagcgcgtcagcgtccctgtgccgaatgacgttgtgattcctttgttgcgattattgaggtcagcgccctgctcaggcgaggcggaagtcttcctgaggcgatggttgagccttccctgatgtgtgccacagttgccagagtgccgcctatgggattcgcggcagggcgggtagccgaagctgatctcgagcgaggcatagacgtcgcccgagggtgagcccagcgtcaggcgaggtggagatttgcgtccgagggcgagcccagcatcgagcgaggcggagatttgctcccgagggctggtccgcttcttctgtcatattagatgtcccatcgggggatggcaggcggcgtgcatgcatagtagcgggagcgtaatcatgctattgcatctagacatgaccattgtcttgttagtcactgtgctcatatgcctctgtgtggggtaggtgtgcgcattaaatgcgagtgtcccctattagtcttcagatgcctttatcctatcttcctgggatcggcttgggcgagac

SEQ ID NO: 35641 - DNA, 423 bp, Zea Mays
gatccgccctaggggtaggcctggtggctaagtatgacgccatggaatggcgctatgctaggtcatagcgtcgagcgtgcgatccctagttcgtcaaagttctcaatgtacatgatgttgaggtcagttcccccgtccatgagcaccttggtgacgcgcttagaacctatgactgactcgacgacgagagggtagacctcaagatgtgggatgttgtcggggtggtcgcgacggtcgaagacgattggaaattccaaccaccaaaggtatcatgggattgtcggctccgctgcgtggacttctcgatgagcagcctttatgcgatgcttgtcgtcgtaggctcggccccgccgaagatcatgaggcaccctattgactcggggaaatctttggtggggacttcttgctttgctagctttgtcg

SEQ ID NO: 35642 - DNA, 533 bp, Zea Mays
gtcactagcggcaaaatgttctctatgagttgactcacgtgttcgattgggattgtactctgtctcttcttctctattacttattaagagacaagggaagtcgtccacaagtgaggccatgtccccgcccccgcgactccgtcgacccgcccttgacctagtgcgccatgtgcctctatagtccatctccgccccatgcacgccgccacccggcttacatgcctagagctggagctgagcgtcatcgtgtgcgtgggttatctccgcatcatcttgctcttgctccactccctcgctgaagtcactggatttgtcattgtcgtcgcctcaagcttagtggcagagagggtgacgttacgacctttatgtgggcatgcacacctccatggactcacctccccatgtgccctcacatcgagccaacccgcgttcgccctaatcctccattctcgcgccctcaccacggtccagcgaccccacgcctctataccctcaccaccccgaatcccgccctacacgccatcaccacacca

SEQ ID NO: 35643 - DNA, 347 bp, Zea Mays
gccagcattaggtgcagatgggatgcatacttacccacaccaacaacaggtagtgtatcccctgcattaaatgtgtgtgccaagtttgtaacatgcgactttactgttacccgcatgttaccgaggcaggagcattgactcaatgtgtcatttgggcgcccttcattatgagttcactattcttcatgcattaccgaggcatgaagggatagatggaagagatgagacgacaccgcccacacctatgcatgaaaatgtatcagactacgtcgcaacctaccacaagggctgcgtgcgtactttgtttagacaaaataggaggataggatgtcagtagcttgcacgac

SEQ ID NO: 35644 - DNA, 425 bp, Zea Mays
gtttttccagtatatcttgaaagatgacactatatatttcgttatgtatttctcattctacataacatgatactatctctctgcaggtttctacacagctgcttagcaagcatgccatcagcatggttctagtatatagagaactccgtgcaaactagtggaaaaaccttgttttgcacacttaagatacagttgctgttagtgttatgactcatcactcctgaagtgtattctgctgaatgtgcatgttactatttctatactttgttttgggcatttatgagcttcaaatgccaatttttgctggtcaatttcgtcgaatataaggtttctttcttgagcaggtgaaaagaactgtccaagcagatgggattagagctctcaaaaaagcagaaagagaagcatatgcccctccagcaggctca

SEQ ID NO: 35645 - DNA, 413 bp, Zea Mays
gcggtggaatttgatggcgccggcgagggctccgccgtggccggggcacctctgctcggctgccgtcgggaggttaggggagtgttccctaccgttggatcggtgcggacgactgagattaggttgagcatatcccttcgtgggattcggtctggtccatcggatcatgatcgtgcggatctcgtacaatctggaacgttaaaccatcgatcttcgatctaacagctagcacgccgcatctgtttattataaggctgatctaatatgagccgttagtttggaatcgaacggccgtaagttcacgataccccttcgaccctggaaacttgcttaagagtccctgtgcttttctagaatcaacccgcagtactacaaatagtattctgagtcttgaaacaacttgcgcagaggcc

SEQ ID NO: 35646 - DNA, 319 bp, Zea Mays
agtcaattttgagatgctttttgtggcgatgttggacgaggttgatggagaggtagatggctctgacgttttcggttgtcgtagtagaccagtgtgcttcggttgaggggtgtgtgaatctcctggagaagctggcacaaccagctcgccttagccaacccattagcgtcagcccattactcagcctcagcactggatcgggagaccacgagctatcgcttggaggatcaagaaatgaggttggcctctaggtacaccgcatagtcgaatatcgaccgacgggtggccagacacccgacctagtcagtgtcggtgtaaa

SEQ ID NO: 35647 - DNA, 303 bp, Zea Mays
tgccggctaggaggccgtctagacttcctactttctaagcatgtgttggaatactagaaatattttagggtcagacactcccaagacaagagattatataaagtattggtttggtgtgttgcatgctgcattagtcttttaacccatgagaggactctgtccaagcctgtagttggacgtgtgctgatggtggacctggatgttgacgtgttcctgacatctgtggcctggactgttcctggtggagatgtttcaattgtagattcggatttttatttggtccttaagtccttgtcatgactc

SEQ ID NO: 35648 - DNA, 405 bp, Zea Mays
acttctgaacttgaggataccttatctttgagggcccaaggacttcgctgatgaagtagactggatgttgcaccgggtgcgcatgtccttcctccacccgctcgactactaacgcagtgcttaccgcgtgattcgtgcaggagatatatagcagcagatcttccgctggctgatttggtgcagctcggcgtggtggcttgagtattagtggtgtagtcaggaactttttcagtgcctctaaagcttcctgtgcctctgtggtccactgaaacttgtccacctttttgagcaacttgtagaatggcatgcctttctcgcctagccttgatatgaatctgcttagggctgccatgcatctagtaagcctctgtacctttttctgtgatcgtggcgcttccattctca

SEQ ID NO: 35649 - DNA, 678 bp, Zea Mays
tatgggtacaagttttattaagtgactaagcattggtgttgtacagaaatgggagataaaaggacttaaagtcacgttgacagttagcctttgaactgaaatatggccaccagtgacattggcagaactttgggatcaaatttgagcaggatccaatgagaatttgactggggatactataacaaagttaaagctggattataggttaataactttgatacatgaagattagtaagttgtcacatggaaaatggagaacaagactcctcaaatcgcgctgtcagaacgactgaacatgattgccatggtacagtcatcataaagatcttcggtgccgtgcttctcaatgctggtgatccgccaccacaattcacgctcgcctaggagattcgtgccacgggaagagtagataacgtcgggacaaggtgaaaatatccagtgcggggtgaatccgatcgctggccggaccggccgtcgtgtcccaccgtggttaatcgtgctggcatcaccagagtttgccgttatccggccaggctacgtgccttaaagccttaccacgtcgtaatagaccgctttcggtagcttgttcatcgtctaagacactcccccggtgaaagccacgatagcactacgccagtgacttctcctttctccggccaatagcacaacttcttaaaa

SEQ ID NO: 35650 - DNA, 536 bp, Zea Mays
cgacgccatgacacacctcactgggctcgctcaaactgcaaagatcaccctcgacgatagggagcacttcgtggttgacctttctttagaattggtggagaaggatctataggtggaacaaatgagcaaccgcatccaagcattggagcagtaggtggaaacccgggacaacaccattgagatcctagaaaactagctccatgatgtgcaagaggagcttgcggaggccaaggctcacctagaaatgcatcaccaagaaatgaacgctaatgaggcagacaatgaggaggagcaggatcccgaggaaatagagctagcttccagtccaaacacgacctactccggagtgtcccctacacctgcggccagtgttgcctctaccaataagggttagacaggttagaattaaacatgttaggagaaagggaagaccacgtaagcttagcttttggtaccaacttttggactaggctttagggtggatctcctaatatgatgtaacccagaaaacctgtatgaacaatgcaatgaatgaa

SEQ ID NO: 35651 - DNA, 881 bp, Zea Mays
ctaggacaacaccttggacacaaggcgcacactggatgctggcatctcaccttcagcaacaggttcagccctcaaagcctccatatgagactgaaatatcatggacagaaaacggttacatgttaatgctaatgagcaacagcaagatgccaattgttagttattgcaataatttgagaaagacatataacacaaggtgtttataatgaaataataaccaatgctacactgacagaaactaattgcagttgacatttgatttggagaggtaaaaatgcgaagatttaggcacaaatgatctctgatatcatgttcctttctagaagactgtcagttggtagtagtataatgcaatagaatttgctcagatcaaattcgctgtgaaaatttaaaacgttcagaataactagatcggcaattaatataaattgtttccccacaggtagataattcgaaatacatcctacaaataataattcaagctaatttaatagactgtaatataaaattagcaaaaaaacactacatgcatcagacaggcaatagagtgaagacaacaaaaaatgacaagcatggtatgctgaagttgactactattttgatcagacttatttaaacatcataccaagatatcacttattacattaactaatgcaagtttgggaacagtcggtcatttgttctgctcggatagtctggttatggtaataatcttcttttactacaactttctctgtattttgcataatcacatccacagtaaactcaaagttcagaaagagctaattcgcaagagacatacatggtagcacaacagataaattggatcagactaggatcgttccagtattcatcccaactgccactccaggatagtgtat

SEQ ID NO: 35652 - DNA, 335 bp, Zea Mays
ttcgccttatatgtgttgggagtttgattttgaacacaaccattacaagagaagaaatataaggaattgaaactatagtcagaccaatcataattagccttaaggacgagcatctcaagcacagagcaccatttagtgtgtgggacggtctttctcaacaaaatatggtctatcctttgttttttaccgtttccaaattttcgagacctttagcgctctttaatatcatctctgatcaatgccccaaagcatttaatccaaacaatctccatcaacctcatctcctcacgttcgccatcgtcatcaccaccaactttgtctgcccacatcatcga

SEQ ID NO: 35653 - DNA, 326 bp, Zea Mays
cgggaggcctcattatctcaatagccttgattttttctgggttagcttcaatgccccggtatgaaaccaggaaacccagcagcttccctacagatatgccgaagatgcatttctccgggttcagtttggtgtgggttgcccgtagcttgtcgaagaccagggttagatcttctactacagtcgaccccctactagtcttgaccacgatgtcatcgacgtaaacctccaccttgtctcggatcaggtccccaaaggtcttactcatcacccaaacaaatgttggcagggcatttttcagaccataaggcatcacaacataacagtac

SEQ ID NO: 35654 - DNA, 372 bp, Zea Mays
ccgccggcgaaggaggagaggcgcgagaggacaatccctcgtggcagcccttcgctaccgagaacccagccttcgaggagtactacaaggtattgccgcttgcttcagatcacgccctgtttcctgttgcgatctaatgtcccaagctgacatttgggtgttgctagctttcgatgctagttagatggtggtggttgctcttcatgtaggctgcctatatgacgatttgttgacgtggtaggggctgatagtgttcatttaagctacgtgtttgttagcgttagagtggagccagagcttaagctgttagaaggtagtcaatccacttctacacttcagcacctccactcccgtgcagccagagacgaaggc

SEQ ID NO: 35655 - DNA, 432 bp, Zea Mays
agctgtgtagccgcttagcatggtcccgtaccctaagcctgcacgctccaccactctgcgacgggcgtcctagtatttggaactgtgatccaagggatctgggcatacaacttggcttcccaggctcaatcttgcaggtcctgttgcgtgaatcagaggatggctgataccagacgatgggtcctatgggtgtgctactaacgctccctagccaaagctgtgtacaggtccaggtcccagtcgaggctacctcctgggggccgttgccaactctttcttaggtctactggtatccagcctcgacacatcaagcctacatcctaggggggccaagtaccaggaaggagttggtaacgccacacacaacaaggacaaatagtatacatataagtgctaatactgctcgataaatagtactcaaaagtatcttac

SEQ ID NO: 35656 - DNA, 461 bp, Zea Mays
gaaaaaggttgcccaactaaacgactaactttattaataactacaccaagttgcaggggatacccacaccttggtgacaatcattacaaagagccaacttcattatgagttcatcatgaccaacatcaaaacatatgataagcagactaacactaagaccgattaagaccaagacactaacactgaattaagcattattatagactctgactctgtcgatctatggctccaaatctatctatgtcctgcagtaaggggtgccataagcataacgaccatggggcgccgagcggtaagggtgctgatggtggcgcgccgcacgctcaacacgcagttccacgatctcagcccgagccttgcccaactcgtcaagggcgtggtccagctcggtgttgagcacaatgaccaagttgaccttgctgcttagcctgggattaccctcaccaacgggtgagacaatc

SEQ ID NO: 35657 - DNA, 402 bp, Zea Mays
atgcaactggtacgtgtcttccaaatattgtacatttaccagtggattacaatcccaatctgcaacaaaaaatggcaaaacgaatatggtgattgaaaggctgcacttcaacttttgaactgagcatgtatatggcggcgagccggggacaacagagtcctcgaatatctcctggatgtggcgttgtgcatgacaagggcctccgtcactacggcctcgtcaccgaccacgcgccacaacaagcggttgaaggcggtggtgggacaggttgacctacgagaaggtggcattgtctcagcaacgcctactgtctgctctggctagaagaactcccttggaacagggaacgtgcacgagggactatcctgctagccgcattaagaaaccccctagcagtgtgct

SEQ ID NO: 35658 - DNA, 275 bp, Zea Mays
ctctttgatatagtgccgacaaccttcgccccagtgtggtcctgaaggcatcctaagctttcttctttaactcccccgaagagtagcgcacctggtctgtatccgcaagatatagcatactcttttagttcttctttttcagccttcgacaattcttgcccaagtatatcttggaagttgaagtcctcttcttccgaaatatcctcggttttctcctttccttttccagccactgtgcccgggatctcttcagcggctgcagcagcttcttccgc

SEQ ID NO: 35659 - DNA, 308 bp, Zea Mays
ttgtttggctattcaaccaatcttcatccccattatgcatccgtataatattatggaacaacactgccgcagctggtattttcacttggttcctaattgggtggtgtgttccaacttttagaatagggaaacgcttcttcaaaactcctattgctctctctatgtggttccgcaataaagcatgccggtgattaaataattccttatagtttcttggtcgttggtgaccgtggccaaattctttcaagtggtatcgaacaccacggtacggtgcaatgaatgatggtgtgttagcatatcccccatcg

SEQ ID NO: 35660 - DNA, 378 bp, Zea Mays
gttgagttcagatttgcctgaccatgcatagtgatgagttgcaggtcccttatgttgtactcgaccgacgcctccgcaatgtacaatacaagatggtggcctagctactcattcacttgtccaactcttcaccaacaattgctacctgggaagatcatgtcaccaagcagcagttctcttgtgcgccagcttggggtcctttttcacctacagcagagacttcaaaaacaagcccacataaagaagtgcataaagacaggccaccgcaaacaagtgttcctgaattagattctttttagctatttcaaaaactcaataatttaccgattttttaactattagagacgctccaagtaaaataaataagtgcgtaaagac

SEQ ID NO: 35661 - DNA, 550 bp, Zea Mays
gttgtagcatggggcattcggtgttgggtatggcgccgccgtcgggcaactacggcgaagtcacggcgggggagtgaagacgacgggcggtccgtccgatggtagctgggtggccacgattagatctcaggttatccctagtcgtttcttcaacttgggccgttgattcgagaatggacggtcggatcgttgatgggcgatcggatttgagcgagtgcagctgaaccgttgatcttgagataaacggtagaagtcggatcgcaggatgcgttaaatctggaccttagatcgcggatcctgtggccatcatgcgcgctggttgtgtaaatatggagatctaatctagaccgtggaagcctgatcggatggcctagatctgttgataccccttcgcggtgcatctttgcaaaagagacccctagtttaaatggaatcgacccgtagtccacaacagaggagttatgagtcataggcattcttgcgcaaaagaccctgtactttcctgcatttgttgcgcagtctagagactaaggaaaaccatataaataat

SEQ ID NO: 35662 - DNA, 321 bp, Zea Mays
agtagaactacgactatcacaggttgatagcttgacggtagatgaacacaacactagcacctttgctcaagatcacgctcactagcttttgcacatagcagcacttctctcttgtttggctacaacacccaccaagcactaaatctatcacaaaatacaatagatagtgatagagaatgattctacaattgtttgctgcctttgggattcatttgtgtactggttgaggtcgtgggatgacctatttatagccctaagacctcccatagccattgtagaacagaattggaaactgcagactcgagggcaccagacctccaa

SEQ ID NO: 35663 - DNA, 466 bp, Zea Mays
attatgtcagatgtaagaatgtgccagctggactattgacaaggaaattgatcaagtgtcgacccctcctatctgtccaaccatcagacataagtgtgcaaccaaattcagtccaagccaactcatgagtctttttttatctcatctacactcttctttgccttctcaagcaatggcaccttaacatcatgatatgagggtttcacgtacccaggaccatattgcccaaccgcctcaagcatgatctcaaaggcccttgagttgatgacattaagtggtaagccgctctcataaataaaatcagcaacatacatatatgttatttccttctcctccttgctctttcgctgcaatgtagtttgagtgttgcccttacaatgcctctcgcgaaccacatcttcaggtgctttgcgaaacatggatgcaattgacttagaagacttcgacgcgtgttgattgttttggc

SEQ ID NO: 35664 - DNA, 837 bp, Zea Mays
ctcctattcacttaaaaattgccgcgttctagagacttgaattattttaacaccttaccatttgttaaagttgaaacaatcaaattagaaccaacaagtagacttactaattttatacaattcattttgtgcactagaattgccatacacaattagcaacgcatctaccacaataatcttacccgacatatatgtgtttatcgatgcactcttcacatagtaatttatagtttaacttgggcatcacatgaacactactaatttttattcgcgactgtaaccatgcgcatttagactacaacaagcaatttatcgcgattacgtgcttaactaaagccgtccaacaattcggctaactagagcaacgacatagcccgctaaataacatgcacgtcggcttgtctattattatcgaaatccgagacacagcatacactatatgcgaagcataatttaacgaacgcataatacgcattgactcgactcgacttataaatatagagaaagcgatgactactttggcatgtcaccacatctctatataagccaaaataatttctacctacaacgaccaaacattcatgtcgagcacactttattttaccgtgtctcgcatacaaccatatggtggcgtgcactcgagacactttgattaacttaacgcaattaccactacaatgcacttcgatatacacgttcgacatcacagtgcttcgacagaccccacacttccaatctacttgtcacatccaaacacaccacgtgcccactgcattctcatgaccaattttagcacaattaattacgacaacatttatcgactagacaatgaaaaac

SEQ ID NO: 35665 - DNA, 273 bp, Zea Mays
gcatgtcatgaatttcctgagaatgcgcgggctagagctgctactagtgagtttactgaatttgcttctgtttggtggatagaacatggtaagaagaatcctaataacatgccacaaacttgggatgcgttgaaacgggtcatgcgggctagatttgttccatcttattatgcacatggtatgttaaacaagttgcaacaattgagacagggtactaaaagtgtagaagattattatcaggaattacaaatgggtatgcttcgttgtaacata

SEQ ID NO: 35666 - DNA, 482 bp, Zea Mays
gtatatatgtgtccactatagacctatcacaagcttcggtgcgggggaaatagattttcagatcgaagggagtaaatgctaagtcagataagtttaattggacgggttcagacgaatgagctaaatgagacagaaagcatgtttctatgcaggattagttaggagaacttagtcggggcacaagaaattgatcagaacaagaaactcagtactcatggtggataatactagcaagctttattcatataagcggaagtagtattacagaagaagatccagttcattatgaaccgaccctgcagaataccccttctaccactactcctactcactaccactacatcctactactacattacactatactaatatctaagccggtggtgccttgccatcggtgttgccgccctcgcctccgccactgtcgtccttgccgctaccgccattactgttgtcatccttgcctccctcgtcgtcgccgt

SEQ ID NO: 35667 - DNA, 655 bp, Zea Mays
ccttatgttgccttacttccttaataactatgaatgtgatcgaggttaaggttcggccttcgccccaacaggatggattagtcccctcctttagaggtgtttggattggagacactacgtgctatacctccatgatgcgggcttgctttatccctccaaattcggcggataacacaacccgttcctcgttccagatccatgtgatgcatacgagacattcagtgcagtaacatgacacatgtgctgtccctttcacccctccccttgtaggttgtagcgctggtgagtaatgctggggacgagtagtggcattggtgagcatgacacgagtgtagcagcagcgcgaggcgagcaacatcatggatgagcggcagcgttggtgagtgggagtggaagcagagtagttggtcatgacatgaagcaggtggtggcgcttgggtggacgtgaaggaaagagagaaaatttgggaattggaatgaatggaagctgctgaaatccaggaccacatcgtagtcatagtaatgaggaaaaggagagaaaataaaaagaagaaaacaattaaaatagggaggcaacctaaaaaactagagggtaaccgtattaatgtatcctatcctcatccctcaatcctaacactcgaaaggatatttccat

SEQ ID NO: 35668 - DNA, 326 bp, Zea Mays
acaaggacgtgccaagtcatgattcaaaagcaaaaggagatagctgaagccaaagcacggcagaatcagctgaaacaggtcctgcacactacttcatgttgttcgccatacatccctgagtatgtaagcaaccagcaacccacaacatcagttgtttcggcaagtcactctcaagctgcatgggctcagctaccaccaccaccacctacggcaccaaccttgattcacactcagcagccagaagggcatctccaagtgtagcaacagcatgacacacgagaggagtccgaagctcacacagtcaatagcattgtgcccaaatcgag

SEQ ID NO: 35669 - DNA, 483 bp, Zea Mays
cattcaaagttataaaaatattacacactttgttcagcaaatattacattccaaatgtttttacaataacaactattcttctttcaaaactgcttccgcagcttcgttcaacagtcgagaaacagcttcatctaaaatagcttcggccattttagtaatttcttcctccctctttgcttctgggtcggccattggctcgaagggctctggggaagaagatagctcagctgcgatagaaaacataaataagttcgaagtcgcaaaaataaaacataaagttagaagtcattaaataatacctattctcctttctagttccgcagttttttcggatgccttcatcacttcttttgcatcatgagaatcttttttgctcttttttattatctcgtgtgccatctttcggccgccattctcccagatgtcagtaaagaattttccgcccactaagttggcttcggccgaagggtcttttgtatcttc

SEQ ID NO: 35670 - DNA, 293 bp, Zea Mays
ttccagtgtagtagccacctgggtataatacactcacccagttttctttagatttttgcccactgaaggattggacgtgtttccctttccttgatttgtgttcctagtagtctattgaaggtttgatctattctgcttcgggtagggacaatctttgatgaaatgcccaaacttgccacaattgaagcagccactcgaggaacttggaagggcagggaaacgagcaacaggggcactcggctgattggtctgggcgggggctggagtgggacgaatgaacatgggttgtctga

SEQ ID NO: 35671 - DNA, 338 bp, Zea Mays
cagatacatctggggtcttccggtccccgctgtccccgattcttcaagccagtgggtgcgatggaaataaaaggtctcagattctccatgcagtggctccgggatgcagtactagatgttgattgctcgtccacattatcctcgtcgcatcctcttttttcgcctatatagtaaactcacggccagcgacttcaagcggtgagagcgattcagagctacacagccatggccagagtagctggcctgctcgcctcctaatagacttttgcatcttacatgtatgtgtacaggttcagttattaatactatttttgttgtgatcgtcaatgtcgtatgct

SEQ ID NO: 35672 - DNA, 411 bp, Zea Mays
ggcggccttatgctccagctctagggacgaacaggaggtgcgtccagggcctaggcctaggtgagcagggcgctgagcgctgttggggaagggcaccggcatccatccatgtaagcattgagccgaggtgctggaggagtccctgcgccatagaagctcttgttcctgcgaatcccacccaaggggcggcactttagggctttggagaggagcaccttcgcgcgcccaccatgggagccgagaggaggcaggaaaagcttcatgaggaaggtaccgagtggctagaagaaaagagaaaggggtggcggctagaaaaagagaggggtcggagtgcaaattttccaagtgcaagggagttgtccttctatttatacaggagctagggttagggtttttcttgagctggcttag

SEQ ID NO: 35673 - DNA, 285 bp, Zea Mays
aattggtaccgaaactcaggtcgacaaatctcggctcaatgtgtgagggggagattgtggaaatagtaccacattgtgagttgcgtgtgggcaagcatggcttatatggatgtcactaccactggagcactcgaggacgctgtctcatcaacgagggcactcaccaccacacaacaacaaaatcgagaggttgtaatcaatcgtactatcgagcgagttactgtgcccagaccaacaacctatccatgggaaggccatcaacacggtgaggttgatgatcataat

SEQ ID NO: 35674 - DNA, 371 bp, Zea Mays
aagggagccctttaatcaaaaagggaaacaaacacccaattcccctcgcaaatgaacataagttttttgatcaaggagtttggtcaaaatgtctgcaagctggcgagtggtatcaatatagcgcaattcgatgtcgcctttctcataatgatcatgaagaaagtgaaagcgaacatcaatgtgcttggtccttgaatgtagcacatgattcttggcaacacttatggcactcgtgctatcacaaagcagaggcacatgatgaaaatccaagtcaaagtctcataaggtagccatcatccaaagtaactgcgaacaactagcggtagtaatatactcggcctctgtggtagacagggcaacactagactgtt

SEQ ID NO: 35675 - DNA, 390 bp, Zea Mays
attgattacaaaaaatgcatgtactttgcagcttgcatctcttttcagcttgttgtttaactttgatactcattttaaattcatggtttcatgttgataacttataggatgaccaagtggcacatagtgatgaagaggggctgttgggcactgatctctgaggcaaatgattgatgaccattaaccaaatagaaataggagtacgttgtaggcaagttcgcaagtggcagtacgcaggactgcaacaggaaacttatttattgagtttagaacttagatgctggtaatgttgcagacctatattatctctatccggccaccaaaacatatttacttgtggctgtaatgttgcagacttgcaccaattaagttagaaactttataactata

SEQ ID NO: 35676 - DNA, 278 bp, Zea Mays
cattgctgatgattccagctgctcatccatgcactaccaccgtctctagaatcatagctagtgtgtccccctaaactccatgtgtgattcaccttgatctacacagattcccttaacaagaagttaagaaacacatgtgcctgcaaaagttgctccgatgtcttgaactctgccttcaaaactatagtgtgaaaatcatctccaagatcctcacaaatcgtctcaagtatctaataggttcgctcattcaccttgaccggactggtttcctcaagggg

SEQ ID NO: 35677 - DNA, 366 bp, Zea Mays
gtggagagtcgtagccctcggaggagaagccctcctcggaaaactacgagcctccgaagtcctccgatggaggagtcagagggtgcttgcagtttccctccgccgagccacacatgccattgccacctttgccaccggccatgctttcttgggtgagtggaaagagtagacgaagaagagtgcagaaaggcaagaacgagtgaagagagcggacacgggtaggcgggctatttaaagatggcaaaggctgactcctcgtttcgcgctcgtttagtgaacagtggcaaagacttcaatagtcactcaagtttccatgaaaaggagcatacgacaccgggagatagtaaggtcaaccgctcagcattg

SEQ ID NO: 35678 - DNA, 624 bp, Zea Mays
gtaatcatccagggaggacaacaggggtgagtgcttatgtgggtttagggatgggtcttgctcaaggtgatggccctcgtaagaagaaacgtagaacaacgaaagaatatgtcaagaggattgtggatgagtatgaggccaagtttgacaaactgacagccctgtgtcagagtatggagtgtcgattaaacaattctgagagttgctcatcatcaaaatttgttgatacaccagaccatgcaacacatcattcagttaactcattacaagtaacttcatctacttgcaacacatatgacttatcagataacaaaattaatgtgccactaatattctgcattttcccttaattcttcctatgtttaacatttcaggaggtgatgaaatgcaagttagtggtgcagataggtccgcaatctgttgtggtcgctagagggcaggcttaccctcgaaaggatgttgtaaccgtccatgggattgagcggtgagatgaccacacaaaagtgcaggttgattttgtgtttgacaacttcttggattttccgctccctataccaatcgctggtggtgatatgttcactcttggtgaagccaaaaattcatttgtgttatggcctaagtcag

SEQ ID NO: 35679 - DNA, 516 bp, Zea Mays
ccgagcaatttatgtgaattgcatgggggtttattacgcaccatttggcactcaagctctaaactggttatccaagtgagatccgaccaccatttggcagggtttggtttctgcgaatggtcccactggagggctcgacccgttaggggcatctcatttagtccttcattattcaatcctgttccgaccctttggtcggcctgggtgaccaaagaggggccacatgtccagctcgtcagtcgggtttctgtaggataatgtgagcttcaaccttggacgtgggctgagcaaatgacctatgagccggtcacctagcttgcggctcactgggagcttgctcgatccacccctcgctttgcgtgaggaataaaggtgagttttgagttttttacctggttggtatgatgcagttactactgtggtgtggtaaagggggtggtcatcatgacgccgcttagcacggttggctttaagggatgcgaaacgacctgcctatccatcatgcttaggtggctt

SEQ ID NO: 35680 - DNA, 283 bp, Zea Mays
aacatcctagggttcaaaagtagcaacaaaagcggactgagcaaagtgagaaatcccaggatacctggtgtgtgtgactcactcattgatctcaccactcatctgttgaggagggtggtcttgctgaacatgccacagatccgtccttgaggaggtggcatccccgtcaacagcagccttaactcctccaatctcagcaggagctggctcgagcggacctcaagtggtggaagaagtggggtcaagtccgtcagtcaaagtagtggaagcaggcttgactaga

SEQ ID NO: 35681 - DNA, 279 bp, Zea Mays
atgagccacctccatagcctcctcatcatgagtcctcctctcgcgccaccactgcctcacgttcgatggaccgtagcgggagaggtagaggttggccagggacggggtcaaggctggggactgtttattcgtctagccaagggcattgctggcgccttcgccatgtgccgcaaccgggcgattgaggagtccgtgcacaagcgtcctactgaggcgctgcatgaggactttcgtcgttatgtcgcctccacaggtcatcctctgcctcttgggtctcct

SEQ ID NO: 35682 - DNA, 560 bp, Zea Mays
attggtgctcaggagctgaggtttgcctaattttggtgctgtctatggcgctgaatgctgattcgatgaagttgtgtgctaggcaggcattcctatttctaaggggtgtcaattggatgtccagccttctattggatgctaatattgggccctttggaacgctggattttttttcctgtttcctgtgcctgtgaaaatgaactgattcttgtgaaatttctatatgattcctctgaaattccttcgttcaaaagagcccttcggtgtttgcacatggtgcatgcaaaaaccccactgctcaccggaacacccactgaagaacaacgcgagaatacacagagacacaactcaattggacgatggtggacacagctcccggtaccttcctctcacgaagaacgattaccagtttaccaccaagtttagagtagtagtacatgaacaaagataatctggaactacttcggacgagttggccttcaactttctgcccaagcctacgccaactgcccaccctccttcactccttatcctgcttacaactacagaaaacaaaaagc

SEQ ID NO: 35683 - DNA, 2752 bp, Zea Mays
ccgacatcgacctccgggccatcctgcccattgccctctctggttcgtaccactaactaccgacctgatcggttcgagcatgctgatgctttattagttgcgctcttctagagtagccactagccagcatttcatgaaggacaacttggttgtattttccgctaaaccgagcgttctagaattttgtttggttcgtttgattcttattttagctcccatttaatataatatctaaatcagctttctcggaattccctctggattttgctgctatttgcaggttgatcccatccgtctacatagtacacctagttgtttatgcttgtgcaattatgcatgcgattttatgaaacttcactaatagctcaaattgaatgaagtttttaaaaacaaaaccaatttagttttgcatatgaggtatttcattcgaagagcttctcttcctctacggtacctgaatcaaattgcttttcagggttggagcaccttaccagcgtagacgagagatttgcaaaatacagcaacactctgttcagggagactagccttgaggtgaaccgcgaacagttgactcccaaggagaacgacaaactcaacaagtctatctccacctaccttcgccttctagctggctatttgcatcttccctctgccctcaagacccttgaataccttatccgcagatacctgtatgaatttagctcagctaattttgccgatggccctacgagctctagcttattctcttgtttctggtgggaaccttcatgtagggtgcatgtatacaattcggatgagttgctgctgagcgcactgccataccatgatacacatgcgtttgttcggatcgtgcagttggtcaacttagggtgagtgtggctctggtctggatagatacttattttctccatttgtcttcaatatcaacttgtgctggttgatgtgctttcaggaatagtaactgggcatttcttggcggtgtcaagtcctcaggtgcaccgccacccaggagtgttctagtgcaacagtgcatccgtgataaggctgtgctggagaccctatgcaactatgtaacgccgaaattaataatccttttaacagtaggattctgtcatgatttttgatatttttttgttgataattcattttactttcaggctacaccaacaaaggaattcagtcactcgaagacagtcgtctgcttttgcactgctgtgattgttgagtgtttgggtgctgtccctaagcttgacacagatgtagtgcagagggtgttgggatttgtgtttgactctcttaatcctgcagtgacgcgagaccaggaatataaggttacctcaaatgatttgcagtttttttggccccttttcaatggtcatatttgttatattttttctttcccttttactttgcaaccctcaactggatactgtgtgtacactatttcgaacattatgaatcttttattgtgctatatgggtttacttcccattgaagaactattgacatcctgctttcttagcaatgttataactacagttatgttgtatctttatgaccaggctggcgctcttatgattgttggagtacttggaacccgtgcgactctagcgcctaaacttgttcaaaatttgattcttttcgttgcaaggactgcacaacatgatgcattcgagtcagttgacttgccatggcttcgtgtttcagtgatggctcttataagtcttgttcaggtttggatttaacttattgtcattcatatccttaggaaattctggcttgctatgtaaatcattgaactcaatattggtgatgctgaggtagaagtattgataaatgtctgctaattttacagtcccaatctgtccatgttttccctaagaagccactgatggttttgaaagacatcaggtttaccgttgttttcccagcatacacattatatatttgctcctttctgtttctcctggtgttgaagtgttaaattcctatggtaaacttttttcagggatttttctggtatactttctgtattatccagtgaatacaacatcgagaaattcattaggctttatgttgaatcattaattgactacaggtgattttgcttatctgatgtaattatatttgcatatttctctctggcattgtatgaacgtttataactcttaaaatgcgaacagtattgtcgatggtacctgccacacacacctgattgaaactattgagagtctgccaatgaagaatttcattgaaagtgtcgtgtgcaaaattcttggaaactgtatcaaggtatctcgggccacaggaatcccagatattaatcacacaggtaactgtaacagctgcttcaattccattttaaactaatcaagtaatttctttttttttgtgcatacatgtattttaagcatatcatggtgttctgtactgtatgtactatgtagtatttgatatatattgtttcatctatttttcagaattatgggctaagaaaatttttaaggcaattgaaagaaaatatcccctggagctacgtgatgctattcataaatttcttgaggtgcaaaatgacacactttccacttatgtaacttgtcagttcttattgctgttgtttgacacttctttctccctgttctcagaactctgaaactaattcaccgggaggggattctttggctgaggtttttgggatattgtttgatgaaaacaagaatttgccaactgaaatatctgactcaaacatttg

SEQ ID NO: 35684 - DNA, 608 bp, Zea Mays
gttgctctgtcatgcgccctgaatggagctcccatggtacagtactgaagaagatcttcaggtgcaatgcacctcgccgtcggtgacccttgcactcggattcatgtcggcgctgtgatttgcgctcggtgacacgcggataacgcatctgggtgaaaagatctttgccatggatgaggtcggggcactgtggctgccctgtgccgtacccccttgcgtcgcgacgtggccacgcggccgtcgcggtgaggatcgcattaacttgagcacaccactctactgaccttgttactacgccgcagtaggtcgcggtagatagcctctatgtcactggggactgagctcagtgagtgccacattgagcggtctacggtgactccttccctttcttaccgtcagctcttctccacccaaattcgtcgtactcgcgatcgctctctataaattgatgccctagtgagcttcgctaggttattacgtgctcaatgcaccagttctcacctccgatcatccaccaccgtgccccaatttgagatttcccccaaatcagttctccgcgccgccgtgagccacagcgtcgtggaccaccgtctctaggtccgctcttg

SEQ ID NO: 35685 - DNA, 890 bp, Zea Mays
tcttttacaaaatcgacttggcgaaggggtatcggtcgcttctggccgttggatcctagttcaagcgctcagattagatctgagccatatgtgaaaggggtacgcaatataaagcctcggatccagatccaacggtccgtgttttatgacagcaggacccgacctgatccacacgatttcgatctaaccgcccaggacttaacccgcccaacccaggtgctcacctaatcctagccgctccaggccataccaacggcgctcgcccatcttcccacactggccgcaaccacggaggtgaacagggtccggcgcggcggcgccatagctgaccccatacggaccacgttctgcacccagggcgatggctacgccagtgattggccatccaccactaccacgcaactatccacagccattcacatccgatcgctcggacatgcgcccatcttcaacctccagaagccaatgcctggggtcggccgtgttccatacaggcggacgtgcccacggcacagaccaccatgagaatcccgccggtggtgccaaaatcccaagcgcacgcccaaccctgcccctgctaccgataatgaaatcttgatagcttctgtaatgctacagagagggaaaacaaagcttaccaagtttagcgccgacccggccgaccatgactggatatccgcagcaagcgcctagttctgaggttgtaagagcagaccgacgacggagacaccagtgggtcacaccgtgtaccttcagtaccctatcctctcggccttctctcctctctctaggctcacggtaacggcgacctccagcatgcagccgagagatgcatggctatggtgttcctcagatgacaggcagggcggtagcggtggaggttatttata

SEQ ID NO: 35686 - DNA, 1022 bp, Zea Mays
atcttatcctgacatggcagcttatcattgtattgctgttactcttgggcaagctggtcttataaaagaattatttgatgtgattgattgcatgtgttctcctcctaggaagaagttcaaattgagccctcttcagaattgggatcctcgcttggaaccagaccttattgtatacaatgcagtgagtaatatctgcaccatattttatgtagaactgccaaactggattatatagaccaggaaacaagaatcttcaaatattttggtcacttggtcttcagtagcacataattacttttacctctttgcaggttttgaatgcttgtgtgcaacaaaagcaatgggaaggggcattttgggtactgcaacagttgaaagagaagaacatttgtccaacaaattcaacatatggtcttgttatggaggtacgttaatcttgatgttgcatttgagtatgagtatgtgactcagctctcgtgcattccatctcagacccagctgtggtggtcctgattgacgcttctgcaaaccttttgttattgcctgaccataattaagcagctcattccgattgaaatgcactgattcatgttatctgttctccatttatgtcgtctgtttttcacagtagcattatactttcaagtttttttgcattgctctttatgtggcataatcccttctgtctattctaactttctggtactgcaggtaatgcttgtctgtggaaagtacaatttggtttatgagttcttcaataaggtggataaatcatcaatacctggtgctctgaactataaaggtacttcctacaaggctacaactttaacttgattatgttacgaagtataactggcatatctgacctggtgctgtctgtagttcttgtaaatgcactttggagagaaggaaagattgatgaagcagtgatggctgtgaaggatatggaaagtcgtggaattgttggttctgctagtctgtattatgacctagctcgatgcctttgcagtggtggacggtgc

SEQ ID NO: 35687 - DNA, 297 bp, Zea Mays
cctcgagcctcatagcattcatgacctacgagccccttagactatggcacattaatggcccacacaccccttggcctataagacacttatagcctatgggactaggcctgagtgcacagacctcccacagggcactacacgacgagctgtgctaagccctagctacgtaggctagaggtcagcgtagccaaaatgatgacatctaggaccacatggcccccatgtcatctaccatggtaaatataagatagccaggcagccccgggcccccacgagtacgtgtggctccacccaggg

SEQ ID NO: 35688 - DNA, 283 bp, Zea Mays
gaagtagtggtggccatggtgcagccggtgcttgaatctaagctgtaattgatgaagttggtgccgcttgattgcaccctccgcggaaggaactcaagatggaatcggcactggtaaggtcccttcaatccctttgcatcctgtttaccacgcgtagacccaccagggagggagaagcatgtcaccggcgagcgcacctccgccaacggcatgggcatttcgctactcggcctcggtcggggaagaagcgctctgaccgtccgatctgatgtgggcgggggag

SEQ ID NO: 35689 - DNA, 499 bp, Zea Mays
gtcggtaagttgctgcaacaccattagctacagcacgatactcggcttcaatgctagatcgagagatggtgtgttgtcacttcaaggaccaggagacgagactagtaccaagaaacatggcatagcctaaagtagatcgacgaagtccaaggaatgtggagatcatgatcaatggtgctacagatgtagcttgatcgctgcccagtgtgacttgcgaggatcatgcatatgaagacacacctgctgcataacataatgggatgcccgatcatgtgaaagtcaagcaccaaagagctccaacgaggctgtaaaaaatagtgggatagacatatgtagcctatcaacaacagcagacttagacgttgtatcaatagtagagatgggcttgcacattgttatactagcctggtggagtatggcgtccgcatagagacgttgtggcaaaagtaaacccttagactggtgttgaacagagattcccagcaaataccctcactct

SEQ ID NO: 35690 - DNA, 490 bp, Zea Mays
aacacctaataatcgtttcccctccatcaattgcacgacccgagctcctaatcacactgtccaaggtgacagcgtgaactatggttaaacagaggtgttcccgatgatctagcgcggtctagcttaattgaacgggccgaggagcatcagaagaacataagggcactgaaacgggaaatcaaagagcatgaacggacctgtagcacgccggccacggcgagcttacttcgcgcggtgttttggactgatttgggggaaatcccaaattggggttctctggtgaacgatttgggacacgagtgggtgcgctgagtgcttgaataccttgcagggctaagggtacgctcaatttataggattcatgagcggtggcccgtgaatttgagatgtcgtggtggcggtcggagagaaggggggacactggtgcaagcaattggtggctttcatcgtggcgagctcaccggcgatcaccggatatgtgttacccgag

SEQ ID NO: 35691 - DNA, 284 bp, Zea Mays
cgggtttatttcatttaaccagagggtcctatttgcaaagcgcaagccgaaggggtatctcgcgctaacagtcgtccgatcaacatccgacgatgaggattagaagtctgttcaaacgaaccggtattcactctgggccctcagatcctggatctacgtttacgatttaatgatgtccgatgcacgtgtcgatcgtccgatccgatccaacggtcctaatcaaatcgcccaggagtaatcacccgattctaatccggccgtccgttaacggatcaacggcccgc

SEQ ID NO: 35692 - DNA, 370 bp, Zea Mays
aagcattcatgcgtgtctatcccactacttgctacgatcgcgccgagtcttccggtagcatgttgacctctttcgcagatctcgtgcccgtctgcatgagcaaatcgagtctcgcgacatttaattagcctttctgacccggcgtgtgagggtttaagccgactgtcggtacctctcagttgaggcccacaatacgtcccttggatgacttatctggggcctttcgggcggcacatgaagtaagtctatgccttgatggccctgggatatccatcccccacatcagagcaaagtgcgatgccttgctagcctagcggtgagaatgaacgagttgtccggattcgaatgcttatacatgtctggattcgac

SEQ ID NO: 35693 - DNA, 742 bp, Zea Mays
aaccgattggagataatctctccttaattctagggataataatcctatctttccaacagccaacgagcaacctctccttaattctagatagtaaatcctatctatcctaacagcctgcgcaccaaacagccagtgctcctctacccagcgtacgtcacgggcgcgtctgtgcctggcttaggtgcgtctgcacatgacaatacttgtttgccttatcccaatttattctctcgtgctctccaaaattttgacttagtacattgtgatttgtggacctctccaatcgccacgtattcggttacatgtattatcttcttgttttggatgattgctcacatttcagcagacttttactttgcgatttaagttcgacaccttctccaccttggctaacttttttttttcttttcgtttgtacctagttcgggtgcaccatcaaaagcgtctagtgtgacaatggttgtgggtttgacgatgcctccacgttgtccttgctcatcacccatggtgcccttctacttgtgtcgtgtccctacacatcccccacaaaacggcaaggctgggtgtatgattcgttccatcaataacatcatccgctctcttttgttttaggcatccctgtctccttgccgttgggttgaaaaactccacaccactatgtatctattgaaccatttccccaccaaaatctcgtgcaacctaaccccttttggcacctcgccttcctatgagcaccttcggg

SEQ ID NO: 35694 - DNA, 544 bp, Zea Mays
gtgagctagccatgacaaggtcacaccgctcggtgttcttgagtgatttgggggaaatcccaaattggggagctctattggatgtttcgaggcacgggttgcttcactggttgcacaattacttagcggagcaggcggggtcggcaatttataggctcccacaacgatggccggtgaattggagggagacgcgtggcggctggagaaagagaaggttactggcgctcgggattagtggctttcaccgtggcagctccaccggcgacgagccagggccacggggttgtttatggtgactcaccgtgacgtggtaaagcgttgaggcacgtagcctggctagataacggcgaacgctggtgatgccaacgcgactgaccacggcgggacacgacggcggtgagaacagtggccggagtttatctccagtgcgatatttcttaccgaggagcgcttatctgagttcggtcgggcgtgaatcgtgacgccggcgcggatctgagcgcaagatcaccggcggcgaggggggtgaatatggtgatctgtt

SEQ ID NO: 35695 - DNA, 331 bp, Zea Mays
gctgggagaggaagaggccgtccttggaacgcgtgacaaagatcccaaggaagtgatgaaggtcctcgagatctgtcatgtcgaactcggagtgaaggagctcggtgaggtgacgaagaagccgggtcgacgaggttgtcaggatgatgtcgtcgacatagagtagcaggtaggcgatgtcagcgccctctttgtaaataaaaagagacatgtcggaggctgacgcagtgaagccggaccgctgtatgaagctggagaagcgctggtgccaagcccgaggcacctgcttgagtccgtacaaggacttctgcaggaggcacacgtggtcggg

SEQ ID NO: 35696 - DNA, 338 bp, Zea Mays
aagcatacagacaccactgtattcaaaatcaagcatttcttctattgagttgtagacgtcagtcagagttctgaacttgtgctgtcctaaccctgaactttgtgactgttgtaatggagaaatctgcagacctggagctgatgctgtactcgacattggagtatgtggggaagccacattatcattctgaatttcttgactgttttggtcaccagaattcagtcctccaggtgattgctctgaaggtgctgcaatatcttcattcccaactactgtcgttgatctgtcagacaactcatactcaacctcaaaagtgttagttatttgcttgtttgtaa

SEQ ID NO: 35697 - DNA, 410 bp, Zea Mays
tctcggcgcccccatgattctgttgaatttgctgctatcaccgtgagttctccgcgctggctgactgacatacaacagtgttaccaacaagactcccaggcaatgaagcttttaactgagttgactgcaggttctggcacctcgggcaattatactctgcagcatgggcttattaagtacaaaggcagactatggttgggcaataacttggctctccaacagaaggtaatatcttcgctccacgacagtgctgttggtggccattccggcttcccagttacttatcaacgcgttaaacagttgtttgcctggccatccatgaagtctgttgttcgggattttgtccgttcatgtgaaatctgctcccgcgccaaaccagatcggtctcggtaccctggtttattacagcc

SEQ ID NO: 35698 - DNA, 565 bp, Zea Mays
atgtgaacggaaatggagatggtggtccacggcgcgatggttcatggtggcgcggagaatccaattgggggaagtttgaaattcgcgagctacggtggctaatcggaggcgagggctggtgcactggacacgtaacaaccaaacggagctcactagggcatcaatttatagagtctatcagcggtggcgcccaattttgagaagatgcgctggcggccaaggaaaggggatgagtcaccacggcgatctaccgtggcattcactgagacactgcttccggcgatggacaggctacctattatggtctaatgcgacgtggtaacaccacagattatgtggcgcatgagcggcaagcggccaacactggcgagggtcatttcgtccggtcgcagagcaagtgggtacggtgaacaatccagtgaccgggtccaagcttatcctggtgccaagatcttttactccctgcggttatccactttgcgccgagcacgaatcgtggcggccgacgcgaatccaagcgaggggatcaccggcggcaaggtttagtgaacccacgatcttcttc

SEQ ID NO: 35699 - DNA, 353 bp, Zea Mays
aaacagttagcagttcgttttctcaaagcttggctgtgcgcagcacaagacgagctattttcctttgtggctggtggctcgcgcgggaaggtgaaacctccgcacgcgctcagtatcgacgaatcctctcgtacttaagctgatttcgttgtgtgtccttccttactctttgagctcgttgccctcattcctctctcgtgagataccggtggtgctgagcagtggtgtgtggtgccggcgacctccatcggtggccttcgactctgttcgcccaacttcgagactcgtcggcgtgacgctgctccagcgactgcaaggactccgagctgttggacttcttcctctcctcttcg

SEQ ID NO: 35700 - DNA, 674 bp, Zea Mays
gaagtttcttccttttcgagaggtgggagagaagagacgcccgcagcggcacgagcttctgaattcctgtttttttgttcctggttttttgcttttgtttctgttcttgttcttgtgtgcgggtttggtttggtttccgtgcgccttttctctttattctagtgcgccgatgacgtgaggcgccgggttttcaatacttgcatccttttcgctgcatttgtttagcgggagttcttcgaacaagcagcgctgccgctgcttgcgcgaatctttggagtgaagctccccgtcacatcagtcctcttcttccccggtcgtcgtcctatgcttgtccctgtctcggcaattctgggatactaaagaggaatcggtgaaggtccggtcttcgattccccgagatttgcatctgaatcttcttcttcttcttctcttttgcctccatggagtctcttgctgcgtgccactccatcgagcgagtctagcgcgcgcgacacagtagcagcagcaaaggtgaactcttgcgtcctttttgctgagcaatcttcggaaaacatgttcccagtttccccccctttctcgatgaatgaggaagaaaaggtggcaagctttgagtgctgctctcgccatcggtttctttgctggtttctcccccctcgcgaatcgcttgaaattac

SEQ ID NO: 35701 - DNA, 274 bp, Zea Mays
cgggaggactggtggccgccaccagtatctgacggtcattgagcttttgttgcctcttgctctcttgagacccgtgtccgccaaagatgacgttgacttctccatcaacgcgggggaatgctccgcctcctcccccttcctgctgctgaggttgtcgtggttctctgggccctcctcgtggtgggggaggtggcagaggttggaagtgtcggtcgttcccaatggagtgcttgaaatctctatagttccaaagggtgtggcgcatgtccttgtg

SEQ ID NO: 35702 - DNA, 367 bp, Zea Mays
gggagatctgtcagtgaatatgttcacaagttcacagaattggctcgctatgcgctggatgatgtcaacacagaagccaagaagatggcccgtttcttgaaggggctgagaccagaactcaagactatcctcgccagccaagattttcttagcttctcgcacctctcaaacaaggccatacaggtggaaagggctagagaagaataaaagggtcacctcaagagaaagtttcaagttctccaagctcaacagcaggacaagcacgagagagtccaatcttttgggtttcctcgcaaaggaccaagcttcaacaagccagcagggtccgctccgtcatgtttcagccagcagggtcaaagttccctcc

SEQ ID NO: 35703 - DNA, 365 bp, Zea Mays
ctcggcctagccgaactgtcctacgcgacagacttcgattcaccctttgcgcagtcttgtggtatgcttaaattagatctactcttcttgatgtgtgcacgcactgtgatccatgcatcaaacttgtcgttgtcgtcgcgatgctatgcctgcgccagagccttgtcgggagccgcgctgcgtgcccgcgccagaagccttgtgcacgtgcctggtcagacaggctgcgcctgaagccatttgctgcacgcctcgctagagccacggcgccccacacctggtcggggaggttgtgcctgcagctccacgtcctagttgggaagtgtatgcttcactgctcggttaagttctagcttttgtattag

SEQ ID NO: 35704 - DNA, 528 bp, Zea Mays
gaacacttggagtcgctcctaggccgatcaccggggactcgacgtcggcgactacccgatttggtcacggtggcgtgcttatctcccgacgagctctctgtgtgtgggtggcccgattcttttgagttcctaatgatgggagatggggatgcggccttaaagcatggaggtgcgcggtgatcccacggactccgagtcaaccggcgagctttttctcgtggtgtggttgttgtcagcatggatggttcagtggagaagaacgtgccgacaacaggggccaacaggtcagtgtgtagcgtcagcagccggggtcgtgcgtatggttgaacgacggggcggtcccacatgccagagatccatgcacccagtggtttgctgggctgagcgcacggatgagtcaggataggccaaaaatggcgccccgacccaagtaagctttcctttctttttcttttattctcttttgtttcttatttttgaatccaaatttgaatctcaaatctgtggtgaatttgtcctcatttaaat

SEQ ID NO: 35705 - DNA, 554 bp, Zea Mays
cactgaagataatctcccagcgaaaaaatgggtctcccttgttaggaggacactgaataagaatcctggttcatgctgctatggtggctatcgcacgccatctcctgtcccggatccagttgtagaacaagatgctgattttgagggatcatcgagaaggcacgacagtttatcctatttgcatcgtcggtcattcaaccttagccggagtttaagagttgaagggaaccatatgctgtcacacccaagattggatcgtaggttcagtgtctgtgacccagttagcttgggaggcaggccaagtgattttgatgggaacttcccattcatgggatcaccagatgatcattgtatcgaggaggatacaagcaacggagcacatttttcacccttcccatatggctatggtgtctctgcacctatggaagaaaatggttatcatccaaatacaccgtctaggtaaattttttctctctcttgacatgtttcataacagtttgcacatgcatgttctggtatgcaatttttatctattttcaaccatttgctcttag

SEQ ID NO: 35706 - DNA, 530 bp, Zea Mays
gtgctctaggcctatgttcgggctcagggaggggttgtagtggtcggacgccgtgaagatgctacggcccggcgaggggcactttcgacgagctgaaatcccccacgtatagcagaattggcgcaaaagagggacatggaaatgtcacttacccagatacgatgcttcgggcaacttggcacggcgcgatggggctctggttggtccggacgttgaagaatcacgtcggcggtgagctccgacctgcgcaggggagaggtggagcatagactaggtagaggatttgaggaaaggggaaaccaccgtgggttcccggtgtgccaagctcaggcgaagctcattgtggccaaagtgctggcagaagtccaccggcgacaacagaaaggtgaagcaacagcgggggcgacgctgcggctgggtgagtgcgagggcagggaaagagcgaatgtgaggcaagggcgagctgagggattgtgtggggtcttcacctagcactcgggtgacgtgggtaggtcgtggggatgtgggcg

SEQ ID NO: 35707 - DNA, 333 bp, Zea Mays
caactatgtaagttcttaaggttctaatgaatcgtcggtcatgtccccatggactacccaccaaaacattggtgactatgtaatatacatgtattttgtgtccatcaccttctcgccctagccccacccggtagtgacacactcacacatgcataacaccccactatccttctctccatataacacaactcacacggctcaacacaactatgcaaacatcatctaggatcaattgtaagatcgcaactcatatggctcacaagttcactttacattgtatcaaagtaataaagttcacaacatgttgttcacactttattcattacccatcac

SEQ ID NO: 35708 - DNA, 565 bp, Zea Mays
cttccaagaaatttttgcagacaaaaacgaaggccccagcgcctgacctccaaagcccaccttttcccaccgtttctttcctcacctcccgcgacagcaccggtagctgccatggcctcttgcgacctccttgatgtcgaccctctggagcttcagtttccgtgtaagcttctcgctcctagcgggtcctagcaccccctcatcatccttctctcgttcagattcttgctgagttctttccccgattttttcggctgattctttcgctatttcttggtatgcagtcgtgctcgacaagcagatcccctgcccgctgcggctcgccaacaggactgaccgtaccgtcgcctttaaggtgtttcacatgttgatttgcgatgctaaaccctaaggaattttgttgtagaattgcggatagctccatgaagaattctttgttctcttatgctttcgtggcgcccttgatttgtgtgggtagtaggtgaagacgacgaacccgaggaagtactgcgtgcgccccaacaatggcatcgtaccgccccgatccttgtgtacggttgtaggt

SEQ ID NO: 35709 - DNA, 467 bp, Zea Mays
ccatgattcacaccgtcggcgcgattcgtgttcgctggtaagaggataaccatgatggagtaaaaatcttggcactggatcagctcgggctcgggcgcagatgacattcaccgtacccacttgctcgtcgtgcgaccgggatagatttcaccgccgttgatcgctcaccgttgtgcgccacgtgcttaagcgctagcccacgtcacggtgaatcatggtatgcatgtccggtgatcgccggagggctgccacggtgaaagccactcgtcccgagcgccagtacctctttttccctccggccgccaacacatcctcatgaaattggacgccaccgccgttggaggctataaattgccgcccccgtccgctccgctaggtaattgcgcaaccagtgaagcaactcgtgcctcaaatcctcccctagaactccccaatttaggatttcccccagatccctcaagaacacc

SEQ ID NO: 35710 - DNA, 377 bp, Zea Mays
gagctccaccagcgcaaggttgagtctcagaggaaacccaaagatgctccacagtccagccgcacgtggacgagaactccgcagccagactccgatcgagacggccgcaatcagcaacaggtgcacaacatcaccaaccagcaccccgctggtgacgcccctcgccgtcaggaatatccccccagggtcgcggaaatggaactcgcggtaggggtcggggacgtgcgcagccgccgcgccgattcgtctgtctttttcacggcgaagactgcgcccaccaaaccagagactgcccagagacgaaggccaccaaagacaggatggcacgggcgcagccagccgacaaccctagagttgtcgcgcacacttatcaacaa

SEQ ID NO: 35711 - DNA, 371 bp, Zea Mays
cagaacgccttcatccagaaccggtcaatccatgacaactttctatacgtgcagagggtgatcatgaagctgcataaaaaaggtaatccagctctatttgtcaagcttgacatctctaaagccttcgacaccctgaattgggcatatctcttggatgtgttaagggcctatgggttctcccagaattggcgcaattgggttgctgaaatcttgggatcgtcctcctcaagaataattttaaatgggcaacgttcaaaggcaatcaaacacagacgtggggttcggcaaggggaccctctttctcccttcctattcatattagcgatggacccgctgcatcggatgattgagaaggccgctgaggatggact

SEQ ID NO: 35712 - DNA, 316 bp, Zea Mays
ggacaagaggctaagatagatttgttatgtaggtcaagttgttgggtatggcagagttgatctaggtcaccaatttaggcttaagtaaatttggagtaaggtctaatatatttcaccagtattaactaacctatttaagtaagccacattcgattagcttagcttaaggttagcctttgttaggttagattaatctatcacattagatcagatctaggttggattggtattactatttgggcttatatcagatcaaataaatttggattagatcatggttgttacactagtgtgggataaatatgttatttagggc

SEQ ID NO: 35713 - DNA, 653 bp, Zea Mays
cgtactaccactacactactgtgtccattgctgtacggacgacggaaacttgtggccttaatttgataacacgactacatgtacatcagctagacggacctagctagacgatgcccatcgtcacatgcatgctttggaagctatacctttgcttgtttctgcgtggggtagtagtgtacggcgtacatgccaggccatctcgatcgctgtcacgtgaaatatgaatgcgccaagatagagtttgtgcatatgggagagaatcgtgtatcaatgtcagtcaggtgctagctagcggctaagatagcatgcatatacattatatacattctagttacagattgtaaatgcggtgcatttatttgaggtcagtcagcttcttaagtactaattagtagccgacgatggcgatgaacccgcgcgcgcaatgggagagactgtgtgtgggagctgagacgagaggcgtacgtacgtagagaaagaaggtgggcaacgtgtccatgtccaaaaacttgtgtgcagctagctagctgctgcaacaacacacccaatgaaaaaagatctagagagagaatctgatgctagctgggtatacaaactgaatcttggaaggtccgatgtagctatacgtacgagcgagagagctggtcatgcat

SEQ ID NO: 35714 - DNA, 363 bp, Zea Mays
gacgaagtcggggcactgttaccgcccagtcgccgtacccacttgcgttgcaacgtggccggacggtcctcgccgtggagatcgccgttcaccgcgattgcgccatgccataatcaattcaccatgccgtcgcaagctgcaaggactcagcagtgaccaccgtagacagttagccagtgagcgccacgttagcaacctccggtgactcctcccccttctcaccgtgcgcgcttccccgtccaaattcgccctcctcgtggctgtcttctataaattgatgccctagtctgctccgctaggttgttacgaagccagagcaccagccctcgccttcgattagccaccgtagcgccctgatttcat

SEQ ID NO: 35715 - DNA, 423 bp, Zea Mays
gctcaaggtacactcaactttgctcccaacaaggttggttctcttgttgtcaaccccaatgaatacaatcatgaccacactcgtctattaattgcaaagatgatcattgcccatgagtatccatttagaatggtagagcatacttggttcaatgtcttgatgaattggttgaataccattatcagtacattggtaggaagggtagaagaaaagaatgcatgaaggtatatgaatctgaaaaagaaatcttgaagaaggcacttaaagatgttgactcaataagtttaacttgcaatttgtggacttcaaatcaaaacattggttacatgtgtctggtcgcacattacatagatcctaattgggtgatgcaatgtcgtgtactaaattttgttgatttggatcctccacataccgggcttgtca

SEQ ID NO: 35716 - DNA, 401 bp, Zea Mays
caagtggataacggagaggagtaaaaatcttggcgctcggattagctcgggctcgctcaccgttgtgcccgtcgtacccacttagaccacggctggccgggatcgtcctcgccggcgttagccgcttaacgattgtgtgccacgtgtctgggaagtctagcacgccacaatgaatcggtgttgcaagcctgtccattgcctgagaactggccacggtgaaagccacgaattcattgcgccagtaacctcccttctccccagtcgccagcgcttctcctccaaattgagtgccgccgccgttgagtgctataaattgaagcctcagggagctccgcttggtaattacgcgtccaacgcaccagcacttgcttccaattgtccatcagagccgcccaattgcc

SEQ ID NO: 35717 - DNA, 439 bp, Zea Mays
tatgctgtaaaatatcagaaatattgtcaacatatttacagatttgtgtcgtttctttgcggtaaaggcactatcagatataagccaataaacatcatcattgctacagccaggagcctagaaggaatattagtatgcaatttgatgttgatctgtgcttgagtgattcccattttgggataaagtaagccataattattatctgtaaatactaccagacatgatctaaattgggattgactaacacttaaaatggccgtaccattcctttttagataatggaaacatttggcttcatcctcagacgaattagcaacttatttgaaccaattgactggactgagtttaacataacaaaaccatctcaaaactcaattcttgtctagaaataaaaggccatgtgaaggtgcgaaaaaacactgcatacctgcattctcta

SEQ ID NO: 35718 - DNA, 465 bp, Zea Mays
aggatgatacactgaaagggacaacaaactctggatctgatccaccccttacagagcaagagtgtgttcgttctctgtgggatttaatttgttccaaggacattgaccaaagcaggtacatgttacccaaattacgaataacgtatttataagtttggttcatttatgcaatatgaatctataactttgttcatcatacagggttgtcatagattacggtgaatacagtgcaaactgtatggatatttatgaatctttcgcggagggcaaatgtcttgagaatgtcttcatgcagtgtttcattgagtgtgttcgtgatgattccaaaaatcatcgtcgaactctgacatctaacagattaatacttgatgtcaacgttggggtaggttcttcttcacagttattgtaactatacacataatatacttacacactctattttttttataggctctgttaaatttt

SEQ ID NO: 35719 - DNA, 328 bp, Zea Mays
tttgggaggtgcatcgataggcgtctatgtgaaaagtgtaattgttttatgcatgtggtcggtgattgggatagtcgaggcgaatggggagtatgattagtcttgttggagttactatgatgttgatgccttgtgcgtaaagtgaggacacatatgtgtgtgccgtggtgtattagagtagtggtggcgtaagatatttgtttgaggtgtgcgggtatatgccgtaatatggttatactcacggtgaggaaagatgtatgtattgtgtaacacgacgcttaggtcgctattatataatcatgtgaaggatgctcaggaaggtcgtgtg

SEQ ID NO: 35720 - DNA, 288 bp, Zea Mays
tttgtagcatggaataggcaaggagaggagggctattgaaaccgttggttctaaggaccacgagcactgaagaaacaccagcaccctccccctggcattctggtgtcattggcgcttatcgatatgatccatggacttatcaatattttcatgatcgatacgatcgcgtcgttgccacctatcgagtatgtgatatcgatcatgtgcggacggtccagacatgtgcagatcggcgagtttatcaccgatgtgcgtaggatgctgtggttttccagagtaagtgtacct

SEQ ID NO: 35721 - DNA, 382 bp, Zea Mays
gtcattgatgataaaaataaattgtgagcaagtaatatacaacaatagagaagagtttcaaccaaagaataaaatcaaagcaaacatccaaggatgaaatatattttgttcacatgagattctgtaagtgccatgacaaaattattctatacaggaaccaagaaaaaacaacttcagaagcaaaacctgtgctccaaaatacgctgttctgctttggaggatgaacatgccagggaatctgctaaaacctttagtttatctacctggtaatttgtgagtgctgttagcattacagagcatcaactagaatatttaggtaggcctgaaagtcctacagcaatcaacaataacaaaataaaagaaccagacaaagctatgggcc

SEQ ID NO: 35722 - DNA, 471 bp, Zea Mays
gctctgattttacattggcttctttacttgattttccaaaatctcctgaaggggacgttatgtcaccttgttttctcggtccagcggaaataataaatctagtaaggaggtttagtagtttgattatgcatggaggaaattttgaatgtgtacacactttcttgggatgcacaattaatctatcagctgttctcatcagacatagtcagtatgaagctgctcaggtactatattttatttttggactaaaattcattagaaacatattatgttttatttgaatgttgctcattctatatagtatcaggctatcagctatcaaataagctctgcttatcctcatttttatctctaacagaatctgctgggaattctggaaacatacttgaacaatggaaaagtatcgcatactggtcaagatgcagacactgcatgttcagcatatcttcatctcaatggattttgccttct

SEQ ID NO: 35723 - DNA, 605 bp, Zea Mays
gatgggttctgtcaagtgggtgagatttccaaggctaaacaaattttgaagagtatgtttgaggatggaattgatccagatgtcatcacttattcagcattgatcaatggtatgtgcaggatggctaagatgcatgaaacaaaagaaattttgtcaaggatgcagaaaagtggaattttacctaatgatgtcctatatacaactctgatttgttactattgtaaggcagggtatgtcaaggaagcactaaagcattttgtggacatttatcgaagggggctagttgccaatccagttatccataatgcattattacatgctttctatagagagggaatgattacagaggctgaacacttcagacaatacatgtctaggatgaatatatcatttgattctgtctcctttaaccgcataattgatagttattgccacagaggtaacatagttggggcattttcagtttatgatgatatggttagatatggctattctccaaatgtttgcacatatcagaatttgcttagaggattatgtcaaggaggccacttggtacaagcaaggcaatttatgtcctgtcttcttgacataccttttgctattga

SEQ ID NO: 35724 - DNA, 369 bp, Zea Mays
cactcgtgcagcgattgccgcagtagcagcaacagatcaggcagagcagggaggtcagctgaggatctcctccaaccagatcgccttccgagttcgtcgcctctcgtcttggactcactcctccactgctcgatccacttcttcagacccagtcaccactccacctcccacttcgccagctcctgccgctctcgagccttccaccacacccgttgtgaccaccacctccaccactccagcttccactgctcctgctctcgcttctgctccacctattcctccacctcacttttgggagcgtgataagactgaggtgcgacctctcgctactgattgtgatatcctggcccctgagatggtgatatcctg

SEQ ID NO: 35725 - DNA, 333 bp, Zea Mays
attttttacttggtcgatatgacatagttacttgatggcacattaaaagaggtggccatcatgacatcgttcagcgtgggtagtttgatgggacattaaacaatccattcatcgtatcatgcgcatgtggcgtgatgggggtggttaaccgccttgcttgttactagtgtacctcctgcaatgatgcacttctgaagccatgatcaagccaaaaatcaatctcgaacacactcaagatcaacacttagtactttgccctcggggctcctaatttgttgtgctcaacctttcgaatcatgtagctggagcttgtcgatcaaagttttaggaacc

SEQ ID NO: 35726 - DNA, 724 bp, Zea Mays
gtcgaccctagacagcaggccttcgtcgctgccctggatcgcccatgggggtgcctcagctcccaccctcgctggcccctatccctgctccagcgcagacctttggagcccaacaacagcagccagctgcctcatttccatggactctgtggcagggagcctaggatcagcagtccctggcccaatccttcaacacgatgacccttcagcagcctctgtcgatcactgaatgggtcgctgactccggcgcctcgaatcacacaacgccatatctcggtaacatctcgcattttcgaattccaacttcttctatcccttcatctatcattattggaaatgggtccagtctgtcggtcacctcagtaggcgacgtggttcttcccggcccattttatcttcataatgttcttgttactcctaatatcactaagaatttgttatttgttcgttagtttaccactgacaataattgttccatggagtttgacccgtttggcctctctgttaaggatctcatttccataaaagagatcatcaggtgcaatagctctgggccgctctacaccatcagtctccatgttgttcgtgctcctccgccactacacactacgctcttgctactgttactgctcttgtgtctctttggcaccggcgtcttggtcaccctagccctgatgttttatccaagctatatagcatttttgttgttcgttgtaataagcct

SEQ ID NO: 35727 - DNA, 315 bp, Zea Mays
gcggaaagtgccttccgggttgacagcttctcctttttgaagattttggttcacaattgttgtcacacactactagaaccattgttggagattgaactaaaaaccgtactcatctgtttgagttttattcactctctattacagaagaattagatgctcgtagcagatgtccactcaggttgagattttgcacattcagcacatatgcttagtgcttaccacgcatcagggtgacatgcgtaaagttgtgtgcttgctatggtgaactacatctagaatttcagggatcattgttttagttgggctcaattgaat

SEQ ID NO: 35728 - DNA, 446 bp, Zea Mays
gactactgttctttctaagtcagcctcttatcatgatgctattctttatcaggaatgccagcataggatattgctgcactatagcgcactggcacatgggacttgttgtttgtaccttgtccaccacatgtttgtcctagacctgctctgatggttttcttgagtgttataagacttgtcttgttgcctgttgttttcaataggaatatggacatgattatgacgagacttttttctcttgttgattagatgaccacttttcgcatcctccttctggcttctgttcgtgagtggtccatctctcaacttgatgtcaaaaatgcctttcttatggtgagttgcttgaggaggtttatatgcagccaccacctgagtatcctattcctgagggcatggtttgtcgcctttgtccctccctttatggtctcaagctggctcctcgggct

SEQ ID NO: 35729 - DNA, 454 bp, Zea Mays
ggcaattattgtggcggcgtggtaaaagaggtgtccatcgagacactgtttggcgtgggtggcttgatgggacacagaatgccccattcagcgtatcgtgtgtgggtggcgtgttggggtggttaaccgttctggccattactggtgcctccccgttcgcttcccccatagcgctctatccgaggcggtatggaacctgcagaatgaacaactttttgcttgatggccgaggtagttgtgtactgaaacggcggatcctcccgtgtcgatcgcaagggcccatccttcgatcgcaagggcccatcctcccgctcctatgtaacaatagaatgggaaggttatttatatcggttatgcttagcgtgttctcatgcccaagaattttccatatcctttccttagaagccttcatgcacccttgtgttcatcactcacccaggcacctttctcttgc

SEQ ID NO: 35730 - DNA, 436 bp, Zea Mays
tcggtactggggattgagctatgtggcccggagcacattgctcgacgtgcgtacaccgcctcgcggcgccgtcgcggtcggctgcctcggctggatgaagacgagatgagtaccgtcagtttctggatgagcgacatagattagaccttagtgttgaatcagcctgcttgaatctgagccaaggattgtgaatcgaagggttgtgagagggtcaggtttcataaaacccttgtcgtcggatcttgatccgatggccattactgcgtatcgattcgtttgagccatgatttattctgaaccactagaaccagatctgacggctagatttggacataccccttcgccacagcctctttgcaatagagcccctgtcttttctttgtataaacccgcggcctgtggctatgtaaaagtaatttgactttggccatggaaa

SEQ ID NO: 35731 - DNA, 398 bp, Zea Mays
cgtaggggaggcgggggcacgaggatggtctacactattgtcttaatagttagtagagatagagaatgatatttaatgtgaaattaattgtttttaattttaattaccaaataacaatgtgtcactgtactaaaaacattatatgattttttaaactttagaaactgatatataaatgtcaaatagtccacttaaagtataaaggggagccgaataggggaattgattggagaggaggtgaaacaaggggagaaataaaagaggggaagttatttaaaaatgcatacaaagtacaaatagaggaagataagagggggaatggttagagcgagcctaatggttaaattctaaatttctcccttctaaacccatgaaccccttttgcaggttgcagccta

SEQ ID NO: 35732 - DNA, 674 bp, Zea Mays
cgagattactgaaccgcgtcttctcgcgaacaacatgctgctcgcgtcggcgatcctcctctatcctcgtctttcccttcggcgtccacctcgtcatcttgggcccacgggccggctctgatcgtcttcgtctaattttatctaaccctgtctaccacccatctaactctgtctaaccctatctcgtgcaacttgccgcgcagctgtctctctcgctcggccaagacaagagccgtcgtgaaattgacaaccacctctcgtgccctctcctttctatacataccctctcctttctatacaatcgtacaccctgccatgaaccccttccctcttccttctcacacatgagcagcccacgcgttttcctctctatgcattgtgccttcgtggtcttagggtccacctcgtcgtcttcctcgcgtcgtcggaggagcagccccatcgtcttcctcgcgtcgtcttcctcttctttgattgcctgctcggctggtcttcatgtgtaggtgacaaatcctctccttctccctcgtcttcgcatccttcttcctcgtcactacgcaaacatcatggcggccaaggagctcacaccaaactccctactcacctagcgacgcagctggcctagcccctcaccggtgcggcttggcgtggcccacacagctagcccgcctcgc

SEQ ID NO: 35733 - DNA, 412 bp, Zea Mays
ttggtttgtgctaaacaattgtccggaggttgagcaatatttgaagtataacaccctgatataattctaatttatctgtgtgacttgctaattattagattcgatgttcgaattaactatgtttcataattataggatatacaaggaagagttagcggatcaaggaactccttatgttcaaaaatcccatgataagcaattttctttctggtttaagaagcatgtaagttttatgccaatataatatttattaagaaatataatttgtgttgattttcaccatattattattctattgtttagattgcaaaactacgttacgtggatggagaagacattagtgatgacctatttgcattgtcatgtgaaccggaccttcgggttcgaatatttccagcatgtcttgtcgatg

SEQ ID NO: 35734 - DNA, 374 bp, Zea Mays
gatacagggaggctaccacacatattcagctttggctccttggtgccctggtctctcactctgagttcgacgtcgtggacttccttatttgtgagatcgaggacaccgttttggatgggattcatgctcgtcggcagttgccctatgctcactacttgtgccacatctttgcgcagctgattcagcctcctcggtttcagggcacacttgaggcctcacgcctcgtttttggatcctaccgtcctgcgcctgagactcctgtgccagcttctgctcctgtttttgactcttaggtcgaggatgcagctcttcatcagttcgacactcaggctacaacagttgatgatgatgatgatgatgattttggggttcct

SEQ ID NO: 35735 - DNA, 486 bp, Zea Mays
ggcccaggcgctaaagattctaagactcagaatactatgtagtgtacggcgggttgatttccctatttcccagggtctcttttacaaaacgcgcggccgaagggggactatcagatctcggtcgttggatcataagcggacggtgtagattagatcagtttaatcccaatcggtacgcaaacggagccctcggatctgagatcaagggtccaagtttatcgtacacgcgactagatcccaaccgcccgacactgaatcgacgcctcagatgcgcagttcgaatcggtacgcgtagttctaatcctggccgtcacgctaggatcggatggcacagaggatctctccttccctcgacggcggagtacggtggtgtgcccagagtacggcggttcctcgccggcgccgcgctaaccgcgagcccgatgagcaaaccaccccgaggaatcgcgcaaaatgaaattcacctacttgttatttggatagggg

SEQ ID NO: 35736 - DNA, 495 bp, Zea Mays
ggctccgaagcggcagacaatgttttgccagaagattttttgagtggccttcgatgttattgtggatacagctctagcctcgatccactttgtgaaatattcgacagcgatgaaggtgaattttaggttcccttgagccgtaggcagtggtccaacgatgtccagcccccagcgttgaagcggccatgtatgggcgatgagcttggtgaattgcgaagggctgcctgagcgaggggagaacttttggcatgcttcgcatgacctagtgactcggttggcagtgcaaattattgcaggccagtaaaatccttgacgaatcaccttgcagcgagggccctgggtcctgagtgggagtcgcaagttccggtgtggacttctcgaaggatttgtatgtcttcgatttcagttatgcacttcagcatgggctgactgatccccttcttgtacagctgaccctctactaatgcgaagtctcggcttctgtgctttagtcgt

SEQ ID NO: 35737 - DNA, 316 bp, Zea Mays
tctgcatgcaagataaaagtgctagattctgtccccggcatttttgaattatgcgcggggcagttcgtattttcgtgcaggaggggagaaaacgacacatcgtggagttgcatcggatctatcaccaacaacggtgacaggaaccgcagtgtatgtagcactagcagcagcagaaacaggagcagcaacatcaaaaacgatagcattgcacatttaaagccctaggccaggatactgaaatactaaacgcagagacagggtattatttggccacttgctaaacgcagacagggtatttggccagctacggagctac

SEQ ID NO: 35738 - DNA, 345 bp, Zea Mays
tggaaaattacactacaaccatcaatagtgtcattcagaatgttgacctttaccaatttgatatgtacttgctcaataaaaattgtggaacatgagattaaaggatagtaggcgtaattccggagactaaaccagcctaatttctaagggaggagtcctagctttaatgtatggcaggagctaaggggatgtctgttttctctgcccctaatccaggtcgttatgcttctaggtcgggtcatttattagtttttcaaacaggcgtaatgtttaaaccatgtgctggtttgttatggttgcatcggtgagggattggaaagaagtgtcgataggcaagaatgtcgg

SEQ ID NO: 35739 - DNA, 479 bp, Zea Mays
gtgccttgcgatggagagttgttaagtcctaaagcccttgaagcttatggcaacttgttcaaaaactcactctctgaagctcatatcaaagcgctgtcagccctcttcggatggacagtcccagatgtttttgaacctgttaatgtgttgtgtatcgccggacaaggcccagaagaccttgagtaaggttgctgttcaagcagcgcatagttgttttatttggtttttcctgatggatccttcaaaggttttgttttggaatgtaaggggtctgaacaaaaaggcaagaagagactcagtgcgtgttgtgattaataacactaagcctgatattgtatgtttgcaagaaacaaagaaagcatccatttctcggcatatgattctctctctgttaggttctgattttgaagagtatgttgttcttccggcgactggtacgcgggggggaattattttagcttggaggatttcggtctgca

SEQ ID NO: 35740 - DNA, 335 bp, Zea Mays
cggcggagacttcgccgcgtgtggagggtgctgaggatcttcctggtacaagtactgggtgtaggcggcgaagggtggtgggaaaacagtgtgtgggtgaattttcgcggagtggcaggcgccgtcacacggggatggagcgtggccgacttcgagtagacagggttggtaagcgagaattgttgtcttcgccgaatggggcgggcataggcgtaggggatcttcgggagatttttgagggtgaggaattgaggataatgttgtttaattacatggagatgggtatcattccgaaggttgagccgatgtgataggcgatgccctcgccgtgtgtg

SEQ ID NO: 35741 - DNA, 352 bp, Zea Mays
ttggggatgaagtgagtagattggaggtataggttttactcgataagaagttcgatcggtgtggtttaattgtttgggcatatgtagtgtagtggtggtataaaaaaatgggttagaaatcgatcggctaaatggcaagttcggttagagttgttttgttacttgggattgtgtggtgaagtgatggcatgactacgtagccatcacatcatctattgtgtgactatgcttaagtgtgccttgatataaattagagggtttatggttatgccatgatagtctagagctaaacgcttgtggtactcatcataatcttgcttggtagtcaaattaagtcttgtttgctcccgag

SEQ ID NO: 35742 - DNA, 409 bp, Zea Mays
gtggggtgcatatggcgcgatgcaccggctatggaatgagggaggagagaggtcacgatcgtcctatatagccccgcaaggaaccaaagcgccatgggtcacggcagcggatccccccaatcctggaatccacgaggtttgttgagctcgcatcaggaggaaattgagcgtgcatcaggacccatctgcagacccatggtcgcgcctggaataaggaggtggagcgaggttggtcaggctccatgtggcaggagcgaggcacgcgatttttccggtcctcacgcggctagattcggggacccgattcaacggatgagaggaagacagaactgactatttgtccccacatggaggtgagtcgttcgagtccgagcgtgcggggtgggcacatggattccgcgtggcgtgg

SEQ ID NO: 35743 - DNA, 721 bp, Zea Mays
cttgaagctgatcaaagaggtcgtcgatccgaggaagtggatacttgttcttgatggtgacttcatttaacgatcggtaatcaatagacattctcatactctcgtctttcttagagacgaacaagactggtgctccccaaggggatgagctgggacgaatgtatcctttttgctagagatctgcgatttggagcttcagttctgctaactcggtaggagccatgcggtatggtctctttgcgatgggtgccgttccagggatcagatctatgtagaattccacttctctttctggtggcattcctggtaattcttctagaaacacatccatgaattcttcgaccactgatatgctttctgctgttagattgaacatcattgggtcattggcaggtggctgggcctgacaagagactgactttccctggtggtcggtgaggaggactgtcttgcttgcacaactgatgatacccttgtgtttagttaaccaatccatccctaagatcacatcaatccctttggatggcaagacggttaggtctgccaagaatactaccccacttaaaaggattctgacttgggagcatttgagctggcatagaaggtcggaccctagggttcgggtgaccaagggaatccctagaggagtagagggaatgccatgtttctccacaaaactagtggctatgaaagagtgggatgctccataatcaaaaagtac

SEQ ID NO: 35744 - DNA, 427 bp, Zea Mays
cccctagctccgttaagtcatcacgaagccaaagcatccgctactgcctccaattagccaccagagagctccaatttctttcttccccaaatcagttttccgcacctgtgaacacctcgtcgtggccagacgcctacaggttagttcaagcatccttgcttgatgttctagcctccattaagtctcctgctactcatagacctgtttaattgaactagactgccctggatcgccatgaacacgtcaaattgttctcagtttccgccgtcatcgtggatagagagattccgacccggattagcgcaattgatggaggggaaatggttattaggggtcaaattaggtgtcaactgctctagagcatcggtcattgcgtatcttggccggtacaggctcgccggagccactgctccgccgtccatggtcg

SEQ ID NO: 35745 - DNA, 507 bp, Zea Mays
gaggaacgtctgaatgctgtgatttagttgaccaggtaccagcaaaccctgaggcgctaccatgataaagcagtacgacaccgggcatttataggatgagatctgttgcttcgtcgtatacagttaggggaaggatgacacaagctataaccgccatgggaagtgccctttgttattgcataagtaactcggccattttcttatcagctaactcagatggacgggactccagtagagaactcatggaatatcaagcaccttagaaagttctacccgtagtagcaccataaactctagatggtgaactacactttgtaaattagtgacctcattgtcaataaagcttctgtgttcgtccacatacaaacaaaccctcaagtagcgattgacttaagtcagaaacaccttaaatcgacgcaacatgctcacgcttacaaagctaagggtgcctactataccctgctaacggagcgatcagtttaagtcgggaacgacttaagtcggtgc

SEQ ID NO: 35746 - DNA, 368 bp, Zea Mays
cgaggagtagatgagccttgtctagcatccaactgcgtcgtgttttgttgaaggttaggtggataggatgttgtagcaggtcgatgtagacgtgtggtttgctgttgtctgatgttggggcaaactcattttggtagattgccaatttttccttggcatcgctggcggagcaaggggtgccatctcccggtggtaacgtctgcatagatcgtgggggtatatcgttgcgatgtggactcctgatgttaatggccttgtgtgccatggatgctattgttgacctaatgtagacgatggtgtggttgctcggtctagagctcatctccatagcactcaatttccattagtttggttcaaatgtgaccaac

SEQ ID NO: 35747 - DNA, 610 bp, Zea Mays
catacttagaaacgtcaaccttcatccgcttccaccagaagttttgcttcagatctcggtacatcttggtttcgctagcgtgaacggtgtaaggcgttttatgagcttctctcaatatatccatcttcacctctgatttctgaggcacacaaaggtgacccttgaaacgaaccaaatcattctcatcgatggagaactcccggggtttaccatcgccaaccctctttcgagctttctgcaataaacgatcctgctgctgagccgcacgcactctctccatgagggaagattgaataagcatatgagtctcctcactagcggtgtcgacatagcacaaggcgatccccaaacggtccagatcagcaatcaactgcaaggccacttttggaaccccggacctgctaagggcatcagccaccacatttgccttcctcgggtgataatgaatagacaaatcataatctttaatcaattcgagccaccgacgctgcctcaaattcagctccttctgagtaaaaatatacttgagacttttatgatcggtgtaaatgtcacacgtctcgccataaagataatgcctccacgactttagagcaaaaaccacctcgac

SEQ ID NO: 35748 - DNA, 442 bp, Zea Mays
gatacatcaacatcaatgtgttttgtgagttcacgcttgactggatcatgataaatttatatagctccagtgttgtcgcaatgaagaagtgtaggcgagtcacaagaaacgcctagatcagccaagagccaacgaatccagataatctcagcagtagtagtagccagagctcgaagttctgcttcagtactagatctagatacaacaacttgcttcttggatttccaagcaataggggatgatccaagaagaatacagtaaccagtaatggagcgacgatctgtaggatcactggcctaggtagcatcagagtaagcatgaagctgaagtggggaagttgagtcataaaataaacattgtgtttttgtcccccgtaaatatcgaagcacacgaagtaagtgcccataatgaactgatgtaggagcagagacaaacttactca

SEQ ID NO: 35749 - DNA, 489 bp, Zea Mays
gttccatatagatatagttagcccagctggtgtttgctggccgatagggaaaaaagcaacaccatgcatatactatgaaaacaaaaccatcaaatctcccaccgagattatctgctagagggcaggattaaaccccaggataaacattttcgagaaggggcagccatgttgcatgcagcagtgctgtttccatccttgacaagcaaggcctcagcagcataatgcaagcaaggtgctgaacctacaaggtgagacctgacagttgaagaagataatattaaatgggagatcttgttggtgaaggtcagctagtacagaggaaattgcatccaaaatccaacagaaaatggtaggattgtaaacttgtgttagtagattttccttctctgtggcagtttttctgcgtgggagtatggtaatccaaggtgttgctttgatgtatgacttgaaatattaggtgatacacatacttatcacaaacttcaaatg

SEQ ID NO: 35750 - DNA, 305 bp, Zea Mays
gagcgcagttggccggccagaacaatgctaggcgagagagggaagtggtggtgataggaatgtgagaggagagggattgttatctgttaggtcttatgaatatggaggaccgaccggcagcaaacaaaaaagtgaacactcatcatagctgctgttgggcagggattcttttccatctcgcatcctctggttgagagatatatatgtctgctgctctcgctatatagcgggtcggtctgccctgctagctagctagctagttcaacttctaggcatggatcggatcggatcgatcaacattaatt

SEQ ID NO: 35751 - DNA, 452 bp, Zea Mays
cgatgctgatgcggctccctagagcgaaggtctcacctctggcgaatgttgatgattgggccatcgaagtggaaagcgtatcttagtacaatagcactccccctacctagcgtgccaactgtcatggtttcgaaaactaggggtagtatgatttgtgttcgtcgggggtgctagcacggactcactctaaatggtgaatcgctgggattccaatgagaagtatgagacaccgggggtatactggttcgggttcgcaccctactctagtgtagtgttgatcctggttcgggttctcaccctactctagtgtagtgttgatcatagtattgcgatgagtgtgttacaacaagtgtgcttgtgtgactataagaaagaaggtttgcccttttatagtttaagggtaggacctaataggggtgacttggtctctacttggaatgtggttggtctgt

SEQ ID NO: 35752 - DNA, 683 bp, Zea Mays
ttggactacaactgaattttctatgcattttacaagttcagcactaatttatatattaaaaatctatttaaaatttaatttctctgattttcgagttgactggaccgggcgacaattaccagaaagatcagggcacttggcgtaagattcttaagacacagaactacatctgtatggacggcgggttgattctaatattgatcaggggttcttttgcatgatacgctagccataggggtatcctttaatctgggtcgttggatctggttttagtgcgcacgattagatcgcgaagcggtacacgcccctgaacgtccgatcaatggtgagcggccctgatttaattatttgatatacgatcgtggccctcggatcatgatcaacggtcgtgattcttttagacgtgggtattccagtttctaatcctagccgtccagtaagatctgacggcgcgcccaactttccccaacctgacacacgcgcacggcggcgccgcccacaaactacggtggagcttcaccggcaaaccatgcgccccatgctctagtgctcggtttctcaagattttaggtgctaaacgatgtgcgaggtgaagtcaatcgaagaggcagggtctgaccaggggtggcggcgcagagaacccccaacacgaccgactacggatccgcggcggggctaaggtt

SEQ ID NO: 35753 - DNA, 341 bp, Zea Mays
aaatgaagacacacaaagaaacaaacaatttaggctgcttagcaacaccagacatgtctagtgaagcacttgataaagaaccaaacacgagcagtgatgaactaaagaaagagttggagaatcagagtacaccagacacgcaagtgtgtaccggacatcgcactagataaagcactgaatacggtactaagataggtctgcaatgtgtttgggaattctataagttacctgatgtgtctattgtgccaccgactgtagaagcaacctgagtagggttgcaatgcaccgacatcttcggtgttacaccggacatcgcactaaataccttgaactcactgatc

SEQ ID NO: 35754 - DNA, 320 bp, Zea Mays
cttggcttcctagactaaatcctgtaggtcctgttgcatgaatcaaaggatggcagataccagacgatgggtcctatgggtgtgctactaacacttcctagccgaagctgtgtactggtctaggtcccagtccagactgcatcttgggggtcgggtcaccaactaattttcccttaggaatactggtatccagcctcgacacatcgagcctacatcccaggggggccaagtaccagggaggagttggtaacgccacacacagtgaggacaaatagcatacagataagtgctaatactgcttgataaatagtactcaaaag

SEQ ID NO: 35755 - DNA, 323 bp, Zea Mays
cgtctggccacgacgaggtgttcacgggtgcagaaaactgatttgggggaagaaagaaattggagctctctagtggctaatcgaaggcagtagcagattctttggcttcgtgatgacttaacggagctaggggtgtgctcaatttatagtatcccagagcggtggctcccaatttggtcatggcgtgctggcggccggagagagggaagagcactggcgcaatagctgcgtatctttcactgtggcaggattaccagcgacgagccagcaatatagagcggcttactacaatgtggtgaagcttcaaggcacgtggcacccga

SEQ ID NO: 35756 - DNA, 364 bp, Zea Mays
tgggaggtggaatgggtaagctgctggagacagccagccttcagctcgcccatggttaggagcaggagatgacacgccaatgacattagaccacaataaagagaggtgacttagatacgaggaagacaggaggaatatcgtaacaccagtccacgtactatgcatggcaggatagcatgaactatggtacgttgtctgcagcagctcccttatcatatctcctatttcaagcttcactctgcaaacaatattaaacaatgtcatctacactcccgtttcatctattttacgcgatccgctgaagatagccttagtaaggccaacaaggaagtggagttggcaacgggagtggtagaacggcaaa

SEQ ID NO: 35757 - DNA, 406 bp, Zea Mays
gttcatctcggcgttctccatcatctccctcgatcttgttgggatttcttgattcaaactccggatcgaggtattggtctagttcatctcttttttactcaatcccactcattcttgattatctagtgtatcatttgttgggtacattttagtttaagtgcttgcaacacttagattatcctcatttgtcacgaacattgtttgagtttagcggtttgctattgttcgttgtagttgaaccgctcgcatgaacggttgaagtgcatgctcaatatcatacacgtctctactcaagcgtggttgttaagatccttgctcatcataggttctatcttctctttttaaggatggtgcgtagaaggaatccttctatggttgaatccgactcctctgacgacgaagagat

SEQ ID NO: 35758 - DNA, 292 bp, Zea Mays
agaccgattggttgtccctaaaaatcccgaactcagaaagaaaatgttggatgaagctcacctttccaaattctccatgcaccccggcagtaacaagatgtatcatgatcttagatccttgtactggtggaccagaatgaagagggagattgttaagtatatatctaaatgcgacacttgccagagagtcaaggccagtcatttgaaggtagcaggcaccttacagccccttcccataccatcttggaaatgggaggagatttgcatggattatattgtgggattgcccaat

SEQ ID NO: 35759 - DNA, 317 bp, Zea Mays
gtggtattgggcagtccggccatggggctccgtgcttcgggcggcgttgccggagtttaccgggaggaggatgatggcggggtcccgttggatctccttttcatggccggatgtggtgactgcgtagcgtttcgaataggggtaacgggaaccgtccgatcgggatcggatgatggtcataactctgggattcattaaaccgggaccgtcagatctagatccgagggaccacgctgagtaccgattcgccagtgtccagatctaatcagatccgttgatagttgatccatcggcccagatttcaggataccctttcg

SEQ ID NO: 35760 - DNA, 277 bp, Zea Mays
ggaggcacgctgtggacgccaaaaagagaagtgttgaggagaagaagcatggcgggaggccggaaatgctgaagcgccaaaggaagccaaactccagagtaattgggccacagtgggtcaagtgatccggccttgtaatcgaatggtagcccaagtaagaacgagaggaagcagtcgacgtatataaacacctggatacggtgcctggaaaacctaagaagaaattaaacaaacaccttacctgccgtatctctctgttcttcctcttccgtttgcc

SEQ ID NO: 35761 - DNA, 617 bp, Zea Mays
cacgaaggcaaaagggcgcagaggagcatgaaggcagagaggcgcagtcgattggaagagaatacgaaaaggtaactgctgcatgcggggtgaattcctttttcaaggaaactagagtccttgttagggaaacccttccgcgctcctcaattgccacagaaaatcttgcccgatgcgcaccaaggcaacccagtctatgacacgggggcctgggtccacaagtcatacggattgtgcgttgaacttcgggtgcggaaaaagtgaaccgccgcgcgtgcctgtagaccgaaccaccgcatgcagtagcacgcctcttcatctccgccgcaagagacaacagcccagtctatgacacgggggcccaggcccacaggtcatactctttgggtgccggaccctgggtgcggaaagagcgaaccgctgcacgcgccggtagtgcgcctcctcggggtcgtggcagcacataaggtaattttttaaaccaatgcagcggtatcaaggcgccctgcgtgtgccacgacgaaaccaccaggcgtgggggccgtgcgccagtcagccacgagaacaaatatggcagttggtgtgaccgagggcggattgacggtgagtacgtcagc

SEQ ID NO: 35762 - DNA, 300 bp, Zea Mays
caaatagagcaatctaatccaatcaatgatccgttcagcatgtccaaatgtatgttgaaattgaagagtttgcctctaactcaaactgaactactcaaggcaatcaattttctgaaaggggacaaagaagctagagagatatttatttgctgtgaagagcagtctcttgcagaagcttacatcattgggtctatttctgactaatgcaaggtaatcggtttactgctactagttgtttgcaacatgttctagataatctgtccacatagcctgtgcaatctgatttcttttcaaattccc

SEQ ID NO: 35763 - DNA, 291 bp, Zea Mays
tcttcgctctttgggccagctgtatgacatgtgaggcctggcccccgtgtcataggatgggaaccctggtgcgcatcgagtagtagccatgccttgcttctctcccactcgcggtgccctttcgcctctgagctctatgcgtcccttggccttcaggtttctgctttgtgtcgccatagtttaccatggccttgtaagttcatctcgagcatgcccagactgagtgggtgctcgacatggtgtgccgcctacttggatgggatgcgccggcgttcggcggaaggatttgcg

SEQ ID NO: 35764 - DNA, 430 bp, Zea Mays
gcaagctggccacgacgagggcaaaccgtgcggtgttcttgagtggattgggggaaatgcgaaattgaagctctctggtggaggatttgaggtgcggacgggtgcgcttgctgcttgaatacataacgaagtcaatggtgcactcaatttatagactccaggggcggtggctctcaatttgatcacgacgtgctggcggctggagatagggaagaacacggtggctataaccgtggcgttcactggtgcaacggcgcaaggataatactcctaagggtgccacaattactaccgcacggtaccaagctagggcttggcgtaaccgaggtcaccgacgcttccacgacgacaccggtagtccggccacgttgccatggctaaaagcacggtgataatctccaatccgtgatcttatgcattcccctccgtg

SEQ ID NO: 35765 - DNA, 562 bp, Zea Mays
agagaactctgatgaacaatttatggctactcctagtgtaatctagtgaagggaggagcgtgataggctcagtacctgttggtgcaccttctggtgctgagtagagacacgtggaatgaccgagggtgagtcatcaacggcgaggtggtatgacgtgggtcgaagcatcgtggtctggggagacggcgttggtggagctcctgcatgccggtgaagctcgtggcaccgaagtagaggacgagatacctcacagaagattcgaaacgatagcgatggcactggtggcgaggagagggagttctagtgcctggaggctcgagttgtggtgagtagagatcgtggttgggtcctatttgtagccgggcgccattgattgggagggaagggtgagggcggtgtagctagggaggtgatgatgactgctgagacgttctccacgttgatgaacgccattacgaggggatcaagcaaggataaggtgcctaagatgtcgggtgaaacctctgttttcgggtgacgggtgcgaggaggctggccgagccctacaatggcttgaatgccg

SEQ ID NO: 35766 - DNA, 611 bp, Zea Mays
gggacggccgcagtcagcagcaggtacacaacatcgccaaccagcaccccgctggtgaggcccctcgccgccaagagtatccccactagggccacggaaacagaactcgtggtcggggccggggacgggcgcaacagtcgcgcatattttactgcttgttccacggcgaagactgcgcgcaccctacaagggactgcccagaaacgaaggccaccggagacaagatgtctcgggcgtaaccagccgacaaccctagagttgtcgcgcacacatatcaacaactccctcagccatacaaccacggccccgctcagcatccacctaaccacgcataccaacaccaccaggaggtacaaatcgtacctcccccactcccacctccacacccgcaacagcaaaacatccaccaccccaaccacccccaagccccaaagcaagaagacttcgccgatcagccgtattgcggagtcattcacatgatcactggggggtctagcgccgacttcgacacaaagcgacagaagagggatcactaccacagcatcaaccacgtcgccgtcactggtccagtcgtgcagataaagtggtcccatgtgccattgaccttcgac

SEQ ID NO: 35767 - DNA, 277 bp, Zea Mays
ttaaaaacaaagtctgtgaccacagcttcagcggttagacctctctccttcagcaaacgaatttcatcaagcagaaccttggcctctgttatctccaaggtggtgggggactcaatccaactaggagtgcgcacttccggctgtctccctgaccgaggggggagggacttgccatgattttcaacaatgaaccactctaagcgccatcccttaatgctgtttttagtgggatatccaggtactctgtcttcctcccatgatgcatctccagactcgc

SEQ ID NO: 35768 - DNA, 294 bp, Zea Mays
gcacgtcgttctcactgattaagccaagtgcaactacacgaccatggcaataggagacctcatctcatggacatgcagagcagcggacgtgcatacaatattttgtttctgagccaaccgttgccgcacccgcacagactaatggagtcacggttccacttttcctggtaaccgttttgaccaagattctaccggatcgcatgggagcgcgtgtggctgggtgtcgacctggtccgccatagccacgacacaagcgtgctagtatctagcagttgctttcttcctcagtgtgat

SEQ ID NO: 35769 - DNA, 324 bp, Zea Mays
taagtggattatgctcagccgtgaaaagatctttgtcacagatgagctcgggacactttggccactctatcgtccatccacttgcgccggcgacgtagccaagtgaccgtcgttgaggtatacgtcgcctgccgtgatcgcaacacaccctgaccctttaaccacgtcatagtgagtcgccttagcccacccgttcatcgccggtggtcttgccacggtaaagtccacaaatcgcttgcgccagtagcttcttccctctccgaccgccagtgcaatctcttcaaattaaatgccaccgccctcggatcctaaaattgagcgtgc

SEQ ID NO: 35770 - DNA, 735 bp, Zea Mays
cggccagatgacgccacggctggagctcccaagcgacagggacacaattagatccaccccgaccatttcccctccatcaatttcacctaggggacactgaatcaatcagttcacggtgaccgagcggatggacaagaggatgaacatgttccgatcaaacagcgacgaggatggccaaattgaggctgggtaaaggttcacgggttcaccagggtccatggacatactttggtttgggcagaacaagacccgaagagcgggtcgacggtgaggggggtcacagcggcgttttacaaggaaagggcgcgttccggcgatgggcttcggccaaactccaaattgccgcatccaggagcaataagagatcaaagactaactaaaacagggagtaatttggtaattactgaccagaggagcgctggccacggatgttccttctcggcggagctaagaacagaagagggagaaattgtgggcttcgtgggttttccggtgagctcgagtcaattgcttagttgcggaatgcggtgatgaagcagcgcccacaccctatttatagacggctggccggcgacggatgaggctcggggagctcgggatcgcgctggcgagcataccacgcggcggattccggtgacagcgcggtggtcgccgtttaaccggagtctgccacctcggtaactcacggacacgtcgtcgggagcttttaccgtggccgccgatgaccaaacgggg

SEQ ID NO: 35771 - DNA, 537 bp, Zea Mays
cggaaattttcgacaaagatttcctcgagtcggcctagttctggatgcaacttgtcctcaagttctctagccacgcacacatagaatctgccaaatacaggggaggttgtggattataaagtcatcatggtgtgctcctcccacatggcatgctagtcggtagtatcccagccaacgattggggttcgattctcctgagtatgttgcaatattggtgggtgccatgtaccgctgtggcactggtgttcaaaggatgtgatggctaaaggcccgaggtcctgtggtggcgggctcaggatttagtccccatcgaggtcaaagcggcctccacgtcacttgttgtactgatgggtgtcacccgacctgttacgtcctttcactccacgcccagatctggtgttgcacagcaaggtcgagcaggtcctagatctcctaatgagttttttgtttgctcggagtatccgccttggggtgtttgtccaaaagtgctgaggtggccgcgacgttttggcttgctcaaggaaaactgaaagtcgc

SEQ ID NO: 35772 - DNA, 292 bp, Zea Mays
tcatgagcctgttccacgacagaacggtcatcgaccatcctgtattcatggtactgctcattaacataaagttcacgtccagcatctggttcagtatacatccggtctggggtctcctataaatcacgagccacttcgtggtgcatgtgtatgtcatatagttgatctgacaacagtgtcaagatacaaccaacacatgtttcgttatccgactcgaagttacggtcctgctcctcagtgagaggaagaactagggaaatcacccacaagatcctcaacggcatgagccaaa

SEQ ID NO: 35773 - DNA, 551 bp, Zea Mays
ggcgagatgaggaacactatggagagtccgtgcaagaaggggatgctcgagagtggcaggtgtaggggtgctgcagaggtggcaccggcggtgtagggggcctcgcaccatgctcgctatgtgagaaggcgtcgacggtgagggcccaagtcgggggtggtgcgttgtagtgcagtgaggaaagcgcgacgctgtgacatggcactatagtggcgatgagagagaagtggtcacctatgggatggcaatggagaaagttgtagccacttgttgtaggagcccgtgttgccggtggggaaggaggcggtcgcgccagtgccggaagaaatgacagcagccgcactagagggggctgtcccaccgtagattggggtgggagccatgctgctatagtgggtggtgggtaacacagtcgtgccgctgcttggaagtggtgttgcaccgctggaggatgcagagatcgcaccatcgaagtagaaaagggaagtgccactagagtaaggggtgcacatgggcgagcgccacaccgtgcggagcagggggtgtggggg

SEQ ID NO: 35774 - DNA, 371 bp, Zea Mays
ggtaaagcagaattcttcaccggacttggggtgggccgctatgcagcactgtgatgtgggtagggctccactcgctgccatacacggtaagaagacctccgttgagtttgctattgtctctaatataagtagcgctagggaatcaaagtctgaacgtttgtgcgcaaggatgatgaactccggcgatgtggctggggtcgctccgtcgaccgggtgggcggctaattaggtgtgggggaaacaattggcatcggccgtcgatcccgttacgtgcgggcgagattagaagtagggtaacgattcgtccagttaattcctagtcgttcgatctagatcgaaggtgcgtggataggtttcccttcactagtttt

SEQ ID NO: 35775 - DNA, 366 bp, Zea Mays
ggatatgcgatacgatggaggggagcttggatgatgcacaaccacatccaccgtctgcggaacgtgctacagtgtgatttgattgcgcaaaatgcggatgtgagcgtagatatgggagttgctgcagatagcctaagaaaaaggtaagggaccttaaccaagtgcattaagaatgaaacggagccacctcttggtggaggatgagattagacatagaggcgagtattttgataaattgtttaatggtgagaatggggctcaaccttctggttggatgactcttttgatgacactagtagacgctttgtgcataggatcaaagaatttaatggtattgaaaaggatgacatgggtaagagatgggct

SEQ ID NO: 35776 - DNA, 318 bp, Zea Mays
ggaaatatcgcgtcgtggatgaactccggccactattctactccggccgccgtacccgcctgagtcacagtcgctgtggataggtttgccggagttagccacctcgtgaccttgcgccacgtgccctggcgtcttaccacgtcgcagtagctcgtgttatgcatatccggtgatcgccgatgagctcgccacggtgatagccactaatcgcttgcgccagtgcatccccttctctctgatcgccaccgcgtaatcgcaaattatcgggccaccgctcaagggccctataaattgagcacaccctcgactccgctatgt

SEQ ID NO: 35777 - DNA, 274 bp, Zea Mays
accattccatctcacatgatataatttttaattatagattttatacttaaactcaaaatacttaccaggtttgaaggataacccgaactcaagccgacgacctcgaacagcggaacagggttcccatttggcagttgggcacatgagacgcaggtgtccttgttcctgccctctcccggtacgtaccatacatgcatgattcattgtgctccgatcctggtgcaaagtgcgtaatagcgtagcgtttaattaggtgctgtgtgtgttttgtgaa

SEQ ID NO: 35778 - DNA, 417 bp, Zea Mays
atcggaggagcaaagcctgcaccggcggcaccgcgacgcgacacgaaccaacaacccgacaaacgttgggagaagaggcctcgtgaagaagtccacgccgccggaccacccacctctcgcgcccgaggaggacctcgcggaggcgaacgcatgctggacgacatccttgacgcccagtgcctgtaccacaaggacatgcgccacaccctttggaactgcagagacttcaagcattccgtggggaaccaccgacccttccaacatctgccacctcccccaccacgaggaggacctggagaacctcgacaaccccaacagcaggaggggggaggtggtggagccttcccacgcgtcgacggagaagtcaatgtcatcttcggcggacatgggtcgcaagaaagcaagaggcaacaaaag

SEQ ID NO: 35779 - DNA, 513 bp, Zea Mays
gtttagaatgtcaccacatggaaagggatcgcaatgcagcagcagatgcattgtcaaaattagggtccagtcgggcctaggttccacctgggattttcgtccaagaagtacaacaaccaagtgtcaccgcatagcatgctgaagaatgcaatgccatggaccaagcagaaatagatcccaatgactggagggagccaattatctggtacataaaaaacaaggaagaaccagatgataaggccacgacagaacgcatcgcaaggcagtcggcccactataccatcatagggggttcgctatatagaagaggcacagtaggagtcctcatgaaatgtatttattcggctactggaagcagctactagatgaaatccatacatggcaatgtggcatacatgcaacatcaaaaacattggaagggaaagccttcaggtccgggttctgttgaccaatagcaaagaatgatgcggcagatttggttcagaaatgcgaagcatgcaagttcctatcgaa

SEQ ID NO: 35780 - DNA, 282 bp, Zea Mays
ttggcccgctacgcgccggatgacgtcagcaccgaagtcaagaagatggcccacattttgaaggggctcagaccagaactcaagaccatcctagctagccaagatttcctcagcttctcgcacctctcaaacaaagccatacaagtggaaagggcaagggaagaagaaaaaggtcacctcaagaggaaattccaagtcctccgagctcagcagcaagaccggcaccagagaactcgatcctttgggtttccacccaagggactaggcttcattagaccagtt

SEQ ID NO: 35781 - DNA, 774 bp, Zea Mays
agagcccctactccatcagagttctggataccacttgctgcttggttcactgttggcctagtcggtctttggacattttttcatttcttttcagtgtggcggcgaaagatcagtttaagctggatgaaaataattgccagatcgaagaggaagaattttgaaagaaaccatgaggttcctactgctgaacatgtttggaacacagaatcattgattcgtgcaaaaggaatgatgtgctgtgtatgcttggaatctatctcacctgctcagccccttgggcagatgatgacatcagaaaatatggttcaccgctgcaatgtttgcggtgcagctgcgcacataatatgctcttcaaattctcagaaagactgcaaatgcatctcaatgtttgggttcaaacatgtggtccatcaatggactgtactctggacagacatagctgaccaatccgaagaaggccagtactgtagttactgtgaggagttatgcagtgagtcttttctgggaggtcctcccatatactgctgcatgtggtgccaacgattggtgcatgctgattgccagtctgccatggctactgaaaccggtgaaatttgcgaccttggtcccttcaagcgccttattctgtcgccactttttgtccgggccattagcaaacctggtagcatcttgagttctataactcatggagcaaatgagtttgcaaccactgtgcgggggcgtttaaaccgaactaaaaaggagaagcatcagaacagattttcatctgacagc

SEQ ID NO: 35782 - DNA, 392 bp, Zea Mays
gctgccttcaagtgactagctttgattctctggcaagtgtcacactcagatatgtacttggcaatttccctcttcattctggtccaccaatataaagatttgagatcatggtacatcttgttgctaccagggtgcatggaaaatttcgaaagatgagcttcgtccagtatcttccttctgagctccgggtccttgggaacaaccaatcgatcttcaagaattcccttgctgtcctgacggaagcacttgtatttttctgccttttgcttgatcatttccttgatcatctgaacacccttatcttcaatctgtgccctgactatttgctcttgcaatgtgggttccaccgagatgtagcctaagtcacctgaagaaacaacttccaggttcag

SEQ ID NO: 35783 - DNA, 297 bp, Zea Mays
tgaactttgaactttggactgggcagtttagaatctgatttttggggtgttgatggaggtgtacactgaactgggcagtttagaatctgatttttggggtgttgatggaggtgtactctgaactttgaactttggactgggcagagtttacaatctgaactgggcagcaatctgaactgggcagcagagtttactcagaacacccaacaatctgaactgggcagtttacaatctgaactgggcagaacagttgatgcttaaatatggactgggcagaactctgaactgggcataaca

SEQ ID NO: 35784 - DNA, 422 bp, Zea Mays
ccaagtatgatgtcagcaccatccggagtagcatcaatgctgacttgattaaccttggcaatagagtatcccttgcgagatcctggagtttgctgcctattctgaactggagtagtagcaatcctctgtgggcagagatttgcatagtgtccagtcttcccacacttgaaacaagtagtgcctgcactctgccctgaaaacttcatcggggtgctagtgggggtagcctgacgaggaggtggagtcctctaaggtgattgctgaactgggcactggcctccgccagtgcgaactggtgtaccctggggtgaactgtagcgaggacgaacactgctgctcccttgtccttgagatatagctttcctcttcaaatctcccagctgaacacgcttgtgttcaatagctagagccttatcaagcag

SEQ ID NO: 35785 - DNA, 425 bp, Zea Mays
ctttggttgatgttatctagggcagggcctggctcgagcgagacagaggttcctcccgaggccttggtcgagcctgcctcggggcatgcagtcatacagggaggggttagcacagttgtcggagtggctttctgtgggattcatagggagttgttggtggggtagttggccgaagccgagctcgggcgaggcggaattttctccgaggtcgaggccgactttgggcgaggcagagttccctcccgaggatgagacctttctgtgacgtacgcatgtcccatctggagttgtttgggcacaacagacgagcgtgggagagcaatggccattattcccagacgtgtgccatcgtagttggtggtcccgtcactccctgtttgactacggcatcacatggggtaggtattcacattaaatgctcatgt

SEQ ID NO: 35786 - DNA, 416 bp, Zea Mays
cgatggcagagcgcgaggagttcctggccgaggtccacaaccgcctggaacaagctcaagcagtgcagaagcgccactacgacaagtcccacagaccagtcacatatgtcgtgggtgactgggtcctgctgcggctacgcaatcggccgattacttctctgtcccaggcgtcgaaggggaagctccagcctcgctttttcggtccataccgcatctcggaaatgatcaatgaggtagttgtacggctggaactaccggcccaagccaagctccatgacgtcttccaagtgggcctcttaaaaaatgggtgggcgcgccgccggacgttcctccttcgctgcccgaggtgcacaatggggtattggtgcctgctccagagcgtgcggtgtgctaccgactggctcgtggcgtgcaac

SEQ ID NO: 35787 - DNA, 385 bp, Zea Mays
atcacaaattccacatccctttctggaggcaacccatgcaaggcttcaggaaagacatccggaaattcacataccaccagaatatcctggatttcttgtacgatagcctcataaactcgtccagggtctttggctatgatagttacagggatggacaactagatctcttcatgaccatgacttaatttaatggtccttaagtttgcattgatgatggcgttatgctgggctaaccagttcatctatgtcttgcccctttataacaatcatgttcgtaagaaattctgtccatccaatgttactggtatatggaaggctacttccttagtaaatatccgtcccccaggtgagtggataacaaatccctcccttgattcagtgcaaa

SEQ ID NO: 35788 - DNA, 575 bp, Zea Mays
caggggatacccacaccttggtgataatcattacaaagatccaactttagtacatgtccatcataacaagcatccaacataagataagcaaactaactctaactaaaactgacttaggctaagacactgaactaagcattattacagactttgactttgtcgatctaaggatccaaatctatgcgggtcctgcagcctggagtaccatagtcgaagcgaccatggggcggtgaatggtaagggtgctgaatcccgacaggggtgggagaaccaccatccagatagtggcgtgctgcgcactcagcacgcaattccacaacctccgcccgaaccttgcccaactcatcaagggtgtggtccaactctgtgttgagcatgacgaccagattgaccatgctgttcagcctgggattgccctcacccactggcgagacaatcacacctctagcactgtcggtcgaacgacgaggatagtacttcaggtcaaggccatcagctaccctgctgaacaacaagcaatactaagaaagtgctcgtcgtgctgcatcttgcatggctgcctcggtagtatccct

SEQ ID NO: 35789 - DNA, 303 bp, Zea Mays
ttttgctggttgcctggccctttatcctttgatcaaatatgtgagatggttcattgttcgattagggactacaaattggaacttcaccattagtttatatctctgagacattacaccattaggtcatacatctgcattagttctttttacattttcctctattctgtcctactattttgtcaggttgaattttatcatctggctaaagtaaccaatgccacttactgagtgtgcctgtacatgctgtcaagtttatcgttgttagctaattggattgacttacgttacttttccacatttgag

SEQ ID NO: 35790 - DNA, 421 bp, Zea Mays
tagccaagtagtcctcatatgcagggtcagggatggattgctccaggtgctgcataaggcccacattgatgttttcttctatttgcatgttttcacccccctggtcgttgtttccctccaaatgcatgccctctgggggaagccgacaaggctagcactgcttcaacaggttcagggcttccacctgggggaagtgaatctcctgagggattatgatgtcattgaagaatcccaccgactcatcagaaggcagatcctcaaggtccgagagctgataactgaattgttcctccacattgtttgcattcaccaccggctcgggaggctgagcttgctgaactggccaagcatcccagccatcatcatcattattaacaatattttcttccttgtcaatccctcccatgggaggaggaatatt

SEQ ID NO: 35791 - DNA, 303 bp, Zea Mays
gagaaatgcaaaataaaaagtagcaatattagaacaggaatggtgatagaacatgagaataggctgtacgggaagggaggaatcggaaagacagaataataaatgaaaatggtagaacagagaatggtggcaggacacggaatgccatgataactttacgggcttaataagtaacggagatgatatcaacgagggcaatggtaccactcaaatggtagccctttacaatgttttttgcggtacgaacgatggaaggggacccttttgctagtggagggaatggtggcagagaaggcattaatt

SEQ ID NO: 35792 - DNA, 607 bp, Zea Mays
tggccgaaagggtatagggttatcacagccgtctgatccaaaacgaggcgcctagattagcccgagacccttatgaacccgagatcatcctcacacgtcggatccgaatcctatgatctgcagcgcactttcaattccatccctcactggccgcacgatccttgattgatggcacccgttccttctcctacctccagccgacaggataccctccaacaatcctgaccgccgctacacgatcgaacgacgcacatgccttcttctacctagccgcgaatcaggagaagcaaaacgcccagcggtggcgccctgcagtaggccacccaccgcccaataccttcggtgctcagcgcgatactcgagcaacccactacaatctataccctgatgatttccccgtgcgaaaatcctagcagcaaggatagcgggaaaagaactcaccccgccgagacgaggtagaggctgggcgcaggtgctgcttcacgaaggatcgtcgccgaggacccctcgccccacgcagatagtttcgccccgaccgaagatctccaacggcagtctcctaaactgcgagcaatccctctctcccgctctctcccgtgcacggtca

SEQ ID NO: 35793 - DNA, 311 bp, Zea Mays
atacttcatcactgagacagcgtatggggagaatagcagaaacagaagggttggatgctgtgtcattagaatgtgctaattcattgaataatggagttgatttttacttgaaataccttattggatcatgtattgagctagtaagagcaagatctcagcatgatcgaataaatcatatggcactaaaacaacagttaagtcaaaagctaataaatggtgtgcagctccaaaatcaggtgcatggtcaaagtgccactacatgtccgcaaatcagctcggtttcattgcaagacttcaaggctctatcagag

SEQ ID NO: 35794 - DNA, 605 bp, Zea Mays
cgccgcgatcctcgctggtgctacgatttgtgcccggtagcgtgaggataacgatgtttgataaaagatcttagcgctggatgagcttggacccgaccactaaactattcactgtacccacttgttgtacgactaaccgcggtgtcctcactggagttcgccgtcttcgtacctgcgccacgtgcctaggagcattaccacgtcgcagtgaaccgtaatagggagtttgtccatcgtcgggagccttgcctcagtaaaagccacgttagcgcttctcggtgatttcccctctctccggtcgatagcgcgccttctccaaattagacgccaccgccattgctctctataaattgatgcccccgtgagctccgctaggttattacgcacccagtgcactagctctcgtcccagatcattcaccatagcgtcccaatttcccatttccccaaaatcggatctccgcgccgccgtgagcactacaccgtgaaccgctgtctctaggtccgttctcgtttcccctacccttgcacgctcaggatgctggttgacccaaccaattgaactagaccatgctagatcgccgggaacacctcggtttatcgccg

SEQ ID NO: 35795 - DNA, 296 bp, Zea Mays
gaggaatggttttatgtaaagaataatctgattgaaagggaagacataaaggggattatccaacgcactatctggtctcgcttcggcatcagaaggccggctactgcgcttgggaacgatatcgaagcatgctagaaggctttcaataatgtttgctcctttattggcacaagagacctagttcaggagcacatagcctacagagtgtggtctcttgtgaatgactgggagatgccgaaggagactgctactgggtccagtcaaggtggtttggtttatttgaaatacaccttcag

SEQ ID NO: 35796 - DNA, 282 bp, Zea Mays
caggacgtcgttgactgttcggcggtagagttcatcactcattaaaacatacttgaaagctgtacgccaaatgttcttatccgtcctaatattgggatttcgtaaataattaattatgggtgtcctccaatcacttgcatcggcttcattatcaaccgaatcaattgggagaactttcctagcaaccccagacagtccggagtctttacacggacggtccgcgtcttgggggattggccctgtaccggttatcagattttcagtgttgtgaaatctccctcg

SEQ ID NO: 35797 - DNA, 346 bp, Zea Mays
gatacatgtcaagagctcaaggaagaaaatgagaggctaagaatgagcttgacacaactaaaagggaagtgcactgctcaaccttctcaagataaccgtgattacatggtgaagaagcttgagacgggaacaaccgtggcatgcactaaatcccttgaagaaaatgtcaaggacttgaggattgccaagaggaaggaacaaaagaagaaaatcaatacctctgccaaaagcctcaactgtgcctccatgcaaggtaacatccaaggtaatgatcaagccacacttcacactaagaaaagtaagaagtgtagtgaatgctttgaaaagggacactttattaggtcat

SEQ ID NO: 35798 - DNA, 376 bp, Zea Mays
agaagttgggaatccagtttgccttatgcggagttctcgtataataacagccatcaggccagcatcaagatgtcaccgttcgaagcattgtatggacgaaaatgccagacccctctcatgtggtccaacgtaggggaaaaggcactagaaggacctgcctttgtcaaagaggctgaggagaaagttgccctgatccgcagaagattacttgaagctcagagtcggcagaagagttatgcggacaacagacggagagaactcagatttgaggaaggagacttcgtctacctcaaggtctccccgatgcatggtgtcagaaggttccaagtgaaaggaaagctagcaccgcgattcatcggtccctatcccatcatcg

SEQ ID NO: 35799 - DNA, 415 bp, Zea Mays
ctgcggccagttggtgggctgtgatggcctcggtcgtcctagtcgtctggcgagggagatatgggttggagatgtcccctggccattaaatcgtccatcgaactcacggcaggcagacctccgtttcaaaaccggtctgtggcggtgtctgtgcggggaatcctcgggtggtgtgttcaccggcgggccgtgtcgtgcggaggcagtgccgccgcggttgtctttggagccgcgtacccagcgcagggaagaagacgatgtgcgaacctatgatctgtgaacgaacggctacgatttaatcggggttccccttcgcgggatcaatccgggatcgttggattccatttggacgaacaggattaggtggaaggggtaatcggtcggctttggatcgggaccgtccatttggaaaccg

SEQ ID NO: 35800 - DNA, 334 bp, Zea Mays
atttgaagaaagcgcgctagcggccggagagaggggaagtcactggtgcgagcgctatcatggctttcaccgtggcaaagcctccggcgatggacggactcactactacagttcactgcgacgtgttaaagctcctaggcacgtggagtatgggcggcaagtggccaacgctggcggattatcacggccggccatagagcaagtgggtacggtgaaccatccagtgaccgggcccgagcttatctaggcgccaagatcttttactcccctcggttatccgctttgcgtcgagcacgaatcacagcgaccggcgcgaattcgagcacgagatcac

SEQ ID NO: 35801 - DNA, 670 bp, Zea Mays
tcggggtaagaaatatcgcattggggatgtgctcgggacactgtttcgccctggccgtcgtacccccttgccttacggtcggtccagattacctcgccggagttggccgcctgccgattgggtgccacgtgcctaggtgctctaccacgtcgcagtaactcgccttaacgtgtccgttaattgccagtgaccttgccacggtaacagccacagtcacccgcgccagtgactcagtccctctctccggccgccgcgcgtcttctcaaaattagctgccaccgcctatggaacctataaattgccgccccagtgagctccgctaagtagttgtgcaccaagtgaaccagccctcacctcaaatcgtcccccatagctccccaatttgggatttcccccaaatctgtcaagaacaccgcagtgtgtgagctcgccgtggcccgctctccacaggtccgatcacaccctcctcgctcttgtttcagctctcttgtgtgctctttatgcttctcgacccagccaattgagctacaacacgtaggatcaccgggaacacctcggattatcctcggtatgcgccatcaccgtggacagagagttctcgacctggaattgtgcaattagttgagggattcttgtcgccggggttagaattaggggtcgagcaaaggag

SEQ ID NO: 35802 - DNA, 286 bp, Zea Mays
ttggtaatctttggaacatcgaatccagtatcgtttgggctgagccctcgacgtcttaaccaaactataatctttgaaatcaaatctggttctttaaacttcgtttaaaattctttcacgcttgcgttgcacgtgtctctctgtggcctgccatcgtagcgcgtggcaggtgctaaccggtatccggacagagcacagcctctcgcccacgcgaacgttgcgtggcgtcgcttccgaatggatcacaaatttcgatgttgtatcgatctcgcgtatttatttcgcg

SEQ ID NO: 35803 - DNA, 510 bp, Zea Mays
cattggcgtaacacggcaccgaggaggagtaataccaaccactcaggcgcattactaccccctatcgcaccaggttactattttgagacaagacaacatacaccctcattgggcgcacccattgggtgtacaaaccagatttttttgggattttttgaagcaacatgatccacaagatatccgcaggagttacaaaatgaaaaactcaagatctatcaaactggagtcaatcggacttctatcggctggaacctagtcagcggtcacattaaaagccctagctgaatgtcatccagcaggacttctattggcttagactcagtcggccagatttcactcggctagacctcggccaacgtaggttcagctgggcaaatctcagtctggtacgatcgttataataaacctaagttttctaaaaacagattgtgaagacctttgagttgattagtactcagatcaatttaaagctcgagggctacacccattgggtgcacacaaggacgaaaa

SEQ ID NO: 35804 - DNA, 588 bp, Zea Mays
gaagggtctattgtagtgccgaaggtgcctacagttgggctagccgaagccaaagatgatgcggccaaatagccaaattagaaaaaaaacagtgaaaatgccaggaattatgagcccaccagcagaggcagaattgccgaaagtgcaaaaggctcctaccacaactcccgcgagaaggaggatggccagtgtgctagacgctgtcatggagaccacaaaagccttgacccctgctcctactaagaaagttgtcgaagctgtcaaagtctaggccgaagccaaagctggatcttcagtgcccattgagacgaaggctgccgcgcctgaggaaaaagttgagcaacaaactccagataccggcatggcagcggggcaagacatgatagaaaaagctaaatctcctgcccctgaagctctgaccgaagatgttgattacattattcgacatgcttcggggaaaaaattatccaaagaagaaatcttagcagccagacactacgcccagaaactaaaatatccgaagggggccttagtgttcaatggtattgacgaagatgatttcctatactgtctcctggacaacaaaga

SEQ ID NO: 35805 - DNA, 357 bp, Zea Mays
tgccaaagtaccagcaggagcagcgtcagaagaatcctcagctagcagatcaagcatggcatttatatctgcatcactagggttcaggggcacctcaaaatggacttgccgttcgtcatcaggaatctccccaagcgaagcaaccaaagcactgacttcttcagcagagggtcgcactctaaggcccaaatttccatcagtcacaggtggatttgacacgaaaagggtgaaggctttgggaggaggcaggttccaggccgagtaagccaccggagcaccaacatttgacaccttacccctgaggatcatttcaagacggcttaccaagtctgcagaaggaattctcctgttggtaac

SEQ ID NO: 35806 - DNA, 307 bp, Zea Mays
caagaaattgctagaaaggagcttgcatctatgatggttttgcatgaatacccattatgcatggttgatcatacaggatttagaagatttgttagcgcacttcaacctttatttaaaatggtgacaaggaacgctattaggtaagtagttttggctaactgtactaaactacttattgtgttttggctaacttatatttccttaggaatgacatcatgaagcaatatgagacagaaaagaagaaagccattgctttcatggcaggaaacaaccctagggttgctatcactactgatatgtggactgc

SEQ ID NO: 35807 - DNA, 304 bp, Zea Mays
aaaaattaccgcgttctagagactcaacttattctaacttatagcaaggcacacttaagcatagtcacatgatagatgacgtgacggctacgtagtcatgccatcacttcaccccacaatcccaagtaacaaaataactctaaccgaacttggcatttagccgatcgattcctaacccattttttataccacgactacacgacatgcctaatacgttaaatgacccattcacaattcacctacatctttaccaaaacattcccacatcgcttgaaactcaacccaagcttcactgcacaatttt

SEQ ID NO: 35808 - DNA, 464 bp, Zea Mays
gttatgtgcttctacccatgatgtagaaacaaaagaatgtgtggcaccagtatcaaatagtacttttgctagatgggattcaactggaaacatacctactgccacatccggtgcatcctagattgcttcggcctccaaatggttcacctttccacggttataggcctggccatgacctcctggtgcttgctatggtgctccttgtcttgctgaggtgttgaaagttggctgctgctgaactactttcttcggtaagtgattcacccagtgaccttattccccacaatggaaacatccacgacctccttcttgcgctggcactatgtgattgttctgattggttgctggggcaggaaggtgaggtgcctggttgttctggcgctggtactgatttctccttgctggttgctgtgacggtattgttgctgctgctgagggaactgcctctaatactgctactggtg

SEQ ID NO: 35809 - DNA, 777 bp, Zea Mays
ctggttccatcagccctttccttattggatgagcaggctcgttcgctttcagaggtgacagcaggtttgctcctgtgaccctttccagaatatcatgactcgcggattgagatctcgtgatggttcatggttgcgagtactgcgcgcccggccggctcccatgttgttggttcggtcctcgcgatcacaggcgtgcagaagagtgtcatctcagatttaagcaagctcctgactggaacggcttgaggcgatctgctagcctttcgtcggggatcattgtttggtggtatgtcataattgctccccggacttagcatgctttgtgtagtgtagggtctgctagatctcctttgtaggctgttccctcgatttaaaaggtggcggcaggcatgttaatggcaggatgattagccattcaatatatgattggaaaggcccaaccgcaccgcgcataactgtacatccaggacgcacagtgtcattcgctgctgcgttgtgcattccggcttcagttctggcaaagatcgcgcttaacgtcgactgctgcggaatctgctcgtcttgaacaggtaactcttgagcagcgggcaagatgggtctcctgtgttacatgcgcatcactgcatcatcaggtacgcggtttgctgtttaaatttgcgatgggtctctcatttcttttctttttcctacaacctgttggtagtagttgtcaatgaagaatctcatgttttacactgtaccgtcagctacaggtagtacagtacatctgctgctggt

SEQ ID NO: 35810 - DNA, 448 bp, Zea Mays
ccacaaacctctctctggcccatttaccgaccaagtcctcgctgagtaagtctacgtggtagggcgaatgaccaagtttccaccgagcaagtctgaggcggggcgactgaacaagtcctcaccgagcaagtccccgtcgagcaagtctgtgaggcgagacgaccgaccaagtccccgccaagcgggtccgcaaggaaggaatctaggccaacgctgtcggcccacgacgcccgcaacaagacacaacatcaccaaaccacgtctagaccatacatatagtaccaaaaggtctatggcagacacgatggaacaccccccgcatgcgcccacggatataccctcactgactcgcggggccggtcaactccagtcgtggagaccttggcaccggagtctctacagtggcccatacaccggaaaggatgatacaaaaccccatactgggcgt

SEQ ID NO: 35811 - DNA, 368 bp, Zea Mays
tgacggtggtgccgagccaagaaatcatattgtgcatccagggtgagcaggtatgtagtgaggtacacgactgtggggttgtcctcaagcagctgctgcccttccaaggcacgcatcctggccatccaaacgggacggtttctctgaaagggcggaaagaatctgagtggggtgtcggccacttcttcttcatagatctgacatagggtcctcaatgccttgcgagcgacgacttgacaggtgtctttgaatctgtgcctagcagcagtgacactccattccacatggtgcgaactggatccaatgtatacagtcacgacacatttctttgtgccatgctcgacgaattcacgaccatcatactctgg

SEQ ID NO: 35812 - DNA, 288 bp, Zea Mays
gccagatcggtgctccagtacctcggtacctcaccttctccatgcccgacatcgcctacaccgttcaacatgtgtgcctacatatgcacacctcgtgggagccccatctcaccgctctcaagcggatcctatgctaccttcgtggctccctcgactatggactcctccgaccatccctgacatcagagctcgtggtctacaccgacgctgactgggctggctgccccaacacgcgtcggtccacatccggttataccgtgtttcggggcgccaacctcgtttcctggg

SEQ ID NO: 35813 - DNA, 465 bp, Zea Mays
cagcctcatgatcgtgagtgcatgaaggcataggaggcagaggcggaggtggaaccccaaagacatcatcgtcagggactgctgcgccctgagtctcgaactggtgaaaagtggtatcctcggcctgagtattaatcactggagcaggtgccggcacaggatcctctagagctggacggtaggccccaaagaggaggcgagaggcctcaagagtaccctggaactgtggtggccgaatcagctgagcgaagatgtgacagagatagtgagcatacggcagctgtcgacgagcacgtagaccatccagtacggtgtcctcgatctcacaaatgaggaaatccacaacgttaatctcggagtgagagaccaaggcaccaaggagccaaagctgaatatgagtggcagcctccctgtaacccatccgtggcagaagcgtccatctcatgagctgatatagaaacttgg

SEQ ID NO: 35814 - DNA, 360 bp, Zea Mays
cgccgtaaaccagttccggcctcaactcgtcctcgctctgtagcaacgcctttttcccaagcgtcatgtcggttgtcgtctccaaccttcccttgacgctgtcattccttgtcctccacactggagttcgccgttgtcggtccctgctacgacatcgactcgccggggtctgcatatgtagaggaaagtgaagcttcgtgcagtgttcgttgttgttgcgtccggtggtaggtataggccgtatagcgaacatggttgctcctgcgtgcatagtgttggtggtggcggtacgattgatggtcgacgcggcttcttgcagcacgttgcgggtgcgggtgatgaaagcaaagtcatgtggcg

SEQ ID NO: 35815 - DNA, 428 bp, Zea Mays
gcggatgtggggcggatgcggaggcgcggcagaaccatgtgggtgtgaacgcctacagtagtaacataaggaagggaagggcatgcttacatgtagcacaagttatatgttagagactgcagagcatctgcggtgaacttgttgtcatctcgtagcacatggtaatgcgtaggacgacttgttccctgcaattccacgagcagttataatcttcagattccttatttggggggaaaatgtctgaattagttgtaacatgctacacacataccttggccccagcatggctgcacaggaagaaatcaaattctgttgggtggcagatattattatcaactacggtgcctgcaaattccataaacgtttcagcaaaagcattgtaaaaaaacagcaaatgcgcctgcatccctaaccagctcgaatattcc

SEQ ID NO: 35816 - DNA, 330 bp, Zea Mays
ctaggaattatacaagtttctagtattgtttttgtattaaaaatcattttctacaatttattatctaatttctctggtctctggactatgcgcataaaacagataagtatagggtttaatctgtaaatagttctaagactcatcactcttctgcgatgggccgcgggttgtttatagagttatacggggtctcttttgcataatggcatggccgaaggggtaagaagcaaccagagccgttggattaaaaggatacggtccagattagattgttttataaatctaaccgatacgcatcccgagccgtgggattacagatctacgcttagg

SEQ ID NO: 35817 - DNA, 302 bp, Zea Mays
gctaaggctaagtgcaccacttatgcaagacaatataggatggagagcatcacctgcgaccctgcatgttggtgacctggcacgtgttagacttggaacttgggaggcggcgtatggtcttcttgaggtgagagtgagaagatatgagtgggaacatggatggcagtagagaagtcacacagaggaaaagtcctaatgtttttatcttaaaaatgtaagtatgcctctcacatgggtgtggtgatcagtcatcaatggcatttgccttgctcaagttagatgggagataatgtgagagaaac

SEQ ID NO: 35818 - DNA, 281 bp, Zea Mays
attgatttgggtggagatagactctttggatcactgtgtatgccctcacggtgcagttcttggtcgtgatccgagttgattctcatttgagttcgttttgagaaaaccccatctctctcaggttttctgatctgcgctacgattttaggtttgttcgtgttcatacttcaccagtaaacatcttgtaacacgtgcaaactttctgggaagtttgagaattttctaggcgttttccctacatggcaccgccgtctgtgtgtgcggcactaccgaaccccgac

SEQ ID NO: 35819 - DNA, 468 bp, Zea Mays
aaaatgtaaatccactaatgtcatatgtttgccatgtcgtgacctggcgtgatggtccagatgccaaccccttaatggtttgttcttctattgtatctccgtgtggaatgtccttcacaattagccatgtgttgaaccgcagcttatgtcgcttcattacccaatcatttgtttgcccaggattttgctcgcgaagctcattgatgtgttgttagataaatggctccatgtcgacatcaccgagtgattcctctgcttcttttgtctcccattcttctagccgtgaaccaaccccagagtgggatcctatagcagcatatgaaaaacagacacctttgcactgggatgcagatggatgggactttgcagttgcatcggaatccgacggcgacctcaccgacggggacgacctccagttcctcgttgacggggagctggactccgacaccagcactgagtggtcttggg

SEQ ID NO: 35820 - DNA, 429 bp, Zea Mays
aaaccccgtagcagactagaagtgcatttcaatttgatctgatatagtgatatctgattccggtgcttaaacagagtaactgaccgagggcctatttgaatgagctcggggtagttaatttattagttgggctaaaacttagctaaaaactagttaaagacttttagacttggccaaaaaataacccaccttagctcttctgtttggatgcactagtgctaattttagctagctaacaattagctcttacatgctaacaggccctaacaaggtcctgttaatgaacctcagtttccaggttgaaggcttgaaactatttcatgaatagtagtacttggtacatgatacctttttctgttcacaggtctttatttgaactagaaaggataccaattgtgtcgggtgtgataattaggggtacccggatta

SEQ ID NO: 35821 - DNA, 412 bp, Zea Mays
cgctcgtaccattggaatcttgcatactaatattcttatatatgcttaccttcatatcccaatgactattcaaaacctttcagttaatattcccttgatcacccttgcttcttgatggtccatgagcgaccatttcatttcgcacatccttggtgatcttgttgtttccatataacttccttcggtaatgaatttttacctaaaccctcctattggaaccttgcctatcgtacccttgattattttctccacttcataacttcgcgagtcttgccttaactctatcctttgctatgctcttcgttattatcatctttacccttgacacctctatatctttcattgatgtttatcttatacttgtcatttaaaatctcatgtcttccatctcaatctgagcgttgaactttac

SEQ ID NO: 35822 - DNA, 305 bp, Zea Mays
gcaagatcggacctgaagtgcactgaccacagtgagagcttgttcacggtggcggaaaacagatttgggggaactgagcgtttcgggggttttggtgagtaattggaggcacgagtgggtgtgttgagtgcacaattacacaacagagtcaagggtgtgctcaatttatagggcctttgagcggtggcccgtgaatttgtgattgcgcggtggcgatcggagggaaggggatgcactggcgcaagcgattagtggctttcaccatggcgagctcaccggcgatcaccggatatgcataacgcgag

SEQ ID NO: 35823 - DNA, 304 bp, Zea Mays
cgctccagggacccctcgccgaagcctgcccaccccgtcgtcgaagcatttccttgcacagcgacgccaaccgatccactcatccgtctctatgccatcgctgttcgttgccattcatcgtcgttcgtcattgtttgctggaacaactccccaggcgccaccactcgttggagttcgcctcggcatccctctcccgcgatgtcgtcgcctcgctactcatgcccgtgccatcgcaccagcagctgtgtcattgtcgcgccgcgtcaagcaccgtcatcaaagtgtcatcacgccccgtcgatct

SEQ ID NO: 35824 - DNA, 470 bp, Zea Mays
tgcaattgcatctcgaaaatcactcatgtctaactcatcagatgtgctagtactactctcacctgcaggtagatcatgacttaggctattaggtcctacttcatcaaaatctctatcgtgtagagcactatctctaatgaagttatgcagtgtcatacatgcaataattatcttcgattgtttctcaagcgaaaatgaagggagacttaatagaattctccacttcatttttagcaccccaaatgatcgctcaataacatttcgtagggatgagtgcgcatagttgaaaacttctttactcccaataggttgcctcgcattttgccattccgtaatgtggtacttctgacccttataagatgcaaggtactcctttctatttggataacccgaatcgacaagatagtatttacctgcacaaactcaaaatacaaatgttacgtacatatgacataaaatagtactgtttt

SEQ ID NO: 35825 - DNA, 353 bp, Zea Mays
ctccggccttctcctattcatccttgtgggttcgtctctatctgaaggcatttggttgtctcaaagagctctctcctttcgatcggtccctttgtctagaggacgtactctcccttttataggctgggagaggggtcggccagcggtggcttccttgggaagaagcagtaaggcaatggtaaaaccagtgttttaccccgggtgaggccacgcgtacttgtggggcccggtgctgcctggttgtctcgtatttattgtggcgaatgacgtgggggtggcgatggtcccaagcgtcgtcattctagctacgtcgacccttggactccgtagccttgggcttggtgcgtcccgtc

SEQ ID NO: 35826 - DNA, 517 bp, Zea Mays
ttggttggcctgccgatctcaagacaaactctatgatctctcctccctaacagggtccctccgggggatcaggtctaggtgctgttggcaaacaccatcgtctctacgcacacgcggaccgtctgactcggcgcatagaagaaccctctcctgctgccaagttgcggaccgtctggccctaggcaatggactgtcctcatctccgcagagagggcaccactgccggttcacctcacattaattggcacctagattgacgccaacaccacccatttggccgtactgtttagacatctataactcaaaggttgcaaataatgaccgtatgcagttttgttcgtgctggatcttaggatcaatcatgtcatttggttttcgagtttcgcgtgcgtttaggtttttcttgactattccatcatgtaaaacctttaggttgaactgacgaagaaccagtgcaacatatagattgggcagacattcctctatcttcagcatcttctcttatctgatctaattt

SEQ ID NO: 35827 - DNA, 622 bp, Zea Mays
gtgggttgtcacacaaaaatttgagaatgaggccctgcaagttgctctgtcagaatgactgaataggatcgcgatggtacagtggactggacaagatcacgggttcagtgcatctgtcaccgccggtgatctccgcgcggcgattcacgccaaccgccgcgattcgtgctctgtgtgaagtggataaccgtggcgggtgaaaagatcttgggtgagaagaacataggcctgagctagatcatcatcgtgcccacttgccgcgcggtcagtgaaatatcaccatcagtgtttgccgtgatcgcagtggaagacacgtagtcgcctgtttaaccatactgtcatggtcatggcaagcaaccggttaccatcactgaaccatttccctctctcgcgcgccacggtgagcaggtcaccatagaaatatcctggccgcggtgaactcgatcccaatccaaaattcgtgataagcttagtcggggtctataaattggaggcaccccctgctccgcctacttgttacgcgcccagtacaacacttctcacctcaaatcatccaccctagcgtccgaatttggttccccccccaaatcggtcatatgtgtcgtcgtgaggcaccgcgccg

SEQ ID NO: 35828 - DNA, 328 bp, Zea Mays
acgttctagaaatataggatctggtgtaatgaagagtttgaaaggtcacaaaatagaatttgatatgacaaagaagggcgtgaaagttgctaaacagaatatgatgtaatgaagaatgggttgaagattctgaaaagtagaaactgatcttatggcgtcgttataaagagaaataaaaaatatatgtgctcatatataaatggtcggaggactattctctattatagtacacaaaattaaaggtcgtggaggaaacaatatccataagtagcagtaaagtggcaaaaagcaatgagcgttgctatagcatgtgttgcaacaccattca

SEQ ID NO: 35829 - DNA, 350 bp, Zea Mays
aggagttaggttgtttcaaggtgacttgttgtcccttgggtggagttaggctcttctccctcctttgtaagtcccggtggtcgtttgctcactgatcaccctcgacgtccctttctccttggtttcttccttgagcacatcttacgactgggtcggtcgatagatcataggacaatgggaagttgcgctccgtgggccacgagccgaggtaggtgtctttctttgggttcccttgaccccattctcaggcttgatatttttctcccttctccttccgtcgcagggcggttaccgtcgaccaagaggttgcatcgccacccgtcgagaagttacgctcgggctccttatct

SEQ ID NO: 35830 - DNA, 381 bp, Zea Mays
ccaccatcctatggaaagagttattgttgttgcataaagagcacccttatgaattctcatcactaagaaaggcattctttacttcaacagagaggcagtgggcataagagagtggatagtggttatgtacattctttacttcaattgaatggtgaggagcataagagtgtgaatagtagttatgtacacaactagggcaaaggcctcatcgtttgccacaaccatagctccactaaaaccaagagccaaagcaacttgcaacagagctaggtgagattttgcaaacacggaatataataagctaagaaaaacatgcacaccatagattagcagcattgaaagaaggtccaagtatggcgtctcaaaatcaaggccaaagca

SEQ ID NO: 35831 - DNA, 309 bp, Zea Mays
gtgaccgcggggtgtaatcatatcgtccaagcagttgaccttagtccaaatggtgtcgtgttacatgaaacgacgtctgctgcctgacttgcttccagatgatttgaattgcttattgaatacttgcgactgttcggtgaccgtggtaggagatgagcggttgcttccggtctctataaatagactgtctgcctcgctggtgtcttcacacatcttctgatcgtctgttgcttattttcccacttttctcttctcttccaaccgaccatgggcaagaacaagaagggtggaggttcgtcgcaccactcc

SEQ ID NO: 35832 - DNA, 328 bp, Zea Mays
acatttcattgatgcatgtcgttttatcatacaattgtgatggaaaatttgaaaggcaaatagcccctaaacagatcaccaggaactcacacacaaacaaacacaatgtgtgtggtggttggaatgactaggccttggtggctggaatgacttagcattttcggattttccgtctggctttatgcattgctgagagttacatttgtggctgtgatagcctcctaactaatgcagaatgttacccaaataaatggtctatgttactactgttactccatgctgaaatttaactaaagttatgaatctagacactagcatgcacctagac

SEQ ID NO: 35833 - DNA, 331 bp, Zea Mays
gttacaaggacctccacggacatgacgcgacgagcttctggatgacctccttgcagatacgagctgtaggctggccgagaccacctcgtggcgacaagtttaggctgggcgaggacgtcctcggaggcaggctgctggaggacgcaacccgaatacccgatgtgggctgctgggaggcaggggaagtggggatggtaagcggtgtcggatggagctattgaagatggggaagaagtgttgggcgacgagcggtggctaagaaagtgtagaagtgtggaaccgtgaaatgagatgatacagcatcacactgatgagcagtttagggttttgg

SEQ ID NO: 35834 - DNA, 488 bp, Zea Mays
tgcaaactgagaatacgggcaatgtataactccgcataggtaagtaccggataatatgtcttgaccggtagaaagtgagcaatctttgtaagccgatcaacaatcacccaaatagagtcatatccttttgcggtcctgggcaatcccacaataaagtccatactgatgtcttcccatttccatgttggtattggtagcgactgtaatggaccagcagttttcatgtgtatggccttgacacgtccacaagtgtcacacttagccacatagcgtgcgatttcgattttcatctttgtccaccagtaatgttgctttaggtcttggtacatcttagtgcttccgggaggaatagaataacgactaagatgtgcttcatcaagaatttgctggcggagttcttcgttctttggcactactatgcggtttttaaaccatatcacaccttgatcgtcttccttgaaacacttggctactccagcccttatctt

SEQ ID NO: 35835 - DNA, 289 bp, Zea Mays
cccctgagggctcaggcatacggccaacccctcggcatcgtcctcggctcttagcaggaaagcagtgagcgcaagtcaacaacgcagtgcaccgtcatgtcactcacacgacgccaagacatctcccctgggaatacgacgatccccagctcaacaacatacatctcctaggtgtataaatatggcagtggtagttcctccacggggcaagggtgaacacttagtagttttcctccaagtgtttcggtattggcacttgcctcaatcagttctagggacttggggactt

SEQ ID NO: 35836 - DNA, 422 bp, Zea Mays
cgattgtctctcggcatcggatcatatctatgcgtcaaggacacacagagatgaaacatgtggaacactgctccactctcatcgagccgatccaatctactgtaattaaagctttcactgcataatcataacatcctacgcgtagccgggcctaacgagcatgaagggtgagaggacgacgaccagatcaaaggtctaagaactagccggagccgattccaggaacaatccctgttcaagtcgatgtgaaacacctaacacgtcataagaacatccgacccatgtgcagggcatagttatacggatataaagcagatccttggtggacaaggactaaccgcaacaggttagatctactcgacagaacggagcaaggcgtcacccacacgctcgagaatgtgcatgaggacgactagacgctt

SEQ ID NO: 35837 - DNA, 550 bp, Zea Mays
gtccagagaagaattgctctcaaattaaaattcttcttctccttggcatcccatgtctcaacacctttttcccaaaggtctttgagctcatcaatcagaggctgcaaatatacatcaatattgtttcctggagagtttttaccgggtatcaacattgacaacatccagaaaggttgtttcaaacacaaccaaggtggcaagttgtaagggattaaaatggcatgccatatagtgtatgcaacattgaccatcccaaatggattgaaaccatcagatgcaagacccaatcgaatgttacgaggattagaagcaaaatatttgtatatgttatctacatgcttccatgccttagagtcagcagggtgcctcattttgttatcttggactaagccctccttgtgccaacgcatatattcagatgtggttggattcatatacaacctttgcaatcgaggaataactgggaaatatcttaggattttccatggggcacgcttgttggttgcctccttgtgatgcccagaaaccattggttgccatctagactcac

SEQ ID NO: 35838 - DNA, 339 bp, Zea Mays
catatcgcaaggatacgaaggcaccagtcctcagctaccgtacaaagtggccaaccggctggaaaaatgaatggttttatattaaagctgatgagaaaaagagggagaagctgatgaccatggtcatgagcccgctgtctttaaacttcggaatgaccaggcccctatgcaacatgcaactgaggtcaccatgccagctggccgaagtagagtttagagtggtggccaagcaaactagtaccagggacctggtgcaggaatatctggccaaccagacgtatccaacgtcaagtggccggggaatgccgaagatgaaagaaacgaagcagaagcatgaac

SEQ ID NO: 35839 - DNA, 280 bp, Zea Mays
gaagctgatatgcccatgatgaagaagctaggctacttcggggaagccgagaagaagttgattcgctttggcggggaagagaccatcccgaaactagaaaatgatgaagtggtagtttttaagagcttcttcaaagcagggttgagatttcctctgcacgggatgattgcagatgttttggaaaactttgagatttatcttcatcagctgactcctaacgctatcgttaggctcagcgtctttatctgggctcttcgaagccaaggagtggagccgctcg

SEQ ID NO: 35840 - DNA, 429 bp, Zea Mays
atttataacccatagttcactggcggttcccaagccgggtccacctggtttttttaccgggtccacctggttttttttactggcgcacggtaactgaaaccgctagtgataatttataggtgccgcatgctgtgagctcttttctactagggggtacgaacctgtattcctgtgtgcgacatcgatcttgcccggcatcggcatcatccgctgatagcccaccaccatccccagtcgtaataggccagtgggcacagtacaggaccaccgcgcccgcttttgcatcgatggctggctggctggctgcctctctcgatctccccaccttcctgcctgcatgtcttttagagcagtcactactggcctggccatgattcagcccggcctgtcagtgcagtgtgcaggtggcaggtaccacgctcagctctc

SEQ ID NO: 35841 - DNA, 918 bp, Zea Mays
aagtcggcccatctacaggcggaaacgtgcccgcgctatcagttttgcagaaacacccctatcgtttcaaaaatcagagcagcagacctcggcactatttaactgggtcactgacatttgcgaataagcccttgcacttctatctcttcacagctcgcagtccacgacggcgaacggtggggaaccgagctccagtgagcttgtaccggccggatcccgcaacgaccggtgctcccgtgtggcagacaccaaattggacccctcttaatcatttcccctcactcaatttcaccaatgaggctctacatcaactggttcacggagacagcgtgaacaatcggatgagtgaacacgttcccggtgatctagggcttcctagcttaatcagatgggtcagcgagtatcagcagcgagtaaggatgctgaaacaagaggacagtggacatgaacggacctgaaactcgttggccacggcgaggtcacaccgctcggtgttcttggttgatttgggggaaatcccaaattggggagctctgatggacgatctgaggtgagggttggtttactgggtgcacaactacttagcggagcaggcgggggtggcaatttataggctcccacagcggtggcgtccaatttcgcgaagacgcgctggcggccggaggggaagaaggttactggcgcgcaagcttagtggctttcactgtggcagctctccgacgatcaccggtcatgccagacgtgattcactgcgacgtggtacaatgcttgagcacgtagcgcatagcggtaagttgccaacagcggcgaggtctatcccggctgatcgacgagcaagtgggtacggtgaaactcatccgcgaccgagcccgagcctatctggtgccaagatctttactccaccgtgattatcccctc

SEQ ID NO: 35842 - DNA, 1054 bp, Zea Mays
aacctgcttctttggatccatccgatacggggccttatgaataggctgtgtacccggaaccaacttgatttcaaaagccgcatcgtgcactagtggaatgcctagtagctccactggaaacacgtcggcataatcacacaccacatggatgtcctgcactcgcaaggcagcctcactctccaccatcatagaaaaaaggattcctgaattccttgtccgacgattcggaagtaattgggacaataaagaaagagtgtactttggagtgcttcccaataataccacctccctacccgacggtgcctgcaaagacactgtcttccaaaaacaggatataactgtgcgatattgagttaaccaatccatacccaaaataacatcaaatgactccagggaaatcaccacgagattagccgaaaagatctcatcagcaaggaacaactcgggcagactgaacaactacttatggatcccttagcagaactaaccacaattgggtgacccatcctttgcaccaaaagaccagcacacgacacaaaattcttcgaaacgaacgaaaaactagcgctagagtcaaaaagagcatgtgcatcaaacgaatcaactgagaccgtacctgtcaccacgtctccatgatctctgccatccgcaaatgatagcacatatgctctaggaacacccgccaaataggaagctcccggagtgaaattaacagaagaagaacccccaaggagttgcaggatgaggcagacgaggagctccaaactgaggtggtaaaggagcggtcagtgcaggagtaggtgcgaccaagtactgaggaagacctggcataggcaagtactaaggagtcctgggcatataaaactgctactgagggggcggtacagaaaattgctgctcagtgtttgccatcgtgttgatagtgctctacgaaaggggaagaagtcactagatcccaattatgtttcccatttggattcctcctacaccacatccttgtgatcctggttgtagatagagcacctgccactccattgacactcagcacgacgat

SEQ ID NO: 35843 - DNA, 462 bp, Zea Mays
ccagaggaagaggtggcagcgccaatggagcctccaggggtgcctgtcgagggcgccgttattaagtcatagtcggcggttggtgtagcgacaactgtagagctgcaacccgtaggggagctggtggtgtcggggatgtcgtggccgcgcgtggcgtgggggtcctagtggctggagatgcagcgcttgtcgcagaggaggtgggtgctgcatatgacgcagtcgactgaggagaaacacctggcaggagcagcggtgctgcgctagaggtaggtgccggcggtggagaaacacttggcaggagcagcgatgctgcagtagatgtagttgccgatgctgcaactaggggccttaggcgacgccggggacgatggggtacctgcggatgaaaggggaaccgatatgcaggaccaccaaatcatcatcggaagacaggaaatctaaatcattagtgggatgggg

SEQ ID NO: 35844 - DNA, 486 bp, Zea Mays
gcaaactctgcattaagcgcttcaagttctgaaggggctgattttctgattgtaaatactggcagtggtgattttgtggatgttataaatgatgttgttggtcaacatgtgaagattccgattttcgtcacgttgaatcatttaagtgaaggaacttattctgacttcacatccaggttgctccaatctggtgcatctggagttgttacatccttagctggcatggaactcctcaatgacgatcttataaaaaaagacttcacaaaggtgggctcagctgaggaactcccacaagcgagttactcttctgctgggatgctggaagatgttaataatgtaatggtcctaactcgtgattgcgagaagactaaagttgctggatttacaaaattggatgaagaagtgataaagttgatagaaatagaaaagcctattctgaacgaagctatcactattatccgcaaggcagcaccaatggtgatcatc

SEQ ID NO: 35845 - DNA, 301 bp, Zea Mays
gtggatgaggtttcgcttcgagagagaggatgtcacattgcatgccagctagatacgctagctatttggattcccagagtcgttgactcggctccatagtctatgctatggtacctcagatcctcctcgtcaccctaacggtggagttgcaccagccactgctcacatcgcggccctgtttagacctcctttcacagatgggtcgcgacgctctccagccgacttcaccgctgcaataaagtgtctgtatgagcttatgcgatggacactactacctaggatgggttatagagaggccacc

SEQ ID NO: 35846 - DNA, 322 bp, Zea Mays
ctatgttcagttcgttgtgtttttgttaccccaaagcgaaaattagcaggacaactggatatcacacgaactgtcatgcatttttcttttgaatttttggttgaaggaactggaggatcatctgtttttagcaagtttaaagacaaaaaagattcagactgcaagaacgagctgggaggtgtggacagacttgacggatgccgagacagtatgattgaaaccaatggtgttttgatgcaaaaccagtctaacaagatcaaacgtcacaaaaggtggaacataactaaggtatctctctcccctagtctttcctctcacttgc

SEQ ID NO: 35847 - DNA, 461 bp, Zea Mays
catacgagagtgctaaaacaagagctaggagggcgtgatcggaactgtgaagagctgaccgcggcgagctcacacagtacgatattcttgatagatttgggggaaatcccatattagagctctctggtggataatccgagacatgagtgggtgcgctggatgcttgactacctagcggagttgatggcacgctcaatttatagggcctgagggcggtggctcgtgaatttggaatcgcgctggcggccagataggaagaaagttactggcgcaaggatgcgtggccttcaccatggcgatcactggttgaggagctacggttgttaccagtaagctactacggctagcagtgacgtggtaaaagggtcacggcatggcacgaccgaggaaaacggcggtggccacggtaatggccgtgcggccacgtcgctggcaagtgaatgggtgacagagcggctaca

SEQ ID NO: 35848 - DNA, 398 bp, Zea Mays
gatgagaagggaattctgcaccgcatagcagatccaccggagaagaaactttccttggaaatccctaggaaagccggaacaagacaccagacatcacaacctcctgcgcaccagacgaagactactctttgcaagccgagaaccgggaatttacttacccgaagaactccgctgtccacttcgcccacaaaggagcggacacggattacaaggaagagagaagcaaacgttcctggaaaagaaacggagctccgccgagctatctttccggcaccttcgccctcaaagaaggacggaaaggaacttgcccccacagtaacagctttctaccccgacgtcctcttcatcgggggaagattggaatcatctcccatctctgacgacgagccaaccatccc

SEQ ID NO: 35849 - DNA, 291 bp, Zea Mays
ggcgcaacgcggtgaaccaatcggtggccggtgagggtgaggaggtggcctcgtatttgcggaatcgctcgccggcgccgcgattcggcacatcaacgtgaactagtcttcttgcgccgccgttctaggtatgagtaacccccattgcatcttgttcattcccgcaccatagatcgtcatcagatggggggattggggtcgagatctcgtgtctccggtgatggtccgccgtctgtgcgggcgctgccgtgcccaggcatgcgggggacgtgatggagcctggggccatgg

SEQ ID NO: 35850 - DNA, 483 bp, Zea Mays
gccgaagctcacctttagaatgaaaatcaagttattcaaatttctgactaggacaaacaattgaaaaggttaagcacagagcttgaaaagtgaactgaacttttaaagatgatgtagaccgttatgagcatgaaaataaagaactaaaagagaaagtcaaagccaaagtagaaaaaaactctaaattatccgaagccttcaaagtgctttgagacaccttcttcggtttcacaacctagtgctcccatcgcttgcatagaatcttcaattcagtcagagtagtatcagaagatgcgaattattctgccgacaatattccaaaggcgcttgaatttgttgaaaaagaaatcaatgattttgacgaagttatggtgagtcgtggcaatttttgtgctctaggggccgctcgaggaactgctacgatttttgcgaaagccggatgtaatcatttgaaaatgttaacaagcctaccttcaatatctc

SEQ ID NO: 35851 - DNA, 440 bp, Zea Mays
cggcggtccacgacgcggtggttcacggtggcgtaaagaaccgaattgggggaaatttgaaattcgcgagctacggtggctattcggaggtgagggctggtgtagtgggcgcgtaacaacctaacggagctagccaaacgctcaatttatagtggttatcagcggtggcacccaattttggtgaagacacgcgggcggatagagatagagggaggtaacttgcacgagttaccgtggcattcaccggagcaatgactcagccgatagacagaccatctatagcgacctattgcgacgtggtaacaaggtaggagcgtggcatgctcgggttaacggcaatcatcaccgcgacgaccgcgcggccatgttgtggcacaagttggtatggcaacatggcggccacagtgccccgaccttagccacgacgaagatcttttcac

SEQ ID NO: 35852 - DNA, 570 bp, Zea Mays
ttattaacaaagcagcatgtattggtaccttatcagttcctgttatgacccacagccagtcagagttccccataattatgctgatggtaccttgatcattatgaaagcatctcaacgagagttattttgcctaaaggggattcttcattccttctcaggattgacaggtcctaaagttatttacagcaagtagtgcctccttcctatcaacttggacgctattaaaggcactcagttggctgctgtgtttagttgtcaaattggttccttccccttacttatcttggtttgccaattgggacctctaggcctaaagttcaagattatctccctgtcaacaacaagattgaaagaaggttgaacatgaccagcatgtggctatcgatggctgggaggctgacattggtcaactccactttctgggcaatgccgatttatgcaatgtgcctcagaagctcccatcctcggatatcaactctattgatcgtgcaagaaactgtctctagaaaggaagtgatgttaatgtgaaatcaactccccttattgtctgggacaaagttacctctccta

SEQ ID NO: 35853 - DNA, 432 bp, Zea Mays
accccgaaggcttgcaaataactcaagacgccgaaggccaccgaatcgtcaacctcataatggccgaagactggcgggccccaataacactatacctccagggccactaccatccaactgatcgcaatgaggccaaacgactgaaacacaggagcagggatttcgcaacagtcgagggtcagatgtacaaaaagggcatcagccagcctatgttgaaatgcataactgaaaccgaaggcctagaaatcctccgcgaagtccacggcggaacctgcggctcacactcaggacccagggccctcgcagccaaggtgattcgtcagggattttactggcccgcgataatttgcacggccaaccgagtcaccaggtcatgcgaagcatgccaaaagttctctcctcgttcaggcaacccttcacaattcaccaagc

SEQ ID NO: 35854 - DNA, 2506 bp, Zea Mays
aacttcagagctttatgcacaggtaaccttctcaccacttccttttcgtcaaatcagtaaaagttcatctgttagttagtgttacttattattttgtaaattggtttatgtggcaattggacatgttgctcgagatttttaatggtcgtggtttcacataatgcgttcatcaaaatacttgcgtttttattgtcagactattaaatatttgaagtagcatgatatgatgtaaaatgctgtaaattcacaaagccacactcttctgaaattataaaaaactgacaattccaagagcttgctttgagcaacaacactttttattgcctacggcgtagagcgacacccttttagtgcttggaggttactgagtagtaaaacactcaagtacactggagatttagaccatgcttagtgcttacaatggccacttaatgacatggtgctaggaaataggaaccaagtgcaaatcatgtcatattgtttaggagggattgtgatgttatcaccaaattgctagggttatgctacaattgcccttgtttatccagatgtgggtcatatccagggaaagttagatctgttgacgccccatccaaacagtaaaaatgaaaactgtttcactgagagtttctgtggtgaataatgttccagtgctaagattgcaattctttttaattttaggaaactacaagtttaatttcaagttcaagtgtaactttcttttaattactttgggatgcttgtgaaattttactctgattgaaataggccacagtttttctgctttgtttaatttcgctccaacgattccagttgttgaggaaatatttttcctatatttatgtacaaatgctttacttcctatccttactaatacaagcccattaggacattgatgcattgtccaatgcttaagtttgactagcaatatcaagaaaaatggataatatcaaaataaaagagttcatattttgaaaatttaccctgatgaatctactaatcgagatcttctgttgcaaatctttgtgaattatagatattgatgtttggaactagaaacaatttgacctaggacaaacttaaatgaacatgtacttgtggccaatggaagtaatgtgtagcttctttttgcaacattgaagaatgccgcaataatgtcttctattactgctcctactactgttttaattatctgcactaggcaattgtaactgatgttctggtgatactaatccttctatcatcacttggtagtcctaatgatttttattgttatttttttctttgcttaaaacccactttggaatatcattcaaacttccactctgtcatctttcaagccatatccaatgtgccattctgtgattctgtttgaatatttccgaaatctgagaacctaatcttttctttctgtgatgatcaaagatacacatttcgatgttcattgtttcataggaatttagttaatttcctggcaaagtaattctgcatccttaatggttgactatatttttatatatgtttagctttaatatactggactacaaatttatgatctctttttaaattatgaaacttcattttgaatttttgagcaaggtgattatgttactacaagggagtctcttacagatttcatgtaaagttggatgcatgacataccggttgatgtttctattttgaaaagttatgttttggcagacaatttgttataatattcttcggtttatgacatcaactaaaatcaggatatggaacgaagattctgaacttgtgtacatcagtaaacacatacatactcgcattcgcatgcaattagtataacttgggctgtagactttttagtccgtttcttgtcttgtaagctttccgcctaatttatgcataaaaagctattttgatgttgatctgagcggttaatatactaatatgtgttttggaaatcttctgataatgtagtgggtacctttgttctttgtgtcacagcccaccttgtgcttgtgcatagacaaatccacagaatatattccattctcagtttaaaaaggcctccttatttcctagcattgttgctcttaattgatgttgcacactttaggtgagctgggaattggacacaagactaagaagccattatgttacaagggatcatcgttccaccgtgtcatcgaagggttcatggcacaagttagtttttcttttgtatttatgcattttgcttccatcaccgttacgatgtttgtattttgtggttagaatttggttagctttgtcttgttctgtttttagtcagttccttgtttagttgctcataatgtaggatgcaagacagatgatattgactgcttttcttatcacatagtatttaaggtcgaatgcagtattatctatgtctgcaattctaataatgagtggaaaatgtattgttttgttaatgtttgtattttatggttagaatttggttagctttgtcttgttctgtttttagtcagttcctttccttgtt

SEQ ID NO: 35855 - DNA, 400 bp, Zea Mays
ctacttggaggagacctgtgttgagccggttgataagcttggcactgaatggagaacttggcatacaacaaactctgtgatagtggcatggttattggcatctatgtctcctactattagcaagagggtggaagctatgtgcactgcatcacagatatggcagaccttgagtagcatatactctcggagggggaatgtggtggtgatgatggagattcagaataaggcagatgtggtgaaacaagcagggagaccaatggagcaatatgctagtgagcttcagtacttatggggagaactagatcactatgcccctctccaaatggtttgtccacaggatgcacacattgttcataagtgggtagaggacaggagagtgacccacttcttaaagaatctg

SEQ ID NO: 35856 - DNA, 284 bp, Zea Mays
aacgactccacctatgagttatttcgttccgctgatgatctcgccactaaggtagaggagctaacgactgctttggctagtcaggacaagttgctcagacttgctgcatgtgagaggaaatattacaagagcaagtattagggatcttgagtctgctagagcttctgtcgtggtgtcccaccaaacagaacatgacgagtgcgctcttcacatgttgaacatcatcacattgcagaccaagtaagccactatgaatcatctaggcccctaagcgatgttatggt

SEQ ID NO: 35857 - DNA, 357 bp, Zea Mays
cggctccggtggtgacgatgacgagcccgactggttgcgggatttcaagccggcggcggcggttaaagagagcactaagaagaaggcgaagcctcccgcgatgaggaaaacgctggtttcacggaaaccagatggatttggggaggaagacggcggcgacgacgagggggagttcctacttgaggagtatgagagcgacagcgaagacgtcgcgaggcggggtgtagggaaacgagcacattgcggtagtagtagcagcagtagcagcgaggacgacgatgagatgacgcccaaggttttcttcacaagccgcacgcactcgcagctctctcagttcgtcggggagctcaagaggac

SEQ ID NO: 35858 - DNA, 338 bp, Zea Mays
ctgggtttgaagacgatatggtagctggagagctcggctgcccatttggcaattcggatagatgcctccaggttgcggaacagctctctcagtcccctgtccgaggtgacccgcaccttgaatgcttcgaagtaatggcacaactttcgtgatgccatgacgactacgtaggagatttttccagctcggtcatgttacacttggaggccgtgaggacctcggagacgtaattgactggacactgacgggtcgtgccctccctgttttgttcttggactagggatgcactgactgcatatggtgatgcggcgatgtagagcagaagcggcagcgaaggg

SEQ ID NO: 35859 - DNA, 337 bp, Zea Mays
ccccacccacaatgggtgtgtggtgattccctccattcttcccttctacatggtataagacttttagatcctgcgcctccacccctcctgctgcgccacacccttcttgctgcgccaccgtttctccctcccaggtcgccatgactgaggccaccatccatgctaccgctgtgttcgtcgctccctatgcgacgatcaacgccaagaatcacatcccggtaacccttgagttaccttgagctggcaaagcccaacttcaatcagtgggaaccattgttcacctctctatgggaaattcgccctcctctcacacatcgacggactgcaggaagcctac

SEQ ID NO: 35860 - DNA, 354 bp, Zea Mays
gacacatttaagcattggctaactgacccctttcttgtagagttggccctcaatcagcatgaagtcccggcttcgatgtttgaggcgcttggccttgttgatgtcagttgggtggtagtacccttgtaggaacagggttattggtgcccgccagtcttcggtcataataaggttgactatgcggtggccctcgctgtcattggttatttggagcccttcggggctccggacggctggcgtgccgatgacatggtagaacacgtcggagggcagagactcgcctctggcggcagccttggccagtgcgtcggcctcttcattcttggcccggtccacatgctgcaaggtgaatcc

SEQ ID NO: 35861 - DNA, 302 bp, Zea Mays
gtgttgttgcttggcgagaagatccacccaagcaccagggttttctggtagaagaccgaactccgctgcggatctacagcactgcgtggacaacatcgccccatcgattttcaataagacgcttgttgtttgagtcaacatgctccgaacaatgttatgcacctttcttttgcgagtttgtgcactatgttagcgtatcggcatacgcccaaattttgctacttctagctgcttgtttatcgtagatcaaactacatgagttccatgtgaataattttgatggtgctactacaatattttaa

SEQ ID NO: 35862 - DNA, 354 bp, Zea Mays
gggccgcggcgggcgtggacatggagatggagatggggtgggggaggtggtacgacctcacggagctggacgtcgccacgggcgggttctgcccagagaacgtggtcggggagggaggctacggcaccgtgtaccgcggcatccttgccggcggcgaggtcgtcgcggtcaaggacttgtttgatcacaagtgagtgtcctcttcttcactgtcccttttcctttggactggtatcttccttttctaccccagaagatcatggtaaaagcatccaacacaggcgttcactttcggattaaatagttgctaattgcttcagcatatactaatcactaaattggcgtgtatgaaat

SEQ ID NO: 35863 - DNA, 915 bp, Zea Mays
cacaacaagtgcgcaacatgaagtctttactaaaagacaattccgtgccaaagccgcctaagggtgcagccagacatacattacaagtgtggcatacgaagtccttacagcaagtcatccaagcaagacccacacattgccgcggcaggcgaagtccccaactcatttcacaacaaacaatgtaatagtttacatacacacagcagagggccaccggccacattgcacaaataaatatctaccgcattttgctgccctccctcttaatcgcgagccaggggagggcagcgtcttcgctcactaccgcgatacaagagcgagggcagcatacgcgctacattggctcaaccttcgggataaggcctgcctcacgaaaattaaacaacatcatcttcaactcctcaccctaaaaagatttcatagatccccctccccaatacacgacccagacgacgaggacaacaaatctcgttggccactccgatctacccgtagacgggttcattccatccccatctgatgacgtctaccacttcgtgacatctcgccatcactatgcttcaacaccactcttcgatggcggtgctccacggacctcgccccagccgggggatcagacgcctcgcgcacttccagtagcggcacagcctccgctgcggccacatccaacgcagcaaaataatccaaatcctcgtctggagactcttcagtccacaaaaacaggctcccaaactcccccacatccgatgaccaagacccagtttccgaaccagacatattttcattaacaggcattgcattcgcagccgccataaaattaatatcatcagtaggggctgcttgcgtaggcccagacgtcggaacctgcgcagcaaccgactttcagtatcacaaaaataaggtcctaaacccaac

SEQ ID NO: 35864 - DNA, 299 bp, Zea Mays
ctcaacatttttctccagcctagtgtttgaccattcacttatttcttgcttcacttttgcaagttcaaaattttcattagcttcggcaagctttttccgaaggtcttcaacttcagctttatgagcttcggattgagcgttaaattttgcttcgtctttcttcactttgtccaccaatgaaagtagaattttatctttctccaaggcttcatttctcagcttgataacttctgaccgaaggttgccgagggctatctggcagttttcatcttcagcattcttctgcgccctcaaagcgt

SEQ ID NO: 35865 - DNA, 662 bp, Zea Mays
aagataacatcgaatgcccccaaggagatcaccaccagattggccgaaaagacctcaccagcaagaatgacggaacacccctgacaaactgaacaactactaatgaagccattagcagatctaaccaaaattgggtgacccaacctctgcaccgaaggaccagcctgcgacacaaaatcctccgaaacaaacgaatagctagcgccagagtcaaaaagagcatgggctacaaacgaattaactgaaatcgtacctgtcaccacgtctcctttctccccgccatccgcagcgggtagcacataagctccagaaatacccgcagaagaggaagctcccggagtgaaattaacagaagaaccccactgagccgccgggtgaggcagacgcggagctccaaactgagacgacataggagtagacggtgcaggagtaggcgcggcctgatactgaggaaaaccctgcatcggcacgaactaagaagtcccaggcacataaagctgctgcggaggaagaagaactaaaaactgctgctcagcacttgacatcatgttgatagtgccctgagaggaggaggaagtcatcggctcccatctgagcttcccattaggattcctcctacacaccacatccttgtggtcctgactgcagatagaacacctgcc

SEQ ID NO: 35866 - DNA, 653 bp, Zea Mays
actacaattgctttatctttgatggaagaaccagctgcaacatcagatgaagttgatgcaactgattcacgtgtggcatgaattgtaccagtgccactgccacgttctagggctggggtaacacaaattttgcgaagatgacttgaacatcattactccgcctcgtattctcatttgcagcgacacaacaattaagcgaagcgcaactcaagaggaggccaaggcgggcccaatattgctcaataagtgaacattgtttcactgaaaaaccaaaataacagagcaattactgtctatataggtgctcatctcggtctctgaattctgaatagaggagtggtcgcctgtttggggttgaacagaggaggacgagcatgcgctggagcgggcctctgcagactgcagcggttgcgcgacagagggggtgcagctgacgctcgagcagatggccgtcggagcacagcagggcggtaggagaggagggtggcggcgatggagaagggtggcggcgctagagaagggctcacgcgcgagcgcgactgtgcactgcgtaatgcgtgtaccgtattggtacaagtagggcaaaacaatgtttgtgttgtaccggtggtgggtcagcccatgtaacagagaccggattagtggcccaaaac

SEQ ID NO: 35867 - DNA, 329 bp, Zea Mays
ggcggcagccacggcgacgaccgtgcagccacgtcgccaggcaagtgggtacggcgacagggcagtatagtgccccaaactcatccacggtgaagatcttttaactgccaatcgtgatccacacctgtgagggcacgaatcgcagcgccggtgcgaatccaggcatcgaggtcaccggtggtgagattcagtgcacctgagatcttctttagtactgtaccatcagagtttttcatcagtgcgactgacaaaggtaatttgagggcttgattctccaatttttatgtgataactaaaccagccttctgtagcaaagttgttaatctata

SEQ ID NO: 35868 - DNA, 469 bp, Zea Mays
tagcagaagcaatgggtggtggactggacgcaggtagccacaaggtgtacaaggaaccagagctatcacagcgggcgaggagactccgcgtaacgagatccttcacaaacaagccaaaaggatcaaactcaatagagcaagagttatcgatggtaaactgacgaacagataaaagattctgaacaatgtggtcggggacgacaagaactttgcatagacgaaagggcctgggaaggaccgaatcacctacagaggttctaaaggcgacagtactcgatgacggagaggtccccgtagacaaagtttctgaaggcggcgttgaggtggagagcacgagccttgtggttaccgaggaactggtccttgatggcaacccagtcctagcagacagtgccaccacgctcgcaaacgacgttttgtagctcaacagttcccatccaaaggatccacgagaggaccaaactatcca

SEQ ID NO: 35869 - DNA, 394 bp, Zea Mays
aagataacttcagctaacattgaatatataatacttagtagtgtacaagagagaagaaaaacacttatagaacctgggtgctgatgagagagaggtctagcgcattctactggtatatctctacatctttaaattctagccaaatcactttagtgtcgttgaagtagtcaaggtcttgtataagcacaccaaaagtggtcctactagcagttgacatctttatatactagtcatagaatctatgcatttgtgttgtcaattctagaacctcttctggccggactagaggctgaccatgttgttatgtccatgcaaattgatgggatagctctttttactttgtttatttttctatgctataacgagcatgtgctcatcgttagagatagactgc

SEQ ID NO: 35870 - DNA, 282 bp, Zea Mays
gaactttatggatgaccaatgaggtttttgatgtgggtgcaaaggtggtgggtgacaaatcctccacccaagcaaacccatcaacctcaagtcatccaaatcttgaagaaaatcatcaaccccaaaggatgccaacggtggtagaagatgaacatgaaagtattgatggtgtagtggctcttgatcaagtagatgatgaggaggaacaaattcaaagacaaccatcagtgcctcatcctcgagttcatcacactattcaaagagatcatccggtggacaaca

SEQ ID NO: 35871 - DNA, 376 bp, Zea Mays
aattgcttcaatcccctgtttggatgatggttagattggataagaataaccatttaatcaaatagatgcatcactgtcttcatctaactatctagtagctagccttttgaactgaaaccaatccatttgtcattagttgcatgacaaaagtggaacaaaggaaggtggacccactgaggaaaaacacaagagcaaaatcagcaaaccattttcactttaggggagagggaggattggtgtcggagatttgaagttaagtgatgaatgagggtttgaattgcacaattaaactcatcttccgtttatatgtgcttgctggatgtgggagaactgtgaatgggttactgtagttggacttcccttttgcaacaacaac

SEQ ID NO: 35872 - DNA, 331 bp, Zea Mays
aagccgtaaaagctaagcaaagcaagtatgatattctcatcttcaaccacttcaagtcaacttatatatacaatagcatgcatggtgtgatatacacattagacacggcatctatatatttagattagatgttcccttagttggattggagcctataaatagcatcaaccgctcaatcataagaacaccaactaatctgagtcgctcgttgcattgacatcctacatatctcctcctctctaggtaggctagctagcaaagctgcttgccgtgtgtgtccatctccagcaatggcttctggcgccggtgccgctgccgccgttgcggtttt

SEQ ID NO: 35873 - DNA, 806 bp, Zea Mays
aataagtttagttaacttaggttggtcttttattgcttggaatagtgaggtttgaaggggtagaaatgagagttcagacggtttgttttgagttcagttcaaatggttgcagcttggttcagttttggggagcagaaaaatccccacgtctctgctatgctccacttgtagcagtttggattgaggccatggataaaagtaggattcgatgcttccagtgcctaagtaatttatgcttggtgtttatccattgccggtgcccatcctgtctacctgtctctggtttgtgtgtgacttaggttcactgctctaccgtggattcgatcgggcatggtgcttgtgccgtgaagccgcgtgtgcaggtttaagcagctgctggcaccatcgaggtccttccctgctgtgatcaggacaacttcagccaacacctatttctgtaactcgtggccatggttctctaggtgtgtagcgctcctccacgcgctcaggcgcgtcctccacgttcggcgtcttactgcccctcgtgcgcgctcggccttacctcccctgaccacattgctctctccaactctcgagtgtcatcttccctagcggctggtcgtgcctctatcctactccgacgttcaccggcgcgcatgctttgcccctgcttgccggtcatccctgccccagcgcctgcttcatccatggccggctctttgcgtcggcctcctctgcaaactccctggcgctcgatgctctctgcgcacgctggttccagttcggccgactgcgcagactttcttctccctggctagaactctttc

SEQ ID NO: 35874 - DNA, 294 bp, Zea Mays
ctaggttagcgaggaatactaccccactcaggtttatggggatttctatgacacctatgtgacaaggaatatgacccccaggagaatgggtcaataatggcctcttaagggctatagtaggtatatcatgcttttccacaaagtgtgaggatatgaaggaatgtgatgctccggaatcaaaaagcactgaggctagagttgattggaccaggaactcaccgagaatcactcctggtgcatcctccgcttcttcagcatacacatgattcacctttgccttgccaaaggactgct

SEQ ID NO: 35875 - DNA, 387 bp, Zea Mays
cgttggtgttgtccatgcaaggccaatctcttctgtcccaactaaatactgatcagagacatgtctatgataccattatcggtagagttctatcttccttacccggatttttctttgtctctggccatggcggcacagggaaaaccttcctatggaatactctgattgcgaacatcagatcgaaaggaaagatagtacttgttgttgcttcctcaggtgttgcttctttgctaatgcctaaaggacgaaccgcacattcacgtttcaagatacctttcgacatgaacgaaacaaccatgtgtattattaggcgagggaccatgcttgctgaactcatacaggtatcatcattgattgtatgggacgaagagccaatgacgcatcgac

SEQ ID NO: 35876 - DNA, 433 bp, Zea Mays
cggaataataagcacgaaaaatcgaagtcttttccaaaagactccgcgcaaaagtcgcctacgggtgtagccggaataacaggtacgaaaaatcgaagtcttttctaaagaactccgtacagaagcctacgggagcggcctgatcaacgaaagcacgcagcttcatcacacaaaattatggttacatacatacagcgagggcatcacacattacattggctcaaccttcgggatgatacacatctccctatagttgaacaacattatcctcaattcctcacccgcaaacagacttcgcagctccccctcacccacactcgccccagctggcgaggacaacaattcccgtttgccagtcccgtccacacgaagatgaccaccctccatctcaccacgatgacgcctatcacttcgcgagaactcacccactctc

SEQ ID NO: 35877 - DNA, 664 bp, Zea Mays
cccgtggtggtggcgggctctgacggtggaggtagaagagtggattgctcgctggagttcaacgagagcattcgtccgccccacgctcagttctgcgcgcacgtcgtcgtgatttccagtacgagcccctttcatagtttagaattgatcctcgctttgtttagatgggtcctgcgtagagaatcaagcaccgtatcaatgtctgggttgtcgccgacgatgttccgccatatggggacggcggcgccgccattcaaaccgaaacgggtgaggaagaacggtgtatgtcgttgatgagtgagcgaatggctgggattatcccgcgtgtacccgttcggcggtgtcaatccggaccgtccgtctctgatcgggtgcatgtgattcaccatgggcaacgcaagatctggacggttgaactaagatcctagggccagatatgtgtaccggttcacttaatgcgacatctaatcatggccctcggaatgagatccaatggccagaatccatccatactctcggtcgcgacagatttacatctgagaccctcaggattccctaaattgaacccgcaatccacctaggtgttgtctgagtcttgggattcttaccccgatgcccctgcgtttctgtttcattgaggcgcagtccagtgaataagaaaaat

SEQ ID NO: 35878 - DNA, 784 bp, Zea Mays
aatgatatcagtgaagacgaagatggaggtatatagcaattgttttatactatattctactacagtgatgcaatataattaattatgtctagccttttaatttagttacttctcccttctgaaatctagctaaatgcagacacaagtattctggagtatccatccttgcaagatctctttttacaccacctagtgcaaagtcaaaggctattgttttctctcatgatttcaaagacagaagaaatacaacagggaataagcaagctacaatggatgctctacataagacattcatgactcgcaaaaagcgccacattaacataggtacgctacatagttaaactgtggcgttcttcactttgtccaattttttcgtagaatgacataatccaaactcttattgctctaagtatacaatcctattttagttattaacattaataatatatttgtttaactattatcttttcagagtcactgtatgcactagcactagcagactttattgagtaaagccaatatggtagtaactatatatcaatcaacttgcagatttatgttccattgtaattgggatatttcttttttgggggtgggtgagatggggtgtgtggatatattgtaattttgtaggatatggtctggcaatcctctcctcttacctttccttgctgcacacttgatattttgtttcattttcttatttattttcacagtaaaattaactggaacataactgcattatgttgatattgacagtgcctttcaagtttgatacaccatc

SEQ ID NO: 35879 - DNA, 289 bp, Zea Mays
tgtatgtgttatgcattacctcccgcaaagcacacacagcagcagtcaagcaactccaaggtatatgaagagatgaccaaggtggaaccttctccttttgtttcctacctaatcttgttcaaacagaagtttatctctgacatatactaacaggatccacgaactccatttgttgctccttcacaaacatctggcaggcaccaacgatagtgttggatgcgtcagcattgagcatctcaactgttgatgcacacgggcacgcgctcaacgtcttggaagaactcaacca

SEQ ID NO: 35880 - DNA, 953 bp, Zea Mays
tctctactggggtgagcatcggtattctgtcaaataagaaggaatttgatacattgaagggcacactgaaacaaatggagaacttagttcaggatttacaagatgagctggagatgaaagagggtttaactgtgaaagaattacttaatgaaacatctatcgaacatgatggtaaagtatcactttataatattcttacaacatttttaacacattcagaccaattgaccaaaagcttttgtatcttatctgctgataatagatgataatagcaaactacacggagttgatccagagccaatgagcaaaattgaggctgagcttgaagctgagctagcaaggctggaactgaatatcacttcgataagtttagaagaagaaacatctgaaatcaatggggtaactatttttcactgaaatattttacatacgtatcctttgtagcctacaattctatttattgaaattctgcatgtataggccgacgatgattccattggtgacattgtttgcggggaactgaaagctgatacggtccctcgcgacctcacagagtacagcagtgaatctgaccatcgcagggacagcagggaaagctccccaggttacacatgtggagccaactgtcctgtctcgccaagagatctcagcatccgtcttcacaaggtgatccaacacaggctcgaagaccgaatcaaggagctcgagtcagcaatcgtgcacggacagaagcagacgcaactgcagatgatggtgactgaccaaatggtctccgaccgaatacgctcgaacagcgagtcaggttcttcttcaggccagggaagtcccattttcatacaagaaaccagctcgctggcagaaccgtaccgtctaaacctatctggagacgcgctcgaagcttacgatgaagcttacgaagagttcatgaggatcgcggactccccttacaccac

SEQ ID NO: 35881 - DNA, 519 bp, Zea Mays
tgttgatttggatgccgtggtggtggaggcggtagagctaggattttttggtgttgttggtatatattgtggttttgttggtgaggatggaaatgttcattatggaattggtgctggttatactgatggggatggtaggtgcgggcgataactctttagctgtcagtcggatggtttccggcaatttgatcttttgttgccttggttttaggacaatccctggttgggtgtgctgagtcttcgccatgtaaaagaaaatagaatcttcgctgttgtgggcctcgacctctgcccctgcctctggttgcattattgtcgtggccttgatgtagtgggtaatcatgacgacgagcggtgccccagtctactacaggtttgcaatgttgtgcacctgggactgggtgcggttttgccggcctgagtctggatgcaaagccctgacccatgtcctactagactggtggagtgtccttgcgctttcgcagtgactcgattttcctttggtggagctcttctaac

SEQ ID NO: 35882 - DNA, 405 bp, Zea Mays
ccttcatccagcacaaccttgttgctagcgtcgctgtctcatcctcaccgctctgataaccgtgagctgcaacgacactcccgtcatattgtaccacaaccgttgtggaggtcttctctgatggtccctttcagacgctgacacttggttggggcctctacctagtatgtgtggtactagcaaacaccaacatatgcattcgtgtacgacacatttctaggcgtggcaaacatggggcatgcctcgtccatggcggtttgacaacatcgtcctcaatgtcagcttcttccactacaactgcatagtcgtcttcgtctatggtgccctccttctgcgccatcgtcaccctgacgcctcttggtgcgttgcgggccttcccgcatgctgcgcctgtgccgcgactta

SEQ ID NO: 35883 - DNA, 313 bp, Zea Mays
gaaaactagaaaatcaagaagccgggaattcacatagaataatcccgtgcaataccaataagtaaattggaatgtcaagaagacattggaataaagtattgaactgccattttgttttgtgatttgtagagcgtgatcaagtcgcactattgtttagtgcactagagaggacttaagtaccatgaatggtattcctcatcctattccgaggcctcaaagaaaaggataggaaatctagttactctaattccaagtacccggggacgcctggagaaaaatggataagagagcttatcacagcctagtcacgaaa

SEQ ID NO: 35884 - DNA, 426 bp, Zea Mays
ttgtagaaaatcatggcaagtccctccccctcggtcagggagacaaccggatgttcgtgctccaagttggattgaatcccccacggatttggagataaaagaggccagggttctgcttgctgagatttgtttgttgaaggagagaggtctgactgctgaagctatggttgcagactttgttttcaagaatattcagccactggaggacagagcgtacccggcttatttgtatagtggtgtcactgattcaacccgggttaccaacaagaggattcctgctgtggatttggtaagccggctggagatgattcttagaggcaaagtatcaaatattggtgctcctgttgcatattctgcctggaatctgccaccttccaagtcttttttcgattttgtgtccaatcctcctgctagtggtagtggttt

SEQ ID NO: 35885 - DNA, 407 bp, Zea Mays
ttcgcatgccctgtaggcactgtctgcctgccgtgatcattgagccacaattgcgcctgttgcgcacgttgcgtggacttatcatgtaccccgattaccgagccataattgtgtctgttgcgcttattacgaaggttggatgtgttgtcgtagccctgatggccgcacacgcgttgacgccacatacgctagagcttgtacccgcgtggattgtggtgggttgttcaaggtcctgaagtcatattatgtgcaacattcgtaaacaattttgttttcactttatattttgtttgactgtgttgtgtggcatcgtatatttatatatatcgccaagtggccataacaactatattaaatctaggaaattaaatcgaaatacaatgaaacacagataagttaaatctctg

SEQ ID NO: 35886 - DNA, 693 bp, Zea Mays
gatttttcagtcctttgtctcttgctcctacgaggagctaccatattgtcctcaatgtgttgttcagaattagcaggaggtaaagaaactggatatggttcaggagtataactagtagatgcatcgctacgtgctgcaactctatccttcatagggaatatatcttcgaaaaaggaggcatcatgagattcagtcacggtgttaacatgcacatctggaaaatcagatttaatcaccataaatctataggctgcactattatgtgcatatcctagaaagacaatcaacgatttttggtcccaatttacgtttcttgcacgcaggcacattaactttggctaaacagccccatgcatgcagaaatccaagagcaggctttctacctttccatccttcatagggtgtttttacatcccttagctgatggaactcggtttagaacaaagcatgcggccaaaatagcttcgccccaccatgacttaggtaaactagaactatccaacatggcattaaccaagtctgtcaaagttcggtttttcagttcagccacccatttgattgaggccagtagggagctgttgactcatggatgattccatgttcagcacagtattcaccgaattcattagagagatactcccctcctcaatcagacctaacccgtttagatttcttttctagttggttttctac

SEQ ID NO: 35887 - DNA, 329 bp, Zea Mays
acttcatgatgaaaatctagactctagtacttagaacaaataaataagccctcactcgaccctacttgggtctgcccttggaactggagtcattgatggaatggacaaatcacaaatgagtcgaagttagaaaccttttctttgaaatttccgttgatggctagcgcaagtggtggcgcgtcattcagatcaggggtcactttgtccaccaccaccatcggttcaacatttgtgggccagagcgttaggctgagcccagcagagttcctatttggattcgcatgagtaaaataggtaaagaatggctaatgtttatcgttccaacagag

SEQ ID NO: 35888 - DNA, 393 bp, Zea Mays
gttggttctttttcacaaaatttcaaccttgtgcatatgttatgaactgtatgattgtaatcagttacagatttaaaatcttgtaagcgtaggtgattccactcatgctgtgcttcaggacatataatttccttttgctgttcataacgttcttgaagtgcgacccataggtttcgaggattttcttccaaaagatattcttttttgagatccttatggatggaagtccttaacaagagtaatgcagtgtacttcgcaatatcagttatatttggattgtttgcgtcaggtgcattaatggtatgtaaaatccctctagatgcaaaaccaattttgatatctgatgcccatgcaagataattgctaccatcgatagcaagttcctcaaattcc

SEQ ID NO: 35889 - DNA, 541 bp, Zea Mays
aaagagatagcatcgttcacgggtctgtactttgcagagtaacacaatgtcaatgcccatacgttgcggtatcatgtcgacgagccccctatcagtgatattgaaatttttcaatggaggggcaaaactgtaggacccagcacaacatactgtttcaccaacgacgaatggaagactgctttactctacatgtataacaacatggaagagatgagtcagtttctcctgtaagtgtaaactttattttagtcattgccgctagaatttttgttgtgatactaaaaggtttgtttccttgtactaacagggaatttgattctcaaaattgcatctctggctgtgaacgtgaccagattcgtcgagagggaaaagatgggggacttaatttcttgtgttggtttcgagattatgtagataaaaatgacaatatacacccagaccttcgacaattatccctaggagcagtaactggcagacgttatggtcggtatgatgtcaatggttttagattccgttccacaaggttcgaagatgatcatcc

SEQ ID NO: 35890 - DNA, 452 bp, Zea Mays
tagaagtatgaataggtttgaataagaaagggtagtgtaaagaaagactccatcctggatcttgattcctttggaggtatggcttgactcttgtccttccttgatttgatgaggtcaatcatcttcaatcttcgttctcgaagttgctatccgaatttgggacatgtagtgaaggcagattcttaggtagacaaaataggttaatgggtggttatgagttaaataaggttaagcggagtctgtcttgttgttttgcttctagattggttggataagttatgtaacatgttatatcggtcaagtttggtgttatcatcaaggataatgggtactgttgttaccataactagggacatagttgagataggtgtgggtacatggggtaggtagaatgaacagagttttttttacttgtaagataaatgggttgggaaacctataatataggctag

SEQ ID NO: 35891 - DNA, 385 bp, Zea Mays
agggctggtggccgccaccagtatctgacggtcgttgagcttctgttgcctcttactttcttgcgacccatctccgccgaagatgacgttgacttctccgtcgacgcgtgggaacgctccgcctcctcccccctactgctgctgaggctgtcgaggttctccgggtcctcctcgtggtgggggaggtagtagaggttggaagggtcggccgttcccaacggagtgcttgaagtctctgcacttccggagggtgtggcgcatgtccttgtggtacgggcactgggcgtcgaggatgtcatccaatgtacgttcgcctcctcgaggtgctccttgggcacgagaggcaggtggtccgacgatgtggacttcttcgcgaggcctcttc

SEQ ID NO: 35892 - DNA, 470 bp, Zea Mays
aagctaagtccactggcgccacatctgacgaagcttttttagaagaaggagcattcgatagcgcagaaggcagctggggccgaaaaaacaaagaattattactgtgacagaagctattgaagagacaccacgaccagcttcagcttcaaaggcaccagctgttgagagcgctacagctaccgaagctgcacctactaaagctgcaactgccgaagctgaaccagccgaagatgcaaatctagaaagcacactttctaatattgataagatacttcttgacatggccacagaagaagctactacagctgccgaagaggccatggccacagtgcgtgagaaagagaaggaaatagccgaagatgcttcggaagaagaaaatttgaattttcaaaacttaattggacaagaattgtcgaaggctgagaaagaagagttgagagactatgccatatcctgtggatatgaaccag

SEQ ID NO: 35893 - DNA, 383 bp, Zea Mays
cagatctaaaaatctatgcagttttgatccaagaatcctatagcaaatttgaaggctgttgtctggtgaacactttttattaatggagattaccctgttcttaacaagaatcaagagaaagagggggtgaaaggaggtcggttcaacataacaatgaagatcagagaaccggaaatatctgcagaaggaaaagatctctggttgttgtggtttcggatgtgtgcaggtgaagtggagataggaacgaccgcggcaagataactactggctgattcacggtcccgcgagcctagccggagcctggccggagattttttgccggtgctcgccgtggcacggtattttgtcgctgtgtcactcgcgccaccaccttacctcattgt

SEQ ID NO: 35894 - DNA, 365 bp, Zea Mays
tttctcccaattctatatggtaacatactccatgctctgcagcaaatttgtagagctatataccagctacaagtttgtcacagcagccatgagcagattcttgctggatcatagttgaattcatgctcaaagtcccagtggttgcactgtctgtctgaaaattcagacctcagtaacctgacagtccaactttaagctcaattatctctaaattcttcttaacaactatgcttacactcttaagcaaagttgttctcctatgttaggtctataattttgatgtggtaacctggggcaaaaaccctagagtttgaagttacaaggctcaaaagttgagcaaaaactctgaaattcagacttaggct

SEQ ID NO: 35895 - DNA, 271 bp, Zea Mays
agagagatgaaactgaaatgactgagacaaggtggtcggggctggttgtgcaggaaggagttattgctgaaggtacctctactgctgaagctgaacaagccatgactgaagttgagagtgataatgaaagtgaagatgacgatagtattctgtgtccaactaagcctagtcatgttgaatttgggaggtctacagtaaaggctgaagatctgattgtgatgaagaaactaggatattttggagaaaatgatgatgaattggttccttttgc

SEQ ID NO: 35896 - DNA, 784 bp, Zea Mays
gaagtttctaaaccaattatatatgttagtaaggcacatatggggtagacaccatctacaatttataaaaaacttctctgctgaatccattaatatatgtgtattatgatattgattttttcatgtagatttcaaggaagaggaagacagacggctgctactactgctgacatttgtgacgccaacgttgaggactgaggtaagatgttccaacccgatctcacctttgctttgatttaccctgtgtcttgcttgttaggttattagatctcaactttcctctctgtttcaaggaggagatccatatgtttattttgtaatatatgtttgacttatgtggtcatcattcccaatgccttctcttgtttccatctgctgcacccttaggttgtttccgacgagagaagaggagaacatcggagtgcgctctccatcggagatgttgctacgtcctagcgaacaagagttacgacgaaggaacttcaaggtgtcggtaactgcagctgatgggctgcaacgacgcgtaagcatcatgtacaactccgcaaggcgagccgtgggagcgccttccggaagaagcgctcctccaaggtggtgtcgcatgcgcaatcacaccagtcagcacttgagaatacagtgggttcccatttgtgttttttctttttcttttcttttcattgtacagagatttgtttgttccgttctatttcattccctgtttgacgcagttgatgatgagtggctagttaagtttggcagatgggaaatggaaggtgtatatgtg

SEQ ID NO: 35897 - DNA, 310 bp, Zea Mays
gtgccgtgaagagctgtacacgttggacttccgtgaggtggttggcacatggtagcagggcctggaagcggtcccgatattccaccactgagcccgtgcaacgacatgctgccagctcgcctaaggggttggaccgcaggggtggtctgaatcgctggtgcaggagtttggtgaagcgacagcattgtggagtgcccttgtcttgctgaatttggatggtccacagatgagcgatgtcttctaggttgtaggaggccatccacacgcgctcttccttctatgatgcgctgctgatggttgtaagattcgc

SEQ ID NO: 35898 - DNA, 507 bp, Zea Mays
cgccggggggcaggctcaatcgggtagttgagcaaaggtccctgcctcgagcatcgcggactgtctggcacctgcatgcggatggtctgatgctcatgcagacggtccgaccaaccaagccggacagtctgcccatggacataggcaccagcctccacacaaagcaaacaaggggatgaaggggcaaagcacatgtaacacacatggtcggctagtcaaagctagtcctacttttgatcaattgctctccaagtatgctagcaagaaggtcgttctatgcaatcggtcagcaaagaaaacccaaacaaaacgaccgaataagacggcccgaaaggtgatgcagcatgcatcgcctattcatccaataatgccagcatactttccacccacctattcatcgtcgatgcattatcctgttaagatatggaatggtatgacgatgaacccatggtacatgcatactccctttgtctattcaggccggggggcactcccattctattcctt

SEQ ID NO: 35899 - DNA, 383 bp, Zea Mays
ctgagctttcttgaagggtccaatcatgtccagtccccagcacacaaatggccatgttataggtatggtttgcagttgctgtgctggtaaatgctgttgttttgacaagaattggcaagcttcacatctctggactaactcggctgcatcactctttgctgttggccaatataaaccagacctgaagactttcccaaccatagttctggatgttgcgtgtattccacactgtccggcgtgaatctcatctagtagctgtctcccagtgatcgaggaaatgcatttcatgaggactcctgttgcaccccttctgtacagtgcgtcccctatgagggtgtagtgggtcgactgtcttgcgatgcgttctgctgcggccttatcat

SEQ ID NO: 35900 - DNA, 320 bp, Zea Mays
gttcaagcaagtgttcaaggaacactacatcccagatggtgttctatagatgaaataggaagagtttgttcgcttaaagcaaggaggagactcggtgatgcaatacctcgccaaattcaaccatctctcccagtatggtattgagcaagtggacacggacctgaaaaagaaaaatctttcatgagaggtctgaatgatcgactacaatgaaagatggccatttgcctagatctcacttacagcagggatgtgagcacaacactttcagtggaggccaataattcggggcagggaaagacaaaaagatttgggcgtgaagg

SEQ ID NO: 35901 - DNA, 491 bp, Zea Mays
ggaaatacccgcagaagaggaagctcccagagtgaaattaacagaagaaccccacggagccgccgggtgaggcagacgcggagctccaaactgagacgacataggagtagtcggtgcaggagtaggcgcagccagatactgaggaaaaccctgcatcggcacgaactgagaagtcctaggcacataaaactgctgcggaggaagtggaactgaaaactgctgctcagcacttgacatcatgttgatagtgccctgagaagaggaggaagtcatcggctcccatctgagcttcccattaggattcctcctacacaccacatccttgtggtcctgactgcagatagaacacctgccactccactggcactgcacgacgatgcgcatcaccacaacggaaacacaccagatgtaacacccctggtgttactgctactaaaacttgagcatggcatcataagcattggcattgcatatgtctgacacacttagag

SEQ ID NO: 35902 - DNA, 546 bp, Zea Mays
ccgggatctggcactcacggagtatgacttgtgggcctgggcccccgtgtcatagactgggctgttgtctcttgcggcggagatgaagaggcgcgctacaacgtgcggcggttcgttccttctgcacccgaaatccaactcgcaaagtgtatgacttgtggacctgggcccccatgtcatagactgggctgcctggatctaggtgcccgtcacgcgtgatctcctgcggcgattgaggggcgcgcggaagggtttccttgagcgaggacactggtttccttgaaaaaaggttcacccccgcgtgcagtagttaccctttcacattctcttccaatcgattgcgcccttttgccttcgtgctgcttcgttccacgcccgcaccaccggctgtgccttttttccttcgagctcctcagttccacgcccgtgccgccgtgcacgccatgacttcactcagtcaccccgaccgcttccagtttgaggcggcgctcaacctagtgcacgacctgcttgggtggagcgtggcagcatttgccgcaaggatcc

SEQ ID NO: 35903 - DNA, 447 bp, Zea Mays
ggggattcctcccagaccactcgcatcgtgggtgatctggaggaaaaataggaactcacgctcatcgccttcctctaggcaaatgccgacatattcgcatgggaaccgtcgcagatgcctaggatccccagggaggtgatcgagcaccatctgaagatccaccctgacgccaaaccggtgagtcagaaaccacggagacagtccatcgagcggtaggatttcatctgtaaggaggtctagaagctgctggacactggcttcatcgaagaggtccatcacccagtatggctggacaatccagtcatcgttcccaaggctaacgggaagcttcggatgtgcatcgactacaccaacctcaataaggcctatcccaaggacccatatccacttccacgaatagatcaaatcatggattctacctccgggtgcgacctcctgtccttccta

SEQ ID NO: 35904 - DNA, 336 bp, Zea Mays
taattccctttcacccaacaacaggcgcttctggcccagcagctacctccgtaccaacagcagcagtagccggcgcagtaccagcccatggtgggatctccgctctgggaccagaattctctggcctccactttcagcaccgtcaccctcactccaccggcgaacgaccggtaccttgatacaggtgcctcttcccacatgacctcacatgatggtaccctctctcactcctcaatccctcggtatccctctcccacctctattgttgttggtaatggttcacttctgcctgtcaccgccaccggctcaacacaccttggctcccttaccctaaat

SEQ ID NO: 35905 - DNA, 657 bp, Zea Mays
tgtttctttctgacatggtacttacataaaatttcagagaaatgagccttatgttgatagtagtgctggatcacacttaaatggaagtataaataggccaattcaatcagatgatagcatgtcatcagtgtttgggaggctatcgatttccagaagcccaggtactgaaagcaggaaacatttttcttatgagatctcattgttatctctgcactctaaaaccagatatgtttttgtactttttgaaacagccaatgaaattggatcggatactctgcttggatgctcaatgtctggttcaaaagaaagtcctgtctcaacttctgcatcaatgaggggattgtcaaagccacctggaaaaggggacctccggctctcaagatctatttctacacctcttctttctcctagagttagattgaacccaaatttcattgacagacagaagaatcaggcagctactgctgtaccattaccagaaccaatagtccgctttaaagcgaatctctcttcagatgctggaatgttgtctcgcaagtcacatgcatcagcagctcccatgtatagatcaaggtccaatagttctcggtatggtattatggaatcatcttccatacctgttctggccttgaggcatagctctagaaaggatgctgg

SEQ ID NO: 35906 - DNA, 609 bp, Zea Mays
aaagaaaacagaaaataaaaaggagaaaagaataaaactttaattgggccggcagactcccattttggcccactagggctttccactgcgcgcagcccatctccttccctccccttttctttattcctggcgcttacatgtggacccggtctgtcagccgtgcggcgcgtgcctcttcactggtggctggggcccacatgtcgggttcatctccttcaccgaagcttgcgctaacagaacgcggctgccgcacggatctcgcgggtgtagcatggcctctccctcttcttcggggcgttcgtgggggataccgttgacgagacctcccttcgattacttagggccgggtcgcagatccctgcattctacccgaggccatcgcgctccatccctaccgaatctccagcctctggttctcgctcagattgcaggcacttaaggcctcgccgtggccttgttccggcgcccccacctccatactcggccatcctcatcccctccaaactctacgcagtcacgagcctcaccttacggagagaacttcgtgtgcgcctcatccggtgactgcggaatccgccgcgcgggggaggaccccgattcggtgtcatt

SEQ ID NO: 35907 - DNA, 1358 bp, Zea Mays
gtcgggtttagttcctggatgttgccggtgggtgaccactggtgtgcaggcagcgcagccgtcacaagccatggtgttggatatgttggtgctgggaggaagaactgtcacagggcatgcttgaagaatggtgtggtctgctctttcgacgatagtggtgtcagggtgtctatgctgtgttcatctcttccatctgaagatgtaagtttcagcagcaaaatgtcattagttaattcaacaggctttgcacagaagaagaaagggagtaaggtatggcgaagatcccagggtggtaagaaattggtaaggcatagagctccgaagcatggcctgggaaaggacagacatggtcacagatcttcagttaaggatgatgataccgatgcagttttgtctggtataagcaaggagtccagcattgaagagtgcaattctgctctgatccgtcttgagaagctcagcgatgagaaggctcttaagttctttgagtggatgaaggttagtggcaagctaaagggaaacactcatgcatatcacctagctcttaaagccattgcctggaaggaggactggaagatggctgaacttttgcttcatgaaatggttgctgattcggactgcgcattggatgctcgagcatttaacggactgatatatgtttgtgctaaaaggaggcttgatgcttgggcaacaaagtggtttcacatgatgcttgagagagaagtgcagccaaacttgtctaccgttggtatgcttatgggcctttaccagaagactgggaaactatctgaagctgaattcacttttgagaaaatgaggaactgcaatatcaagtgtgttaatgcttactcagccatgattactttgtatacacgtttaggcctttttgccaagtctgaggatactattaatctaatgaacaatgatgggttagttccaaacatggaaaattggttggtgaggttgaatgtctactgccaacagggtaaaatggaggaggccgaattggttttgcagtccattgttgacgaaggattcaccctgaatgttatagcatacaatactttaattacaggctatggaaaaagttctgatatgcagaaggcaaacaaagtgtttgatagctttggtagtgcaggtttagctcctgatgaaacaacctatagatcaatggtagaaggttttggtagagcaaacatatatgaagagacaattttgtactacaggaagctcaagggtgctggcttccgaccaaatgcatccaacttttacactatgatcaacctactagcaagacatgatgacaatgaaactgcagctgaaattctacaggacatgagggcagcaggctgtcagtg

SEQ ID NO: 35908 - DNA, 378 bp, Zea Mays
aaaccgggctgagaacgccgcggcaacctctcaccgccactaccactcggggtcggtcaattgggttgggggagcatcgaccgatccctgggaaggttgggatagcgtcacggttgttgaagggtccgcggggtgccctgaattgctcaccagtgtgtgcagatcaccgccgaccgccgctcgccgtggccaggactgtttgtgttaccaacccccagtaagatatccatcccctgattcgcaatctgctctgctctgaattgcggctgccggtgcggtgtttcgtgcgagaatcgtgtgggggctggaccaattagcaatggcgtcgtctcgagggcgggcgcaccaccgtcttcgtcttgagggaggaagggatac

SEQ ID NO: 35909 - DNA, 449 bp, Zea Mays
tcgactttggaaggcagtcttcgatgtcaagacgttggtcaggattgcccgactcacatggaggtgactgaggatccttcagccttagaggtggttgttgcagaagacctagtcctcgaggatggtgttggcagtcacccagcccccgagggtgtcgctggtagtgatctggctcttgtgggtagcgcgagctgcaacccagcccccgagggtgttgtcggtcgttatccggctctagtgggtgacgcgagctgcaacctagcccccaagggtgtccaagtgagctctccttcccacacctccatggatgtccatgtcgggtcgtctccaccatgatctgatggggtggtggcaatgcatgcttctttggctccgagcaaacaagtcgccttggaggtcggtgatccagatgcgagaagtccggcatccgctggtggggctgagccaac

SEQ ID NO: 35910 - DNA, 790 bp, Zea Mays
cgagaagagccaggacgacgccgcacattcacatggtcatgatctacagtaaccgaaggcgaagaaggtatacggatggacggacaggggttgcggtgggaggaggaagggagagagagaggtggagccatgggagggcgacacttgcaaccacgggagagcgacataagcaacaatcaaagcgcacgctgcagccatgacgaaatcgatgggagacaaatcgattttggctagggaagaggcggagagagcgaggaggatgagaaacgtcacagcacgggtgaagagagacgaggagggagaaagcgtcggtcagagagctgaaaaggagagaaggaggcgaggagacacgaacgtgagccgttggttggagatcgagcgagggggagtatttggctgacgtggacatcgcgagagaggctgttttggaccgcgtttcatatataggaagcatgcaagatatcacacatagatatgttagagaaaaataaaacccatggtcaaagccaaatagataaaagtaccacgccaattttattgttcaagttaatcaaagaaaccatccctgacaatgcaagcaacaaaggaatgaatacataattccacaagcattaagaaataaagtcgtagctacctgaacacaacaacagactatttgatatggaaacttcgacgaacaaacaaaatggttgtcatctttaatagaagaaagctgcaagtagagagtcttgctcacgcataaatcagcattatggtacataattctacatacctgcaaaaagaaggatag

SEQ ID NO: 35911 - DNA, 284 bp, Zea Mays
cctcaatgggtgtgtggtgattcactccattcttccctttctacactattgcaaggcttagatgacagaattgttaaggccatgctatctatatatgcggacgatgtggtccttgtcaagccgcaggaggaggatttaaggtgtgtcaagcttatcttggattgttttggtgcagcttcggggttggttgctaacatgcagaagagttgtgctattccgatcatttgcaggtcctcaattgcctaagacagttgcagtattttatagtgctttatgggtttttt

SEQ ID NO: 35912 - DNA, 392 bp, Zea Mays
cagattgttaagcatgaggtccaactttggatcatggccgttgccaaagtaatggccagcgccatgaaagaggttaggtaggccggtttgagctcctatgatatccatagggagggggcttggataatctggaaacgttgagatgagtgtcgtcaatcggtatcaacactcgcaaaaagggtggttcggattattaaggatgaggttcgatttctggtcatgaccggtgccaaagttttggcacgtctgaccgtagttgaggcttaatatctttgagaagtcgcaggtagtttttttgtgtgttctgaagtgtcatgttgtgctgtgctatgtgttcttctcaatgcaatgatatatgttgctctcatgtgtattcaaggtggggtggggga

SEQ ID NO: 35913 - DNA, 283 bp, Zea Mays
ccctcagtctgccacctgactcagtttcagctagcgccttcaccttcttgaaacaactgaaagcttcatcttttgttgccagaagttgtatccacatatatctactatgatcatccactataagcatgaaataactcttacctcctggtgtcttgggcctaatctgtccacagagatctgtgtgaaacaggtccaaattcttgtctgctctgtaatttgctacttgaggaaatggctgtcgttgttgcttgccaagagcacatccatcacagaactcttccac

SEQ ID NO: 35914 - DNA, 487 bp, Zea Mays
agtcttagtcagtcttagttagtttgtttatcttatgttggaatggttgtcatgatgaacttgtaatgaagtcggatctttgtaatgattgtcaccaaggtgtgggtatcccctgcaacttggtgtagttattaataaagtcagttatttagttgggtaatccatttatttccactttcctctctatttgagaagttgtcaatgaagatgatcaattgttcagtgctataaagatttttgtacatcttttcttatgctgaaagactgtagagtcagatctgatgtgtgtgtgctttctacagatgtctgagaacaggcgcagaggtgcaaggtgtgctcagccagagcatcaggcacaccaggaagatgcagctcagcagtagttgccaccgccacccccgatgaccattgagcagatgttcctgatgcagacccaagtagtccaagcaattggtgagaccttagcagcgatgcagcaggtgcagca

SEQ ID NO: 35915 - DNA, 343 bp, Zea Mays
cgatattgaaagaaacaaggcaccagaacactggtggttgtggtgagctaaaggaagggtgcaagagttagttgtctagtgcacaattacctgctcagtcccatgggggcgctaccgcgctagctagagagaaattggaggtggaaggccaaattgtatgtcctattttttatttaattactactaggctaggagtaatgaaatgaaaaccataacaagcaagatctgaaactatatgagtatgagggggcatgagttaagtgtgcaaccataattaagctgcacctagtgatggcttgcagaagttgcactcacaactctggtgttgtgtagtccaataacc

SEQ ID NO: 35916 - DNA, 371 bp, Zea Mays
atcgcctccgccggagcactgctggccgtggtagcggtggttgcggcgttggccgcgacgacggcgtcggcgaaggactacacggtgggcgggtcagacaggtgggacacctacgtcgactacggcaagtggaccgccggcaagacgttcatggtcggcgacaccataagtgcgtgctactgctagctctctccgttcacgtacttgcccgtgcattatttccttcccatctcatcttgatgtggcgtgcgataatgtacgttaacgactaactgcagcgttcgagtacatgccgtaccacaacgtgctggaggtgacggcggcggactacgccagctgcaacgccggcagccccatctccacccactccg

SEQ ID NO: 35917 - DNA, 328 bp, Zea Mays
cgaaatatttaaatcttgattcatctcgagattcgcttgactgttatatccttccttgtcaatgtcgatcttttcttcttcggtcttagtctctttgatttgaggttagtgtatatcatcggagttgggtgatatggttaagatagatatgggtgagatagactacatgatgtaggtcaaaagtttgttttaggtgagggttgatagattatgcaatccatcatgactctattggttgggttagacctcatgcatgtgactgagttggtttaaggcactagtttagttttaagtgcatgaggggtatggccttatcttttgtaccagc

SEQ ID NO: 35918 - DNA, 1583 bp, Zea Mays
agcacagcaccgaatacaacagatatgaggtgtaaattaaattcttgttgcaaatcaaagcatgttaccttttctgatggcgctgacatatttggaaggaccgcacatctacctgcagataatacaaagcaaccacaatctgtacagacattccagcaagccactcaggaaggtcgtgaccaccgtgatagagatgatcaacagttggtttatcaacaagctgaagctatatcccggactgttgagattaccaattctttgtctgaaaatgtagtactagctggtgtttgccgtacaatcccacttaccaaaccaaaagatatcactatactgggaaactcagtggatctgaatcactgcatagaaacttgtcatggcagtaactgtttgaactccacgagtttggcaagcttatctagtaagatgccatgtcaaaaattccaaggtgtgaactctcatctgaatggcaacaatgtttcaagtcttgatgttcagtatcttggagaacaaaaccatatgatatcacaagcatcatttaatcctgttagtttggcacccaagggagtatcaggtgatatgagcccattgtcagagccttccagttgttgtttatatgataggagcagtatcacgttccacgagaaggctgatgctaattaccacttgggaaaagttagttctgagattcttagatctggtaacgtggtgagaagcataagctcttcaacaggatcaaataaaccagcacaagccatcgattgtgtatctgctgcattcaggaacatgcacagccgccgtgacgattatgtcggccttcctatcaattcacgaggtgaattcgtcaaggttcatcctggtggcacccctaattctgttgacatttttacgaggcagtgtttgggggagaattcctcatgcccctcagattatccaaccatcttcagttctattacccgcatggatcatgtacccaactatcatgctcgacaattctatacaatagaccagtctgcttttcatgcagatcctcgttttcctccagcgggcccaatggcatatgggatggatgtgaggcagtggccaagttctgaaagagcaaaagttcattactacacaattccaaacaaaaagtatccatgcgccaaacagcaagagctttcaatggatcacaattcacagcagaagctacttgggctgcgaagccgctgtcccagccagaactctgggcagggtatgcagcacaacgccgaaacgacactgcgcctcatgggaaaaacggtcacacttgggaccagcagcagcatgcactgtagaggcctgaacaacggaaccccagcttgttccagtaaacaaagccaagctgaagaccggggaacgcgtacgaaagttttcccacagctgtttcacggaggactggctctggctgatcccgctgctgcgtgtaggatatcagatggagagaggcaaccgtctggacacccgtcacgtttctctttggctccagcagctgttcgggcttttctgcctggtaccagcagtttcagaacaggtggccacaaccagcaacctgaactagcaacagc

SEQ ID NO: 35919 - DNA, 393 bp, Zea Mays
gttttacctctttataaagagaataaagtgtggtgtcatctgctatatgcaaacaatgtaatgctctattctagttgccctaaagtcccgctcaagtctttctctcaaattgttctcaaagaaatactgttggatcagaaagatgatttggatatcatgctctgaaatctataaggttcaaaagatctctgttaaggattataacacttgtactctctggtagtatgatgaagctaggcggaatcagaaatcatacttaactaatcttatattggaaatcaaaatgtgtgttatctctttatcttaatgtcatgcaagcctcttatgtagtctgtctcactgacacttttaccctttgactagatgatgaaccccaatggaaatgaagtaaat

SEQ ID NO: 35920 - DNA, 329 bp, Zea Mays
cgcagcctttggaggtcggggcaagaaaagattaaatagggtatttgatgctattggcttcgtataccctgattaccattatccgataaaagggcaagagaaaaaagaggaagaccgccgcttcggccactgtagctgagccgaagggcaaaaagattaaggttctgacccaccggtcgtgctacattgaaccggtcgtagtgcctaaatttagcgcagggtctacttcagcatccaaagcaacacaaactgctttgattacacagagcgctgaagaaccaacggtaatgccgaagacgcatacaatcaatccagtcaaagataagttt

SEQ ID NO: 35921 - DNA, 517 bp, Zea Mays
accagctgaagctcgaccagcaggacctacattctgggcgacaccaatcaacacatttctctcgcctgcatcaatccatcctctaatcggcactcttgttgtttgcttattactgcaacctggttgtttggcccacgtgtgatcctctcccctatagtggccatccatcacaacactgggaccgactatgcgctgattcgcaatcattttagtcctacgttccttctcccagctagcagaattactcagttgtcgtgtatccactacatcaagcctcatacgcttgcttctcatctcttgaccaccaccactttgtggcctgctcacctgtaatttgtttgtcccaacagcagctacgtgcccatgtcctatgtttggcttggctgtcacttcttcaccgttctttatgtaattttttgtgacagccacctgaccattctgctttgccacctctgcctgggaaccttctgcagcatttaatatgtcgcactccactgttcccactatgatttttgag

SEQ ID NO: 35922 - DNA, 403 bp, Zea Mays
ggaaatcagtaccagcgtcagaacaaccagtctgctcgccttcctaccctagcaaccaaccacattggccaagcaaccccaacacaagtaggaggtcatgcatgcttctactgtggagaacaaaatcactgggcgaagaatttccccaagaaagcagctcagcagccgccagcagtcaatgccccagcaagacaaggagcaccacagcaagcaccaggagtccgtggtcaggcctacaaccatggaaaggtgaaccacctggaggccaaagcaatctaggatgctcaggacgtggcagtaggtatgtttccagtcgaatccaacccagcaaaagtactatttgatactggcgccacacattcttttgtttctacatcttgggtagaatcacataacatcccca

SEQ ID NO: 35923 - DNA, 695 bp, Zea Mays
aagaaacccttcgagaatattacaaaaaagattctcttattgaaatcacagttgctttcggccgatgaccatatagccatccactatgcaatcagcggccttcgagtaggcattttatacagccaatgcataagggatccaccaaataacttgcaggagttgtaccagctctttgaaaagtatgcccggtcagaagagctccactagaggaaagttgagtcttagtgaaaacataaggagaccccgcaatctagtagaacatggatcaagacttagcacgccaagaccgtgttgagccctaggtacacaatattgcaaatcagtagcaactaggagataaccccctcatcgtcaagattacccccacaacaaggtcgcggtggcaacgcggccagggtcagagacaggggtcagggaccacaacaacagagaagattctattgtcttttccacgacgaagactcaacatacccaaccagagactgcctagagactaaagcaacaaaagaccgaatggctagggtcgtgccagctgacaaccaaagagtcgtcgctcacacctatcaaccccaacaatacaaccaacatcaatttcaaaacgaacaccactattacccccaacatcaaaaccccaacctctttccacatcaatggcgccttcaacaccaagaaattatagtgctgccacctccacc

SEQ ID NO: 35924 - DNA, 379 bp, Zea Mays
ctactgtggatttattctccagtcacttatttgatggcgagatgttagatcaagttcggatgtgtatcgggtgttcttttctttgttgtgaagtatgcccctcctcgttatttccaccagcaatcgaggtcagctctggtgttgtggcgatgttgttgatcgagttttggggcaatatatcggctgtcgattgagtttttgggcaatatatcagcatgttgattgttgaatataactcgtttatatgcgctctactctggtcgatgcttttgtcgtctgtgggacatacatgccattttttttgtttaaccttttctagctgattagcagccatctgagaacgtgagaagataggtgaaattaatcttggagttctgaa

SEQ ID NO: 35925 - DNA, 741 bp, Zea Mays
atttacagctgccattcccttgaggtggtatagagggcactgcatcatatgcaaatattattaggttcgtggttcagctccttgtttcgtatatgcgcttggttcagtttatgatatcagcctgtggggaaggtatttaggaaggcagtcggttgcttggtttaggactgtgcgggtcggggtcgggcatcgagtactttccgtgtttatgcttgcaggttgcggcgtgtggtgtggatgcaagaatatcaggtccctccatttggttctgtcgatctttgttgccaacagatgagattttggtgggatttcactttcaacatgtaaatatttgccaccacaaacggcaaaaaagaatgagagaataaagggatcacgtgtctcgtcatagagagcactacatactagcaagtaccattggaatagtcatcggtgtcttttgggcataaattcttgcgctttatctacattttgggctttggagtcatcttttttttcctgtcgagaatctaggggttagggattattcatgaccggaactttgacgattgtcccctagctgggatggtattgtgctgatactgtcatcttgtcatttcttgtttggctgacctacactgaatattttggtttcatgtttctatcaaagttgtttagcatagaaacgaatctggagattacttgtcggttcattgggtattaattcatcataattatatggcatggattcctagaccaaaa

SEQ ID NO: 35926 - DNA, 328 bp, Zea Mays
ggggaggagagggtggcatggtcacgaggaaggggagatatgagttactatgtatcagagttactaaaacctgacctggtttggacgtctctccgcactccacggtgcttcggccggtgcgcgtgcgacacgtcgcggctcacagctttcttcggattcgacttttttatgtaatatagctttgtatgagtgtgaattccgcttttccttgcccctctcctgtgctacctacttctctcctttcgcatccaccgcctccatctcagcgtcgtcgccagaaacgcttcgccgccgattcgcctgggtccataaaaggcttggctctccc

SEQ ID NO: 35927 - DNA, 326 bp, Zea Mays
gttggatctgatttacgtgtgctttctatagatgtctaaaaacaggcgccgaggtgcaaggcgtgctcagcaggagcagcaggcaccccaggaggaggcagctcaatagcagttgccaccgccacccccgatgactattgagcagatgttcctgatgcagacccaagcagtccaagcaattggtcagaccttagcagcaatgcagcaggtgcagcaacagccacccccacctcaaccccaagtgcaagttcagatgccataggtgcccagagacaatcgagtagaattcatgagaaaccatccccctgcctttgcattctgtagat

SEQ ID NO: 35928 - DNA, 435 bp, Zea Mays
cagccgctattttactacggccaccgtacccgagcgtgtcgcggccgccttggataggttcgccggagatagactctttgtagccttgcgccacgtgccttggcatgataacctcaccaccgtgactcatgttagtcgtccgatggtcgccggagagcttgccacggtaataggccacgaatcaccgcgccagtaaccttcttcttctccggccgccgcgcgtctcaatccaaattcaccggccaccgctcaagcctgctataaattgccgacctgcctgctccactatgtaattgtgcaaccagtgaagcaaactgtgccttgaatcatccacaagagctcactaatttctcatttctcccaaacctgctctccgccgccgtggtatagccctcgccgtggccagcgcatctcaggtccgttcatgccctctaa

SEQ ID NO: 35929 - DNA, 301 bp, Zea Mays
caatttctctctcccttccgccgaattacccagcctggtggaggagtagacgccaacgcaggctacggcaagatggccaagggttgagtcgtgatggcttcctacttataccctgaagtctggtttgttcatgggatcgcagcgaactcgatcttggcgggattgagcagtgttcggggtttgttaggcgatgaaggaagtccgagcaggaggaagaccctggcgcgcaggccccacatgtcatcgggcaagtctgttgcagagggaaagggatgaagttgatccatgggccccaccggca

SEQ ID NO: 35930 - DNA, 381 bp, Zea Mays
cagggtaactgtggattctctgagaggaatactcagccacttttgagaccaatggatcaacatgggactatgtttttccagccagtccatccctacaataagatcataggtagatagtggaaggaccttgagtgtggatgagaacgaaaccccactgatggaccaagaagcattcacaatttggtgattgcaagatagttgtgacccattagcaacctgtacccgtaaaggttggagtactgaagttacccctgtcatattatcagctacaacactgctaataaaagagtgtgagctgcctgaatccaacaaggctaaaatgtccattcctgctatatgaccaacaaacttcattgtgcgaggagtgtccgacccttccac

SEQ ID NO: 35931 - DNA, 372 bp, Zea Mays
cgttgggctcggggcgtcgctgttgctggctcaattgctacgcatcaccaccgcggattcacgcatctctgtgggctaggcacgacaatgtgtgattcacggtatggcctccttccctgtactcgcgttcatctctatcgtgtgtagcacagacccccttcaagaatggtgtaaccgagcctctttggggatctctccagccatggcgctgctgtgggagggcgggcgctgccgcgtccggttgttttacgctcgcgattgatggtggtcgttgatctggacatggacgatcgtgatcaacgcgcagataacgcttgggttggatagctatcgaccgtggatctcaatcgaacggtccacaatcgatctggg

SEQ ID NO: 35932 - DNA, 405 bp, Zea Mays
gcactgttcacctcggaatcaggagccagccagagtatgatggtcgtgagttcgtcgagcatggcacagagaagtgtgtcgcgactgtatacattggatccagtccacaccatgtggaatggagtgtcactgctgctaggcacagattcagagacacctgccaagtcgtcgctcgcaaggcattgagggccctgtgtcaaatctatgaagaagaagtggccgacacaccgctcagattctttccgccctttcagagaaaccgtccagtttggatggccaggatgcatgcattggaagagcagcagctgcttgaggatgaccccacagtcatgtacctcactgcatacctgctcacccttgatgcacagtatgatttcttggctcggcaccaccgtcagatgattg

SEQ ID NO: 35933 - DNA, 299 bp, Zea Mays
tcaaaacccattgggatctaaatcccttacggtttgtggctgtccgttgtcatctgttgccttgcatcaagttggttgcataaggctgtttaagtcatcttttagtggttgttttggtcacataaggttgttgttttggttgtaaggtcacgtaaggttgttctggtcatgcatggtaatgtaaggtgtttgttctggttgtcgtgatagtgtaagaatgtaaggtcattgtattttgctattttggccttactttctcttaatgcaatgacatgcagttttacatgttcaaggaaaaa

SEQ ID NO: 35934 - DNA, 340 bp, Zea Mays
gcgaggaccgcaagtgaaatgggccgacccaagaaggcgatgtgcccatacccagatcgtccgaggattacgcgcaatctcaaggaacagttcgacttctcacgcccgatgccctcgaacgttggggacagaccaggatgaagtcggcgagttttccttaagataagctaagtcagttcgctattagttaggagatatactggaggaacgtgatcatcgtgtacgtagggagtgccccacgatcgtgtatataaggcccagggggaaccccatcattttcacactagcccttctccattcaggagacgccacttgtaacacaccacacatacagacccac

SEQ ID NO: 35935 - DNA, 663 bp, Zea Mays
aactaactttatagttgctgaggaaaaaaacaatagcttcatctcaatttcgccagcagaaaaaagtagcaacgatttgagccaaaaactgaaagagcctgcttcaaaagcatctgccagttttctgaagacaaaagaagctgtgaaccaaagacctttacaacaacagtacatagaagacctataagcttcccagtatttctgcttctttataagcattttggtcattcgaagtgcacataattcctgagttatccaaacagaaggagtgaatagtgtattatgatgctcttttgaatcaccagattcttgattaccacgattgattttacaagtattccgggtaacacaagcacacattatcaaatggaaggattcatatgtgctccagtgctgaggggcatcctgacgcacatacttgattagacccttgatgctatcatgaagattgtatctagcaccagatgtttcacatagcacctcatgacaagcatttgcaaatttgagcatgcaacaaattagatcatgcattatggactttctattcttgcaatcaattttgagaaaatccagttttccattgccaataagtgttccaatgcaggaagctttgatgcatgtagctaacagttgaacattgtcatctgaagtactcaattcttt

SEQ ID NO: 35936 - DNA, 335 bp, Zea Mays
gagagtgctgcgagcgtcggcttgggattggccgggggtttggcctcgtcggctgtctaccagagctgtaccagagcacgcgtggcgcgtacgttgcctcggtagggcgaattaaccgactggcgggctggaattcgtggtcggagcaaatcacacgtcccggcgtcgagaaccggttcctgcgcgaccctgttgaccggtaagcattccatctcgttcaagacttctaccgcgctcccttgtccttggctgtgtttgaattcgaattcaggtagaccgaatggccgggcaccgccgccgcttcaccattgtccgcggatcgtggtggcccgagc

SEQ ID NO: 35937 - DNA, 721 bp, Zea Mays
cctatgccgattagattgcgtgaatgaggcttatcaggcatttgctgagatgacaagcagaggaattgtaccaaacaatattacttacaactccatcatatctgcactttgtaaggcaggcaatatgactgaagccttgaagttagttcagaatatgaggcagagtggccttgttcctgacatttacacaagcaacattctaatcgacggtttgtgcagagaaggaaagctgaagatggtggacaaccttttattggatatgtgcagtaatggtctaaccccagacacagtgacatataatacaataatcaatgcatattgtagggctcaggatatgaacagtgccatgaatttcatgaataagatgcttgtagctggttgtgaaccagatattttcacatataatatttggatgcatagcctctgcaggaaccatatgttgaaccaagcagggaagctgctagatgagcttgttgctgtggattgttctccaaattctgttacgtacaacacattaatggatggcatttgcagtgatgttcttgatcgagctatgatacttactggcaggcttattaagatggcttttaaaccaaacactatcacactcaacgttttcctttctcatttctgcaagcaaggatttgggaatagagccctcatgtgggctgagaagctcagagaagattcttttgtttttgatggtgctacaagaaatata

SEQ ID NO: 35938 - DNA, 281 bp, Zea Mays
tcacggtgaatggcatcaaagtgtttccatgcttcaccatcggatgcgtgcaccatcttgtcaggattatatcgtttgccatttttgtgtcatgtcatctgtttcgcgaattcctcggtcatgtatagatgttggatccttggtattaatggaaagtgacgtaggattgtcacggggatgtcgagctgcctcttctgtccatcaccagagtctacctccatgaacctagacgatttacacttcagaccgtactttgcctccgcgtattctttcctaaataa

SEQ ID NO: 35939 - DNA, 789 bp, Zea Mays
taaggtttgaattttcagacagacagtgtgaccactgagactttaagcatgaattcaagtttgaattattgagaatttgaccaaggttgctatgacaaaattgtagctggatggtcaggctataattttggtacagagagctagcttagtcaccacacaaatttgggagaaataggagctccaaagtgctctgtcaaccgttctgaatggggatcacgatggtacagtaaccgtgtggatcaggacgccagcgcagccaccttaccaccggcgaccgattgccgtcgtgattcgtgcgaccgccggcccactttgtgctctggatggttggatagtgtcgcggggtcaaatatcttcgccgccggtgacctggaagccactccggctagtcgtagttcatctcccctggcccaccgcccgcgggtaaagttggtcaccatcgtcgtgccttctccgttgtccaccgcgtgtcctaactgcgccaccgcatcgtcgtgacttcctctaaactccccatcgaccaccggagttactgccacgacggtgaacacgtgttcactgcaccagcgttcttctccccctccggccgccgcgcgtcctccctaaattcaccggccactaacgaagctgcctataaattgagcccctgggcagctgcgttaggtcatcacgaagcccacacacccgttcttcccctcgattgcccaccatagccggagaattccccttttcccccaaactggtttccgccgccgtaaaactcacctcaccgcggccagccctttccag

SEQ ID NO: 35940 - DNA, 476 bp, Zea Mays
gattatagttggtcttgtcgcggacggtttgatgttgtcgtttctgcctttgttgtgctagtccggttgcacccttaggtgtcttctgcgcggacagtcttcgcggtaggcttcggttttttcgcacttgttgtgctagtccggctgcacccttaggcgacttctgcgcggatagtcttcgcggtagactttgattttttcgcacttgttgtgctagtccggctgcacccttgggcgacttctgtgcggatcgtcttcgcggtagactttgattttttcgcacttgttgtgctagtccggctgcacccttgggcgacttctgcgtggatcgtcttcgcggtagactttgattttttcgcacttgttgtgctagtccggctgcacccttgggcgacttctgcgcggatcgtcttcgcggtagactttgatttttttcgcacttgttgtgctggtccggctgcacccttaggcgactt

SEQ ID NO: 35941 - DNA, 303 bp, Zea Mays
gccagatcgtgctcgttaccctggttcacttcagcctctaccagtaccaccacaggcttggcattcggttactttggattttatcgaagggttacctaggtcaggtcagcacaattgcatattggtggtggttgaccgattctccaaatatggtcacttcttacccttgcagcaccccttcacagcgagtaaagttgccaaggttttcttagacaacatatataagctccatgggttgtctgttaacatcatttccgatagggaccgagtgtttaccagtggtttttggcaacacctgtttca

SEQ ID NO: 35942 - DNA, 349 bp, Zea Mays
agtgggtacgagtcttctacgcctctgtatggatagacccggatcatcactggatgaggtttcgttttgagcgcgaggatgtcaccattactgccagttagatccgctagctttttggatttcctgagtcgacgactcgtcttcacagcctctgctacggcacttctgaccctcctcgtcgccctcacggcggtgtggctccgggtacagctcacgtcgcggctctgttccgcccacccttctcagatgggtcgcgacgttcaccgacagattttactacaacagccaagtatttatatgagctcattagacggactcttctgccgaggatgggatacagggatgctac

SEQ ID NO: 35943 - DNA, 283 bp, Zea Mays
aggggacacacatacatacatgcacacgaacgacaagaccagaagacctagaggccgaagccaagggagcctaggcctgagagcactagtcgcctacaggaccctcaacacgatgggccgcaccgagaaccaggctacgacggccaggggtcggcgcgacatagagacgtcaatgatggcgtcgatgctcttcggcacccacgccgcccgccataaagagcgaacagggaagcctagacacccgagacacatacggacaaacacaactttaccaaggtcgaac

SEQ ID NO: 35944 - DNA, 346 bp, Zea Mays
tgcgtacttgcccatcgttctcgggcaggatgcattgcaatggctacgacacctaccgcgacactgcatcgacgattggagcgacttcagtcggcgcttcatcgccaactttcagtccctctccgacaaaccagcgcagccatgggacctcaaatccattaggcgtcggggcgatgaaacacttcggtcgtacctcaagaggtttcagaccatgagaaatcgcatccccgaggtcactgaggcagcagtgattaaggatttctaccggggatctaatgactcagccttcgtctgagccatactgcagaaggcgccgaccacctccgagcagctgtttcgggaagcg

SEQ ID NO: 35945 - DNA, 320 bp, Zea Mays
gtgtgtgaggttcctgcctgttcctgtttgagattgctttgcttgtagatgtggcgatgcctagcctgtcctatgtggtctttcctgctttctgaggaacaagggctagactgtttgaacaggggcatatgctacttttcaagcatatttgaatcagaccacaacactctcgctccaaggatcaggcttgaccatgctacctaccttcgttgttcctttgggattaaagccagctattcggactgctacagcttcaatctttagagacaaaacattgtagaaacatagacatgctttttccaccaattccatctttatga

SEQ ID NO: 35946 - DNA, 329 bp, Zea Mays
gtggtgtagatatattgccctcttccgttgttcgtgtcgccgtatgcgatctgccggcggcggcgccccaagatatacgtccggtccgggtggctgtctggctgatgatgcttggacgttctcggggtcatcagctatttagcagttctgtcttgtttgggcttccttgggagcatcgatgcatggatcgagctggacgacgacgagggaaggttatggtgacccatgcgctcacgtagggccacgacggggcggagaggtcgatgggggcacgccgacatgcatgacacgcactgacgcttgacgtcaatgcaacgcaacccacgggc

SEQ ID NO: 35947 - DNA, 543 bp, Zea Mays
ctaccctagtgttggctagggggtttgcgaccagggcattgatacttgagaatggtctgtacgttggtgcttggtgcaccaagctcgcctcctctaggataattgtttggtacgccttgcacagattaggcctgtatcagcttctctttgctattgctgcccattccatgtaaatttttattgcagtttactcaccaaggattatgaggtaggaactccagatggatgtcaagtaatgtttatcagacatttaaaggagtctagggacctaattagaatttgtctgctacctttttctgatatgaagactatcgcacatgattttgtcagccaattctattccttgttgctattcaactgctgaatgttttctatctatcaattaaattaagagtaactcgtgttgcatcccaattcaatcataagaagcaaggatgcagtggttgatggagagtggaggagtgggactgagatttcgtgcatgctggatggtccagagggtgagtcagactttgaagtataaaggggagtgccttgcaagct

SEQ ID NO: 35948 - DNA, 449 bp, Zea Mays
ctcccatgattccttgtggttcttgaaaccatccaataccttttgtttccttttctgcaagaatggtccactcatctcataaggactaggccctctcaaacctttaccaaattgcccaatggcctcaagcataagtgcaaagctaggaagggtgactgtgttgtgtgcaatactagcttcatagaaaaactgacatatgtactcacaagccttatcccttctctcttctcttttctgagttgacaatgttgtttgaaccttgttgctaaggttaattcctttatgcatcatttgaacaaattcttcaatagtagaaggtttataaaatctgtcaatagtgccaccacgtaccactgttctacagctaaggctactagaaccttttgttggcttttgcttcaccacaaggacttcattcccaagatcaatatccacttgctcacaacttt

SEQ ID NO: 35949 - DNA, 440 bp, Zea Mays
gatggagtcgcagcacagctcgcttcccaccccaaagagttggaggcaggaaagatggagccgcagctcagcccgctgtccaccttcacaaggctggtgaacatcctttcctccaaatgctaggaagaagcaggaagaagcgtcgcccccatggacatcttgcagaggtaggcaatgatggctgcctgaaggatgaagcagggcgtgaagtgctgaggttggaggtcgagctcctccagtagtagcacgaagaaagaagaaatcggcagcgccagcccgctggggaggttggagatgaagagcacaaactctccagtggtgagattgccgtgaggagaggcaccgacacagatccttccggcgaacgccggcgcaccccatccgagcaggttgcgcaccaagttgagtgccacctcgggctagagacgctcggtaggatc

SEQ ID NO: 35950 - DNA, 396 bp, Zea Mays
tggaatctgcctccttccaaggcctttaccagttttgtgtcaaatcctcctgctggtgatagcggtttgggccttagagtgcgaccctctcccgaagaggttagtattttggttgcctcacttggcgaaatccctgacgacgagaggcaggttcatttcgaggtacctttgaatccaagtgatgcagagataagtgacatgctggatatgttggatgaagattcctctgatgcagcccctgctgaaacactggttgtagcacccatcccagaggctggcaaagctttggatattcagaggtctgatagtgttcgcccgaagcgtcctcgccgagccaatcaaccaacttctcctgctgaggggaagaaaaataaaaagagacgtcttcgccgagtg

SEQ ID NO: 35951 - DNA, 271 bp, Zea Mays
aaacgatgggggaaaaatccttatgtgctttagcggcgcgatgaagtcccctggcggcggctagtccaagctccaccccggtgggttcgggacgtcgatttctcccaccctgggcagaatttgagaggggttctgcgtggtatggatagagggcacgtagaaggggcgaatccatccattaataggggcccagaagtcgccatgcacgcccggcatgctcggccaggttacggagtccgttgtgaggtgagcggagcgcggtgcttgggga

SEQ ID NO: 35952 - DNA, 336 bp, Zea Mays
gatttgtgacagaaaacgtacccatcagcatgggttctccttctggtgtagtagccacttgagtataataaactcgtctagtcctcttttcacccttgcctgcctggttgtttgccatattaccctttccttgagaagtatttccagaagtcttttggaagtttggcttgttttgcttaggataaggacaatctttgatgaaatgtccaggctttccacagttgaagcagttgttagatgagccaggaaaagctggaaaacgtgtgccatgggcacctgactgagtgatttgggtaaaggcaacagttggatgaatgaaaatgggctgcttaaaag

SEQ ID NO: 35953 - DNA, 359 bp, Zea Mays
caccctcgggggttgggtcgcagtctgcgttacccatccaagccgagtcaccctcggcaacaccctcaggggctgggtgagcgccaacaccattcttgagggccgagttctctgcagcagccacctttatggctgaaggtccctcagtcacttccatgggagcaggacaatccaagtcagcttcctgaccctcaagaccgcgctccaaggtcgatgaggcgcgggacgctgtccgggatgaccccaacccggcgtcgaacacatcagcacaaacatccatcgcgtcaccatccgccggttctgataacagatcctctggaaccatatcttcaagagtttgatcaaagttcgccagagac

SEQ ID NO: 35954 - DNA, 437 bp, Zea Mays
ctggaccgtttgggggtcgctttgtgctatgtcggcaccactagtgaggagactcggatgcttattcaatcctccctcatggagagagtgcgtgcagctcagcagcaggatcgattattgcaggaagctcgaaagagggttggcgatggtaaacccgggagttcaccattgatgagaatgatttggttcatttcaggggccgtctttgtgtgccttagaaatcagaggtgaagatggatatcttgagagaagctcataaaacgccttacaccgttcaccctggcgaaaccaaaatgtaccatgatttgaagcaaaacttctggtggaagcggatgaaggttgacgtttctaattatgtggccgcctgtgaagtatgtcagcgcgtgaaggtcgagcataagaggcctgcaggtttactgaagccattggaaattccg

SEQ ID NO: 35955 - DNA, 575 bp, Zea Mays
cccccgccatgattcgtgccctcgccggcgtgattcgcgattggatcaactggataacacttgaagtcatgtaaagatcatcaccgtggataagttctggccagtaaagtatttcggccaccgtacagagcttgccacggtggaacccgataagcatgccggtgaccgccgctttccggctttgtgccgtgtgtctaggcttttccaccgcatcgccgtgacctgctctctctctccattgatcaccggagtgactggcacggcgtaggacacgaattccttgcgccagtgaactctccctcctccgaccgctgcgtgtcttcgctaaattcaccggccaccgttcgctaatgctataaattgaagccaccgcaagctccgtagtatcatcacgcaccacaccacccagtataacccccagacgatcaccagtgagctccaattttaaacttcccccaaatctgctcaagaacaccgtaggagagacctcaccgcggctagcctattccaggttagttccagtgccttgatcatttgttctagcattcttaggtccttctcaagctcctcgaccc

SEQ ID NO: 35956 - DNA, 322 bp, Zea Mays
tgtttgtttttgggttgaagtccacgtctttatcttttcttttaaggcctggttagtttgtccttttgattgagcgtcttgagttattgtagccatggccgctgggcccttttagggtgtggatgtgcctcgagatggatctagacaccagaacgcttaggcgagagagaaaatagtcgtagaacagtgagcgggcttaagggtataatgtggtgcttgctccccagcccctgagcaaaacttggcgacttggttggcatagcaatttggttgacatgttttgtttgtgtatgaatagagaagggacaaaagagtaacttag

SEQ ID NO: 35957 - DNA, 477 bp, Zea Mays
ttgatttaatgtttacgctagattatctcagcgtaatggttatatctttacagtttcgatgaccattcaatcttttgatagacatcattgagagtgaattgcacattgaatcactgtattgcttggctgattcaagtaggtcatgaactcctaaactgcatcttcaggctactttaaatgtgtcagtctagatcattagcgtgctaagtcacgtataaccaatgacatggcttgttgagttgaacaatgcacatgacatacaactagttgcaatacaggtacctcaatatactagaggtagctaaacctcttgtcacaggttcacatccagttgcccactagttttgtccttgaactacgcagaagagctgcgtgtcatttcattaagacagatgaagaagcacaaaagactgaacagaggcccagcccgattacaagagagcaaagacaagtactgtgtttgaagcccttactgag

SEQ ID NO: 35958 - DNA, 487 bp, Zea Mays
actctcttttgggagagacttttcaggactaggaggaggagccaaagtacagggggcgaggatcccaacaggacagtggagtgaggaccaactatggatggaggaggatgacagtgccccaaggtgctggtgttggtgatgttgtagttgcagcatcaatgccagatatagatgagatgatcagcactgcagtagaggcattcgagttcgatgggggcagactggcagagaggggtccgtcaggacgtcacccgtgccgctgcctccagcagttagttcatcgatctcttcatgagtgcttccattaaaaccattatatccaacattaaagattgagcattctgtatctgaccaatttccctaggtagtgagtagtgaccccgccaatgcatttgaaagagagatcaattgtaattaggtttgccattgcagttattctagggaatattgagccgcagatattattctggcttgcatcaaggtacaa

SEQ ID NO: 35959 - DNA, 761 bp, Zea Mays
gttagatttgtctatggcggagtcttcgcctaggtctgcccctaccgcgacagagtctccgtctagagttggcccaactgcgtgacagggcaggagaaggatcagagtgtcgaaatggagtgtgagaatgttgggcgagtcttcgcaaggcatccaagtcccccgaaaatgttatcgtatgggaatggagaagcctcgtccatgggacagaatgcggtcggaggaagggactcgtcagatcatccttgcaccgacaactaggtagcgttttgaggagggagatttacgggctctatttgatggcgaggagcttagactgatgttgtttaattttcgagaggctggcctgatcccgaagttgacatggccgttctttggtgaattcaagtggcaacgttgccctcgccccttcgccaaaggatggctatgggaacttgtttgcggaacggaatatcttgtatacgaatgatagcttcgtgcttgttgtttgtcccgttttcaatttaaggtgtgcccttcgttgttgcacttgtgcttgtccggttgcattagtgggcgtctttggttcagagtggttgtctctcggacgacttcgtgctatttacaaagtgttctggttgtgctgatccagttgcacccttaagcaacttttgtttggataggtaatgtgcgtctcggatgacttcacacccttaggagttggtatgcacttgttgtgctgatcctgctgcacccttagacgacttttgcttggatatgaa

SEQ ID NO: 35960 - DNA, 328 bp, Zea Mays
tctatccattgcctgtgacagtgccccggtgaatgccacgatagataacttcggtgactcctcccctttctcactgcccgcccttcctcgcccaaattcatcgtattctcgatcgcactctataacttgatgccctagtgagctccgctaggttgttacgaagccagagcaccagccctcgcctccgattagccaccgtagcgccccaattcctttcttcccccaattcggttctccgcgccgccgtgagccaccgcgccgtggaccgccgtctccaggtccgttctcgcccttcttccccttgttttagcactcaggcatgcttggc

SEQ ID NO: 35961 - DNA, 373 bp, Zea Mays
gttgggattactagatgaagataatatggaaacaagtgcgagaccagatgcttgtagacctagacaatttagtggtcgtgataggaatgaggatttggatgaagaaatagttgcatttccttgcagagatactataccagaagagagaatattagtttgtgatcggtccaatcctattatgaaggttgtcagtttgtacaaggatattaaggaatccagaattgctatgaggcaatacacgattaacaatgaatttgagttggtaattgagtcaagtgctccttttagatatcgaggatattgtaaagacagtgattgcccttagcgaattaatgcaagacccgaagttgctagttctccaactatcgttgtg

SEQ ID NO: 35962 - DNA, 409 bp, Zea Mays
gcgtgctcaaatcggccccatctcactgtgaccacttttatttggagttcagtttcagtttttctgaaacagttctgacagagcgactttgagtagattgttctccaatttttgtataacaacagcaggagatgtctgcatcaaagttgctcatgtatagtagccctacaactttgttagagcaatcctaggtagattcccactggatcttagtctaaatggctcttaatcttggatcaaggtcactgtccaacagaagttcagtctatattggcctgacagttcaacttcaggcttaaatatctctaaatttttctcaacaagtgagcttacaaccttaagcaaagttgttctccattaattggtctacaaacttgttgtggtgacctagggcaaaaaccctataatt

SEQ ID NO: 35963 - DNA, 481 bp, Zea Mays
ctagttcaattggccgggtcaagaagcatcaagagcatacaagagtgctaaaacaagagctaggagggtgtgatcggacctgtgaagagctgaccgcggcgagctcacacactacgatgttcttgaccaatttgagggaaatctcaatttagagctctctggtgtgcaatccgagacatgagtgggtgcgctggatgcttaactacgtagcggagctgatggcatgctcaatttatagggcccgagggcggtggctcctaatttgggcatggcacgctagcggccagagagaggggagagcactggcgcaagaaatgcgtggctttcactgtggtatgaccaccggcgatgaccggacatgctagagcgagtcaccacgacaaagtactacgtctaggcatgtggcatccgagcggcaggcagctaactccggtgagcttatctgaaccggccgtgagtcaagtggacacggcggccgggg

SEQ ID NO: 35964 - DNA, 410 bp, Zea Mays
catttgagcatgggttggctgaccccctttttgtaaagctgaccctcaaagagtgcaaagtctcgactttggtgcgtgaggcgcttggcctcgttgatgtcgcttggatggtaatatccctgcaggaacagggtgattggtgctcgccagtcttcggcatgacgaggttgactatgcagtggccttcggtgtcgttggttatttgtaggccctctgggctatggacggttggcgtgccgatgacatggtagaacacgtcggagggcaaggcctcgcctctggctgctgctttggccaatgcatcggcctcctcgttcttggctcggtccacatgctgcaaggtaaagcccttaaattgtctctcaagactgcggacagccgtgagatactgcatgagtgcggggtctttt

SEQ ID NO: 35965 - DNA, 503 bp, Zea Mays
gcttttctatcctgattattggtgcatatagagttcaagttttgctattgtttttaggcacatggcactactctattcctaagggcatgaatacaaaacttatactttacattatcaacttttatatgattgttccttttcatgtgttgacaatttccaatcatgatatagcaatgcaccatagttcttgtgccccaggagcatgaaaaataccacaagtacatgaaaagttatgaataaaaacctagtgaatttcacaaaacgctaggtacttttgtttcttgaactcatctagatggaaaatgaagaaaacctctcttgtcgcctcattagtgaatgggacttgtgatgtactgatattgatggtagaaccctttgtagaataaagattgacatggattcccttttccatttgaagtttgttgacctgattgtttctcttgggtgatctcaatttgatcacatgttctgcaataagaaaaagggcaagggttggattcttg

SEQ ID NO: 35966 - DNA, 711 bp, Zea Mays
ccaagctaactcatgatgagctctcaagttagtcacatctttgacacatttagcaagtaaaggctctttaacctcatgaatactaagaggaacatatccagtaccatattaagcagtggcctcacaagcaatgtgaaattgtctagaattaatggcgttaaaaggtacaccacactcatagaaccacatagcccattgcttgttgacataatctctgtcagccttagacttagtgcatgcttccatggtggtttgttggtgtgaccctgaggagagcctctcatccacaacttgttcaggagttcttcgaggcatggttgcagttttccctttttctttttccttgtttgatgtatgtggccatgcagctgttctaaactgaaatgcagctctcttccttttggcagttgtccccgagctaggttgttgcatagatgtggcggaatcctcttcgccttgctgcccctaaccatcatgatcatcatcaccaaggaaaataggcctagacctcttgttcttgtccaaatatgccttcatttcttttctaatctcggttgtagtcttagaacacattaatgtgtctcaataaccaccggcaagatgttcttttaacctcttgattcctcccattgtcacggtcttgcaaaggttacatgtgaccttatctcgattcccaatctctgtccaaaatccatagttccatccaggatc

SEQ ID NO: 35967 - DNA, 384 bp, Zea Mays
cgagtctagagttgcgctcggtcattgagcgagccgtactttccagccctaccccgcaggtgtagatatatgatcgagcagcaacccccggggcggaagggatcaggcatttagtgcgggaactagcagataaaaagatagagattcccatcgcaggcataacgcatcacactcgtgcacactctgactctgcactggcgcgaagaatccacatgccactgggcctaagctggggcacggcatatacccacccagcctatgaacccaaccgcctgcttgcttgcatcgcagtcccaccctctctctctccccttctttgacttcaccgattccatcgtcaccactcgccatggccaccgatggcggccgcgaatatccaccccg

SEQ ID NO: 35968 - DNA, 448 bp, Zea Mays
ggggaaacaacctctgttataagaggacaattagtgtcttcacttcagattctgagacaattttttggtcttctttcaccacctccagcaactgtgcacttggcaaatgctgcagctagaaaagcagcagttgttctgtctaacctgaaaactgggagtgagaacatgtacagttctttcaaagacagttcctctattaaagcaggttacctatgaactgatatatatttttaacatttagtatcctttggttttcttgttccttttgcaattatgaattctctaaatgatagttacgcttcaaaactgtagttggaaatatgctacatcttatcgtggaagcctgtatcgcaaggaacttaatagatgcatctgcttatttctggcctggctatgtggttccacttaaagaatcctctccagttcaggcatctccatggtcatcttt

SEQ ID NO: 35969 - DNA, 687 bp, Zea Mays
tcatgggtgagaatataaacgtagtcggccttccctggaaccctttaaacaaaatcgcagccacctctacaaccggataatagccattgtgccgccgccgctgtgctagtattgtcgccgtggtcggacctcggtagtagagcgtatcggggcttgctgagtgcctgggcggcctcgttggggcgtggcgggaacctctggtggaagtccggaccttgcggtcaaacggttctcggtgaattgctcgtcggagcagcgcgcgtgcagtccttccgcttctcaccatggcgcggctcctcctcatcgccattgtcggtaataagccctcccctgtgtccgtcgtaccctcgatttgggttagcacccgtccaacgacacgtagatccgtgtatgcgtcgggttgggtgctcaccggcgtactccgccgtggtggtcacctgggcgccgctctctgttagagttggaggtaggaggatgtgccaggatcgtagatctgtgtgtggatggcacggattaaaccatgagattccactgcgcttggagttaattctggccattgatcggtaatcctgtggtctagattgggtagtggtcaggtgcgatcctcggccgtccgatgcgatcgtgcgcgcaagaattggcctcggtatttaaaatcttggccgctggtctctgaatcaacggtta

SEQ ID NO: 35970 - DNA, 285 bp, Zea Mays
agggaactttcaggggagaaggcgtcccttcaagagagcctcgcaatagctgaaggcgaggaaaccaatacccgtgaagcttaccgcaccctaaagatggactatgacaagaaactgaagaagctcacccccgcaagaaaaatacgcaagaagaccaaaagtcaaggatgtcagactgagcagaaggaagaaaaccctccaaccctaccccctcccgggttaaggaactcgtccgacaccgaggagatgtccctggccagccttgatgaccttctcaaggaattt

SEQ ID NO: 35971 - DNA, 283 bp, Zea Mays
ggattgtacatgggcccctttttacatcgaaggaggtaaagacgtagggtcttctaagtctgggtcatccgagcctcgaagccttcgatggtctttgcttcggctcaccggagcgaagggagtgcttgagcgttcgcatgggcgtcgtcctcgggcccggcttgcggggcttatcttcggggccttcgatctttgatacgttgatgtgggaatcgtcgagcgagggggcttgttcgctttcgtcccaacaaacctcgagcgcaacacacaaactaagtgaatg

SEQ ID NO: 35972 - DNA, 387 bp, Zea Mays
ttcttaccttaaaagattctttcttactttaatggatccctcttatcttaaaggactctctcttatcttaaaatgatccatcctatcttaaaagatactctcttaccttaatagacccatctcatctaggaaggattctcatcttatcctaatagatctaactaatcttaaaagattctaccatgatctttgagatttatcttgttctaataagcatacttacctccaccactttgcttatctcataatggtgtagaccaacttaaacataattataagagctaacccaacccatagagtcatgatgaatgatataatcaatctattctcacctaacatcaaacagacttttgatctacatcatgtggtttacctcatccatatcta

SEQ ID NO: 35973 - DNA, 528 bp, Zea Mays
cgcgcgggcgcatccggtcttgccgtggctccctgttgattgccggagcttgatgggtagcgggtgcgggacccgtgctggtcgtggcggtgagtatggttcggacgggattgggttggagaacttggtgttggtgcaaaacgaggacgtggagatgcaggaggctggacgtgttcttcctcctcaagctcctccgcttgaggactcaatcatgcagagagtcgtggctctgcagaaggagattgtgacagtggaatctgtcttggcggcccggcgggtggcgaaggatttgcaggacctttgcgttgagtccaggaatgctgcaggagtgcttagcttagtacagccgtgggaagctgacgatgacactctgagggtcttgctttccaatttagtgcttgaggaagatggggtggatggaaaaggaccagcacttgttctgtgttctgttttcttaccacagttactggagcttcaaagaccagcttcatccgttctcctttccactgcattgggtctctgcaagcg

SEQ ID NO: 35974 - DNA, 1419 bp, Zea Mays
ctgtttggtcaaatgttcccatgagttagtgattttccaactgaggtccctgtttagatatgcttcttttttcaaactgttgaatggaatggcatgcacagtattgtctaaaggcgtgacttcaataattttcttaacacattttgtgttaattgttctgcatatgcaatgcatgactcctgcaattttatgaacacatttttgtgttaattattgtgcatatgctattaatatattacattaatattgtgattattggtattgctgcaatagatgcaattgcagcattccgtggactgtccttgctatgttgagaccaccttttgttcaaactttcagtttaacttgctaagtttttttatttggacatggaatttgtctgtcactgttacacttgcagttcctgctaccaatgagtactattatgcttgccgtcaatattacctttctttgctatttttcacttctttctaccatggggttcgtctttagtgcactttttttggttatacttccatcaaattgttcttaccataagtctagacttagttttttttgtacttggtcataacacaaaaatgttcatgtgaccctgtcacagttgcgaagtgtgtagggatgtgagatttggggtcagggttggaacctccaattttgaggtgttgtggtggctagggtgtagatcgacactataatgaggggatagaacatgtgggtagctcttgaagactgacaaagataattgccttgcttccctatatttatagcccctagaggacttgttttaccaagcaaactacatgagttattatcgatttggaatctcctttcctaacaaataattatatttcctaaacaaggagtccttatcgatttagactctcctttcctcacaaacaactctatttcctaattagatactatttacgtctattgtaatttgagcccaatacatgcatgacttgttttctagcgtgcataagatatacaggtcataacatctcttctcacttcttcaaacaacttgtcctcaagcttaacgtctcggtatcggtttgtgaaatcgtgcagtggctcccaagtagcgtcaatgctggtcaggccctgccactatacaagcacatgctagacaccacaacgtaattgggtgtgtaacacttggagcatgcaacaaccgaccatcctgaactggtggcatgtatggcgtagtcgtcggaggatcctcgtaggacggtttgaacagcttgatgtggaacatgccatggagatgggtgctggcttggaggtggaggcggtggtaggccacttgcccaattcgctccagtacttggaaggccctgcatagcaaggcccaagtttgccctttggttggggctctaatgaatgcatcaggcaatggagaaggtagagccacaccca

SEQ ID NO: 35975 - DNA, 459 bp, Zea Mays
caccaggtcccggatagcctagaagttgttgaagtgtggagaatgtactttgatggctcactgaagctgcaaggagcaggtgcagggattctctttatcgctcccggaggtgaacaactcaagtacgcactccagctgttatttccagcatcaaataatgcagcagagtatgaagcactggtccatgggctgagcatcgcggtatcactcggcatcaagaagctgatggtatatggcgacttgctagtggtcataagccagataaacaaagattgggactgctctaccgactcaatgggcaaatactgtgtagccgtgcgaaaactagaagacaagttcgaaggattggagttccatcacgtggaaagggatcacaatgaagcagcagatgcattgtcgaagttggggtccagtcgggcccaagctccacctagaatctttgtccaaggaatatcacag

SEQ ID NO: 35976 - DNA, 590 bp, Zea Mays
agccccttagggactcctcactcgaggaagacgtgatgaggaccttcttccctgactacacatcataccctccatcatatcctccgtcctatcctcctcctggaggatattgattcatgtatccttgtctctctctttcttcgtttttggtacttgttgccaaaaagggggagaaaatccaaaatttctagtcattctgtttgtggttctttcggttatgtatttcttttggattatttttgttttggccactgttgtggcttgtatcctcttatcattgtatgaaataaaactgctgggtttttattcaaagtgatatgatggtcttctggccatcatcttttgtcccatcagtttgtaatgattgctttgctatgaagtgaaaatgatgtgtatttagagatagtcatatgcatcacaactcctgttatgacactcttgcacccctcggatggttgtattcagtatggtttttgtcactatctctaaatgtgttgttcacatgacatattatgtcaaaacattggattcacaatcgtgcacacatttagggggagccatcttgaaagtagtctagagtgggggggggg

SEQ ID NO: 35977 - DNA, 618 bp, Zea Mays
aacatccatagaagcaatcgaagaggagccgagctcgggactctcgggggctggctcaccctcagaagcaccctcgggggctgggtcaccctcaacagcgccctcgggggctgaagtatcctcaatcgtacccacaggaatcaggtaacccttgcatgtaacatcaggaaccaaggtgtccacatggattaggccgccctcaaaggttgaagaagtatgggaaactgttcgggttatttcttgcccgacaaattttctagctaagggaatgtcatctggcacctctgcacggatgccaggactcccagtttcaggaagttataataaaagatcttctgggataatctcctccagtgcatgatcaatggcagacatcgctaacctctgaagattaaccagccctgacggagcctgaattttggacatcgttgttggtcttgctacggcgactcttgcgaactaaagggggaatttcctcttcatcctcttcatcctcgtcacacacacatccaccgattctagtgccaccatagctctcaatatcatcttcgaggttggcactcgccgggttagcaccgaggactagggcagcagagtcagcccctagctccaattcag

SEQ ID NO: 35978 - DNA, 329 bp, Zea Mays
cggtgatgctatctttaccattactagtgaacatctatgatctatgtcttagtcaaattgtgaaagacatcgtggtaggaactcttcctccctcaaagtgtgaactttcatagtttcatttatgcttacatgtactgcttgcactggtaaattgagatggcatggcttctaattaacttctgaacctgtgaacttccatagctccatttgtcctcgcatgttatcctacttctcgcgctggtaaattgaggtgttgaattttattacttgattacttatgagaacctgtaatcctgtatctccacagcaaacctgtaatcataaataat

SEQ ID NO: 35979 - DNA, 327 bp, Zea Mays
gttgctcgatattccatgcgttggcaagcgtcctgccttcctcgtcctttagattgtaggtgcctggtaggagtacctctctgatcataaatgacccctcccattgtcgggacatcttgtgcttgtccttattggtttggactcgtcaaagcacaaggtcccctacttctagagtcctcctccatatgtggcggttgtagttccttcgcaatgtctattggtaacttgccaaccgtaggagcaccacatcatgggccttgtcaagttggtccaacgcctctttgaggcttgactcgttgtcttcattcgcatacaaccttaccctcg

SEQ ID NO: 35980 - DNA, 424 bp, Zea Mays
tgtggtcgttaaaaatagaatccaacgttgccttcacgacgaccacactgattggcgccaatacctacctctccccgcgcgtaaacagaaaaagaattaacacgatctaaaacaaccccgcctgaatcaaagcaggggcagccacaacgtcttcctcctcccctctcgttccttgttaatagatcaatctgcgcagcacggacagccacatcgtcttcctcgtcccctctgtaattcctagccagccaccacgtcttcctcctaccctctataattcctaggtcaaagggagcaggggcagccatcccccatcccttcccttccaggtcgcaaccatcttcctcctcccctctatattttttaggtcaaacagagcaagggcaggcatcccccatcacgtcccttccaggtgagctcgttttcc

SEQ ID NO: 35981 - DNA, 404 bp, Zea Mays
cccgtgtcgaggaggactcccccttcttgtcatcctggcaggcctcccactgctcccgagtgagatgtagcatcctgccgatggtgataggcccagagagggcttgtggttcgtcgccatcgacgaccttgagacgatcaatcgcttcttcaatcgtcatcgtggagaggtttagcagagactcaattgagcgagcgatttgcttgtacttctcggggatgcaacggaagagcttcttgacggctctctcctcatcgtaggtgtcgtcgccgaactgcaccatcttctgcaacagagtgtttaggcgaatagcaaagtcatcaacatcctcacctggcttgaaggctaggttcttccactccttgcgaagtgcctgcagtgtggtcttgcgggcacggtcgctg

SEQ ID NO: 35982 - DNA, 465 bp, Zea Mays
agaaaaacacacctagtagaacggggagcaagcttatgcggcgcggtggcagagaggttcggatagcaagcacatccaaagactcgaagctgcgcatatgtgggaggtgtgttgtatagggcagcaaagggacaagaggcgtggacagttttagtgggaaggcaattgagaagataagtggttgtatgaagagcatctacccaatagcgaggaggcatggacgcctagagcagcaaggtgcggatcatattgttggtggtgcggagcatgcgttcggctttaccgttctgcgacgatgtataggggcaagacatacgaagtttcacaccattggtgagaaataaggtccgggtagaggagttgtcaaactcccgaccattatcacattggacttacttgatcgtgcgcccaaactgagtatgggcataagagaaaaaatgagagatggttgaaaaggtgtcagat

SEQ ID NO: 35983 - DNA, 462 bp, Zea Mays
cttttgcatgcgcctctaggtgttgctccctgctcaggtggagacccggtgctgccgtgtgtcctatggtgcgtgacgtaagccctaggcacgggggccacccgcgttcaatgcgggcatggcacacggttgttcacaccactcacaggtggtgcgcaccccgcttgaatgtgggcggtgtgtgcagtatgcaaggccagtattgcgttagtaacccgcgcgttactaaggcaaagaccattgacccactacgccgtgcgtgggtaactctcatcatgagttctactgttctcgctgcggtgccaggcgaagagacaggaggaggggacaggacgacaccgtccacctactcccctacgcaagatgacaggtcaggctacaccgcaacctacgccagatgtcttcacccacacgctgactggacgggacaaaggagagtcaggccagaggagccagcacggc

SEQ ID NO: 35984 - DNA, 503 bp, Zea Mays
aagaaacatggccttgatagggtttgcgcaactagacaccaaaccccattttttgatacaacaagtgcacaaggagacttgggttgatctagcggtcaagctatgagtgtctataagttgtgcaggtgcaatttcaagtgtaaaacacgcaagggctagaaaacaccaacaccatcatgatttttttaagaggtttcacttgctaaactcaaggttgtttggaatggggtctttttatgaacagaacagacaacatttttttgtaaaaaaggttgaacagttacaataccacctagatagcaagacaagacaaacacatagcacgaactaacaagacttaccaacctgacatggggtaaggcatttctaacatagcagtacatcacattattcacaagtttttattattggaataaaggtgagagaagcaggttggtgcacaagagacaattataatgcgacaatcatgatgcatgctcattctagtcgtcttctcagaccta

SEQ ID NO: 35985 - DNA, 519 bp, Zea Mays
ctggagaggctggtgaagctcgagtagaagctaatgcagccaagtcgccttagcgacgccgttggcgacgccacggtactcagcctctgcactagaccgagagaccgtcagctgtcgcttgctggaccaggagatgagacagtcaccgaggaacacgacgtaccctgacgtggagcgatgagtgtccgggctctcgacccagtcgacatctgtgtagatagtcagcgagtgtggagaggaagcacgagctacgaacagctcgaggtcgacggtgccgtgcagatagcgaaggatgcgcttgacggcggtgagatgcggctcccgaggatcatgcatgtagaggcagacttgtactgcataagtgatgttcggacgggtgaatgtgagatattgcaagacaccgaccaagttgcggttcaacgtcgactctggaaccggtgagccatcggaggagagcttggcctgagtgttcaccggggtactgcaaggcttgcacgcagtcatgccagcgcgctccag

SEQ ID NO: 35986 - DNA, 539 bp, Zea Mays
ggcaggccgtccgctatgcgcccggatcttcccggtgtgtacggctttgggcgtgattggacttctcgtcgatgtggccgggtcatcgctagggcctcggtaagctttgttcttcctctctttggtattactgaagctagcaagttgccattaccagtcagtagaggcagggtagggcgtgagcgtgagatcttgacaccacgggtgggttccttgcggtggtctgcgccgctgtagatgcatctggcgaggaagataggggttgaagaaggcgccgtagtcggtgcgtgtggccgggggaagaagaaataaaggaaaccgttaattggtagatgaacgacccagatcagtagacgtattctctctgctagaaatgatcctggccgctaagtattgatcgggcggatgcgtgtggggcgctggtgtttaaaagatggaccgttgagattagatctaagggtagatggtggaatcggacttcataaaatataggctgtagatccttggtccgatggttcctatcacttactggtttgtcc

SEQ ID NO: 35987 - DNA, 284 bp, Zea Mays
gtggatctttatgtggtaggttacagggggaattatctattatggagaatgctagagaactaagttgatggctgatgaatgacctgtctttgatggggtgcccctaggccttatatccgaccgtggggcacttacatgcgtgtatgataacgatgtatgcctaagtaatagtgaaccgaccgaacttatcttcctacaatgttgccgacttattctcacttggttccgatgtccaaggtggtcacgcgggagaatcggatcagagctgtggataacgctcaaac

SEQ ID NO: 35988 - DNA, 553 bp, Zea Mays
gatgaagtctcatgccaagatgcaatctctactctaagcttggcttcacgctcaagccaagtggtcaatgaacaacggtacaacttatccttaatcacaaaaggttgttcaaagtcaaatgtaaagctttcagtgaacaataagaatttgtcaagatcgttattgtcttctatccaacaacaaagtcccgtgctggagaagccatacaaaacccaagttaataacattgcagtaaaagcaacaagatctctcaatgccaataagaggtcgaattctgattttggaattactacatttggtactagcattctatcaacatttaaaataataatcattttggtgttattcagatctgaaacaagcacacattcagcaaaaaagactgtaaacttagtctctgcttcgattaatttgaaacactctggtgctaagtctattctaagggaaaggtaacacactattaattaagtaatggttattttaatgcttttcacagtaccactaaaattgacattttattgaccaggaacttctttattccaactactaattc

SEQ ID NO: 35989 - DNA, 292 bp, Zea Mays
aagtcggcgacgacttaagacggtgcgacatgctcgcgcttactcgacttagggtgaccactataccctactaacagagcaatcggcttaagtcggcgacgacttaagatggtgagacatgctcgcgcttactcgacttagggtgaccactataccctactaacggagcaatcggcttaagtcggcaatgacttaagacggtgcaacatgctcatgtctactcatcttagagcaaccactatgccttaccaaccaagcgattgacataagtcaggaaaaaaactccaaaacc

SEQ ID NO: 35990 - DNA, 312 bp, Zea Mays
ctttggtgatgccatcagtgccgattaggtgtttgatgaattgccttaaggtattgtcagccgtaacctgtaacctcatgagtcatgagcatgtgctaaccccggtccatcctgcccgatttgtccctctgcacctgaatgagtacaccgagagaaggtgcctccaaacttactaatcgattagtatgtcttcattgttctactattgtctactgtattcttgtgcgttgagatgttaggtttttgttactcagttgtggggtttcattattcttgtgcattgagaatgctggtggcctcatgctcatgtgg

SEQ ID NO: 35991 - DNA, 284 bp, Zea Mays
ggagaatacagtaacctgtagtagaacaacggtcaacaggatcacttgcccaagtggcatctgaatacgcatgaagctgaagtgggctatcggaagcatagagtaaacatctggatcttgtcccacgtaaatatcgaagcacacgaagcaaatgcccataatgaactgaagtaggggttgatacaaattggctcaacatatgaacagcatgagcaatatcaggtctggtgatggtgagataaacaagactacccacaatatgacgataccgagttggatctgct

SEQ ID NO: 35992 - DNA, 284 bp, Zea Mays
aatttcatcgagattcatcctcgtttgcgagaggcgaggttttggccacacttcaaggattgcataggcgcaattgatggtagtcactttccagcggcagtcccggcctcagagcaagcgaaatatattggtcggcacggttacgcgtcgcagaatgtcatggtcgtttgtgacttcgatatgaggttcacatttgttgtcacaggatggccaggttccgttcatgacacaagagttttacaagatactttaataacttatgcggacaggttcccccatccacc

SEQ ID NO: 35993 - DNA, 436 bp, Zea Mays
ttctagggtttatgtgccactcaaactctccaagtttagtctcttatgaacatctccactaacctttgagataatactcaatttgttatcacacacacccacatacctctatcccttggttaagtaccctatcctagggttaaagatcccttcaagtcatcacatcacaacttgtttttaagttttagcctagtggatgcactctaggtgtaacatacataatgaaatgccaatgcatatgatgccatgcccaagttttagttcttgtaacaccaggggtgttacaacgatgaagggcccttcccatttgggttcgagcttgccccaagattctgttatggtagttctggtgaggactaagtctccatcctggaattctctagggatgatagtgttgtcgcgccatgccttcgtctatgcttgttttttgtttagt

SEQ ID NO: 35994 - DNA, 294 bp, Zea Mays
aagcctcgattttgcatttctttctacatttctttcgaatagtctttatacatctctcgattggatagcaccaacatccctgcacgggctcccccattcgtgcctcataggggagatgaagaatcaaatggtgcattggattgaagaagctgggtggaaatatcttctcaatcttacacagtaacatgggtgccaatctttccaagtctgcaaccatggtccgagataactcttttgcacaaagctgacggaagaaatagctcaactctgaaagcgctagccagacatgcttag

SEQ ID NO: 35995 - DNA, 459 bp, Zea Mays
gtttttctccgcgccgcgactcggaggaagacgatggcctgttgcccgttggatccgacgttgacgatcgagatcatatgataggatacccttcacgtgattagattgtggtcgtaggattcatggcgaacgatcatgattagatcacggcgtactgattcactctgtgggatcttgagtgttgatgcggtaacggacgatttaggtttggacggtgggggcgagttacccgttttataacacagtgatctaatctggtgcgtcggttttagatccgacggcactgaacgactgataccccttcggccggttgagttagcgattaggcccctctggttgtaggaaataaacccgccgtccactgtgactgttgattgagtctcggaatacttacgagtaagcccctatactctctggttattatgcgcccagtccaggaaactagaaaaccaaggaaaa

SEQ ID NO: 35996 - DNA, 328 bp, Zea Mays
cggcgtccacaccacgcccctgcaagtgatcgagcatttcctcccccggccgggacggggctcatccacgctcggggacgggatggatgtcttcttcctctaaccgtacccacggcctcttgccagagaatcatcccatatcttcgtcccgtccgtccatatgcatgatccatcgtctcctaggctagggccggtgatgtttacacgagaggagggggagaggaattctagccagctgcgcatgtgatcgttgtcatgccaaccgtaccgcaagattctccgtccagccgccagaaccaagaaacccttttaaagccaagggagctcc

SEQ ID NO: 35997 - DNA, 894 bp, Zea Mays
tgtgtaaaccaaacattagaaatgtgttaatgatgtaaaggtaaataacgaatgtgcagatcgaatattatacccatatggccttctaggcttggttgtgtaggctcaattaatacagtatcataatctctcaattcaggttcatgggtaggtgtgtcatgaacaatatgttgttgtgtctggattgataatggagcacctgatagagtatctggcatcgtagaaagccatggtaagccttaagaggagacacatttattttttgaatgattcacttgtactcaccagttatcgtgtcgtcttgtacacattgtctcaactttttgtattcacgtcgcttatgcagtagaatttctctatctgcatcatccatattgatgtacctcgctcggttcattatgaggttgcccatggtagatgcagtaattgctgaagacaaaaggaaatcaaattaataaattatgtaaatagtaattacaacaacgaatacctaccggattgattataggttgaaggttgagaaatggttgaaaatggttccactgatgttggcagttggtgtaaagagcccctcgcaacaacaggtgttaccggctctgccacctttgtgttggtttgtattacgatcgaagatccagtagcataagcctgcgtctgtctgggcgagtatagtactacaacaggaagaatgagtattagtaactaaaaaataggacaatgttaattatgggcaggaagtacctgtgtcagccttcttcatcgctcggtaatcacacattcttttatttctcgcctccctttcttcgttggtttcttcagcctttcttcttgcacggtattctcgttgttttctattcctctcctcccgatgacgctcatgttcatcggacggac

SEQ ID NO: 35998 - DNA, 527 bp, Zea Mays
ggtgtgctgaaatttctgtgctgaaaacttgtttgaaaccttagctgctttctgtgctgcatttttttttgccgattcttgtgcttctctgtactgtgcgctagaaagcacaaaatattttggacgtgtgcattttttttgtcagtttgtgctttatcagtttattcccggaagcagtacagagaatgccagtctgaatgctttatcagtttatctgaaccaaggttggagcagttttggacgtgtgcagtcaaacaaggcgccaacttcgttcgtgtacagttaacgccgttaagagcaaagggtaaaattgtcagataaagcgttaaggctagcatccaggttggtgaagacgataaaatggtattttgcctatgaaacgttgtttgaaaatggtgtactggcgaaacccattgccatgatggcattcaggagaagcccgcctttgataatggcgaacgggcaaataactcgtagtaaaccgcaatcaccggaccagcaacacgtccaggattcatagacgaacg

SEQ ID NO: 35999 - DNA, 568 bp, Zea Mays
gaaaagagtgcgggcctagttgacattgtttgagagttacaaagcgttcaggccttgggactagacgaagaatttgtgcaggttgtctatgttccacgaatgctctaagacttcgttagatggtgaggtgagcctataagcattcggcgatgttttggtcttgacgatgtagcccccccacttgtgttcaagcttgctccgagactctattatgatggttcttgtgagtactaagtctccttctttgaactctcttgggatgacggtgttgtcgcgtcatgccttagtctgtgcttgatatttgttcagtgcttccagagcgaggacacagtctccatcgataaggtctttggaggttagttcgtctacgtcaagggtggttgttgggcttgttcgtggggatccgtgctttagctcttgcggcgtcattgcgttgcatccgtacatcaagcggaaaggtgtgaacctagtcgatctacattctgttgtgttcaatgcccatatgacttcaggtagttggtccgcccatttgccctttttgtcatcaagtagccttttcttgatggcg

SEQ ID NO: 36000 - DNA, 311 bp, Zea Mays
ttcggcatcactttcaatcgtcacctttggtcttcgaaggccgaagcgagaccagatggggcgctggatgatttccttaatgtcctctttctcaatcagatcattcttgacataaaaccattcctccatccaagctccaggccatatttttcgaaatgttggaaccgggtgacttgcattaggacgagcaataaatccataacaaccgaagttgttgtgatactgttctttgccagtagccttcgtctcatacaataactcgtgcatactgcaaaaacattttgtgctcagctccagcccttggcttctta

SEQ ID NO: 36001 - DNA, 421 bp, Zea Mays
gagaaaccgtagtttgtcgtttggaggaccatgagactaagttgtcgccgaggaagacacagtaccctgaagtggagcgccgagagtctggacagcccacccaatcagcgtcggagtaggcagacaaacccgtaatgctgtcggtgccgatgtcaagtccagtggagagggtaccctcgacataccgcaggacccgcttgagcagtgccagatgaggctcgcgcgggtcgtgcatgaagaggcacacctgctgaatggcataggcgaggtctggccgagtcagcgtgagatactgtagagctccggcgaggctgcggtattgggtggcatcggccaccggggtgccatccgtagcggacagcttggcttgagtgtcaacaggagtcgtcgtagggtgacactcagccatgccggcgcgttg

SEQ ID NO: 36002 - DNA, 312 bp, Zea Mays
caacacaacgcaagagagaagatcacaagagcgcaatcacacgaaatcacaagaacaacctagaacggcgctcggatcttactagaatcactagaatgcgttgtggcagagtaccggagtgaagtattgctcttggcagtgcttggggtgctaaaggagtgcgccatggggccctttttatagccaaaggcaaccccatagttgttgctccttccatctaaaagatgccaaaaatctgctgtctgcgggggcacctgatcgatccgggtccatgtgcaccatctccgagatctgacagcctccttccttctg

SEQ ID NO: 36003 - DNA, 407 bp, Zea Mays
gctggcgataactagcgctggggggccacacgcgagaaccaggagaagctccagcccattcttcgtgccctacagaagctccaagccgaaggccttactgccatgggggtcgtcgccgctatccaccgccggagggtgctcccattggtagagcgacggttgcggctttcggaaatgaagccgggggtcgatttggagggttcacggatgtcatcgacccccctctccatcgacgacctcctcagacgggtagcgggcacggtagggaggctggacgctggcgtccttaaccagcccctgatgcgtcccgaccacgggtatgtgtccttggtaagtgttcgacctttttctattttgtgtcgtgtttcttatgtttttagcccttacccttgggatttttgttcgtc

SEQ ID NO: 36004 - DNA, 349 bp, Zea Mays
gtgggggacgattggaggcgagggctagttcactgggtgtgcaacttcttagcggagctcactggggcggcaatttataggttccatcggcggtggcggctaaatttgaagaagacgcgtggcggccagagagagaggaggttactagcgcaagggattcgtggctttcaccatggcatggtcaccggcgatgaacggacacgcttcagtggtttactacgacgtggtaacaccctaaggcacatggcgcatggtcggtagacggccaacgccggcgaggaccattttggccgaccgcagcccaagtgggtatggcgaactcaccttcgaccgggtccgagcctatccg

SEQ ID NO: 36005 - DNA, 607 bp, Zea Mays
cttggctctgtagtgaactgaacaagttctgagcagtccaaaaacctggaaatatctccatccactaactaatctaggaagtgctgggtgtgtggcatgcaaaggggctggtgtagaagagggtgtcacctgccattgcttcacaccacttgggatgaacttgaggaggtgtaaaagtccatttcctagctgactcagctagttagctgctgccttgatgtccaacatgcagcaagggagcttcaacttttttcctttgtgtctttcttggcgtggtggacatgcagagagtatgtggagcaccccggccgttgtttgtctctgtgttaaccccagtaaaaaccccaacagccccaaccattgtgactccttgccattgtaacttaagacaccaacccgagctccctaggcctttgttaattttctactctcaccgtgccatgcccttcacgtacgtctaggtcaggtcctcaagccctctccacccctctaattccctgtgaaagcttgaacacaaagtgagccctggcagtggtgaccacatcaacaaatccctcgactcatcgtggccagcttcccctggaaggtaatatgctcggtttgttca

SEQ ID NO: 36006 - DNA, 305 bp, Zea Mays
cgaactttttgttattggtgagtttttgtctttgccgatctttcttgtcgtttcgttagaagcgttggaattcgaggtcgaattccttttaagtgggggtagagtgtgatacccaaattttatgaaaaagaagttaaatttcttttccctcttctttcgtgctctgtgcctctggagtttggagttctgggaggtgaatacctcaattgaacggtagttttttggcattattcgctggggccaggagctcaaaggggagcatgggttgtgagccatcgatttctcatcgagtggatgggatgccc

SEQ ID NO: 36007 - DNA, 494 bp, Zea Mays
atcaatatgcatgggactataatgctgaagccaatccatgcccaccactaaatccactgagggaagaggtaaaaatacgaagtctgaaatgaactagaaagtagccatagaccaagtggcatgtggtagatgttgagaacaagtaatgagttgtccattagccactctgaccgccattggacgttgcaatgggtgtctgcccgtcaacaatgacaaaaatcggtcgctaataaatgaatgggtcgacccagaatcaataagtatcatcaaaggctgctgttgaatagtgccctgaaaacgcaatgtggagactgcatctttccctgtccacgctgcatcagacagtgtcatcagcaattgaggttgactgtcttgcacggcttcactgtcctctggctcatccagcaaatcccaaacctcctcaataacttgtagttgcacagtattggggcatttgtgtcctctgaaccacttttctgcacagcgatcacaga

SEQ ID NO: 36008 - DNA, 559 bp, Zea Mays
agaaggccgatgaaaataataaaatttcttgcaggaaaatagtggccgagaagacttctgatgagtgggagactctgaaaattaccatcactacctccaacactggggggcaggtgcagccaggaaaccaggcgctagcgcctgttctgcgcatcgcggatggtccgacgcacagatgcggacggatcgggacaccaccagacagtccggatcattccagcggacggtccgacaacgcccaggaaccacgacaaccatgcaccttcaaaccacgacgaccggaaataggtacatggaaaactgacacattaaagtcagttggctggctggtcagatctggcccaaccttcgatcaattattgtctaaatatgtaaaaaagaaggcagtcccaagtgaccgccagtgaagcgatctcgctcacccactcagaagcgacagcagataagaccgattggaccacctcaccaattggaaaagacggaaggtcatactgtccagttgagacttaacgtgcctgcatggacacctccactcacatatctacctatgccatatcca

SEQ ID NO: 36009 - DNA, 1095 bp, Zea Mays
ggacgtccggttcggcgcgcaggtgcacgcgctggccgtggccacgaggctcgtccacgatgtcttcgtcgccaacgcgcttgtggccgtgtacggcgggttcggcatggtggacgaggccaggaggatgttcgacgagtatgtaggcgttggaggggagaggaatgccgtttcgtggaacaccatgatatcggcgtacgtcaagaacgaccagagcggggatgccatcggggtgttccgcgaaatggtgtggagcggggagcggccgaatgagttcgggttctcgtgcgtggtgaacgcgtgcacgggatcgagggatttggaggctgggaggcaggtgcacggtgcagtggtgaggacgggatatgaaaaggatgtgttcacagcaaatgcgctggtcgacatgtactcaaagctgggagacattgaaatggcagcaacggttttcgagaagatgcctgcggcggacgtcgtctcatggaatgctttcatttctggctgtgtaacccatgggcatgatcaccgtgcactggagctgctactacagatgaagtcttcaggattggtgcccaatgtgttcaccttatctagtgttctgaaggcttgtgctggtgctggtgcattcaatttgggccggcaaatccatgggtttatggtcaaggccgttgcagattttgatgagtttgtcgctgttggccttgtcgacatgtacgcaaagcatgggttcttggatgacgcaaggaaggtgtttgatttcatgccccgaagggatctgattttgtggaatgcactgatctcaggctgctctcatgacggacggcatggtgaggtgctgtcactctttcacaggatgaggaaggaggggcttgaccttgatgtcaataggacgacactagcttctgttctcaagtcaacggcgagctcggaagcaatctgtcacacaagacaggttcatgctcttgcagagaagatagggctcctatctgactctcatgtcatcaatgggcttattgattcatactggaagtgtggtcagctagattatgcgattaaggttttcaaagaaagccgttctgatgacattatatcttctac

SEQ ID NO: 36010 - DNA, 310 bp, Zea Mays
ctggccctgagtggccatgtgcggagtgaactccgcgaggctgtccataccggggtgaagcgggcattagccgtcgttgcatcccactacaagattgacctcgagtgggtgtgcgaaggttatatctttcccgacgaggatgaccttgccgaggcggatgtccagaggctttctgacgtcatcaaacggccgggctcggcattggcttgccacttcgaggaagagatggttccactagtctccccacccgaagttggttcttactcggtcgtgacacctccaaatgacatcgacggtgatgcctcccctc

SEQ ID NO: 36011 - DNA, 354 bp, Zea Mays
gtgaggtgggaagacacgtgaggaccattggatgtgttagtgacgatccagattagatcgggcgtaccgttttgacacgttagatccaaaccgtagagctataatctaatgggtgagaatcgacctcggctatttagaatttggaccgtagatctctgatccagtggcctgcgcggcataccgcttcgcccatttggtgatctaatctgtaccatccatcgtggatcggacggtgcagatccactgaaacccgtcagccgcgtcagttttgcacatgagtccttcagttatttaagaatcaacccgccatccacaggaactattcactgtgtctggggaattcttacccgagac

SEQ ID NO: 36012 - DNA, 441 bp, Zea Mays
ggcatcactgcgcgccattgaaccgcacacttcactagcgacatcgttggtcgtgttcacttcaccggtggtgagactccttttcacgctccgttttattcgtttctttggttgtgcgcggggcgacgatctgtgcactgtcggggagaggggctggccgctgcgagaggtgcgcagcctgggaggcttgaggttgaagaaggatggcgagtcgttgatcttttaagcaacgattgcgattagatagagcgatatcccttcgatggattggaactgggccataagtgcagatcggacggccttgtgcgctcgcgggttcataatggacgagattcgatcctggctctcggatctgatctaaacggtctgaatcttcccataccccttcgcccgagaacacttgcaaaagaacccctctgttttagagtaatcaacccgcag

SEQ ID NO: 36013 - DNA, 438 bp, Zea Mays
ggccactagatcgcttggattcatggggtgagtgtggagactacgcacgtcccctatcctctgatcggtgatcgtattgtcggtctttaggaggcgagagagcaacacatcgcctcaatcgtcatggggctgggctgctggtggaagctaccgctgactcggtcctcgttgcacagctgcgagctggtgctccgtggtcccaaccatactcctctcgatgccttatctcgttctcatgtcggcgatcgcatgaagcgctgatgttgcttcgcatgtctcaccgtctgttgatggcgtgacgtaggtcagtcaatgggtgggcgagaggtagaaggtgattttccgcctgggtgagcacttgtcgatagcccttcgcgtctagggtgcgtggcaggccattggcaatctacaccaggaccactcctacctcgcttgatg

SEQ ID NO: 36014 - DNA, 293 bp, Zea Mays
cgaaatttggtgaggagacatcttccaccgccgaggcggaaccggctgctcccgatgctcggattgctgaagaatcgactgtagtgccgaaggtgtctatagtcgagccagtcgaagccgaagacgagacaaccagaaaaccaggattagaaaaggcaacaaatctgccataaattctaagccaaccagtagaagcggagctgccgaaggttgcaaaagctcccaccaccactcccaagaggagaagaatggctagcatgctagacgccgttgtggaaacaacaagagcgctg

SEQ ID NO: 36015 - DNA, 424 bp, Zea Mays
cggtggtctaactttgagaatattgctgctcctcccaattcgtcaacaatctcatcaaatataggcattgggtagcggttcttcacagtgtgagcatttagccttctgtaatccacacaaaggcgccattcaccatcttttttctttaccagcagaatgggagaagcaaaggggcttgagctctgttgaataataccattgtccagcatctcgcgaatttgtctctcaatttcgtctttttgttgaggagtataccgatagggtctcagtctgaaaggtgatgcccctggtattaggtcgatagcatgatccacagctcttttaggtggtagacagttcggtttggtgaacagatgttggtactgttctagcaactgttgtatggacaagggaatgggatcagacaggttactgtccactgctt

SEQ ID NO: 36016 - DNA, 360 bp, Zea Mays
gatccgtgtccgccgaagatgacgttgacctccctgtcaacgcgcgggaaggctcctcctcctccctcctcctgctgttggggttgttgtggttcttcttgtcctccccgcggtggaggaggtagaggttggaagggtcggccgtgtccgacggtgtgcttgaagtccctgcagttccaaaggtgtggcgcatgtacttgtggtacgggcactgggcatcgaggatgtcgtccagcgtgcgctcgcctccgcgaggtcctccccgggtgcgagaggcaggcggtccggcggcgtgcacttcttcgcgaggtctcttctcccagcgtttgtcgggttgctggttcgcgtcgcgtcgtggtg

SEQ ID NO: 36017 - DNA, 380 bp, Zea Mays
atcgatcaccaacgaagctattcggtggtagtctaggccctggcggagctgcagaagggattaatcgagaggagagtcgctatagtgctgggaattgctcatcagagcgggttctccatcgccggtccgccatctacgtggccagcctcgccgtcatcttcaccgtcggtaagaaacccactcgcacgttcgttgttggctgcacaacgtgtagcatcgctttgatttgtgatggctcatcggctcggctggatggccctgcgctgccgtattgtaccctggcggggtagggagaagctgggggccgtcgatcatcatagggacggcgcaaattagagccttgtataccggttcagatgggtgaatccggtgcattgatg

SEQ ID NO: 36018 - DNA, 852 bp, Zea Mays
attgattatgtgcatgaattgagtatgaggtaaatcaatgagcttaatttgcgtttagtattcaaggtcgtaatatgataccaatacaacttgtgtccccatttttacaggtgccctggccaaagcgagtgttctactgtacccaaaaactttaggtagttgtgttgtctttagtggttcagttcctctaagtaaatcattcgctcaaaaggtgtcatctgaagctagaaaggtgataacccaaagatatatgtgcttatgtttagaacttgatcttcttactcttatataacctaagtatgaactcttatttcagaccggtattatggtttactcttatataacctaagttcatatgtcctaccaaagcgaaaatagtttatgaagcataatagttttgccaatactaaattcttgagtggtatatgtgaaagtactatagctaagaccgatcagtatttatttaattatttatgatgagatgttaatgtctaatgtagtaatgtgaccacgcagatcgtagttgatgtatagggtgtgtttattggttcatcatttgaaatataagcttcatacttctaacaactattagcatagcatattttttaaaccttgattccacaagttactgtgaaaagctgcagacctcctgaccttaactggatggagcgtagacactgaattttgatggcaatgatgcatgtctatattgtgagaatctgggcaccatttatttgttgtttatatgactttttgcaagcaccaatcacttcaatttaccttaccttagtttcctattatcttctgaacactgccatcttctcaataatcctctatgcttcatgactgtgg

SEQ ID NO: 36019 - DNA, 439 bp, Zea Mays
ccgaggtgaagtactagacataggaagcacaacaatatcataaagtttgtttctgagagatgctactcaaccaataatttcatgtggcaacaagttgctcctaggtcagcacaagcctactcgcacttcgtatgtcatgcttttgttagttgttacacatgattgggtgagcgtgctgcagggcatgttttatataccatgtcatgcatcatcataatatttgtgggactctcactatctttctttgcactcctgctcttcatagggctagccattcctcttatcatctatcctctttctgacaacaatgttttttcttggtggctccctcaatgcttgaaccaagaaaacaaggctaagtttcatgctatggcatgtgtgactgctagaattagacgtacaatcctactaggccttgtaattgtagttttttctcgaa

SEQ ID NO: 36020 - DNA, 384 bp, Zea Mays
tgaataggtgttgatgagtttgtaaattttgtctgtgtgatgctgaaccttggttgctgcgcaggttctggggtttgggcctgcgcacgcaaccactactgacaatgttatttttgtggcggcttcgaccgtggctgctgatgacgattcatttgtctctgtgtctaagtgttttgagtctgatgattctgggagttcgattgcatggacggaggagtcttcggatgaggacttggattattttgcggcgttggatgtggctgcagcggagacttcgccgcgtgtggtgggtgctgaggatctttcgggtgcgagtactgggtgtaggtggcgaagggcggtggcgaaacagagagtgagtggattgtcgcgaagcggtgggcg

SEQ ID NO: 36021 - DNA, 396 bp, Zea Mays
cggggtgcatggagaatttggaaaggtgagcttcatccaatattttctttctgagctcagggttcttaggaacaaccaatcggtctacaaaccatagaattcccttgctgtcctaacggaagcatttgtacttgtccaccttctgtccgatcatttccttaataacttgaacacccttgtcaccgatccgtgccatgactatttgctcatgtaaagtgggctccactgaaatataactcaaggcacctaaggaaacaacttctatgttcagcttgcacaactcgtcacacagggtggcaatcttggaatctatactcacacagttacactgggccttccggcttaaggcatctgccacaacattggccttgccaggagggtaatgcacttccaaat

SEQ ID NO: 36022 - DNA, 298 bp, Zea Mays
tagaacaaacaatcaaggcactggaactgacctggagcaagctgtccacgacgagggtaatcgcgcggtgtttttgagcagattggaggaagtgtgaaattggagctctcgggtacaccattggaggcaatactttgtggctgggtgtgtgattatcctacggacctaacggcgcggtcaatttataggaagcaagagcggcggccgggaatttggatgacgacgcgcgacgaccggagaaggagaggagcactggtgcaagcgcttagtggttttcactgtggcgctccctccggcg

SEQ ID NO: 36023 - DNA, 540 bp, Zea Mays
cggaggtcggagccaaggcgtctgtccaaatcttagcttagaactctagtcccatagtctttaggtccacccacgcatagagacttgggagattattcctctctcgtccgcttgtaacacatactacgagcattgagcaacaaaggtgccagtagcgtgagccaccgaagactggatgttgggactttctggccaaaccagtataaatcttacgcccaccgagcacaccatacgaaccgtggaacacgcacatacaaatttacttgttggagcgtaggttcgaaacaccgacagttggtgcactatgtaggggattgcgtgttcctgacgtcttttccaagctccggatggctgaccacgacgtagtttaggcccctggaacgaccattcatttttaaagcctcgacttcgtcgtcaacaacgagggaatgatgatcaggtcctcgaaagaccgatcaccctcgacgtatatcttgatcgacattgctaggggcctcggaggtctccagctcaactcccattagggaagcaacagacgac

SEQ ID NO: 36024 - DNA, 304 bp, Zea Mays
gcaaataacagagagacacaggggttattacgcaaaaattcatgagactcaggattcccacagacaggactgcgggttgatttcgacataaggcagggtctctttagctaaaagtcacggcgaaggggtatcgatagacttcggtcgtccgatcaaatatcgaaggccaggattagatcttggcacactgaaccggtacacaaccctgaccaccggatccgatttgaacgacacagattttattatgattccacccatcccagtcgctcgttcaacgatctgtggtcacgatccgatcacatga

SEQ ID NO: 36025 - DNA, 466 bp, Zea Mays
ctcctctagggtagcaggcacttttgatctaatacactgtgatgtatggacatcccctgtaatcagcatttctggctataagtattactatttgtgtacttttcccttacatcagaagttggacacctttcccaccctgtctcacttcttcgcttgggtctccactcagttcggtcaccccatccagagtatccagtgtgacaacgggtgtgagttctataacaatgcgtctcgtgactttttttctctcgcgacgtccacctccatatgtcgtgtccctacacgtctcctcagaatgatagggctgagcgcatgattcgcacagcaaacgatgtcatgcgctctctgctctttcagtcctcccttcctgctcactactgggctgaggccctcaccactgccacctacctccttaaccgtgtgcccaccaaggcggttgctcaccccactccttatttcgctctct

SEQ ID NO: 36026 - DNA, 647 bp, Zea Mays
caaatttcgcaacaaagatcttcccgtcttttcttccccatgtctgaaacaccgggtgttaacacggcaacccgttttctagccatctcagactgagcgcctctgctattattcataacctccctgtccactgcaccaagtgacgtagcgggcgcaagaaaacgtccaccacatccccgccaagcaccgcgaccacgtacctcccaactacctcgaccgcggaaagacccactgccaggaccggagggacgtccatgtacctgctgacgccgatgatccaccacacgccagccagcagcatcagaaccagcattagccataacgccaggccgacttgaggacgaaggaaaatccccaggaagaacgtctgtcctgagaacatcgacgtacgttctgggagcaggaaactgcggctggtagaagctgctcgaatgaatagtacacctaggttttacggtgctgtataatctctaacgaagagaatggaggcctgggtgacggctggcccaattagaaatggtcgaagcctgctcgcccaacgccagcggcggtagatggcccacagaaacacccgacacaggctccacccgatgagaaataggcttaggatgtccaaccgtattcccaggcgaaataagcggcatagg

SEQ ID NO: 36027 - DNA, 309 bp, Zea Mays
cgggatgcgcgcacgtcaccggtttgcggccggcacagacgcaaaccacccgattggttcgctgcacgcgagaggccaaagctttgcacgagcctggtcggggatacggatgctttgggtgtataggcagatgtaaagagagaaattgtcttaaaatggattgttttgtatttactcatggtctcatacagctcatatctccagacaacacgttcagataaaattaacatatacgctgaatcaggataaaatggtatatacaaccaatcagacagacagacaaccaattagacggatagcgaattcgtc

SEQ ID NO: 36028 - DNA, 1199 bp, Zea Mays
caatgaatcagagataaagggactaaccccaggcgccgtcagctcagcttccgaagcaatcgggagagcgaggctatcaactgggccgcccttaacagagtaccagaggtcattaactgacgtcacaaccgagataccctcattaaagcatgcatgcgggggcgccaaagcagcagacaaactgccaggacccgaagagccaatcattaatgaagcagatatcaagggtcccatcccaggcgccatcagctcagcgtccaaaacaattgggagagcgaggctatcaactgggccgcctttatcagcactaatagaaactcgcggaccaaggcgagacttaaccgaagcacgaacagtcaagtcatggaaaccgaaccgtctcttccgctgaacaatatctcgatcatcatcagactgatccggcaatggtggatgagaaaggattgtctcacgaaccagccgatcatccaaacatgaagccaaaacggagataggatataccagtgatcggggatacgacgaatccacctcaaaagccacaggtggttcctcaacatgcagatcaacaattgaaggcaataatgtcggtacagggcaccatgcacgaagcttgaaaatagccctgttgttgtcctcaaaagaacttggaaggatctcatgaatcatacaaagaccaaatagaagactctccactgtttcaatcctccaaagatgggcaggaattccatgaagctctaattccataagctgaggtaaggctccaccccctgaggccaaagcatgacgagaccagcgcttgatgttcagccggaggggggggacaaacagagaatgcccaccagaaagcacacgatccgctagctcgacacttgaaaagtgaacaatgaagttgtttgacgccaccatgcgtaagtcgagcgcatcagcctcaaggttgaaacttgagatgagcgcatccaagacatccgtcgcgcagaaagagccctctaaagcaataaccgagacaagtaaagcacgccgaagctcttcttcagcctgagaaatgctcctggagcgcttgatgaaacacacctgacggacggaggcagtggcaggagcagggacaggcggcgatgaggaagaggtgggaggatcatcatgaccactgcccctccgagaactcctcttcctcggaccacgacgagtacgcctccttcctc

SEQ ID NO: 36029 - DNA, 311 bp, Zea Mays
tggccctcgatcagtgcgaagtcccggcttcgatgtttgaggcgcttggcctcgttgatgtcggttgggtgatagtacccctgtaggaacagagttattggtgcccgccagtcttcggtcatgataagattgactatgcggtggccctcgctgtcattggttatttggagcccttcggggctccggacggctggtgtgccgatgatatggaagaacacgtcggagggcagggactcgcctctggcggcagccttggccagtgcgtcggcctcttcattcttggcccggtccacatgctgcaaggtgaatcc

SEQ ID NO: 36030 - DNA, 381 bp, Zea Mays
tggattggggtgggcctctagtatttaaaatgtggagcgttggatggtgatccgacggcctagatgcagtaccggttcgaaattaatctggaccttatccgcaccgttcacttgcaatcgtgcggcccagatatcgcgataccccttcggccatgcctatttgcgtaagagccctcctggaattttggatctaacccgccgtccacattcattattcactgagtcttagagaacttcggtttaggcccctgacttttccagtatttgacgcccagtccagataattaataaaacagggaaaatcatttagaaaatagtttttagtacatatttaaatgcagattcttgtttaatttgtagaaaattcatataatgtccaaa

SEQ ID NO: 36031 - DNA, 638 bp, Zea Mays
gcaattcaaaggcaactaatttcataaataggggtaatatatcagataatgttgacatcccaacggcacaataatccaccaaacatgagaaacaaatttacaagtaaatggttattacatatgctagcagaagaaaactaaaaaaatagatcctgcagatgtcagtggaggtctaacaatttgtccccctacaggccatgacataagtaagaataattcatttcaaattcttgcgttgggtttttcaactttcattttttttatggaatctaaaagagatgatgactgttctttgcttgatgatgattttgcaaaagggttaactggcctctgaggctctgctcgattgcaatatttagtgctctctttttttgcaccagtatgatcaatgcctccttcctgattctgattttcactgtttttaggtaccttggcaaatggaacagaggcagatgaatctttttgagttctatccttaatttcaatccctcgttctcctgctggcttctttggttcagttgaattgcattgttgattgacaatattgagtttgggtaatgaagattcaagcgaacggttcccatcttgcataaacatagaaggtagagttgcctgagtggtcagcactggtgtgttcg

SEQ ID NO: 36032 - DNA, 390 bp, Zea Mays
gcatcgggcgacggtgatgaattcggccgaggggtgctggcggccggagaggggaggcgagctctgtgcgggggaaacgtggctttcatcgtggcaatggctccggtgatcgccggacatgcatccggtgagtcaccgcgatgaagtcccgcgctgaggcacgtggcgtgcaacggcgacagctcgacggtggcgaggctatccgttcgaccgatgagctggggaggaagtacgacgggcttagccgccacgaggctcaactcaatccgggcgccagatatttaccagcgcgagcttatctgctgcccacggtgcacgaatcgtggcgatccgtcaacaaccccggcgaaaagtcaccggcgacgagcaggggggtgaatcgtgatcttc

SEQ ID NO: 36033 - DNA, 451 bp, Zea Mays
ctattcttaatttacttgcatcacaacggaaatgtagtttgttcaaagttctctctggttgtgacctgttctgccgagacgagaatgtggttgaatataatcagaacagttctgcaagcatacaaatttgtgcactcgtagattgcaatggctctccaatggaagtagcacttggtgtcgccaaactggttgctgaaggttttaccacatttaaactgaaggtaactatttaacttgttccataatcataagacatggaagttaatgcttttataggatttttttgctaatccaaggtataacattatatcttttccactttcgcattggaaggttgggcgccgtgaaagccccattgaggatgcaactgttcttcataaaataagagaagttgtggggtaccagatcaatatccgtgttgatgcaaatcagaaatggacatatgaacagg

SEQ ID NO: 36034 - DNA, 525 bp, Zea Mays
gtactatttactcatactcgagatttctctcattatttgcggacttttcctcttcatcagaaatcggacacttttcccaccctgtctcacttcttcgcttgggtctccactcagttcggtagcaccatccggagcatccagtgtgacaacggccgtgagttctatatcaatgtgtcccgtgatttcttcctctctcgcggcgtccacctctgtatgtcgtgtccctacacatctcctcagaatggtagggctgagcgcatgattcgcacagcgaacgatgtcacgcactccctgctctttcaggcttcccttcctcctcactactaggctaaggccctcaccactgccacctaccttctcaaccgcctgccaaccaaggcggtgcccaccccactccttacttcgctctttttggcatccacccctcatatgatcatcttcgtgtcttcgggtgcgcttgttaccctaatctcgcttccactgcccctcataaattagcgccccgctccactcgctgtgttttcc

SEQ ID NO: 36035 - DNA, 272 bp, Zea Mays
aagtggtagtgtgcgtccctgcataagggatgtctccctcttccttttagggctactttgggaatctcgaattctcttcgggattgaagaggattaaggtgtaaactaatttccttttcaatcatcttcaattctgaaggggtttgagtttacaaactagctcttagagttggtttgatgaccaggaaaataaaggggatacatggagaaggaatcacctctatttttcgggtcaccaaatcagcccttatagaccaagggaaagaggggtt

SEQ ID NO: 36036 - DNA, 293 bp, Zea Mays
aatgttcgagacagggcacttccccaacctgctgcaagacatgttgcatgcgttgggaacctacgtccgacccttgtatgagacaaggcgagtgtgcgagcctccccgagcttgctactacatcactcgcattcacgtcagggtgatggatgcaggggataggggttcagagctatatcagctcatgagtccctgacaccgctatccaccgacgctacttcggtcagcgatgctgccagacagactcgttggtctctcagccacacctaccggcagcagctgcatgacacgaa

SEQ ID NO: 36037 - DNA, 417 bp, Zea Mays
atcactttggactgctggctaaaccactgactgccctcctcaagaagcattctgactttgtatggacgctagtgcaacagacatcgtttgaagccctcaagcaagcattgttgtcagctctagttttggcgttgccagattttactagacccttttctattgaaaccgatgcatcaagcacaggaatcggggttgtcctgcagcaagatgatcatcccttagcctttgtgaggaaagctcttggacctgggaatttgggactctccacctacgagaaatgtacctcacaattttactcgctgttgattaatggcgtacttacttgcaacattcagaattcgttatctatacagatcaccgtagtatatctcaccttactgagcaacgactacataccccatggcagcacaaagtttt

SEQ ID NO: 36038 - DNA, 308 bp, Zea Mays
ccctgccatacactagggtagtatttcttcagatatttaccattgaggccttgggtaatctccttccttgcaagtcctcaacgaaatatgcattcccatgcacaatacctacaaccttgaatggtccttcccaattcggcgaccatttgtcgaatttattatttttgactcccacgggtaaaatcgttttccataccaactctccaatctgaaatgatttctccttcacctttttattataagctctcgccactctcagcttttctttctctatttcacttaaggctgttaatcgactttcattattc

SEQ ID NO: 36039 - DNA, 282 bp, Zea Mays
atgtgatgtttatgaactctacttgagtgcatgtgatgtttatatttgatctcgttgacatgttctgaattacaatacgctgctgccaatttgtataattgtaatcaattttctggtcaatttgctagtgatgcatgacagggtaaatattcaggagatatcatactagctgctggctactccttggctaccagtttcttgtagcaggggagggtatccttggctgttggctgccaaagagcaataggggaggacagccccatcggacggtgctcacccagg

SEQ ID NO: 36040 - DNA, 673 bp, Zea Mays
aaacggctccctagccgcgttcgccatggggctgcacgaggaagaagatcgtcgaggggaggggaggaaagaagtgacatgaggaggggaggagggctcacctgcacacgaaggattcctggtgacggcgggctctggctgctgcgtggggagggacagaggagggcgccggcacttatgcgcatgcacacatggacgttagttccattttatgcgcacgcacgacacaaaggtgcgggcggggtcaagaggagaggcggttttgggaaggatgattatgacgtgtggggccgatagatcagtgaaacggttgagcaagggggtatgcttgtgctgctgacgggcgggactcaagtcaggaacagtttcaggtgatttcgtgcgcgcgacatggcacacaaccgagctgaaccgggcgtgaggagttgtcgcgcgaggatgaaaagagaggtggttcgcgatgataaggtgtgtgtatatatatagaaagaagagggcgcgaaagtcagttgcacgatttcgccacggctcgtgatgggaggcaagacgaggagaggttgttgaggctttgtccaagtaagacgcgtgcacgcgaaatagacaacttttagagtagataaagctgacacttggggcctcaaatgaccgcgagaagaacgagtgagggggaagg

SEQ ID NO: 36041 - DNA, 345 bp, Zea Mays
cccgccacgttagctatttctcttcccatatatctccatattgtacaacgattccccataaatccttcccctatagcccactataatcataaaataatatttttcatacctattcaccatctattatcatttttttctaactaaaaaacacagccgcgcacagaaaccgagggcagggcgtccctccatatccagggggagagagacagttaccgcgggatatagggtggggaagaggtcactgttgtaggaaaagagatgctcctgtagccgctaaagtgagaggaggggatgcccggaggaactgctgaagccattctaagtgcacacattcatcctgtaata

SEQ ID NO: 36042 - DNA, 437 bp, Zea Mays
gggcaccccagccccgccacccggagcagcacccgcagggacagcgcccccgggcactcctccacctccagcaccctgagcagcacccgcaggggcaacagtaatagcttgcctcagaatggccaactcttgctgcatggcctgcattccggctaacattgccgccggactcatagaatccccactaggaacttgcgggctgccacgagccctacgaggcggcataactacagccacaggagtaagtaaataagtaaataaggttggcataacacctcatcaaataatgtcaaactagcactgacaatatcataatatatcaatagtaaagaaggaaacccatcctatatgtgcagtgtgtcaatttatcattatttcacttgctaggacctacagcctattcctctgataccaactgtaacaccccattgctccca

SEQ ID NO: 36043 - DNA, 501 bp, Zea Mays
gtgcagaaggatgatgatgttgccatggaaaatttggagaaaacctgccctaaacctcggctgtcaagctaactaaaaaagcttccaatggtacagtaccaaaatatcaacataagcagatcccccttgccgctggcgacctcgtgcgtagattcgctccgatgaggtgattcgtgcccacttaagcccggataataacgcagggtaaaaagatcgtcaccgctgttgggctatgggtactaatccggctagccgccgtgctcctttctgctttgcggccggtccagatatgtcactggagttggctgcccgtcgaccaaacgccacgtgcctcagcaattaccacgttgcaatcaccagtgttatgcacgtccgatgatcgccggggaggccgccacggtgaaggccacgaatcacaatgtctgtgactcatttcttctctggccgccaccacgctcaatccaaattcaatagccaccgcttagcaatcctataaattga

SEQ ID NO: 36044 - DNA, 517 bp, Zea Mays
ggggcgccgccgtgcttgggttcacgggcgtggagtgcgctcgtagggggagaagctcgggtgccgtccgtcttgagataaacggtcacgattaggcgggcagctcggggagaaatgagtgggcgcgaccgtgggatctcagaattgtggctccgatcggatctggcgatggttgattagtggtcgttcatttgcggatgaacgtacgggattagaacaacttaccccttcgcctcattaattaatgaccgtagatcacgaatccgacgaccacgatcatgtactggttcagcgcatatgcacatttaatccgagccctccatctcagatctcacggtcaagatgccaccataccccttcagtcgtgactcatttgcagaagagcccccgtctttagtaaaaataaacccgccatcctacacggtgattactgagtcttgagaaatcttatagtttagcccctgcagtttctgatatttatgcgcctagtccagtgatttaggaaagtaggaaaaac

SEQ ID NO: 36045 - DNA, 450 bp, Zea Mays
gtcagggtctatgatctgtgacagttcaagagcaggactcagctcaattagtatggttcgggcaaagaatgacactttgggaggtggaggtgatggtcaggaccctcctcgacaggacaagagcaaggcggtctacttggagaagtagggaggcaagaagaagcacaaacaggatagagctactcgagaaatgataggtgcaacaacaataactgagagggcagaccagagaggcaacattcaaattggctcggatgagattgcctaccatgtcagacgatagtcgtctcggttatgctatacctagccagacttgatcccttgctaaagccttctactccaactcccactatagccccatcgcttgcagcctcgactactctagagtcaaccactacctccactacacccatagcttccaccttgcctacctccaccactcctgctccc

SEQ ID NO: 36046 - DNA, 313 bp, Zea Mays
gcagaaaatgactcttgagccaccccatggctcggttatagctccgacgtcctccattcttggacctcctgaagccggtttgcagacgcttgagtctggccaccccacacccttcgctcatggttttaccgatgatgttggtggtggattatgcgttgtgcagaatgtgatcttggagccacctcctggttcggtcacagttccgacgcttgtatctactcacaccacaacctccactcagggtagtctcgaagttgatgatgatctcctctgcgttgagcagaacgtgaaccttgagccaccccctggttcg

SEQ ID NO: 36047 - DNA, 284 bp, Zea Mays
cgcaaggccgtgaagcggctgtttccggcgaacacatccgaagcatccgtgactagctcggtacgatggtcggagtaatttagtggccggagtatatccacgacgatgatatttactcaaccccaagcgctatccaaccgatcagagcacgaatcacggcggcgaaagcacgaatccgcgcgcggctcgtcggtggcgagggacagagctggcgacctgatcgggacactgtaccatcggaactgcgattcagagctcctgacagcccaacttgtagcgtccag

SEQ ID NO: 36048 - DNA, 423 bp, Zea Mays
gttatatttagtgagaataacgtccctccctatgtaccacaagaaaaaattaattttgagagggagtttaagtttccaaagcagcatattaagattgaaatgaggggtattcattagaaggcagtacattgatcgaacagagaaatgtccatctttgtgtgcccccaaaggaaattatctctcgattgtcacaaagagacatttgccaataaatttgataaattctagaactcaacctatttaacctcaacaataaatcaactaaatgataggttgagtatattttcatccattacatcgctggctatatcattctttgtacacacaatattaataagatttggaaaatggtccttaagcgatctatctaagatccatctgtcgtcccaaaatctagttgctcgcccatcacctgctcaaaac

SEQ ID NO: 36049 - DNA, 494 bp, Zea Mays
atgcaaaagtcgcctacgggtgcagccggaatagcacaataagtgcgcaaaatcgaagtcttctccaaaagactacccgtgcaaaagttgcctacgggtgcagccggactagcacaataagtgcgcaaaatcaaagtcttctccaaaagactccccgtgcaaaagtcgcctacgggtgcagccggactagcataataagtacgcaaaatcgaagtattttccaaaaggttccccgcgcacaagtcgcctacgggcacgaccggatcaacgaaggcacgcagcttcacataaattacggttacatacatacagcgagggcatcgcactttacattggctcaaccttcgggatgatacccatctccctgtagttgaacagcattatcctcagctcctcaccctcaaaaagatttcgcaactctccctcacctacactcgccccagccggcgaggacaacaattcccgtttgctagccccgttcacacgaagacgac

SEQ ID NO: 36050 - DNA, 451 bp, Zea Mays
cgaagaggtatcctcaacttctagccgttggatcacgatcgacggcccgaagagttacacgcccagatctaatctgcgccctccgcaatcgatccaacggtacagattccatcgcccgaagcggtatccgtcgtctaatcctagtggtccgcgaccagatcaacggccagaaatgatttccttgtgaacaaacatgtcagactaaatcatcacctcccatcagtgaatcaacggttattgagtcgtcttcacccctggctgtcaacacggcggcgccagacttccctgcggcagagcgtggccggagaggcgccccgagggttcccccatgcatcgaatcgagtgctaataggcgtaatagggataggggacaacatcgtggcgagggagatggttctcaccgagggagaaggcgggtacgaggacggccacggcgcgagtgacactgcgg

SEQ ID NO: 36051 - DNA, 364 bp, Zea Mays
gttaattttgtatcctaattcatcataaccttactaggagcctttttggaataagggaattttctttgtaaaattgaactaattccggtaaaatttgtgcaagttctaataaatttctgcattccaaacatgtctcctaccgtgtatataagtgcatccaagcaagatcgacacacattactgctagatacgatatggcatataattctttgataaaaacaaatctctgaaggctcactatctctctacacttttctacccctataaagcacctgtttttttggtttccaccgttgtcccttttgaaaaaaaagtcattatacttctttctaatctaacccacggtccaaacatgtgtatcgtg

SEQ ID NO: 36052 - DNA, 362 bp, Zea Mays
ctcatttcacaacaagcaatgtcgtcatagtttacatacacacagcgaagggccaccggccacattgcacaaataatacaaatcacattttgttgccctccctctctattgcgagccgggggaaggcaacattttcgctcaccaccgcaacacataagcgagggcagcaaacatgctacatcagctaagcctttgggataaggtctgcctcacgaaaattaaacaacatcatcctcaactcctcaccctcaaaaagattccgcagatccccctccccaatacacgtcccggaagtcgaggtcaacaaatctcgttgtccacccctctctacccgaagacgggttcgttccatccccatccgt

SEQ ID NO: 36053 - DNA, 556 bp, Zea Mays
gcttgatgtgacagatggaaaaccaatgtgacactattttcttggtgccataggtataaaatgaccatgtgatcacgttgctaggccaccacactctactttcgcaactgttatcgcatgtaaaaaatcgtcggatcgccgccgcctgcgattgtcgttttcaccgccagtgacaagatcggcgactagctcattgacgctagcccgtctcaagactgtcgctcatcgacgaccccggtatgtcatcatgcctccgtctcccagcagtgatgcagttccatcgctgccgccgccaccgccgtggggcgggaagagcgctggctcttcttctgctagggttccatgctccattgggctggactgggagagttatgaactaggtcattctaagattacatcacggagggtaagggagatggcgagtttgggctacttcccatgtggatacaggcgtaccactggggtggagactatgtcgaggccagatggtgaagtgctcgttttttagggttgttcgctgcaagacttcgtctgccgtgtcaagattttttgacta

SEQ ID NO: 36054 - DNA, 611 bp, Zea Mays
caacagcagaaatcaaaactctatcatcaggagtgtcgacctctaaggcgacttcctgacccgaagcttgagctgctgccatgcaaccagaatgcggaggagaagatcctacatgaacatccatggaagtgtaagaaggagaaccaactcggacaccctcgggggctgggtcatagctcgcgctacccatccgagccggatcatccccggcgacacccttaggggctgggtaagcgctagcgccatccttgagggccgaactctctgtaacagccatctctagggctgaaggaccttcacccacttccatgggagcaaaacaatccagaccagcctccggacccttaagaccgtgctctaaggtcgatgaggcacgagacgctgctcgagataactccagcccggcatcaggcacatcagcacaaatatccatcattccaccatctgcaggctctgataacagatcttctgggaccatgtcttcaagagtttgatcaaagtttgccagagacaattcttgtagaccaatgagggcagacaaagctggagaaggaacaccactactttccccgctggctatgtagcgtcggctgttcttccgaactagaggg

SEQ ID NO: 36055 - DNA, 293 bp, Zea Mays
ggaaaaagaagctagggcggtgggaggataatggagaatttagaattttctttctccaatatttcacaaaagaacatataggtaatttagttctatcatttgcctgagcagttgacttaggtccaactggtgtcgtgttatgcgaagcggcgcatgttgcctgactcattttcaggcggcttgaatttcttattgaatttttgcgattgttcggcgagcggggtaggaagtgaacggtcatccccggaatctataaatagtttgcttgccccgtctgttctcttcacttgttc

SEQ ID NO: 36056 - DNA, 320 bp, Zea Mays
cggtccagtagggatggaggtagccggcggccggggtcggcgggggtgctgcctgcgtagagatgcggcgacaactgtgggatgggtgggagagggagataggaaattggctctagtaccaagttagaatgggaaaccttaaccctaattagggttgggagtgcatatatataaaccaagagttgggtcaagcccattacatagaggggtaaacaggtaattacacaaggactaacccaaaaccctaacgggattctaacaataaggtcctaagttcgactccccatgggagcgaatttcaggctggagttaaaagaaat

SEQ ID NO: 36057 - DNA, 378 bp, Zea Mays
gactcagatcaacgtgaagactttaagtggatggtaatgagccctttggagatatgctttgctttgaaaaggccatagtgcgatgcgagcgaagatgctgatgaatgccttaaggcttttggtgaggttgtgaagaagattgggtcccgagaccttattcaagaagctctcacgtacaaaatttatccaacccggactaggtggaagctaccgaaggaagtgaagggcttgttaccttggcttttagttttaaggagcgtcgatgtttgttgcccgaccacacacactgaggttaccctcgtggtgcttttgggtaggatggtgtcgttgattgtgactcaatggttcctgcggtagcacaatgagggagatacacaa

SEQ ID NO: 36058 - DNA, 415 bp, Zea Mays
cgggcctagaagcccggcggggccaggggcgccaggggcacgcgtggcacaagagccagggccgcccaaggttagaatctaggcggtaccatgggtgctggcggagatgtacatgcaaggagtgggatcccaatggcgaaaaccaaagaacatgactcaaataaaaaatcatggttagttagatggggcgaggcagagaaggagaaatctacctcatcaaacacaacgtgttgggagacaataatgaggttggaagagggatcaatacatcagtatcccttacgatcaaaagaatatttgaggaagacacaccaagtggaaggaagtgcaagtttgtggggagcatccacagaaggttgggatagcgggcgcaaccaaaaacgtggaggtgttcgtaagagggggagaacaacac

SEQ ID NO: 36059 - DNA, 367 bp, Zea Mays
cttccaccggttgtcgtggttacaagtactctcaaaagagccgatgaggttggcttcgaagagtgccttaatttgatcatactttgattggtgctctcgaggcagctcttcatatgtgatgggcctatcttgcactggtcgagacgtatttgcctgagtgttcaccattcgggcaactgatgttgaagatgtttatatagacggtcccactaggcatgccagaatgtgttgccacccgaaacccacctgtgggaggcggcagacaacatgaggggctaggaggcctctgggatggctggtgggcctcgatccctcggtcaacgactcaactcttggcgtacggcctaacttcgatgttcacctgacg

SEQ ID NO: 36060 - DNA, 292 bp, Zea Mays
ccggcggcgcgctcgccaccacggcgaaaggccaccggagaccgccacaccggcgttcaggcacccatacgcgaatctactcggtgctaaacgcagcagagaactcaatgaatcgactcaggcaccccttaccgaaagtagtggcgatggcaaggccctcggtgccacgatgcggaccgatagaggaccaactccagcgatgaattgcaagcgccccgatccatgaactctcgaatccagtgtacatatgccatccacatggtctagctaccatccgaagctactcatcgag

SEQ ID NO: 36061 - DNA, 624 bp, Zea Mays
gaaggccaccggcaaagagcagtatcacaacaacttcggttgttatggattcattgctcactctaatgcaagctacccggttccaacataccgaaaaagatggcccggggcctagatggaggaatgattttatgttaaaaatgatctgattgcgagggaggacattaaggaaattatccaacgccctatctggtctcgcttcggcctccaaagaccgaaggtggctattgaaagtgatgtcgaagcgtgtcagaaggcttttagcaatgtctgtgctttcattggcacaagggatataattcaagagcacataacctaccgagtgtggccacttgtggatagctgggagatgccgaaggagactactgctgaatccagcgaaggtggattagttcgattaaaatacaccttcagataccgagagaagttcaacgaaccaaatgatgactggttgaaatgcattgaggctactagcgacgagttgcttgggacatataccagggccgaagatgatgccttgtcctcagccttcgagggtcggggcaagaaaagattgaacagggtttttgatgcaattggcttcatatatcctgattactgctaccccttgagaaggcaaggaaa

SEQ ID NO: 36062 - DNA, 284 bp, Zea Mays
agtttgctttgaggcaggaggtggtcgaagccctcttccacaaggacaagggcgacgagaagcgaaaggagggcacccccgagacatccacccaatgcaacccaaagaagggtaagaagaagaagatacagcagggctcacccaaggccctcgccaccaaacttgtcgccacggccaagaaacgcaacccttgagcccctcaaggggggccgggtgtcttcgacaaaatgttgaaggagtcatgcccttaccactagggcccagttaaacattccccttagcaa

SEQ ID NO: 36063 - DNA, 682 bp, Zea Mays
gtttttcttaactattttctcaacttaaactggacaacacacgagtcacttaaaacaccatattttaggagacctcacatgtcgagcatcaatttataacctaagtgactcaacctctatcacgcttgacaactaccacatcacccgatttatctatttggaacaccgcctgcctagcgtactactagtaccccacattttgactcgacttaaaaacgtagaggaagtgatgactacttcggcatgtcaccacctcactacacaagccaaaattattattatttaaccacacgtctagataagcatgatttcaatttaacttgcccatattttaaatctcggcataagcttggctattggctaatgaagtgaccattttctaattaccaacctacacccccatcagtaaagcaccagcacatttccaaaaattccccgagactacgacgacaaggcttcgatccgccatacaacaaaaatcatgacgaagccgataggtgctatcaactaatcgttaaaaaaaaatattagacttacttctcgccttgccactacaacaccctttagtcacatgaccctcggaagcatccttcacacggttatacggcagcaatctaacgttgtgttacacaagacatacatcttccttcgttgcgagtataaccacattacggcatatacc

SEQ ID NO: 36064 - DNA, 361 bp, Zea Mays
aaaaaaaaaggttggtttcctttttgactgcaggggctaaagaggctatgattatgctcacaccgtcagatagcaagaactttagacggtttcctcccgttgatatttgtcccggaggactaataaggaaaggcaaattctatcggtgacagtaaccatccagattagtggagcagttggaacgagccgtagcgttttacacagcctgctgctgtaggttccgtagtgcttgctccaagcgtcctctctttgggaaaaccagttcacagagacacacgagtagacgacgatgtcatatataagagcgcagctgaagtacgtaaagtaacaccgtcgtcgatcatgcaacggcaacggcaac

SEQ ID NO: 36065 - DNA, 526 bp, Zea Mays
gagggtttggggtgcaggtaggtgcagaagctgcttgattacatgacggagctgagggtgcggtcaatttatagagcccgcaagcggtggccgcgaatttgggtgacgacgcgcgacggtcggagggacagggagttactggcgcgcgtgaactcgtgtctaccgtcgtggcgacctcactggcgatgattagatggctatagggagtcatggtgacgcgacggaggtaccagagcacgtggcgcaagatcggaagacgactgtcgccggcgagcttatcagctcaggccgtagtgcaaaaaggggagtacggcggctagccggggtgacatccagctcaacggcggcgaagatcttttgaccccgcgatgttatcgacttaccccgagtacgaatcggtacgccggcggcacgaatcttcgtgcagagaggtcgccggcggcgaggctgtcgcgctggcggtctgatctgattctggcactgtaccatggcgagcccctttcagtgcatctgacagtcagaattt

SEQ ID NO: 36066 - DNA, 271 bp, Zea Mays
aaattcttcagctcctgactattgtcatctcaatttattttagtcgatgtttgtttactggagactagagttcagttgctccatgtagagggatttacacatctccataactacttctcgtcctggatgcacatcgccagcggggacaggctcgattacggtacagttccgtgacctcgtgttcgccctgaatttaccattttgctttggatctttggattgagaggtgtgttcggtttggtcccgatttagtagtacggttcactggcta

SEQ ID NO: 36067 - DNA, 369 bp, Zea Mays
gatggttctatcttttgtgtttggttgaggggataataatgtccatgttctgtgtttggtttgaggaatgtggatgaagagaatatatcactgtttgtgatccattaaacatctgttaggtgacatctgtgtgtcatcctcaattaccctgttcttctcactttctccacacaatcagcggttcgtagccccgaccccaaccatggaagtcctattcgccaccacctttaccctagcctatgttgcccccattttgttgtgtcgctcgacctagcccatgttggctcgtccaccctgtccgatagggttgggctaagagaggtcgcactgccatgagccaagactagtcgcacgtgtcaaaggtcgtcc

SEQ ID NO: 36068 - DNA, 521 bp, Zea Mays
cacatactactgcacgatcgcaagtacagtacgaccgtaattagcggagaacagttatcccaccgttccattccccttcacttcaccccccgccgaggggaaagtgtgatgattagcagacttgcagcttgtatctcatttataaatacacaaaccccacccagcaggccagcactcaagaaccgcaaggaggcgcctttccggcgttgcccttgtttttttcccctctccaactcgaggggttttcgatccggggggcggttcccggcgagatttttgacccggcccggtgcttggttccattgatctccgtctgctactccttcctcctacttggttgccttgccttcccggtccctgatcggagcctgtcgccggcgggcgggcgggctgagtttactgcccgttactggggggacaaagagcagaaggaacagagagtaaaaaatcttgggccttgatcggatccgaggacggggcaatgcggtaataaggagcggccatcactgccggagtttgat

SEQ ID NO: 36069 - DNA, 316 bp, Zea Mays
accaccaaaattatttatgggaaaaggttaaaccctatttccctttcagtttcgagatcggagatgagatcgcaagctttccttgtcttgactacaatgtcatcgacgtaggcttcgaccgtagcgccaatgtgattgccgaacatgtgatacatgcaacattgatatgtggcaccgacgttacgcaacccgaagggcatggttgtataacaatacgtgccctatggggtgatgaaagaggtcgtgacctagtcggactctttcatccagatttgatggttaccggagtaggcatcaaggaaggaaagagtttcgc

SEQ ID NO: 36070 - DNA, 279 bp, Zea Mays
caccgagctatgttgagcatcttatctatagactttagccagtcatctgcttgtagtgggtccgcggagttggagaaggttggtggtttatgactcataaactccctgtgcttatccctgggtggagctgctggtggtggtggaggtagtggtggttgctgctgttgctccctccgctcctggcgcatctcatccctctcttggcacatctcctgacgctcctatcgcatctacgcgtgcatatctgccatagtgtcagccatctgttgcattatctgc

SEQ ID NO: 36071 - DNA, 616 bp, Zea Mays
gaggtggatcgaccaacgtcgccattggtcagagcttgaacgtcaaggtgaagggtctgagacatcatcattcgatgcactagaccgatcatccccacccgtcctcgtcgaaggatcagccggagggcgcattgaagcttcattggcatttaccgggatagcttgaacactaatattgtatgacaaaaaccttgcttcattggattgtggccctggctccgagatatgtagaatcatattccgctgcaacctctctggatcaaaacatcgagtcctaacagcaaaggaagagaaatcccttttgtgaactatatccaaatgaacctcctcaatgaagcatgagtcttcaagaatgacctccgccgtagagcggaaccatgcatgctccggaagacctctgaccacgacgtccaccaattgatacatgaccgatgaggaagcatgcgagaaacgcgaccagctcttgaaaagcaagttgaaacgagggtcaacaaaaaatcttccaccattgagcacgcgtgttgccgtatcttcaccaggcaaaaatagtagaaaatcttcaggattcgcttgatgaattgacatatctctcacattgacttcaaaactgcgagcc

SEQ ID NO: 36072 - DNA, 432 bp, Zea Mays
caccgaatagctgagctccggcggtctcgccgccgttagagcgggcgccgccgcccaagtccggcggtcgggggcgcggataacagcggggacacaggggccgtggatccgcttgtgaacggctcggattagatcatgccataccgtttcgccatgattcgttcgggtccgttgatctggttcgggcggtagatcgacgaccgacgatgtatctggatctcatagaaacctagccgtcgatctcagatcctgcgatcctggttgtgtaccgatttacagcagcgctgggttaatctggttcgcccgcgtctaatccaacgacccgcagtgcacggtaccccttcaccgagccattcttgcataagaggccctgtagaatcaagaaaccaacccgccgtccatgcggctgtagctctgagtctaggaaatttt

SEQ ID NO: 36073 - DNA, 353 bp, Zea Mays
gacacgtgctgagatcctagaataacatgacgaccatgattggtgagctggccagctgaaataagttgcatggtcaaattagggacataagtaacattaggaacatgaataaaggaggatgaaagaatgccatgtccaacaaccgaaagaggtgagctatcaacagtttgaatagtgagaaataggagggtaaatggaagaaagatgggtacgatcagacttcatatgaaaagaagcaccaaagtcaagaatctgtgcaagtgcaagagactaaagtggaccgtggtctctcggtggaggactgagaaggcctgcagaacggagacaagtctcctctttatgaacaatagcca

SEQ ID NO: 36074 - DNA, 461 bp, Zea Mays
cataattcaaccattaatgaaacatgtaaattgttgcagacactaatttcaaatgtgtatcacaaatttatgaagctaacaaatcaatacttaatttatttgggtgtcatatatctatttaaaatagaaaaacaattgcaggtgtctatacacaattaaacatatatatggaggggtagcttgaaaaatttatttgtcttctacggttgtacctctcgacttcggtgtaccggggagtagggaacagtgatcacagggctttggcaatgttgcggggcacaagatccaaactccgacgagcagatcagtgatgaactctaggcgcggttaggaactcggtaacggggacagcaccgacaacaagtacagtaccggcggcgagagtcaacaatgtcacggtgcaaacagcaggacgctggggaagcagaaggagcaccgatgaagaaggacgaagctccagc

SEQ ID NO: 36075 - DNA, 601 bp, Zea Mays
cgcagtcgtaaggtggaactccaattgagcggcaacatcggtgtgaatatccgccttgaggtcgtagaacttgtcggaggcggacactgcggcgtgctccaggtcgacgatacgagcttcccagttggcgtcgtgggccacgaacttcttatcaagctcggcgaggaacaacttggtttgtgcctccagagctagcttgaactgcggatccatggcaccgactgattttgcgtggcgagtgaagtaatggaactcaagaacgccgatgatcgacgaaatctgataccaatctgttagcacccggttacgtggagcagaattgaggaagggaattgggtttcgtggagaagaagaactggaggcggaggaacagagataggattcgatatgtattttcttctttaatagtctctccctcgatatgtattttcttctttaatagtctctccctcaacgtttcagcagtataagtatttccttattacatgggcagcactggccctcatttcacccactctgggccagacagaaccacattgggcttaagcttcctcttgagcctcgtagccatgccttgggactgcctgtttcttcaacagcc

SEQ ID NO: 36076 - DNA, 380 bp, Zea Mays
tgaatttgtggcccgatcgcattgccttctcctgctcttgccccgtgcccaacctatgtatctagccatgtcaggctaaaagctttatttccagcttcggttcagttcagtgggctcaaaatccattaactagctagatagctccctgttagcatcgcagatggcctggttggcggacaggaaggaaggaaggcaaagctgatggtcgctggacccacaagacgcagccagcgtgtgattaggccaaatgtgaggattagcggtgccgagtggattaagtagaagtggttaaacaccttcttgtaagaggggaaaggaagggtctataagtacccgtgtaaccgagtaagcaactctggaacctggaaaacacaatagcc

SEQ ID NO: 36077 - DNA, 605 bp, Zea Mays
cccggatttgcgctagccgtcacgactcgtgcctcggatgtatggattacgctcgacggaaaaaagatctcgtcgcggatgagctcgggacattgtggacgctctgtcactcgtccacttgcaccaacgacgtggccaagcaaccatcgtcgaggtatgcgtcacccgccgtgatcgtgacacgttatgaccctttaaccacgtagcagtgcattgcctgagcatgtctattcgtcgccggtggtcttgccacggtaaagtccacgaatcacttgcgccagtagcttcttccctctccgaccgccagcgcaatatcttcaaattgaacgccaccaccctcgaatcctataaattgagcgtgtcattggatccgctatgtagtcaagcacccaacgcacccacccgtgcctccgattatccaccagatagccccaatttaagacttcccccaaatcggtccagaacaacgtattgagtgagctcgccgtggccaactccctacagatctgttcacgccctctctttcctctttttagtacccttatgtgcccttgatgcttctcgacctggccgattaagctagaacccataagatcacccggaac

SEQ ID NO: 36078 - DNA, 320 bp, Zea Mays
caattccccaggtcgcggaccgtccgcgtcgagatgccggaccgtccggggttacctgaaatgttctcttaattgaatcggctgataatgaagccgatacaagtgattggaggaagcctatacttaattatttatgaaatcccaatatcaggacagataagaacattcggcgtacatctttcaagtatgtcttgatgagtgatgaactctaccgccaaacagtcaacgacgtcttgcttaagtgcttgggcccagatgatgctatattggccatggccgaagtacatgaaggaatttgtggtacccaccaatcggctcca

SEQ ID NO: 36079 - DNA, 649 bp, Zea Mays
tattgacggtgcgtgcatgcacgaatcagcgttaggaagcatagttctgtctttctagatagactaataactagagtgaatccgtagccaacagaaatggaggcgattaaattgggcaactgcaagtctgttgtctcctcatctttcagtcttcgggttagtgcagtagtgtcaggcacaggcgctgagccgagtagagtagctagccgacagctgcacatcgtccttgaggagagacacagcatgttagtagttagcatctaatggatgcagccggagtttggtacccaggaaatgattcagtacggcagagataagataaatttgtgtaaggaaccacttttgaggataacggacagagagtgtatctgaccttattacgtcccaggcaggcttaactttcatcatccttcagagcaggccgtcttgctgaaagtaaaagaagagactgatgagtgatgacacgtggaggagaacttggaatctgaataataataatgcgtatactcttcatcatttgaggacgagacttgtttgggccaccgatgggcttccatttctcgtatgtgcgtgcgtgacattaaacggcaacctcttctgatgcagacatgctcgctgctgccaactgctgcctcggtctatattccaa

SEQ ID NO: 36080 - DNA, 304 bp, Zea Mays
cgccgtcctgaacgcgacggagcgacaccggcgaactccaatccggaaaacccgagcgccagactcaaattcgctcggcccccgcgagattgacgactcactgaactcaattccccatcaaattttggttgacctcgagtgtaggacccagtacacggtgtaccgcggcggcgccatggtcggccagtgctcccggggattcggctataccataccacaagtcgctagggaataacatggaggaagggaagacgaacacgatggggactcacttgtgactggccgaggtgcggtgatgcccgac

SEQ ID NO: 36081 - DNA, 313 bp, Zea Mays
tggttgttttgaatcccatgcgcacgcacgccacaaatggtcggctgacaagtcaggacgtcccatcgcattaaatgatcatgctccctccaagaaaaactcaccgagcgccgtttcacattatacctcaaaaggtacaccctcttctctctctacctctctttcctttttttattttcgccctcaacagttaaccagaagaaggcatcttctaccacgggaactcactgtgggaaggaaaaagtcaaggcggaatactgttcagaggttcgaaagttaggccctcggcagggtttggcaaaaccgcctcagg

SEQ ID NO: 36082 - DNA, 277 bp, Zea Mays
acttcgtcttcctcgggggcagggacgttgttgtctccaccaactctcacaatagacatatcccgaaagtaccttcctctcatattgtcaagatgactctgtttaatcgttgatttcccaaaaattgtatgactcggcctccacggccgatcctcagaatcttctccccagctttcagcatcataatcatcactatcaccggtatcttcagacaggccttccagtatttccttagtaattttctttgtatttgatttttccattaactcgataaacc

SEQ ID NO: 36083 - DNA, 947 bp, Zea Mays
cggcagggtaaaaatcttggcaccggatagactcggacccggtcgatggtgagctcgtcgtacccacttgggctgcggtcgggcaaaatggtcctcgccggagttggccgcctaccgaccgtgcgccacgtgccttagggtgttaccacgccgtagtaaaccactaaagcgtgtccagtcatcgccggtgaccttgccacggtgaaagccacgaatcctttgcaccagtgttatcccctctctccggccgccaacacgccatgcccaaattaggagccaccgccctcgggccctataaattaagcgtgccatcagctctgctaggtaatcacacacccaacgcaccagcccgtgcctcagattatccaccagagcgctcgaattttgaatttcccccaaatctgtcaagaacaccgcattgtgtgagctcgccatggccagctctccacaggtccgatcatgccctcctcactcttgtttcagctctcttatatgctcttgatgcttctcgacccggccaattgaattagatcgcgttagatcgccgggaacgcctcgggttatcctcagtttgcgccatcaccgtggacatcgcgatttagagttagaactctgcaattgatggaggggaaatggtcgttaagggtagaattaggtgttgagcaatggagaagcatagtcgttgcgttttctggacggtatgggctcgccgaagccgctgctccgccgtccatggttgggggtctcgacgtgtgaagaaatagaaaagggaaggggctatctgcaaacgtcagtgacacataggaatagtgcgcagttgactttacgagttatttaaaagagcagggtccactgcgcaaagcgaacaccgcgggcgcgcttccgcctgtgagtgggccggcttgggctagtttcagcccagtactattcacctttttccttttttt

SEQ ID NO: 36084 - DNA, 307 bp, Zea Mays
gtatggatacatgttttgacccgtgggtcagatctgaatccgattcgaagtcgggcggacacggattaggatattaccttctaccgcgggttatccgttggatatccgaaatcgacccatagtgtattttttggcctagcccatattacatagcaaagaacagatcctaacaccataaaccccacgcctaacagtcctaatttcccactgttggatgccccttatagcattgctggcttcctacattgtgcctcgtggccccttccaagtctcagagaccgtagcaccactgacagttggccgccct

SEQ ID NO: 36085 - DNA, 378 bp, Zea Mays
gggcatagagcatcgccatagaggaagaccacaccccctccagcggtgggctgaatctaggctcgtgctcgaggaggagaggcagaaggctacctctgagcccccaacgaaaggcaacgacagacattgctgccggcagtgattttttgaaggagccacagggccccctcgtgcggctatgtcgtcatctccatcagaggtatgatatgtcctctctgctctctcgtgtaccctgaggcacacacatgacaccttggggatcttccacgacctgcactcctcgtgactctaccccaccgcccctagcctctgcatcgtcctctgcaccatcggtgcgagggccgtcgtgcatgcacaaaccatggtgctcggcttcct

SEQ ID NO: 36086 - DNA, 453 bp, Zea Mays
accatgtgtgcctggaaatagtggcgcagcttcctggacgcaacaagcacagcataaaggagtttgtgcgtctcaaggtacctggcttttgcttcatggaggacctcgctgacgtagtagaccggcctctaaacgttctgggcccctgccgagccctcaggttcctggccttctagcgccacctggtcttgttgtgccatcctttcgatgaccagcaccatgctcaccgcttctgcagccgctgtgatgtataaatacaacggctccccaggttctagagctaccagtattggtagggacaccaggtgctgcttcaactcttgaaaggcttgttccgcctcttcggtccaagagaatgggccggacttccgcaacagcttgaagaagggcagcgccctctcagccagccttgaaatgaagcggctaagggcggctaatgaccctgtaatcttc

SEQ ID NO: 36087 - DNA, 314 bp, Zea Mays
ttaattagcttaaactgtcctgtacacaactactgaagagcaacaaaggcttattgttcaggtcccattgtttagcactttatgggctagttcttgatgtcaaatcatttgctgcatttgagacttagtgctccacagtttaaattaattggtgtagattttgttacctttttttagtgggcaatttttgtagtagtaagtgttatattgtgggagttatcattttgattactttattgttagatttaccatgaacttgatatttcttattttaagcggcaaacttgtgaatcttgtcctgcatagtcctttcg

SEQ ID NO: 36088 - DNA, 703 bp, Zea Mays
gtggctgacacccaattctacccctaacgaccctttcccctcaatcaattgcaaggttctagctcttaatttctctgcccacggtgacagcgcgataaatggacaatccgagacacgagtgggtgcgccggatgcttgactacctagcggagctgatggcacgcttaatttatagggcccgagggcggtggctcttgaatgtgtcatggcgcgctggcggccgaagaggggggagagcactagcgcaaaggattcgtggcgttcaccgtggcaaggtcaccagcgacaacggacatgcttaagatgagttactgcaacgtggtagagcacctaggcacgtggcgcacggtcgataggcggccaactccggcgaggaccactttgcccgactgcaacccaagtgggtacggcgagctcaccgtcgaccgggtctgagcctatccagtgtcaagatttttaccctggcatgataatctcctcaccagagagcacgaatcatggcgacagcgcagatcatggcacaagggtcaccggcggcgaggggggctgaatctgtgatctttgttaggtattgtaccattgggatcctatttagagcgcctaacagaccaatttgcagggcccaaatatcatatttttacatgacaacttgttaatccgcatgtaacaaagttgttgccctatgatccagctacaatcttgc

SEQ ID NO: 36089 - DNA, 315 bp, Zea Mays
taaaacaaaattattgcaactggaatgggtcaaaaaggagctaaaatgaattagttatgaattaaataagtgtctggatttattttaacactaaaaatcattttctatgattttcctatccacaggactgcgcctcaattaaacagaagcgcatgggttaacttagaacttttactaagacccagcgcacagttagactggactgcgggttgatttgactctcttcgggggtctctttagaaaatgttacaccgcgaaggggtatctgttgatatgggtcgtcagattagaaacggacgtcccagattaaatacg

SEQ ID NO: 36090 - DNA, 671 bp, Zea Mays
tccaactaccctttagtagtgtgcgaagagtgcaaacagaaaagcgttatcctgatgctcaaacaatgaacccattttgttttgtgtttttttctttccaaacagggattgccccccagaattcagggaagctgtctcaaccctgatatttgctgctgctcgctatcctgatttacctgaactttgtgacctaaggcacatattcacagaaagatatggaaattttgttgagcattttgttagccaggaggtacgcaatatgatgctaatatgttgttattgaattgtcttatgcttttgtggtcctttgctttacacacaatattataatttgatccttctgtctgcagttcattcggaaacttgacagtacagagttcactaatgaggaaaggttccaagtcatgcaaagtgttgctgaagaattatccgtcagttttgatgccaaggaattggaactcaagttatgggcctcactacaaacagaacatgtaagtcctccacaaatttattacctatttttccaaaacaaatttattacatgaactgtgatgtaggcacactaaaatgtccttaacttgaaatcatttaatgtgttttacactttcccttaggatatgcttgagaagggttcaaggaagccagcagaactagcaatgccttcatcgagc

SEQ ID NO: 36091 - DNA, 325 bp, Zea Mays
cctctttttttccccaccttttgtcttttattttgcacggagtatgagcggatcgaattatttattatagaacgaaatacaaatactacacgtacagaaacgagcgccacgccacacgacggttctcacaaacctacgaccgcagaaacatcgcagacggcgacgggaaggttcctcacgacaaatgtacgtgctacgataggtcgtctggtgccttggtggtcggcgagctaaaacaacggggcacgtacgattcgagtggtccgtctacaacaactacaagcaagcggggagatgagatacggagcattttttgttcagcttt

SEQ ID NO: 36092 - DNA, 305 bp, Zea Mays
cagtaatgataatataactaatataattgagcctaagtatataggtaattagtacacgtctcgctaaattagtaaactaaattggttaaggtctaataagtgtttgcctagtaaataattgtaaagcacaaattaagtgtctagttccttttcaactaagtctatctacatatcagtcgtagcaaacttaggtacttaactaacttgatgattaagtaactaatggatggttaaagtgaacgtggtaaacacttgtgctcatgcttgtgatgatctgtgtgcgttggctaagtatagtaagtgtc

SEQ ID NO: 36093 - DNA, 496 bp, Zea Mays
ggaggaggggtagccaatagaaaaggagaaggggcaaccgacaacagaggagaaggggcataggagggacaacttgaggcagataagcatcggaggccaacgaggtcgtgcagagaacgttaggctctagactctggaaggatggctgacggccaaggaggaggtggcgacgtcgtgagcacagagacagcgggaggcgacgacaaaacaagtgggtgagcgcaaaaaggatcggacgacacctatatgcagcagtagaaaccctaatgggccattggatgccatcccattagcaccttgtagcctagctgtgagatcccactcctagtcgcccatagtgcctggtcgcccgattagtcgtgattatgtgacgattaatcggatggctagacgactagacctcctagtcacgtcactacccctaatcgggcataatagaacgacaaggtcgattaattgcgactggtcgcatgacttgaaatcattgcatgaaaac

SEQ ID NO: 36094 - DNA, 376 bp, Zea Mays
gactctcgttgtgaggtaatactctacacctagtgttttggtgactattgattcgttatgttctggtctgcgctcttagagctcctccacctctccttatatagtccaaggaggtggacgaccacaaggatgaatacgagtaggttagataatagatctaatcaggtaacctagtcatataagaatccaactctctataattacaagtgtgattttcttatccatttggcccgttcttatctacttaggactctatcttgtatgtagggatattgtcctatctatttaggactctaaattgtctctcctattccaacaatatctatgccatatttgtacttctagagttatggtcctcatattagatcttttaaaa

SEQ ID NO: 36095 - DNA, 304 bp, Zea Mays
cgcgaaaacgaccaacaggccacattacaacacaactcgaagttacatacaagttgtattttcatgcacacggctagggcaccatatactacatcgactcaaccttcgggatgatacccatctccctataattgaacaacattatcctcaattcctcacccttaaaaagatttcgcagatccccctcacctatgctcgccccaaacggcgaggacaacaattctcgtttaccaatccggtctactcgaagatggccacgctccatccccatacgatggcgcctaccacttcgcgaaaactcacc

SEQ ID NO: 36096 - DNA, 413 bp, Zea Mays
gttattcatggtgcagccttaccgtgccaacagcaaaacaaagatatcagatcatacaaccatgttttctgataccttgttggacattttcaggggggctgcaagcacaagatcgtgataagggacatgaggttggtactcccagatgacacactgaaaccaagcagaataccctctccagacgttccaattgtagaggggcttgcataagtgcgacgaaggtgactgacgacgataagtgggctctgaacaaccccttctacttctgcatcaaatgctactacctcctccacaaggacagcacactgctatatcctcacactgtggtgaatgttggtgccgataaaattgttgagtctactgttgttttcagtgaccatgacaaggcctcgactcacttgaatatatattct

SEQ ID NO: 36097 - DNA, 292 bp, Zea Mays
gcaaaaccaaaattttcccaaggcacagatcactggcgcttggagtgcgggttgatttcttttaatcacagggtctctttagcaaaagttgaaggccgaaggggtatctcgagcctacaaccgaccgattagaaacgaacggtcaagattcgctctgttattcaccgaaccggtacacaattaggttcatcggattcaaatccgatggtctacaatccccctcaaatcccgattccatccagtcgcccgattacaatcctacggtcgagatgtgtctcgcgaaggggtattt

SEQ ID NO: 36098 - DNA, 366 bp, Zea Mays
atcggtgtcgtcatgctttctgttgtatggcggatcgatgccttgcttggtcaagtcatgcattccattcccattggataaataaatgccttgttgattgattagatgtcttatatgagcgttatcgcagcccaataatatttggaagcgagtagcgttcatgagtcaatccttgctaaaattgaagaacagtccgataacatatgcacataagtgctttaggtcttcagtagccagtgtaagtcttatggagttttatgccatgttttaatgtctctatgttagaccccctaaaatatggtgtttgaagtgacttgtgtgttgtccagtttaagttgagaaagggttaagaaacattaagtaacc

SEQ ID NO: 36099 - DNA, 800 bp, Zea Mays
cgcaaggctatccgcgagatcgtccttcgtcatggcacaaaggccaacttcgagcttcggaaagcccatacttctggccatctcccggcagacagataattctttgttgtctgggaggcaatataataagtcatcttcgtctgtgccattaaacactaaggcccctttgggtatttcagttctcgggcatagtgtttagcttcaaaaatttcttcttcagataatctttttcccgaagcgtgtcgaataatataatcaaggacttcggaagacgcttcggaacaggagcggcagctttttcaggcaaaatctgttatataccctcttctttcgctgccttttctccagtttccgaggatttctccttggcgggcactgaaggtccagcttcggcgtcagcctggctcagtatagcttcggcttcggttagctttgtctcgatttcaatctgtgtttttgaagccttggcaatttttcctggagtagagcttgaagtctttatcatctccagcacatctaatacactagccatcctttttctcttaggggttgctgctagatctttttgtgtcttcggcgcctccactcctgccgaagggcttagaacttctgatgtttttgtccctttggttctcggttcttcaattttgtcagccttcggcattgcagccggctcttcaatcctctgcgtaagagcaggtcctttggcttcaatagccgaagaggtctcaccgccaaattcaggcactatggccagttcaatgtagtgcggtcggtgagtaagagccttcacctttttc

SEQ ID NO: 36100 - DNA, 310 bp, Zea Mays
tgtttttgtttcttcggcttccaaggatttcaccttggtgggctctgaaggcccagcttcagtctcagattgatgttttgaaacttcggcatcaagtgcttcaatatgcacttcagaagattcaacaattttcttcggagttgtgcttgaagactttattgtctccaaaacatccaacacattaaccatcctttttcttttgggggtcactgctggacccttttggcttgttgctacctcaatttttgatgaaggacttagaacttccgatgtttttggttcttcagccctcggttcttctattttttcc

SEQ ID NO: 36101 - DNA, 465 bp, Zea Mays
aaaagggaaccaaggacacaaagagccatagggcccccagcttcattaaggagaaggggaaagcgcctatggctagtagctcgcattcctttcatgagaagaagaatcatgcctatttgtatactcatgttaagaatgtatctcatgttgctcatcatgatgcttgtaatgatcatgctgtttcacctacacgtcatgatgctgtttttgctcctttcgccatgaatgcttcttctagtagacctcatgctcatggtaggagtagacctaggcgacgtgcttttaatgttgtttctcatgcgactaggaacacatctcatagtccaagcatgctttaccatacttatgatacctcttatgtgcttcattgcaaatatggtaaagtatgtgctaaaaatgtgggacctaaatgcaagggaggtaagacttgcatttgggtaccaaaaacctttgtgactaaccttg

SEQ ID NO: 36102 - DNA, 764 bp, Zea Mays
ggcaattagggggagggcggctagggttaaggggagactaatgggccggatcaaggttcaaggcccagctcgcccacgtgacagctcccgaccccgtcgcaagcaactaaccaaagaaattctactgtcttacaggtgaatgttttccacaaattccaaattcccaaagcgcatcacccgaatgaggaaaaagaacaaaaagaataacctccacttctcctctttgcaaaccgggtatcatactctaccccccttaaaaagaattcgaccttgaattctgacgcttctatcggaacgacaaaaggaaaaaattaatgaatcaacaacacttacccacaacaaaaagttccggatatttctgccgcatcagctcctcaagttcccacgtagcctcgcgctcagactgattagtccataagaccttgacatacttaattgatctcttcctcaaaacactctccgatgattccaagatatgtaccggacgacactccaaagtcagatcctgttgcaccacaattggttccatctcaatctgatggtccgaatcccgcaagaacttcctcagcatagagacatgaaaaactgggtgtacccctgccatggaatccggcaattgcaagcgataagccaagctgcccacccgggccaagatagtgaacggtccaacatatctcgggctaagctttccggagacaccgaaccgaacaactcctttagtgggtgataccctgagaaggacttggtcacccactgcaaattcc

SEQ ID NO: 36103 - DNA, 449 bp, Zea Mays
ctgaaattcgccctggaatttttggagcaaagaagcaggcaaaaagcacccaagaacaaagaaccgggagcagcaggaagcgctcaccatgttgcgccgccatgatgctgaggcggagagggagaaggcaagcatggtgtcgtcacgcatggccggctagaggtggtcaaacacaaggtggttgcggtacaccgaaccaggctgagcgtgagagggcgtgttcgtgaggttggggagggtgtaagaccctcgacaactccagattacacctctatagctaagcactctgacaagcacgaatttggggatagcgagcaccgctccagtgctctcctcctctcacgaagatccagaattatcaggggaaatcagagtgcagggaacaggtagtgattacaaggatcgagcgtagggctctgtctcccgattaccggacgcagccgggttca

SEQ ID NO: 36104 - DNA, 338 bp, Zea Mays
acggtacgaattcatcagactccggagtatttatcacatcaagtcccgtctaaaaattgaagtcgatctcgttttggtccaatccatttatacctctgttaaaccttaatccgagtgcccaatatattcataggattttgtaaacgaggtagagaaaaagacatttctcgttaatcctctacatatctatctacttctatttctttccaacgtgagctgattttcttgatttttgaaaatatctcaccgtctctgtgtacttctgaaatatccaccgccgaactgacctccttatcccgtcgctatctcttgtcccattcagatttttcatagccgcg

SEQ ID NO: 36105 - DNA, 639 bp, Zea Mays
caatactgggcgcacgattaaaacccgacggccaggattagactttattaaaaacgaaccgttacgcgatatggaccgttcgatccgcacaacggctcagatttaatggggtgcaatccaatcggtaccgttcggtccgatccagcggcccagatcaatccatcgaaggggtacgctggtgttctaatctaggccgttcactagagatccggcgacccggggacatcttccccaacccgctggcagaccacggcgacgcactggagctgcgacggcgcgccagccggagttggccaaagatgagacggagggccacaccacccaacctgattggtgcaaaacgatgtggggcgatcgcgagacagaaggtaggcttacctccaaggattgtggcgttcggagccctgcccacggtgcggcggcggattcacggcgctataactccggtcacctgatacgccgtccaaaagaaatcacgagctacgattcacggtcctatgcattcaagggaacatagggagtagcgaattggtttctcaccagagcttgtcccgtggcgtggccggtccacgagacgagcgggatccgcggcggagatgggctctgacgagtgattggtcgcacgcgagacgattgcag

SEQ ID NO: 36106 - DNA, 446 bp, Zea Mays
acacatatatatgttgaacttgaacctgggtttgtaattactctttgctgttctgatgcaattcaaacaggctgtcggggcaggtccctttatacaacttctagaaaacgtgttatagatatttgttaatgctgctcaggtaacacttaaagacaacaattacaaccatttccatgttcaatcatcctagcctgattatctgtgaagaaggcattccataaataaacagtgccattttcttctgtgatctatgttcaacttcatcttaaaaaatcgtagagctgcgttccatttcattaagaaaaataagtagcaggggaaagaaccccagagtacagcacgcctaaagcctattacatgaaagagagagggaatacatgaccaggacagccaagagttatcctctcctgcctactgccccctccagcagggagcggagaccctta

SEQ ID NO: 36107 - DNA, 486 bp, Zea Mays
ggggtcaaaagatcgttaccgccagtgacctggaagccactccggctagccgtagttcatctcccctggctcaccgcccgcgggtaaagtgctcaccgtcgtcgtgccatcgccgttggccaccgcgtgtcctaaccgcgccatcgcatcgccgtgacaccctctaaactcccagtcgaccatcggagttactgccacggcggtgaacacgtgttcactgcaccaccgttcttcctcacttccgaccgccgtgtgtctcgtccaaaattcgcggccaccgctcgctccacctataaattgagcccccggccagctgcgctaggtcataccgaagctatagcccccactctcgcctccgattagcccccatagcctgagaattgctcatttcccccaaattcgttctccgccacccgaaactcgacctaaccgcgaccagcctttctaggttagctcatcgctctccctctctcgtttaagctttct

SEQ ID NO: 36108 - DNA, 763 bp, Zea Mays
atcagagctcttgtttcctttcttgaacgaagtcaagatgttgcatgtgttgaggatatactccatatgattatccgcgccctttcacagaactcgcttgtaccatctttcttggagcaagtaaattcacttggtggttgttacattttcatcaatcttcttaagaggtgatttgctttgatttacttacagatactagctaaaagcaagcaaagatttcaatctacattaattctcacgttgatagggtacttttgctcttgtcgttactcattagggtttatcaaattgcagatattatggacctttttttttaaaaaaaactgaactctgtttccgactggcgaaaaatatttttcctttacttcgtgtcatcttttttgtgatacaattcatggcaagatgcaaatgcagtttttatatctgttttctctctgtatcgtactttttagtttatatatgaagatgtgaatttttacatcatttgtttgccagggaatttgagccaatccgcctattgggccttcagcttcttggaaagcttttggttggggttccatctgagaaaagagggccaaaaatttttggcctccctgtaggacgacctagatccattgctgaagatataaggaaaggggcaacagcagcacctcaactgtttttttattcaatatctgatagacttttcaaatttccactttcagatcatttatgtgctagtctttttgatgttcttcttggtggagccagtcctaagcaggta

SEQ ID NO: 36109 - DNA, 316 bp, Zea Mays
cggtaacacacattgtttgcagcaacctgcctgatagcaaaatgaagaatctgaggtacgtaagggaagagggcctctcggttgccattatcacgctttctggttcgaccatggtgatcatgctgctgtttgatccagagcattcagcagaggacttcctgttgttaagccagcatgggtggtggattccctggcagagaaccggctcctcaactgtattttctcttgtccttactcacctttgtgtagacagcgtgcaaaatggcctgcttccttcttgcacttttgtttcactagtgatgcctacagatgttta

SEQ ID NO: 36110 - DNA, 285 bp, Zea Mays
gaggagcttgcgagaagaatgaaggcgacggtgtagctaaagacagtgaccaggacgagcttgaggagcgacgtgatgaaagagtgcagcatggaaacgacctgtaggtggagagcatgcgccagatgggtagaccagtggccggaggagcgcgcgcaccaggaagagcagtagccggtgaagtggaaaacctgggagccgagcgtgaggaagttggagacgaggactcgaccagcgtcgatggcgagatgcagcagagagcacgcctggaaagggcgccgcgag

SEQ ID NO: 36111 - DNA, 352 bp, Zea Mays
ggctgattaagtctgaaaatcagactgacagtggactgacatcaacttcaggaccaagttcatgcatgatctgctgcctttttgtgacaacaccatatagcaaagttgtagttggtataatgctctacaagtttgctgcagagttggacttgtgttgtcattagaaattaagagaaaatttggctctaaacttgactgtcaggctgtttaagttctgaacttcagacaagcagtgcaactgcaagcactttgggcatgaattaatgcatgatcgagcaagtatttgcctaggattgctataccaagattatagctggatcctagggctacaactttgctaaagagtgtcgat

SEQ ID NO: 36112 - DNA, 551 bp, Zea Mays
cccacggtggccgccagaatccagcctgcgcgcggcggcgccattgccgtgcacaaccaaacctcgatactacgcgtccaaactccaatcgggtgggatctacacgacaaggaagtgattgcaagtgattgggtaaggttcttaccagcacgaaggcagcaggcagccctgtgctcggcgcacggtggaagccgaagtacggtgaggaattccggcgatgccagcgatggattccgagaggtattgccacggacacctccctaccggccagacaaagcccacggacaccccaccgaggaccggatcgacgtctttgcgaggattactcgcggcggcacaaggcactcgactcctcacggtttctctgcgcggtaatggcgagagttgcaagggcagcgcgtacggcgacttgagtgcgaaggggaggacaccgcgccgcttaagtactccgggctcggtcgcgaggtcatgcggactccgcctgaatcccgaagctcccggcggcggttgagcaccacgtagttgcatccctggtccaactccatgcggtt

SEQ ID NO: 36113 - DNA, 394 bp, Zea Mays
acagggtaatgaatgttgttttttcctcgtcttcttttgccaagctaatctgatgatacccggagtagcaatccaagaaagacaacacagaacatccggcggttgagtccaccacctggtctatcttaggaagtccgaagagatccttcgggcaatgtttgttgagatccgtatagtcgacgcacatgcgccaatccactttattctttttgagtacaagaacatggttggctaaccactcaggatgtaacacttctctaatgaatccggccacgaccaagcgagctagctcagcacggatggcttctctcttatcgggcgtgaagcgacgtaatttttgtcggatcggccttgcctgggggtagaccttcaatttgtgctcggccagttctct

SEQ ID NO: 36114 - DNA, 294 bp, Zea Mays
aaatttgtgaaaatcacccctgaaaatgctttatcaggcgctatgaatggagttctgatggtatagtgacctgaagaagaatccaggttcagtgaactcgccaccggtcaccccatgcccggattcgcgccggtcggtgcgattcatgctcgacgcaatgtggataaccaaggggagtaaaagatcttggcgcccggataggttcggactaggtcactggatggttcaccgtacccacttgttctgcggccgaccaagatgatcctcgccggcgttggccgcttgccgcccatg

SEQ ID NO: 36115 - DNA, 464 bp, Zea Mays
gtacaagggaaagattgcgcttgcgcttgcttgggcgccggccgcgccggtggcggtaatcttcgagagccgcggtcgcggcgcgcggtgaagagaaaaaaaggtgtgtgtgtgtgagagagagaggaggctccctgccctctcgcggtgacttggcgaggagggggagggactgggaaagcgaatggttttcgggaaggcgctgtgatttggcctggaaaggaggaacctttccttcctcttcccgtcctttgccggctcttgtaccgccctcagatcggcgacccggttgtttcttcggcaacgggcggaaatgaggctctcgtcgtcgtccggcagcgtcctgccggctcagccgggctcgccggaaggtactcctttgcctgctctgctgcgccgacttcgatttctctcgctgttgtcttgttcattaatgcacttccttccccgttcgttgtattcct

SEQ ID NO: 36116 - DNA, 314 bp, Zea Mays
cctatctgtaccgaggcctagctgactccacccgggtcaccaatagaagaattcctgctatggacttggtgagccagctcgaaatgatacttagaggcaaggtatcaaatgttggtgcccctgttgcctactcggcctggaacttgcctccttccaaggcctttacccatttcgtgtcaaatcctcctgctggtgatggcggtttgggccttagagtgcgaccctctgccgaagaagttagtgctttggttgctttgcatgaagaaattcctgatgatgaacggcaggttcactttgaggtgcctttggatccc

SEQ ID NO: 36117 - DNA, 551 bp, Zea Mays
tagaagttacacctaaaacataaaacatcaggtgcatcagtttaacacactacagctggttacaataaaattttagtgacactgtgacacccaaatgcattacatggaatgaagaaaataagtgcacttcacacatcaaaggatagccaaactcctcagatgtggtataattagaactgtgtttgcgcttaggatgacatttcgtgcagaaaatgcaaacggtgacagggccttaacacagcactgatgcaccaaaattgcaaatacaagtagtaataatcatacatgtcacggaatgagcaacaaatatcaagtgttgaagttataagaaactggccatcaacatgtccaagaaaattgctagggttgaactgcagaaggtttagccatgctcccagtatattcaatttataatgcagtaaaaattattaacaagaatccatcatcatcatcctcatacagcatattctgatagcagtaagtaacaatctcacatagcagttgccaaaaagtcaagcttcaataagctgataaaagtaaaacaaagcagc

SEQ ID NO: 36118 - DNA, 282 bp, Zea Mays
tttgaatctgtgcccagcagcagtgacactccattccacatggtgcagactggatccaatgtatacagtcacgacacacttctctgtgccatgctcgacgaattcacgaccatcatactctggctggctcctgattccgaggcgaactgtgcatgctctcaacaacttggggaaaccatcttcattctggcaaaagctagtttggcaacggaactccatctgacttctgagagcaggaaagggggaaacatttttgaaatggagggatgagagcaagatttt

SEQ ID NO: 36119 - DNA, 295 bp, Zea Mays
agttcctcaccctcaaaaagatttcacagctccccctcacctacactcaccccaatcggcgaggacaacaattctcgcttaccagtcccgtccacgcgaagacgaccactgtccatctcactacgacaatgcctaccacttcacgacaattcactcactctccgtttcgccaccgcccttcgccgcctatacccagtactcgcgcccgagagctcctcggaaccctccgcgcgcggcgaaggctccgctgcagccacatccaacgctgcaaaataatccaagtcctcatctgaag

SEQ ID NO: 36120 - DNA, 456 bp, Zea Mays
caggtacgatttcagttgattcgtttgtggcccatgctctttttgactctggcgctagctattcgtttgtttcggaggactttgtgtcgtgggctggtctttcggtgcagaggttgggtcacccaattttggttagttctactaatggctccattagtagctgttcagtttgtcaggggtgttccgtcattcttgctgatgaggtcttttcggccaatctggttgtgatttccttgggggcattcgatgttatcttgggtatggattggttatcccagtatcgcgcagttatatcatgtttttggaagacagtgttattgcaggcgccatcgggtaggaaggtggtattcttgggaagttcccctaagttcacgttatccttgttggtgcaattgcttccggatcaccggtcaaggaagtcgggaatctttttctccatggtggtggagggtgaag

SEQ ID NO: 36121 - DNA, 352 bp, Zea Mays
gttgagggattactctttttggacatttagcctggtgccctggctcaaacttctcaccacaagtatagcagagtccatttatcctcatgtattctttcacttgtctctccttactccatgccccttgatccactaccttctcttcagtcctaactcctgtcactcccctacctccttggtctatcttactattcctaccactattctttaccacaatctcctgctgcaccagcaccaacctaatagccctatcaacagtggaaggaatctgggacattacatgaccttgtatctcattcttcaatactttcataaactgagcaacaaagaatacctcccccagttctggatt

SEQ ID NO: 36122 - DNA, 459 bp, Zea Mays
gaccagatctccaaggtcctcgacaccctcggcacgcgccatctgcagcaacaccacactcatttggcaaaaccacacatacccacacataaccacacaaaacaaaagataaccttcacctgctctctcgcccggtcagaccgctccctaactgcctcccgaccgtgcggaccccacatcctatcgaagagtgcccccgctgactgctttaccacagggtcttcgaccttgaaaatttcacattcaaagttctcgtctgattggtcgaagacctcatagtgtttgcatccctcgcgggacaacgcattcatggtcccctcgcaggtgacgagggaggcgaaggacatgaagccctacacaatagtcgggagcaccagcagctcctcctgcaaccattcgaggaagcgaaggcctgcctcttggtcgggtacttcgaagtctgtagtccgcgcacccaga

SEQ ID NO: 36123 - DNA, 289 bp, Zea Mays
gatctgattattacaggtgtccgtccaggacccatccttggtgacccgaatggcatttatgggggtctaggcctttacccttgggggtccggacacataggtgtaatccctaagcatgccctcttctggggcatgtggcagcaccgataccgtcccaaagcagaggactagtatgaggctagtggccctatcaggcgaagctgatcctgagtggttggactgctcagttccttagcatgcatttaggactaatcgcacgggtatctgccttgacatagtagaagatggt

SEQ ID NO: 36124 - DNA, 1184 bp, Zea Mays
gagcacttcaatgccagttgccccaagaaggacaagtccgaggctggcccacgcgaccaccactctggtcggcgcaagggcaagcgggagcacacctcttgcaagcacaagtccagggggaagtacctccagaaggccaaggtcaaaaagcatgccttcctcgcctccctgagcgacctcgaccacgactccaacgagtcggcctcctcttcgagcgacgaggagctcgagagacacgttgaggacaagctcaacgggttgtgcttcatcgtcgacaccgtaggaggtctttacaccatggcccatggtgattatgcagttggtggcgacagcaatgacatcagcgacgactctgcttttgaggtatcaaattccgcccactgaggtagaagagttgaacattgctttggcaaattagtacaagttgcttaggcttgctgcttgtgagaggaaagagtttaaatccaagtttgagtccgctagagcttcagttgtggtgtccgacaagactaaatgtgatgggtttgcccttcacatgtcgaacatcgccactttgcagaccaagtatgccaccctgctagatgagtgcggtgagcttcaatctaggtctagcttgttgggcgcatgtcagacttgtcctagcttgcagactgagctagcggagaagaacgctaggatagcctcgcttgagaaggctagctcagtgagtgcatctacacctatgcagtgtgcactctatgagggtttgtagtctgctcttgagtcctacagacatgacggatcagacaaaacgtgtccaacatctcggggctcaaaagaagcaacaaaagctgagtgagcaaagtgggacatctgctgatacctggagcgagtgactcactcattaagctcaccaatcatttgttgaggagggtgatcacgctggatatgtcgtggagcctccctcaaagaagtggcctccccctcaacagcaacctgaccacctccaggcgcaacaggttccggctcgactggacctcaagtggtagaagaagtgatgtcgggtccgtcatccgaagtcatcgacacaggctcaaccgggggagccggtggagacggctcataatcgccccagtcagcgtcgtcgtgctcctcctccatgaagatggtctcacccatatgatttggacttgtaggctcaaaga

SEQ ID NO: 36125 - DNA, 728 bp, Zea Mays
ctggtggctttacagaaaagcccctgatgtttcggctaactaggaacgggttcattcactgttttcgcaagtcactgacgctttgcacaggggtcctccaacttctgtttcttcgcactgggaggtccccgacggtgttcaagtgcgactgagctccggcgagctagcaggccggtcgaatggagaaaggactgacgcccttcatcggtcgaaaccaaattcacaccccaaccatcgattcccctaagttaattgcacatttggtgaactaatatggtctggccacggtgagcgcgcggataaactaaagattcatgcgttcccaatggtcagtggacctctagtctaattggacgggtcagcaagcattgtaggtatgtgggaaagcttaaacgagggagagggagggctggactgaccggagtacggctggccgtagtgagcagttccttgcggtggcggaaagtgaatttggggcgaacgtgaaattggagagctgtgggaagtaatcggagctacgcgtgggttctctggacgcgcaattacctagcggcactggccgaggctccaatttataggcagcttcgacggtggctgggaattttaacgacgacgtgtggcggtcggagataaggaagaaggcggcgcagtgaatacgtgttcaacgtcgtggcagctattccggtgagcaacggggagctaaagtgaaccgtggcggtgcagtggcg

SEQ ID NO: 36126 - DNA, 442 bp, Zea Mays
gtagggtatagtggtcaccctgagttaagtaagcgtgagcatgttgcaccgtcttaagtcatcgccgacttaagccgattgctccattagtagggtacagtggtcaccctgagttaagtaagcgtgagcatgttgcaccgtcttaagtcaccaccgacttaagctggttgctccgttaatagggtatagtggtcaccccgagttaagtaagtgtgagcatgttgcaccgtcttaagtcatcgccgacttaagccgattgctccgttagtagggtatagtggtcaccctgatttgagcaagaacgcaaaacgaagaattctcgaagcctctttattgatgatgtgtttcccggtttacagaatacattgtcgccccaatagcttttgaaatgtagctaaggataaaacttcctgagatgttctatgttccatgagttcccgac

SEQ ID NO: 36127 - DNA, 365 bp, Zea Mays
tgtgtgcaccactcctaagagtgttgtctcacgaaggcgttagaacctgagccgagagggagaggacgagtgaaccacgcccctgcatcaagtaagatccgcgccgctgtcatggattgctgccagcagcacaacttgggccctaatctggtcacccaaggcttgattagtttacaaggaagccgtgcgtgggcacaatcggatagtggttatcgaaagtggtgggaattcgtcgccggggttggaaatctgccgcttgccgcgaccgggactttatgcagtgcatagtgaggtatgtatttcgtccagtgcattccccttgtctagggcatcgttatagactcctcgaattaagtcgtagtgtg

SEQ ID NO: 36128 - DNA, 616 bp, Zea Mays
cccgagcccagccttgcctaccttctccccgcgaatcccgtaggacgccaatccttcaactgtggcgcgcacgtctacgaatcctagagcaggctcggtcgcgacctcgggtggacttccgcctcactcgatcccgactccagcctcgatatccgcaacggaaaggtgcccaacgtcaccatataccgcagaggtgatgtattacttaagggctttttttcatactcagcattgtgtcaaccactacgacataggcaacctccttggcagaaaggctcgggtacgtcatcgaaccctcggccctggcctcggctctcagtagaaatcggacgggcacaagtcaacaacaagtataagactcatgctctgggccataccttctataggggctcggctacgcctcctcaccgtacgcggccaactccagtactcctggcagcactccttgaggctataaatagggcagcttacaacttgagggaggcgggcgaacgcttcacaattttctcctccaccatgatattggcacttgcatgaatcaaccccacgaacttgggatccttttctctcctgctcagcttgtattccctactgcaagcacttaggtgcaagtaat

SEQ ID NO: 36129 - DNA, 620 bp, Zea Mays
accagcaaccggagatgctgggaataggggatgtccaaagatcacagtggatgaggtcaaatggacgagtagtgcgggacaaggaagaagaaaagggtatgtgaatgtgatgcccaagctaacaagcatggcaaagtgaggtagcgttgccgcgagaataaggaattgccggggtggcggagagcctagagaggacgtcgtggatggggtggccgaaacgacagtgctaggtggaggcagaggcggtggaggtgaggatgtaggatgtaacaacatgggcaaaggtggggtgggaagcgaatggaatataagggggcaaagttgttgcagcgagcaaccacaacacgagtagtaagatcccatatggtgaacccctagggatcaaactctataaaatagtggttgtcgtgggcggagtgctggcaataattatcagttatggctcactagaggcgtaggagtaggagctacacacaaggggtagagagctagtcactgacacggacgcagtgaagacacggtcgagcaatgtggggtcgacgttggctagagtaggggcggaggggctgcccacaactagtggggacgcttcggggcctcatggggtcgatggcggaaag

SEQ ID NO: 36130 - DNA, 318 bp, Zea Mays
agattcaaaaggttgctgcaataactccgaagagaaggagaatgtccagtgtactggatgccgtcatggaatgcacaaaggtgctgactcctgcttcagtgcctgctgaagaggagaagattgtaaaaggatctgccgatgttgggacagtgcaagctgcgactgaggctgagccctagatgctcgctaaagcgagaccctcgggtgccgctgaggagggtgctgaagtaaggtctttagaggctgctgagggaccatcatcgctaagaaaagatagtgctaccgaagaatctgagttccctgcccctcaagcccctg

SEQ ID NO: 36131 - DNA, 315 bp, Zea Mays
aaaggaagtagtaactaagctatacttgcttgaactagaagaaggagcatgtcaccatttatcagtagatgacaaggagtccaatccgattgaggcaattaggattgtgtcagaactccccgatgtattccctgaagagttaccaggtatgccacctaaaaggaaggttgaatttgccatagagcttatcccaggcaccgcctctatttccaagagagcctatcgagtgtctggaccagagttggtggaactcaagaagcaaattgatgagttgttggagaaaggttatatcagaccaagtacctcacattgggc

SEQ ID NO: 36132 - DNA, 383 bp, Zea Mays
caaagatgtacaacatctgcatacttatctatttgctaaagggaaggtggcattggtatgagattaattgttattatgttgttgtttcctccatcaccactttgtgcagggaaacggcatccatgctgcaatattcccaccagtcatataaaagttcaaacctctgatacaagaaggagtcgtctacaacatcacatactttcggatcagagcctcgaacaatttgtataagcctgttttcaatgagaacatgattacctttacaaactagaaaaaattggaggaggttgttgaggttccgcctgcgtttcctgtacttacctactcactcacaccgatagaccagctcatttatgtgtcgaccacagagagtactacacagg

SEQ ID NO: 36133 - DNA, 504 bp, Zea Mays
ccacaagaggggcaagtctcagcatcagcgccaccatccttaccgtggcaaatcttctgactcgggtacttcgggaggaagtactcagaggtttcgggccattcctaagcccgggctggggctggtgtgtttccgctgtggtgatgcgcatcgccgtgcagagtgccagtggagtgggaggtgttgtatctgcagtcaagaccataaggatgtggtgtgtaggaggaatcctaatgggaagctcagatgggagccggtgacttcgtcctcttctcagggcaccatcaacatgatgtcaagtgctgagcagcagttttcagttcctcttccttcgcagcagctctatgtgcctgggacttctcagttcgtgctgatgcagggttttcctcagtatcaggccgcgcctactcctgcaccgtctactcctatgtcgtctcagtttgaagctccgcgcctgcctcatctagtggctcagtggggttcttctgttaatttcactccggg

SEQ ID NO: 36134 - DNA, 471 bp, Zea Mays
gtgcagcctgtaagggaagagcgggtggccgcgtagccgtcgtcgccataccaatagtcatctctctcgctcccatgcctcaccagtgacaggcatggctgaaacaacaccacgctctatgctgcacgacggtgagtactttcctccctttttaatattttattccctctctcctcaattcatgttcgccttattaggtcctggaaccgatagcttctctaacccgtctttgtcgttgttcgccactttggtttgggcacccaccgtcgtcatgggagcgtgtggtctgctcctgctgcccgccgccccgtagacattgtctgtgactccgtaagtccatgtttgctctactagaccccctcatgtcgtctgcatctgcattagggtcggctccattggtgcttgctgcattagggtgtttgctctttgcaagaactgtgttaccgtcggtcatccggtgcacaatccgtg

SEQ ID NO: 36135 - DNA, 413 bp, Zea Mays
tcaatagcaagatccttatccaacagtctctgaaatgatggaaatgtgtgagcaaccaatgcatactgtaggggcccattgagtccttctgtaaagtgctcttgtttcctttcatcatctgccacctcatcaggagcatatcttgacaattggatgaacttgtcatggtactcgctgacagacatgttgccttgcttcaatgacaaaaactcccttcttcttgatcttcatcaatctagcaggaatgtggtagtttctgaactgagttgtgaattccgcccaagtaatagtgtcagcagcatcatgggcagcaacataagaatcccaccagtcagcagcaggacctgtcagacgaccagaagcataaagaaccttctcccggtcagagcattgggcaatgttgagcatcttct

SEQ ID NO: 36136 - DNA, 339 bp, Zea Mays
ggactgtcctgactctcgctctgtcccgggactggccggtccaccaacttgatgtgaagaacgccttcctccacggcaccctgatggagacagtctactgcactcaacccgttgggtttgtcgaccttgctcaccccaacatggtctgcaagcttaacaagtccctctacggcctcaagtaggccccccgggcttggtactgtcgttttgccactttcttgtgttcgcagggtttcgtcgaagccaagtcggacacgtctctgttcctcctccgtcgtggccccgacactgcctacctcctctacgtcgacgatatagtgatcactgcctcctctcctg

SEQ ID NO: 36137 - DNA, 433 bp, Zea Mays
aaaaggagtgctccgccgctgcaatatcctgaccaccccatcgatttgcgcccattggttgacctttgatgtccgctgggtgtctgggtgggcgctcaggtaacacatggcacgcgacggaccatagcgtgacgatgatttctcgtcgatgggttggccatgtcgtggatgtgtgccgcggcgtgggcagcactactgatgctaccataaccggtatgacgcactccattatgttcttcataccctccacgttgttcggcatagctctgtatcctagctagggcacctgggtgctggagcactgcacaccggtgatctccgccgccgtggagctctctgctctggaccgctcaggtgactggagaaagaagaaaggactctagccgttgactcagtggtgaacgactaggattatatcactcgcatgcccgtt

SEQ ID NO: 36138 - DNA, 450 bp, Zea Mays
gtgaccctcacatcgtgatccgcgccgccgccacgattcgtgccctctggcatggcgataatcacggcggagtaaagatcttggcaccggataggtttggacgcggtcgctggtaaactcgctgtacccacttggactacggctggccaggatgatcttcaccgctgttagcctcttaacgatcatgctccacgcgtcttggaagcttagcacgttgcagtgatcctgtgtagcaagctcgtccatcgctagaggacttgccacggggagagccacgatatcacctgcgccagtgaccttccctctctttggctgccagcgcttctcttcaaaattcggagccaccgccctcggacactataaattgagcgtgccgctagctcatttgggtcatcatgaagccagagcacccgcccttgcctccgattagccaccataactctctaattc

SEQ ID NO: 36139 - DNA, 277 bp, Zea Mays
gaagagcactggcatagtggcttggtgtcctacgctgtggcaatcgctccggtgatcaacggagggcaagagcaggctacgacgatgcggtggaaagagttagacacgcagcggacaaccgcgacggcttaacggcggtgagaatccttatccgagggtggtgagtgaggggagaggtaccgcggctagccggagtgacgtctagctcactgacggcgatgatccatcaccccacgacgctatccatcaactccaggcatgaatcccattgccggtg

SEQ ID NO: 36140 - DNA, 332 bp, Zea Mays
ttgtagaccaacaagagcagacagggctagagaaggaacaccactgctttcgccactggcaatgtagcgtcggctattcttccgagctagagggatttcatcctcctcctcctcaccatcatcaacaatgcggatagtacacccattggggtcagcgtcatccaggttacacccattggggtcaacgtcatccaggtcacacccattggggttaatagcaggcaggctacacccatcgggattagtttcaacaaatgcaggcactggcacttcttcagcagcaggaacggaaggactagcatcctggtcaaaactagacactcgatgaagac

SEQ ID NO: 36141 - DNA, 569 bp, Zea Mays
tgctcccttagcttactctgcatggaacctgcctctgaatagcctcttctctgaatttgtctccaatcctcctactcgagatggtagcctgggccatagagtgcgaccctcccctaaggatattgaagccttgattgctcctgttcggaatctttctgaggctgataaacaaactcacttcgagatgccatccaacactgatgatgttgagatggatgccgttcttagcctgctggctggggaatcttctggctcaacccacacagagccgatgacaattgcgacagggcaagagttcggcgaggatgaggaaatccagaagcccgaaggtgcccgctagaagcattcacgccgagtgaaccacccagctgcacctgtcgaggagaagaagaagaaaaggcgactccggcgattgtcatgcctggaacaagacactggcccttctacattattccttggtgatggcccgacgaacaccatcctcgaggataatgctgaaggttgtgatgatgctcaggctgctggtggtgtgcttgacgaggatgaagaggaagaagaagagattccac

SEQ ID NO: 36142 - DNA, 737 bp, Zea Mays
aaggggatgtggtttcccgaataatcccatgtgccaacatttcctgacattggcattcaatctcatctttcaaaagttgcgggtatcggtactgtcggactgcaattggagccatacccggcagcaaatgaatgtgatggtcatggcgtcgcgcaggcgacagtccacgcggttctgcaaacaggtcagtataatcttgcagtattgaattcatgaggtccctggtcgccgtcatagcagcaaggctaacttcatcaccaccgatcccatgccacatgacggcacgatcatggtgccagaaagccatggatcgcgccatgaagtcccatgtaatgggtcccagcgtcttgagccaatggacgtcgaagccctcgagagctaacgtgtagcagtcgatggagaacgtctggtcctggatggccaatgtcgttgctgcacagatgccagaactgtgtagctgtcgtccattagcaacagtgactaccagacctgggcgatgggtgatgtcgaggctgaatcgatgggtgacgccctagttgatggagtgggtggagccggagtccacgagcgccttcagctcttccccttggatcttgacgcgaagatggatgttatgaccagcagggaccctcgtcaacgcgttcagcgatatgcagacttcctccgtgatgtcttcgtcctctggcgcagcgtcgtccaaggacaggcagaaaacgccgccccgcgccgcacacttg

SEQ ID NO: 36143 - DNA, 324 bp, Zea Mays
tggggatagggatgggacttaccaacgggtcccacacagcagaagcacaacaggagtgtggcgcgttcgtggtcaaggctgtcgagcgggccccgcagttcagtgacagagcgcaggcgcagagagaaagggagaatgggtcgagcgcgcgctcccttctgttacggcacacgagagagagggatggtactgacgggaggaaaggagctcatgatagcaggggcccacgcgccagagactccaggcgtggcccaaggtgcgcgcagatggaatgggccgcggggcaggtgaatcagcccaaaaccaggtctgccttaccttttt

SEQ ID NO: 36144 - DNA, 407 bp, Zea Mays
ggggggatttcttgtcggagtaccgtgcggccacaagaatcacgctgctccatggacgacctcgccgctactgcttcatcattgaggttaggcttatcctattcgccgagttatccgtattgttttggtctatttttcgctgtgaactgcaaggccggggaccgttcggagtacaccggtgcgagagccgccgcgacttcatcgcgccgccgtggctgtgctggggaaggaagacaacattggggccattggatctgcttaagacggataggattagaccatggagcaaagttgtctagaccgtagatcttggcgtgcgcggctatgattagatctgccgtaccggttgggggtggtttgatccaggtcgttagatggaaatggggcgcgtatacgtatgtcccggt

SEQ ID NO: 36145 - DNA, 741 bp, Zea Mays
gttttcttcaattttgagcggcggagcctgcactgaagactgaagctgcttgagtcacgcctgttccgacgatttttgcagaaatcgcccagcctacgggactgattgggcttgaagttgtggcgcgtacgagagatgcctcatgccagagcttctgttattagagactgaagttctgcaagcgcgtgctgctgctctggagttttagcagctgtgttgagtggttgggagccatggagtcacggatggatcagtacgaggttttggagcagattggtcgcggcgcctttggtgctgccatcctcgtcaaccacaagacagagaaaaagaagtacggttcaatttagttactgagcctgtttccccgtgaatttgcctagccgacagtcttttgctttgctactgcaggtatgtgttgaagaaaatacgtcttgcaaggcagacagagcgatgccgcaagtctgctcaccaggaggtcagcagaacagaaatttacacgccctttttcatttgtttgtttgtcattttgcactgtcttcggtgaactgatagagcaaatggaaattgcagatggctcttattgctcgcttgcaacatccttacatcgttgagttcaaggaggcatgggttgagaaggttggttcttcatgaacatgcttctgtatttgccttttatttggttccgtcctctgttacctcaacgcatgagttttgatagggctgctatgtttgcattgtgac

SEQ ID NO: 36146 - DNA, 647 bp, Zea Mays
atttttaatattttctctacttttgcagtgccacgcaaccttggtgttgtcattaccatatgggcaccgattgtcatggtatttaaataaattacaagattcctgttggcgttccattagtcatacccctgttacttgtaggtttacttcatggacacacaaatatggtatgccattttctccactgtctttggaggtgtttcaggtgccctaagtcatgtgggtgaagtaagttgtctcatttgtgatgtatttacagtatgtaaggtcatattttttttcttgggcaggaaccagtatttatgaattttttgctaccacttactagatcttacatttgcttttaatgtagatacgaacccttggcatgttgagggccagattcaaatcaattccagaagctttcagtcaatgcaatgcgataaaacagcgagaggtttcatactgaacaaatacttttcttttcactgtttttaattgttattagccaatgcctcgagttgctgaacaagcagatgccttattttcacttgaagaacgcaaagttgcaaccagttgtttgtatttgactaactgtgtcattcttaaccgctagcaagcatttgagcacagaagcttctttcgtgtttggaattcattcatcaatt

SEQ ID NO: 36147 - DNA, 296 bp, Zea Mays
gctgaggactcttccgatgctgctcctgctgggacattggcggtggcgcctctcccagaggctggtacaacctcggatgttcagaagcctgtcagtgctcacccgagacgtccttgccgagtcaatcaacttgatcctcctgctgatgagcagagaaagaaaaagagacgcctccgacgagtatctagtttggatcgggacgttggtacttcggttcctgctgctgaagaagtgcctgtgcctgaatttactgacgccgaccccactgggtgtgattcatctgctgctgatcccaa

SEQ ID NO: 36148 - DNA, 317 bp, Zea Mays
ggaaagtcggaaacggataacgaccggtaaattccggtatatcgaaaacggataaatccgagcaaaatagctcgaaattgatcgggaaacggtaactgtaatcggaaaagctcacaataaacaaatcctaaccacacagatgttcattcacatccacatacaagtctcattcacaaatgtacacaaaacacaatcttgtccacatataattgatcatacactcatccatgtccactcttaaattataacacacaacacataagtcttaaaacaggattgttcattcacattcacatacaagtctcaaccacacaaat

SEQ ID NO: 36149 - DNA, 313 bp, Zea Mays
attgttagcacgtgtggaggagaggagtagcagaggcagggattggaggtagaagaagggtattggggagacggcggcggccaagacagccaacccccaggtactcgtattatctttctgttgtttgatgccctctctgtctcagcgttcccaggtttatacgccttattacaactcagcccaacaggcctacacaacccactccggcccaaatactttcacgctacgacgctttactcgttgtggacgcgcagcggcttcctcctcggactcgccctccacgtatttgtctgcacgaccgacgtcctggctg

SEQ ID NO: 36150 - DNA, 1451 bp, Zea Mays
tggtacttcacagatagctgggagcaattccgtatcagtggcagcatagatgtgattgatgcttctactacagaccctgccaagctccaggttagacctgagagctgattactgctgcatttcacctacgtgctttatagagtgcactggtctggtaacgctttgagcacacagccaggtgtttgttctactagtttaaattagtgtagctttacttcaagttcatacctgggttttgttcgtttatcaggttcaaccatatgtttgtgtcaccttatcagcctgtcaaagcttttgtatatgctgcttagaatagccctatcgcttatcttgttgtattctcatgtaatatatagctttctattcaaatctatggtaaacaatggttgtcacttctttcacagcacaaggagaaagcatggttttcaagttcagtgaagtcgagatcgcagtacttaggaccacagccaggcattccggttctagatgatgagcatgttaaggacgttcatctcgatcctttagctggcccagtagatgccttttgccttctggttcttgatccggaaaaggttaggcagcctttttttcactttcctgttgttgctctcatgtattgtactaccacatatgatgtttatattagagaaaagtgttgtgttcactgtttttattcagaggacaaacctaaaattttggtttagctaccacgaaaaatgaaaacaaacataatcctgcgaaaatgtttagattcagaatttattttgggaattattttaagttccttggttggtgatatgattctgtaatcaggtgtgctgtccgcaagcataaaactgtaacactggggagatagtgtgagaaaatgatgagtttggtgctaaatagcaatggagataggttatggttctttttattgtactcaatccgcccacagttttcaatatacatggcagataatactcagatttaatagcatccccatctcaatttcatatttattttgttccctgctaaatgggcactgccattaagtgccaaaattatcagaaaatcctgtcaaattgcagtaggttactgttgttttttgtgttcagaaaaggtggaaaacgcagttccacttggaaatagttatttcgcggtattcagctaggaataagtacttggttatcaccaactaccagtggtctattagctttatgaattccagaatttgtgcttttattactacttccattgttactgcatccaaaatgcacaaacaattggaaatcaagagtctacctgctgttatctgatacacatgagtttttgtatggttaatcatctaattgccattttattattgtgcttaggttgattatttgaatctgaaaagcaatcaaaggttgatctttacaagaagacaaaaggatgatggatccaatgattggatggcagtaaaagttagt

SEQ ID NO: 36151 - DNA, 323 bp, Zea Mays
aaatccctcaacaaatcccataacatcaatttccttcactgaattcttgtcaaacaataatccaaaatgagaagtacctttcaagtagcgaagaatccactttactgcatttcaatgttctttaccaggattatgcataaatctgctaaccacactaacagcatgagccaaatcaggtcttgtacagatcatagcatacatgagattcccaacagcattagaatacggaacgtgagacatgtagtctttctcacttcagtaacaggacattgcctcgatgacaatttaaaatgtgaagcaaatggtgtagcaacagatttgca

SEQ ID NO: 36152 - DNA, 292 bp, Zea Mays
ttcgcgcgtctcgccaattgttgatgatgtggcgtatgtctggacccggatgagtggggaaagaagatggtttgccgcctgggtaaggatctgtcggtagccctccgcgtctggagtatggggcaggccgttggcgatttgagccggaactccgtcaactttcactcggcgtgtgtaaggctcgagcgaagtcgggtagcaggttccggggaaggagtggattgtcgcgctagtgtctggcatcgtgctccgctcgttcccgctcgcgctcctgggcatgacaggctaatgg

SEQ ID NO: 36153 - DNA, 500 bp, Zea Mays
ccgcagttagcagtaggtgcacaacatagccaaccagtaccccgccggcgaggccattcgccatcaagaatatcccccagggctgcggaaatggcacgtgaggctgaggccggggtcgggcgcagcaaccgcgcagatattactgcctatttcatggcgaagactacacgcatccaacaagggattgcctagaaacaaaggccaccagagacagaatgtctcgggcacaaccagccgacaaccagagagttgtcgcgcacacatatcaccaccaccacccacaaccatacaacaacgaccacgcccagcatccgcccaaccacgcttatcagcaccaccaggaggtacaagttgtaccacccccgctcctgcctccacatcaaccaaatccacatcaccaaaatcaccccaagcaccaaaacaagaagacttcgccgatcagccgtatcgcggagtcatccacatgataaccggagggtccagcgtcaacttcgaggcaa

SEQ ID NO: 36154 - DNA, 353 bp, Zea Mays
gacgaagcacctaggtaacggcgtttgagggcggggagtggactatctagaaccttcacgacaaatagagatgccggataggggtagctgggggttgtacgaaaacggtcgcctaacggctccttcgtgcatcatctagaatggtccttcgcttggaggagaaagagcgtgtgttagagaccactaggatgcgtgagatgtgattatgaccgttggatttcgatcatgcggctaaaacagaaagtgctgacgtggaggcacctgtaagcagaattgctccctgctttaataaatagaaatttgttttagtttttatttattccaatacatgtcggatacgtatcctagccgtg

SEQ ID NO: 36155 - DNA, 364 bp, Zea Mays
cggccgggtactagagaaagaaagaaagaaggtgtcatggctatagaagatgggataccgaggccatatggtcctcagaatcagtcctaggcgtgacgctgtgtccccaggaaggtcttggtgaccgcgcccgggaggatcttttgctggagcactggcaattgctcaccatggtcggtcttccaccactgcgcatggacggaagtcgtcgtgatgccgattagcggtaagagctcccttgatcaattcaatccattttcctctccatgtaggtcttacccatgctacagttgggttactgggtcgcctcctcgctggctttgcccgccgcggtggtgaacgccgccatgggctgggtacggcg

SEQ ID NO: 36156 - DNA, 506 bp, Zea Mays
ctcgccctcaccttccagtctccaccctaaaacctcttttaaagctatgatccctttcttctccagatctaggaggcaactctcccgaattgagcaggctaggaatgatgccatgaggacatgaagtggaccacacagacacgaaggatcgataacagggaggcttttaggcgaaggaggaggcaagtgctcagacgcaagggtgtggtaagcaaagtcggcctcgagtgctttccttccctatttatgcatagtcataggaagatggaatggcgcttaaacaaagggcccaccgcaaacgacatggagcattcgtcgcttcaaccttaaggccacctcgggcatcaaacgagtgagactgtgtgctttgcgagttttacaccacccagggcagagcgccaaatcggtgcatgacagagcacatgctagtaatgggcaaggcagtttaccaccccatcacgcgtcctattaagccgcccacgccatgtgatgtcatgatggccccc

SEQ ID NO: 36157 - DNA, 494 bp, Zea Mays
gcgcatcacttccccgactgggcacgcatggactgcgttgtcaagtcctggatctccggctccatctccccggatcttgctgaaatggccatggaacgcggcgccactgcccgcaccacttggctgactctcgagaatcagttcctcgggaatcgggaaactcgcgccctccacctcgacgctcagttccgacactttgtccaaggtgatctacctgtctccgattactgtcgccgtttcaaaaccatggcagatgccctcggtgatcttggtgaactagtcaccgaccggacgttggtcctcaatgttctgcgcggcctcagcgaccggttctccgacatcggccgtcatcttcgcctcggtcgcccctttccgacgttccacgacgtccgggccactctcctgttggaggaactcacgatggcccatcgtgcgtcttctccatccgccgccctgcttacctccaccaaacctccacaaggcgggacttcgac

SEQ ID NO: 36158 - DNA, 388 bp, Zea Mays
ttctttgacttggttgatcccgtgtcaggcaaggatgtgtgtattagggctagtgagttgggcgacgaggacttgggacctcgttgtgtcatgtcgggggtcgtaagtggtgatcacgccatggatcgtgttagcgagttagtcctcgtgctttttgacaagggccaagagctagagattatgttgtttaattgcagggagcgtgtgctgatcttgaaggaagagccccctagtccgtgactttgtgttgtttcacagttatgttattatgtaataatgacatcacattgtttttgtgtgtttattgtgcgtggtgtacttgtgtaaaaacactcggtcagttgtcgccgattggcaaaattttttagcatgaaacattgccctcccc

SEQ ID NO: 36159 - DNA, 454 bp, Zea Mays
cttacaggtattcagagatgactaggggctttggaagaagattacaccccgggcatatcagaacaatccataatcgcagcacaaatgatgaaagggcaaaccacacccaaggcagccagcaaagctcacaatcttcgggaatgcagcaaacctcctacagaccaccagtctaagaggcagagggggaagaagctttggaggaaggtttagctctcaacccaggagattgttctgcttattttgtggggaggataagggacacacaacaaggacgtaccaagtcacgatccaaaagtagaaggagatcgctaaagccaaagcacggaagaatcagcgaaagcaggtcttgcatgctgcctcatgctattcgccatatatccctgaatatgtgggcaaccagcaacccacgacatcagttgcttcggcaagtcattctcaagccataggggttcag

SEQ ID NO: 36160 - DNA, 453 bp, Zea Mays
tgtataggttgaagggaggagtaggatactagagaaccttgtccagagcagtgttagagaagtttggggccaaggaatatcctagagccatgaggagattgttgggtataaggcagagaaggggagtagaggagtacatcaaggagtttgaataagctagatatgttgctgtggtgcacaaccaccaactggatgacacctttttgagatctcagtttgttgaaggtttgaagggtgaaatacaaggaatagtgatggcttagcttccaaagtggcctaaaccaatataaactgttgtgcatcatcgatgtgctcctgcacgtaccatcaagtcacaagcaaagacgtcatcctacccaaaagcatcacgtggataatccagtggtgcgcagtcaggtcacaaacaccgacaccatctgaggtaaagccctctgaataaaaaacagaccaaaa

SEQ ID NO: 36161 - DNA, 283 bp, Zea Mays
cgtcttctttcattttactcaccaatgaaattaaaattttgtctttctccaaaccttcgtttctcagctcaattacctctgagcgaaggttgctgagagctattgtgcagcttttgtctttggcgcttttttgagccctcaaactttaaagttaacagtttctgtacctttatactattgtatgcaaggctatcagcaagatcatccttcgacatggccgaaagtccttcctcaagcttcggaaatcccatgcttttggctatctcccggcaaacggatattt

SEQ ID NO: 36162 - DNA, 403 bp, Zea Mays
tggcgaagtcgattgtaactagatggttcgtgtagggtaccatagaacacaaagaattatacaggtttgggcctttgaagtgcgtaacaacctacgtcctatgtgtttatgagattgtatttctcggtggttatgattacatggagttctggggctagaagatgactatgcctactgcgatctgtctcgtttcataagggtgactctttttccttactctgatggaaaaaccaagttacacgcaccacgcccacgaacgttgccaattcaaaactgactctgacctctacgtaagttagtgagtcctcagggagcacgccatgtcgtctgcatgcataggatctagtccatgctccttcacgcccacgcaaccgtcattaagacctacttctggttgtgctcg

SEQ ID NO: 36163 - DNA, 378 bp, Zea Mays
taaatactgtccatgtaaaggattttcgtccaataagcctggtgcatagtttcggaaaattgattaccaaaattttagccaacagattggccagcaaacttgacgagatggtctctccaaatcaaagtgccttcatcaaaggacgttttattcaagctaacttcatgttggtgcagcagacatctaggctccttcatcatcagaaaaaggcttgtttgcttcttaaactggatatcactaaagcttttgattcggtatcgtggccctttcttattgaagtcatgaagcaactcggttttggacaaatttggagagatataatttgtggtttactggcctactcttctactcaagtcttgcttaatggctttcctggaa

SEQ ID NO: 36164 - DNA, 345 bp, Zea Mays
ctgattatccaaggtcatgcattccacattcatcaggttatgcttgtgcacaataacaatatcgaagctaacaatttaagaaaatattctttcaaaaatgcaaaaatatctttaacgagcataaggtgcttacaactatcctaatgcccgggtcttgttgcagaattgatagttgaagagcctgacaaataatgaagaaaaagagaggctaataaaaaaacacaactaagaagacagaatcctaagcaattcagataaatggacaaagtagaaaagctattgctactaactgaaggggttaattttggaatgtttcctatagtcatatagaccaaacactttaag

SEQ ID NO: 36165 - DNA, 526 bp, Zea Mays
gctgctttgtgtcctagtaagtaactttgatgaggatgagcaagcatgattgattgattgctggagagagtccacgcatgcatccgctcattggactcaaccagtaacagcgtgattggttgactgggtgcgcagcgccagtctccagctagtccggaccgctggatacgcaggataggcacgtttccgcgcatgcagccaatcaagccaaaaaaaagcctatactgcatgtatgggtacaggctgtcatcctcctctccggttaactaaacaggcgctgcgcaaggtcaatggaacgccgcgggcatggtggcagccggccaaccaaccaatcacgtagtaattgaacatgatgggacgaaaatgaccttattattgtcttgagtcgccggttgcgatgattagagcttccagaaatggagtcggtcctccatggcatggaacgggccacttgatcggcccggtgggcccccgtcgtcgtcctaacgacaaaacctgcaccaagctgactctgacagataatcaa

SEQ ID NO: 36166 - DNA, 404 bp, Zea Mays
aatttcacgattggtaagctatcacgccctgtccacgtgaaccgcgaacgatgaggacaatggtacgtgttcccggtgatccctggcggtccggttcaattaaagggttcgaggggtttgcggggtacctacggaggctagaacaagcggcagagggacttgagctcacctgaatcgagctgaccacggtgaggtcttcttcgcggtggcggagaaccaaattggggggaattcaaaatttgtgctcgctagtgggggatttgggatgcaagtgggtgcggtagctgcttgggtacatggcggagctgggggcatggtcaatttatagaggccgcgagcggtggctggggatttgggcgacgacgcgcggcggccggaggtagaagaaggtactggcgcacgtg

SEQ ID NO: 36167 - DNA, 303 bp, Zea Mays
cgattaggtcttcttctaagtgaaccggtacgaaaccaggtccaaccgatccccatcccacggttcacattagattgagtgaataggtatgctttagcttgatgcccatcgtctggtgatagatcgacgggccaggaccctcatccccccaaaccagtcagacgcggcggtgctgccgagcgctcacggtggatgcacaccggcgttaggtgatccggcagcccgaccttcccacgcggatacagacaagggctaaacgaagcggggagatcaacgatgctagcgaggtagcccttaccggac

SEQ ID NO: 36168 - DNA, 291 bp, Zea Mays
tactcctatgaaccttgttctccccttatgcacttaaacctaaattagtgcattagaccaactcaaccgtgagcataagagctaacccaaccaatagtgtcatggtggattgcataatctgtctaccccacctaacatcaaacaagtttttgaccaacatcatgtagtctatctcacctatatctaccttaaccatactccccacttcgataatatacactaatgtcgaatcagtaagaccaagactggagaagaaaagatcaacatcaaatcaagcatggaaggataaga

SEQ ID NO: 36169 - DNA, 900 bp, Zea Mays
gaggcaacattggccgcagatgtagggggaactccggagtgggccgtgttcggactgaaaactggctctatttcctcgggatccttctcttcctcactgcctgcctcattagcattcatgtcttggtgatgcaattctaggtgaacgttggcctccgcaagctcctcttgcacatcatggagctggttctctaggatctcgatggtgttgtcccagatttccacctgctgctccaatgcttggatgcggttgcccatctattccacctgtagatccttctccaccaatttcgaagacaggtccaccacgaagtcctccctatcgtcgagggtgatctttgcagcttgagcaagcccagcgaggtgcgtcatggcgtcgctttgcaaggtctacgggcggtatagtgcactcatgcactggacgatgattctcccaacctggtcgagatgcatggcccacacatccttcacgtggctcactcaccaatttcgaagacaggtccaccacgaagtcctccctatcgtcgagggtgatctttgcagcttgagcaagcccagcgaggtgcgtcatggcgtcgctttgcaaggtctacgggcggtatagtgcactcatgcactggacgatgattctcccaacctggtcgagatgcatggcccacacatccttcacgtggctcactctattacaccacattgggtcatccctcttctcggcggggaagagtccaagtgggtgcataatcatctccagtgggtggtatccatagaatgtcgtcaaagcttttagtgctgcggcctcagtggtgtcgtctgccctgaacccgacagttttggaatcaagtgaacgccacccaggctgcagagggtgagactccaggatctgccaaaccctacaacgtag

SEQ ID NO: 36170 - DNA, 372 bp, Zea Mays
gcacagttcttttgggacaactaagacccattgtaatctgttttgtatccaacatttgtacattccaacttctcaacgctgcaaatatattcatgttgttacctcactcagttgaacaaacggcttggcagcatatttcaccccatctatctactatcttccttctattacttttcttagttttgtttcagttgcatcacttcactcctcaaactgtattccctcatctatgctattggaatttgtcattgcatcaatgtcatatttttgtcagatgccagccagggaagtgatgtatactgcctgaattgaaactattatcaatttagatccctaactgcaacttttgtgcttgctataaaatattaccag

SEQ ID NO: 36171 - DNA, 355 bp, Zea Mays
aacaagtcgaatatctataaaattatccaatatctattgcgattaattttgtgcaactcgtgagccgactcatgagtcgtaggagctagctcagctcggcttgattcaccatcgagttcaaaaacctagctcagttcgagtcgctcaaggctcatgatccgctgcgagctcgagccagcttatgggcctcaagcttattttccaatcctactctttctctcctagctccctctctcttctaaccacctacatctcgtgtggtcgtcgccacgttgcctctttttgcagcacctgcgcccatcgcctctgcactcacaacagccacatccacaagcttgcccactgtgccgcttct

SEQ ID NO: 36172 - DNA, 779 bp, Zea Mays
ctaagggtgcagccggactagcacaataagtgcacaaaaccactctccgtgcaaaagtcgcccaagggtgcagtcggaataataagcacgaaaaatcaaagtcctttccaaaagactccgcaaaagtcgcctacaggtgcagccggaatactggtacgaaaaatcgaagtctttttctaaagaactccgtacagaagcctacgggagcggcctgatcaacgaaagcgcgcagcttcatcacacataattatggttacacacatacagcgagggcatcacacattacatcggctcaaccttcgggatgatacccatctccctatagttgaacaacattatcctcaattcctcacccgcaaacagacttcgcagctccccctcacccacactcgccccagccggcgaggacaacaattcccgtttgccagtcccatccacacgaagacgaccaccctccatctcaccatgatgacgcctatcacctcgcgacaactcacccactctacgtttcaccaccgcacttcgccgcctatgcccagcactcgcacccggatgatcctcagcacccatcacacgtggaggagtctccgccgcagccacatccaacgcttcaaaataatccaagtcctcttccgaagactcatccgtccacacaatcgaactcccagaatcatcagactcaaaacacttagacacagaatcatcagaatcgtcttcagcaaccacggtcgaagccaccataaaattagcattgtcagtagcggttgcgtgcgcaggcc

SEQ ID NO: 36173 - DNA, 365 bp, Zea Mays
tggactgaggacgacggtagaggtaggtctctaaaatgtcaagaagggacgaggtgtaggggggcacataataaactgaaggaaggtactaacccagtttctgtggagaggacaacagcgtcggcgactatgtcgttgcagtgctgaagcgtacgcagtcgtggggtgctgggttcaccgatgaggattacacaaagggttgcatcccctgctcgctgtagctgcgcgtgggtccgcacagcgccaggggccaccatagcagcggcagaccggctcccatgcagaaggtgaaggtggatcggtcctatgcggctcccatacggtggacgaagcacgattgggtcgaagcagggcaacagtggtag

SEQ ID NO: 36174 - DNA, 307 bp, Zea Mays
tccgttcatcacaattgcactattcatatacttttagccttaaatttataatattagtcaacagtgcccaaaacagacaaacagtggtgtatgcagtttcactgatagaacaaagggacctatgaaagagtccgctgttatgtttttccctgttttagtgaatggtgaaacaatccaagttcgatatttatcttttctgaggaagcaccacaagtccacaatacatggattacattgtttacgtgcatactttgtctgattgaaaatagatgtcattttattattcctaacttgtcacaggaaatgc

SEQ ID NO: 36175 - DNA, 377 bp, Zea Mays
gagcatgtcgcaccgccttaagtcattgccgacttaagccgactgcttcgttagtagggcatagtggtcaccccgggttatgtaagcgtgccaattggcagtgaacaatctgagtgcctttgaaacctttttattgatgatatttttctcgatttacagaatacatcgtcgttccgagagcttctgggatgtagctaggggtaaaacttcctgaggtgttctatattccatgagttcccaattttcgtgccatccatctgagtgaggcgatatgatcccggccgagtgacttctgctactatgaatggtccttcccatagaggtgataatttatgccgcccctcccccgttagaattcggcggaggacgagatctcc

SEQ ID NO: 36176 - DNA, 595 bp, Zea Mays
caggttcacactccacgtatatcttcacgcttgatatgggcaatttctgaacactttgatcttgaaggtctggatccccttttagctgatgacccagaggatccactgaatattatcatatctaacatgcacaagatattattcaacattgattcgtctgctactacatcaaataggatacaagatgtgcaggctgtgctaatttgtgctcaacgtttgggagcaagaaatacaagagcaggacaacttctcactaaagaactggaagaatttagggcaagtacttcagccgattctgtcaccaagcatcaatcacgttatgtgttgcaagtaataaaatatgtaacaaaccatcccaataacaggtgagtgtatttctgtactcatgttactaattttgtcacttgtgtaccatagtgtttgactgttcacatagacgagtatacctgaatgaaagttctacagggaaatgacaatgttataccttctgttgtttcaggtgggttgctgtaggtgatgctacaggggattatccatttagtcaccacaaacttacagttcaattttcagaggcatctgctgcccaagatagaaa

SEQ ID NO: 36177 - DNA, 556 bp, Zea Mays
ttttagttggtttattaagacttctttatttgccatttcgagaaggaattataaatatgtcattgtgcgtgtatggagagagaggaaggctaatttggtagagatgggcacactactgttttgttccaaaaagagtggaattgcttagtacaaagcactatgtaccttttgacatgttaatttctgcttcactatagctagtttactatcatcttccgttctcttctcaaacatgcagaagagctgcatatcattacattaatagaagaaaagagttacaacacacagacatgctagtttgttattattgtttagttatgtttatactttgcttttctatacttctcagcttttattttgatagcaaattcacaaagaacttgatgccacacttcatgtactatttcagactgtttagagagacacgagaagggattaagatccatcatctgttctaattatgagtccattgtggaaattgtgttatttcccttgtgatgggtgctgtatgtgaattaatttgtgaagttagttgttgaatccaatggttatggat

SEQ ID NO: 36178 - DNA, 750 bp, Zea Mays
ccgcctccaatggcggcaccgaggatgcgacctgcagcaacatcgcccagcacccgaggtggaagaagaacctgtgctcctgctctcaccagcgccgaagggtgcagccaccgagatccgccgtagggccgccgtgaaccgtggtcgagcttcatgcgttgatgtctgctcaaggtaaggtctccgttcaatgcgccatgttctttggctcgcgtagcattcgattgtgtgggaagctatgcacttgggtgggggcatgctgctccggtgtgttcgccgtcgggaggtgagcggcgatgctgcccagtccgtcgtggggtggaagatggccttcgggccgttggattcacaagcgacgatctagattaggcggaacataccccttcgcctatctcgaaactgggtcgttgatggttgatcctgcgaccacaattgcgtaccggttcggattgaagacaactttaatctgagccctcaattgcagatctaacgtcggtcatgtacatacaccctttcggctccgccgttttgcaaaagagacctcatagttttagtttaacaacccgccatccacgcggggtgaatatgagtcttagggaacttatgttttaacccctgcattcttataaaattgtgcgcccagtccaggaattaaagaaaataggaaaaagagatttagagattgatattgagtataaaaataattgtaaaacttgtataatccttagaaaattcatatgtagtccaaat

SEQ ID NO: 36179 - DNA, 312 bp, Zea Mays
tcttagaatggtgcgtcgaaggaacccatctgtggtcgaatccgactcctcggatgaccaggaaatccacggagatactccacctcgctctcgatccaagcgagggcgcggaagcggcaatgtcatgccgggtgctgaggcctccgggtctcaaagtgctcgcggtcggacatcccggaatccttccggtcggtctcgacctgcgatgaatccgcaggcgtgggagcctgcaagtgatgatgatggcgggaaggacgatgaggttgatcttcccccggcccacgctcctgtgattcgcggcttggtcctcca

SEQ ID NO: 36180 - DNA, 346 bp, Zea Mays
ggcgaggctgcgtcttcgacctgtgcacgagcggtcggtcagcacgcgcagccgcctctctcgttgtcgcctcgtgggtcgttgtgctcgtgatcctcttccactccctcgtcagacacagtgacggccaaagaggtatagcctcttcctgtatcttgcccctacgatttctctatcggtcttgaagagttagtcgtgtggctgcttttgtgtttgtgatcgtgacacacaaaccgatgccctggctgtcctatgcagccgatcagactccagtggtgccaacaaagtcagtcataacttgatagatctgagtgcctcgctgcattccttcgtaatacatatcgat

SEQ ID NO: 36181 - DNA, 586 bp, Zea Mays
taggaccttacagttgggacttgtattctactcgggggtcctcggcttgttgcatcggggccgctctagtcctcctggagtcgtttgggtggcgtgcactgccttactcccgatacggcgttcagtccccacgagttagtgagggtatatccatgggcgcatgcgggggtgttccgtcgtgtttgctagagaccttttggtactatgtgtacggttcagacgtggtttggtgatgttgcgtcttgtcgcggtcgtcgtggtagtgtcgacctaggttccctccttgtggatctgcatggcaggggtttggtcattcttcctgcctcattgacttgctcggcgggggcttggtcattcgccccgcctcacagacttgttcggcgaggacttggtcggtaaatgggtcagagagagattttatgggcctcgccttgggtacgtttatgggtctcgccttgggtaccctgttcctgggtatccgacagcagccccgatccttcgcgcgactccttagagtcggtcgcatgctttctttccggggatcagaagccccgagtgtgcataagcgcatcaaaatgatgtagcc

SEQ ID NO: 36182 - DNA, 286 bp, Zea Mays
gttcaatgttgccggggtgcccatggtggagaactgcatagctggctataacagctgcatgtttgcttacgggcaggtaaactgcaggtttcacttgctagtcgctgctgtaaatactcaagttttaagattgcattattctgttattacaaaattatctgcttctgctagactggaagcggaaaaacacatacaatgcttggtgacatagaaaatggaacacggaggaacaatgtgaattgtggtataactcctcgagtgtttgagcatctctttgtaaggatcc

SEQ ID NO: 36183 - DNA, 373 bp, Zea Mays
gaaccagatgatgactggctgaaatgtgttgaaaataccagtgatgaactacttggggcctactccaagtctgaagataacgcactatctgcggccttcgggagccgaaaaagaagaggctaaatagagtttttgatgctattggatttatgtatcctgactaccgctacccgccacgggggcaaaagagaaagagtggaacttctgggaaggatgttgcttcagccgcctcaagcgagcccacgccgaagaagaaataggtgaaggttcttactcaccgaccgcgctacattgaaccggccacagtgcctgactttggcggtgagacctcttcggctactgaagccgaaagacctgcccttacgcagagaat

SEQ ID NO: 36184 - DNA, 500 bp, Zea Mays
gaaaatgttacaccacgaaggggtacgctctaatttggaccgtcagatcgattccaacggtcgggattagatctatctttttataaaccagcatttgaccagagcccatggatcccgagatcaacggtcccgatcacacacaggcaaaggagcatggctgcgccaatctggaccgcctgttaggatcaaacggccacaagcgttcttcaatttcccccacccgagtcgcactgaggcgagcagagcacggtggcgaccatcgccggctatggctgtcccgcgccacggtgcaccaagcacagaaccgaatgccgcaaaatctcatggaggacaaagcgaaggtgacaggggtctctttacctggatataggaggcccacgcatcccgcccacggtacaggtggatccaaggtgaagaccgtacgccggcgagcaatccaccaaccaccagggcctcaccaagcaagatgccgccaaaaccgagcccaagagatcacggca

SEQ ID NO: 36185 - DNA, 345 bp, Zea Mays
ctcaaacttgatttgagttgtaatcttggtaaatgtacacattagcaattagatgggggttagggctggacgaaaaactcgtggctcgtcagttcgctcggcttggatcgacttgtttgaattttagtcctagagcctaggagactagaacttctcaggtctcgcctagttgccaatgaagcaggagcctgagggggcattctaggggtctgaagggcttcctactggcatggggccctaggggcatgtggctttgttggaccctgtggagggcaggaggccagctcggtcacgtggcactgtcgaagccagtaagtaggctggcgacaattgtcacagagtggg

SEQ ID NO: 36186 - DNA, 273 bp, Zea Mays
cggatctagaacatcagttaataagtagtattctgactaaacaacacaaagtattatgttcgatattaccatcgtgcagaggattatgttgattcttattattatcacaagtacaatacaattatcaagaattaatatgggcatttctgaaaaagtaccaaagtcatgcatagtggtatacatgggccatgacaggaaattcactgtaaggatttgctagacaactaaacataaaacctacctgaaatcttccaagaacaagagatagagtaa

SEQ ID NO: 36187 - DNA, 438 bp, Zea Mays
cgctgggcatcttggcgatctttctccatcactgttgacacaacatcaccaatatttctctcataaggaaaaattctcagctcacgagccaaacaggacataaaatagtcatcgtcggcggcccatggtatagggtaattcctaagccatcgacccccggtaaccttcagcatgcgcgaatatgtttcacggagctcgggcgaagacataacctccccgggacccgcgcacatccccattaactcctcaaaaaaatcccggaggccctcggcccgatattatgatccccgtaccttacaaatccattttcgtttttcgggtagctgcaaccacagtcttccccttcgaggtaccctcgacaggccgggtcttcacctattttcctcggtcatcgccggcgtcagtagagtccccctccgggtagggaccgtatcgcaa

SEQ ID NO: 36188 - DNA, 286 bp, Zea Mays
tgcccctcgcggtgactttgtattggtcgaatgtcgaagaccgtcgacgcggtcttttttcgacgtagatttttgcgggggatttttcgcttgtatattacatggctccgcctcgttaaaaacctcacccccgggaggaaaagagtgcgggccagaataaaattgttgtgggaattacaagggcgagcgggcctcgagcagtcaaacaaaaaatttgcggagattatcgatgttccaggaatgctccaattcttcgccggatggcgtcgcgagcctgtatgcgctg

SEQ ID NO: 36189 - DNA, 535 bp, Zea Mays
ccttgtgtggattataacggttctccttgtgctttccagtatcaactacatatactacatcatcaattgtaatgctggtctctgctatgtctgtggcaataataacctgcaacacaacatgaaagtcctgtttggattctctggtctcaagtttagttggttaaagttaaggactaaaactttagaccactttagctcacttgtggggtctaaagtttttgtgaggttgagtaaattttagacagcacttgacctcctgtttggagcctcaagaactgaagtgatctaaaatttagtggctaaactttagatcatgggattcaaacagggcctaagatgcagtaggtgtcagtttgtgggcctgtggggacaggagtggacataatcaccttgcggaagttatctggtggagactggaacactttcctttgatcagagggtccaagcagtgaatgtaaaggaaggatccaatcagatgatgcccctccaaatctaactaaagcagataatctatcaatcaacaagtcaatctctg

SEQ ID NO: 36190 - DNA, 307 bp, Zea Mays
aagttgtgcttttaattgtcatccttatttgcttgggctcctaccaatttgcacgttgctcgataagagtgcaaagtgcactgttgtcaaacaccaagtccatatgaagagatacctcagtgagcctgtggagtcatagggtagagtgtacctaaagttgcccaaaatgagccccatatcataattgagctaatctgatggccttgacaagacaccctattgccagcgtcgtttgtcgtcaaaaggaaccaggtcgagtgccctagagactcccatgatgacctcggtctagccacctacgcccgac

SEQ ID NO: 36191 - DNA, 939 bp, Zea Mays
tatggaatgtgctaagaatcctcggccactattcaacgtctcgctgacagcttacacaaaggtccctggacttccttttcttctccaaataagtccccgaccacggcgcgtttgccgttcatcaccgacgtcgcacgaactggccctggccagcggcgaacgctcagtcgagcgacagggggagaataacctacccaaggcgacctaggaacgagctttattgtggcttgaacacttagaggacgtcctgcccatgtgcacggcggaaaccgtgatgttgatcccgtgttcctaatcacctacacccgaattggtcaaacggatgctatggtgagctttacgtgcctacatagctgctagaacaacacttgagaggggcagagctttactagagtggtctggccacggacgagccgttctcggcggcgcgacggaccgaattgggggaaaacggcgtcgcggcggctctgggtgaaattgggagctaggatcggggctatagggccgtaagaggctgtgttttcattacgcgcaatcaatttgggcgaagatggagagggtagtgcgaatttgacttcgactgagcttcactggtggagatgaaagcacctcgccgtggctccttgctcaatttataggcacgacggtccggtgattgatccgcggccatgaggtgcgctattaacgcatggcaaccacgtaagggagaggcacagtgaggtgaatcaaagcatgtgcgacagcgtggcggacaatgctgagtcacggcgaccgccggtgaggtaactccggccacatgcggctgggttcgcgaagtcgtgccacgtacgagttaccctttccccggcgttatccatccaatactgcgcacgaatcgggacggcgatcaacgtcggcgagctgagctggcgttctgatctgctcagttactgtaccatg

SEQ ID NO: 36192 - DNA, 282 bp, Zea Mays
gagaaatagaggttcttattgctagctggaggagtcattatgctatactatcttatcatttcctggctgactaaatagaactgcatagttgatctttgcatgcatgtgaactgtctgaattcttgtcacagtgcaacaaccggcgttctgtattcatatatcactgtgtatgttaatcattgctctggttgctggataagttaagttttgtcataaaccacccgtctcagtcttccatttataaatcatttgtatgcacatggcgcttcttccccccccccc

SEQ ID NO: 36193 - DNA, 302 bp, Zea Mays
cacagaagagctctccatagcggcgatggcgactgaattggggggaaatccaaattcaggcgctgtggtggctaatcggagatgagggttggtgcccttgcttcgtaacaacctagtggagctagttgtgcactcaatttatagtatccgcgagtagtggctccaaatttggaagaggaaagctggcgacgaagagagggggtgagtcaccgacgcgagctatcgtggcgttcacaggggcaacgttacaggcgatggacaggatacctacggcggtttactgtgacgtggtaacgcttcta

SEQ ID NO: 36194 - DNA, 443 bp, Zea Mays
gtattcccatattcggttcagtacatttccctgtgcgtgtaagcggttgtgattgaggaatggcgctctggggttggaggttgtcctcaccggagtcttctccgccgcggaggggaactcgtcgtcatcactcagccgggtagaggaggaagacttggattcgcgccgtcggatgtttttttggacggtcgtgattagatgtagggtcggagtagcgtgaaccatcggatcttgtggcatcggctacgattggcagagcgttccccttcgcctagattaaatcctgaccgtccaaatctaatccagtggcccatttcacgtactggttcggttaggattaggatctaatctgagccctcaaatgtcgatcggacggctcagattggaagttaccccttcggcttgcgtagattgcaaatgaacccctgcactttacataaaac

SEQ ID NO: 36195 - DNA, 1020 bp, Zea Mays
aaaggctccagcatttccagtatcagcaacagttagaatcaaatattataggaagcacaattttgttcgattttttttcataataggtcagaaattcccaataagtagtaacgtgtatgctgtgtgatacgtatccaccctgttgctagtaatgtgctggaaaacatatgaggatcaccatcaaaacatccaactcttgcacaattaatacaggagctttgccattgcttgtgttaagatcaactacaactacccccttgaagcatatgaaatatcaatggaccataagctacacgtgtttggactaagaagttgagctcagccatcatcaacattaacagccagatcgatcggcaaaggtggcattatatatctccccaaaccccccgatcatctattctgatgaccattggattaagcttcgcaacacaaatataaagcaacaggaacatataaatcttttttgaagtgtcatgaaggaaatcactcctgttgtcgacttatgcttaggcaatgtacaaggcttactgactacaaccacatcatagagaatgagacagagcaaattcgaacaaagaattcattcactgaaacaacattcaagagtaaacgtgcatcataagatgatttgagtaaaacctctctggctcgtttggtggagaagcgaacaatttgtgctagagccagcgccttcttggcagtcatctttaacccgccatagatcttctcttacgaagggaaggcgaaatggacaatctccttggcgtccaacctactcctccacgattggtggatagcctgggcacataggactttgatgcccacatccattcctgtaacacccaaattctgaattgggaattggtagaagaaatctgaacaaagtatcattgggaaataagaaaatgaggagaaaaagaacttttcttttaaaaccatttcatgaaataaataaacaaggaaaataaaacttaaactagtaataataaaatagtatggtttatattcacccttggattt

SEQ ID NO: 36196 - DNA, 480 bp, Zea Mays
attggatcaggctgccagcgcggaactctcaccgccgacgatacctccgccgtgattcgtgtcactggtgtttgggttcgtgcgggtggcaagtagataacgtcgcggggtgaaagtgaatcaccgtcgatgagctggactccactccggctagccgccgtgcccctcccctgcatactgatctttcggatagaattctcaccgccgtcgtgctgtcaccgtcgcgcaccacgtgccttagcgctggctctcgtcgcggtgaatcatgcggtgcatgtccggtgatcaccggagttactgccacgccataggacacgtaacctcgcgcgccaggcttcttcctcacctccggccgccagctcgccgtgggcaaattgagagccaccgctcccggagtctttaaattgagcccaccgttagctccgcaacctcatcacgtaccccatcgtccagtatcacccccagtcctgcaaccgtgag

SEQ ID NO: 36197 - DNA, 596 bp, Zea Mays
gcggctaccagcgaatcggcgtggttggctactgaaccttggcgatttctcgccggtcgccatggagccgccgtgtcacatgggcggcattgcggtcaccccgatacgtggtatgatgccttctctgaggtttgcgcttgtatgaatcacgttttgctcgattcctagtcatgattacctcaccaatgcggctctcaaagttttccggtggtcctccaccgcatgctggggcggcgccgccatcgtgtttgtggtcgggatgagagagagaatgttgatcgttggatcataatcaacggttgcgatgaatactcgagataacgctttaaaccattggatctgggccataggtatataggatcggatggtttggagcagatcttggtgttcaaaatctagacgatcaatcttagatcctacggtctcgattgcgtaccggttcatataagacacgatttaatttgagccgttagatcttgatcgctcggctgtgctacgctcgtaccccttcggccctggtcgtttttctaatgagcccctgaatttctaataaaccaacccgccgtccatttggaggttagcctatgtctgggaac

SEQ ID NO: 36198 - DNA, 688 bp, Zea Mays
cctcgtctatcaattctataaacttgtctgctatgtcgtattgcttctcaataattttgtcaatgctgtcttttatggctatgcatgacttgtcaacctccaagtcatatgcagcaagaacatctgtgaatttagatcgatgacgatgtgggagatcgttgatcttacttgacatcatctctttgatagatggaagtttgatgttaaaagttggtcgaggcatgggggcagggcgcggtgcatcaaaaatattggtcctgcactccggctggttgttcagcaaaaattaataagaatccatgtccaccttcctattctatttgttccataaatattcataaacaatgtatataatacatcataaacttgcctcggattggcgatcgatcttaggtccaactgcatagcatgtctcggtcgagcttcggaactagaaataaaattgaagtgactgtgagtaaccaactgtgtaaatgtcaataaccaactgtgaaaatatgaataacttacttcacaatgtccgaaaggttcagccccctggcgtaccttcctcttgtcagctttggtcaaagcttttatgttattcttatcaaagaatttaatgtgaggtgtgccagtcttattttggggggcagcggctgtatgcaggtgatccaagtaatacaactacataaaaagaattacaatg

SEQ ID NO: 36199 - DNA, 582 bp, Zea Mays
tgatggtcatgaggaagatgttttaggtgcgggtgaaaacaacacaacagacccctagcactacactcaaaggaaagcgcaaggtgttccatgactcttcaaagcctaggaagaaaaaggaactaagggatgagtacatgagaaggattgtcgatgcattcaagtctaggacctttagctcgaacaagtccatacatcctttgacaacgacccggtgcgcaaagagattgctgctcaattacaataagtcatccaagatgttgcgacttgcatttctttgcaactcaattgttaatagacaaacatcatcaagatgtctttgcaacacttaagaccaaagaaggaaggaacgcttggctatgcggggcttacaacaagcaagagtagtccagttacgtcttggtggtgggatggagttgaagctgtctatgtggtgtcatgggtggccactgttttgtgttgtcgttcagagtcctgttcgtcgtttaggtgttttgaaaaccgttcgtcgtttaagttttgcagaactgttcgtcatttgaggttgttgtccattagagaactatttcaatttttccattt

SEQ ID NO: 36200 - DNA, 395 bp, Zea Mays
ctttgttacctaagtcccctgatgctttggaaattaaggattttaggccgataagtcttatacatagcttcgcgaagattgtgtccaagctcttagctaacatattggctggaaagcttccttctttggtttccaacagtcaaagtgctttcataaaaggtcggtgcatccatgataacttcattaatgtgcatcaaactgctatggctttgcacaggcaggagcctatgatacttcttaagctggacatcacaaaggcttttgactctatgtcatgcctttcttgcttaaagtattgagatttttgggatttggccctgtttggtgtggtgttttgtccaagctgctaagtagttcgtcaactagggtgttgattaacggcgagccaggtgacc

SEQ ID NO: 36201 - DNA, 333 bp, Zea Mays
tcttgcgatactttctatatggctctggacggcgggttgaattctatattctctaagggctctttacaaaatatgccacgcgaaggggtatcagcccaagagcaccgttgaatgcgagatcaatggcgtagattagaatcgaatcgctaggtgatattagccatcggatctctgatcaatggctatgcttttaagttaatgtgatctgccctagatcactggatccaaatctaacggtctgatttcaatacaggtgaaggggtacacggttctaatcttgaccgctaaaaacagaatcaacggcccacatcgttcttcttcctctagcagcca

SEQ ID NO: 36202 - DNA, 813 bp, Zea Mays
ctatggtacagtaacctgcttgggttcagaacacttcaccgtcgtcgatcactcctccgccgcgattcgtgtcgccggcgttaggattcgcgctcggggtgggtggataacgtcacgagatgaaagatctttgtcgtcggtgagatggaggtcactccggtgactcaccatcaccttctcctttctgttttgcggctgagcagataagctcgctggggaaccaccgtcgcacgaccttgcaccacgtatccgagtacctccaccacatcaccgtgattcgttttagcttcccgtcgatcaccggagtagtcgccacgacggttgccacgagttcacttgcaccagtaacctttcccctctccggccgccaccgcgccatcatcaattcaagcgccactgcccctggaatctataaattgagcccaccgttagctccgcaacctcatcacgcaccacaccgtctagtatcgctcccaatcttgcaaccgtgagctccaatttcaagttttccccaattctgttctgaaacaccacagggtcgagctcaccgtggccagtcctccacaggtttaatcataccatccttgttcttgttttagcatctctgtgtgctggtgatgctcaccaactcacccaattaagctaagatcctatgaatcaccgggaacgtgtagattgttagttcatccgcgcgctcaccgtggccagagacattggtgtagttgtttatgaaattaacttggggaaaaccttcactcggccctgaatttggtttagaccaacgtagagcgccagtacttgccccaatcggcc

SEQ ID NO: 36203 - DNA, 558 bp, Zea Mays
ttgcttgcgcgagctcttacgcatcttcttctcttcgagccttccacagttctacctcccgcccgctggtccctagccgtcaagagattccacgctactggctttcttgccccacgccgtatggttatcgtccagcacgagcggagaaactgaaacacgatcccaaccaattcagaacccgatttggtgatcacctccattctcggtagcacttaattccagggacagcaataagaattgctcctctccaagttcttttggagcgtaatcttatccgtttgggtcggattgatatttgataacttgattgccatttggggagttgcgggagagagagagagatgggccagagcaaggcggagttcttgaagcagttcggtggggactacggttacccggacgcgcctaggggcatcgacgagctgcgggccgccgagttcaagcgcctggaaggtgtgatttcgcgatctcctaaattcattccgcgaccttcttttattaggaagtttgagctttgttgatgtggctaagaggagttatgtcaattttgacgacgtg

SEQ ID NO: 36204 - DNA, 597 bp, Zea Mays
agaaagtagaaatacggatacggcgtaccctacgtgtggtcggccgagcatccagcccggaccctttcaggaggaaagttgcaggctatcagcttgacagctgcaagccaacccactattcaacactgctccacatggcgcttgccaagaccacgctttctctcaaatcaaaactccaaaagagatcctccatgttcttctttcctgtgacgagaggaggccagggatacccccatgctttgccgaacataagaaaatggaaaagctggccaaagctacaaaagctagggcttgtcctatcccactaccaaccacttactacctgggtctgacgtgtcatggcctggatatgcacgccttttgtgttctctatgactattctaataaaccaataatccacccccaacccaacccccccccccccccaaatttggcctccccggatttgctatatcatcccctccccccccccccccccccacccccaagccagatgatcttagcaagtggggcccagctgttgaacgtccaacctaacccagcttttgcacggtagtattattcttaaattttctaacacatcgccaatccttcctt

SEQ ID NO: 36205 - DNA, 1329 bp, Zea Mays
tgctgttctagggcctgtttgaatcattgagccacctatttaggccattgaaacgggtggatgaaacagaaggagagattgtgtataatgcgtgtgatggtattgcaagtctttagggtgaatatataggagtacatggcttgaagataaggaaggttatctcgggattccaatcaaatcctaaaccaaccatatcaagagttgctaatatactctaacatccccttgcggttgtagtgtttgcaatatgaatggacatactagagaacaatggaaatacccccctgcagtcggaacgctggtgcgaatgctgcgactggagtagcccatgcagatgatagccctttgtgctgataatgtcgaggtgccatgcgtcgggtagctatggttgatgtagctgtcgaggatgccgaagaatacagaccgcacaagtcgcgggcgcgggcgtagaacgcgggaaggtccacagcgcgccaagaggcgccaggttgacggtggcgcagaaggagggcgccatagacaaagacggtgacacaaccgtgacaatcgatgaagaagtcggtacagaggacgatgtcgttgaatcgccatggacgatgcgtgctctaggtttgctacgtctggaaacgcgtcgtggacgaaggcacgagttgatgttgccaatgcgaaacgtactaggtagagggccctaaccatgtgtcagactgtcagcgtctaacgggggccaacaaagaagacctccacgatggttgtggtgcggtatggcgggaatgctgttgcagctcactgttgtcaaagcggagtagatgaagtagtcgaggacaagacgacgacgctggcaacaaggttgtgctggatgaaggcgaagaggtaggcatggcgacacatcgaggttcttggagttgccgcagtgggagagtcacgatgcataggaagaagatcctccacagcgccactatagcgtgatgacactacttgaagtcggtgactcgaacagttggagaagaccatgtgcgagagacgtgcaccgacaagagtcgatggcgtgtagatgctacgacgaggatgataacagacgacgatgttgttgcctgaggaggtgatgcagcggcaaccctcttgtttggcgaagcatcgcacgatggacgacagatgtctcgggagggtggttcgcccgcgatttgttgattaggccgacaacgtgcgaggcggagatgacaatggcgatgtcgacggtggagcctgaaaggatcacgatgcccaagaagggggtgaattggtcttttctaaaaattcaacaacaattaaaccctaagcaagagtccaact

SEQ ID NO: 36206 - DNA, 378 bp, Zea Mays
gtcgccacctgcaatggcaaggacaagaggaggcaagcgatcagggagcgcaacaaggttggtggaggaaatcctagcagactaaggaccaacaaaaagggaggagaaaagaacggatgagagccaacaaagagaaaggaggggcaccaaccatggtggcgatagcctagcggctagccaacaactaggaggggtagagggagaaaaaaattggttggatagcatgttagaaagtgaaaaccctaatccattgattataagctaaatattacatacactcggcactagttacatacacggactgggctctaggctcataacacttagacatatacaaacaatctaacaagcatgaccataaacaatcaaatgctcaag

SEQ ID NO: 36207 - DNA, 546 bp, Zea Mays
tgaaagagactatgctttagaaatgtggagattgcttgatccagattcaagattaattaattctgttcaacttcatgataggatggtgtgcgtaaaatctggtatgtaatttgtcattttattaacaaagtacaaaagagcatagcgtaatttgtcattgtaaatgttgtgatactcagaagctaacaaactgtgaaaaatactactcaaatttcgtttttagtttcattctactgaaattaatgccaaatttaccttttgtaggtttaaagaagtccttgctaaatgtcttccatgatggttcttgtcatcctggtatggcattagtaattgatgatcgtctgaaagtttgggatgagaaggatcaattacgagttcatgtggttcctgcatttactccatattatgctccacaggcagaggtgatgttcatagcctgtataccaatataaggatatcatgttgtcactaacaggacccatcatttccacattctaggcaaattgttctatcccggttctttgtgtagccagaaacgttgcatgc

SEQ ID NO: 36208 - DNA, 407 bp, Zea Mays
ccacccgcgcatgtcgatgataggcatgcacaagattggtgtagcgaggaggagccgatacaggtgaggttactaaagaggccctaggtggcacaagcgaggtcaaaaaagtcaagggcgaaggtggggccactggagccgcctatgggactggagccgccagcaagccgacaaaggtgcggtagggcacacggaccaactaagggcgttagggtagcctggaaagagtccatgggcacaaaagccaagagaggcactagtgccacaaacgggagcgacatgggggaacttgcaggtgaaaaaacaaaaggtggttgaccagagggagccacgaggccataattaagaaggaagtccagctcgggaagggagttagcaaaggactaagaggaattcgagaaggggaa

SEQ ID NO: 36209 - DNA, 353 bp, Zea Mays
ttcagacttgaacagttgtctcgtagatgcatcattggttgtcgacgttgtcatagcgctctagtcagcacctagctcccgacgccatggtgtggggccttcggctcacagtcgcgtggcgaggtggagcgggtttcaggttcccatttaggcctcatgttcattcgggacttccgcctcgggaagccagctctagaatactgtagcaattgcaacatttcgacgtgtacgagggagccgtggcagtctgaccttgccataggtcggatggtgcggggcgtggactacttcgacgcatgcttgccaaattccctgtcatggcttacccgtttgtcgttgaggcaatactcgct

SEQ ID NO: 36210 - DNA, 322 bp, Zea Mays
gtggtcgccaccagtatttggcgatcgttgagcttttgctgtcttctgttctcctgcgatccgtgtccgccgaagatgacgttgacctctctatcgacgcgcgggaaggctccacctcctcccttctcctgttgctggggttttcgtggttctcctggtcctccccgcggcggaggggaggtagaggttggaagggtcggccgtgtccgacagagtgcttgaagtctctgcagttccgaagggtgtggcgcatgtccttgtggtatgggcactgggcgtcgaggatgtcgtccagcgtgcgttcggccccacgaggtcctcc

SEQ ID NO: 36211 - DNA, 551 bp, Zea Mays
cgcccaaagcgcgaggtacaaaccagtaggtcgacgcctcaatttctgaattaattaataattattacaaccgcacgcatactaattaaatcagcacacgtgaaatagagatgatgtgtatcctctcgtctcggcgctccacctcagctctcctgtgatgcgattccccctccctacagctacaacttgctcaagcatgcgggaatgcagcagcagcgtagccggcaggcagcgctgctgcagggctagtagtggtacgataatgatgagagtctgctgctgctgggctggttgtacgatagtactactagtgatgagagggatgctagctaggtgctctgctatgtgttgctctgctctgccctgcgctgcgtcccctatcaaacgagagagggatggcccacgcagacgcagcagcacccggctatttgcatgggctataaaatgaaccaccacctcaatcgataggaacgaccggatcacaatcgccactagcctacccactagtacattctagagctgtcgatggcctcaccctccttttcactgct

SEQ ID NO: 36212 - DNA, 304 bp, Zea Mays
ggctcgctcaattgctcgatggagcaatggcgccgccgcgcaccgtgggctaggtcccctattgcacgaccctcggtatgaaccacctccttaggctcgatgttgttccctatcccttttacatctactagtgcttgattcggaacattggggaccatcaggacgtctcaccggcggcgctcggccacgaagaagactagcgccgccgtggtcagccagcgggttggggaagaagtccctttggccgtcggatccttgttgtgtgcaccgaattcgaccttggggtaaccaaacatgtgtcgtt

SEQ ID NO: 36213 - DNA, 423 bp, Zea Mays
gcgcatcatcacgaagctggacagacgcatcgattccatgttccagcatagggagtcacgcctacacgcccagcgtgttcagccctaggactgtctctacgccattcctctggtagtggatctgccagagtgccagtgcctgattgcgttcgtccccaagtcatcggtcgattggaaccagaggagcttcgccgggtggctatgtgaggattgcatcgccattctctggctcgttagtgaatagatttcggaggatctcaatctcacttatcaagatgcacgacacacataacgcattaatgcgcttggatacatgattgcatggagttgtgcttaaggaactgtgcgtgcaatgtttacgcttacgcattgccgagagacaacgactatgtcatatggtcaggttgatactgttcagtttac

SEQ ID NO: 36214 - DNA, 283 bp, Zea Mays
tgcgaatacggccaacatgccacattaccatacaaattacagttacatacacacggcgaaggcaccacatattacatcggctcaatcttcgggatgatacccatctccctgtaattgaacaacattatcctcaattcctcaccctcaaaaagcttccgaagatccccctcgcctatgctcgccctatcggcgaggacaacaattcccgtttaccaacccagtctactcagagacggccacgctccatccccatacgacgacgcctaccacttcgcgagaattc

SEQ ID NO: 36215 - DNA, 581 bp, Zea Mays
tctccatgcaaaagtcgcctatgggtgcagccggactagcataataagtacgcaaaatcgaagtattttccaaaaggttccccatgcacaagtcgtctacgggcacgaccggatcaacgaaggcacgcagcttcatataaattacggttacatacatacagcgagggcatcacactttacattggctcaaccttcgggatgatacccatctccctatagttgaacagcattatcctcagctcctcaccctcaaaaagatttcacaactccccctcacctacactcgccccagccggcgaggacaacaattcccgtttgctagccccgtccacacgaagacgaccaccctccacctcacttaccctccgtttcgccaccgcccttcgccgcctacgcccagcactcacaccaggaagaacttcagcacctatcacacgtggagaagcttccgccgcagccacatctagtgccgcaaaataatccaagtcctcatccgaagactcttccgtccacacaaccgaacccccagaatcatcagactcaaaaaacttagacacagaatcatccgaaacatcttcagc

SEQ ID NO: 36216 - DNA, 395 bp, Zea Mays
gtgatttgcactaggagcaggatagcagatgaggtcaaacgaaacgatgatgcgcttgagatgggaaaatggctgctcgacacggttgagaacttgagatggcatacgagcaatcaagcaggggtcactaccacttccggctataaataagagataaataagagatgagaccattatctcatgagacagccatgcaatgtcgccaaggatttaggaacaaatagtttttttgtcattaacgacaacattgcgtcgtggtttagttggctatcacgtcagtctaacacattgaaggatctcctggctcaacatttttttcccttcccttaagtccgtgttaaagaaactgcatcatgcaacgctggaaattttgctaaacaaatgacggatttgca

SEQ ID NO: 36217 - DNA, 379 bp, Zea Mays
cagggctcaattacatagccaagaggcttgtgagataatgattagggcccatttgtagcccctagatgctcttccgttaatacatgccacacaagaaaaaattgtgaaaatctcccctcacctcccctataaaagtgggaaaggacctagcccttgatttatttaaactcagctgctctccactctcgtctcttatattcagtccaagaccaacaatctgaattactgctctacgcggtaggtcactgctcgcttagctcttaacgctttttgtaactttggctacaatccccaactactgctgtcctaccaacaggggggtggagccatcactatttatatgttcctatgacaaaagaaagatgagagtgcagcagat

SEQ ID NO: 36218 - DNA, 271 bp, Zea Mays
caagctagaagtccatacatccagcttagactaccaaagcgacccatcacccaatccaaaaaagccaagcctaccaagccataatatggctagatctaacaagatacatgtcatcgattccccgggctacgaagcatccgccaaccgccaacctcatatggtagggacgtcaatcatatacgatgatgaagacctacaagatgacatagacctcgacatcaacactgaggagcagctgctactcataagtctttgcatgcgcaacaacaac

SEQ ID NO: 36219 - DNA, 292 bp, Zea Mays
gcgagcttctttagcttcttatcgtaatccatcttcagggttcggtaggcttcatgagtgttggcctcctcgccttctgctatatcaagacactcttagagggatgccttctcctttttaagttccttgaccttctgctctaagttttccacccgggagtttaggtgggtgcagtgggagaaaaggtcgtcgtagtggttatcgagagtgtggaggtatccggccatgtagacgatggtggggtcatcctcggtaggatctctccctgatagggcctgaagtcttttcctcc

SEQ ID NO: 36220 - DNA, 339 bp, Zea Mays
cattgatctgaaggtgctacctctgaactgctatgatatcatcttgggtatggactggttatcttcacatagtcccatgcagatacattggcagcaccaatggttggcttttcaagctgaacataagaatgtggtattacagggaatagtttctgataattctaccttgcaaccaatttcagtccctcagctatttcatctgcaacagcacgagcagctatggtgtgttctccacttgcaggcagtggatcaaatggactcatcaccacctcagagcgctctctcggtggaaattcagagtttaattcaggagttcgcctccctgtttgacaaaccaag

SEQ ID NO: 36221 - DNA, 568 bp, Zea Mays
tggacgtttgacagcgatgttctactcctgttctagtatatttcccccctctttaagaagggcagtaggaaggttggtattgtcattctgacggctcgcgttctgttcttttgatgattgttcctggtcgctcggagggttgtcatcattcatcaatatcgtggcggcagataattctggtaactctggatcgtctagttttcccgaaagcatcttaatcgttcacaatgacctaatagcaattcgttccacagtgatgaggaatcttataaatacatgggatgggacgggtggtgttttcaaataaacttgaaacgtgatgcctcaatggcatacatcttatgaattgaggtaaaagatagtgataacttgttagttcatcgttcacaattgacgaaaaaacataataatataggcaggacaaagaaacaaaccactttgatttatgtgtcactttaggatcatggataatattccttacaagaacttttattttttcacagtttcctgtaaataggaatatcagcctttgtgtatctgatgctgtgaagcaaacattcgttaaaaa

SEQ ID NO: 36222 - DNA, 376 bp, Zea Mays
gtgatgtctggtgtgtactatcctacatcacctttaatgttgcaccacattcttcatattaataagcacatgaacatgtatgagaatgataatttgcttagacatatagttgtcccaatgaaagacaaattcttaaaatattggggtacaattcctttgctatatgcatttgcatttataatggaccctagagcaaaaatgagaggtttcaacaatgtgcttgcacccatgtctcagctgactcattctgattactctggatatctaacttctatgagggctgatttatctgatttatttaataaatatgatgacaaatttggttctgttaggttgcagaggacttcaaatgctacccctagtgaaggtaagagca

SEQ ID NO: 36223 - DNA, 462 bp, Zea Mays
gaatggcttgccggcgtattctgtcgtggggagttctggcgccgccgtgcgacaccattggggaagatgggtcgtgcaccgtcggatacggggcgaacggctggattagaattgggtgattttcccagggcgattggcgaccgttgatccaaaatcccgtggtggagattagatccgggagttatttaatcctagccgttaacctagaatcggatggccagcaccacgtcccagctctctggatgtagcgatctaatctgggccgttcatgtttgatctggcggcccatgtgcaacggtaccccttcgcgggtacattttactaaagaaaccctaggcttctgagaaaacaacccgcagtccactctgtggggaatcctgagtctaggaaaacttgcgatctagcccctgcactttccagaaattggcgcgcagtccagagagtagtaaaattagagaatta

SEQ ID NO: 36224 - DNA, 408 bp, Zea Mays
ctgcagtggagccttcgccgcgcgaggagggttccgaggcgctcccaggcgcgagtactgggtataggcggcgaagggcggtggagaaacggagagtgagtggattgtcgtgaagcggtaggcgtcatcatagtgagatggagagtcgacgtcttcgcgtggacgggactggtaagcgagaattgttgtcctcgccgattggggtgagtgtaggtgagggggagctgcgaaatctttttgagggtgaggaattgaggataatgctgttcaactatagggagatgggtatcatcccgaaagttgagccaatgtaatatatgatgccctcactgtgagtatgtaaccataatttgtatgataaggttgcgcgccttcgttgatccggccgcgcccgtaggcgacttctgc

SEQ ID NO: 36225 - DNA, 478 bp, Zea Mays
gtggaggggtgggagtggtagcctttcttgatattggagttgtgggtgttgtggagctctttggttgtaattttgatgctgctagggatggtattggtggtcgtttttgtagtgagggtgatggcattggtgggggtgataagtgtgagctatggctcattggttgttagtggggatggccctggccatgtgctctttggtttctttagttttggggcaatccctggttggatgctctgagtcttcatcgtggaaggcgcactagaatttcctgggctgctagcgacctctccctcggcctctatctcgtagaacgttgtcgcgacggccttgctacgagtggtagcgttgagggggacatcgccctactgctactgattagctatgttgtggacctggggctgcgactgactgtgctcttggcgaggggcattcctactgtgggccctggttccatgacttgctggactacgagtct

SEQ ID NO: 36226 - DNA, 318 bp, Zea Mays
gcggatcgttgatctcatctccaacggtcacgattagatggatggttgagagtgtgggaaccgtagatcttagatggatggcctagatcaaaccttggcgtaccccttcgagtcattaaaccagggtcgtgaattccggatccaacggtagcgttgagcgcagatgaataactagcgtgaagtctaatctggcgcgcagatgttgaatttgacggtccatgatccacgataccccttcgctggcccttgttgcgcataagcccccagagatactggatatcaaccttctgtctggggctgcaacgctttgagtctcag

SEQ ID NO: 36227 - DNA, 489 bp, Zea Mays
tttggaatgagggtcatcctgcagagggagttgatgtatcgataatacttatgaatgtttgtagactcccaatacttcccagactcagaaagatgaagatctttggcttcatctctagtaggctaccgaaaatcatgtatcttgatcttgtcgccagagatatcattgttagaaaaaccaagaatgtgagcaaatcgacgatagctcaccttataccaactaccttcaatgtagaagttcagataaggatagttgtatggactctcctcgtcagcgggctttatccacaaagttgagtagaattgagcaataacttcatcattccaatcatattggaatgtcatgatactcttcatctttttcctttcaagggccctcaatgcctgtgtcatctctgggtccccaatggcctcacaaccttcccagttgatatagcgttgaagcaggataggttgatgcttcttggggaggatcacagaattataaaaa

SEQ ID NO: 36228 - DNA, 507 bp, Zea Mays
gcacggccggataagcgaaggcacacagcctcatcatacaaattatagttacatacatacagcgagggcatcacaccttacattggttcaatctttgggatgatacccatctccctgtagttaaacaacattatcctcagctcctcaccctcaaaaagacttcgcaactccccctcacctacactcgccccaaccggcaaggacaacaattcccgcttgccagccctgtccacacgaagacaaccaccctccacctcactcactctacgcttcgccaccgccctttgccgcctacgcctagcactcggaccaggaagaacttcagcatccatcacacgaggagaagcctccaccgtagccacatccaatgccgcaaaaataatccaagtcctcatctgaagactcttccgtccacacaaccgaactcccagaatcatcagactcaaaaaactaagacacggaatcatcggaaccattttcagcaaccacggtcgaagccgccacaaa

SEQ ID NO: 36229 - DNA, 1111 bp, Zea Mays
gaggatgcaaattccaatgattcctctacatgggaggatcactgcttacaaagttttgaagttgtcgaagcaaagccaagtaggcggaagagcaagggtaactttgcttattgttttattggcattcatattgtaactatgacatatgttgtctactagtttttagttacatggccctgtggccctgacaactttttggaagtttacatagttgagatagtttaccgcgaactatcttatgattccctcccgcacttaacagctgcaaaaaagaattccaagcatggaaacttgaaggaacagataagctatcctaccaattctgtatcttcaaattctgaaactgcaaatgttgagggtgttcagaatgatttagaggcaagtgaggaaagatctgagagtctaggcaatattgatgaaggatctgatttgaaaaaggaaattcctaaggatattgataaaacttgtgcaaaggaggtagacgaagaggtgatagagcttgataacatgttctttgaagactcatctgcttgggaagcagtggctccagaaatcttgaaacagcaacaaatagagaaattatcacatgatggttatggccatcttattggaaacatagatgatatatggaagaaggtccaagtgcctttttactctttcttcatattgatgggacatgtttcatgtttgatttgtgcttctgctatgtactattttctaaccgttcttttcttttgctcaaccacagggagattctggtaaaatgccgaaagctgttctacaaaagttttgtcaaaaacttggttgggaagcaccaaagtataataaaatatctgagagagatggcaaatttgtatattctgttaatgtgttgcggggagctactggccgtggtaagagtcggaaggctggaggcttgacgataatccagttacctaaactacatgaagaatatggatctgttcaggttacaacctttttctgttactttgtacactaacacttcttagttcttacaaatactctaggtaagctaattattattctgatatggcacttctccccatgataatagttttcattattatacgtacatgatacactgagatat

SEQ ID NO: 36230 - DNA, 324 bp, Zea Mays
gcagcaacgtctgaaggcacgtccgggtgcagtcgagcatacaatacatgcacttcttcatgtaaagtattacagtacacttgcaggctttcaagggatgcactaagctctgccacacgagctagagctttctcttcgcagtctcaagcgaaagagcgcgagttgacggcccaatcaatggtcgtaacccgttctgagatttcatactgtaggcgactgacttcagctaacaattccgctatacggtgactgtcctgctcacgtgccctattcctatgccgtagttctgacagtagttgttccaccctggccactaggtctcca

SEQ ID NO: 36231 - DNA, 278 bp, Zea Mays
ttaacccaggtatgaaggacctcctccgcctcactttggtctctgatgtgctccgcgacaaactaatttcgggattggggcgtgtgggcggcaatcgcatgggcgccggtgagcctccactgtgggcgcaccatctccgccgctctggtggtcgtgaggtggaaggcctcccatggtcgttagatttagatagacggtggagattagacatgggaatacctattgggaggataaaccagagccgtagatctagatccaacggttgtgggcctatatcg

SEQ ID NO: 36232 - DNA, 409 bp, Zea Mays
gggagagggtacaacagcggtggaggaggcggaggcggcgtcgacggagggagatgaagcctggttgcggcgctgctccgaaagcgccagtggaatccatcggaggcaaagtttctcatatgcagatggccggagatggagaaatagactgtgacggtggaggcgccttgcaaggacctctccgcccatcagtgccaggacgcgcaagagccatcgcaaatccattttcattccccttcggatgcagcgacgtggccttctgttcatccttcaagctagcggctaaaaaggcatgaaactgggtgtttagggtaggaacgtggctacttgtgtttgtgtctgattggggtcgcaggaggaatccatgattagcatcgctgatgctttgtgtcagtctccaaacacggag

SEQ ID NO: 36233 - DNA, 282 bp, Zea Mays
ttgtttgcagaaatcgaagaattcagagttggtgaagttggatcctaggtcagttatgatgctatttggtatcccaaacctgaatattatgtcttgtatgaactccactgccttggctggtgttaaagaggcaataggcttatactctatccattttgtgaatttgtcaatggcaaccagcacatgagtatagcctccctgagctttcttgaagggcccaatcatgtccagcccccagcatgcaaatggccatgttatagggatggtctgcagttgctgtgc

SEQ ID NO: 36234 - DNA, 326 bp, Zea Mays
cgcacggtggataaggttctggacctcgccggcgataaggacgccacggcggtcggaatggactggaggccgcggtaaatatcttgggtcacgtggcagtaaccctctgtggtggcggactccggttaaacgacgtcgccgtgccatccccggattctaccgcgcggcaagctcacctgcaccgtctgaaatccgcgatcctcatccgtcgccggccagccgtctataaatagagcgcgggcacggcttcgtcaccacattccgcacatcaacaactgagcttttgactcgagctcaccggagagcccccgtagccccaaatttcc

SEQ ID NO: 36235 - DNA, 281 bp, Zea Mays
cactgtttcaccctggccaccatacccccttgccttacggtcagtctagataacctcgccggagttgtccgcctgccgcgcgatggccacgtgccttgaagctttaccacgtcgcagtaagccgctttagatagctggttcatcgccggtaagcttgccacggtgaaagccacgcatcccttgcgccagtgacctcccctctctccgatcgctgcgcgttttctcaaaattagccaccaccgccgatggaacctataaatttccgccctagtgagctccgc

SEQ ID NO: 36236 - DNA, 601 bp, Zea Mays
ggaaatgcgaaattggagctctctggtggaggatctgaggtgcggctgggtgcgctagctgcttgaatacataatgagttgatgatgcacttaatttataggctccgggggtggtggttctcaattttatcacggcgtgctggcggccagagatagggaagaatacgggtggttgtgaccgtggcgttcaccggtgcaacggcgcaaggataacacctaagggagccacgattactaccgcacagtaataagttatggtgtggcgcaaccagggtcaccggagcatccatggcgacgctggcggtctggccacgtcacaacggctaccggcacagtgataaacttcaactcgcgatcaaatccattcccccatgagatcttttaccttcccgtggatatcctctgcgtgccaagcacgaatcacggcgaccaacgcgaattcggatgcgtggatccctggcggcgagggactgagctggcggcctgatccaatcattgtaccatcgcgaagtgtatttagtcggtctgacaaagcagattcaaggcatcttctctccaatttttatgtgacaatctcataattcatctatatcaaagctat

SEQ ID NO: 36237 - DNA, 562 bp, Zea Mays
ggcgcgatgtgctcagtgggctgctcatgacatcctctactcatatccttctcaatgggatgcctggtgatttcattacacatagaagggggctgcagcaaggggaccctttgtccccattgttgtttgtgctagtcatggacaatctcaatgcgcttattatcagggcatcggatgatggactgctccaacctctatcttcgcgttctattcaacattggatctctatatgttgatgatgtggtactctttttacggccggggttgctagtgaccttaatattgttgctcggattttggatctttttggagatgctacttgtttgaaaaccaacatttagaagagtagagtggtgtcgattcagtgttctcctgctaatatgcagacggtccaagattgttttccttgtggtttggatgtgtttccaaccatgtatttgggtttacctcttaccctaaagaagctcagtaaggctcagttgcaacccataattgaattactagctgacctccttcctgcttggaaggccaatttgatgactaggctagcagggccatccta

SEQ ID NO: 36238 - DNA, 508 bp, Zea Mays
gctggagaaggaatatcactcccccctcactacctctgtaatgccggctattcttatgaatcagcggtacttcttcttcttcatcttcatcaaatatacagacaacagccggtgcacggtcacacccattgggttcaacttcaggacggtcacacccattaggatcaacttcaggatggtcacacccattgggttcaacttcaggatggacacacccattgggttcaacctcaggaaggacctctactggcacttcatcacgaccggagtagaaggacctggatcctggtccaagcacgacagtcgccgaagtcgcctcttcttcttcttcttttcctcaacaggcgcagtcgggcggctaacttggcgaggacgctttgggcgagcaccctcaggcttccgagtctccactgctttgtcaagctcttgtctagccatgatagccatcggcttagcatgggtcgagtcggaagattccccagctaacatactaagcacatcatctatc

SEQ ID NO: 36239 - DNA, 483 bp, Zea Mays
ggatcatggccggttcaggcgactgaaatagatgagccatggtaaagtgttttggatggatcagaacgccagctcagctcgccgtcgttgatcaccgtccggaatcgtgcagggtgttgggtggataacaccgggaaaaaggtagctcgtacgtggcaccctctccgtgctcggccggagttactcaccggcgggcgccgtgactcagtggattccgccgtagtggcactcatgccgtagttctccctcactgtatcactttccgacgtggtaagcatgcgcgtgtgttactatccgtggccgggggccatccgttgggccgccgtgcctataaattgagcagggggtcacggcgaggtgctcgctgatcttcaagtgagctcagatacaactagaaattcacactgtcctctccaccttctctcaaatcgattgcacacggtgaaagcccagtcccttacgatcctatagcctcaatcccca

SEQ ID NO: 36240 - DNA, 439 bp, Zea Mays
ccggagatgacacaggcgttgagggcctgtgaaagcaagaagatgaaaaacataatgacattccaatatgattggaatgatgaagtcattgcccagttttactcaactctgtggatcaagctggccgatgaggaaagtccctacaactttccttatcttaatttctacatcgaaggcagctggtacaaagtgagctaccgtcggtttgctcacattcttggattcactgacaatgatatttctggtgataagatcaatattcatgattttcgccaacctaccaaagatgaagccagagatcttcatctctctgagtctgggaaatattgggagtccaccaacatgcacaagtattacagatacatcaactccctcagcaggatgaccctcattcctaaagggggtaatcagatgaatattcttggagagagcaaggttt

SEQ ID NO: 36241 - DNA, 730 bp, Zea Mays
catccgagaaagaccaaaagtggagcaccatttgcatggagaaggtctgaagctatccacgaagttacttttgagtgggagcttgtcccttgtgtgggcattccctttcatggggctccaacaaggattaggggaaagcttgcatgctttttgatacctcggtaaaatactgatgcttcattggatgtgaaaggatcacgatgcccaagagagggtgaattgggcttgtctaaaattctaacaaaagattaaaccctaaacatgagcccaacttcacccaaactactagaaacaagtaaaagctatggaatagagaacaaccctaagtcattattgcaaatacgaactaagcaaatacacaaaataaaatgctcaaagtaaatgtgtaaagtaaagtagggacaagaagactcctcctatttttcctaaggtatcgaagagtcgccactcaccactggtcctcgttggagaacctgcacaagggtatcgctctcccttggtcctcgcaagaaccaagtgctcactacatgaatccacttaattcctgttggttaagaaccaacgggaattactaatcctcgtcggtttatggcttattcctgtcggcggtaagccgataaccgtcagatgtcggggataagattattcccgtcggctgctgacgggaataagtaatcatcgttggccagttacaagccgtcggcaataaacactaattcccgtaggtccg

SEQ ID NO: 36242 - DNA, 309 bp, Zea Mays
tgggattcggccgttgcgatcgaaagcatcttctcacaactatataaccgggtcccctccttgtctgtcctatgcccacgaccgagaagccatacgtcggcgtaagcaggggatcgtgtgccatcgctaactagagccagcgagagataaagggagccaccgcaccgggagtccgcccagcgtcgtggcctaccgtgtcccagccttaacattcggtgagtacctcttcgagtgattcgctatgatcctagcgtagtgtagcaccgtgtatttggaaattatcgcgccctggggtagcgaatttgtcac

SEQ ID NO: 36243 - DNA, 291 bp, Zea Mays
gtttggatcgtgcaccttcacgccgaggaccggaaagacttcggcggaagtcgtggaattagttccctgtgctcgcaacaagtggggcaactggtgggattattggttttatgtttcgggaagcgaagtcgaagacctcccagggctccccgcggctgtaatgtgctcccattgttatgtggcattcccacaatttaaggtggcggaggaagatgaggacgaagggccctccggtgcgctgcccgcatgagcagcgggcgtgatttggttgaggaaatcattggttatgga

SEQ ID NO: 36244 - DNA, 321 bp, Zea Mays
tgggggtgctctgtgacgtcccaacgatcgtcgcccacctagctctacttcgcaccccatctgccagatttgcggcaaggaaggtcacacggccatacgctgctggtaccgcatggacgactcctactccgaggaacctcctttctcacacgtcgccaccgcatcctcaaaggttgataccgactggtacactgacaccggcgccaacgaccacatcaccagcaatctggatcgtcttaccgtccgtgaacgctaccacggcaatgaacaagtgcacgtcggcgatggatcaggtttatgaattacgcatattgatcattc

SEQ ID NO: 36245 - DNA, 480 bp, Zea Mays
tgagtacaacaaagaatggagttacgtcaaggcttgcacgtggtaaggaagaggatatttccaagggtaggataagtaagacaccgctctcagattgagacaaaaaagagattcaagtaagcatcaaggcaagatttatatattacaagggtaaggcagataacggaccaaaagtacaacgaaggattgagttaggacaaggctcgcaagtggcaaaaaagaggataccactaagggttagataggtaaattaccactctcaaattgaggtggaaaagagtaggatttaaagggtaggttcaaaataagcaccaaggtaaatgtatagatattacaagggttaaaggcgatgacaggcaagggtgtaagagataagaggtgaaggtgcaaaagaaccaagggtatgagtacaataaagaatagagctaaggtaagactggcaaagtggagaaaacaatcaaggataagataggtaaggtt

SEQ ID NO: 36246 - DNA, 375 bp, Zea Mays
aagcaaaccttaatgagccagggtcaccttatttgataacatttggatcggattttagtgattcatctggtgtgaagcctctaaattctacaatttattcttgcggcgacccttctttgggttgttcatgtggtgattgcccttcttcttctgtttgcgcgggatccttgctgcctcagctgaatacagaaaccgcctgttcagttaaaatgggatctttaaaggtaggcaatatcttgttacctgaatctatatgtatgatgaaattatagaaggattgggtctagtgtactaagttctatatttatcgtaacagtttagagataccgtaataataaatgcattagaaaatggcacagatcatgtgctgtcata

SEQ ID NO: 36247 - DNA, 470 bp, Zea Mays
gtccagaacgccttcctcataggtgaacggcaagaggaattttatatgcatctacatccaggctactctgttcttgatggtatgttttgttggttgcatcgttccctctatggtcttaagcaaaatgtgcttggtttgagcatttctcttttattgttgctgatactagcttcaagcctagtgaccacgatcctgctctctttgtccacacttctcgtggtagcacacttctctatgtcaaacacatgatcatcgtaggtgacgattcttagcacattgcctctgtgaaaaagcagcatcttagtaagacattctcgatgaccgatttgggtccctctctgtaactcccttggtcttgaggtcacttccacccctgatggtattatcctctcaagagaagtgcactcaggacatcctttcctatgttgcttttaatgatcaccgcattgttgatactcctatggagcttg

SEQ ID NO: 36248 - DNA, 753 bp, Zea Mays
atttgggtgagggtgttgttttcgctgggtttggggtcggttgcgggtttgtggcgatctgttttccgaccggcggtaatctggtgggcaaagccgagatttttcccttaggttgggaatcggcgtggtgcatccggtgatggggatggaatgctcccctccctttcccttttcagtgctgattggcgcattcgattcctcggcaaagggtgtggtggtagggaagttgggcgtcacttgatggctttgaggatccacctctgttgattctctctaccttttactctattggtcggcacccttggtcgtgcccactgcccggtcttagttcgattgttcttttggggatgatgatacatacctagatggagaggttgatggagtggttttgatgtgtattctttgcagtatttgacgttgttatttatactgattaatgattgtaaccgtgtctgcatgtggagattgaaaggagctcagaaggctgggacgctgacctgctttacgacaaggagcgtgggatggttcaaggtggccctgttcgcatacctgctttacgacgaggatgcgtggacgaactggtgcctagcgtaggacgccacgtccgcgttatggtcgtcatcctcgacgccgagaacctaggtgcctacctgcccacgctctccttctgcttccctttatagttcacccctttcctccaaatgaactgacacggaactccctctgctgcatggtctctgtaaccaatttaac

SEQ ID NO: 36249 - DNA, 356 bp, Zea Mays
ttatatgtataataagtcaatagcacgtgcaaggagcagctgtaaggtatgcgcttgtggacactacttgtttgcgtcactccaaagtaaattatgtgagatagtaatctagggaagtttgttatcatctgtgatatgctagagcttggacatcttcatgtcagctggccagagagcttataattccattctgttgaattgagtgaatagctagctggttgcaccatctatttattggcaccaatttaatggccaccttatagtccacttgcatagacagtttggctttccggaggtctcttgcattcttagtttcttgctgaccttgatttccatgatgtcattgcagattgttg

SEQ ID NO: 36250 - DNA, 417 bp, Zea Mays
tcctgatagaacgacatgtaattaaagattccacataattcaagctagtatatgattttcaattctttgcttttctacctatatgcctggatcagctatttaatgaatagaataactttgtttagcatgacatgagtatttgaaaaaacatgacagttaaatcagtatgttgagcatgcataactacttcccactacatttccaacatagagcaggggctctccaatcccctgttaacatttcatgagccggaaattgtcagtgaattgtacacactttactatttcaaagtacattttcaacagtaaacgttgatattctcaaatgaacatatggcccgacagcaactttgtttacagtgtccatgatccaacatgctgtggaatcaaggaaatagctctcaacatacaacttgtg

SEQ ID NO: 36251 - DNA, 470 bp, Zea Mays
ccccttatcgcgtagaagtgagcggattggagaatagggcattcgttcgccggtttcgggcctctccggtgagtttcgccgcggcctggtgggcggcgccgccgtgcgcatctgcccagttggggcgataatcgtgcgccctcggatcattggcggacgacgcagattagatattaggatggcattttgcccaagttgtgcgacccattcgattccaatctcacgtctgtgggtcgatcgcgatcacttaatggtctgggccgttgatctggcatcctacgtctgtgggtgagtgtgggagagagtgatggaccaaactaatccgggccggtcatcgatgatccaacggtggagaacccatcgatacccctttcgctgtgcaaaacttgcataagagcccctggaatatctataaacccaacccaccgtccaccagtactgtttcctgagtctgggttattttacaccag

SEQ ID NO: 36252 - DNA, 531 bp, Zea Mays
gaacacctgcatttaatgcgcgtacctacccaacgatgcggcagcagagcacagtggttgacaagacgacaatcacatctggacgcaacaacatgattacgtctccgctacagtacgcgcacgccgcctgccatcccccgatgggacatctaatacgacaagcagagcagaccggccctcgggcgcatttctccgcctcgcccgacgccgagtccaatccacgggcgcaatctccgcatcgcccgatgccgagtccggccctcgagcaatttcttcgccacgcccgacgtcgagtttagacctcaaatgaattcttcgcctcgcccaagctcagcctcggccacctactcctctacgaatcccgcggacgaccactccgccaaaactgtggcgcacgtcaagggatggctcgtccaacacctcgggaagacttccgcctcgcccgagcggggctccgacctcgataagcgccacaggaaatctcgacgtcatcccgcgcaaggacgctgatgcaccccgtaagcaggcctt

SEQ ID NO: 36253 - DNA, 397 bp, Zea Mays
agcttcaaataagtcttgctaatcacagaagtaaccatttaattatgccctaaggacaacaaactggaactgagcaaacaaattgtgcccccaaatctagggttggtatgatcacgggcggcagaccaatcccccatggatgcatcatccaggtccacgctaaataccctcaatctaccaccagagcagatccatgtagacttatgtcaaaggttaatgaagtgtggtaagaaaaccctaactaatagagcatatccatgtagacttgtgctgctcatactattcgaatccggtcattcacatgacttcggtaaactacagaactaacacgtacaagttgaaaaaataaaggaagactcatgaacctgggagcataaagaagaacatggtcgcacct

SEQ ID NO: 36254 - DNA, 310 bp, Zea Mays
tgcatcaaagacctgttgtgtattactgttccacacaaacaactgaccttttctcttcaaattggtaagaggtttgctaatcatcccaaatccaaccacaaaccttctatagtacccagccattccaaaaaaactcctcacatccttcacacattgaggaataggccagctctgaaaaactttcacctttttagggtcagtagctacctctgcagcacttataatgtggcacagaaatttcagcttgtcttgggcaaatctgcacttggacatctatagcttaagttgtttttccttaagcaactcaaac

SEQ ID NO: 36255 - DNA, 353 bp, Zea Mays
ctcggccaaggacctgaagcggctgacgctgttcaccaagatgcgcatgtacgtcgtggcgtccatctccggcggcgattcccgggtgccgacgcacaggacgtactgtcaagagacggcttcaagtggttgaagaagcaaacacaaaggaggaagaagctacggttcacatcacgggccggcggaatagaaggctaaatactcgcgtctcaggggccaagtgggtaaactgagtagtctgtgtccctatggttgggccgtgggccttgtaacaggatataagaacaatctagtataatgaaaaaggggagaagaattgtctgaccagccattccctaattctgactctctct

SEQ ID NO: 36256 - DNA, 438 bp, Zea Mays
ccttcgccgcgcgtggtgggttccgaggggctcccgggtgcgagtactgtgtataggcggcgaagggcggtggcgaaacggagagtgagtgaattgccgtgaagtggtaggcgtcatcgtagtgagatggagagtggtcgtcttcgcgtggacgggactggtaaacgggaattgttgtcctcgccgattggggcgagtgtaggtgaaggggagctgcgaaatctttttgagggtgaggaattgaggataatgttgttcaactacagggagatgggtatcatcccgaaggttgagccattgtaatatatgatgccctcgctgtgtgtatgtaaccgtaatttgtatgataaagctgcgcgccttcgttgatatgagtcttttgtgaaagacttcgatctttacgtagttattgtgctgttccggctgcacccttaggcg

SEQ ID NO: 36257 - DNA, 664 bp, Zea Mays
gctgctgataagcactagcgaagtttactgtgaaccgtgcatagagctcttcccaagagtagatcgaccccggggtgaggttcatcagccaggtccaggccgtcccgatcaaggctacatggaagtagcttgcctttaaggtagtgtttccaccagctgccgtaatggtggtgacgtagacctacaagaattccgacgggtttgacgtaccatcgaacttctctggcaggtgtggctagaacttgggtagccaagtcgccgcgcagagatgatccactagtgcggcacagcccatgccgactaatgggacacccgcctggatttgagcgcccttggagtttgtggtgcaactgcagcgaagtcttggtcgaggttgcgaccctcgaagttttgttggcgctcacactccctctccagagagactcgagcatcctcgcccacatgctagcggttgagctctgcccgcaggtcgtcagtccgtgcaaccctcactgaggttgatcgcacatatgccgacgcctcgcgttgacgctggaatgatcgaggcctggacctggccgagccaggatgggccatgccgaggagatggtcgacatcttcgcgccactgcctaatggcccccggcgaggccgtggaacttggagggttacgtagcaactccctg

SEQ ID NO: 36258 - DNA, 1241 bp, Zea Mays
catcctagctttattgatgatgctctgaagaaggtcagctgccaggacaaacaaaaggggcgaaagaggatcgccctgcctaacacctctcctgcaatggaagggcttaccaggaactccattaagtaacactgaagatgtgccagagtgaaggatgctccgaatccagttgatccacctagggctgaagcctttgtggatcagaacctggataatcaactcatgctcaaccatgtcaaaggctttctcgaaatccagcttgagcacaatgatctctttttttgaggagtgacaaaggtgaatatattccaaggcccaggcaaagcagtcttgaatggacctccccttgatgaaaccatactgattcttgtgaattaaccggggcatgaacggttgcagacggtttgccaacagcttcgttaagattttcatactattgtttagtagagaaattggcctgtaatcccccaccttcataggactctctatcttcggaatcaaaacaatgaatgacccgttaatacttctgaggcaaacctgatcatgatagaatttatcacacagatcatagaaatccggggcaatgacatgccagcacttcttgatgaaatttgtattaaaaccatctgggcccggggatttatctgagggtaagagttttatgatgctatcaatttccagtttagaaaacggataatctagtccctgaagttgctcattgctggttaaaagatctgaaagatcaaacccgatatctgaaaagtcggacgaacccagtctgcacttgaaagcctcccagagaagatcagatttatgttcatgctcaaagaacatggtcccattgtcatcagtaaaagtagggattgaatttttcctgtgcttaatggtggcatgggcgtggaagaagcgagagcaaatgtctccatcagtaacccacctaatagccgcacgctgcttccaataaattttttgaatattaagcaaatctgctaccttttgttgcagaatttccctgaaattccattcctcaatagagagatcccggtgctcttccatgttgtcaataagttcaattagcaacttaatgttcttcaccgtaatatcaatttttggcagcgatctctgccattctttcagaactttcctaacatatttgaacttggcagtcaggttcttagccttgtcgggaatgctaggtatcccattccaagtagtttgaaaaaggttcatgaaaccatcca

SEQ ID NO: 36259 - DNA, 416 bp, Zea Mays
caaagttgattaaatacgggataaactgtaatggttctagcaatgtccagttattgtgttcattatcgatcaatactaaaaactgaagtactaatgaccacaaagtgaaaatgcaacatacctatcctaatttgtacaaatatagctagaatcaaacaatgttacatcaatatgagaccactcgcgctcaagaaaaatgtaatcatatataaaacgcacgagcataaaaacgaacagagctgattccctcgaatacctcgcatgatgccatttgtacatagactactcaaacggatcgatctatcaagagagaaaggggtcatcgcaggaagagtgccggcagatttggaaaccatatgttagatcagtccaaggggagaagaaaaacaagatcaggcacctgggagaacttggtc

SEQ ID NO: 36260 - DNA, 281 bp, Zea Mays
gtcgcgtggtctctttggaaggaacggattaacggaataggaaaagcaatcccacgccaaaaccgcgtcggtgcttctagttgtagtgctctactgctcttattacactacaacacgtacgcaggcacccggccagtccacgcgtcctcagctcggctgcctagacgacggacggacacgtagctgcgacgtgtcgaaaactgccagatccaacacgttgcacacatgtatcgtctataaataaacagatccggcctcgtccatttcatccatcgcatctc

SEQ ID NO: 36261 - DNA, 397 bp, Zea Mays
gttttattcgtttctatggttgtgcgcggggcgacgatctgtgcaatgtcggagagaggggctggccgctgcgggtggtgcacagcctgggaggcttgaggttgaagaaggacggtggatcattgatctcatcttcaacagtcacgattagatggatagttgagagtgtgggagccatagatattagatggacggcttaaatcgaatcctggtgtaccccttcgagtcattaaatcagggccttgaattccagatccgacggctagggttgaacgcggatgtgtaactcgcctggatctaatctggcgcgtccgtttcggatcaggcggccaggacttcgcgataccccttcgcgactgcagttttgtaaaagaacccctctattattatgtaatca

SEQ ID NO: 36262 - DNA, 337 bp, Zea Mays
atcaaattgttccgtaaagtcatcttaatgctcaaacagtttttttatctgccccaattgtacactgctttatgaattatgtcatttaggcttagctgtccgagataatttcatttgtgatgatggtaaccggagcatctgtccttttgttttaaacataaatattttgatagcttaacttgtgcatcattttatcatgtactaacatggtatatagatggcacttagcagtagcattcctgacttacgtgattgtcctgttagaatgcttctgcagtataatgggcttatgctaatctgtttggaatcccatgatgaataacaattatggatgttg

SEQ ID NO: 36263 - DNA, 820 bp, Zea Mays
gtttcctcggcgccaagattcatttgagaaattagacaaggtaaattattaatatggtgatacaagttgcttaatctggtagttttgaatgtgattacttcttggagctaacctttttctgttttaactatttaacttatttccaattgcaggttggacaaggaacttatagcagtgtctacaaagcccgagatcttaaaactgacaagtttgtcgcactaaaaaaggtgcgttttgtcaatgtggatcctgagagcgtgcgctttatggctagagagattcttattctacggaaactcaatcatccaaacatcatcaagttggaagggatcgtaacatcttcggtttcacgaagcctgtatcttgtatttgagtacatggaacatgatcttgttggtcttgctgcgactcctggccttaagtttactgagccacaggtgatttttatattatcctatttcatctgaaaaggtgacatggacttaaatgttttcacatgaatccaggtcaaatgtttatttcagcagttacttagtggcctcgatcattgccatagcaatggagtgctgcatcgggacctaaagtgttccaacctcttgattgataacaatggtgttctgaagattgcggactttggtctagcaacctcatttgatcctgacaatcagcaaccattgactagccgtgttgcaacactgtggtacagaccacctgaacttcttctcggtgccaccaagtatggcccttctgtggatttgtggagcacagggtgcatttttgcagaactgcttgctggcaaaccaatcttgcctggaagaac

SEQ ID NO: 36264 - DNA, 413 bp, Zea Mays
tgaggaagatgcctgaacctcgtgttctgcagctgttgccggtaggtgtggctgagcgaccacagggtccgacgggcagcatcgctgaccgaggcagcgtaggtggacagtggcgtcagggactcgtgagcagacagagtcttgaatcccctgtcacctgcatccatcaccctgacgtggatgcgagtgatgtagtagcaagcccggggaggctcgctcactcgccttgtttcgtacagggggcagacgtaggtgcctagcgcatgcagcacttcttgcagcaggttggggaagtgccccgtctcgaacattgatgtgtaatgttcgacaacaggaccaaaccccatgaagttgtcctgctgggcgtagttagcttcctcattgacgtgttcgtcttctccatcgtcttcgtc

SEQ ID NO: 36265 - DNA, 334 bp, Zea Mays
ccaatacacaatagctccatcatgactttagcaccttgttatggaaggaggcagagaacacggaagatttcacaaaccacatcatccagcaacgcaaacatcaagaagcacaatggtcgtgggcgaggccgtcgagagcgttggctccgcatcacgcgaaggctacaagggctagtatggtgatggataggctcccaaccatgaccaatgcaagcgccgtaaaaaatggccattgtgctagggattgtcttagcaagcccaaggacgaggcccacatcacgcaaagagacttggagtccacgttgtagatgtcattaaagaggacgtatttgag

SEQ ID NO: 36266 - DNA, 443 bp, Zea Mays
tggattacgttttgatttctttaaaaaagaagtcattcattatctgactttattgtttagtgcaggtgcatacggaggatgggatgagaatggctactttgttggatataatggcctagaggtgcacccagcagtaagttataataatagtgtactttacaaagtgtcatatatgcctttcctattgtagtccctagtggtcctaactaaaaactgaaggatggtgcactttgtgcgtctctatggtggtaccaacaagctttgcacctgttagctgtcatcttttcttgaattgtttgggaaagtgtccaactattttagtgtcaccctttattgtgctacactgctactgttatccttgttccaaaaatctctctgctggatttgttaaacgatttaattgtcatcaccctatatggtgtcatgacctcatgactattcca

SEQ ID NO: 36267 - DNA, 300 bp, Zea Mays
aattagtggaatggcacaacatgctaaacttgctaactgaggttacgctgtctctgtctagagataaatttgtttgggacggtcaaaggaatggaatcttctcggtccaatctatgtaccatttgttgatgaatattcccaacaacgaacggaacaagaagctttggaaacttaagctccccttgaaaataaaagtttttttgtggaatttatgtcgtggagcaatccttactaaagataatttagccaaaaggcgatggaatggtagcttgacatgtagcttttgcaatcgaaatgaaa

SEQ ID NO: 36268 - DNA, 305 bp, Zea Mays
ttgccttttatttatctattttggctccttttttagcttcctattgtttagtggtcatttggttgatacaacaaagaaagcaaatgagcattgaatagatgttatcggtctctttttattatgtttcatgtattgtttagtaaatagtcttgggtctttggacccaacttaactagatataaataactgcatctcacttaaatagaagaacaatgttcagtatgcaaatctcgtttataaggaggtccttacccccgcacgttctgaagatgtggagggacatcacgactccaggttagtttttt

SEQ ID NO: 36269 - DNA, 385 bp, Zea Mays
gcgggaattgttgtcctcgccagctggggcgagtgtaggtgagggggagttgcgaagtctgtttgagggtgaggagctgaggataatgttgtttaactatagagagatgggtatcatcccgaaggttgaaccgttgtaaggtgtgatgccctcgctgtacgtatgtaactataatttgtatgatgaggctgtgtgccttagctgatacggccgtgcccgtaggggacttgtgcactaggtctagcgcgtttattatgtcggtccagctgcaccctcaggcgacttttgcacggatagtcttgggaggaagactttgatttttcgcacttgttgtgctagtccggctgcaccctcaggcgacttttgcacggatagtcttttggag

SEQ ID NO: 36270 - DNA, 891 bp, Zea Mays
cagaatttgaagccgccttccgagaacatcatgtgcccctagggatcgtccagctcaaagaagatgaatttcgggaattaactcaaggagggagatctgtcagtgagtacgtgcacaaattcacagaattggctcgctatgcgcctgacgatgtcagcacagaagccaagaagatggcccatttcttgaaggggctaagaccagaactcaagactatccttgccagtcaagatttcatcagcttctcgcacctctcaaacaaggccatacaagtggaaagggctagggaagaagaaaagggtcacctcaagaggaagttccaagtcctccgagatcagtagcaggacaggcaccagagaattcggtcctttgggtttccacccaagggaccaagcttcaacaagccagctggacccactccgtcatgtttcagtcagcagggtcaaagttcccttcaggccccctccgttgcaagcaaccaacctccagtcaatgcatgttggcactacggagaccccagtcactacaagaataattgtcctcagttgaagacattcgtacctacctactccaactcggtgaatggccccaagagttccccagcacccacctccaaggcaccctcctccaacagccagctaagcaagacccagtatcatggcagggcacgagtgaaccacatcgacgctcaagaggctcaacaagccccggaagtagtgctcggtgagttcctagttgaatttactcccgctgctgtactttttgattcaggagcatctcattcattcatagccactagttttgtggaaaagcatggcattcccactacacatctagaaattcccttggtcacccgaaccccagggtcagaccttctatgccacctcaaat

SEQ ID NO: 36271 - DNA, 289 bp, Zea Mays
gtcttccttcaaaattctttcggcagcttcatgtaaaagtttgtcgacgacttcgtcaacaacttcgttagcaatttgcataacatctaaagcttctttcataaccgaatcagcttcggggttatatggctccggtggcggagagaggccgactgtaaaaaatatatgatggtgaatttcgaaggtaaaaacgagcaacaaggcaaaaagtttcaaataaaagtacctataatcatggcgcgttcggcagcttcctcagcttgcttagcttccttgcggatgtcgtgag

SEQ ID NO: 36272 - DNA, 778 bp, Zea Mays
aacacacagagcggccggattgcatccacggcggaactctagttccgcagtccctgctcgaccgatttgagcaccggatccttcaaattaagagcacagggggcacgagcaagacacgggcgccgtgatgcttacagaaattgacatcgagccaactaggttttggtgggttgacaccagggcagtttatgcggcatcaaactcatgttccgaccaaactatggccgcaaagaccaaactggcacctcggtgatctttactagcctataaggacactagaacattaattcatatgcgttgaatcataccgtagtcgtctggccacataagggtgaggcatcggtgatgtggtcaccaggtacgttgagtcttttgaccagggagtctgggcacgtccaaggtatagttttgggaaaggaaggcaatactactaactggagctacacaaggtgatcaaggactgaggtaaggatctctcctttgttcctgctcctttccctccaacggttttctctttaaataggcagcgaaaagatcatggggactggatttctaaattggcagtagggataatgatgaacaagaagtgtagtcgtggctcagacgggaagatccacgccggtgctgcagggcgaagattatccatggcaaaagggagggggtaaggataggagcgcactgtagcagatatttctactgatgataattcagagatgtgcataaatctgaatatctttgctctccctcatctctactatttcccataccaaagtaggac

SEQ ID NO: 36273 - DNA, 377 bp, Zea Mays
attggacgtaatcttctagtactccttgtagttccaagaacatgctcgtccatcatttatgatcttgaccggattgtggaggagagttgcatcctgcaggtgtttgaagcctcactgtaatgtacatccccgaggatcgtatgagtagttccatagagtcctctcatttgtccttgtcttatattgttcgttatggcctgtaggtcctcgtttgtagttccaagggtgaggcatttgggcagtaaagggcatgtgtctaatgatcagagggttataaatgtggtgtcccttgctgagagattatgcttcttctaagttgttccgtcctattaggggtgtatggtctaaattgacttgttcagtacctagggttggga

SEQ ID NO: 36274 - DNA, 477 bp, Zea Mays
gtgagggtgtgagatgtatcagtgatcggagataggacagagggaagtctccgagtggttacgacttttggagcacggcccaggtagtacattgcagcagtgtactagtgtagtaggtgtgctgtgtgcaggtgcggcccttcttttcttcccccgtcgaactgaacttccggcacttttaccacagtccacagtaacgcaggacctgagtgttcttgaaacctgaaagactgctgctggtgctggatccaggtttcactttaaccaccgtcattaactcgccgacatttcgcccgtgtgtgtgtgtgtgtgtgtgatctactagcaccgaggatccgtcgcctaggcacagtttgaacgcggggcttggaaggttttggaaaaaaggaggcgtcgaagcgtagtgccggtaggtacatacagtaccgtcttgccaccctgccatgttgcccacttggccttgccgagaacccgcgt

SEQ ID NO: 36275 - DNA, 518 bp, Zea Mays
cttttcctgtcgacatccttgcctatatgtacttgagcctttgctcccataaatcaactatcatattttctgctaattcattgtctctcatgccaaagaattcctaactcttttggtccaacactcaacttaccaacgctgtagattttaaatcatatgatgacaacagtgtctatcaatgcttctgcaaaacctaggtcaaagcaaggtcctaaaaatcgatgatcagtttgtttggccatccacctggtaatgattagctgattatacagcctaaccagcccaactatgcagcctgaataacaattaaacagtaacatgcggaagcgctttccttgtgtatgacatagtaaagcttcttttaggacattgggaaagtctaccagtgtccaatgtccataatcacacaaggaaacttcagatctaacagaaagaatagaaggtcaagagtagtagagtgcttagttctcattcatgaaagaaagaagaccacaccatcatcatgatcctgaactata

SEQ ID NO: 36276 - DNA, 304 bp, Zea Mays
ctaggctaattgaaacgaaggttgacgaagataaggctgaaaggtcaaaaactgaagaagcaaaaaagatgcccgggattctaagtccttcaacagaagcaacagtgctgaaggcagaaaaaagttctgccataacccctagaagaaaaaggatggtaaatgtattagatattttggaaacaacggattccaaatgccccgcttccataaagaaggttgccgaagttgtcaaagcgcaaactgaagctgatactaagcagatagaagttgaagctgcaacgattgaggctggaatagatactgg

SEQ ID NO: 36277 - DNA, 394 bp, Zea Mays
gttgaagatccacgacgaggtggctcggtagctgcgctagcaactccgacaaggaattacgcacaacagagagcgagggagggaaacaaagggggaaggggaggttccttacctcacagtgagtgtcgggatcccctcggtggcaacaatggcatgatggtggctcgaaatgttggcggcggcatcaggactacatgaggaacgacaatttagatcaggcagagcaaactagaggggtaaaagagggattggggcgtgttctgagttgttgtcgccgcgacgaagctaaccatggcaagaaactcgatagggcctcaatgccaataagagaacaagcgcggggcgatgactgttcttcctcggcatcaggggtgaagccaggatttgagattag

SEQ ID NO: 36278 - DNA, 600 bp, Zea Mays
cttacctctcgacttatccccgaatgtgatgtattccttaccaatcacggggtcgaggctggagaaccatttagaacttccggtcatgtggcgtgaacagctggaatccatgagccacgtgttctccaggcctccgtcctgcatcaatagtaagacacggggtgagcaaatggtacatcactggggttaggatactgatagggaaaccagtgctgcgacatttgcccatgataagtgttaggaaaaccaccaaacatccccggtcccatggggggatagagatcaccacaagaaggaaactgtggtccgctagagaaggtggaaccaaaaccactgccacggggtccttggccatatggcacacgaccagcaccccgccgagcacgaccaccacatggtctctcctcctgaggcctagcagcaagaggcaaagcacctctaggcctcgcaggacatctctaaacaggctgagcacgaacaccaagagaggggcggttcatgttcttcctgctcgactcagaaacccgccgctcatctctcttcctcctaaagcaaaaagaagccagatgcccatccctctcataatactcacaatggtac

SEQ ID NO: 36279 - DNA, 333 bp, Zea Mays
gtaattgacttgatgaatctgggccaaaagaatcgaacagtttgctcaactgccatgaatgaccgaagtagtcgctcccataggtttgtttgttgcttttgcattagtgcctccagtaccaggcatgatgttgaacttgtttttagctgatgtttgagtaaaccaattgcagctgtctgactgttcatgttcaaggacgagatttaacatctggaacagtcctaagaggttgcatgcatcttgtggatctagctggcagtgaaagagtcgataaatctgaagtggtaggaataggattaaaggaggcacagcacataaacaagtcactggctg

SEQ ID NO: 36280 - DNA, 547 bp, Zea Mays
acacttaagggatggtagaacaccaagcagagaggcatgaaccaacttgtagatggctgaccatggtgagaagctcacagcggcgcggaaaaccaattttgtggaaatcacgaattgaggagctacggtggacgattggaggcgaggagcgatgcactcggcgcataacaacctaatggggcacgctgaacgctcaatttatagtgtccatgaacggtggctccgaatttgaggagagaagttggcggccgaggagaggggatgagtcaccttggcgatctaccgtggcattcactggacaaaggcgtatggctatcactggttaacttccacggctcaagacgacgtgataaaacagcctaagatgtggtgcgaccgagtgaacggcagcagccgcagcaacggccgcacagccacgtcgccggcaagtgggtatggcgacaaggcggtcacggtaccccaaactcatccacgacgaagatcttttcactgtcgatagtaatctgcacatcagagggcacgaatcgtggcggccagtgcgaatcca

SEQ ID NO: 36281 - DNA, 297 bp, Zea Mays
tgtgtatggtaaaaagtttcagctccattatcatctagctggtgcatttcgtcaggctaagtgtccaaatgttcctagagaagtttttgcaaaagcaagacagcatgttctgacaaagaaaatgctaaaaaagagtaaagctgagcaacagattccttctagtccacatattcttgcccaatctggtgaagaacggcagaacaatgatccattttgtgggaatcagtctcaactgtcaataaacaatgaacctagggaggtactattactatttgtaaccactttcctgtttctact

SEQ ID NO: 36282 - DNA, 431 bp, Zea Mays
cttggggacccatgcttgatttcctgcggggtcatggcctccgagccatatagcaggcgaaagggagtgaatccggtcgcccgacactcggtcgtgttcagcgcccagactgcttcaggtagcaggtcggcccatttacccttcttgtcgtcgagaagcattttcttgatcgccgtgaaaatcttgccgttggcgcgctccatgatgccgttggattgtgggtgatatattgaggcgaaggcaagcttggtgccaatggagaagcagaagtccctgaagtcttggctgtcaaattgtttgccattgtcaactgtgagctcggacgggactccgaatcggcaaacaatgctttgccagaagaatttctgggcagtcttcgatgttatcgtggatactgctcttgcctcgatccacttggtgaaatactcgac

SEQ ID NO: 36283 - DNA, 328 bp, Zea Mays
cccaaccaatttttggttgacatcgagtgtaggactcggtacacggcgcgccgcggcggtgccatgaccgggcagcggacccagggattcggctacaccatactacaattcactagagcataatagggaggaagggaagacgaacacaatggggactcacttgtggccggtcgaggtgaggtgatgcccgtccacggaatgacgcgagcacgacggaggactccactccggtgaagaactacccaatcctcagtgcaccccccaggcctaatccaccacagtcgcgatctacgcaaccaggtgagttggccagtcaccgcgaccaccc

SEQ ID NO: 36284 - DNA, 549 bp, Zea Mays
cgcggatttgagatttcagagcactctccagacttcaggccacagaccactagcttccctacttcagtcattcagccggacagccgccaagggagtagagtagagtagagtaggtcagcaagctcacccacccactcgcccccaactctctcaggtccccacaccaatgcgttttggttttgcgcccgcgcgggagatagggagcgaggaggcgcgaggaatccacttcctccacagctctgctgcgttgatctggttctcaccgtgaccgaggtaatgggatttgccggttcgtttctggggccggtaccgagttcattcagtttcgaacttctgccatttttgctacttcgctacgctaatgctgaagatcaatgggtggggattcgggcgctggagataggccaaagttgggtttgaggatggcggggacagattttcttagtgaaaaacaaacccatttcttcaacaaatgcgcggacgtctatcgatgagatacttggatttcatgcaggggtgtgagtttcaggaggaggggttgactatttg

SEQ ID NO: 36285 - DNA, 644 bp, Zea Mays
gcgggggcactggtggtcgccaccagtatctgtcgatcattgagcttctgctgccttttgttctcttgtgacccgtgtccgccgaagatgacgttgacttctccatcgacgcgcgggaatgctctgcctcctcccccttcctgccactgaggttgtcgaggttctctgggtcctccttgtggtgggggaggcggtagaggttggaagggtcggccattcccgacggagtgcttgaagtctctgcagtttcggagggtgtgacgcatatctttgtggtacgggcactgggcgtcgaggatatcgtccaatgtttgtttgcctccgcggggtgcccctcgagcacgagagatgggtggtccagcggcatggacttcttcacgaggcctcttctcccagcgcttgtcggtctgctggttcacgtcacgccatggtgcagatggagcaggcttcgttcctccaatgagctcctggtccctttagtcggcggtgatgtagaggtccgcctccctgaacagctgctcagaagtggtcgacgccttttgtagtatggctcggacgaatgccaagtcattagatccccggtagaagtcctcgatcactgctgcttcagcgacctcaagaatacgatttctcatggtctgaaa

SEQ ID NO: 36286 - DNA, 314 bp, Zea Mays
cgagggttggctatggaatggacaaggagatggagcttgatggtgcgtgcatagcgaagtttgccgagtgcgtgctagagggaaagacgacgtccggatggagctgcgcaacacatcaaacacccagcgggtatcatagcgtgttgtccactgcgcagcacctctcctagacatttcgccgaacacctggcactcgcgcagcgctagcaacaaggaagcaagctcgacatagggtctgctcgaggtgagctcggccggtgaggaaacagcaggaggtgcaggcgagttgctgcttgctgagaccttgctgcaat

SEQ ID NO: 36287 - DNA, 484 bp, Zea Mays
cgccggataccgaccctgggcgatcagttagtgtgaagtccatccttcgccgtggatttagggggctggaacccggccgcgtttgtgcgcgaagtggaggccgaggccacaaggattgtagggcgatatgtgccaaagactgagaccttgcggagctgggatatacgcggttccaatgttcggttgaatagtgtttttgagttgaatggtctgccatatggcggctatccgggagacgaagatgccgttgttggcgaccgccggggaaaaagggtggtggcagcagtcgacgaaggcccttctcggggagcagtgccggctgcgaccactaagaagaggaaactatgtacaacagctgaggggttgggggcgtccgatcgttttgctgtggatttattgggaacttgcgtgactcctggggagaggatgtcatcgcccgagcgccgagaatcttccgcgtgaatgctgaaggttaccgggggtc

SEQ ID NO: 36288 - DNA, 293 bp, Zea Mays
ttgttaacccgaagggcatcaccaaccattcatacaacccaaattttgttttaaaggttgttttccattcatctccctctttcatatgaatctgatgatagccacttcttaagtcaattttagtgaaaataaaagcaccactaagttcatcaagcatatcatctaatctaggaattggatgtctataccttatggtgatgttattgatagcttgacaatccacacatattctccaagatccatctttcttaggaactagaaggacagggacaacacaaggggaaagactttct

SEQ ID NO: 36289 - DNA, 455 bp, Zea Mays
ggtgattcaagtatgggagaagggggtgaggatgatataatgcgtgatgatgaggatgttgacagtcaagatgaaggtcccataaagcctgaaaatggtgaagattccaccaccaattcaaacaatgaattgatggatgaatatgcctagatggagatcacttgatgttgagaatctgaattcaatcatgtcttgtgttcttttgtggacttgttagtttatgaagctatgaactatgcattatgaacttgttatttttatgaactatcaactacgttattttgcaaactatgttatgcattaggatgaaggaggcgctaaaaaggatgaaggtaggaaaggcgatgggccctgatggtatccctatcgaggtatggagatgtcttggagacatagcgatagtatggctgactaagcttttcaacaccatctttcgggcaaacagaatgcccgac

SEQ ID NO: 36290 - DNA, 1122 bp, Zea Mays
aaaaaatgatattgagccatgtttggacccttgtaactcttaatccataagtgctttgcagtgaatcactttagcaaagttgtagggatgttatagtagtgcaagtttgtgtaagggacctagccctaaaaccgtgtggaacctagtgtaaaatgtcccgaaagtgtggctgtcagactgagaatagttctgaaactgaagttcagtgacattttctcaactttggaatccaattgtggctgatccagtgggggtaaggtttgggtcactatgacaaagtggaagcctgtatatcaaagaacaactttgcaaaagggaggtaggtatgttactgcttggaacaggaagtaatagtgacctaaacttgctctgtcagacggtttttgggtgggattcagaatgaacagtaaactgcataagatctcggttcagggaaccttgacgttggtgatctctatgccggtgatctcctcatcgtgattcacgccagtgttaagatacgcgcctggataagagtggatagctgtccacggtgaaaatatcaggggagggggatggatgtggtctctggcgcgagctcatccatttcagccagttgatcccgtggtcggccgggacgccatcaccggagtttgatgttccttgtggccacgccacgtaacagagggtgttaccacgtagctgggagtcgtggcgtgaagccagttactacctgaagccattgctccactacgcgccatggtgaacacgctccagtgaagatcttttctgtcaccaccgtgagcacttccgtcccaaattcgcgaagcaagaaatccatccctttaaattgaggacactccctgctttgcctctctgttacgcgcacagcccacccctcactgccctaattcattcaccacaacccccagtcaccggtttttcccgagaaaggtcggtagcgccgccgtgagaagttccaccgtggtcagtcctgtctgaggtaatcccagcccaactgctatctgttttaatttcctttaggtgtcgtggtgctcactggcttgggaatttgaactctactgcagcagagcatcgagaacatcgcctcgccgttgcagaggaccgccgtagaccgcctac

SEQ ID NO: 36291 - DNA, 675 bp, Zea Mays
cacgcggataatgaatcggggtaaaagatcttggcatcgggatgagctcggaccctgtcaccggactgtgcaccgtacccacttaccgacgacgtggctttgtggccgttgctgtggccgccgccgttcactcggtcgtgccacgccttaggctgttttaccacgtcgtcacgagtcgtggagagtaaccagagaccgtcgtagctcattagccagtgaccgccacggtagctcgcgccagtaacttacccctctctctggtcgcccgcgtgtcttccccaaattagacgccaccgttgctgatctctataaattgagtgcatagctagctctgctaggttgttacgcgcccagtgaatcgctcatcgcctccaatcgtccaccgtagcaccttaattcgggatttccccaaattggtttcccgcaccgttgtaagcttctcaccgtggccagccatctacaggttggttcatgcctctctgcttggtgttctagcatcccttaagtctcctgttgctgatagaccagattgattgaactataccgcgttgagtcacctagaacacctcagttttccatcgggtctcgccgtcgtcgtgaacagatgaactccgggccggattcgtgcaattgagggtcggattaggatcgccaggagtagaattaggtgtcgac

SEQ ID NO: 36292 - DNA, 288 bp, Zea Mays
cattaagacattttgggctatttgggccggcctggcacacataactaattgtgggccgtgccgtgggccgatgactgggcacacgtgctggcacggcacgacccataattagatatgtgcttttgtgggccgtgcctttgtgggccgtgcttttgtgggcctgtgccgtgccgagccaggctggcccacatgtacatgtataggttcgactcctaagcaaagaccggacaaaatgtgcctgctgtattagctagcgtagcgtagctgactcctctggctcaacctcac

SEQ ID NO: 36293 - DNA, 325 bp, Zea Mays
gtccatgctggacaatgcgggatacacgcagcatccaggaccctggttgggaaggtcttcaggtcgggtttctactggccaacagcaaagagtgatgcagccgagttagtccagaggtgcgaagcctgccagtacttgtcaaaacagcagcatctaccagcgcagcaactgcaaaccatacctgtaacctggccgttcgcatgctggggactggatatgattggacccttcaagaaggctcaaggaggatgcactcatgtactggttgctattgacaaattcactaaatgcatagagttcaaacccgttgcttctctaacctcag

SEQ ID NO: 36294 - DNA, 357 bp, Zea Mays
aaaattcctagtggacggtggcttcaatttctggaaaggctagggtgctctgtgcaatatttaggacctaaattaaattttcttactgctagataggacggcgggtttattctacagaactgcaagggtttatttgcaaacaacgcacggtgaaggggtatcgtgaagtctcaaccgcccgatctaacccagacggtccagattagatcgcgttttaatcgaaccggtatacgattcaagcccactgatcaagatccaaaggccaggattttattaaggcgcgatccgatccctgccctccaaccaggatctaacgcccccaaagcgtcccagccgaatgggtatacacgctctaat

SEQ ID NO: 36295 - DNA, 519 bp, Zea Mays
aggacagtttacgggatggcagacttgaagaaactcactctgaggatggacagctggagcagatcgcattactttccccccaacaatctgctggtccgctgaaatctaatgggcctctacagcaggatgagggcactctgggtccggtgacccactctgacgtagggccgctggggcaagtcacattaatttccccccaacattctgttgggccgctggaaactgataggcctgtctcgccccagcgtcagagctgcagaatgcatccaaatgtctacgggacatcacttaaagtttatagtagaagaagacagcgtgtttcagttggacaggttgacgcgccagaggacgtatctccttccaaacagcagttctttgagatggtgtccaagaaaattggttgtttacttcctactccaaaagctaagaagaggagagaacctgccatcccttcgcagggactccgtcgtagtcgacgggtggctggtctaggcgctgagcacattccacagatcccca

SEQ ID NO: 36296 - DNA, 339 bp, Zea Mays
caggaaggatggcgaggaggtttcagttcacggtgttgtgcgtcccgacagcgcttccctagttccggtgacaaattctccagttcccagtcatgaatcctgttcaacgaggctagggaaaccatccatgtgtcacggcgaagcttctgcgcccagtgcggtcgcctgattgttgacatgggccacactctattgcggcggacgaattcctccccggcttccctcacattcgcacgacggcttgttcacccacacggttccagcgaccgaacacatttccccctcatgcgctcacgatgccacggcgtagacgagatctggcagcagtggctccatcct

SEQ ID NO: 36297 - DNA, 553 bp, Zea Mays
ctaggctggaagacgttgatgtactcgaagaagaacgactgaacacggtaatccagtcagtccgatatcaacaaactctgaggcgctacccatgacaaggccatacagaatcgatcctttgcagcgggagacctcgtcctccgccgaattctaacgggggaagaacggcacaaattgtcaccactatgggaaggaccgttcatagtagcagaagtcactcgacctggatcatatcgtctcactcagatagacggcacggaaattgggaattcatggaatatagagcatctcagaaagttttacccctagctatatctcaaaagctgtcgggatgacaatgaactctgtaagctgagaaatgtatcatcaataaaaagacttcaaaggcactcgaattgtttaactgtcaatctgcgtactcgcctagctcggggtgaccactataccctgctaacggagcaatcggcttaagtcggcaacgacttaagacggtgcaacatgctcacgcttacctaactcagggtgaccactataccctgctaacggagcaatc

SEQ ID NO: 36298 - DNA, 522 bp, Zea Mays
ccatttctcagacgaaaggttatcacgggatctaaccacaatcgtcgatctcccgatcaacggtcgcgaatcgattcggccgagttacgactgtcgctaaatatccaccgtacagggttggatcaacggtacagacgtgttctcccctaactacggtgaaccaggcagcagtgccacaccccgacgacgacaacacgccggagcggcgtgtccctgcccttttccccatctatttcatatacgaaagatgctacacgaacgggtaacaacggtgaatctgaagaggagaatcacactggtgatcgcgcagcaccacggtctggccacgatcgcactgagttccgcggcagcgccacaagtccggcgataaattcacgatccacgggcgctcaaatgaatacaatgttcggtgctaagctatgaggggacagaggtgaaggcgcagaggaaaatctcacacgaggaaggcagtgcaagactccggtccacgcgatggcgcattctccgccatggttccaggaa

SEQ ID NO: 36299 - DNA, 337 bp, Zea Mays
cgagccgaaggggtatgaagtaatctaagtcgtctgatctgaaatataaggccacgattaaatccacccgagatcgaaccgttacgtcatataagccgctagatgccagatccacggcccacgcatgcgcacactcttttaccccctttcccctcggatcattaatcaacggtctagattctatacaggtgagatcgatccgcacgcgcgggatcggaatcggacgaatcctatcgactcgtacgaaacgacgccctagcttctaatctgtgccgtcaacgccccatcaaacggccacgacgttcccttcttccctgagccagaccgagcggcggcg

SEQ ID NO: 36300 - DNA, 416 bp, Zea Mays
gggggatggggatcggcaattgccggcgggctgatacgccatggcggcgagcacaccgccgcccgcctacattgtgaagagggtggagtgactaggaccgctgaatcgccgacgaacggaaccgattcaatctgagggtcgagtagcgcggaattagtcaccgccgtttgatacgatctgagcgggtgagattagatcgtgcttacttcaatccagtgcgttggtgtcagatccaacgtatgatacagcgtactgattcggtctagggtaggcgcaatccggtccatggaattctaatcggatggctgtaaacactctgtaccccttcgctgcacactactttcacatgagccctcgggcttttagtgactcaacccgcggtccactacggggttggactgagtctagggaatttt

SEQ ID NO: 36301 - DNA, 280 bp, Zea Mays
ggccatcttagatcaccacaagcgaaaggccagacgcgacaaagagtcaggcgagggtgtcgacaaccagctcaacgcaaaagggagaggagactgatggcagcgaaccaacgtgctggtggctgtgacaagctagacgggaagaaggcctccaaccgaggagaccactgaccacttcgagaagctccttgaagccccatgttcgaaccattgacactcggtccaacacgcatacaaggattgtggattacttgggaaattcctaagtaaggaggcactg

SEQ ID NO: 36302 - DNA, 276 bp, Zea Mays
cgccatacgagacgaattaccatgtgctttttccgatacttatcactataccaacaactacgactcggataacacatccataagataggctcgggaacatgtttgagcccccgatcttggactcggctctctgctcggtcatgatgcgacatacaggggccagacgtcctccccctggtccaagtcaaccgcaagtacaaaggccattccggcggccatgctgctacaagggcttgggcttgtctcctcttccgtttacgacaaaccttggcgctc

SEQ ID NO: 36303 - DNA, 329 bp, Zea Mays
aagtaggagtcgatttcgtaagtgattgtgatatataggttgtgtctcggattgcgataataataggcaagccgacgtgtatgttatttagcgggctatgtcgttgctctagttagccgaattgttagatggtttggttgagctcgtgctcacgaggaattgctggttgtagtctaaatacgtatggttatggtcgcggatgaaaaatattaatgctcatgtgatgtctaaattaaaatgcaaattattgggtgaaaagcgtttcgatattgattatcggggagaacgcgttgttaattgagtatggtacttctagtgctcgaaatgac

SEQ ID NO: 36304 - DNA, 377 bp, Zea Mays
atcggcgttttagaggtaacgaccgagttatgcttgacactattgtcggtgttttagaggtaacagccgagtggtgcttgatgttgtcggcgttttagaggtaacagacgattggtgcctgacactgtcggtgttttagaggtaacaaccgagttatgcttgactctgtcggcgtttttagagataacaaccgagttatgtctgaagtctcgctttcccgagtgatgacttggcccttttcagaaatggcgcccaacccgggaaagccccatttatactcatgccgacgtgcgcttttgatttctgagccctaacttcacatttccgcctcgaaccactcttctgtttctctgagatttcgcccccattcgatccgc

SEQ ID NO: 36305 - DNA, 415 bp, Zea Mays
ctgaaatcatatcaacaatacagcgttgtggtaccctactgtcatgcattgctccaacaaagtccataaattccggatcacgtgtcttgttacaacagaggtgttgtttttcagtttcttgggttacaaaatcatgattatgcacaaggttaactagatcaatcctaacagatatgacatttttagcatcatcataaattttcctaagctttattcctactttgcactatgttcgacctatgtatttgttccagattctagggttaccatcttttctttctacacatctcccctctctggagcaattcaaccatttgcagtttgtcttttccctgtaccttttcaaaggaaagccgacctcatatgcataacatttatagaaatcataagcatcatcaacatctcggaacatcat

SEQ ID NO: 36306 - DNA, 554 bp, Zea Mays
gcagcaaccacctctaaggctgaaggtccctcagtcacttccatgggagcaggacaatccaagtcagtttcctgaccctcaagaccgcgctccaaggtcgatgaggcgcgggacgctgcccgggatgaccccaacccggcgtcgaacacatcagcacaaacatccatcgcgtcaccatccgccggttctgataacagatcctctggaaccatatcttcaagagtttgatcaaagttcgccagagacaattcttgtaaaccaatgagggcagacagagcaggagaaggaactccactactttccccactggctacgtagcgccgactgttcttccgagtcagagggatctcatcttcttcctcctcctcatttccatcagcaacacggacagcacacccattggggtcagcgtcagatggatcacacccattgagggtcagcatcagatggatcacacccattggggtcagcgtcggtaaattcaggcacgggcacttcctcaatagcaggagccgaaggaccagcatcccgatccaagctagatactcgccgaa

SEQ ID NO: 36307 - DNA, 462 bp, Zea Mays
ttgctttgttttactaggtgctgtttcaacaagcaacaagcatatttgtgcttgtcgagactggctagattctataactgatactgtaggtttctagtgtggtgttcctttggcctatatactgccaaggaattcggcctatatagtgtggtgcccttcaaataatttttccgtgaaatgcttgtgtttggatcccgattcttagatttgagcgtgacacttgcacaatgtgttcttatgttctcgctgctgttgatgacacatgaacatgcttcctactcgcagataacatttgaactaagattcgtttatcacttgatgcgcaagcagaatgtatgcattttaccggatcctgcattgttctctgataactatcatgcatagtacatgatgtgcacttggggctaggctctgtttcaacaagatcatccgtcaatagcggatatataaaacgtggttttc

SEQ ID NO: 36308 - DNA, 362 bp, Zea Mays
tacgtagtggatatcaccaaattcgcatgaagctaggagatgaatggaaaacagaatttaaaaccaactttggtttgtacgagtggttagtcatgccttttggtcttactaatgcacctagtactttcatgagattaatgaatgaggttttacgtgctttcattggaagatttgtggtcgtctactttgatgacatcttgatctatagcaactgtctagtagatcatcttaatcatctacgtgctgtttttaatgctttacgtgaagcacacttatttggtaaccttgacaagtgcacattttgcacagaccgtgtctcttttcttggctatgttgtaccaccacagggaattgaagttgat

SEQ ID NO: 36309 - DNA, 328 bp, Zea Mays
cgggtgtgacactgggcgtgtacgcacgttgcatgcagattcgacaaatgtggggctcaccatactcttgggtaagatttgctaccggtgcctctcgaacacccactttgtcaagacctattctagccctgtcaggtgtcgcagatgttttctgctctgtcactttgaaaaatattgcaacagtacgcatgtctagcctttgacacgtctgatctagaggcctaaggtgcacaacattaatagattggtggcaagctgcattgatgctcatgatgcattggaaattgctcccggagccttagctaaggcccctttgccttcagtcacc

SEQ ID NO: 36310 - DNA, 410 bp, Zea Mays
ctatatcatacggatttgatgtgattgaaaaaaattaaattcttattcggttattcctataacacatgaattgaataagatttataaaggagacttgttttctactgacgagagggtgatctgttgccccgggttgacgtggtgtccctaacgtcattcgtgtggccccgcgtaggcgtactcctggtatgatgcaccgctccgctcgtccgtcgtacagttccctgtagtggtgttgacgccctcgtagtggtgcatggcgggccccacgggacagtctcacggcgctgtcacgcgttgcgcaacctcgtctgtcgtcatgatcccgacatcactctccgtcgtgcgtaggcatacacccggtatggcgttttatctcgtccttcctgatatgcgagtcactatagaga

SEQ ID NO: 36311 - DNA, 348 bp, Zea Mays
gcactttgtgcaaaacaatatgatactcagataatgtgacgtgcgtgtgcgcgagaggggcacctgcccccgcataaactacgggattattacgtcgctgttagggggaggtggagcgttggcatcagcgacgtaccgcgcgcacaccggatgtgagacgccattcacgcttacgcctcctcctcctcccttgtttctgtttgcttgctaacctaatggcacagcagaattgacgccccatcggctagcctagcccccggttgatcgatggagttaggagtgttgtttgtttcatcgtctatctactgtcctatgagtgacggcgacgtcgccatgcatgctctcggc

SEQ ID NO: 36312 - DNA, 329 bp, Zea Mays
atggtggcattgatgaatgtattcgtaggtacagaccacacagtcctgaatggacctgctcatgataaacccatattgatttttatgaatgagcctttgaattagaggctggagtctgttggcatgtaacttggagatcatctttatgactatattgagcagggagattggtctaaagtcattaaccctaaccgggttgttcacttggggaatcagactgatgtaagaactgttgagaccttctaggttcagagagttgtcaaagaaatccttgcaaagatcgtaaaagtcactcttgacaagatgccaacaggatttcagaaagttcc

SEQ ID NO: 36313 - DNA, 445 bp, Zea Mays
aacggggtcacctcacaacaccagagaagaggactgaaggaaggaggaagatggggctggaggatgtgaaactaaaaatggggaaaggaggaggggagtggaaccaaacgaacttacaaactccacaaagcctagctcaggacacattggagggcaacctggattcaaaacacatatgggatgatggcctcatccgcacccttgtgaacttccatggccttcgtgagccagcgagcgatcttcacgttattaagaagtggagcactcagccaactgccatccgatggggccttggtagtcatcgtaaatagtggcaatcgtctgccaatgagaggagccacccccatggaggtaattcccaatcttctcgccagcgtgaccccgcgatcgcgaagaatggacagcgccgcaatggccccggtcgtccttttctccccttccttcg

SEQ ID NO: 36314 - DNA, 364 bp, Zea Mays
atcccccacccaacccaaaaagctagccttaccaagacaaggtttggcaagacatgacaaggaacctgcctcccgccccaccgggcttcgcccccacggtcggtcctcaccacccattcgggatgccctcgaaaaacgacggtgaagacatataggccagcctggacctcggcatcaacactaaggattagctgctgatcaaaagccttcgcacgcgcaactccaacctatagaaacaaagagatgccctcgcggccagccgtccaggtagcaccgcagcgagacccaaaccagggggtgcctcccaatcctgtaagagaaagagcacctctaggccctcaagcaagaaatccagcaactgtag

SEQ ID NO: 36315 - DNA, 296 bp, Zea Mays
aagcttcggtaaacaacttcattttcctcaggagcaggggcagtgttgtctcctccaaccctcacaatagacatgtcgcgaaaatatctccctctcatggcatcaatatgactctgtttaatgcttgatttcccgaagatggtatggcttggccaccagggccgatcctcagaatcttcatctccactctcaacatcataactatcgctgtcatcagagttttcaaacaaaccctccattatctccttagtaattttctctgtattcgtttttgccatagactcataaaacccagc

SEQ ID NO: 36316 - DNA, 414 bp, Zea Mays
ggtaaatgtgcataaaaaccaagaatctaggtacaatcaagaatagagataagtcttgcaagaggtaaagtataggatataaccataggtgagataagtaagagaccacgcttgaactaaggtgggagattggaggttttagataacgaacataacgtaatcaccaaggtaagattgagagacgagaagggtaaaggcaataagaaacaaaagcacaacaaagaatgaggttacaaactcgcgagccaaagaagaggatacggccaagagaaagaaggtatgagacggaagaggggcgattttaaagggcaggtatgaaacaaacatcaatgtaggatatagaggtgtcaatggtgcatatgataataattaaaagcataacaaaggatatagttaaggcaagactcacgaaac

SEQ ID NO: 36317 - DNA, 456 bp, Zea Mays
cgaagggtatgatacaatattggtggtcgtggaccgattctcgaagtacgcccattttatggctctcaagcaaccttttactgctgcccaggtcgcacaggtgctattggatcaggtggtcaagttacatggattgcctaagtctattggtagtgaccgtgacagaatttttaccagtgccttctggacccagttgttcaagctgttggggaccaagctgaatttgagtaccgcatatcatccacagaccgatggacagagcgagcgggtgaccagtgtgtagagatgtatttgcgctgtgcagttcacgctcaacctcacaaatggaaggcttggctttcactagcagagttttggtacaacacttcctatcacactgctttggcttgttcttctttcaaagtgctgtacggatacgatcctccctttgctgctgcccctatggttccttcagac

SEQ ID NO: 36318 - DNA, 564 bp, Zea Mays
taaccccaatgggtgtgttgttcgtattgttgacgaggatgaggaagaggaggaggaaatccccttaattcggaaaagcaattggcgctacctggtcagtggggggagtagtgatattccttctccagccttgtctgcactcgttggtctgcaagagttgtccatagcaaattttgattaggctctcgaggatatggttcctgaagatctgctgtccgagccaacagatggtggtatgatggacgtttgcgctgacattccggacgtggggttagagctatcccgagcagcgtctcgagcctcatcgaccttggagtgcggtctttggagtcaagaagctggtctgggttgttccattcctatggaggtaactgagaatccttcagccttagaggtggctgttgcagagaacccgatcctcaaggatggcgccagcaatttcctagcccccaagggtgttgtcgacaatgatccggcccgggtaggtagtgcgagctacaacccaacccccaagggtgctgtcggtggtgatccggctccgatgggcaatgaaggctacgaccc

SEQ ID NO: 36319 - DNA, 481 bp, Zea Mays
ttgcatcaaatttaaaaattgttagacatctcaacacttatgaaaatgatgaattgctaagacaagttgtagttcccatgaaagataaattactaaaatatcggtgataaatatccttgttgtatgcctttactttcattctggatcctagggctaaaatatatgagatgttttatataatccttcttcgtttgtctactctaattgatacatattactctaggcttccatgaaaggtgagatctcatttaaccaatatgtttcagctgtatgaatcaaagtttggtgatgtacgcttgcgggcacaacaccaaaagtccaatgctaatgaagtttggaacaaaatggcttgggatgacatctatggtgatgatgactttgatggtgagtcctctacttcccagtatggtatgagatcatgatcaggtagtattgctccctcttatgctacctttgcaactgcatcctctgtcttaaagtt

SEQ ID NO: 36320 - DNA, 691 bp, Zea Mays
aaaatcgagaagaaatgatggtgtccagggcaatccggtacgatctagttcaatcaatcaggcctacaagcaataggagactctagagatgctagaacattcaacagaggggcatgaatcaacctgaggtaggctgaccacggtgagagtctttcacggcagcggaaaaccgatttgggggaagaatgaaattctccggttatagtggctaatcgagggcgggagtgggtgctctgactttgcgataacatggcgcagcagaccgggccatcaatttataggggcattaagcggtggtgcctgatttgaagaaatcatgctggcggtcgagaagaggggatgagtcaccgtggcgatttaccgtggcgatcgctggtcatagacggatgatgatcactggttaaccttcacggtacaaagcgacgtggtaactacttaaggcgtggcgcaaccagagaaaacgacggcagactcggcgatgaccgcacgaccacgtcgctgggcaagtgggcatagcaacagggcggccacagtgccccaaactcatccgcgctgaagatcttttgactgccaagcgtaatccacttatccgtggcacgaatcgtggcagccggcgtgaatccgagcgcacgattcaccggcggcgagatgcattgcatctgatcatattcagtcactgtatcatcgaaac

SEQ ID NO: 36321 - DNA, 422 bp, Zea Mays
caccgatagaggaggtcctgtagccaccatgcaaggggaggggcggccgcacggcaaccgctgccgacagtctcaatggataggggagaggagagcagcatcgacatggacgcttcagccaaaacacccatcgcggagctgcggatgaccatcacggcttcatgcatcaacggcggcatcatgacgacactaatgatgaggatgaccatggcaggcgcagacgtaggcggtaagcgctcggattttggacaccatgggggagaatgggttgctgcatccgatgataggcacacccgctctagaatctagaacatcgagacgtggcgaagaagtagactactttaggcacggtggccgtcgtcaccaccaattgtagcttccagcaggcttcgagttcaagcttcccccacttaaggttcttt

SEQ ID NO: 36322 - DNA, 436 bp, Zea Mays
ggggatagtgctcggggtctcggaaatatcaccaccgtggataagtccggccggtaaaacaaatccgaccaccgtactagcttgtcgcggtggaacccgataggctcgccggtgaaccgccgtcgcacggccttgtgccacatatccgagtacctccaccgcatcgcaatgattcgttttagcttcccgtcgatcaccggagtagtcgccacgacggttgacacgagttcacttgcaccagtaacctttccccaatccggctgccaccgcgccatcctcaaattcaagcgccaccgtccttggaagctataaatcgagcccgccgttagctccgcaacctcattacacatcacaccgtccagtatcgcccccaagcttgcaaccgtgagctccaatttcaagtttccggtcagccgcagggtcgagctaaccgcgg

SEQ ID NO: 36323 - DNA, 286 bp, Zea Mays
cccggctaaaacgaagattgaaccgggtaatggacgccttaaatttcgaataccccgactatgaaaagcttgacaaaggggccaaaggggtgaaaaggaaaagggttgtcagcatcctgaataggcaagttgcccggctaataaaagaagatgagaaaattttgaagaaagcgaaaacagttcctgagccgaaagcgacatcctctaaaaagcgaaggcttgatacaacaccctctgctgagccgaaggtggatgagacagaagaagctccttcaacactctctgc

SEQ ID NO: 36324 - DNA, 639 bp, Zea Mays
cgggatactaaagaaaaccgccagtgataatgatgcggttgggacatatatgcgactcaatggtttctgccgctccagacgtcctagtatatcccaatcgctccagccgccgttgtcgctccagccgctgatgtccctctccttcattgtcgttgccggatccaccctccctccgtcgtcctagccgaagtgaagtaggcggtgggctcggccgtcgactctgcacaccacgcgccagacactagatctaggtgaactgcttagttcctccattttattgttgctatctgccctcgtgcctccattttaatgtattaaatcactcttctttcggcgcagttcctgcataagtttgcccaatctggcacattcattcactgattcttgttccccggacaaacctgcgcgtgacaagagaactgcaccttttcagtacaacctacgcaagaagcgtgccaaaaccacttccacggtaagttcttttgtgcataacttatcttgtttcttatgtcctctgtttcagaaattgttaaatgcgcctttgtattcattgacttacagcaagttcttatcttgtttctttgaccatggcaagttcttgtttcttttactagatgtcctatgttccaaatagttacg

SEQ ID NO: 36325 - DNA, 531 bp, Zea Mays
gcctaagggtgcagccaggttagcacaacaagtgcgcgacacgcagtctctcactcaaagaaggccaacaggccacattacaatacaagttgcagttacatacactcagcgagggcaccacattctacatcggctcaaccttcgggatgatgcccgcctccctataattgaacaacattattttcaattcctcaccctcaaaaagattccttagatccccctcaccaatgctcgtcccaatcggcaaagatagtagctctcgtttaccaaaccgatctactcgaagacggtcccgctccatccccatctgatggctcctaccacttcgcgaaacctcgcccacgctatgcttcgacaccaccctttgtcgccggaacttggtcctcacactaggaagatcagacacctcgccaacctccacccgcgacgaggactccgtcgcggccacatctaacgcagcaaaataatccaagtcttcatccgaagactcttcggtccaggaaaacggactcccaaactcaccatcagacg

SEQ ID NO: 36326 - DNA, 341 bp, Zea Mays
gttaatccttgttgcttagccctgtgatgatttctttgaaaatactgaactgtatactacactttttttgatgcgatgaaatttgtgagggctttggctgttatcagcctgttagacctgaggcttgaggtaatttgagattatgaggtggcttagccctgtgatgaattctttgaaaatactgaacatgtatactacacttcttgtttttatgcgacgaaaattgtgagggctatggctgtttcattgaaaaattggacctgaggcttgtggtaatttgagattataaggtttcttagccctgtgatgttttctttgaaaaaagtgaactgtatactacc

SEQ ID NO: 36327 - DNA, 502 bp, Zea Mays
cacgaaaggggttcttcatgtcggagctaagaacgcgggaggggaaaatttgtggactgcccacagtttcaggtgaaactgagtcaattgcttaagcactgaggtgcgtgatgtggcgaagaaaccgaacccgagcgcaatttataggccatcgaccggatttagatatggatcgcggatttcagatgtgctggcaagcttaccgcgcggcggattccagtgatggcacggtggtcgtcgattaaccggggcctgccacctcagtaacttgctgccacgtcaccggggacctttaccgcggccgccgacgacccatccgagccgcggtggcatccttatcaccggcgagggctgatccttatctccccctctaatgtactgtaccatggcaatccaccatcagatggcctgaccgagtgacttgaagccagattttctctcaattccatatggtaccaaacccaaacacctataacaaagttgttcctctataataactcta

SEQ ID NO: 36328 - DNA, 400 bp, Zea Mays
cgagctctgcatggaaacaccccattcttcatggtatatgggtcggaggcagtgctaccagccaatctgatctttggggcgcccagattaacctttgaaagcatagccgaagcagaagcaactaggctagaggacattgacgtactggaggaagaacgactaaatgtggtaatccagttggccagatactagtagaccctgaggcgcgctaccatgacaaagcggtgcggcatcgatccttctcagtgggagacttgtcctccaccgagtactaacgggggagggatgtcacaaactatcgccaccgtgggaaggtgatgtgcacccgttgggtgaatgcccgatctttcgatgagagggtgtgtaataactcgattggtggagcagacgacgttcacgg

SEQ ID NO: 36329 - DNA, 330 bp, Zea Mays
gcagtcgccaacgaccttcacggcctcccgtggttcgtcctagtgctccagatgtagcacctccgaggtatccacacgtacagggaggaagcgccacattccgaactgttaggtttgtgacggcggctaggcaagggtgagggctgggcaactgcttgtttactggtggcgaattagggttaacttaaccgcgccactgtaccttattatataggcgttctgttgggtttctagctctgaggcccatcagtaatcctaaagcctgtctaatttcagatctagtccgagttaggcttccttccccttaagtgtgtgaccctataggttcac

SEQ ID NO: 36330 - DNA, 322 bp, Zea Mays
gttctcagtcatttacatgcaatttggttattgtggacaccttcaccaaatatgcaaatattttacccctcaagcatccatttactgccctctctgttgctcgactgtttcatgaccaagtatacaaacaccatgggctgcccaaatccatcatttctaatcgggacaaagtgtttgtgagtcatttatggcgggagttgtttcgtttggaagatgtttagttgcgcatgagctcatcttatcatccacagtccgatggccaaacagagcgtgtaaaccaaagtttggaaatgttcttgcgttgtttcgttcatgcttgtcc

SEQ ID NO: 36331 - DNA, 393 bp, Zea Mays
gcgttggtagtcgagcgagcagaggaaggacacgcatgtccagtacaacatcccgtctacttcatcagcgaagttctggggccatctaagaagaagtatcctcaagttcaaaaactattgtacacaatacttctaactgcacgcaagctccgtcactacttcgatgaccataaagtcatagtagtcaccaggtttccaataggggatattctccacaacaaagaagccattggaagaatagccaagtgggcctgtgagctgggagctcacaacatcgagtttcggcctcgtactgcaataaagactcaagcactagttgacttcgtatcagagtggaccgagcaacaagaaccagataacccggagactgcagaagtatggcggatgtatttt

SEQ ID NO: 36332 - DNA, 349 bp, Zea Mays
gggtagaaagatcgtcgtcgccgtcgagctggaagccaccccgggcagccgcaatactcctccccttactcaccaccgtgaataaagctgctcaccgtcgtcgtgccctcgccattgtccatcgcgtgtcccaacctcaccatcacgtcgccgtggctctctctaaactccccgtcgaccaccggagttactgccacgccggtgaacacgtgttcgatgcgccagcgttcttcctcactcccaaccgccgtgtgtcccgtccaaaattcgcagccaccgcccgtcctccctataaattaagcccgtgaccagctctgtagggttgtcagctaaccagctacctccaatt

SEQ ID NO: 36333 - DNA, 292 bp, Zea Mays
gtcacttcaatcactctttgaccggctaatggtgttggtcaacaaaataagagtgcttggaagtgaagattggagtgactccaaggtcactagactatttatgagagcatacaaaaaaaggacaagagtctagcaagaatgataagggaccgtgatgactatgaggaaatgacacctcaccaactatttgcaaagattcaacaacatgagtctgaagaagccccaatcaagacaagagacactcatgccttgatctcaaatgaacaagattcccccaagaagaacaaagacc

SEQ ID NO: 36334 - DNA, 536 bp, Zea Mays
gtgagcccgcagtccaaattggtggttcggcaagcatcgtagacatgtgagaaagcttaaacgagggagagggagggttggactgaccgggaagggagctggccgcgttgaggtcggtttcgggtggcggaaactcgaattgggggaaatgagcgattctccggctatgggggctaattggaagcgggagtggtggctatggcttcggtatgacctaacgcagctggccgggggctcaatttataggcagagcaagcggtggccgcgaattttggatgagacacacggcggtcggcagtgaggaagaacggtggtgcagtgaacacgtgttcaccgccgtggcagtaactccggtggtcgacggggagtttagagggggtcacggcgatgcgatggcgcggttaggacacgcggtggccaacggcgatggcacgacgacggtgagcactttacccgcgggcggtgagccaggggagatgaactacggctagccggagtggctcccaggtcactggcggcgatgatcttttgacccc

SEQ ID NO: 36335 - DNA, 328 bp, Zea Mays
tgtcacctaaggtgatggactgtcccctgcgtcctgcccggcttatccccccacacggctccatgggccgcgcggctccctcgtacatcatgtcagatcctccgcgtgcggctcccttcgaacgtacacgttggctccatggtctgcatgtttgttaagtcattttctattctgattcagacattctagcatctatgcaacattaagtcattcttcatttttctcaggcattcattgttattgattcagtcatgccaagcaatattaagtcattctagcttccagacaacattaagtcatttcagagtccacacaaagtcattcaagc

SEQ ID NO: 36336 - DNA, 480 bp, Zea Mays
cacggactggattttcattaccacttagccagcagcatggccaagctccacttccaaaccagcagttaccttctagtcatcaacatcccagggcccttagtagccagccaaatattcctggagttggtgggcctttatatccttccaagcatctgcctggtggatcattctctgctgagactaataacatgggttttatgaactcacctgctcaaatgcatcaaggtggagcaggtacaaactaccagcaaaagtcagttagtggtcatgcagttccaaatcatgttggtccatcaccaattcgacctccaatgggttctaatatgggtaatagtgatggacactttgaaagagatggccctcacacttatggaaggtttgatggagcaaaggctctccagcagcaaccaaagcttgctgctctctcaacttcacaaaatcccatggtaataatcttggtacagtagtgttgaatcttaa

SEQ ID NO: 36337 - DNA, 364 bp, Zea Mays
caagcttggacagttcttctaggttctcttcaacaccaatgaaatcagatccatgaatccaatcatttgtacagataagacgctcaaccattgctggggtgagtgaactcctaaactcatctagtattctcccccctgcgctaaaggctgactcagaagcaactgatgagataggaattgctaagagatcacgggccatgcgagacattataggcaacctagtagcattgtcctaccaatacttaagaatatcaaaaccttttttgtcctcttcattgtcctctaaaagatatttatctaattcagacttgacagtactattgcaacacccattattgctcatctgttgagcaattatagacct

SEQ ID NO: 36338 - DNA, 375 bp, Zea Mays
ctccaccttggcactatccatggcgactccctctgcagaaatcacatgtcccagataggtgacggttgtggttccaaaggaacacttagactgcttggcgaacaacttgttggctttcaaagactccaaaaccgccttgacatgtattaggtggtcagaccatgatgcactgtaaatgataatgtcataaaaaatacgagcacaaatcgccgaaggaactgtcccaacacttcattcatgagggtctggaatgttgccggggcattggagagaccaaatggcatgaccaagaattcaaaatgaccatgatgtgtccggaaggctgttttgtgcacatcatcggggtgaacacggacctgttgataacctgaatgc

SEQ ID NO: 36339 - DNA, 319 bp, Zea Mays
ttgtatatccagactactgttatcctccaaggaagcaaggaaagaagaggaaagctgctacctcggcgacttctagcacatcaaagacaaaaaaggttaaagttttgacacgtcggcccaggcgcattgaaatggtcgacgtgccgaagctaattgagagggacgcttctattgcagagccaagttgctctatgtcaatcgaagctagaacaggaccgactaaagagccgaaattggagaaggcagcaaagcagttgaaagcactgagtccaccatgcacaacggaactgccgaagccatcaaggatccctgcaacaac

SEQ ID NO: 36340 - DNA, 1330 bp, Zea Mays
aaacgccacagcacaggaggcacatatgccgatgtggcgggaaaggacccctggcacgccaaggacgtggaagaaaggggacagggttatgctacaagaacatgcggagggggagtcacaagaaaagagctggaggcgagggctgacacggagtttggagtcaaaagggcccatggtgaggaagagctggactagagacggaaatggaatgcgggcaaaagaatctggaaaggttggaaattcaagagatgagggtacaggaagaagaaacgcatgtaagaaaatgaagaaacccccggatggtgagtatgctggcaagctgagagttgagctggacatgtgctccaagagaggagatgtgatgggggcgatcactctgtatgattccgcagtcgaggaggggatcaagttggggcagcatcactacaatgtgctcctttatctgtgttcttcagcttctcttggttttgtgcaaccagcaaaaagtggtaatatgggtagtggtatcgccagtattggtcctgcacagaaacttgatccatcacccagcagaagcttgggaggttcagagggagacaatgcatatgcatctgaaagtcatgttcaagatcagggaaaaaacaaggccgatttgattccaggtggtttgaaggcacaaacagttagcataccagtagaagatgagcttggagactatgcacgtgcacgaggatttgagatatttgataaaatgtgctcagagaaagagagagttcaaatgagtgaggctgctctgaccgcaaaggcacgtatggcgttgtccatgggtgacagtgatatggcctttgagattgtgaaacagatgaaaggcctgggtttaaagccaaagttgcgctcatatggtcctgctttaacagcattttgcaacagtggtaatgttgaaaaagcatttgaagtagaagcccatatgttggaatctgggatcacacccgaagaagctgagttggagacacttctcagggctagtgtggttggccgacgcggagacaaggtatattatttgctgcataaatttaggactgctgtcagacaggtatcccattccacagctgaattgtttgaggcttggtttcggagcccaacagcatctaaagttggaaagagaaagtgggatgcaggtgctatagcgaaggctattgagaataatggagggggttggcatgggtttggttggttggggagagggaaatggacagtggcacactcaaatatcaacgagaatggtgtctgccttgcttgtggagaaaagctggctattatagatcttgacccaaaagaaacagaagatttt

SEQ ID NO: 36341 - DNA, 732 bp, Zea Mays
ccgtagagcgcggcggcgccgccaccgcccatggtggcgagttcaccggaatctcccggaaccacgcatgggcgccctagaactaaggatttccatcgcacgggcaaccccaagccaccacggacataatgaaggcagtcacatcgcggataataccccggcatgccctgcccccgacccaacgcgacaccgcggcggagcatagattccggtgagtaattccaggggttcttgtaagctaacttcaattcaagttggtgcaacacgatgggggtatgaagtacaagcgagggataggatgtttaccacggttttcgctgcgccaagctttggccacggtgaggtgtggccacggtggctgcccaacccggtgaggaatcctcggttgattcgagcttcgctttatgccgcggcgatgcctattttgtccacgaggatgccacgaaagtggtagggcagtcgcacgcccccaatttgccacgtcggtgaagaacggctgcaacagaactccctttctcccacccccttacggcaatggcgcgcccgaccctcggatcgcgagtgtggcgagtatggtggggagttcgcgggtggatgagaggggcaaggaggggcggctcaaatacccacggacgtggccccgtaagcagttttcccctcccgatccatcagcgcgaagatcccggcgaggttgttagcagcgcgcgcgagctgaccgcggaggggataacc

SEQ ID NO: 36342 - DNA, 584 bp, Zea Mays
ggaaaggtccacatgtagtgagagaagtcatctaggatgaccagatagtacttgtaaccgaaaatactcggtatcgggatgttcaaaggtgacagtggacgaggtccaagggggcgagcggttctagacatggaagaagggaagggtaagcgagtgtgacacccaagctgacaagcatggcaaagtgaggcatcattgccatgggggcaagtgatggctaaggtgctcgagagactagaaaggacgttgtgacaagggtggccaagacgacgatgacatatggaggcagaagcagcagtagcgatgatgtagggtgtggcaacatgggttaagggaggtggggcgagcaagcgaataagatataggaggcccagatgtcacagcaagcgaccacaacacgagtggtaagatctcttatggtgagcccctgcgcccgcgcctagaacgccacaagaggcaatagtagtgtccccaagactggtggcggctactccatgtgaggaggccaaaacttggtcggggacaggtcgcattgagatcggggagggcggcacccatggtcaccgcgagcatgctaccatgca

SEQ ID NO: 36343 - DNA, 613 bp, Zea Mays
ttgcttaaggggttcaacatggttgtcatgaaaaatatgaagaaaaatgcacccaaagtcgggctgtcaggctgccttcagtctgaaaccagtctgacagtgtaaccgagccatctttggactaagtttcaaccttgatctagtgagaatttggcttgggttgctatgacataatggtagctggatcattgggctacgactttgctaaagagtgtcgatcatgttgctatataaaatcaagagaaaatctgccctaaatcctggccgtcagaagcactgaatgagggttgccatggtacagtgatctgaataagattagatcgactgcccggccgttcaccgccgacgaccgatctgcgccgtgatttgcgccggggatgggctgagctatcgacaggcatctcctcgcgacgatattattgaagcaggataagatcgctgcggtgggggggtgattattccggccgccacgcggtcactgatctttccggccatgcttggtcaccggcgccgctctcctctgttcatccatgccatcaccgattggactgctttatggtcacggttgaacgtggcacaactctgcgaacccagccgcatgtggccggagtta

SEQ ID NO: 36344 - DNA, 488 bp, Zea Mays
ctggtgctcgactccttgaactatgacccttcaacctatgcaaaattccttagtatcttagagcagtaagtcttttctatgcatgcgtgcatacttatatcattgagaaaattttgaaataacatggagattctacttgagatcacagagcattttgagatcacagagaaaattttgaaataacatgtgagaaaatttaggttgtatttgagggatggcgtgtgtgtgtcggtgtttgtgtttcgggtcactcttgacctttgtacttactttcttccttaaatgaaatgacgcgcagttctcctgcgctgttcgagaaaaaaaaaataagtttaaaggtggaaagtacgacaagaccaaaaaatgtgttccactagacatccatcatcactggccggtaagtatgtgaatttatgaatacatatcatacacaatgctgcaactaaataaccaatctctcttgttatgtatgtagtgccacaagcaac

SEQ ID NO: 36345 - DNA, 953 bp, Zea Mays
tcacaccttttcgtctactatattgatcggaggccatgacgctgcaggagataaagcatgggtcaccccgaacaagcacatcagcggtccccgacgtcgacgaaccaacgtctaaagacctcatcgacagagatcgcatcctcgccctgctagccatcaacaaataccaagctcaaaccaaggcctgacgcgacaacgcagtcgtcccaagagagttctacgaaggagacctcgtactcgtccggaccacccggacagagtcacggggcaagctagagccgaaataggagggtccattcatcctcaagacgaaggcatcccccagcgcgtacaggctatcaacgccctccggcgaagacttagagcactcctagaacattgataatctccgcaaattttttgtttaacccttagggctcacgcgcccttgtaatccaccaaacaatattgttctggcccgcactcttttcctcccgggggtgaggtttttaacgaggcggagccatgtaatatacctacaaaagcccccgcaataacaaaaactcagacccaacgtgtcaaaaaagaccgcatcgacggtcttcggcattcgaccactccgaagtcaccgcgacaggtagcgcagactaccctcgcgtgcgacactccgcgcaaaagtcgcctaagggtgcagccggaatagcacaacaagtgcgttaatcgaagtctctcattaaaaagacactccacgcaaattcgcccatgggcgcagccgaaccaacacaggcgtacgaatacggcaaacaggccacattaccatacatattacaattacatacacatggcgagggcatcacatattacatcggctcaaccttcgggatgatacccatctccctataattaaacaggattatcctcaattcctcaccctcaaaaagcttccgaagatccccctcgcctatgctcgcccc

SEQ ID NO: 36346 - DNA, 1093 bp, Zea Mays
gggttgaggtggagtggagtgtgcacttatcaatagaagacaagagccgagaggaagggccacaatagcaagacgaaaattaagaggggcacacgacacacacaggcagccctacaagtggagctttggagggagggaggcctggcctcgtagtttcggtgccagtggtgaaaagtggcagctctgcccacattcctacaccaccgcccaccgcggggccaccgtctccatggcaccacttctccatctccaatccaactgcccttgcgatgctctgcctgctgcacattttcctcccactactacactttattaatcacacagaccgaatcccacgccttctctttccttccccttcgttctctccctgctgctctgctcctgccgcctggctgccgtgccgccgctgatccctctccctctcttccccctcaaagccccaattgccgggtgctcctcttccacccccattgccgactgcttcccgccagagagtggggaagggaggggggtgagaagggagatggcttcttggatagggagtgggtaagaatcacacgatgcagttacctccacctttctctcttctccttttgcgggcatattcttcacctccgcctgcctagatccttctttctttggcccggcttagcttccagtctcaccaacagttctgacctcggagcatctatcaatcggcccactccactctctggtaaggcaaccagccacgccacggcaccctttttgttcgagaatctgcttgcccgcgtcgccgtcgtggctttgttcctcctcgcgactgattcgtcggcctgagtcgtcactttttgtctaattggtttcagcgccggttccatcgggttttgatgcaagagtagaggagttgttgctaggttgttgtgactggttgttggagagcaggagccagattgaggagaatttcagccaattttagcggaaccgtaaaacccatcccgagaatttttcctgcgcctcctacggttaggagctgtggctggacagtgcctgcctacgctctggagttttagtgcagttttacaagttttcagtcaattttgatcaagctcag

SEQ ID NO: 36347 - DNA, 553 bp, Zea Mays
tgatcttgcgaggttgccttactgtttggtcgcggtcgcttatttactagctctcttgcttgtttagggagctaattttgtagggctattttggcagttgtcacgattggtgatctagaggtgatttccctatatgctgattttgtgggagtttactagcacttcattttgtgggagtttactagctcttcatcttaggagtggccagtcacttgtgtggttcacatgtccgttagctgtttctactgggtagtagatgggtggacacattttgatcttttggtggttgagatgtcatttcctgtcataccttgcttgttggcaactgcgcagcagcacgagtaaatttcgttatcctatgatgtcgatccgttctatttgtgactctgcctccttcccatgcaaaataggggctacataggtagtcatattttggaactatgttatcaagagatctcactgcaaacttggtgccaagtgctcactgttgagaatcagaaagtttagacaactagatgagtttggcagtttgctactactaactgaaatcagc

SEQ ID NO: 36348 - DNA, 440 bp, Zea Mays
cgcgggcgggaccactgctgcagacccatttcactcccttgccatcaccggtaatatgcatgtccttgtgttcgtcatgtcccttattacatatcgcacaccgtggattaggatttagggcttgtttgtgtagcttcgccgacctctggccatctctccgccatggaggattgctacgccgccgtgtggtgtattgggtcggtgtgatgatttttgggccgtcggatcggaaatatgcgatcaggatcgactcaagcatagcgactcagccaaaaccatgggggctcgtccgatcagaatctatgggtcacgattagatcccaggccatgacatctagcccgtcgatttaaccacctgcggctccgattagatactggttagatctgctcgtggccgtccgaatctaatctgacggcccaggcagccccgtaccccttcg

SEQ ID NO: 36349 - DNA, 782 bp, Zea Mays
cagtaaaccaccattgcaatccagattcctcctgaagctgaatggagactgagaaatcacgcacaataccgctggcggaggaaaaggctccatcccgccaggccaccaggatgccccccttgtcccatgagcaggacagaagacaaaattaccataaccaacacccaaaatagataggacatcaaaagcagagatggaactcagcttagtttcttgcaaacagactagcagaggcttggaactaaggacctcagacttcacacaatctcttctagatctatcattcagacctctaacattccaaattagaaaaattgactgatacatgactaacaatatagaagaaaacgaccaaacagcgtcaggctgagacctggatctctaccggcacttcccagccgaacaaagcagccatagcctccacatgtgatctggagaggccgttctcgaataatttgacatatctagcagcattttccaaggagatttcctcatggtcaccacaataccccaaatgcctgcacaccttggcaactgaaacgtttccgaggtcaagaggaagcttagccacccttctactcctcctgggcatgaaatcctttggcagtgtcttcttttttctcaaattgcacctaggtggcgagagcagcccgttaatcggtttgatgataatttgtttgaaggcctccaggggcaaagactcaaccggctcctccagaatagatggatctgacccaaccttcgatcttcgagaatagacattgagacaacagcgatcagga

SEQ ID NO: 36350 - DNA, 291 bp, Zea Mays
atcggaatgagctcaggccgagcgcaccaggcagacagcttgaaggagtggaaatcaaggtgttcttccgtatcacggtgcagttcctgtaacatgcaaaattcaccgaggagctgttccgccgtcgcagcctcccaggtgtggcccgatattccatgcagctccacgtcgatcaggaatgggagggcgccaccgccgccgatgagagcttgacgagtccaccttctgatgtgtaagcgaatggaaggggcgatgaaaggccacccgtcgttatagacacgacatgccagt

SEQ ID NO: 36351 - DNA, 324 bp, Zea Mays
cttagccgagctagctgagtcaaagactgataaaggtaaggccaaagagccaaaaatcgaaggaacaaaattgttagaaattttaagcccttcggcagaagtaacagtgccgaaggcacaaaaaagtcttaccacaactcccaaaagaagaaggatggcaaatgtactagatgtgttagaaacagtaaaggctttaagctctactccttcagggaaaatcgccgaggcttcgaaaatgcaaaccaaagctgaaacaaaactggccaaaattggagctgcagtaagccaggctagtgccgaagctgggccttcagagcccactga

SEQ ID NO: 36352 - DNA, 630 bp, Zea Mays
cccctcaatcaattttactaacggagctgggaatcaatcggcccacggagatagcgcgaacaatcggacaaccaagtgcgttcccggcgatctaagacagcttaactcaactgagttggtcggggagtatcggggggtacataagaacactcaaacgagggggcagagggcatgagcagacctgaatcgagctggccgcggtgaggattctttcacggtggcggaaacttagtttgggggaagtgagcaatttgtggtctctggtggacaattagaggcaagcgtgggtgcgttggcttcgtgataacatggcacaacagacccgaccatcaatttataggatcgctaagcggtggctggtgaatttggattgagcgcggtggcggttagagaagaaatgagtcactggcatggtgattcgtggccttcaccgtggcggcctccccggtgatcatgggacatgcataatactggtgattgcgatgtggtaattgctgaggcacgtggcattcggtcgatgagcagccaactctggtgacttatccgaaccggccgcaaagtaggaaggagtacggcggctagccgaaatagtgcccatagcccaacaacgttgaagatctttttaccccg

SEQ ID NO: 36353 - DNA, 403 bp, Zea Mays
gtgaatttgaggttgccttgggctgtgggcagtggtccgacaatatctagtccccaccgctaaagtggccaagtatgtgcgatgagctttgtgagttgtgaaggggcgcctgttcgaggcaagaatttctggtatgcttcgcacgatcaggttactcggttggccgtgcatacgattgctggccagtagaaaccctgacgtatgactttagctgcaagggccctcggtcctgaatgtgatccgcatgtaccgctgtggacttcgcggagacgctctatgccttcggcttcagttatgcatttcaacatgggttggcttattcctttcttgtaaagctagccgttgactatagaaaagtctctgcttctgtgttttagccttttggcttcattgtgatcggatg

SEQ ID NO: 36354 - DNA, 695 bp, Zea Mays
gtgacggatccgggctctccatagcgcagcctcttgtggggaggagataacgccatggcggggacctgagcttcgggcggatccagtccttgcagttgggcttccagggctgcaatcctggcatgggcattctccagctccaagtgcaccctagagagatccagggtggcattgtccaggtcggtgttgagaccggccactacaccagctagggtgttgaggcgatcctcaccagcttcacctgggacgatgctggtctgacttcctccacgcagacgctgaggaagatgcctgaacctcgtgttctgcagctgctgccggtaggtgtggctgagcgaccacagggtccgacgggtagcatcgctgaccgaggcagtgtaggtggacagtggtgttagggactcatgagcagatagatcctgaatcccctgccccctgcatccatcaccctaacgtggatgcgagtgatgtagtagcaagcccggggaggctcgctcactcaccttgtttcgtacagggggcagacgtaggttcctagcgcgtgcagcactacttgcagcaggttggggaagtgcctcgtctcgaacattgatgtgtaatgttcgacaacaggcccaaaccccatgaagtagtcctgctgggcgtagtcggcttcttggttgacgtgttcgtctccaccttcttcttcgtcgtca

SEQ ID NO: 36355 - DNA, 710 bp, Zea Mays
ttgtaacgttgcatgcctccccttttatagctcaaggggggcacgtacaagggtgctgagccccgacatgtgggctcaggaatataatggatgtaatacttggagttgctggagcaatcttcttgcacactaacatccacgatctgcgtggtattagcgtgcaggggaagcttccttggcaacgcataagtgatgatggacacagtgcaccttgcagcacgggagtactgtttggcaatggactagacatgcacgccgcctgtaggatggcctggacgccgcctaccagctgagtggacaggtcacaataaatgctgaggcaacacatcgcctgtcaggagggtggacaggtggcgtgtcctatccgcaataaatgcagagaccgcgcggccgagaggccttacgtcaggctccgcccgctggcttatgtcacaggcaacaagccacgtggcagcatcgagtctccgcctgagcagggagcgcaagcgcacaggataaagcctggacacgtgtcagtaccggacccttgcttaggtcaggttatcccctgtcccgggacctcgttatgggtggcccagaccttactcggagggatccggaccccatccaagggacccgacacgcttacttgggagtcccagaccgtattcgggggtccaggctgtgcgtacaggggtccggtgcttcctcgtggaggtccggtccaactg

SEQ ID NO: 36356 - DNA, 297 bp, Zea Mays
gtttgcggggtacctaaggatgctagaacaagtagcagagggacttgagctaacctgaatcgagctggccacggcgagctgatcttcacggcggcggagatcagtttggggagaatttgaaattcgcgagcgctggtgaatgattgagggtgcgagcgggtgctatggctttggaatgatctagcacagttgcccgggccatcaatttatagcgctcacaaatgttggctggtgaatcgagcgagacgcgaggcggccgagaaggaaaaaggcactggcgcaagcgctaggtggctt

SEQ ID NO: 36357 - DNA, 329 bp, Zea Mays
tggaaacggtcgcctggctcttcattgttagcgtgacatgtatgttcagggcctgtctagaagaacggtgctatgcgctgcgtgtttccggcgtcacataacaacggaaacagattcagaggaatacaatactcatgaatgaatcagctaggccggccggcggcagcagcagcaatagaggaacatgagaacgtggccgccctgcaaagccgccgcgccgcgtgtaaaaaaagcttggaagcgcggatgaaatgtcctggacacgcagcacgcgtgtgcgcatgtatgctgagctgagctgagctgagcagatacagagttgacctccg

SEQ ID NO: 36358 - DNA, 469 bp, Zea Mays
cccggggtttattttgtaattttggacggccgaaggggtatcgtgcactgtgggccacacgatcaggattcactggcctggattgaatctagtctttactgaaccggtacgcgccgaggatccttgatcacgaaatcgacggtcacgatctaatgcgcgaaggaggtatactaccgtttgatctgagccgcacaacaactatcccacgatccaaaccctatctaaccctaggtcgttcatcctgagatcaacggttctggtgctttctcctttcttccgctctctcccggtgagccgagcaccctctggcagggaatgcccacggccgcgccatatggccgacgaggtccgcggccccaaacccaaatcaaactagtctagccataaacggaactcaaggaaaacacaggggaatgatttcgccgaccgccacgcagccgaacacccccgaccatgatacgggcggcgc

SEQ ID NO: 36359 - DNA, 747 bp, Zea Mays
ctaattacaggggaggtccaaagatcacaatgaaccaggtcaaaagtctgctcagcccgagaagacgaagtgggaaaccggagacgggtatgtcgacctaactaacaaggatgacagaggccatcaaaatgtttcctactacgagacgaatctagactgctggaaagcttggtcatgacgtcaggtcctgggtggccgagacgacgatgccaagtggtggaggtgatggcggaaactaggacgggaggtggggacgtgccggtggatgaagggcagagcgtgtagaggggcccggtgctgtcacatcgggcgagaggggtcctggtgtccagatccttcacagaaaaaccagaagggtcaaactcaatgaaacaggaattgtcgatggtgaaccgacgaacagaaaggagattgtgagtgatgtgaggggcgacgagaacgtcgttgaggtagaacggtccggggagaactgaggcacctactgaggtgatcgatagagtagaaccattcccaacgacgatcgaagtggggtgggaggaatgaggtgggtgagaacgagataacatgcctgatgtaggggtggtgtggtaggatgcaccggagtcgatgacccagtcaggggagggtggagccaatgccatggtgctgtagacggcggcaagggaggctgcgtcccagcctccagctaggggtgaccagggagtcatggtgtgggtccccggaggcacgagctgaagtggagtcggg

SEQ ID NO: 36360 - DNA, 559 bp, Zea Mays
ggcggggggccttgacccgtggtggatttgggtttggatgtgcttgggcgtgggctaattttggcggtatttgggtttggggttgcggaattgctgccttcggttcgggtgtatctggtgggatcgggattgaatcgggcaagcattgttaggatctgaaattggatatgagttcatacggtggtgtagaagctttcaacgaattggcgttggatggtttggtgcgcaggttgagccgtgttcttggttgattagccatgctagtacaaacaattatttgcacttcgtccttccaatggtgacaaaatgagatgtactctgaggaaaacataaggggaaaatccctgtttactttaagctacggtggaaaatttattcatgccaccgtatgttgtcttgcctttctagtttcaatggtaacactaccatccttttgctctgatttgaacatgatgtccgcattagtcatatatctcatatagttttcactatccgtgaagcagcatatggaggttgcaacctttggactttgtgtagatttcaaagaatgaaaatggac

SEQ ID NO: 36361 - DNA, 364 bp, Zea Mays
ctctgatgctacagttgagattggtatagcaagcacatcacgggccatcttggccagtattggaaatctctgctcagatgccttccaccatactagtagatcaagcttcatttctgtgtcctcagtttcttcagaaagatatttgtcaagttcagacttagtgttgttgcttgaaccaatgcctagcctcatcttcttagcaacgatttccttcagcttccctcctctacctctaccttgctttgatgttattgggtcacttacattagttgtatcctcacttgaagaatacattttcatatactcttcgaacaaatcatgaaggcaagtgttaattgcttcccaaactagttgtcccctttcc

SEQ ID NO: 36362 - DNA, 339 bp, Zea Mays
cagccacctctaaggctgaaggattttcaaccacttccataggaacagagcaatccagatcagcctcttgactcttaaaaccgcgctccaaggtcgatgaggcacgagacgctgctcgggataactctaacccgacagcaggcacattagcacaaacttccatcattccaccatctgtcggctccgacaacagatcttcagggacaatatcttcgagagtctgatcaaaatttgccagaggcgattcttgcagaccaacgagagcagacaaagctggagaaggaataccactactctccccactggctatatagcgtcgactgttcttccgaattaagg

SEQ ID NO: 36363 - DNA, 307 bp, Zea Mays
gctcgcaacattggcaccatgaccatcttcaaggagctaatcaaatcaatcccacagcaagctcaataaaaatctgttaggatgtaacagtgacatcaagaatcaggaacatagaggggagtgaggacgcacctgcagacctgcttcggagttccctgatctgggtggcttgaattcgtcgttgatgtaattctaggacaggaaaggctggacaacagaggggatctaacctctgaagctctacgcgttctgaagtgccaaagatgtcatcttagagaggggaacaaagtaagcgtggccaggacag

SEQ ID NO: 36364 - DNA, 399 bp, Zea Mays
gtgatgcacgagggactgcatttagaggggtttggaccactggccatggtgcgtaatgccttgcgtcttcttggttgctggttgtattacttggaagtctgaaatggctaagtgttgcgcgtgttcgaacatgtgttggttctccttagaaagggtcccctttcctttttattgtccaaggagatggggttacagatcatttgagactgatctggcagctattgaaggtgtcagtgtccatccacgaacttgtggatacgtcactaacatgtcgtgggcggtcaaagtcacccacaccctgtgggtggtggaagtcgtctctagacattgacagttgtcgtccatgcatgcgccatagtggcacactattgtcacgcccaggacatatgagcctaacac

SEQ ID NO: 36365 - DNA, 585 bp, Zea Mays
cgaaggtgaacttgaggttcccttgggtcatgggtagtggcccgacaatgtctagcccccagcgttgaagtggccatgtgtgggcgatcagctttgtgaattgcgaagggttgcccgaacggggggaaaacttctggtaggcttcgcacgacctcgtgactcgatttgcggcgcagattatagcgggccagtagaaaccttgacggatcaccttggcagcgagggccctaggccccgagtgagatccgcaagttctgctttggacttcgcgcaggatctggaggccttcggtctctgtgacacatttgagcatgggttggctgatccctttcttgtatagatggccctcaataagtgtgaaatcccggctttagtgtttgaggcgcttggcctcattgacatcacctggaaggtaatatccttgcaagaacagggttattggggcccgccagtcttcggtcatgttgaggttgacgatgcgatggccctcggcgttggtggttatttgcagaccctctagattgtggacgactggtgtgctgatgacgtggtagaacacgtcggaggccagggcttcgcctctgg

SEQ ID NO: 36366 - DNA, 328 bp, Zea Mays
aataaaacaagctgccggcgatatgttgccaccagtatctgctaaggtcggcctcaagcttcgaaaagccaacactctttgataaagtgctgacaaccttcaccccaacccggtcccggaggcatcctaaactctcttcggcaacgccaccgaagagcaatgcccctggttgatagtcgcatgatattgcataatccctcagttcttccttctcagctttagacagctttttaccaagtatgtcttgaaaattaaaatccttctcctccgaagtatcttcgacaatctccttctctttcccgggcactggggccagggtctcttcgac

SEQ ID NO: 36367 - DNA, 342 bp, Zea Mays
ttatgatccttaaaatccatcctaaagttcatttctttcattgcttcgctttctcaaaatagagttttgactagagataatttagctaaaagaagaaagatagatgatgtttcttgtctcttttgttctgagagaaatcactcatcatctgttttttgtgtgtggtaaccaaacagatatggcttagtatttctcaggcggtgggtactgtttgtgattctgattatgtttcttctggtaatttatggcttagtaaaaagttgttagtggcaaatatgtttacttttgtgcttctgattatgtttctgttggtaatttatggcttagtaaaaagaagttgtt

SEQ ID NO: 36368 - DNA, 389 bp, Zea Mays
ccgcaagtgcgtaacaccacccacagggcacgaagtcttctacaagacacatttctattcgagcaaaagtcacctaagggtgcagccagataagcaccacaagtgcgtaacaccacccacaggctgcgaactcttctacaggacacatttttatccgagcaaaagtcgcctaaagctgcaaccggataggcacaacaagccaaatggtgtgaagtcgtctacaagacgcacattgtccgagcaaaagccgctcaagggtgcagccggatcaacacaacacgtgcgtaccaacacctatcgggtgcgaagtcgtctatgacacgcacacatctatcgacgccaaagtcgcctaagggtgcaacaaactcacaataggcacaacaaaaaac

SEQ ID NO: 36369 - DNA, 621 bp, Zea Mays
ggaaatgaatgcaaggaggcacgacggggaaggcgagggttgaggatgtggtggcgagtaaccgtgttggccaagtcggcaccctgtgttgaggaggcgtcccaaacacacactgcacggtccgcctgctatgtcgggttgtctcgagcacgattagcctccgagtcgtgctggctcatagccttagaaaccgcgcgcggggcggctcgcttagcacggcctatccgacatctataccagataccctgtatatttagcttggttacactacatggacattcttggagaggaatagatggttaggctagtaggtccccagcagcattctgaatcaaggaagaaagccccatggtctagccttgaaatctcaaccgcacacaattacacaaatgctacatggcgaataactttccaacaaagtgtgtacgagacaaaaggcacagatattcgccgatccactcgtgcgtcgtgcgtcagcaaacggcgccagcgccacgctccgcatgatcggtcaaggcgaccccgacgaaacatcctccactcctcctgcctgaatttgctacagcagtcctaattctatgcttcgatgcaacatgccgaacaacacagcaacgactgtgc

SEQ ID NO: 36370 - DNA, 416 bp, Zea Mays
cggggatccagagccgttcgatcataagctgagggcctagattagatgtactaccccagtgaaccggtacgtgatgtgagtcattggatcctcatcacgcggctacatttaattggagcgaagggggatacggtgatcaaatcccacacgtcggattcaaatcgggcaaacgacattatccaaggccgaaccgcaacatgagatttgatcccaaccgtccacatccgaacgaacggccaggagatcgcctccgaccttcagtagccaagctcggtcgcgcacaccacgcccgcggcggcgccattgccggcaagccaccaccccacgccccagtgctccaaactacaaccgagcgcgtgcaacacgtagaggaggtcaaggcgaagtcaagatgaggaaattttactagagaaaac

SEQ ID NO: 36371 - DNA, 273 bp, Zea Mays
ttcttctaggtcagtgatgaagtcctcgaatcttttggttttcacaacgatgtcatcgacgtagacttccacgttgcgcccgacttggtcggtgaagcaatggagcatgcatcgctgacacgtggccccgacgttcttcatgctgaatgatatggagatgtagcataacgtcccaaaggggtcatgaacatcgtatatgttggtcggcttctttcatggtgatctggtggtagctcgagtagtcatctaggaaggagaggagttcacacccag

SEQ ID NO: 36372 - DNA, 840 bp, Zea Mays
cttgaggagaacttaaggatgctaggacaaatgattgaggagcttgaactaacctggaacaagctggccgcggtgaggtgttcttgcggtgtattcgaaccgatttgggggaagttagaaattggagttcctcagtgaacgatttagggtgatactgggtggttgggtgtgtgatgaccttgcgaagctcacggcgggctcaatttatactaagcgagagcggtggccgggaattggaacgatgacgcgcggcggtcggaggagggggagtttcactggcgcaatgaattcgtggcatctaccgtggtagtcattccggtgatcaacggagagtcacaatggttcacggtgatgcggtagaggtactcaggcatgtggcacaaggtcggaaggcggcgatcaccggcgaggtcatccgattctaccgtggcgtgtgcggtacggtggccggatttgtttactggccggagttatccacggcgaggacccttactcaatcccaagcgctatccacatgttcggagcatgaatcgctgcgatgccggcatgaatcgcgcgtagcccatcggcggcgagggctgagctgttgatctgatcttattcagatcactgtaccatgggaacccggacagagcgcctgacagacgaagtttagagcatattttctcctaattctttgtgataacatacccaaggctctatatcaaagttgtagacctataaaccatcttcatctttgtcatagtgttcctagtcagattctcactggattatgcttaattcctagcccaaagatggctcggttacactgttagtctgatttttagaccccaatggcct

SEQ ID NO: 36373 - DNA, 358 bp, Zea Mays
aggcacgatttggtgcagtttaaggcctgagcagcctgaggcagatgccgcacaagtgtgggcatgggggaggagtgtgcatggaaaaattgcatgcgggagcaggtgcgggagatttgcgcgtgaaggagaacgacaggagtcacgtgctggcgattgtgtacctacaggtcccatgaggccataatccgtctctctcacgcgccaattgatagggaaggggaaacagaagagggcacacacctggttcatgggggtgggcgctgctagagtcttgctgctccacctcttctgctccattgataacacttctctcctttgatttgagtctcccttcatcttctccattaatttgtgc

SEQ ID NO: 36374 - DNA, 404 bp, Zea Mays
ctcctctagaaacacatctagaaaatctgatactacattgatagcctcttatggtttaatctcttcaatacgggcggtgacttggtgacaactcccttttcttggtccagacaagacctactccactaacacttcttcccccgataaggaaactaacttcactgttctcttgtcacagctaagactggcttggtacttggttagccaattcatccctaggatgacatctatagttgtatcatggttacccataactattaaatcagcggggaactctatcccccttatttgaacacttgcactagggcaaaatctatctgtttgtgtccttgcacccactgaactaaccctcatgggtggatacatgggtgttactggtataatatgtgattctacccatgatg

SEQ ID NO: 36375 - DNA, 649 bp, Zea Mays
cgccatggtacagtgaccataaagatctctggtgccatgatctcgacgccggtgatctgccgccacaattcgtgcccgtctgggagattcgtgccgcaggaagagtagataacgtcggggcggggtgaaaatatctagcgtggggtgaatccggtcgctggccgaaccggccatcgtgtcctgtcgcggtcaatcgcgctggcatcaccagagttcaccgttatctggctaggatacgtgcctcaaagccttaccacgtcgcagtagaccgccttaggtagcttgttcatcgcctaagacactgcccctgtaaaagccacgatagcggttgcgccggtgacttcccctctctccggccgccagcacacttccttcaaattggtcgccaccgtcgtaggactctataaattgttgcccctgtgagttccgctaggtaattgcacatccaacgcaccagccctggcctcggatcatccaacagagcctcccaatttcgtgttttccccaatatgttttccgcgccaccgtgaacacttcgcagtggccagccctctgcaggttagttcaagcttctttgattggtgttctagcctccctcaagccccctgttgctcgtagacccattcgattaagctagaccgcaccaaat

SEQ ID NO: 36376 - DNA, 282 bp, Zea Mays
cagcagcaggaggattcgagacaaaatgagtaaaggccttggaaggaggcatgttccagaccgagtatgcgacaggggcgccaacatttgataccttgcctctaagtatcatttcaagccggttcaccaagtctatagcaggaattcttctgttggtgacccgggttgagtcagctagacctcggtacagataggccgggtatgccctgtccttcaatggctgaatgttcttgaagacaaaatcagtaatcacagcctctacagtcagacccctctccttca

SEQ ID NO: 36377 - DNA, 392 bp, Zea Mays
ttcagacaagaacaatctaaacctaaataggcgcctcatgggttcattcaaatccaccatagatgacatccaccttaaggaacttcgtctgaatggccgccaattcacctggagcaatgggcaggctgaaccaaccatgacaagaattgacagattcttctgcacgcccaattgggagcttctcttcccaacctgctacatccactccctaccctccctcatgtcggaccacacccctctgctcttacagggggagataatgcgcaaaacaaacaacatcttccgctttgagaacttctggacacgcattgacggattcaaagaagcggtctattcgacctggaataagccgttaccctctgtccagcaaccactcttgcgcctgcacatca

SEQ ID NO: 36378 - DNA, 601 bp, Zea Mays
ataagtgttgcgtgatatgagactcgatcgatgtagttaatattgaattggcctgtagagaggtggtgacatgctgaagtagtcatcgcttcctctacggttaagtcggagtcctgcgtgatgatgttatttatgggggtgaatgcgtattgaaatattttatgttgtgcaatatgattaggaagatgaaggatagatatgttgtttcggaaatgttagccaatagattcggacaggcgtgatagaggttgagtcacttatgttataaaattgatgctcgacatgttaggtctcctaaaatgtggtgttttaggtgacttgtgtgttatcccattttaagttgagaaaatgtttaagagaagctaattaatttgctcccacccatgttttgagtcgcaatgactaaaatgggttgaatgaacttgagatgtattacaatagctgtgtgtcgtgccggtcatccaaaaatggcgaaaggtggtgtgtgatagtaattgggaaatagtcacgacattagccaactcatgtcaggtaggagttgattgtgttaagtgattgttatatatgtcgtgtcacgaattatgataataataggcaagcc

SEQ ID NO: 36379 - DNA, 437 bp, Zea Mays
cgccggtgaccgccgccactcagcctcgtgccacgtatctacacctttccaccgcatcgccgtgacctgttctcactctccgttgatcaccggagtaactgccacggcataagacacgaattcacgtgcgccagtaaactctccctcctccggtcgccgcgcgtcgtcgctcaaattcacggccaccgctcactaagcctataaattgaagccaccgtcagctccgcaacatcatcacgcaccacaccacccagtattgctcctagtcgatcaccagtgagcgcgaattttgaacttcccccaaatctgctcaagaacaccgtgaaaacaacctcaccgcggccagctcaactcaggtcagttcaagttgctccgtcgcttattctagcatccctaggctctcctcaagctcctcgacccctttaattgaacgggac

SEQ ID NO: 36380 - DNA, 368 bp, Zea Mays
ttgggatccactccctcttccaggcaacttgtaccccctactacaagcacttaggtgcaagataatataagtctcatccccctctgctagaagtaggaccttcccttgcccgaacaaggataaacgcttatgacttcttgcatcacccatccggatctgggcacacaacacttattcactagttggtaggaccctcaggtcaaaacaccgacagttggtgtgctaggtaaggggctcgctgtttggtgacaccacattcccaccaagactctagatggctaatcctcagcacccttggcacctcggcatggtgatatggttcgggagtctcgagttcatgcccctcgagttcggctatgacatgacgc

SEQ ID NO: 36381 - DNA, 863 bp, Zea Mays
gcacaatatagaaaaattggagctggtctattaggctacagcattggtctagttgccctggaaaattgggagggaatttgccctaaacattgactgtcagactgactgaagagggatctgattgtacagtaactgaaacagatcgcagattcacccccctcgctgccggtgatcttgcgcccagatccacgccggcgtcgcgattcacgcccgaccgaactcagataaacgctcctcggtaagaaatgtcgcgctggagatcaactccggccactgttctcaccgccgtcgtgtcccgccgtggtcaatcgcgttggcatcaccggagttcgctgttatccggccaggctacgtgcctcaacgctttactacgttgcgatgagtcaccataaaacgccccgtggtcctggctcgtcgccggtggagctgccacggtgaaagccactaatcccgagcgccagtaaccttcttcctctccggccgccagtgcatcttcgcgaaattggacgccaccgctgtgggagcctataaattgccgaccccgcctgctccgctaagtatttgtgcaaccagtagagcaacccgtgcatcgaatcaaccactagaactccccaatttgggatttctcccaaatcaacccagaacaccgagcggtgtgacctcgccgtggtcagctcgtctcaggtccgctcataccctctgccctttcgttttagtgttcttgtgtgctcctgatactcctcgaccaactcgattgaactaagctaccttagatcgccgggaacgcattagaatgtccgttgatcatacggtcaccatggacagagtgagttagaggtccaatagtgaaattagttgagggg

SEQ ID NO: 36382 - DNA, 459 bp, Zea Mays
aaagggtggcgccttgagtggtttattgtggaaaaccacgacaagtccctcccccctcggtcggggagacagccatatgtacgcactccgagttgggttgagtctcccactgccttggaggtgatggaagctagggttctgcttgctgagatctgtctgctgaaggagagaggtctgactgcgaagctgtggttgccgactttgttttcaagaatatttaacctttgaaagacagggcgtatccagcttacttgtacagtggtattactaactcaactcgggtcaccaacaggaaaattcctactagttcttggtgagccgactagacatgatcctgaggggcaaggtatcaaatgttggtgctcctgttgcttattatgcttggaatctgccacattctaggtcatttttcaatttcatgtccaaccctcctgctagtgataacagtctgggtcttag

SEQ ID NO: 36383 - DNA, 639 bp, Zea Mays
tccgagccgaatcatccccggcaacaccctcgggggctgggtgagcgccaacaccatccttgagagccgagttctctgcagcagccacctctaaggctgaaggtccctcagtcacttccatgggaacagggcaatccaagtcagcttcctgaccctcaagaccgcgctccaaggtcgatgaggcgcgggacgctgcccgggatgaccccaacccggcgtcgagcacatcagcacaaacatccatcgtgtcaccatctgccggttctgataacagatcctctggaaccatgtcttcaagagtttgatcaaagttcgccagagataattcttgtagaccaataagggcagacaaagcaggagaaggaacaccactactttccccactggctatgtagcaccgactgttcttccaaatcaaagggatttcatcttcttcttcctcctcaccttcatcagcaacaccgacagcacacccattggggtcaacgtcagacgggtcacacccattgggatcagcgtcagtaaattcaggcacgggcacttcctcagcagcaggagcagaaggaccagcatcccgatccaagctagacactcgccgaagacgtctcttcttctttttctgcccatcagcaggagaag

SEQ ID NO: 36384 - DNA, 452 bp, Zea Mays
ccttgagcacctgctcaagggactaataccgaggtcccgttctcccgcggccacatcaccgtatcaactcctccctggtatttgtccttgctgtatgctatttgtccttgctgtgtgtggcgttatcaactcctccctggtacttggcccccctgggatgtaggctcgacgtgtcgatgctggataccagtatacctaagaaagagttggtgactcggcccccaggaggtagcctcgattgggacctggacctgtacacaacttcagctaggaagtgttagtagcacacccataggacctatcgtctggtatcagccatcctttgattcatgtaacaggacctgcatgattgagtctgggaagccaagcctcatgttcggacctacaagatcacaactccaaatactagggcacccattgcagagtggtggaggtgcaagcttagggtacgg

SEQ ID NO: 36385 - DNA, 542 bp, Zea Mays
gagcccagaaatgctccatgggccgcttgatgggcctcccgatgacttgcccagcaaggcttgccctcgggccgcaaccaggttggatgagctcgatttagggagatgaagattggatgatcgagttacgtgtagaaggagcgctgatgcctcgtcagggaggttgcacatacccaaagtgctggatactcggagataactcggatgaaggtcgaccgaacttcggataagctggattgcatgccacgttaaaagaatagattcaaatatagttagatagtcatcatgacttgtgaagggataaccctctggtcatctatataaggctgagggggtacccctatgaaggcatctcatcttgtcacatcacatcacatcaccacctcatagctcattagccttctcatagcaaccatgccaccaatagatcaacaggagaactcaccctccaccacccataactcatctataaatcgcgtacaccagtgatactcaaatactcaacctcgataggatgtagggtgttatgcattctagcggcc

SEQ ID NO: 36386 - DNA, 272 bp, Zea Mays
ccaccgtattattcctgcacacgcgcgcaaggtcagaattcgatgcatcggccatcatacttggaacaggaatatttgaagaggtcgtcagaggataaattattgccgtgcctaccgcacgtacgccgtcgatcctgtgagtctctgaccagccagtcttgccgtgctgttgttacaagctagacagcggagagggagagctcgccgggccacccagatgatctgccgaactatggtacttcgacgtgttcttgacggctacaatgtgaact

SEQ ID NO: 36387 - DNA, 2707 bp, Zea Mays
cagctcgtgaagggccccgtcggggtcgtctccgtctgcggccgcgcgcgccagggcaagagcttcatcctcaaccaggtacggcgcgcgatggggcgagttggttttttcgggtgacgcctgggtctgtgcgtcgacggtgcggtgcgcggctacggtttcggcgttgtttttctgagatggatgacccgctggtttagtttggggcttcggccggacctttgaaagttcaagtgataatttttgcaacttgatttgtagggtttatgtagaatcttgtcttctagggtttattgactcattgactggtggaattgtagcttttgcccgcaattcggaaatatgttgcgagttgacagtgcgagaagcattaggataatagaactcaacatgcgtgcaactttcagtcagagacagggaattgaaatttaaggagtatcaatgtgtgtggcttaattcctcatgaaatggttatgggttaagacgtgttcatacattaggtgtgtggttcttgttagcaacatcagtgtttcaaaggaagtttatggacttaaaccacaatttgaccaccttacaggattgtgacatatcccagtattagaatggtgtattgcacttttattagcaaatgaatgctttctcttgactgtaggagtattggctttttgattgtaggtgtgttatctccttttaaggattagtccggttgtcatcgtgcaattagtccatggaacctttttatgttctggaatcatatgaacgttacatttccatgcttgggtggtgctaagcataggattctgcaaaaccaaacaaagaactccgtgagtaataattgacaaaagctggtgggtgcctaggatgcgaaaaaagtgtaggaagtaggaacacaaaagtttggttaaacatcactacgggcttcaacttgtttaaacagttattcacttatttgatttagacttgtaaaagatgaagggatggtgtggtacaaattgactaggactctaggagcgaagattacttctaatttttaaatggcatataacagaacattatcaattactgttcatttttaaatggtctgttagcatcttcattttgttagcgtcatactggtacaaagtctttaaatgacttcagtaattttgtagttttaattaaggtatgggaaaattgctgcttctaggtattctaggttatagattcaagagtttactgtttcctatttttctttttctagatggtaagtgtgtacactaaagcttctcagtttctttaacctcatttggatccatgaaatgaaatttagaacgtattagtaattttagatgaggtgtcattcttacgagtcactatataccccatacctagctttaatataagttgatgttctttcatcgacgttatttttgtttaattctctgcatcacttgataaaattgacactctatgtagcttcttgggcgaagcagcggttttcaagtggcttcaacacatcgtccttgcacaaagggactttggatgtggagtacgcctttgaagagaactggtttggatggaactgaatacagtcttgtgttgttggatactgaaggaattgatgcttatgaccaaacggtatgtactagcggcttacccttgaattaacagcctattatttagaattgacaatgatgtgtgcttattgatgttaacaattatgatattttttaattggacccacacctttttttgttgagctgcacttttgggtgaatcagaatcatagcactgaagtgtgttgactatagcttacttctctggtgatcttatttagttgtttgtgtaatactgcatatatttggaatttctgcaatgttgtctcatgtgtactctttccattttggcaggggacctatagcatccaaatattttccttggctgttctgctgtcgagcatgttcatctacaaccaggtacatttctgaacaaatgaattagtcatctttcgaacatggagggaattgtagactgatacttaggtgcttcagttgtaattgttttcatattgaaggacactaacctccgagccttttgctacttattctagatgggaggtatagatgaagctgcattggatcgtctctcactggtcacggagatgacaaaacacatacgtgtcagggcctcaggtggaaggtccactgcatctgaacttgggcaattctctcctgtctttgtttggttgttgcgagtaagatatttcattgcctttctcttgatattaattatgtctactgaatactgaatgctttgaatgttccctagttgtgtatcatcttataattcgtcaaacataacatcaggtcctgttatgcatcagacacctttggcatgtgatgacattgtgcttcttttcctacaggacttctacctggatttgacagaagacaacagaaaaattactccaagggattacctagaactagcactaaggccagttcaaggtggaggaagggacatatctgcaaagaatgcggtacgacagatttttatgggtgaaatgtagttatgtacttctgcttaggtaacttgagatatggactattcttatacttattttgttgttctggaagataagggagtccatccgtgcccttttcccagatagggaatgctttactcttgtgcgacctgtgaacaatgagaaagatctccaacgcctgga

SEQ ID NO: 36388 - DNA, 421 bp, Zea Mays
cgcgaccataaccatacacatttagactacaacaagcaatttattgcgattacgcgcttaaccaaaccatctaacaattgggctaaactagagcaacgacatagccgctaaataacatacatgtcggcttgcctattatcgtcgcaacccgagacataacatatattacaacatttttataaacacacagattcacaagtattttcgtacatcgaccaatttatacgaatcgtaaaccactaatctctaactcgaaaccatcatgcgcttactttccaaatcatgaacacataacgcgtattgacccgactcaagatatagaggaagcgatgactacttacgacatgtcatcacctcactatataagccaaaacaatttctactatcgactaagagttctaggtattaagcacattattac

SEQ ID NO: 36389 - DNA, 849 bp, Zea Mays
gccacatgctcgcctaatcgcctacaggctacaggtatctctcaattcctctccttcaccattcgattagttgtcatatttattgatccctcgtaggctcgtactagaaaatccatgctattgtgtttatttattaatccatgtattccatctaatttagcggttgtggccgctacagatccttgcctagctccagccactgtccattgctgtcagcaccatgacttcctcctcactgcctcaaagttcaggcgacgacgtcgacacaagaaggtgagaactgagaacataattcccactccatatttactttggaatttggatctacctgtataatcttatatgattgtggatggcttaattgttgagtgactaacgctaacccaccggtgatcctcacaaagggacacctcgaacaagaactggctaccacatgctaccagtgatgcagcagccacaacccctattgtgtcatctgctactcccaaaatagctgctggaactgctgtcatgcaatgcgctagtgtcggtaattcctcaatgtctgatgccatggctccccgtcatccaccacaaccacgtgtgaaaaagaccatcgccaagaaaagaagtcgccttgctaccgaaggatcaccttctgctccgactactcaagaacaagacgcgtcaaccgtggctggtacacagctattaaaatcattggggttcgatttcaagcacgctaacctcttatttgatcttgttattacagttcgcttaaatttatggttgcacatgtatatgtggaattggtatgcatttatactatgtatttatacatccacatgtattctatgttttatatggttg

SEQ ID NO: 36390 - DNA, 420 bp, Zea Mays
cttcatgttggtcaccttcgacgctccagacaactaccggaccgagttactgtacttcgaggtagatcggttcgagtgtgggtacaacaccatcattgggaggctgggactggccaagttcatggacatcccacactacccgtacatgatactcaagatgccaggacctcaaggaatcatccccatctgggccaatttccaaggagctagggagtgcttttggggggctatctagacgaccctcatcgttggaccctcggtagcacctccaacgatggacgttgacgcatcaccaagggatgacctcacaatccccacaaatgaagcatctaccactaccaccttgtgactgatcgaagaaaccaagagatccaaccttggtttttccgatgaacacaagacgacgatcatcagttccag

SEQ ID NO: 36391 - DNA, 470 bp, Zea Mays
gctacagagtacaactttccatcgggagttttgaggcatcgctaagggtagaactttctgaggtgctcaatgttccatgagttccccacttctgtaccatccatctgagtaagccgatatgatcccggtcgtgtgacctctactacgatgaatggtccttcccatggtggagacaacttgtgtcgcccctcccccgttagaactcggcggaggaccaagtctcccactgcaaaggatcgatgtcgcacagctttgtcacggtagcgcctcaaggtctgctggtacctggacgactgaattaccgtgttcaatcattcctcctcaagtacatcaatgtcttccagcctggttgcctctgcctccgctatgctttcaaaggtcagcctaggcaccccgaatatcagatcggcaggcagcactgcctccgacccatacaccatgaagaacagggtattcccatgcagagctcg

SEQ ID NO: 36392 - DNA, 431 bp, Zea Mays
gccagatcagaattatctcctctcatcgaaagattgggcacttcagccttatcaagtggtatcatgaacactcgttgtccttgactccttcctgtccgaaccgtgggtcacaacaagctcgtcgtcggtctagatccttgcccccatgccgtcgtcattgccctgtttattcggtgtcatttgcatgacctcactagttcgtcgtcgcatgttaattgttgaaactgtctgtcgagtttcttagttttgttcagtgtcaattcctgcagatcgccgcatcgacgtcctctctcgccaggatccgcagcgttgcctcgttccctactgatcatgtggccgtgtgccacgaaaggaagcttcaagcacatcgcttatttgacgtgttgtctccaacctcgttgcactcctcgccgctcacacttcattttctc

SEQ ID NO: 36393 - DNA, 443 bp, Zea Mays
gagactttgagcatggattcaactatgatctagtatgaatctgcccatggcatctatgacaaacttgtagctggttagtagctctataactttgctgcagagcttggcatgagtggtcattggaaatcgagagaaaacgtggctccaagtttgtctgtcagactgactgaactccaatcgccatggtacagaaccgggatcggattagaacgccagcgtcagaaagatctcgccgccgacgactccccgccgtgattcgtgtcactggcgtcgggattcgtgtctgcacggatggatagcagcacggggtatggggatcctcgccgtcggtgacctggaagccactctggttagccgtaatcccttcccccttgctcaccgcccgtggatagagcttttcaccaccgtcaagccttcgccgttgctcgccgcgtggctctgcc

SEQ ID NO: 36394 - DNA, 322 bp, Zea Mays
gtagagtttgggtgttttttaccaaagaaatggaatggagtgccatttgtgacatgcagaaaaggtagcattagggaacatttggaccatgtaaggtgtattcagggggtttgaggcttagtgatgttagtagtaggtatgatgaatatatgacagatgactggtttatgttagtcttgtgtggctgctcactcagagtctacgccggaactgtttgttgcatttgcatctatgtcctgcacactcctgcacactcataggtcttgtcaccaagggctgtcttactatagcttgctcttaaggccatcattgtgaactaccg

SEQ ID NO: 36395 - DNA, 655 bp, Zea Mays
cgacgaaggggggtacgggttaactagagccgccagatcgaaatcccacgcaccgggttaaatgaatcctttaagcgaagagttacgcaatccttgtcgttggatcttcgaccaggcgcctcgatccacatcggacggccgagaagagttcaggtcgaaccagaatccgggatcaaatctcagcccttcatctaggattgacggcccatattccacccccatcgcccaagcctggtaacggcggcactgccctgtggccacggcggggcatcgccggtgagcctgctggatggcggtcatgtgctctagatcctaatccggggagcgctacacggagacgagatcccaacaacagatatagggttcacgtaccaatggtgaggatgctgatgttctccgaccatggcactagtggtcccgcggcggagcagcggcacgggtgagaaattctagtggccacgaggtccttctccgcccaacgacgacaacgcaagcatcgaagctcgccgtcgaccaacgaaccgaggccaaccatcacgcgctcgttgaggatccacacaggcgcacgatcactctctctctcccttccaactctgcacgccatggttactggattggtacaggagttcgcggcgacctgcgctttatagcccag

SEQ ID NO: 36396 - DNA, 318 bp, Zea Mays
cgccaacaaagtcaccatgcaagccaaggtgcatcagatgatacaagatgaggagcagagagctcgggagctggagcaagagatcacgctcatgcaaggcggaggccaatacaacctgcagcgtggagccctcgcaccgccagcgcctctctagcaatacattcaagccgaagaccaattccaaccatagtgcagcccctttattccaccagctgctactttccaggggatcaactatctcgacgagcgtagtcctctggctccgccgcttcaagcatcaccctggcccgccaacttcagggccggtacctaccccaa

SEQ ID NO: 36397 - DNA, 565 bp, Zea Mays
tataaatcgggtattaccgttacaatgaagatatgacccatatatcgtacaaaccctacaatcttccttatttgctcgaccacgtagactttatcccgacatgtggattaggttctcctgaaagtctgagaccgagtccaagtcctagactgagtccgagttgggcccacaagccaacacctttaggatcaacgtacctatggtaccccttgtatatattgtttacactatcaataggtcaaaagctactacaaagtttaagatttcctctccctcttggtttgtactagtatacctaaaacctccacctacatgttcattgtgatctcctatgcaaagctcctcactaatatgtagagctctaaacatgccatcgaagtcttcctaccactctcatcgtcgtctacttgagaagtatactcgctaattacatttaagaccaaatcatccatggtaagcttgactaagataattgtatttccttcccttttcacatccatcacaccgttctagatgctcttatcaattaaaactccctacttcatttctatttgcagctatccat

SEQ ID NO: 36398 - DNA, 632 bp, Zea Mays
gggctgagattggtgaagcgattcgggagttgtctatggatgactacttgatcgaggatgtaggcatgctagacgctcatactgggctggcggctagcggtgagtgtggttattgctgtgtaagtattttatgatggtatgtgttcttctattgatttgttttcggctacaggggtggggtctaggtagatggtggcgatgtcggcgaagtcggttgaagagaggacctaggcgaagactgtgatggtggcttcattggacccgtgggtgcgattttgtgttgctattggcggggcggagaggtcgccagtgtgtctgtggctaatggtgtggcgtcaactatcgtgcggcagctgcgctacatgatttttttaaccgaagtctatgcaatggcatgctgctgtcatcgccgatcaggtagcgtccggagtgctggtggatgttgcgaccttgcaggtgcattccgagaggaaatggctggaggtccagattcagcgtctccagatgcaaaatactgaggccatcagggacaagactgcaaccgagaataagagtcggaaccttctggagaagcatggctctcttgggaaagagaatgaggggctcagccgccagctgagtgaggtgaaaga

SEQ ID NO: 36399 - DNA, 510 bp, Zea Mays
gttagtttctcggtggcggagaactgatttggggcgaaaccaaaattctagctctcggatgcacggttgctagcgattcttggtggcggggtggatgatgaccttgcggagctggtggttgcttcaatttatagggctcaacggcggtgaccggaaattcggatgataatgcacggcggtcggaggaaaggaagggcactggtgcagtggtttcgtgtcctcagtcgtggcgatggctccggtgatcaacggagagcaagggtgagtcacgatgatgcggtagatggacagagacacgcggcgcaaggccggaaggcagtggttcactggcgagctaatctgctccagccgcaaagcagcagagtgcggcagtgagtcaccggagtgacctccagctcaccgacggcgaggatccttaccccgcgacgttatccatccaacccaagtgtgaatcctggcgccgatgacacgaatcacgacgagactcatcggcggtgaaatttttctggc

SEQ ID NO: 36400 - DNA, 420 bp, Zea Mays
ttcgactacctggatatggcccaagtatactcaactatatttggttactcttttttccttaaaaattgtgttccctgtttctcagttatcatgaaaatagagtattatttcattccatagtgccggcttttcgcaacgtcattgatgtgcctcttgtggttagaggattacgcaaatctagatctgaggtttgtattctgctggagaacggtattctgccttgacaaaattctttgttccttattcacatgtttcagttgtgatctattaggtgaggaaggaactaggaattgaggagaatgctaaggtgctcgtttttaattttgggggtcaggtgggtcacttgtcatataggtggtttggtaagcttatggaatatgtttctattttctcatgtggtaatgttatgtggctatttta

SEQ ID NO: 36401 - DNA, 565 bp, Zea Mays
gcggactcttgaggacgactggacgacgcgagtggcggcgctaaagacgccgctttgctactctctactctctggtggcggtgcggtgctggccacctacaccaagaaaaaaacagtgctagtacttccttgggtcatttcctttgccgttctgctgtcgtttcggtggtcgccattcgtagggtaccgatacctgtactgtcaactcaccgcctagcgctagctctagcaagcaggcagtagcacgcacacggcatctcaacgttgtgatttctggtttgttgttataaaaagcgttgtgtgttttgtgatgcttcagttcagcggaagacaaacttaaatttgtctgtcgctcgtcctctcgcattgcacatgcggcctcgggagttgtgagtcaactctccaatcccaatgctaccttccgcgcttgttttaacgttcgccaggtgtatatggagataacatgtcatgccacgtcaaaccaatcgaagttcggcaatgagaggacaaggcccgagcgtgagcgtggatcaggcacgcggcgcggcgcccccaccaaccactg

SEQ ID NO: 36402 - DNA, 278 bp, Zea Mays
atttatacccccttctcacatactagccgttaagggacattcccatgaattctatgtattcgtgaacagtccacaattcagacccctgacagtccgcacttgaaaacaaatggctagtttcacattaaatgcactatcaaagcagacagaaaagtgactcacggatggtctgcccttcaaggcccggacggtccacagataacgaagagaaacacacagtaactctacaaacctggttttgattcaaaagttagtgtcatggacgatccacgtgccct

SEQ ID NO: 36403 - DNA, 273 bp, Zea Mays
tatctgcggcctttgggagccaaaaaagaaaagattagatagggtttttgatgctattggatttgtgtaccctgactatcgctacccgccatgggggcagaaaagaaagggtgcaacctctggaaaggttgttgcttcggctgctccaagcgagcctgcgtcgaagagtaaaaagttgaaagtcctcacccatcggccccgttatattaagtcggccgtggtgcccgagtttggtgggaagacttcttcagctgctgatccgaaagatccaat

SEQ ID NO: 36404 - DNA, 366 bp, Zea Mays
gggctgtgtcccaaaaaactgcggccatgtaggccaaggatcccacgctgtcaagtggtgtgtacacgtggggtgttttttttactaaaactcatctgtgaccaatttatttcatcattacgtcagccgatcaaggcaaattagcgatgacgatatcaaatctaatctgtgatgaacttgttgcgtccaaactttgtgtctaagacgttcctttcattttcgtcattaatattcaagtctaatcttcgtcacttgtaattgttgacgaagatgtaaatttggtcatagaaatgtatcaatctgtgactgaagtcaccagcgtcactagaaaatcgtcactgatgatcacattcttactagtggcac

SEQ ID NO: 36405 - DNA, 310 bp, Zea Mays
attataccagccctctaaaaccttctctctaccatctcaattttagagttgtattttacctattttcccttggtcgtatcctcttcctagtcgcttgtgagtttttaactccatccttgttgtgctctgtttggtattacctttacctttctcgtcttcgatcttaccttggtggttacattatgactgctatctaaaatattaaatctcccatctcaattcaagagtggtgttttacttatcctgcctttggtcgtaacctcatctttgccacatgtgagtcttgccttagctccattccttattgaac

SEQ ID NO: 36406 - DNA, 728 bp, Zea Mays
attgactcttcggtaatggtctttcttctatcgttttgtgtcgaagtctacgttcgatccaccggtaatcatatgaatgacccctcgaaaaggttgatcggtgaagtcttcttgtttgggtgttggtggtggtggtggtggattttggtgatgtggtggtgttggcggtaggggttggatttcttagtgttgctggtacatatggttttgctagtggggatggtaatgttcattgtggaattggtgctagtgatattgttgggggtggtaggtgtgtgcgacaactctttggttgtcagctggttgatttctggtcatccaatctttggtggccttggttttagggcaatacctacgaggtgtgctgagtcttcaccgtagaaaagacagtaaaaccttcgctgttgcagaactctgcctttgcctctacctctagtgttgctaccgtggccctgttttgtggggtactcgtggcgacgagcagtgtctctagtctactactgattggcgatggtgttcacttggtctggttgcggtttggccggtctgagtctgactacgtaggcctaacccatgtcctgctggactgtggagtgtccttgggtttccgctgtgactcgacttttcgctagttgagctcttcggactgggcattttttcgaatagctgatataacttttgcaagtttttgggtggatctcttatgcagtgactatataagacgctgt

SEQ ID NO: 36407 - DNA, 687 bp, Zea Mays
tagcgacctggaggatgggagtatttcaaccatgggcgccagaaatacaaaacagagaagaagcagtgaagaagacgttactgggccaagtcagaagggcattcagaggagccaaaggacactacgacccaacaagcgcttcatagggccggaatggcgtaattgagggaggcccatgagaattagggacgctagctgctagtaaatacagagtctggtgagaggaggagggcatcgaggcacagaaccctgatcccggctgcgtccggtggctggcgctgcgtcgccgtgtacggattccagacattgataaaccacaaagctcttcgagagaggaccttgagcaccgggagcggtgctcaaccaccgaaaccctgcttgtgtttacagttggtattcagagctaggctggattcctctcacaagtatttcaccagatcgaaggcgggagcaatggcgccgtcaaagagtgaagatcccttggcgcagctaatcgctaagatcgaggagggcaatcgtgagacccacaggcgtatggagacgatgcaagtctctatggcgaatatggaggcgacggtgaagggggttcttaaggaacacggcgagttccaaaagtggcggccggaggtggagaagaaggtgggggagatgaatgaagctctgaagacgatccaattcgtcatcgag

SEQ ID NO: 36408 - DNA, 446 bp, Zea Mays
tcctcatcgaaaacatgtcaagagatgataatgcggtgggtgagaagatcgacacatcggtacctcttgtgatcagaagaataacctaggaaaagacaacgagtggagcggggcgcaagtttgtggggagcagtggcggaggtgttgggatagcaagcacaatcaaagacatggatgtgcgtataggaggtggcgctgtcgaatagggcgaagaaaggagtgggatgactaaccgccttggaggggaggtggttgagaagataggtgacagtattcagtgcctccaccgagtagctgacaggaagagacgtctggaagaggaggcaacacaacatgttgatggtagtgcgaatcatgcgttcgacctggacgtttggagggaaagtgtaggggcacgagagctgcaactaaacgccgtgagaaaggaaaaaaggagtgggaggtgg

SEQ ID NO: 36409 - DNA, 890 bp, Zea Mays
cgggctttggccaaaagtatgttgaagaaagaccgacaggtattatttgttcttttttctttcttttttgcattgctttgttgaggagcgacatactgaaaatcaggtggtagtgcctaattgcgcagttagttagctacagaagacaatagagcgccgtcttgtcatcttcaaccagcttattgatttgattagtttgtcatttggtattgttaattgtaatctgcatcacttgatggactgaacacatcatgcacctgtggaactcaaaataagcaatgcatttagagatttgtgatagaattccatctttcatctttaaaatttaactgtaaataattctctaggtgcacctttccaattctacacatgtttttagttctgaaaagagaacttgcacttacccagtaaaaactgaaccaacatgctttgatcaggataatttcacatgaacccaataatggatgattgatgtaaacgtttttaccataattgtttgtttggcaggattttttgctttgtgggatatatggacgaactgaggcaatgaatgggaacattgaacaagcaaggaagatatttgacatggcactgttatcaactgaagcaacttctgaggtaaaactatgaattattatatctgtttttaataaaactcacatggttacttgcatttactctccactgaatttgcagtcttaatttgcaacgctgctggttttgaatagtttgtttcttggatgcatgtttacaagcatgggttgctgttgctaagggttttctcattttgtcagggtaacaactctgtgctcagatgagaacattatggctcctttcagtccaaaatagatgttgctttaggaattttcttttgttttgtgaattgatgc

SEQ ID NO: 36410 - DNA, 349 bp, Zea Mays
tcctcggcttcaagcactaggttaggtccaaaaatttccctttctccagcttgtgaccaatttagcggtgtcctacatcttctcccatacaaggcctaaaagatgccatcttgaggctggattggtagctgttattgtaagagaattctgccagagaaaggcacttatcccaatccttgccataatgtaacacacatgctctcaacatgtcttctagaatctgattcactctctctgtttggccgtcagtttgaggatggtatgccgagcttcttatcacatgggttcccagtgactcttgtagctgctcccagaaacgtgctactcatcacacagaactcatcacaca

SEQ ID NO: 36411 - DNA, 433 bp, Zea Mays
ccgaggggctcttctgtgaaactggcttcggcgaagaggtactaagaatccagagccgttcagatcgaatccaatggtcacaatacaacgcgcgaagggggtatgtaaggatctaatctcatccactggtggtttatccgaagactcacgcgcatcatcactccaacggccgaaccggtatgccaggagcgatcccagccgtctgctatggatccagcggtcacgacatcatcttccccattcaggcacgcggctacggcgacgccgccccaaaaccgcggccgagccagtgccaggatacccccgccctgttctagcccctagcacctaaatcgaccggctcaacataaatcggaggtaaaagcgaaccatcagagagagtccttatattggtcaatggcgcagacatttctgcccgcgatgaggggcagca

SEQ ID NO: 36412 - DNA, 333 bp, Zea Mays
ctcacatctgcttcggtcacatgaggcattatcacttccaccgtagctgcatgccgttgatcttgatccatatctgtagcatacatgcttatgtaagcaccagcagcatataagcctagagcagcaagaacaaaatgtggcagcaaccagcaagagcagaaggaagcaataaatagagaagaaatagcagggcatgaagattctagtaatgaactagaaacaccgcaataagatggaggattggaacacaagatgataagaggatgcggcaagacgctaaccttcagaggaggagctcatttttggcaggcggcagcacacatcagagtagca

SEQ ID NO: 36413 - DNA, 414 bp, Zea Mays
gcctcttcagctgctgaatcaagagaaactgttcctcccatgcagaggactaaagagccggctataatgccgaaggcaccttcggttgagctagttgaaatgaaggttgacaaatataaggctgaaaggtcaaaaactgaagaagtaacaaagatggcagggattttaagtccttcaacagaagcaacagcgctgaaggcacaaaagagttctgccacaactcctaagagaaggaggatggtaaatgtattagatgttttagaaacaaccgattccataagtaccgctcccacagggaaggttgccgaagctgacaaaacacgaaccaaagctgatactaatcaaatagaagttgaagctacaataacccaggctgaaaccgaggcagggcccacagtgcctgctgagacaaac

SEQ ID NO: 36414 - DNA, 372 bp, Zea Mays
cgtctggcagcatcactgaccgaagcagcataggtggatagcggtgtcagggactcatgagctgatagagccctgaaccccctatcccctatatccaccaccctaacgtggatgcgagtgatgtagtagcaagcctgtggaggctcgcacactcgccttgtttcgtacaagggtcagacgtaggttcccaacgcgtgcagcacgtcttgcagtaggttggggaagtgccccgtctcgaacattgatgtgtaattttcgttgacaggcccaaaccccatgaagtagtcctgctgagcatcgttggcctcctcgttgacgttttcctcgtcatcctcgtcgtcatcgtcatcctcatcatcgtccccagagtcg

SEQ ID NO: 36415 - DNA, 436 bp, Zea Mays
ttgcataattgcagtcacaccaggtgtgcgaaaaggtaccaccactcaagcaactccaccagcaaaagcaagcggcacttcaaaaagagtaccatagatcaagataatcatttggcgaagccgcttcccagccatttttctttttgcatagctttttcagatcttattgccatgtgtaacaccgatgccaattactgacttgtgcatctcaggtggataggttcttttcttttcattgtttgcaatgagggtgttaactgcatcagtatgtgatgttagcatgccatgagatatcattgctcaatgtgttagtacaaacagtgaaggaattcggattgatccattcatgttgatattgtggcgttcagcagtccctgtaatttcatgcaacaacgcagagtcgttcatcgtaaccaaaacctcaatattcaaaaat

SEQ ID NO: 36416 - DNA, 340 bp, Zea Mays
aaagtaggaagagagagcaaatagtaacagtaatatagacagaactaagctgatcatgcatgtcgctcatcatcctctgccgtcaggactcggacgaattaaactgtatgtctgcatcatcagaacggcacatacacgtcaccgttgaggcagcaagcaagacaccagttaatgttccctctgttgaaaggcattagtcattttattgtatcttattttatttcattatggtctatatggttaatttgtatctgatttgcatgacgatatagtcgatagcaaaacaccatttaatgttccctctgtgggaaggcattacttatttttattaaacatatgg

SEQ ID NO: 36417 - DNA, 388 bp, Zea Mays
gagagactagggaattggatgtagtttggcagggttgttcgagccaaatttggagtggaggaatatcctcaggcgatgagacaccttctaaacctgtatcagaagaatggagtagaagagtattctcaagagtttgaagaagcgaggtatgccattgttgttcataaccctaggatggatgaaattttctttgtcgaccagtttgttaaggggttgaaggtagaattacaaggggagtactatgtcacctgccacaatctatggatagaacagttatactagctcacatgaagcaggagatattggagaagaataggttgaagatgtagaggagtcttactgccaataagactgtgggtagttgtcggtgttttgggtccgaccgcac

SEQ ID NO: 36418 - DNA, 357 bp, Zea Mays
gtttccctgaggaatgcctcctggaactccaaaccccaatgccacagaacatgaaagaaaagagaaatggaaatttaacttcttttcagaaaattggggtatcacactctaccccccttaaaaagaattcgtcctcgaattcgaccactccaagcaaagtatccaaggtaccccatatagcaccaccattcaaaacaggaatccattattggtcttaattaacacaagaacttctacctcggactaattgtctaaggaaactacacaacctgatatccaacatgaatcaacatgcaatgaagctcaaagcaagtcatagatgcaatcaacactacgatttcacaccttcgaatttgg

SEQ ID NO: 36419 - DNA, 333 bp, Zea Mays
cgcgcggagatgatgtggagatgggctgaccgcctggggacgtataccgatggaggtaacgctccagcggaggagggggaggtgactcggagtctgttgcaacggaactccgagatccccggctgcatcatccccaccgcgtcgctgggaggaggaggaccgacatcctggtcccacgagtcaatgggtgatcaaggcacgcgatcggtcatgggaagggcaaagaggactggccaccaggacccacatgtaagcgccataactaaaggaaaggggaggggaaggagatgggctgcgtggcgtggagaaatggaggagtgggctgaattcccc

SEQ ID NO: 36420 - DNA, 407 bp, Zea Mays
gaagaaatagggggtccggtctgaatcgctggcacaactggagcctgaagcagaggaggtggagcaaactgaactgggggaactgagacaccagaatgctatagcataagagccatgaatgccctgctctcagcccgatcctgaagtagctgctgctgaagtgaatcctgtctgtcctgtatggtctgaaacatcgtgagcatcctctcggacaaccgggtctgctcggctgccaggtgagcctgctgctgagtgagagactggagaatcgaagcaatagcagggtcaatagccggaggggcagcaggggtggcactagaactcccagcctcatgatcatgtgagcgtggaggcataggaggcggaggaggaaccccaaaatcatcatcatcatcatcatcaactgc

SEQ ID NO: 36421 - DNA, 293 bp, Zea Mays
aagaaatattagagtcgccaatcgactcaaagctaaagctgaagtcattggaagtgttttattagaattagaaagtggcttcattctttatttagataatgtattatttgtacctttcatgagaaggaacttagtttcaattttatgtttagatgacaataatattcaccgtcactttgggaacagaaagtgcattattaatgcaatcataatgatgttggtcttgccattagacaagacaaattatatttacttcccaattgtgatcgtgtgaattagttaaaggtcttttc

SEQ ID NO: 36422 - DNA, 399 bp, Zea Mays
accgacttgcccgactaatcgcgattagtcagacgacttgaaatcattggtggaatgtcaaatgaactaagcattatctagttaataaagacatgcacagatggttctcaatcggggctgatgtaacaaacttttttgaacagcatataggataacattcacctggtagtatatgaaaggtagtcagagatgtcttttgtcacgtttaagtgctctaatatcccctgagcagtaaagatgccttcaccccaaatgccaacaggttctttaaaagtccaccaagtagttgagagataggggacaccaataagggatagaattctaggtttatgcctacttgaatagctgggggacccagattcgacattgaaaaacgatgtttgtgtaccaacctgaaaa

SEQ ID NO: 36423 - DNA, 518 bp, Zea Mays
ggtggagtagaggcagtggcagaaggtgtggagggagcagtggagcaaggccgagatgcgaggcaacgaactcaatagactatctgatctgaggaaatctagagctggcctccccactcagcctgctctgctgctgctgccactgcaagtgctgcatgagcggctctgtccatacgtcacttctttctgccctcctgctgctcaaggtaaactgtcttccctttgacctgcctgaaggggcaaggaggatcctcgtcgtctcctcccccttacgatgagacattcttcgtccgcaccatcctgacctaactactgcatgatagagttaaaggataggtaggagtagagagcagccgataggatctcaaataaagtgatagctacctagaaacctcatgagagagagaagatccaagaaggacaggagacaggcacgcgggcaggcgagatcactaaaatgagagaagaggtgagcatgtattagtcacatagtcataagtatatgaaatgtgaataaa

SEQ ID NO: 36424 - DNA, 560 bp, Zea Mays
gtaacttgtgtggtccttcttgacgttgggatgggaaggcattggcctcttgtgtcgatcctagactgagatcgtgggcctaaggaaagaagacatggattggtcctcgtctggctgaggattggatggttggcctcttgataggttgggctagattttggctgtgtaagggtggctttaggggttgaaaagggtgtgacgagccccccctgagctgtttatgtggacacttcctttggggattggattgtttgatggctcattgcggtctagggaggggggctcactcctgctggttggacaatgaaggctgccttcgcctttattgtttgactttgatcggcgaaggtaacctttgcttttggggtgttgtcaaagacgactgccttcgtcgtcgcgaacttcgaagcatgctgtgattgggtgttcatcttcttgggaggcacaaatgttgaattctaacaggtgggaaccaaacaagaggaacaaatagggcaaaacaacgagacaaattgggaaacagtggttcacaaatgtcttgtcaaccgtcccctcacccc

SEQ ID NO: 36425 - DNA, 776 bp, Zea Mays
aaaaaaaaacatggagcaacattccatcgaccgtagcaactttatatatctcaagtcaattatcagcaactatggtcttcttagtttgactttgatatcaagtgacgattgtggctttcaatacataaccatggaccaaaactaactgcctgatacctcaccatgtcgcctaaatttccctccatacctcacctcgtcgctcgccggaggagaaaacacaaacaaataagcgcagacaagagggcgaccaatctggcgaagctgctggagcctgctgctgtgactgcatggtgaggtagacggaactgccaaaacctgttgctgtgaccatacggacgggcgagagaccaagacgcgtcgagtggtgatgcggttctgagcccgtggttcagggcagctggaggagaggcagcgctccgctgcaggagacggcgcgtgcaggcggaggatggtcgacatgggcacaacggcggtgtttgtgggggagggggatgggattcctggctgcggcaacgacgagggggaagaggatggcactggggctctagcagttgctgttactcatcattgtcgacgccgacgacaaaaagaaaaggaaaaaaatgctttggatggttaggtcattgccttgttgctagatttttcctcgacgacctgactgaacggcggcaggaacggtgacggtgccctcctcgtatgcccagcagctggcgcgctgatggccacgggcttggaactgcccatgggcgatgctggtcagctggtgggaggccttg

SEQ ID NO: 36426 - DNA, 372 bp, Zea Mays
ccggcagaatttgttgagggctcaacaacggatgaaagcacaggccgacaaaggacgtacagaaagagaattcaaagaaggtgacatggtatatctcaagctacaaccctatgtgcagtcatctgtggctcgtcgtgccaatcacaagctcagtttcaagttcttcggaccatatatggtgcttcagcgtgttggcaaagtagcttataagctacagttaccgtctacttcaactgttcacccagtggttcatgtctcccaactcaagcgctctgtgggtgatcgaccggtcggtgtagtcttaccaaatgatttggaacatcttcaagtgccattgcaggcaattgatcgcagggtggtggtcaggggagg

SEQ ID NO: 36427 - DNA, 332 bp, Zea Mays
attgattggattgcataattaaacaagatacaaacacgaaaatcatcttgaatccttccccttccctcccttcttcttccctccaccaaaaaccaccgggagacttgcaccaacgcgacgtagatccgagcgggaaaggaatggcaccttggagagaagggcttgaggagggacggctagggtttgatgggggagaggtgggtggcggcagcaaatgggtggatgagtgagagggggtggcgtccaaggctagagagagaggattaggggagggcggctagggttaaggggaggctaatgggccggatcgagattcatggcccaactcgccc

SEQ ID NO: 36428 - DNA, 336 bp, Zea Mays
gtagaatctctagggttcggtcgccgcggtggagaagaacaagcagacgtctgcgttaatggtagggttcggccgccgcgtgcgttacgggtgaggtgagctgaataactgcgtgctcgtgggtggattcgtgggcccgatacacgtactctgttgggcgaaatctacgcgaaggcccatgaaccgacacgtggattactgtttcgtaaacagaaacataagacatcgtaataccaatatttgtgtggggactagtacgactgcctagattgcgggaacataatcttctcgtgggcccggatgcccgaaacatgcgcataccagaagtgtataaac

SEQ ID NO: 36429 - DNA, 324 bp, Zea Mays
tgtgtttgagtttttgtttttgtgggggcttttgctggtatattacatggctctgcctcgttaaaaacctcacccccgggaggaaaagagtgcgggccggaataacattgtttgctggattacaagggcgcgtgggccctgatggttagacaaaaaacttgcggagattgtcaatgttccaggagtgctctaagccttcgtcggagggcgttgctagcctgtacgcgctgggggatgccttcaacttgatgatgaatggaccctcccatttcggctccagcttgccccgtgattctgtccatgtggtccagacgagtacgaggt

SEQ ID NO: 36430 - DNA, 380 bp, Zea Mays
ccttagctgtcggattagaagtctacggtccggattggatctaacataaaatgaaacggaaagcgatctccaccgttggatccgagatccaccgtccgcgctcctcataaccaagtcctagccacacccgtccgatcccgatcgaacggatcgcaatcctccgaacgaatcgttatttcaacttctaatctacgccgttcagtcgggatcagatggcacggaatacgtcttctcccccagcacattcatcccgtcgcacgtgagctgcccacggcggcgcccttagcccgtgcggctgctctcgccggcgagtagtgcgcctagagctacggagcccagtttctcctaccggtagcgagctacgcatagagaagacacag

SEQ ID NO: 36431 - DNA, 932 bp, Zea Mays
cggcggcgtcgggcgccggcggcgcggacgagacgccacaatgccgcgtggtcacgcctctcgtgtcggagcccgaggcgcctgctgagcttccccgctggcggctccgctgcatgtgggagctcggctccgtgctcaacttcctccacgtgcgtgctctgcccttaacactctcgcgctccggcggtggacggtcgccgtgccctggagttcgggggtttaggcttctgtgtcgtggtttggacttggcagctagggtttcagtttgacgccgccgttgcactgtctttttggtgggcgcaggtgttccgacctctgctgaacatcactggggagttcacggctgaggacgtcgaggcggcgcttatcactcccaacgagattctagatgatgtgcatatgccactgctaaaggtgggctccttggttgttcggcttgagcttgttttccctttccttcatctcgctgtggtgtggaacgaggtgtatgtgtgtgtgctcttcctcttagtctactttttttatttgctgcatggtgcatgctgttaattgcttcatgaacaaatactgaaatgtgtttaatttttttttctgcaatgaccaaatttgttcattttttaggcttgcctgtattgtgttaccaagtttggaatgggatgctgccttcagtttatagaagcttgcggttgttttttctgcttaactggccacatgcaatattggtatcatgtaccattattattgttttgtgattttgtcactcaataaattcatgaccccaaattacatctttgtaactgatcatacatactagctgcttgcttagagccctttagacagttttgtacagtacattttttgccatgcaaacattttccttgattctcatgcttattggtcatatctgcagtcaattcctcctgtaactcgca

SEQ ID NO: 36432 - DNA, 411 bp, Zea Mays
caaaggtcttacactgggtactaccagccctgatttcaataatcagccacctgtttttctacctcagtttgtgatagggagaatatctatagggtcgagagtttactagaatggcaccagggatgagtgggatatggtgatcaaatgatctgggaggtggtaggcagtaggaacagaaaacacatcctgaaattcttccaacaactggtgcatctccatggtactgtcaggcacaaactcagtctcagttatattctccatcaaagcaaaagcccacacatcatttcccttcatactcttctcaatctgcaacacagaaatctccttcacctccttcaccctcataccatctcccattaaccgacattgagctcacgcgtaaccttcacagggcctaagttgttggggaag

SEQ ID NO: 36433 - DNA, 1330 bp, Zea Mays
ggaggttgtccacggcgctagtccgcggcgtcgcgaccttgttcctggtgattcacaacggtagagcttacgaactaagcactgtgagcttcactgttatagaaggattacggaacatgtcttactcgtgggtgggattgctccagctaccctggccacggtgaggtgagtcatcggtgaacgtggtcaccactgtcagctatcaactccagatcaggtgctggcaaagcagtagaagagctggggaatggttaaaggcttgatcaagctatggaggacaggtttgatatgctggagatgctaggaaaacagcaagagcacgacagggtcctcattaggctttatagcccatggcaagccatcccaaaccatgggtttgctggggccaggctgtaacttagcaggaggacaccatatcaacatgttccacactactcttgcatgaccaccacgtagagcagaggtcaatagacatgacagaggtggccaaggtcctagggacagcaagttacctagcagataagcagctgcacacaagagaccaggttcacccccccatccaccttgctgcgtgtattgcatgggtgccatgtacacctctcatagcacaatttgcccagctccccacatacccttatctcctttagaaggaactggagtctatagtggagggtgatatttttaggagatatttgcaactgcattgaattgctgttgctcactgaaccatggatattttagcaagaagcgaaacctctagtaccctcaactcgccactatagccttattcccatataagtttacaggtgagggtagcagggggtgatcttcttcagttctaactgaatcagtcatttcagcacagctgcaaacctccctgtttaagccttgatatttcccaaatacataaggcaacaaacctacctctcctaacataaaccactctccaacaatagctctaccaacttggtatagcactgatagcccaaaaactcacagaacagaaattgaggtaccccaaagttaagcaaatctcacaaaaactcagtttcagttcagctgacagcacaaactaagtctgacaggaggttttgcaactcctgtttctcccaattctatacagtaacaagcctaccctttgcatgaaacctgttgtccttgacatggtatttcatcttgctgtgccaaccctaacccaattctccttggatcaactaccacaaagctccaaagcatggcaaagacacacaacttcagacttggatattatgctaagtctgaactccaacatctggcagtccaattttgaatacactttactccacttttt

SEQ ID NO: 36434 - DNA, 359 bp, Zea Mays
gcggagtggaaatgggagcgggaggaggaatagtggaagctggagtggtggatggctatagagcgagaggagctggtgaagtgggaggtggggtagaagatgtggtggagggtgtggagggagcagaggagtgagaccgagatgcgaggcgacgaactctataagcaatttgatcgcaggaaatctgcaactgtcctccccgctctgtctgctctgcagctgctgccgctgcaagtgctgcacgggtggctctgtctatacaccgcttcttccggccttcctgctgctctaggtacactgtctaccccttgacctgcctattgggttgaggagggtcctcgtcgtctcctcccctggcg

SEQ ID NO: 36435 - DNA, 524 bp, Zea Mays
cgtactgttagaggttgtagctatataccccactgccggattagtcagcctttggggccgagtggttcgacaatcttgctgggcttgtgcttgtggaccagattgaggggctctcaatcggtcttgtaccggaggcgtcaacctggcaaagacagatgactggggtggcccccaagcggagtattgtggtgtcccaaaaggatatggtggcataccccacatctgattcgggatatatggtggtggtggtatgtatgtataatgatatgacataggtgtgtatgggagtggagttgtccatgtatgtacgttaggtcttagttggacattatgacctcccgtcctttccgattggtgaggtggtccaatcggcctaacctgctgtcgctcctgggtgggtaagcgagaccgctttggaggccgatcactggggccagccttctttttcacgtatttagacaataattgatcaaatatcgggctagtttttaccaactgatcagcggccttgaacgtgttagttt

SEQ ID NO: 36436 - DNA, 415 bp, Zea Mays
ccagcataggagaggggttagccagggagaccccctttcccctatgttgttcatccttgccattgatccgctgcagcgtatcctggaccttgcagacagaaatgggatcctttcccccattccgctaactatagcaaaactgaggacttctctgtatgctgatgctgctgctatctttatcaacccctctagagaagacctcctggcggtcaaagacatcctgcacgcttttggttgcgcctcgggattggtcaccaaccttgagaagagctctatccacccgataagatgtgataacgttgacctagaccacgtgctccagccgttccaagggacccgggggaccttcccatgtcgttacctgggcctccaacttcacacccgggcgctccagagaattcatgtccaacctctg

SEQ ID NO: 36437 - DNA, 315 bp, Zea Mays
caaacagcgctgcaacataggaccgatgcttgggtcgccgacggagatagaatcaatgaactgagaagggacatccgacacttgcaggatcaactcgctgatcgagacttagcacttgactgggccgtacagtctcgtttgctaatgtgtgctaaggaagcaagggctcaggcccgagttaaagaacttagctcaacggttgataacctgcaggtttactgcaatacgttgcatgaggaagtccatatattatactcacaattgcacccaagtgagcctgcacaacctactgaggcggaagccggaccatctcac

SEQ ID NO: 36438 - DNA, 280 bp, Zea Mays
gtggatcagtgcctcatattctgctgcattatttgatgctgggaataatagctgaagtgcatacttgagttgttcacctccaggggaaatgaagaggatccctatgcctgcttcctacagttttaacaagccatagaaatacattcgccatacttcagtagcctctgggttgtctggaacctgatgctcagtccattctgatacgaagtcaactagtgcttgagtctttactgtcgtgcgaggccaaaactctatgtcatgagctcctagctcgcaggcc

SEQ ID NO: 36439 - DNA, 297 bp, Zea Mays
gcaaatctctgtctcgcctgagcctctcacaaactcatgcctcccacctccgacttgcccgaagtcacctcgtcctacaaccgctccatctgtctcgcccgagccggtctcaggcagagaggacaagggcactcgaatctagcaggggacattcacatttaatgtgcacacctaccccacgcagaggcacaggagcacagtggcaacaagacaacaatcacgtccaggcgcaacagcatgattacggtcgcaacactatgcacgcatgccgcctaccatcccctgatgggacattta

SEQ ID NO: 36440 - DNA, 365 bp, Zea Mays
tgataacaagctataaatggtatggacggaaagtgaagggaaacatgatgtaaatttacaacaaaaagtgagaaaaaatctataacccgaacggtccggtcttcgtcttcctggatcgagttcgcctagcgtgggtgtgacccgatgacccatcccacaaggcaagccatcgggaggcccattagacggcactgacatgtttctgtgtcgtagggacccggaaatatctatcctctacactatgaatctacgatttgttttactatcacttcgatattggtcaacgccaccctaatagaattgtcgtgctctatcaacgcttttctaactgtcgcccttgcaaattcgtcaggaagtgacggcac

SEQ ID NO: 36441 - DNA, 576 bp, Zea Mays
tgccgcttcaattcaacctgctcctttggggccattcgatacagggccttatgaatgggctgcgtacccggaatcagcttaatctcaaaagttgcatcgcgctccggaggaatgcctggaagctctgtcggaaacacgtcagcaaagtcacacaccactcggatgtcctgcacccgcaaggcagcctcaccctccaccaccatggagaaaaagattcccgacttccttgaccagcgatccggaagcaattgcgccaacaaggataacatgaacttaggggaacttcccaagaataccacctccctacccgacggcgcctgcaataacactgtcttccaaaaataggatataactgcgcgatactgggataaccaatccatacccaagataacatcgaatgcccccaaggaaatcacaaccagattggccgaaaagacctcatcagcaagaatgacggaacacccctgacaaactgaacagctactaatggagccattagcagaactaaccaaaattgggtgacccaacctttgcaccaaaagaccagcccgcgacacaaagtcctccaaaacaaac

SEQ ID NO: 36442 - DNA, 555 bp, Zea Mays
ccgcggtgaggctaaaccgagtggagttcggaagtgaattggggagaattcaaaattagagttctcgggtggggggtttgggatgcaggtgggtagctgcgtgaatacttgacggtgctgaggatgcgctcaatttatagaccccgaggtcggtagctctcaatttgaacgcgatgtgttggcggccggagatagggaagaacacggtggctgtaaccgtggcagtcactggtgtaacggcgcaaggagaatactcctaagggtgccacgcttacaaccgcgtagtaacaagcttaggcgtggcgcagccgaggtcaccggcgcttccacgacgactccggtagtccggccacgtcgcagcgactatacccacggcgataaactccaattcgcgatcctatcccttccccgtcgtgagatcttttctctaccgtagttatccaacctccagtgaacacggatcacggcggcggcgtgaatcttcgcgcagggaggtcaccgtcgacgagcaagccacgctggcaaccatatccgttcagttactgtaccatggcg

SEQ ID NO: 36443 - DNA, 385 bp, Zea Mays
attaccagagaaggcagggtctactgcacaaatgtttccaagactcagcttcctacgctctagacggcgggttaatttgtaaacatcatggggtctctttagcaaataggccacgacgaaggggtatcgatcactttcagccgccagattagaatcctgcggccacgataggtcatatcaatgccatcgacacgcgcgagccatggccatccgattgaggatcaatgtctttgagtttaagacgctgcaagccaacctggtacgcgcgatcctgatccaagggtgaagatcaattcgttgaaccggtatctgctatctaatcccagacgttcgcgaacagatcgacggtggcagctccttcttctctcccttaaccaacccgacg

SEQ ID NO: 36444 - DNA, 430 bp, Zea Mays
ttgagggcacggcttggtggcttggtgcttgactaccctacggactcgtcggtgtgctcaatttatagtgtgcttgagcaatggtgttcaatttggacgaaatgcgctggcggtcgagaggggaactgagtcactagcgcggtgattcgtggccttcaccgtggcagacccaccggcgacgagccaagactaaggagcggtttatggtgactcaccgcgatgtggtaaagcgtcgaggcacgtagcctggccggataacggcgaacgccggtgatgccagcgcgaccgtccgcggcggggcacgatggccggagtgaacaggagctcaagttcatccacacgacgatctttaccaccctgagccacatccggtactttgctgagcccgactcgcaacggcgacaagaatcccggcgcaagatcaccgacg

SEQ ID NO: 36445 - DNA, 328 bp, Zea Mays
atttactaaaactaaccccaatgggtgtgacccttctgatgctgatcccaatgggtgtgctatccgtgttgttgatgaggatgatgaagaagaggacgaaatccctctaattcggaagaacagccggcgttacatagctagtggggagagtagtggtgctccttctcctgccttgtctgccctcattggtctgcaagaattatctctggcgaactttgatcaaactcttgaagacatggttccagaagatctgttgtcagaaccggcagatggtggcgcgatggatgtttgtgctgatgtgctcgacgccgggttggggtcatcccgg

SEQ ID NO: 36446 - DNA, 629 bp, Zea Mays
catcgttcgagctatgccgacccctacccttcgtagcttgggccttgtcatggcttgtctcgttgtgccctgcaggcggtttacgcactcaggcctagccctgatagcccatgagtgcgctgtaagcgagggcgcatgccataaatgtgttgcagccttaggagctcgtaggccatgagtgggaggcggaccgatgcctctaccgcggctggacaccaggcatacttaatgcaaccggtcacttacggtgggtcagtcttgggtcgggcgaggggatccactcgagtagttttcgttcagttcgctcggcccccatgtcctcctccgccactctggccccaggctcggtgccgtggggctcatccgtggacgggtgcttttagggcagacgttttctttctcctcctaatatctgataggccccagttgccagaggcctctccccagcgtgcttgctgaccgatggtccccagggaccgaccggagatcttatatccgacatacctccacctattctctccatccatcttatccaacatgtccgcattacctctatctttcgttctctcgtgctcgcacattagaagatgtctctatccctcttctctgacaccctagacacacccttc

SEQ ID NO: 36447 - DNA, 358 bp, Zea Mays
ctgccttggaagtaacagaagctagggttctgcttgctgaaatctgtctgctgaaggagagaggtctgaccgctgaggctatggttgctgtctttgtttttaagaatattcagcccttgaaggacagagcatacccagcttacttgtatagtggtgttaccgactcgactcgggttaccaataggaagattcctgctgaggatctgatgtgccgactagacatgatcttgagaggcaaagtatcaaatgttggtgctcctgttgcctactctgcttggaatctgccacctcctaagtcctttttcaatttcgtgtcaaatcctcctgctggtgatagtggtctgggtcttagagtgcg

SEQ ID NO: 36448 - DNA, 618 bp, Zea Mays
gtagttgatgttgaggtggctgtatatgaagctgctgacacaaagaggtgccatgatgatgacaaagatgtgtcggggtagtcgtcatgaaaggggatgatgctgaggtcgatgtagttagggctatcgaggacgtagacaaatgcagtgacacaatcaagagagggttgatgtagtcaagctgcgagggacgaatcatgcgacatggttgccaggcttgggaatgcattgtggatgaagcacacactagtgttgccaatatttgacgtacgaggtagagggccccaaccatgcatcagcgtttgagggaacattagaggtcttggcgatggttgctgtgcgctgaacgatggggtagaaggtgctgatgcaactcacggatgtcgaagtagacaaagtagttggggaagagacgatgacattaaagacgtggttgtgctggacgaataagaagccatacgaagtcggacgtgtctaaccgaaagattagtccaaacggatgtgtctgcccaatggcagcagttcggacgcaaggtatggtggtgatggtagcactcgatgttcgtgatggaggactcaaatagcttgacaaagattgggtattgatacgtgctgcgt

SEQ ID NO: 36449 - DNA, 372 bp, Zea Mays
ttgggcacgaccgtcgttgagctctataaattgaagccccagtgagctctgccaggttgtaacgaagctagagcaccatcccttacctccaattagccaccatagcgccccaattcctttcttccgccaaatctattttccgtgccaccgtgaacgccttgccatggccagccttctgcaggtcagttcaagtttctttgcttgatgttataacctcccttaagtaccctgctactcgtagacccgtttaattgaactagactgccctagatcaccaagaacacatcagaatgttctcggttttcgccatcgccgtgaacagaaggattctaggctagaatcgtgcaattgatagagggattagggtcgttg

SEQ ID NO: 36450 - DNA, 313 bp, Zea Mays
acaacctccgtagcgctgatggcatttggtaaagagcagcttcattgagacactcatctattgtgttgtctgcttcaagtaatccccttctttgtgctgcctcacgaaacgatggtagtgtgtcaccgtctactgtccttagatcctcataggaggtagcaccagtaacatgatttaggaggagccgaagatagaagcgctccccctcagatggtagagcagagacgattctaccgacttgtccacccgtattctgtttcctcctttgccacactttgccctgctgccaagtgtaccactcagggaagtcacg

SEQ ID NO: 36451 - DNA, 535 bp, Zea Mays
gggaggtgcaattctggctcacccaaggccatcctcgggcgggagacgcagtcacgcctcgccctcggggcatatggtcttgtcggacgggcttggtcccgtggcaccgagctgctcagttcctttggcacagtaggagagggtaccccatttcaaggcactgacatgcacgatatgctagacatagtctagatcctcttgttgggtgtgttggtcttaccatctccctgagggcttgttttgttatcccctcaatccacctctaaacgaacccctaaccggctaaccgaacaagctagccctttggatgagtggacatcataatcagagttattaaaacctgaagccctttggagctctccccgcatttcgccgtcgtggttttgcaaaaaggtcctctgtcttttcgtgatttaacccgtggtcctcgctcgaacaccaatcatgttcggttgggcgccccaacgcggtccctcgagcaccggtcttgccttgcccccaaccctagcttgtcactgcctcctcctcctattcc

SEQ ID NO: 36452 - DNA, 432 bp, Zea Mays
ttatcagaaccggcaaatggtggcgcgatggatgtttgtgctgatgtgctcgacaccgggttggggtcatcccgggcagcgtcccgcgcctcatcgaacttggagcacgaccttgagggccaggaagctggtttagattgccctgctcccatggaagtgactgagggaccttcagccttagaggtggctgctgcagagaactcggccctcaaggatggtgctggcgcttaaccagaccccgagggttttgccggggatgattcggctcggatgggtagcgcaagctgcgacccagcccccgagggtgttgccggagatgatccggctcggatgggtagcgcaagctatgacccagccctcgagggtgtccgagcgggttctccctcttgcacttccatggatgttcacgtagggtcttctcctccacactct

SEQ ID NO: 36453 - DNA, 296 bp, Zea Mays
cggctcacctggatacatggatcacgaccgtggaagattgagaccggaggagcagaaggggccagtgaattcctcgtcggagttccccctccacggcgggaccgcttctcgccgtgacctacgacactggcacgctgattggtggtaagacctcgtccatggtgttcactgtatcatccccttcgtatttggctagttggtcaaaggtgggttggctcgagtaaatggtttagcagcacgccggccggtcccctccactagtgcgggcggcgccacctcggtctagtgagctcggg

SEQ ID NO: 36454 - DNA, 277 bp, Zea Mays
agaaaagtgaaaaagaatcatacgatgcccgagtggaggcgaaggaggctgaagaagctgctgaacgcacattgattataggtatcttttaaaaaattgtctcgttgtttatttatagcttcgaaaattcatcattatgctctttattgcagccggcctttcgccacccccaaagccatacaactctgaagcggatccaatcatgaaagagtctttagatgtgatgaaagttgctaacgaagttgttgacgaagtcttcgacaagtttttacatgaa

SEQ ID NO: 36455 - DNA, 423 bp, Zea Mays
atttgacgtggctcccaggggtgaatgctgatgaaccgaccattggagtgaagaatgccgcttggcacgctaatggatcccctacctggcacgctaactatcgtgggtttggaaactgggggacaataaaagttgtattcggcagggtgctagcgcggactcactccgaatggtgagccacggggggatcgaaggtggatctgagacagggggttatactggttcaggcttgcgccctagtccagtgtagtgctgatcatagtattatttggagcatgttatagttgagtgcttgtgtgtcattattttttgaagatggggttgtcttacccttttatagctcaagggtagactttacaatgaggacttgtattatgtcggggtggagttcgacctctcgcttccgggacgtcttcagtatag

SEQ ID NO: 36456 - DNA, 329 bp, Zea Mays
gcccaagtggcacagggagtaaatggtcttgcctcagtaacgcgtggaattaatgttcggcctgcatactgcggatgcaacgcctgccactggggcgagcaggtatgtgtctcgtccttacttaatgcaaaggtgattcacgcttagagattgacatcaggcttttcccgatggcttacgtcacacttcgtataacacgcggcagcactgggccttcccttgttcgccctttctcgtgacaggtctggaacgcccttggctggtgtgatatcctggccctagtggatggtgatatcctggcccaatgcttaatagaaatgatagaatgc

SEQ ID NO: 36457 - DNA, 438 bp, Zea Mays
gaaaaatgctttgaaaaatctatagaatgtgtagaaaagataaaaacaagctttgccaatgttggcgcgtattcaagtgaagacaatttcgtacggggcgatcccgaggggccaattgagtggattagcagcgaggccgaagcctttgaggagattttaaatgaccgtggggacgtatacgccttctcaggtgcaaggggaattgcggctatcttggagaaatcaggttgcgatcatgtgaaaactctggcccaagccgaagatactttatctattgatgatacaaaggacccctcggccgaagcaagcttagttggtggaaaattctttactgacatatgggaaaatggcggccgagggatggctcacgaaataataaagaagaacaaaaaagatactcacgatgctagggaagcaacgaaggcagctgaaaaagct

SEQ ID NO: 36458 - DNA, 706 bp, Zea Mays
aaaaggtggacgacggcgaggtggccgtggctgaacgggacctcggttatcagtcgcccgagggggacctgaaggacatcttcgccggaggctcctactctggtgaagacaactagacagacctcgggggaactccgtgtcccccggtctacgaagctgaagcacgccttcctccggatgcccttccggacctcccacgggtccgagctgcagatagatacatgcagaagtgatcacagccaaagacaagggttctcgtgtcaaatgcggataggaaccctgggttggggcttagccccgtggcaagtgccataccaagaggtgctccacaactctcccccagctgggaaggaccctccaaggtaacgggagtgcaccgacccaggggcaaccatctagctacgactggaggagtaccttaccccgatgccaaatatctctgtaagttctatccatagagcaagactaaggggtctagtttgtttccttttttataactaaatgacgcatacgtgtatgataacccggtggggtctgcccccatgaacccggactattggtctgcacacatgcacgacaagttatgaagaagaaactacccccctcagccgtgctcttgtgatagttccatcttgctgctccatggtcccaccttgcagtctttcagataataccttttagctaacccacccgtacggtttccatc

SEQ ID NO: 36459 - DNA, 472 bp, Zea Mays
gaaagatgtatgcattgggtaacacgacgcttaggttgctgttgtataatcgaataaaggatgtattattgagcattagtcaaacgtggggtactagtggtacgctaggcaggcggtgtccaaataaattaaccggttgatgtggtagttgtcgtgcgtgatttattgttagtgagtagtgggattacgagttatgtaaggattatgttagaaactagtaggcggcgtgtaactgtgttcgtgttgcgaataatagatcagtaggtattattggtgtcattagcaagtaggatgattcctgttgtgcgataaattttgaagggcgaaggacatgcatagtatgtcgatcgagttaaccaaaaatggtgttaagttgagatttatttgtgcatgaaaagtaataatgtgtttaatacttagaactcttagtcgatagtagaaattgacttggcttaaatagagaggtggtgac

SEQ ID NO: 36460 - DNA, 333 bp, Zea Mays
cgcgacgaaggggtatgctcgatcctggaccgcacgatagaaaacagatggcccagattagcccctgcttaatccgaaccggtacgcgccggccaccgtaagatcacagatctacggacagaaggcactctccccagcattaaccgcgctagccattagatcacagatccacggcccggatcttcacacgcaaaggggtacgccggatcgattctccaccacacatccccggatgaacggttcagaacgaatcggtcacgatctaatcacaggcgtccattacggatccaacggccctgcgcccttcttcctcccttcgactccggacggcac

SEQ ID NO: 36461 - DNA, 412 bp, Zea Mays
attgtatgcccaactacacccagacgtgcattttgacgctgctttgggagctggaccgtcaggaacagcaaacgaaggacttgatgaggagttggacctttttcagccccctccttccatgaaccttgctgaccaacggtcccatgcggcaggaaattgagcagcaaagggtgatgaagactagaatagtatagtttagatgtaatacttatgtaaaataagtagtgaagtcgtggtgtacgcgtgagtctgtataattacattttggtaatgtaatgtgatggtatgtgttggcatgtcatatttttcccaaatgtctctttgcctcagatgccatcgcggactcgtgcgcacgacggtgcggggacttcccgtggtcgggaagatactcctaatccgccaccagtaccac

SEQ ID NO: 36462 - DNA, 792 bp, Zea Mays
catcgctcgaaagcatgggttgccattgaggagcaattatttggcaactgtgaggctcgcgctctgcatctcgacgtggcctttcaaaccttcgtccagggagacctctccgacactgagtactgccgtcagatgaagggcatgatgacctccctctctgacctcgaggagcctatctctgatcgcacactcgtcctcaacctccttcacgacctcaatgagcgtggtcacctttggacctgggtcatcctcgaggagctgacgaaggggtgggcccctcgttcggacactgctgtcgctctctacagctccaccctcgggggctacgccttgcaacgtccctcttctacttttgtctcggggctcttccttgcgccttcccgcccctcccgccttaatagcctggtttgaggtatcccctttgtcatctcccctctacaccgctcgcgccttagccaccacttctgccactgccaccccactccgctccgtcctaaaccccatggtctagtgggtgggattagcggcctcttgctagctcctttagcacgatgatctggacccctcccgttgtcaccgattgggtggcttctggtgccttctattgcaccactccagacgctggtatactctctttttctcatccacctcatccgtccaccccttctatcattgtgggcaacgggaacatcctctaggtcacctctatcgatgatttgggtgtctttgggccttctaacttcgcaatatacttgtcaccgcacatatcattcacaatcttctttttgttca

SEQ ID NO: 36463 - DNA, 412 bp, Zea Mays
ggcaatggtacttgttgttgttgctgctgttgctgaaattgctgctgcagctgctgttgcgccctcctctcctggcgtatctcttctctctcctggcgcaactcctggcgtatctcttctctttcctgacgcatctcctggcgttcttgctgcatctgggcacgcatatcagccatagtgtccaccatttgctgcatcaccgtcatctgagctgcaatcagtggatcaactccgcctagtggaggattaggaggattcatctctgttggttgtggctgaggttgtctatatatccaccgagtgtgtcgattaggaggcaaatcaattccaccacccctcctggtattgaccatctgagttagatacatatggtaagagagagtagcagacaaggcagtaattacgaatcgtg

SEQ ID NO: 36464 - DNA, 284 bp, Zea Mays
cttcaacgctgggggctagatattgtcggaccactgcctacggctcaagggaacctcaaattcaccttcgtcgtcgtcgagtacttcactaagtggattgaggccagagcagtatccacaataacgtcgaagaccgcccaaaagttcttctggcaaaacattgtctgccaattcggagtcctgtccgagctcacagtcgacaacggcaaacagtttgacagctaggacttcagggatttctgtttctccatcgacaccaagcctgtcttcgcctcgtataccac

SEQ ID NO: 36465 - DNA, 613 bp, Zea Mays
tgcatttcttcttgcgtttccctgctgcttcttgttgcgggagcgagttcctttagtttttcattgcctttgtgtgcacacatgtttgggttggcggtttcttctacgggaaggttcaagtccggaatgcttttcttcatgtgttccttcccggtgccaggtctcgtctggctccccttcttgctttggggcatttctgtgatcggctgtggcaagtcctcttgccctcttttcttcggacgtctccgagtacttggggtttgagaggccagagttcctgtccttttgttatgaggcctcttaacaggatcgggtataccttcaattttctttggtatttcaaccctctctggtgcattccgtgcaggaacatgcgacttaactacgttcttcaaatcacaaaaatgatcaggcagttcatttgctaagttttgcaaatcggttatcttttgaacttctagatttgcttctttggtaagagggtcatgagcggggattcccacggattgccatataatttctcggcatttatcatccaaaggttcttttcctccccctaatgatgggaaattatcctcgtcaaaaatacagtcggcgaatcgggccgtatgca

SEQ ID NO: 36466 - DNA, 565 bp, Zea Mays
cgccggtggacctccgccatggggcgtgcggtcaccgccgtggtcaggtcgccggggttggtgaaggcctggttaccattgatccctaagcgaatggcttggattacattatcgcataatgattcggagtggcaaatcttgaccctagatcagtaaatggacggttgggaattggttaagagattttaaaatcatggtcgtcaatctggtcgtgcacggtggggattcggtcatcgtcgcggttcggcagggaggattgtgattcgtcgatgttgggtccgaaggtagatagagcttaccgagtcaggatttatgagggtcgtggatcttagatccaacggatagcaggttgtgctgattcatttttggtcaggatttaatctgggccaccgattactgatacagcggtggcggtcgtctgataccccttcggcataggcaaattgcttataagccctcgggtatttacaattgaacccgccatccaggctcgggcaaatactattgcaacaaggctctgttatttatggaaacaaccctcatctttagggtattgttgtccgcg

SEQ ID NO: 36467 - DNA, 596 bp, Zea Mays
cgtcctgggcaagctcatcgcctaactccagtggtggcggaatcgtggccgggctccccctcggtgtttacccggcggtcctcgcttgcgcgaccgtgcagttcatcggaggccatacggatgctgtgtgacgcgcggtcgtcctagacctaagcgataggaggaagatgatctttggcgcgttggatgggttatacacggcgaggattagatgtgggttgtccaccgctggatctttggcgaacgggtcggattggaggttgtcgtgggcagattctggcccttgatcggtaatccaagggttcgcgtagaattacaggttctgacgtctatggatctaattcataccgcccaccattgatcgaacggccacgattggcccataccccttcgacctgggcattttgcgtaaaagaccccgtgaaatatctgaatcaacccgccgtccactgtagggtttggctgagtctatggattacttattttttcgcccctgcacttctgtttatttagcgcatagtccagacacctattaaaaccaggaaattcatttagaaaatggtttttcagtttaaattaattgcagaaacatatta

SEQ ID NO: 36468 - DNA, 500 bp, Zea Mays
gtgtggccgtggcccgtgggcagggtgtcggcgaccacgccgccgtttttttcatgtaaaccattttagttctaattagtttcatgtatcataaatctatttcattattgagaaaggttcgaagaaaaatgtagttagattactaatcagaaaatagcagctaggcaaggcagtatatcttaaatgaatcaagtattatgtttaggcacaccgagaacaaacatcaatttcttcaaggtaaagcagaaaaactccacctaaacttttgtgtcctcaaataaaaaagaagttgtatgacaaccagaattactaagaaaataaaacaataacagctaaagaaacatctaagcacctccataaagtaaatataaagcctagcgatgtactatcatcattatgaaggttgcgcgagtgttttcccgatttgtttttatagtttaaagagtgttattttagacatataggagcagcaatgtatgtaaatatatacacatatatag

SEQ ID NO: 36469 - DNA, 305 bp, Zea Mays
tttgtttcttgaacctgatgcgacgacggggctgaaactgtgtgcaggtgatagtccatccatcaatgtaatactcatttgcttctttttggtgctgggcatccttgtgatgtttccttttttggaaaacctggcaattcatcgtctgacagtgcatctggtatgagagaatctgctattagatgttcttggggggacatctgtctgtttatgccggaaaataaaattcgattcttctgttttggtagtttcactttcgtttgcattgacttggcgacaaggaattccataatactcacaacaac

SEQ ID NO: 36470 - DNA, 320 bp, Zea Mays
gactaggaaattcaaccttcttgggtgtgtcttctttttccaagactagagctgcatctgaaggttcttgctcaatattctgcctagtttcaacaggccctgtttcgataggcaatgagggcccagcttcggcttcgacctcctttgcagaggcaggagtggctgcccttgtcgactccaagatagcgtccagcacgctagccatcctcctcctcttaggagttattgcaggagctttggacaccttcggcaactccgactccggtggcgggctcaggattgttggcaatcatgccgactcctctggctctggctcttcg

SEQ ID NO: 36471 - DNA, 285 bp, Zea Mays
gtagatggtgcgattggataagaagctgacaagttaggatcaccctagtcataacggttgatgcgtcgtgtatgttgtgactcgagaagatgtcaatgagtcctcatgcaaggcgctagatgtagccaatgtcgagacggttgcacagatgatgtgggcacaacgatgagccatgggattaacgaagacacatcaaggcggttgttgtggaagacagccagggccgtcaaagacgtagatgaatacgatgacatagtcggtggagagatgatacaatcaaagcct

SEQ ID NO: 36472 - DNA, 1143 bp, Zea Mays
acaatctaagtaaattctttggcatttcgttcctaattgtcgtgtggcggtcacaacgtctatggtgacaccggtcattacatctcttcccacctctacgaacagcttgtcacaagctggatgtcgggggtagagatccttgaccttgaactgctaaagcagctcccaagtggtgtcgtcactaggtaggccacgccactgaacgagaacatgccaggcaccctggcgtagttgggcatgcaacgcatgctccagttcaggcagtagtcgaccatcctgtatgggttgcatgggcagcagagtcgtcaagggtcccacagaacagcttgagcagccccacgttgaagacatcgtggacacgagcgccagctagaagctaaagacgatagaccacatgcctgacatgctccagcacctggaagggaccagcatagtatggcctgagcttacccttggaccgtgtcatgtggggccggacgtttgcacaacgcaggccagaccagcgccaagatggagggcgcggtcacccacataatgagccgaacaagatttgatcggccatatagagtttgttagagtccttagcaaatagataaggatagagttgttagcaaataagataagaaagagagtttttaggagagattttaggaagatttgttagatcaaggtctatgtaagccgcatggcaaaagggatgaaatcaagcagtaattcatatagcttctattccctaccagcaacatagggagccgagaggaaaaacctcaccccacctctaccagcggctacgccctgcgcaacttgggtgcgccgccgccactcccagccacgccataatagaccgagactccagtgattgcgtctgtcgatgagcagacgaacccaccacaaactcaagctcacgatggtggttgtcgcagtatcacttaacatattgttggagctggagaagacactcacgaatctccgtgaggaaggcatcgcaccacctccatttgagttgcccctgcgacgggcagaagaatcgacatcgaggtcggtcgtacaccacctagaagggtgtggtgtgaagcgccatgtggaacaaagtattatagcaatactctgtctaagcaagccagtcaacccaggcacgtggac

SEQ ID NO: 36473 - DNA, 381 bp, Zea Mays
atgtaggatgggtgcaagcacgaaacgtgtttgagtccaccatctctagcatgcacgagtacatcgtacttgtattgtgaaggtaagcaatcacccactattacagcagcgagctcaccattggccggtaagttgtattgtgcgtcatgacgtgtgttacaacctaacaatcgcaacgtcaccttttggttgccttcttcatctaaacgttctttagcaaagcgaaatgccgcaaccagcttgttatgctcatctagcatgttaagcaataaacgggccacctctggatccgggcgatcatggacatcagcctcgttctcaaacattcccagcctattttgcacttcgtgttcagtgtcatatatgtaaagttgcgcaaac

SEQ ID NO: 36474 - DNA, 388 bp, Zea Mays
ttcaaagtgagtggttgtctcacagagcaaccgatgtaattggagaagaacattaagataagcacttaagggtgtttgcctttgtgttgaatggtatattcggaaaagaacatgaagagaagcagatgacaaagagaattgtgaacggatgcaagtgcaccgaactcaaagtatactaccatccaagcctccccactatcattttttctacaaattagcatcaaccgatatataccggaagaatgcatataaactttataccccaatacaaaaaaccccaatacacacaagctcaacatatgtcatataaaagttatattagggaaaaaataagaacaagacatcagaacatgaacataagaacaagacataagaatctatcctcgac

SEQ ID NO: 36475 - DNA, 275 bp, Zea Mays
agtcttttgtctctttaatcacatcaagactcgtccccaagattagaatgtcatcaacatacaggcataagattactcctcgcacccaccataccgataatatacacatttgtctgcttcaatcacagcaatgccaacagatgtcaaagttctatcaaacttttcattacattgcctaggtgcttattttaggccatataaagatttcgataacttacacaacatagattcttgaccatttgctacaaacccagctggctgctccatgtagattt

SEQ ID NO: 36476 - DNA, 301 bp, Zea Mays
ataggttttcccactagagaacttcacttcaggacaagcccatgcaagtgaaaatgaaatatcctgggttgccttgggagccagcttaactgaagcagcgatagctgcccctattgatgatcctggtctggagcacatcgatgtcttgatgggatcaagatgatcaaaagatccatgctgccacgacaagaagaaagttactttagcctcatacataccactgacatactttaccagaaattaaactggataaagtggtacaatatttgacacattgaaccaaagcaatatatacaagccc

SEQ ID NO: 36477 - DNA, 438 bp, Zea Mays
aaaaaagaagatggaataagaatgctaaggcgcatgagatgagttccatacaacacttctcattgtcttttcatatcgtttcattcacacatccttttgagaaccttcgtccatcgctctaacccttcaaaaaagtgttaaaccaaaggatgaaggtccaaaaatttaacttgtgttgctttgattttcaatagcttcaggggattgaaatcaagtaccaacattggcgcccatctccggtgctctcacaaccacaacaagctaaaccacgacgaagagcatggcaagccatcatgcttcgacaccatccatgaagaaacatatgctccccatcactgggggctcgagctttgaacctagcaacaaaatgcaaaagaaaggcccaagaagggtacaatatgtaggcgtccaaggaccctacattaggaccaagtggtc

SEQ ID NO: 36478 - DNA, 330 bp, Zea Mays
tcgtcgtcgcgcattgcgttgtagggggaggtagagcggtggacgtcgaaatctcacatgcgtccaccattgtgtcacggtgtgtggctccagtgcatccgtgaccttccacgaagattcgcgtggtggcggaaggcgtgcggaggcacttcggtgtcgggaattgctcgtcggcgttggtggatccgcctgcgctgtggccttgccttgtttccccctaaatcaccggtatgaactcgtcaggctcactcgccattgtctgttcactgcgtagcattagttacccataaggctaggacccccgagacctccgtgctcggcatgcgtgtg

SEQ ID NO: 36479 - DNA, 291 bp, Zea Mays
gttccccagtgatctaatagtaatagacacccctggggtagatgtcatcctagggatgaattggttaatgaagtatgaagcaaatgttagctgtgacaagaggaccgtaacattgaagtccccatccggagaggaggtagtggttgagctaaggatgcctaaatcagcggagggagattgtcaccagatttcagttgatagtaaggaggccaacccgcttgaggctatcagggttgtgtcggactttccagatgtgtttcccgaagaattaacgggcctgccacccgagag

SEQ ID NO: 36480 - DNA, 304 bp, Zea Mays
ccagggtctgctcttatatgcaaggaggagggggctcggcgaccgtcgatgaaaaccggcttgaagagctttgaagaccataaatggaggaggtaactacagggaagaaaaggtgctgcaacaattcgcgtggcgtaacggagagggggcaaatggtcgcggggcgaagcgatgtggtgctgctccactaggcggcgaggatacgagcagtcggtgagtcaaagggacacgacagatggttactcgagtcttggcgacggcggctccttcatttctctgtgtgaacgacacgagcaaaattggt

SEQ ID NO: 36481 - DNA, 277 bp, Zea Mays
gtgagccagtacaggggcgtgcggtccaatttttgggtaaatttctgggtcttcatcgtgtattttatggttcgttgatgggtttcctgatggttgatgcacgcctgcttggtggaggcgggaatggtgatcgatgattcgttgggtgggtggggggactggctgacagctgacagctgactgtgtattgtggtttggatggcaggtttagcgtcagtaatagctaggattagggttcaggcgatgctaagattttggggcgccaattgcagaatca

SEQ ID NO: 36482 - DNA, 409 bp, Zea Mays
cgccgctcttgcttcctataaattgagccctccaccagccccgcaaggtcatcagccacccagccaccgagaatcgctagcaatcgtgcatcagtgagcttgaatttcggttttcccccaattcgggtttccgccaccgtgaaaccaacctcaccgcgaccagccccgttccggtccgttcatcctcccctctccctcgtttgagctttctcataactctatgatgctcgccgacccacgcaattgagctagaaaccctctggtcgccgggaacacgggtgtctcgccgcaacactctcggtcaccgtggccagagccaaccaggcacccaattgcgaaattaggttaggggaattgatcggggaaggtccaatttggcgttagttgctcggggacaccagtacttgcc

SEQ ID NO: 36483 - DNA, 411 bp, Zea Mays
cgcaatagcactgtgcatcattattttaagaggaagaaagcaaaaatatttacaaggaggccatgcagagcaaggccggacagaaaaataaaaaccacctagaaaaaggagaaaggaagaaaaaaactaattcgatccagctgcccaaagggcttcagcgataccaaagctgccaaggtgctttgccccaatcataacccaacaacctaattaattaaggaaacaatgctgcggcttggaaatagaaggtgattcccccctcaaaaacagccctgttgctttgcaaccaaaggcatcaggctccaagaatgatagcgcaattaaggcctttccttttatccttgatgatcctgcaattcatgtctcgccaccattctgcaaaggaagaggcagaagaggagggaacaagat

SEQ ID NO: 36484 - DNA, 501 bp, Zea Mays
gcagaaacaacatttgatttgggcagagccttaccagagtggtctggccacggatgagctgttcttggcggcgcggcagaccgaattgggggaaaacggcgtcgcggtggctctgtttgaaattggggttggagattgaggctactcggccgtaagaagatgtgctttcaccgtgcgcaatcgatttgggagaaggtggagagggcagtgcgaatttgacttcgatctagtcactgtgtttgctatgatcacacctcgccgtgaacccaatggctatttatagccgtggcggtccggcgatcacctcgcggctgaggatagtatcgcaatcgcatgtcgaccacgtcggtagaaggtatagtgagggagaactacggcatgagcgccaccgcggtggaattcactgagtcacggcggccgccggtgagtaactccggctaggcctgggagatggcgccacgtacgggttatccctccccgacgttatccacaccataccgc

SEQ ID NO: 36485 - DNA, 392 bp, Zea Mays
aaagatggccacctacctcgatctctcctatagcagggctgtcagcacagcgctgtcagttgaagctaagtatgcaggcccaagcaaatcaaagggaattggaggtgacaggtccaaccaggggcctgaaaagcgacaaaggttggtaatccgacctttcaatcaaaaccgttcttcacctcgtccaccctcctaccccttcaaacagcctgtgttcatccgccctgccactacccccacttcaacaactcagccgagtgcccctggtactcgattccccgcactcccgagctcatcaaccggctgcttcaattgtgggaagtctgggcatttcatcaaagactgcccatatctgaggcggaacaactccaataatcagcagaactcaggga

SEQ ID NO: 36486 - DNA, 319 bp, Zea Mays
ctcttgcctgctgaggcctgaccttgcttcattcgagctggtgtagtgtaggcagtcttgttgggacagtagttggcgtagtgtcccggttgtccacacttgaagcatgccctgttggtggatgtgttaggagctacaggtcctgctgaggtgcttgcttgcggaggagcagttggtgcccgttgagtttgttgtccagaactgccactagctggtgtacttggagtggtagtatagcgaggacgggaactacttccaacctgtccttggttaggagcccttcttttctctccaaacatactcctcttgttttctacag

SEQ ID NO: 36487 - DNA, 699 bp, Zea Mays
aaagactaggggttctttagcaaaacatacctgcgaaaggggtacgcagcgatcacgaccattggattagataagggcgcaccagattaaatcattactcctgcgaaccggtatccgatctaggccataagatccgaatccaagggcctcggtttaatgcgcgcaacacaccacgcgaccacccgatcggacatcgacgaccatggtttaatcaagcgaaggggtaccctacgttatgatcatcgtcgtccgctggccatccaacggccgagcgacatcgttcccatcccgagcgtggacgcggcggcgccacacaactccccggcggcagagcttgccagtgaacccttcctagcgattctgagcgccaaaccacgattacctaggtgctaagcgaaattgagggtgcgatggacaaaggatagtgcttattaccggcaatagcgaggtggaggggccgtgccacggtgagaggtggaaggacggcgcgcacactgctccgacgagcaattcacctaacccgccggcgctctcctatcaattgcggccgcggacaaccttcccaggcgtcggcgaacactcctgggcagtgctccgagaacatggcaacagagcagcggatggtcaacagcggctagaagggggaaacgaaggggaagggttactgcggcgcggtgaggggagattaggaagtcgtag

SEQ ID NO: 36488 - DNA, 302 bp, Zea Mays
tagaaaggcagtgcagtgatcagagcatgcatgcattgcagatgcaggaggaagtgggcacagggccacaccacaggcgcctctctcttcttgcctgacctgacctccacagctgatggtcagctgcactgcactgctttaggcctaacagcatggagtactacacgagtaaaaaactctaggcctaccaccatagtgcactccgtaccttcacgtcaagtacagtaaaactatactgcactattgtagacagacccctacaggaaaatgctgacatttttatttgttagggctagtttgta

SEQ ID NO: 36489 - DNA, 614 bp, Zea Mays
caatatcgagcccccagcgttgaagtggccatgtgtgggcaatcagctttgtgtattgcgaagggttgcccgaacggggagaaaacttctggcaggcttcgcatgacctcgtgactcgattggcggcgcaaattatagcgggccagtagaacccttgacggatcaccttggcagcgagggccctaagccccgagtgagagccacaagttccattgtggacttcacgcaggatctggatgccttcggtttcggtgatgcatttaagcatgggttgactgactcccttcttgtatagctggccctcaatgattgcgaagtcccggcttcggtgcttgaggcgcttggcctcgttgacgtcgcttggatggtaatatccttgcaggcacagggttattggggcccgccaatcttcggtcatgatgaggttgactatgcgatggccctcggtgtcgttggttatttgtagaccctctgaactacggacggctggtgtgccaatgacgtggtagaacacgtcggagggcaaggcttcgcttctggcggctgctttggccaatgcgtcggcctcctcgttcctggctcggtccacatgctgcaaggtaaagcccttaaat

SEQ ID NO: 36490 - DNA, 329 bp, Zea Mays
aaactctccaactcctgtaggcgcttcttgttgatccatctatagagaagagcaacagatacactctattcactaaggatgtatgaacatggtagatgaaacacgtactagaatagctacatagggggtttaacttaaagttgtatgacatgatgcattctcgtcctattcgtccttgcaactcttgccaacatatagtggctatgacgttttatggcggtggcatacctactcactctgttattgatcactagtcgcacttccctagggtttagttagtgtacctgcagaaaattgcattatagttgtgggttagtggttagcatcct

SEQ ID NO: 36491 - DNA, 734 bp, Zea Mays
gcttggattttagccatgacaagtaggttgttgagctagttctgtcggatcgatgctttgcatctgtccacaacgtcgcgcttcgatatgtatgagttcaagctcagtgcatggacacattgtctgaaacatgtgtcgtcgtgtccgagtctttgagtggaggagctaggaaatgaatcatttattagtttgctcgagtactaggttgaaggtcatttgatgaggatcgtgagccctcgttcttcgcttctgggccctccaccaatgggcctagtgacgagaatggccctgctcctcgacgtcatggtagctggtggcgacgacgattcggctctgtgtctaggcgcaataatagggttgtttggtaggctgccctttcggctaggcatgcttcaatagtgcaactcggtcggtttggttggttgcccagtgatccaagcctggcccaacgggtgcaactcgacccttgtaccctgtccctgattgcatgagggggtttggtgtttccccggagccaggtttggcacgtgcatcctatggccattttttgctcccgcaagattacgccatcgacctcagtgaactcgcctccctcctcgcagccggcgccttccaccatgccgtcaacctctgcgcgtctctaccaacctaactacacgctacacctgttgtccctccttgccagtgtgggcgatggcgcctgtgccggcgtgatgcgcttgccgctaccatcc

SEQ ID NO: 36492 - DNA, 312 bp, Zea Mays
atgatgaggagcaaagaggtggtgcgccgggtcagaggcaaagtgttcctctccagactgggccggaggaggagcactgccagaagagtcctagggcggagggtaagaggacgattggcccggatccccgtgatacggaggcgggacaaactgctccggatcatcaaaataagtttcttcttcttcgacgtcatcagctgtcgtaaaaggcaccccatatgcctgctggtaccactcgttgacatctggaggaggagggtggagaggtacatcagcagagcgggggcgaagggagtacccaaagcggaagct

SEQ ID NO: 36493 - DNA, 517 bp, Zea Mays
aaaacgggagagcagagagcatgcacagacctgaaacgagctagccacagcgaagttacttcgcgcggtgtttcggaccaatttgggggaaattccaaattggggctatctggtgagtaattagaggcacgagcgggtggattggatgcttgactaccttgcggaaccgacggcatgctcaatttataggccccccgagtggtggcccgtgaatttgagatgtcgtggtggcggtcggagagaagggggtgcactggcgcaagcaattggtggctttcaccatggcgagctcaccgacgatcaccggatatgcataacgcgagctactacaatgtggtaaaacaccaaggcacgtggcacaaggtcacgagggagccaatgccggtgagtctatccgaagtggccatgactcaggcgggtacggcggccgcagtagaatagtggccggagttcatccacggtgcgatatttcttacccttctatgttatccaactgcgctgagcatgaatcaccgtg

SEQ ID NO: 36494 - DNA, 635 bp, Zea Mays
ttgtcgatgacgaggatgattcggatctgtcccagcagaggtggaggctttttggacatcattcggtttcttcggcccgttcctcggtgctttcgaggcttgggccgcaggtctcttcttcggcggctgctggatcggttgatgtcgcaacacttcagattgtgtcagctgttgagttggctgtgcctgggtctgctgaaccagcgaatgatgtttttctctcaagagtttcggttgatgagttgatagtgcctgggtctgctgtaccagtggatgctctcccaagtgtttcggttgatgagttggcagtgccggggtctgttgtaccagtggatgctgtttttctcccaagtgcttcggttgatgagttgacagcgcctgggtctgctgaaccagttgatgctgcaactctcccaaatgtcttggatgcttcggtggtagagttgctggcgcctgggtctgctgtaccagttgatgtcgtaactctcccgagtgccccggctgctgctgttgattccaatttttgccctacagtcttggggggtgctgttgtcaacattgcggatccctatggtccttccctaaatctgcatgggagggctgggcctttgctgaattgctggttgagtgccaag

SEQ ID NO: 36495 - DNA, 509 bp, Zea Mays
cacgggcccaactgcaacccacgacaacaatgggcgcccaatctgtcaggtctgcttcaagacgggacacacggcgattgactgttggcacaggtttgatgaaaactatgttccagaggaacgccatgttgctgctgcaatgagcccttattctatggatcaaaactggtacatggactctggtgctacagacaatatcactagtgatcttgagaagctcgccgttcgtgacaagtatcatggaagtgaccagattcatacagcaagcggcgcaggtatggaaatcaaacatattggtcattcattagttcacaccccaactcgcaatttacatctaaacaatattcttcatgttccaaaggccactaaaaatcttgtttcagttcatcgcctcaccaaagataattctgctttccttgaatttcatcctgattattttttgatcaaggatcaggcaacgaagaacaccatccttaaggggccatgccgcaagggtctttaccctcttc

SEQ ID NO: 36496 - DNA, 689 bp, Zea Mays
gcgagcttattccggccggatgacgccacggctggagctcccgggcgacagggacacaattgaacccctaccgaacacttcccctcacttaatttcgcaaatgggtgtctggttggctctggccacggtgaccgtgggcgttgcggacagacaatcgtgttcccaacgaccagtgggtttctagttcaattgggcgggtcggtgagtatcaaggacaagcatgggtgctgaaacaagaacacaattggcaaaatcggacctaatttgagcggaccatggcgaggtcagaacacgcggtgttcttgagcagattgggggaaatgtgaaattgaagctctctggtggagtatttgaggtacgggtgagtgcgctagatgtgtgattacatcacgaagttgatggtgcactcaattaatagaccccgaggtcggtagctctcaatttgaccatgatgtgttagcggccggagatagggaagaacacggtggctgtaaccgtggcagtcaccggtgtaacggcgcaaggagaatactcctaagggtgccacgcttactaccgcatagtaacaagcttcggcgtggcgcaaccgaggtcaccggcgcttccacggcgactctggtagtccggccacgtcgcagcgactataatcacggcgataaactgcaattcgcgatcctatccattcccca

SEQ ID NO: 36497 - DNA, 292 bp, Zea Mays
ctcagggtccttgggaacaaccaatcgatctccaaaccataaaattcccttgctgtcctgatggaagcacttgtatttctctaccttctgcttgatcatttctttgataacttgaacacccttatcctcaatctgtgccctaactatttgctcttgcaatgtcggctctaccgagatataacttaagtcacctgaagaaacaacttccaggttcagcttgcacaattcatcacatagggtggtaactcttgcatccatgctcatacaattgcactgggcctttctgctcaag

SEQ ID NO: 36498 - DNA, 315 bp, Zea Mays
ctgagatgtcgatgacttcgtcgtcctctgctgcatcttcgccctctggtggagcgaagcctggaggtggtgcttgtggtagtcctccggagctgcaggtgcgtagggtgccttcgagagtggggtgttcttaacgctgtctcttgctgagagcttcatcttcggaggcttcttggggggtgttgtccgtgagggcattgccttttttctcagccagcagcgctaccttcgctgcttcgtcgatggatggggctggcttcgaactagctcgcttgggtgccatcgcgggtgatctgttcgtagcacgaacggtgg

SEQ ID NO: 36499 - DNA, 487 bp, Zea Mays
ataaaattcatgcatttgtcaacaattatattgcttgctacaacatgaggtatgttgatcgtcctccctcgaatccaaagagaataactattgagtcaagccaagaggttttttcggttgacatttctagatgcacaagatctagcaactgctccaaacatgctgatgaagttaaatcaagtccattgcaacaatctcaagttcttccagatacccagaccaagaagcagctagatccacagtcattaccagttcttcatatccgtaggaaggcgctagcataccatgtgaaaaaagtcgcctataacaccagctgcatcgtctgacgacgattttatgactgctccaacaatgaagcgctctttcaaatctgttgaaccttccagtttagcaactaaccaccccaagaaaaagtctcgagtatcgttcacggacatcccaccacaacaagtttccattaagtcaagcagtccaaagtctgctattg

SEQ ID NO: 36500 - DNA, 530 bp, Zea Mays
caagcccaagcggtagcaccggcacatcatgtgtgaggcggccgccatggcatcaaccattgcttgcaaggttatgctccgtggaggcactcccttacccgctcactccccgcgatgaccagggacctagccttcatatatacccggagtcggtgggagggatttcggtcccaagcttgtaacggcggacgagagagaaccggccagcccctgagtccgcgcccgaggaatccggtcgatcccaacaacaacacggtagatgatttctgcggcagtgggttgaagatgagcctagcgaacggggcccacatggaagggaattgacttatacgcagcagggcgactcgcgtggagacggttagctcagctcgatttgcgggcggaggtcgttggggagatctggcatcaccggcagaggacccaattcgtgcggcatggtgaggtgaggaggatgaagcacgagttggcgctaaggctgacaaattggacccacggggcagtgtgagacgcgagggtgtaaacgggccggc

SEQ ID NO: 36501 - DNA, 313 bp, Zea Mays
cccggaacagttgctcggaggtagtcggcgctttctgcagtatggcgcggacgaaggccgagtcattagatccccggtagaaatccacgatcactgccgcttctgcgacctcggggatacgatttctcatggtctgaaatattttgaggtatgaccggagagtctcatcccctcggcacttgatggatttgaggtccgatggttgcaccggtttgtcggagagagattggaagttggcggtgaagcgccgactgaaattgctccagtcgtcgatgcagtgtcggggtaggtgtcgcagccattgcagtgcatc

SEQ ID NO: 36502 - DNA, 460 bp, Zea Mays
tttaaagcccttttagaaatcatttggatcagggttggacagtgttcagccatagttttaccaagaagccaacgatcagaccaaaacttcacagattcaccactgcctaccacggagataacagccacatcaaagagtgcctttgcattacggtgcactcggatagggagtccaacccatggtcttgacgcatcagtcttctgtaaccaaagccacctgacacgtaaggcccatccaagcatctccaggttgagaatacctagaccaccatactggagaggccgttggacagtttcccaggacacaaggcagttacctccatttgcgtcaccttgccccttccaaagaaagcctcttctcctcttatcgattgccttaaaaacccatttagggagttccaacgcaagcataaggtagatagggacacaagacaacactgccttaactaggacaagacgac

SEQ ID NO: 36503 - DNA, 292 bp, Zea Mays
gtcgtacccgcctaagccacagccgcttaagataggctcaccggagttagccacctcgtgaccttgcgccacgtgcctgggtgctttaaccacgccgccgtgagtcaccttagcccatccggtgatcgccggtgagcttgccacggtaaatgccaccaattgcttgcgccagtgcacccccttctccccgaccgccaccgcgcgatctcgaattcacgggccgccgctcaagggccctataaattgagcacaccctcggctccgttatgtaattgtgcactcagcacaccca

SEQ ID NO: 36504 - DNA, 532 bp, Zea Mays
gaattgtgctgctctttcatttacctccatgaccccatgatctgttattcattttctaaatcggtactaagacttttatccaaggttgtctggatctcagattttattgttattatttcactagcaaacatacccatactttgcaacgggacattaagcttgttgtgtggttacttggatgacttgcggcttggggatttatttagctatatcacgtcatgcgtttcaattcgtccgggaatcgaactctgtactatgcttggacctgtgttgctctaactcatataggtacgatccgttttgtcataatggcattagactttgcaccatgcccaaacacttaactcaactatgttgctctaactcatataggtacgattcgttttggcataatggcattagactttgcaccatgcccaaacacttaactcatacgggtatgggagagagtagttgatcatggaaacattttgtattacaattcgttttagaattggaccccatattgtgcgtggacacactacgctaactt

SEQ ID NO: 36505 - DNA, 463 bp, Zea Mays
ccgtcaccgacgttctcgcgccggactccactcagtatcctcggtggcgcgaccaggtcctgcagaccctccgccgctacgccctcgccgaccacgtcctccccacggtcgctgcaccgacggaggattggctcctaatggacgaagtggtgctctcttggatccatggcaccctcacggccgaacttcaggacatcgttcgcgtgccggacgatactgctcaccgtatctggggtgcccttgaggctcagttcctcggcaaccgcaagactcggatcctgtacctagagaccgccttccgccagcttgttcagggcgatctctctgtggacgagtactgccgtcagatgaagacgatggcggacacactccgcacccttggggcccccatgaccgatgagagcctcgtgctcaacctccttcgtggtctgagtcctcgcttcgatcgcgtggcccccatcct

SEQ ID NO: 36506 - DNA, 405 bp, Zea Mays
gttgaagtaaaaaaatcattaccaagtggagttacaaggagacaaagagatcaccaaggatatgaaaggtaaaatgaccgctcatggatcattaagagacaagggtggtcaagggcatgtagattgaaatatcttaaatagacattggggtatgaaaataagcatccataaaaaatatgagaatatgcaagactccaaggacacgagcacaacaagaccaaggaaatgaaaattgccgaaagataacgacctaacaacagaataggaaagggtctcaaaagacacagagatcatggatatatacactgaaatgtttatatagacagtagaaattatgatgtaagcatttgaaacaagagtattgaagaatctaggggtacgagcatgtcaataccaaaggacttg

SEQ ID NO: 36507 - DNA, 472 bp, Zea Mays
gatccgatcttgtattgatccacttcgccgagcgtccctccccaggcccacgaagggatggccttgcgaaacatcgggcccagagccttttgtgaggtcttctaaccttctagtggacccgggggatatctgtcccccacacaaccaccacgaccacttatattaaccccaaaacttcacatctgtttccccgtctccgcctcaccccacatctcgcctaacaaccagataagataagtctctcttacataagcaaccattcttatctcttgcatgcacaagcaaccatgcaattaccacgagcgctcatattaaccccaaaacttctctcacactagattcttccgcaatatggacatcgagctaaccataatgctggcctccgactcaccagctgccatgccccacctgcggcgctgcctttacatttcctcgtaggcaagcgtctcaaaccactaccatgactctccac

SEQ ID NO: 36508 - DNA, 1771 bp, Zea Mays
tccggctggagttggcgcaagagtccaggactctcaccgcccagaagttcgaactaaagcgccgcttcaaaacccgtggcacgggtttggcagtcatcgagaaatcaagaatgtgacaaagatctaggttcacatagatccgctgtggagacgccaacaccaagctctttcatttgaaagcaaacactcgtcgaaggaaaaactacatccactgcttacagtctcaaggtggctttgttttctcccagcatgagaaagagaaggtgaccgacgattacttcagtgagcacttgggcacttcgatcactagaaccatggcaattgattggcaggcattgggatatgaaacgagggacctccaacaactagaattaccattcactcttgacaaaattcggcgtaccgtcttttccatgtcgtctgaaaacgcaccgggtcctgatggctacatgagtgccttttttaaaacatgttgggacatcatcggaaacgatctgacggtcgccctcaactgtctatactaactcaactcccaaggtttcgagctgttaaactcagctaatattgtcctactcccaaagaaagttgaggctatcaagatcacagattttaggccaacaaaccttattcacagtatagccaaaatcttcgccaagttgctggccaacagactagccccacacctaaatgctatggtttccaactgtcagagtgccttcatcaagaagagaaacatccatgataatttcctttatgtgcaatccaccattagggaaatgcacaggcataagacgcctactctcttcatgaagctcgacatccatacagcttttgacacaatcaattggagctacctcattgaagtccttcgcgctctaggttttggtcagcgctagcgcgaatgggtgtccatcctattccgcacggccacctctttcgtgctcattaacggccgaccaggtccaaagtttgtctaggacagggggtgcgccagggtgatcccctctcgcctatgcaattcatccttgttatggaccctcttcatcgcatacttgacctggcaaccgagcatggtattctttccccatccccggagatacggctagatggagaacctcgctatacgcagatgatgtggccatttttcttaacccggacatacaggacatgcaggcagtcgtggcgattctctaggcgtttgggcagttctccggcctccgcataaacctagaaaaaagctatgttcatccaattcgttgtgaggacgtttagctagatcttgtccttcagcccttcaatgggaccaaagaatccttcccctgccgctaccttggtctgcagcttcacacgaggcccttaaagaaggtgcatgttcagccactcatcgaacgtattgcacagagaatccctagttggaaagagaagtggctaaatagagccagtcatctcactcttgtctcatcagtcctctcttccataccaacctatcatctgacagtgtttcagctcgcggtctgggcttgtaagaaaatcaacagaatcagaagatccttcctttggaaaggggaagaaaacaccaacggaggccattgtttagtgatttgggcaacgtttacaagaccaaagaacttgggcgggttggggattcctgaccttgagaaatttggcagggctttacgccttcgagggttttggcaggaatgggtggatgataccaaaccttgggttggcttggatacaccgacggatgacactgatcgcgcacttttta

SEQ ID NO: 36509 - DNA, 299 bp, Zea Mays
cggacggcgtcgtgcagagctccgacgagcacgcgcatcggacaaattgctcaaagactggcgcccttctttggccgaacccaaattcaagatctagtgagcgtttcccctccactaattccaagaatggctactcggtttgctttggccacggtgaccgcgggcatcggggaagaacacgggcgttcacggcaacccagggtggtctagctccattaggtgggtcgtagagcttgaggagggtctagggacactagaacaagcaacagagacactggaactaacctgagttgggttgg

SEQ ID NO: 36510 - DNA, 312 bp, Zea Mays
tagaacccctttatactaggatcagactggtgagagacagttcttcggacctgaaattattcaagaagcagaagaacaggtttgaatgatcagggagaacttgaggacagcacagtcaaggtagaaaagctatgcagatacctgaaggagatagcttgagtttgaggaaggtggtcacgtgtacctaaaagtgtcaccaatatagggtatgaggagatttaaagttaaagggaagctatcccctcgctttattgaacccttcaaaatcctaaagcaagttgagagatggcctaccaacttgagttaccaaac

SEQ ID NO: 36511 - DNA, 396 bp, Zea Mays
cttttaccctactgtggatcgcttgtcaattgagtagaagttcggggtctcttaagtaaaattccccggctgaaagggtatcaacagatcctattcatccgatcctctacggacggtccagattaaaacccatccacgctgaaccggtatggagccccaaccgttggatcccttctagacgacccagatcaaatcatacaacttaatgtattggcacgcactcgaggccctcggatacgagatcgatggccgagggagttccacgccttcggccagacctagcccttagatcaacaacctacggcacaaattttatttcgcgaagcggtatgcggccctctaatctcagcaccagactcatctaccttttccccccttttcctcacttcatcctcg

SEQ ID NO: 36512 - DNA, 408 bp, Zea Mays
ggaagttcaaggtacaggttcatcagttgacaccaaatgcagtggtggcgcttgctaaagtatgtctgggccgtctcctcatacggctagtagccttttgtggaagtctttgcaaagaataattgtatgcactggcagaagaaaaaaataggtgataagatagctcaatttggatcatgcactttcacaccgaggactgggaagaccttggctgaagttgtcaagattgttccctgtgctaggaataagtggggcaattggtgggacttttggttttatgtagttctcggagatatcgaagggttgccgagtttgccccctgccatcctgtgttcacattgctatgtggcatttccacaatttgcggtggcagaagaagatgaagacgaaggggcccttcgatatgcg

SEQ ID NO: 36513 - DNA, 835 bp, Zea Mays
tagtggcatgaggagacctgccgggtgaagatgctctgacttgtaccgctgacaagtgggacatgcccgtacgaagtcctgcaccacactccacatgttgggaaaattgaagtcacgacggaggcggtgtagtgtgcgctggacgccctcatgtccatcattatggacagccgccacaatctcctgcagaagtggcgaggccggtgggatgtacaggcgcctgtcgtagagaaccatgtcgtcggccaccgcccatggatcagtgcgtgtgcctgtcctgactttgtcgtggatggcagccagagcgggctcagtagcctgggcgtgtcggaggcggctgatgaagtcgaagcggggagctgagatttcctggagaatccccgtgccgtcctcatcggtgtcgcggcgtgagaacgcgtcggccaccgtgttcgttgctcttgacttgtactcaacagagaagtcgaacccgacgagcttgcccacccaatgatgctgcggaatggtcgccaggcgctgatcgaggaggtacttgaggctgtagtggtctgtcttgacgacgaagcgtcgcccccacaggtacggcctccaatgtcgtacggtaagcacaagcccgatgagttcgtgctcataggctgctagggagcgatgacagggcgccaccggtcggctgaagaaggcgatcgaatgagcctcctgtatgagcaccgccccgaagccataggtggacgcgtcgcactccacgacgaagggcttggtgaagtccggtaatgtcaacaccggtgctgtcatcactgcccttttgagggcactgaaagcggcggttgcctcgtcg

SEQ ID NO: 36514 - DNA, 307 bp, Zea Mays
tgaaagtgcatccatctcttttgtgggttttgatgatttggattacaacacacttaaaggactaatcagtttgctaagtgttgaacaggaaagttgaaaaagaaatcatgattcaaaatagtcaagagacatggtttgatatgaaaaagtctcatatacatggattgctcataatataacattataaaggatcaacattaagcaatgatgaggacatcccataagtaagcacatttggatatatggatatggggtattctatgaaacctgggttgcacccacacaatgtctcgcatgcatgtttttc

SEQ ID NO: 36515 - DNA, 418 bp, Zea Mays
acaggtccaatcagggacctgagaagcgaaccaggttggtaatccgaccatttaatcagaatcgttcttcgcctcgtccaccctcctatccgttcaaacaagctgttttcattcgtcctaccactgccccgcttctacaaatcagccgagtgcccctggtgctcgtttccccgccctccctagttcttcaactggctgctttaactgtggaaagtctggtcattttatcaaagactgtccatatccagagcataataagttcaataatcagcagaactctgggagctcaaatcaaggcaaagggaatatggctaataattcagcaggcaaaaatgttaagaagactgggcgaatttattacaatcaagtggccactacaccggaaggagagccggtaattatgcgtacgttccttgtg

SEQ ID NO: 36516 - DNA, 346 bp, Zea Mays
aagatattaaagaagttattatgcgccccatttggtcccgcttcggccttcgaaggccaaaggttgagattgacgaagccgccgaagcatgtcaaaaggctttcggtactgtctgcttttttattggtacaagagatttaatccaggagcatatagccttcagagtatggccacttgtagagaactgggaaatgccgaaggagactatcaccaagtctggcgaaggtgagctggatcgactgaaatgcacctttagatacggagataaatttgattaaccgaatgatgactggctgaaatgtatcaaagctacaagtgatgaactgcttgggccgtattccaaagc

SEQ ID NO: 36517 - DNA, 407 bp, Zea Mays
gcagcattccacatcaaagttgccaagcgatgacaatacacaggtcaaagtaagccccaaagtcctcgccttcatttacaagcacattattaggggttacaaaggttcctctttcgaaataagaccaacttcccaatagttatagaatatgagcttaagttgttcgccctcgaagagcgccctaagctctagttccctgatacggtaaggactaaggacccaaccaggcgtctttgtcatataattcaacaagattcctcttctaacttcaccctctcccctttgcaatggcctatgggcatcatacccaacatctcgcggagcgaaacccgagaaccaggcctgcctagtcccatgcgccgccatttatgaccaccttcgcaaatgacgcatcgacattacccaac

SEQ ID NO: 36518 - DNA, 361 bp, Zea Mays
gccaaacttgctccaattgaacccaaatttttcaggcactttcacaacacttccagcaacatccctgccaaatttcacaccaatccgagatcccaggcttaaatttcaccaaaattcccgttttgcgcaatcgtttccgagccgagtgcccaaaaccctatttcttcgcctaaattcaaaccaagcactcacttcactaatattcacctatataaacctattcgtgaagtctcggctcaatcccatatcgtttcgtgcctcaattcgaattccaatcatcctatgtcactatttgtctgtcaaacgtcgttttcacgtcgtttgacttcttgatcgtcccgtcccgtgccatatctctctg

SEQ ID NO: 36519 - DNA, 277 bp, Zea Mays
tctttgctctgtgtggctatgtcgaattggggagggatcactagagcaggtggattgggatcgcctgggagggcgccactgtcgaagcaagcgccaccgtggtcagctcagtagaggaagaagagccgataaccgttggatgggaaaaggacgtctaggattagatctggtatgtgttggtcctcgaccgtcgatcttacagcgaacgactgcgattggaaccagccattccagcgctgatgtgggtcggtagccgttgatctcgcgatccatggct

SEQ ID NO: 36520 - DNA, 439 bp, Zea Mays
gccatgcatgcatcatacaatagaccaataattattacaaaccgatgttcgttacataaatagaaggtactgccaggctaagaaaccttctccccctttttggcaacaagaaccaaaaagagagagagccgccaatccaaagatcaccagttaggaggaggctgataaggagcaaagaagtggtgcgccaggtgagaggcaaagtgttcttccccagactgatccgagggaggagcactgccagaaggatcctgggcggagggtgagaggatgattgacccggatccccgtgatagggaggcggggcaaactgctcgcgatcatcaaaataggcttcttcttcttcgtcgtctgctgacataaatggcaccccgtaggcctgctggtgccactcgttgatctccgggggaggaggatggagaggcacgtcaggcgagcg

SEQ ID NO: 36521 - DNA, 383 bp, Zea Mays
gataaagtgaagcatcacattgccatacaacaaaaatcatgacaacaccgatggatactatccactaaccgtttgaaaaacttaacttactcctcgcttgccactacatcgctcctcaatcacacgaccatcatgcgcatacttcacacgactatataatagcaacctaagcgttgtgttacacaagacatacatcttccttcgttgcgagtataaccatattacggcatatacccacacacctcaatcaattatcttatgccaccactattataatacaccacggcacacacgcatacgtgtccccactgcattctcatgaccaattttagcacaattatttatgacaatgtttattgactacacaagtgaaacactaatcg

SEQ ID NO: 36522 - DNA, 456 bp, Zea Mays
ggacgatgtcatcaacatagagcagcaaataggcagtgtcagatccacgccgaaagacaaagagtgatgcgttagacttggcctcaacaaatccaagggagagcaagtatgtggcgaaccgactgaaccatgcgcgatgagcctgcttcaatccgtagaggacttgttcagacgacaaacgaggtcggcgtgtgcagggtcttcaaatccagacggatgaatgcagtacaccgtctcagatagagttccatgcagaaaggcattcttcacatcaagctggtgtacaagtcatttccgggatagagccagggagagaactgtgcgaaacgtagctgactttaccactggaccgaatgtctcagaaaaatccacacctgggtgttgggtgaatcctcgaagaacccaacgtgccttctaccgctctagtgtcccgtcgacattgaacttgtgtttgaa

SEQ ID NO: 36523 - DNA, 513 bp, Zea Mays
acagacaatgagacaaaggtgactgagcagctcttacgtgccaggcgcccaggcccaaatgtgccgacctcctgtcggtgacccagtggcttgctttctcgttggtgggtccctggtggccttctgctggggtggcactgcctgcccatgcgcccagcaggtagtgtggcctgcagagcaagtcacactgcctccgttgtcttcctccctccctgtcatgcagcaggtcctatggtccacagagcaattgtctgattggtttgtcggtgacgatggctacaagctcttgcagtatgtacactgttcaatcaggcatgagacggagaggcgttgataacaagcaatgccttgttggaattagccttgtggtattttcatcatggataactgcagtggatggaaaaagctaggtgcgctagaaatctgaacattggaaacttttgggtgctattaaagtgtaccaaaaccttttggtgctattttgctgaagtcaggaactttgggtactataga

SEQ ID NO: 36524 - DNA, 449 bp, Zea Mays
cgctacaggtggacctccgggctccggcgtggacatgtgtggtgtgtcggcgaatcgatagtggtcctcctcctcggcttctcggcacggcagatcggcggctaggcgagggtgacttcatgctccgtacgaggtatgacggctgtgagcctctagccgcccgacgtgggcgtgagtagtgagcctccggcgtgggagaacaatggctcctgactggtcgctggttaaccacagctttggaagcttggatggtggctggtggttgcagggaattttggagtctgggagtggcgctggcgagtggcgattaggttgccactactgcgctgcactacagggagaaagaccaaacaacactagtgggcttcggtcaactcgggttgggtgttgtcctagccggttaggggtgccaaattattttcatcgggtgcccgtgggtcacccacgag

SEQ ID NO: 36525 - DNA, 383 bp, Zea Mays
ggtggatggaggccgcgacatgtggaacgtggcgcggttagagtaagaggcgggaggaggtggaggatgccggatgcggacagttctgccaaagtggccttaggcgagtcgtgactgcgcctgctacccgggcttggcctcggatgagtcgtgactgcgtctgctacccgggcttggccttggatgagttgtgactgcctgtcccgcttgggcttggcctcagacgagtcgttattatgtctcccgctcgagggtgtcctcgggcgagtcgtggttgtgtctcccgtcgggcttggccttgggtgattcttgacagcctctctcgctcgagagtggtctcgagcgaatcatgactatgtatcccaccgtaccggaggatggcc

SEQ ID NO: 36526 - DNA, 698 bp, Zea Mays
taggaattcatcatagtccgtacctcttaccttttacaccagccgatagtctccctgccaagggattcgattctcccaagtacttcatgatgttggtggggatgctgtatcgctgtggtactagttcctggaggatgtggatattaaaggcccaaggcctcagtgggtgggctcagacttcggtcctcatcggggttgaagcgtcctccacagcgctagttgtaccgatgttggttgcctggaccctttcacacttcctcgttgtgccctcggccaggcatgcttcacgcgcgtctgcctgaccttgggtgcagatggagtgggactcgtgttgtgtcttcctcgagctcggacgactatccaaatatggtgttgtttcctattagcgtggatgtggtacattagttagcctccagctcccggtgtcgtgaaatggaactattggcatgctggtacttggcgaggtcaaggaggccttagattttttggtgagtccttcgttcgctcggagattctgccttggggagtttgtccatgagcgtcacgatggttgtgatgttctggctcacctaggggaaccatagcgggctggcccctttgcaggccagacggtggtggacgctagttgtcgtggcgtgagtccgccaagtgtcccagtgtaaccgccccgtctaccatcgcggcaacccccgtctccc

SEQ ID NO: 36527 - DNA, 342 bp, Zea Mays
catgagaagcttgcttggggttttatttaaattattttggccaagcttcctcaatctttattgttgcttattaaatatacttcaatgtttataattggcccaagccatgattctaaatttttcatactcttttcccccattttcttgaattttgttcatagggctcaattagggtttttgttggggttgcacattttccctttttgaaaaaacccatttgttttgaacatgatacttttaagtataagcttaatgggttctttattcttaaatcaacttgatgatcatgctcaattttgctcacataaaatgatggttcttgggttagcacttgagagaaac

SEQ ID NO: 36528 - DNA, 578 bp, Zea Mays
cctccattaagttgtaccaatggataaagttgcatctcatagacaatgaaaagtcaaaaactttattaagtagaaaagaaaggaagtggttttttagaacaaaagcaggagatgtgtgagtcattaagaaaaaaagataaaagactaccgaaaggtgagccccggtacaatggttggctatgacctgaacgcctatatgatgtcctcaaggccaccaaaacaacagaccccacacccaaccactaacaccacaaccaatttccaaggttgaactgacgtgccaggagctcttagagggcactggcaccttccctacaccaaatggcaccttcataagcagcttcgtgaataacagcagaaacagaaggccttttcccctcgagagatagtcatttaggtcaaacacttaaactaatgaaaaaggttaaatgtcaacattgcctgagattttacctccaacaaatttctagttagtttttatattaaaaaaatattgagattaatctcatggtgtttcttgtttgattttctaatagaacatgccagccttgtaatgtgaaaacaggtggcattgtaat

SEQ ID NO: 36529 - DNA, 398 bp, Zea Mays
gccatagtgcctgaatttggcggtgagacttcttcagctattgaagccaaaggacctgctcttacgcagaggattgaagagccgactgcaatgacgaagactgacaaaattgaagaaccaagaatcgaagagacgaaaacactagaagttctaagcccttcggcaggagtggaggtgccgaagacacaaaaaggtctagcagcgaccccaagagaaaaaggatggctagtgtactagatgtgctggagacaataaaagcttcaatctctactccagggaaaattgccaaggcttcgaaggcgcagactgaaaccgaggcaaaggtgaccgaagccgaagctacaatgagccaggccgatgccgaagctgggccttcagagcccgtcaaggagaaatcc

SEQ ID NO: 36530 - DNA, 585 bp, Zea Mays
caaaccagatgacaggtagttgtggcaattgtctcacgaacggtttcacgtcgtgcaacattatttagaccccggacgttccaacagagaatttctaagttgacccctgccattagaaaaagaaggaatcccacctgacaacaaaacagcagttgtatgaagaaggaaatgccttcacattacccttaatttggggtcttagcaacacacgacaggaattcagcaaagcaacaacagcgaacattccccagactgtagcaaacgcagcaaaataacagtaggcgtatgaagaaggaagtgcgttcacattacccataaattggagtcttagcagtacacaaaagtaactaggaaggacacacaacccatcagcatcacaccatccacaatctgtagcaaacgcagacagacagcagctacaggaagaagggagtgacatatagcacccataattcagagtctaagccatacataacaggaattaagaaggccgctattggtgacatggactgagttgcggagcgcagcccacagttctacaataggcaacttaaacatagttgcaatagaggagacacaataaag

SEQ ID NO: 36531 - DNA, 318 bp, Zea Mays
tctctattgaaccctccgatcaaatctaacagccctgatttaacgtaccgaagtggtacgccacacctaatcctagtcgttcctgcccaaatcgacggtgcacgcagatctacccgacccgagtcctcgccggcgacgagaacaacccgcacggcggcgcgccatggccggaattctcactttaacccacggtgcactattgctaggtatactaggtgcgaaatgaaattgggaaggaggcaaacatggggagcgggtccttacactaactccggcgttggctcggtcagtccacggcgagctgcggatgcgtgacag

SEQ ID NO: 36532 - DNA, 313 bp, Zea Mays
gtcgtcctaatcacctctgtttatgtgttcacagtgagagcacacgcgtagattcactactgttcattcaagtaacctcagatcgactaagtgtgacccagcaaagatcccatagaaccagtggcggagttagaatctctttaagtatagggccgaatataacactgaaaacgatgtatagacctttagacaccaaaaactagctctttggacaacagtcacagctaaccatacttgccagtatatggacctttagagactatttggtccaaaagtaagacacaggccctactagccataggcctatctccgc

SEQ ID NO: 36533 - DNA, 281 bp, Zea Mays
caaaaacaccccagcgctttcatctctttacaacccgcggtccacgacgccgcacggcggagaaccgagctccagcaagcttataccggccggatcactcaatgaccggtgctctacttcggctgagacctaattcaagccctaacaagagtttcccctcaattaatttcactagcggagctctaactcgctctgtccacggtgacagcgggcacaacggacagcacgacgtgttcccggcgatctaaggggtcctaacctaattggcagggtcggggagc

SEQ ID NO: 36534 - DNA, 727 bp, Zea Mays
gcttcctcgccttctgctatgtcgagactctcctggagagatgccttctcttgcttaagctctttgacctgctgctctaggctttccacttgggagtttaggtgggtgcagtgggaggagagctcatcgtagtggttgtctaaggtgtggaggtatccggccatgtagacgatggtggggtcatcttctgtggggtctcctcctgacagagcctggaatcttttcctccaggtgggggtatttttgttgctgggtggaaaatatcgaaggggggtctcagagatctctcggctgtagttttggcacaactgtttaagggcttttcgggcaacaccctggcaagtgtctggaaagcggtgcccgatgaaggtgatttggaagagagggtggtttgggtagtttcggctttctcccaggtagactgccatagagcacttttctattccattttcgcggtattccttccagacatattcgggcttcttgcggatccccatgcgtagcgcgcaacttcgaagaaggtgaggaaagccttcctcctctgagcaataggatgtcctaataacccaggggccttccatctggtagaagaaaagaagggtctgttaatatcggggaaagggagaagagtgtttcttgggggtaagaggtgttttcttgttaaggcaacttttaaggtcagggctgtggtctacagccagtcctataggctttgataccacctgaa

SEQ ID NO: 36535 - DNA, 496 bp, Zea Mays
ccgcgatctccatcctctccatagcagactgcatcgagtccatacaacgatgaatctctcgatttccttcctcaattttcgccatcagctgcgccatcggatcttcgaggatcggccacgccatggttccaattctcgcctgaaattgattcgcgacagtgtggaagaactagctccgaataccaaatgttaggatccaggcactctcgactcaattttactccggaacgatcaccacggatcaccggccgccaacaaacttacagttcagacttgtgttctgtctattcctctcagttcgccgccaccttctcctagtgtaagccaatacttcttattacagtctgttacaaggccacttgggccaaataaacttagccactcacagctcgggccatatcgctctcttactccttctgagcccgtcgaggcctgcttctggcttcacatccttctcctttcccgcactggtattcttcgcttcttccgcgtcctg

SEQ ID NO: 36536 - DNA, 489 bp, Zea Mays
aacagccaagcctaatatgcaagcctaacaatagaagtttggaaacagcaaaagatatcctaatacagaaacatacttcctgactcatttaggctaaatcaagatggaaatcccttggtgatagaactactatcagtttgagtcactactaaacataaagatgtagtcccttggcatctggctgtcaccagtttaaggtgccatggggtcccgccactgagcttaccaccaactacaacatcaccatgacatgaaatctatcgtatttagaaacagtgctggtgatagttcaatccaagggaaaatgtatttgtaacagtggctgacccacatcacggtgcatacatggataacttgacgatttggacaaatgacaaatggatccttgcaggatattcgagatagataatcccagcctatggtgtatggcagtgccgaaggccttagcgacatgtgatcaaaataatcttgttgcttgtgttcattcac

SEQ ID NO: 36537 - DNA, 1242 bp, Zea Mays
cagcattgttggagcacccatttgtcaaagatgattcaatgggatcggcagctgtaagtatctttagttacatgcttaagtaatttatggaatcctagtctttgaagatatcagtgccttgaataccacataaattactcaggagtctcgacccgcgccttttgaagctagagggtctgaagatactcagaaagcagaagaaacacaatcaaggaaccaaccttccccagccggcccccaaagtaggcaatttaaatagtaaacttatatccttttccttaaggattttcccacaagttctgtatcttgaactgatttcaacgtttgttaggtaggattactgctaccaatagggaaaatgcttctgataaaccaaaaggaaacagaaaactggatgaccctatgcaagcaactcaggaccgccatggttcacctactggtgctgttgctgaaagctgctctccctcaggcaagttgatatccaaattctgacttctggtagtatttttggtcagtagtgttgatcagaatagtcttgtttcttcctgggaagcatgcagttacatgaactttctaaatatttcattgcagagtgtacggctttggataaactggaaaaagcctcacaaacagtagaaggtgcaagcagcattgttcaagatattgaagcactgtcaaccattctcacccctatcaaaatttggcttactaatactccaagttcaaccaggtaaattcgttgcttttccaatccttgcgaactattcagatcttggtttataagtttttttcctggtagaaaccaggacaaaatggttattccagagtaacgtggttgcaacggatggtgcttagcctttagtgtattgttaagggtatagtagtcatgggtacctagagtaattctagtctttcccttgtatcactatcatagtatcatgtatgcattctactaattttacatcagttcagtagttatttcttatccaaaatgcatttgagctgtataaaggtgtgacaacagatataatatttgaatgggaacatctgaacattgctccacccaactgtataacatccactgagcagaagtttttcttctggtttcatcatgcatagtctctaacctcaacttatgactgcttcaatttttacagggaactcaacattgatggagcaaatcagtcgctcagaattattaaaaatttgattgatgctggttcatgccaatcttatgctgca

SEQ ID NO: 36538 - DNA, 413 bp, Zea Mays
tcagcagcaccttgcctgattcatcaactacaacacagattcctgtccaggtgctcgacaccagaaccatctcccgtggcggtacatccattccccaggtgcgggtgcgctggtccggttgcgacgacgcgctagcgacatgggaagacctcgacaccattcgccaacagtatcccgatccacagcagcatcgcaagagggagggaatgtcagcaatgctctatcgctgggtcacaacacaaccattgacacgggtccggtgccttctccgcgtttggtgggccgtagagtaaaaaagccgaatgcgctcggtagtctagtccggagtggatagtgtaaacggatgagtattaaccttacgtaggaagtctgtaaggtgagggaaaaaacaaatgctaaactccagttaaaac

SEQ ID NO: 36539 - DNA, 329 bp, Zea Mays
taataactttgtttttgtaaggtacttttgagtactacttaccgagcactattagcacttatctgcgtactatttgcccctgttgtgtgtggcgttgccgactcttccctggtacctggcccccctgggatgtaggctcgacgtgtcgaggctggataccagcatacctaaaaagagttggcaacaggccctaggaggcagcctcgactgggacctggacctaaacacaacttcagctagggagcgttagtagcacacccataggacccatcgcctgatactagccatcctttgatacaggcacgggacctgcaggatttagtctggga

SEQ ID NO: 36540 - DNA, 278 bp, Zea Mays
gggcgttacatgtggtgctaggtttcttggcgccatgccatcaagccaactgtcgtgccagaatttggctgtcttgccatctccaacggtgacgatggtggaggcgctaaagaggagcctgtccgcaaggttacaaggcacatcaaaccctttccaagggtggtcctctgtcgtccagctcttccaaatccatcttagccggagggcacaactgaatttgtcgaggttgaggatgcccagaccgcctagggttttgggcttgctgactagtggccaga

SEQ ID NO: 36541 - DNA, 478 bp, Zea Mays
ggaaggtggggctggacactgcgttgagcaggccgtctgctgtgttgcgacgagacagggcgtctgcaactgtgtttcactggcctgccctgtattccactgtgcaatcaaatcctaacagtttgctgacccactgatgttgaggtactgtggacagtcgttgatcaagcatgaacttcagactatagtggtctgtgcgcaccacgaaccgtcgaccccagaggtaaggtcgccaatgacgaacggcctgaaccaagccaatgagctcgcgttcatatgcggtgagcttgatatgccatgctgcaaacgacctactgaagaaagccaccggacctgctccttgatgcaaaaccgccccaaagcctgatcctgaagcatcacaatcaaccatgaacagttgttcaaaatttggtaattgcagaactggtgctgtggacagagcttgtttgagttcctgaaatgctgtattagctgcagc

SEQ ID NO: 36542 - DNA, 515 bp, Zea Mays
gtagaaggttgggggacaggtggaagaggacaagcaggaaggcgacctaaggtgggcaccactttgtggtcacgacgagctaatcgaaggtaacgaccagctattccgaaaatgaatcttctaaggcttttacatgtgtttgtgattcgtttcaaacggtgggcgaatcacgcgtgtttgattccggttgacttcgattgctaggctgcttgctttcgcctcactccttgcagtagtgggtgctacttgcatctttgtttctgtctccttcctcaccgcagagcaacaacaacagttgcaggggcacgtgtagaaggttgggggacatgtggaagaggacaagcaggaaggcgacctaaggtgggcactgaaggccgaggatggacatgaaattgcaacttgttgtcgcaaaggtattagaacccaatgcatttctttgtatcccgtatttagcttcctcttatctttgttcgaaattgcaacttggtgtttggtcattcgattttagggatggg

SEQ ID NO: 36543 - DNA, 916 bp, Zea Mays
attcttggggctgctgatttgagggaacacttgaagtctgataaatctcctccaaaagaatctgagtctggtggtggtggtatccatgggccatgtgctgaatttggacatcagcgcaatgccttggaccaaggaactaaagttggtgatggtgaaaatgttaacccagaaaacctctctctgtactacaaggatccaaaagggtgcatccaaggtccttttcctggatatgacatcattggttggtttgaagctggatattttggtattgatttgctagttcgtgttgccagtgctccctgtgattctcctttcttattacttggggatgtcatgccacacttacgggcaaaggtaagggtgcctccaggcttcagcaataccaaaccaagaagtatgacagatgcctcacatctaggatcagtgtatcttggaacatctgattatggatccataaacaagaatggctgtgtaactgaagcagaaaattactttttggaggctccagtgtctagtaaaatccagaatcctagagcagcaactaatgttgttactggaggtttgtttctcatcaatggcgttctttatgcccatttcttgacattttctcatgttgtgccagtcatgatgtgattgctattttattttaatttcaggtatgaatgaatggaggtttgtttccggtgagaaagtgaatagtataaaccatcttgaagtacagaaggtgcagttagagacagaaaatacctttcaaatagaaggtgatgtcatatcagttggagagtcacaaaagaaagaatcagtacagtcaacttcacactcaacattcttcccgcaaatggttgacccatcgagtgaagccctccaacctcagaatattaacctgctctcaatgctgcttcctgcagaaaaagga

SEQ ID NO: 36544 - DNA, 308 bp, Zea Mays
atatccaatttggatggaaggacaaaagataacctacaagctcgtctagatcttgtcgagatgaacattagaccggacctccatccataagaaaaatcttcaggaaagttttacttgccaccagctttatttgctatgtctaaaagtgagagacgagcattttgtgattttcttagaaaggttaaagttcatgatggttattgtagaaacatatcaaaatgtgttaatgttactgaaggaaagattgttggccttaaaacacatgactgtcatgtcctgatgcagcagctcatgcctattggtttgag

SEQ ID NO: 36545 - DNA, 625 bp, Zea Mays
cgaaaagaggaagccccaccaacactgcctccctccagggtagaaaacttgtcagacgttgaggagatgtccctagctagccttgacgatcttcttagggaatttggggacaccttagaaagggagtttggaagcaccatagaaaacgcccgtgcgtagcgcgatctgtgacaattgcatgcttgtaatgaacttgagtgatgaataaaataatgtgtttgaaaaaagtatggcatatgcatagtagtaatcctttctccccctggtagatggcttcggatataaccacgcctaccgcctcagggattggagcaaggtctcccctaggtgctgaagaagaagtcggtggagaagggagtgaaacccacctccccgcacctccagagctgccattagatttagcccaagttctagccaaccaaacctgactcattgaggtcctcacaagaagccttgagaaccagcgcccgaatggtggaagacctcaggacaaaatgggagattttctaaggctcaagcctcccacattcgccggatctagcaacccactcgacgctgatgactggctgcgcacaataaaaaggaagttagaggccatcggatgccctaaaaaccaacgtgttca

SEQ ID NO: 36546 - DNA, 377 bp, Zea Mays
tctcaggagggttttcgggcccctctgaagagagggtcgccttcccctacctagtcgatgcaagggaaggggtcgttgagctacggacgggttgtccaagtgagatccgaccgctccttcacagggcttggtcttggcgagcggttccactaagggactcgacccactgggggcatctcatttagtccttccttattctatcacgtattgtccctttggtcagtctggccgatcgggggggcatggccaccctgtcaaccagttgccatagaagaatgtgaggtacgaccttggaagtgggaccgagcaaatgacctatgggccagtcatctggcttgcgactcgttgggagcttgtccggtcgacccctcgctctg

SEQ ID NO: 36547 - DNA, 654 bp, Zea Mays
ctcgtggacagttcagtgcgaaatcatccagcaaaccttgctggggggtcaggcccaggacgaggacccagttccggtggccccggaggatggtcagtagcttcccctcgagttctttggtctgagtcaacctgtgcctgctgcggggtgggacctcaatttgccacctgaagacaatgcctaggccgagccagctgataatattcagggggacggggaccaatggattgtgaatgcatcgcctgtccagcagccccaacaagacctgccacctgacgagcaacaagtcagcaaccctcattttgacttgtcctcgaatagttcttctggtcccactctgggtgttccggtgcagaatggacagattcagaatgggcagattcctgctgacctggatgttgttgggacagtgcttccctttaatgcccctgcccttcctgttgtggatggtgttcccttgaatgaccttcaggagattgacgggccccctatccagggaggtccccatgtgccaggggatattattttacctcatgcccagccaggggtcctaacatcaatgaccccaacattgtggagttgaattatatgtttgcccaggattggaggccagaccctgttcttctgagtcacctggaaaggaaaaggaatgcc

SEQ ID NO: 36548 - DNA, 295 bp, Zea Mays
cgccgattgggcgcaaatcttcacgaatttgggcaagatcgctgtgaaggatttgttcccctgactatgctttgtcgtttgtgtgtggatgttgcactgttttaggctagggatagggagttgtaacgtccccaagttgccagtttgagacatccgagtcccgagaacaaactgcgccaaaatcatgtcaaacagttttggtttgagttcaagctttaccagagcatgttcaaggaaatttggcgccacttttatatttggacttaatggattcgagttttggaaaacagggaac

SEQ ID NO: 36549 - DNA, 531 bp, Zea Mays
acggtgacttcagagtggtcgaatgccgaagaccgttgatgcggtctttttcgacatgttgcatcttagtttttgcgggggatttttgcagatatattacatggctccgcccgttaaaaacctcacccccaggaggaaaagagtgcgggcctgaataatgttgtttggtgaattacaagggcgcgtaggccctgaggacttagacaaaaaatttgcgtagattgtcaatattccaggaatggtctaggtcttcgccggatggcgttgttagcctgtatgtgctaggggacgccttcgacttgacgatgaacggaccttcccactttggctccagcttgccccgtgactctgtccgggtggttcggacgagtatgaggtctccttcgttaaattctcttgggacgactgcctggtcgcgccaggcctttgtttgagcttggtatttgttgagggcctgcagggcgaagacgcggtctccgtcgatgaggtctttggacgttggttcatcgacgtcggggacgactgatgcac

SEQ ID NO: 36550 - DNA, 286 bp, Zea Mays
tacatggagtgcctaagaagatcgtgtctgatcgaggatcacagtttacttctcggttttggaagaagttgcatgagatcttggatacaaagttgaattttagttcagcctaccatcctcagactgatgggcagacaaagaggactaatcaagtgctggaggatatgttaagagcttgtgctcttaaacatggtggaagttgggataagagcttaccatatgcagagttctcttataataatagctgccaggccagtttgaagatgtcaccttttgggactttata

SEQ ID NO: 36551 - DNA, 598 bp, Zea Mays
gtggttagccagggaatccaagtttaaggaagatgataaaagtttgagaaaatatcaatgtagtgatcctcaaggagaggcaaattggaacaggaataccagcttgcaccaaccgaacaagggtatggtttaggatgaacatttgaccataagagagctacaagtggattgtcaagattacagactcgagatccttgtttttaagtttgagtgcatctccaacaaggggattactgaaacatctatttgcacgagtttggccatggagttggaagatttagagaggctttgaagaaatgacaaaattatgaattagatctcatacaatttcaaatgttgagatgatgaggacatgacttggtctaattgctagaactccaataatcttgtgaagaaaatgatcttcacacaagacgacatctaggataggttgtcaagaaaattaatataaagttagattaaggttcactaaacagggacatgacctagctttgggtttatgcaaacaaactacctgcattctaccagcacacaagcacgaaaacaaacccaagttgcactagcggtcaaactaagaagaatcacatgccacataaac

SEQ ID NO: 36552 - DNA, 276 bp, Zea Mays
ggaccgggacgtcgtgtcaatgaggacctaagcacttttctgcgcattgaatttgctagtcacgcatgcccgggctaatccggttagctatataaaaaggttgtctaaaaagactaggtactgctgtgccctcaacttggatcggatccacctgtgaaagagaggttggagcaattctgaacggcacgtcttttcctacgcgaaattaagacactataacctggccaggtcctaagcactgcaccaggttgggccggccgagagggtccattctgt

SEQ ID NO: 36553 - DNA, 304 bp, Zea Mays
gtagtgtactagtgggaccagtttctctactgtactgtacaattgtacgtatgtgcggatctccttcggtttgatgacagatcatcgcaaccagttttgtttcaggaatcggcggggtggaccccatcggcagtgagaaggaagattgggatcgtcaggtgtggctgtatggttcagatgttgatatgggcggaatctacggtattgcctatgacatgacgtgcatcagtgcccacgtcatatgtctcgtggtcaccgtctctacccgttcgggtactcctctgttcctcacgccttgtttcgg

SEQ ID NO: 36554 - DNA, 539 bp, Zea Mays
gattatttgaatgagccgaggtagagaaggggaaatctatctcatcgaagacaacatggcttgaggcaataatgcggttggaagagagttaaagacaccgatatgccttatggttagaagagtatccgatgaagacaccgagtggaacgccacatgaaggttgggatagcaggcgcagccgaaaacttggaggtgtttgtagaaagggggagtaccgattagggcaaaacgggggcaggaggcactgatggtctttgtggggagatgattcatcaagcatgtcgtggtgtggaggccttctacccagtagcgtgttggagtagaagtttggaaaagcagagagtgaacaacattattagtagaacgaataatatgcttagctttaccattcttctgaggtgtaggggcgcaacatgtggaacaaagtggcatggggaaggagaaaggaccgagtggaagcaatatcaaacttgtgcctgttgttgcactgaatggcctggatggaggaacgaattgagtggatacatatgagaaaaaat

SEQ ID NO: 36555 - DNA, 458 bp, Zea Mays
ggcgtgtgggttcagtgattcagggtttaagtggggtaactgaagaagattaccttgtcactgctggtttccctaataggtgtgagttgatggtatggaggtggtgcatagccaaggggctagagatctcagctctgctggaagtatccaagttgggattgttttggtgagctgtaagtagtgaagccctatttgctggctttggctggagtgaactgcacaacaaaggttgtagtggcttcaccccctgtaaaatatcagacctgggacttcccttgtacttagccacaagtggtgtttccagctacccttctcttatctgctccttctattgcctttgttcctggataaaagagacatttgggtactatgctgtgaaccagtcttggttcattgtcctggctgagtttatggactgatgaggtgtatgtgcttgttttccacgtgttggagtcatg

SEQ ID NO: 36556 - DNA, 795 bp, Zea Mays
cgcatcacggtgagggagaaggaatcgccgccgcaagaccccagacatcgctaccgtcgctcgagcctcaccacacgatccggtcgtgacagtgtagagtcattcggtcccgtgcgtggttcgcccgaactggaagtaggccccgggggaacgagaatccttcaccggagtggggcttcggcgccgtgccgcggtggagcgaggacgctcttcctggcgccatcctgatctctggtaagtaccctggtctgtctggtacatccgtaggatcgtgtgacaccggccgggtagcagttggttcaacggtttgccagtgattgctaaccggacctcgtccgcgccgcggggccagcatgggaggtagattgacgccggcccattgtgatttagcgcgtgaagtggtcgcccaacttgggtgcaatcgtagcttcgtctagaccatgtccaatcggagtttgggagctcggtgtgtggaacgggtcttccccggcgaggccaccaccgcccagacgctcgctggtgttgggagttggcctggagtatggtgacgaccgcgccccgtcggatcctggatggagggcctagattagaagcagagtaaccgattggccaggggttgcgctggcggttggatcgtgatctggcggctggggttgtatcggccgtagattgaaaatccaaaggctagaacggtttaatgcaagggagagattttggaccgtggatcttggatcctgtggtgcctgccgtgtatcgcttcacgatctattctgagcctttggatcgggatcggat

SEQ ID NO: 36557 - DNA, 449 bp, Zea Mays
gtgggatcgtttcccaggcttagcacgcgatgtttttggacagacagggaaatagaaaaatatatgcgtcttcttcttcctctcgcttctgggaatgatgcctttcaggcttccatggagaggaggtcgcgcgactgtgatggcgatgacattgtacttcacccatcttcccacgctcgaaaagataacagtctctttcgttccgtgacttccaatcgtgttccatagcactctcaaagcacgccaccttgaatctcatcctctcaatcatcggcactaattcccaccaagatacatgccatcaagagcctcctctccctcctccctccacccctccccgtcaaacgccgccgcgccacaaagagcacccccacctctcgatcgactgcttcctcaaacgctgttgcgtttctcgcgcggaatgccccatctagtagtctgcccacgac

SEQ ID NO: 36558 - DNA, 344 bp, Zea Mays
ctgccatctaaacccagccacctggagtttggaaggtccactattaccaaagatgttatgcctaagttgatgaagttaggctatttcagtgaagccaaaaagaagttgattcgctttggcggagaggaaattactccgaagccagaaaaggatgaggtggtattctttaaaagcttctttaaagaaggattaagatttcctctgaatgagatgattgcggatgttttggggaagtttgggatttatcttcatcagctgactcctaacgccatcgttaggcttagcgtctacatctgggctcttcgaagccagggggcagaaccgcttgccgaaggcttctgccg

SEQ ID NO: 36559 - DNA, 377 bp, Zea Mays
gtcgaggatcctcagcaagtggttgcacctctgtctcgtctcgctctcggaaatagggtggatgaactggtaagcggcagagggagcaagagcggaggaagcatgtgtggtggtaggcacaggagtggcaaaacctggcgtagtggagggaggtggagtggtagtgatgactggagccgtggggtcaaaacaagtaggtgtggagcgagtccgagatgagatgcgatggacacgaaaggcgatctgatcagaggcaatcctcaactggcctccctgctccgctctctccgcagctgctggtgctactactgctcgagtagctctatccaactttctcttcttcttgcctccttgctgctcaaggtaaacatgctttc

SEQ ID NO: 36560 - DNA, 517 bp, Zea Mays
taatatcttctctactactataacaagagagtttcgtgcgtcttggttttcgtgcgttgtcccctccagtgatcgtcgtacgccatcgtgcttccccacatctctgaaacaaactcccacacgccacacgcagaaaccgcctccacatgctacatgctttcctcctctcgttctcgcaaccttggagcgggtcgtgagaataagtccctgcaaactccgtgtcgagcgatgcaaggttaggtcccatgaactcggcgtggagtgacccgccatgccacaacctctgatagcgtgcctgctacgaccgtcgtcgctataagtttctggcctctggctctacgcgtcatcgcatcaaaaatggatactaccaacagcaacaaccgtcagtctggtgcttgcgtccgatttctttccatgacatgtcgaggtcggatgaggacgcggagacatgctggtcggtggttgcggccacgacccccctcgttgtggcaccagcgacgaggaggttatagtcgag

SEQ ID NO: 36561 - DNA, 384 bp, Zea Mays
ttcaacttaacctatctatatgagatctatctaagatacatggcccatgagacctatcttttttcgtatgttgaatagttgcatatcgttgagtccatcgatcaatatcattgcaccaattcagttagggtttggtggcaacacactcacaagtcacactctcccacatagagtgctcgcacttgagctctatcaaatgatcgagctaagcacttggcgctcttcacaccttgctcactagagttttttcttagcgtctcccacggggtgagcacgatacccctcacaatgccttctctagagccacacacaacttctatggtattccatggagccacaaccttcaggccatctaggaggtcacaacccctaagagtaacaagc

SEQ ID NO: 36562 - DNA, 351 bp, Zea Mays
tatgaaccaaaagttgagacatccctcgatcaacctcttgccccgtgcaagggctcgagggctatccttgcaaaaccacgccaaaggttccaacatatcgactgaagatcaaacatgacctattaagaacaaaagcccctgaaggagtcaactactcctttggggcctcgggggtctactccacgggtgcactcgcgcgtacccgtcgaaaatcaaacgtcctactcctcaagaaaaatacgacacacttacgagcaagcagcagagcctccaaacaagtaccaaagtacttccttgaaaggctcaggggctactatcgagggtgataattagggatacctgaattatttc

SEQ ID NO: 36563 - DNA, 309 bp, Zea Mays
aaaataatctcgtcctcgagattaagaaggtctagggaaaaggtggggaaaatctatgcgaagctcttcttctctttaccaagttgcttcatcttcaccgtggcggctccattgcactttgcacatctttataaccttattcctcgtgactcgagtcaaagtatccaaaatcttgatggggtactcagtataagttagatcctcttgaacactaaggtcctccattggtaattgttcctcaggtaccctgagacatttcttcagctgagatacatggaatacatcatgaacatccgcgagatgatccgg

SEQ ID NO: 36564 - DNA, 338 bp, Zea Mays
cttggtgcttgactaccgtacggacccgtcggtgtgcttaatttatagtgtgcttgagcggtggtgcttcatttggatgaattgcgctggcggccgagaggggaatgagtcacggcggcgatctaccgtggcaatcgcagagcgactaaactacgacggccattggatggtcactacggctcatatcgacgcaataaacttcctaaggcgtggcatcctcacggtgaacggcgaacacgtcggtgattgccgctcggccacgttgccggtgtgtactgatgaaccatcaagcacacagtactttccagcccatccgcggcaagatctttcaccccgtg

SEQ ID NO: 36565 - DNA, 590 bp, Zea Mays
aagacctcaacgttattagcacgtccacagccaccattaaaatttgaacagacaacacaaacacacaaacagagatacatggttactattgggtattgggctactgcctactgggagataccagatgactgctatcttccgggcgttgcagaggtaatagagggaaagggaagggagactaggagataatcagagaagggagagcaagtgctaccttcatatgacgagctcatcttcaattcttgactagctgacagacgccggagcactggacgccgctggacggctggagcacttggaggctggaacagagacgtcgacagaaaccagagaggacagaggagaggagtagggtttctggcggctgggaagggttctagcgggtttctggcggctgggaggggtcctggcggctgggagggtttttggaggggcaggctactgtagatgggccaaaaaccagagtgaagcccagtaccaaaactgcaacgaccaaaaacgaccaggaagtgttcgaccagacaactaatcgcccaggtcgacgactagtcagacgactagaaaccctaatcacgtcgtcctcctaatcg

SEQ ID NO: 36566 - DNA, 898 bp, Zea Mays
tagagaagaggcaggggcgtagggccaccgtcgccgcctggagagaaggaagatggccatcgcctggaggttccactcatcgccgcttggagtgtctcgcactgtaagcctctcttttccgacctctatatcgttccccaaaccctacaaaggccaaagcatccacaaattaatgccttgccaccgctcgaagcattggggcaacgccttaagcaatgaggcggactggtagggttcctgatcctaccagggatctctctcaatcggtaggggtgaatgagggaagacaggggcggcatcgatgtgaggaggcagcgcggcggatgaacaatgtcactgtcacatggtatgcagctagaatgtcatgctcgtatcctcttcccaaaccgacaaggttgagcatatgattcgtgctactatcgacatcatgtgttccttgtttcaggcctctgttcttgctcgctattgggtcgagagtcttcacaccgccacctacctgctcaattgactatctaccaaagctctctctgctcccacacgcctcattttgccgtcttcggaaccactcctttctatgaccaccttcgtgtctttgggtgtgtgtgtgtgctaccccagtctctatgccacagcttctcataagctttcctgttgatcctctcgttgtgtgtttctcgggtactcttctgatcatatgggatatcgatgtcttaacctcaccaaccgcttgttgatctccaaccatgttatatttctacgagacggacttcttccccacatccccctctagctctactatcgagctagacgtctttctagaactgaccctatggctccctctagccagccacctctatttttctcagcaggttccccgactccaccgctaccccctgcg

SEQ ID NO: 36567 - DNA, 682 bp, Zea Mays
acagggctgctaaaacaacgattcataggcgcagaaccataccaggttcgcctggccatggaagggctatccacggcggcatagagattcaatttggggaaaccccgaattgcagcgctatggcggatgattggagatgagagtgggtgctttggcttggggataacctaacgaagctcacagaggcatctatttatagagatcgaccgtgtgcacgacgaatttgagcggtggatggctatcggtaagaaacaagatgagtcaccggcatggtgattcgtggccttcactgtggcgacctccccggcgatcatcggacatgaataatactggtgattgcgacatggtaattgctgaggcacgtggcgttcggtcgacgggcagccaactccggtgatgataatctcggccgaccgcgcggcaagtgggcatgacggccggaccagctagcgaccgaaacttatcccaccactgatcttttcaccccgccccagtgttatccactcctcatcgagcacgaatctcccaggtgaaacatggatcccgacgcgagctcaccggcgacgggtgcactgcacctatgatcttcttcagaccactgttcattctgaatctcccttcgaagttgcctgacaacccatgtttgagccacaattactccctgctctaggcagtaacacac

SEQ ID NO: 36568 - DNA, 274 bp, Zea Mays
gtggctttagcactggtggtgtggtcaggaacttctttagtgcatcaagggcttcctgggcttctgaggtccactggaacttgtccaccttcttgagcaacttgtagaatggtaggcctttttctcctaaccatgatatgaatctgcttaaagctgccatgcatccagtaagcctttgcactttcttttgtgactgtggcgcttccatcctcatgatagcctcaatcttttctaggttagcttcaattcctcggtggctgacaatgaatccgag

SEQ ID NO: 36569 - DNA, 347 bp, Zea Mays
ggagaacgaggtaagcccaccacaaaatccatggtgatatgctcccacttccactccggaatttccaatggctttagtaaacctgcaggcctcttatgctcggccttcacgcgctgacatacttcacaggcggccacatacttagaaacatcaatcttcatccgcttccaccagaagtgttgcttcaaatccctgtacattttggtttcaccagggtgaacggtgtaaggcattttatgagcttctctcaagatatccatcttcacctctgatttctgaggcacacaaaggcggccccaaaaatgaaccaaatcattctcatcaatggtgaactcccggggtttacc

SEQ ID NO: 36570 - DNA, 615 bp, Zea Mays
aaccgcccgcctccgcaaatggtacgttatgtcgtcttcttcctcatcaccgtctgccgcgactgtgtcgtcgaatgtttcatcgtcggagaagacaattagtgattcggtggcggtagtgcagttattgctggtgcatcgaggatctactcgggccgcgcgcaggagatgcagcatttggggtattttggggatggtgtagggcgcactccaggagccgaagaggtccctaagacggagggggagttggttgctttttaggcattttttagtgtaggacttcgcttgcatgtacatcagtttgttgtcaaagtgttgtggcgcttcgaagctaagattcatcaccttacgtcaaacgccaaggtggcactagcgaagtttgtgtgggcagcgacttcgtatggcggggagcgcttggtcgaggtattcgccaagaattattgtcttcattggtagaagaaggttattggtggcaagattacatagtttggtagatgcactttcatgccgaggactaggaagacttcgggtgaggttgtggagctcgtgccatgcaccaagactaaatggggggactagtaggatttttggttttacttgatgttggaggacatc

SEQ ID NO: 36571 - DNA, 336 bp, Zea Mays
tccatgtgaactataacaaatctaatatttatcccatcaatgttttagagcagaaaatggctatgctagcaaatacattccactgcaaggtcggggctttgcccttcacgtatcttggtcttcctttggggcttaaaaacccaatttggaagctttccttcctctcattcagaagattgaaagaagactagcttcaacctctattttcctatctcaggctggcagactacagatggtcaatgcggtattttcttcacttccaacctattacatgtgcaccctgaagctcccaaaaattgtgatcaaacagattgacaaacttcgacgacattgtct

SEQ ID NO: 36572 - DNA, 291 bp, Zea Mays
ttccgaatgaaagtaaatctcggatactataaaagtaaccgcatccacgtttacagggtctccccattatttccgaaaccgtcccaatattatggcgacgtctttgtcaaactaaaattcataatataaaatttacgcacaatgacacaacgttttacgccaatcggtatatactgtttatgcatctattatgtcgtttcggttttatgccatatctttcaacatcttatgcttcatttttgttaaccttccgcacattacttaccatgcaagatccataatttacgcgcc

SEQ ID NO: 36573 - DNA, 1287 bp, Zea Mays
ctgatatgttacgccggtgtgttagccgtgatgaggctgcattagtagtagcgcaaaaggtaattgatctgtttgattaggaaaatatgcatttctcagttgattgttctttgtaacttactgttttgagtgttttaacagcaagcttgttttggtgcattatgtcccaggttttcaaaagtttgtacgataatgcatcaaatagtgcttatgtctcctggcttctagcaaccttaattgcaatacgagatgtctgcaagcttgttgtcaaagagttaacaagttgggtatgtttcattgtacctttgtattccatgttgtctgcgtaatgaaatctatgtatctggaaaagcagaaatgtctaatactttggaataggaagtagtttttaccattgaattttcttttgttgagacaaactgagggcaacatatctagtgtaaaaacgattatgatgctacattctaatatcaaatcttgtctatcggaaccactatctacggctgagtgcaatctcacctcctctcagactattttctaaagaacccctatgttttttatagaatagatcgtgtccgtccccaagtggaactgctcactcagtcgtagatgatagagccaatggataagatttgatgttagcatgttagtaccctaatcgtttttacactagacatgttgcccaaactaagttaattatgatttgattttgtatcattccatttccgttttatttttttacctgggtttcagttttatatttttatatacatatatattctatgactgagattattgaaatttgatagttcataggtttcttttcattggagaagcttttttgggtcttctatgacactaaagtaaaattttgtttgagtattgcttctgtatgtttaatatcaatagcattaattgcgcgaacaacacatcaacaatatgaaacacacgaaccaaatattaacctgtaagctatgattcggtgggagggtctacatatggaactcttactctataccattttgtttagtaccatctcattttattttttgaagaagttgattagcttgatgttgccctggtttggttcttctgtttcatagttcatcatgaaggatttgaaagcaaaatatttgttttgtttttgtttgttaatctttttgttcaggtaatatattcagatgaagagaagaagtttaacattgaaatcatttttggccttattcattccaagttgctgaatcttggggagtacaacgttcatttgacaaagctaattgatggggg

SEQ ID NO: 36574 - DNA, 1109 bp, Zea Mays
cccaacccaagaaaagggggaactacacaataatgggactctgtcccaacaatgaatctgcagcatcggcattctccggaattgcccaaccgaacaatgcagctaaggcagcgacatggtcctgagatagaggcttagaaaacagccgcccatattcatcaagagcttcttgtgccaatccctcctggtcagccaatatccccaaagttctagcaatatccactctgatttttctgacagctgtggaaggcgcccccctaccatccttcttcagtctattacttcttctaggtataaagtcttttggcgtctgcttacgtcgccgcttttgggtagctggtctggccaagatgcagtcaactggcttagtgatggtggccaaaaaatcctgcaccagcgaatggtcaacatccgatgtcgtggtatccaaaaccgatgccgaaatacagtcagcggagcaatcatcccccgcttgtccctctagtagctcttgccttcccgtcggagaactaagctcgagatcatccacccggtctgctgtcccagaaacagagtccgccccaacatctgcgagaatggggcgtcttctagaatagacaagcagagcccgcggggaaacagtcccagcaaccgacaacgccccccctctgacagaaatgggatccaacatcccatgagagcgccctagagccgaaacacccaaggaaggggcctcgaggcccgcacggtgatcgcagttcagagtttctgccgcagtagctccatcaattggtgacgttgcagccatgtacaccggagccgagacacccaaggaaggggtctcgaggcccgcacgatgatcatagactagatgttctccctccttgtctgctcttgccattaatggaaccagtggcaccggagccaaggcagtcacaaaagacgcctcgaggcccgcacggctaaccaagttcgaaatgccttcatcaatatcacccaagtctgtagccaaaggcaccagagccgaagcacccaaaggaaatgtctcgatgcccgagcagcgcttgttgctagcactggaacgccgcccttcaagattactttgaccatcattaatttgtgggcctaac

SEQ ID NO: 36575 - DNA, 447 bp, Zea Mays
atttgtttgaatgtaagtgtggaaataaggggggtagcgtttctcgctaacctcatagtaatgggtacttagggaatagatgtcatcctagggatgaattggctagataagtatcagacagttatcagttgtgataagaggacaatcaagttgatgtccccactaggagaggaagtggtgaccgagttagtcccacctgagccaaagaaaggaagttgttatcagatggctgttgatagcagtgaagcagatccactagagattatcaaggttgtgtctgagttcccagatgtgttcccaaatgacctaccaggtatgccacctgagcgaaaagttgagtttgctatagagcttcttcctggaaccgcccccatttttaagagagcttacagagtatttggacctgaattggttgaactcaagaagcagattgatgagctgtcagag

SEQ ID NO: 36576 - DNA, 296 bp, Zea Mays
tcgtcggtcttgccgcagggcatcttatttattcatggacatgtctttttcgctagtcgatgaggtcgtgggctcgtttgttggcggtgatgtatctgtcagcgtcatggaagtgttgctcggatgttgccaaagccctttggaggatggcctgtacgaaagcctcatcacgagactccggtagaagtcctcactcactgcctcggtgatgttggggatgcggtacctcatcgactgaaaacacttcaggaatgagcagaaagaattttcctccttgcgcttgatggatttgaggt

SEQ ID NO: 36577 - DNA, 340 bp, Zea Mays
tgtaactctctgttgatcgccggaatgactgccacagtaataggacaccaatccaatgcaccagtaaccttccgctccttcagccgccgcatgtcatcgctcaaattcccggccaccgctcttgcctagtataaattaaaaccaccgtgagctctgtaggatcatcacgcacccaaccaccaagtattgtcctcagtcgatcaccagggagcttcaattttggatttcccccaatctgctcaagaacaccgctatagtttcaacctcaccgcggccagctcaattcaggtctgctcataccttctgctccctcgtttgagtgttcttatgtacccatgat

SEQ ID NO: 36578 - DNA, 336 bp, Zea Mays
aacgattcgtattttaagtaccagagatcaacctgaaccatccgatcgacatcaaacggtcgcgggcgaaatgctacccagatttaatctaagccgtatacgcctaatccaacggcccgcacatattctcccatcccactctcatctctcccctcaccagagcgtaaggcggtggcgcccccaagctgagcggtggcgccatggctggagcttgccgagagacgaccccgatgcccaacttcgatttaaacgcatgctacgcagagcggagaggatggcgaattcaatggagtggttcttaccgaggttcatgtagcagttcgccatggccacagt

SEQ ID NO: 36579 - DNA, 294 bp, Zea Mays
ggatgccattagagaggaaagtgaaacccacctccccgcacctccgcaactacccttagacctagcccaagttctagccaatcaaacccgactcatcgaggtcctcactcgaagtctggaaaatcaacgaccaaatggtggaagaccgcaagacagaatggaggatttcctgagactcaaacctcccacgttcaccggatcaagcaaccccctcgatgcagacgattggaagcgcacgattaaaagaaagctggaagccattggttgcccagaaaatcagcgtgttcaactggc

SEQ ID NO: 36580 - DNA, 360 bp, Zea Mays
atacagacctgagaggacgacgggagcaacggcggggcttataaattaccgcacactgtggaccggaccggaccgcacaggcgtccttcacgtgtgggttggccggtggacggaggtagatcgatcaggtccaggtccgcgactcgccatgctacaggtggccccttccaccctggattgcgtcagcgatctaatgctgcatcctgtggcgagtacgtagatatatactgcatatagttgttaattaacaactagtagtaggaactaactttgtttgtaacgtacatgttggaagaatacctaacaatcagagcgcactacttccgtataataatgaactagtttactgctgcatacagc

SEQ ID NO: 36581 - DNA, 382 bp, Zea Mays
cgctcgagctcccgagggagaggccgcctgtgtcgtagtggttgtaacagcgctgggtatgggccaaaggctgcttacggggtgcgtcatcgtcctggcgcgtgatgacgtcgagattctcttcagcacttatcgagatcatagtcctcgcttggttaatgcagaagtcttcccgaggtgacagccgagccatctcttgacgcgcgctacagtcgggcggagtggctgtctgcgggattcacggcgtagtcggtggccgagaccgagctcaggcgaggcggagaatttgcctgagggctgagcttgggtcgggcgaggcgaagaggtcgcgcccgaaggctcgtcccgctcggtttgtcgtattaggcgtcacatcggaggg

SEQ ID NO: 36582 - DNA, 436 bp, Zea Mays
gtgcttcaggtctgtggattgagctcgccggtgaaaagatgacgctgcggataggtccgggacattgtggccgcgctatccctctgtcatttgcaccgacgacgtggccttacggccgtcaccggaatctgtgttgttcaccgcgattgcgccatgccttaggcccttaaccacgtcgcaatagctcgggtcatctgtatctggtgatagccggagagccgccacggtagatgccaccaatcacttgcaccagtgatctcctctttctccggccgccaccgtgcaagaccaaattcactggccaccgcttagcgcccttataaattgacggcacggtctgctgcgctaagttatctccaagccaaagcacccatccctgccctcgattatccaccatagccgaagaatttccttcttcccccaaattggtcgactg

SEQ ID NO: 36583 - DNA, 649 bp, Zea Mays
gtttgaccatatgggatgggaagagataaggggatgagtgggcctttgctacatgcacccagggctcctacatgagatgctactattgtatcctttttggtttacccgatcattgatcgggattgagtcgtccactggtcgttgaccccgcgcataccaactctggccccaacattgactacatcaacatctggatctttgactatgcggcctggccggggcatgcgatgtcgaggggatgatttcctatgtcgtgtctcaatcgttccatctacacgtctatattgtcgatttgtcctcaccaccatagatcggggcgcctccatagactttttccatcattgctccacctcgcgtgtactctatcagtacaaccaattatgtgcgatccactcggctcccgtgacatccatcaccaagacctaagcgcatttctcctagcaacagggttgttggcttcctgttgtgtcgcctcatcgagacgcaacatctcgcccatgtgcccacttcaccattgtagctacaacgtcattccccacgcatcaacgattgtgttgtgtaatctttgttgtgttgtccatccgcacaaggttttcgtcctactaatcagatcttcaccgttatgttggagcgctacctgtgagcgcga

SEQ ID NO: 36584 - DNA, 587 bp, Zea Mays
ctgggccaggcggccagcctacccccgctctgggttttgtgattggccatttccggcagctgttaccgtttcttgatttgtgtcatggagtggggaaaaggtttttggttcgcgagtggctcctgatgcatgtttggcaacctttccatgatgctgctactgtctttaccttgagtagagtgcagttcggtggtgcgtttccctatttatgtggtaatttagtcgttttatagttctctctaggtaaccgtcttgtaccgattctgattggtactcgtgttcaaggtaagcttttgagttgtcatgtctgagataagcttttgagttcaacgatcttgccattcattaactaccaccaaatttagtagggctgtttggatcaccaaagtgcagcttaaccttgatcaactacctaaaatagatgggatcccaataaaactctttaccggtcctgtccattggcagtcggcactttgatttcaatttcacatcacagagttaggtcctgtttggaattcacatcatagagttcagctggccaaattagctggctaaagtttagctgggttggatccatacagggccct

SEQ ID NO: 36585 - DNA, 408 bp, Zea Mays
tgttattatgaaaaaataatcagaacattacaaatatgaaattgtttgttgggtatgcataacattaacctgtcggggtagctcctcatgtttaaccctctttgtcacgacttttcttaacactcttgtgtggctttcagaaacattgcgcttcttcatagctggcatgaagtcatcttcatcagaatcaatctgaactgtttcattggtcacattttgactgtcagcatttgaaggattttcaacttctggacatggattaggatgttctgcagagggaatgtctacactgaagcactcctggcttgactggattgttatacgcttggggttatttggaggacggtcgacttgcttcatttttttaaattaaaagctgcatacataatatacaatgttgtaaaaaat

SEQ ID NO: 36586 - DNA, 313 bp, Zea Mays
gcgatagcgaacgacgacatcctccccatcctcaactgtttcaaggcctacgaagggtctgagcctcatgtggcgactctgttcacgagcttcatatgcgttgcctgtgtcgtgatcgggaacctggatctgatcacgcccaccatcaccatgttcttccttctgtgctatgctggtgttaacttgtcgtgctttcttctggatctcctggacgctcctagctggcgccctcgctggaagatacaccactggctcctctcgctggtcggtgcaactcaatgtatcggtatgcttcttcgtccctacattgttg

SEQ ID NO: 36587 - DNA, 348 bp, Zea Mays
gacattgcttccttagatacattgcaaggtctaattacaagagcatgaacatgtcaattgaatttctaggtgtgttcttttctagtcattttttctaacctttcgattggtgggtcacatgttttattgattaggaaacttggagtggaccaagaaggacttagaaaatggtgaagagttcaagaggatcaactatgatgatgtctatatcacatgggagtccaagcccaactcaattttgactcaacttcggactcaagtgatctcacttcaaaattccttgaaaataaatgggaatcatcgaccaagttagcatccagaatctgacccgaggttgcatcaaccatc

SEQ ID NO: 36588 - DNA, 439 bp, Zea Mays
agcggacctggttgatcactcaatttatagaagccaacagtggtggcgtcaaatttggagaaggtgcgctggcggccggagagaggggaaattaccgggaagcgctaacgtggcttttactgaggcaaggctcctatgatggacggactccctattacggctcactgcgacgtggtaatgctcctaggcacgtggcgcaggtacgaagatggtgaactccggcgaggacaccgcagttagtcgtacagcaagtgggtacagtgaatagttcagtggtcgggtccaagcacatctagcgccaagatcttttatccaatgtcgttatccgcgcgttatagggcacgaatcgtagcaccagcgaggatcgcggtgtggggtcatcggcagcgagatacactgcatctactgatctttgtcaggcactttaccatcagaaccc

SEQ ID NO: 36589 - DNA, 488 bp, Zea Mays
gcgatctggaggtccgtttctacttctgcatcggtcttctttgtagtacggctggcaccatctgaggaagttcttgttttgctgttcagacacaaaaaccgatgcatgcgatattgtgtactatgccttccactgtgcatatattgtttttattttttcggcttttattgccacatagttaacacaaagaagggatttctcactcttaccacacactgcggcgccctttataaagctactgctgactgcagttaatctcatccacgtttcattagattttggggctcacccccgtttcttgcgtgccttgtgcaagtaaagaaatggattctaaacacggctaccatctctaacagagatgaatgaatgacataagaaatcacatgcaaatatgacgagaagcactgtaggttacccatcactccttgagatacatctttagctgtggttttgccaagtaaactgtcactgaaaataggtgatttcta

SEQ ID NO: 36590 - DNA, 488 bp, Zea Mays
tattattatatgaaaactccgcatatggtaagctcttatcccaacttccaccatgtttaagagcacaagctcttaacatatcctccagcacttggttagtcctctcagtccgtccctcagtctgaggatggtaggtcgaactaaaattcaacttcgtatccatattctcatgaaaacttttccaaaatctgaagttaaactgtgatcctctatccgaaacgatcttcttcggtacaccgtgtagagacacaatccgagccatatataactctgccaattgagataccttataagtagtcttgaccggaatgaaatgagccactttggtcagtctatccacaataactcatatcgaatcatatcctctcggggtgcgaggcaatccagtaatgaagtccatatcaatctcttcccacttccactcgggtatcttcagtgggtgcaatagtccagctggtctttgatgttcgaccttaactctttgacac

SEQ ID NO: 36591 - DNA, 504 bp, Zea Mays
caacctagggtttacctgtggagacactagaacataagaacacaaggatttagagtggttcgagctgtcggagcgtaatgccgtatgtccactatgagttgtattgcttgagtgtggacatgaggagtctgagtgaagatgtccccttgtaacgcatgtgctctcccttttatagtccaaaagtttgcacgtacaaggatgcagaacaaccacgacaggtgggcccctacgaactagtatttaacatatactacatgaagcaaaagtgttatcgtccgccgtgcagatcttctgatcatatgtgtcttccgccccatttgtcagtctgtgcctaccgcggagtatacctggtaggctaatgtatgtaggggccaggcacgctgacgtgcacatgagttattgtgatggacgtgtgcgcactgcccgagcaaacatccactcatgatggcgctgttcatgcttgtggcgccaagagaaaaccgcctgccacagtatcacgcggca

SEQ ID NO: 36592 - DNA, 457 bp, Zea Mays
cgacatcaactcgtgtatgcatcaccgtggggcttcgtttggctattcaaggaacttgggtggacacgacggacataagcgtggccttgttgggcgcgagcaaggaccagtggtgccagaattgctcaccgacatgggatcagcgctgccatgccgcattgcacagtttgtagggtagtcacccccggggactagtaagaccatctctgcatcctctgctttgtccttctcattgcgtagcactcgttggttcacgaattaggtcctcggggcgccgaccgtggcctcgccggcgggcagcgccgtcgggagatttatttgcgccgctgctgtgttggctagaggagaggggtgatgcgacgatcgcggatcagaaaacatatggtggtgattagatgtggaaataacccttcgatgcgttgaatttgcgccctcgattgcctgacctatggatcgg

SEQ ID NO: 36593 - DNA, 1784 bp, Zea Mays
aggtgaaagcattgtattacttgcattccaatagaattattcaccgggatatgaaacctcagaacatccttatcgggaaaggatctattgtaaaggtaatctctcttctatcttggcatgcataacctgccaatgtcttgtctttttttccattcctgaatcctgaagtttttatcaagttttctttagtgtacgatgtatagtagatgcttcaaggtacaccgtacacatatctccaagatgttgctgtagctaatctattgttgaattgtcagttattctaacgtacacactcctatttttcgtgatccagtgtactttattgattctatctggtatgtttcagttttctgttaagtttcttatagtatgatggcagctagacgtatgcaatcattttattagaatgagctttcatcctgatggccttgattcacgcctttaatgttcgcttatccgctgttgtttatgtcttcaagttgcgattcttatccattacgctacaatggttgaaatttcatttatttcttgcctatttacagctttgtgacttcgggtttgctcgtgctatgtcagctaacactgttgtattacgctccattaaaggtatctatttttcatcttgacgtggtagttgtcatcttaaaaaataatttccttttttctcaaacgcgaaaaataataatttcctcatcttgtagcctgtaattaagtctatatatgctggttggaatacttcatttcatattctctggatcataggaagcctcctgctagccacatgttacctgttggtagatctaccacattctgatactctgattttctaaactaacatgagcaattagcaaatgttaatgataatatgataaaacatttaagctgtactgttatatttgtcatctttcttaaatctgtatacataggtcatttatgatctgaagttctgaactctgtctgcacttccttaaaatttaggactttggagtcgtttttcccggtggttagcctatccctagttgcttaggattaaagggctttgctgttgttgttgttgttgttgttgtttcccagtggacaaagtttatctcaaattactttccgagacacgtagctgtacactgtatttcattatatgaaattgtctcctttgaattggcccttatggcatattatagctcatccagtcatatactatattgacattgcttgatcttgacatttgtgataagctccttttgccgacctttcatttcactaaacttgtttttcctatgcagggacacctttatatatggctccagaactggtgagggaacagccatataaccatacagcagatttatggtcccttggggtcattttgtacgtacatcttcgctttcctactagacctgattacttttgcaatcttctcatactagtacattcttgatgctattgcatcatatttcttgagcagttgtaattttaatctactgctggccttcagcaaatggttcaagttgatgccatctactctgctttgtgtttgataatttatctatcaggctaaatttattgtttggttgaccagatatgaattgtttgttggacagccccccttttatacaaattcggtctatgcacttatccggcacattgtcaaggttactaggcttatttagttattttatttgttatggctgcctttttcaatgtcagaactgatttatatgatttcatcgatgcgttaggatcctgtaaaatatccagataatatgagcacaaactttaagagcttc

SEQ ID NO: 36594 - DNA, 274 bp, Zea Mays
ccttcaaaggctgaatattcttgaaaacaaagtcgacaaccacaacttcaatggtcaagcctctgtccttcaacacacatatctctgcaagtagcaccctagactcagcaagctctgaatctgtagggatctctgtccagctaggcgttcggacgtcggctgtctccctgatcgagcgggaagtgacttcttatgattttccatagtaaaccactcaaagcgtcatcccttaatactgtctttcaagggaatgtcgagatactcagctttcctg

SEQ ID NO: 36595 - DNA, 357 bp, Zea Mays
cagaactatcccacaggacggcgggtttattcactaaagtccgagggcttctctgtaaaccttgctcaacgaaggggtatcctgcgatctggaccgcacgattggaaaccagcgctctggattagatcggaccactgctaaaatcggtacttgaccacgaccatcagatcacgatcccgtgacccaaaatcttccatgacttgaccgaatctagtccctcaatctcgagatcaatgatccggattcaaaatagtgaagcgatgccctgggttataatcctagccgctcggtcgcagatctacgtttgggatcagtcgtgccaaaatagcatgccctctaatctcgatcgcacctggc

SEQ ID NO: 36596 - DNA, 580 bp, Zea Mays
cccaggcccatcgtcaacgagttggcgcctagggaccaatggaatattggagcctccgtgtctgaggcggcgccagccgctaatgtccctgaatgtgaaaagaccgggaccgtcaggtgcgcgcgagctcagcttctagcgactaccgtgggcgtggtggcgttcgcctgagacgaggacgccaaacgccgcggcgcaccatgtgactaccccatatcgccattgcgacctttgtatctccttgtccagggagtcacgatcctatgcattgacacaaagaaatatgaatgagccggcgatggccgcatgataggatgacaagctgcagatacgaagcacacttgcgactgacaacggagacatagaacaacaacagagtcaagtcgtgattacgagattaaacttcattttatccagccctccgaatgaacaaaaggatcactgcactacacaaagatgtaaacgattttggttataccacccacccaaactactcaacatgtaagccatcagctactgcctactgaaatgaagcagcttgaccagcaatcaggtggccgtcgtcaatactctagtacag

SEQ ID NO: 36597 - DNA, 675 bp, Zea Mays
caaagcaccatcgccgatatctaagacccatttgctaaattgttccaagtccgcgcgttccttcccatgtaaagacgggctggagagcctcatatttgttcgtagtttcaaaacagttgcatgctgccacaacggtgagctggtaatcgatgcgttcactatggcagaccgtgagcctttgcgcaccacgggtagaatctggcgaaagtctcctccaagcacaataggtttgccaccaaatgggatgttcgcattttccgctctatgttccgaaagaatatcacgcatagtcctgtctagggcctcaaagcaatgcctatgggtcatcggcgcctcatcccatatgacaagagaagtccgttgtataagttcagacagcatggtacctctcttgacaccacatacacctctctcatctagatcgaagggtattttgaaacgtgaatgagcagtacgaccttttggtaatagaagcgaagccacgccagaggaggcaacaacaagcacaattttttgtcgggacctcaaatgtgtgagtatagcgttccacaagaaagttttacccgtcccaccatgcccacatacgaaaaatatgcccggcgagcaggacatcgcagattcagtcagcctttcgaaaatgaaccgttggtcagcattcaactgcgagacagcaac

SEQ ID NO: 36598 - DNA, 484 bp, Zea Mays
cgaccccctcttcaacgctatcctccaggagctccggctagacgccctcccgatccgtctccccgcagtgacgccgacgtgcgtggaagtgttgcggtgaactgcaggctatgggaccacctttatgtggctgcgctgttgctgggtgacggctggccgggcgcgggcgaatgagagagtcgggcgacgccacgaggccattgatgtgctaacatgcgaatgtcaggtgagtctggaggctagatgtggagagggggtgatgatgtgccacgacgtctcgccgttgctgctccatgccagctgctcaggtcgactagacggccgcctcaccgctgctactccatgctaggtgctcaggtcttcatcagacctttcaccgaaagacagccaacacgtgtgcacagccctcctcttcccttctcgttgtgcgaatccgaggatcaaaccctagcttaagctgttcgccgccgtcccgccgctccac

SEQ ID NO: 36599 - DNA, 349 bp, Zea Mays
cgcggcttgtagcttctgcaaggcacggagaatgggttggagcttctcctggttctcgcgtgtgccccccaacgccagttatcaccggcgacggtcaccactcgttgagaaaacggcggaagcatcccgtcgtcgttccggagataaaaccactagttctgccacccctttttcgaagatacaagggaggtggggatgtactgcgctgcccgccccgacctcagctggagggtgcagcagctagcccgcaccgccatacggaccttcttcacgtccgtcgacgcgacgaagaactccgcggagaagagatgggtccacaggtcccagtgggggtcaatccccagaaacc

SEQ ID NO: 36600 - DNA, 402 bp, Zea Mays
ccagacccagcttggtgcgaacctatccacacaacgttcctattccctggctaggcgaagacctggtgcagccaagcgacctactatgcatgacgtgagcttgcgggatgggcctgacgtaagaccactaggccacgctgcccttgcatttattgtggagaagacgtgccacctgactaccccgctgacaggcgatgtgacccttcagcatttaatgcgccctgtccactcaactggcaagcggcgcccaagccatcctgcaggcggcgtgtctgactattcccgttggccaacagtacacctgtgtcatggcatgcgccacacccatcatgactcgcgcgttaccgagggcgctgcagcaagatatcaatactgtacgcactacggatattatggtgcacg

SEQ ID NO: 36601 - DNA, 416 bp, Zea Mays
cgagctaggacatcaagctaaatgcccaaaaagaggtggagctcaattacataatctgactatagaggatatggggttggtattgtcagatgaggcgttgcagcagctggatcaggaagataaggaagtggaggaagcatataagttgtctataaatgctatcagtggaactgaccgtgaggattgtatgagagttcgggctctgatccaaaatcaagtactggtgatgttggtagactcgggcaactcctcaagttttgtcagtcagagaatcgtagatcagttggccttatcaactgaagtggtttcaccagtaagagtgaaggtggctaatggtgagtctatgttaagttcaaaatgggtggcaacgctggagtggtgggcagaaggacacacttatgccggtaatatgagag

SEQ ID NO: 36602 - DNA, 468 bp, Zea Mays
tgggtcgcgagaagggatgacattgatcttctcagccatcaaaactgcagagggagacgaaaaggaggcaaggaactctttgcgccgaggaggaagatggcatgtaaagcaggaagacgaaagcagcatggtaaagatccgaagcacccatctcgggcgaatttataggaatggacggtgtcaccgaggtgtgggtcgcaacggccagtcagctgtcgtttcgaatcccgcacgcacgtgcgccgcaaacggtcggctgacaggtctagacgtcccatcgcattaaatgaccgtgcccccattgagagaaaacgcaacgagcgtcgtttcatattgcacctcaaaaggtacgccctcctccctctacctctctttccttatttcatccccttgcagttaataggaagaaggcgtcttctacctcgggtgtcccaccttgagaagaaaaaaggcaaggcagaatattat

SEQ ID NO: 36603 - DNA, 798 bp, Zea Mays
gtgaggaagattagctgctaggaaaataagccccttagcccctgccatctcccacaaccttcgctcttctccaacctgctccagaacagcagcaacactcggattgccgccctcgaagacacacactgattacagtgtttccataaggttcatgcaccaagcaaaacaagggagttaatccccaccttcatttgtccagctgccatttcacttattgtcctccaccagtccagcaaactatcattttctggttgaggggacagagtatgcagtccaaattgtctcaacaaaaggaaccagcactcccttgtgaaaacacaagagaccagtagatggtctattgtttcactttcttgttcacaaagagggcaactatcagggtgatccaatcctctttttgcaagacgatcagctgtccaacaccttttttgtgcaactaaccacagaaaaaaccgacatttaggaggcgcccaggttttctatatcctctcatacggttcaaaaggaagcgagccaatgaaaaccccctcgtaggcagatttcgctgaatattttccattggcagccagcctaaaaatgtgcttatcttcaacattctgccttaattcagcagttaacagtaagttccagaggtgcagataatcaacaattgcccccacagatagggcccctcgaatatccgacatccatgctcttccagttatagcttcttggtctgtccttgtattgatttttcttttcggaacaacttgaagaagtcttggcgcaatatctgccaccctctgtccttgaatccat

SEQ ID NO: 36604 - DNA, 277 bp, Zea Mays
tgatgagccaaatgatgactggctgaagtgcattgaagctactagcgatgagctacttggggcatattccaaggccgaggacaatgccttgtccgcagctttcgggggtcggaataagaaaagattgaacagggtatttgatgttattggcttcgtataccctgactattgctacccgctgcgagggcaagggataaagagaaagattgctgctttgggaaagattgctgcttcggccatcacagttgagccgaagggcaagaagatgaaggttctg

SEQ ID NO: 36605 - DNA, 488 bp, Zea Mays
gttgactaccagcggcagatatgttgaggaatgggtccgagttttctatgcttcagtatggatagaccctgatcaccagtggatgaggttccactttgagcgagaggatgttaccattcatgccaatcagatttgccagttgtttggattcaacgagtcatcgactcgtcttcacagcttgtgctatggcacctctgatcctccttgtcgccctcaaggcggagttgctcctggtatagctcacatcgtggctttgttccgcccgcccttctcagatgggtcgcgatgttctccggcagacttcaccatagcgaccaagtttctctatcatctcatgagactgacgcttctgccacggatggggtacaaggaggttgccactcatattcagctttggctacttagtgccctggtttctcactccgagtttgatgttgtggatttcctcatttgtgagatcgaggacaccgtactggatggtctacgcg

SEQ ID NO: 36606 - DNA, 606 bp, Zea Mays
gcaaaactctgtcatcaggagcgctggcctctaaggcgacttcttgacccgaagcgtgagttgctgccatacaaccagaatgcggaggagaagaccctacgtgaacgtccatggaagtgtgagagggagaactgactcggataccctcgggggctgggtcatagctcgcgctacccatccgagccgggtcatccacggcaacaccctcgggggctgggtaaacgctagtgccatccttgagggccaagctctccgtaacagccacctctaaggctgaaggaccttcacccacttccatgggagcagaacaatccagactagcctcctgacccttaagaccgcgctctaaggtcgatgaggcacgggacgctgctcgagataactccagcccggcgtcaggcacatcagcacaaatatccatcatttcaccatctgtcggctccgacaacagatcttctaggaccatatcttcaagagtctgatcaaagttggccagagacaattcttgcagaccaacgagagcagacagggctggagaaggaacaccactactttccccgctggcaatgtagcgtcggctgttcttccgagttagagggatttcat

SEQ ID NO: 36607 - DNA, 352 bp, Zea Mays
ggcagatgcactcagccttaaggcttcctatcactgtcttacagtgaagacttctgacattaccttatgccaggagatggagaagttaaacttgggaatgatccaacgtggagccttaaatcaactaaagcttgagtcagtccttttacaacgaataatggatgctcaaaaggataatgagggtatgaagcacatctgtgagaaaatagaggccggaaaagccaattgctttagaaaagatgatcaaggtattgtatggttcaacaaccgcatagttgtgccaaagaatgaagaaaaccgccaacaaattttggatgaagcacatcttagtcgctattctattcatcccaga

SEQ ID NO: 36608 - DNA, 537 bp, Zea Mays
gcggagatgaatcccccaaatcctccaccagtcggtgctgatccagttatctcagcccagatgtaaataatgcagcaaatggcggacactatggcagacatgcatgctcagatgcgaaaggagcgtcaagagatgcgccaagaaagagaggatatacgccaggagatgcaccaagagcgggaggagatacgtcaagagagaagggcgtaacagtaacagcaacaagcacccctgcctccacctccaccaccagttccacctagggataagcaccgagagtttatgagtcacaaaccaccaaccttctctaactccgcggacccactacaagcagatgactggctaaagtctgtagagaagatgctcaacatagctcagtgctcggacaaagagaaagtgctctacgcatcaggtcgtcttactggtcccgctacggattggtgggatgcgtactgcgccgctcatgctgccatcgacacaattacctgggcagaattctccactcaattcaggaattaccatattcctgctgggctg

SEQ ID NO: 36609 - DNA, 399 bp, Zea Mays
tctaccacgacgacggcgagactcgagggaaacccgaggtgttcccgacgactaggcgtggtgtagcttaattggcggggtcgacgagcatcataaacacatgagagtgacaaaacacgaaccagaagggtgagagcggacctggagatggctgaccacaacagagtgactcacggcggcgcggagagtggatttgggggaaattccaaattaggacgctacggtggacgattggaggcgagggctggtgctctagcttcgtaacaaccttgcagagctaacggtgcactaaatttatagcctccgggagcggtggctccaaatttgaggaaggaagctggcgggcgaagagagggggtgagtcactagcgagcgctattgtgccattcacagtgcaag

SEQ ID NO: 36610 - DNA, 375 bp, Zea Mays
tcatatgacaagatagccatatccactgttagcaactacatttagtggatcatgtgttgcttctgttaaggtttttctgttgacaaaaaaggacttgcttgtttcattgtcatcttttggagggttctcgtttctagctcaatcctggattcacgtcaatacttgaaccgctcatagtggctatgctatatgtccaagcctcctaggttaacttgaggttttgttctattggatttctcgtgagaagtatggatctacccttaaacttttgttatgtttataagacctgaaaagccttcgctcccccctctcttgtgaaaatagttgaatagagagtggtgaccggagaaatatgattatttagcttgaacaagc

SEQ ID NO: 36611 - DNA, 466 bp, Zea Mays
ggtatgttgaagattgaatcctgatcattgaggctggcagattagaagagagggaatcaaatgaagttgtcagatagcacagtcatgctatggtccatggtccatgttgtagtgctagtagattcagccatctagtacgatataaatttatagtagtcgttgacactgatttggatcacagactagtaagagttagtacatctctgatcgacacacaccttgaacacgaggaacatagtggatcgttgaaatcgatcgggggggtcagttaggccgatgttgatcctgttcttcgtctggtatactctcgagcacctccagggaagacctatcggggaggagcacacaaaggttgtcctaggatcagcaaggccacctagaacaccactaaatcttttcggaagatgtgacaaacaataaggtagagaggagagagtgtgtaaaaggtctagtagattgatttttg

SEQ ID NO: 36612 - DNA, 451 bp, Zea Mays
cgtggaggcaccctcccagtcccagcgtgcgtgctcgtcaaacacagcatcacgggagacgatcacacgggtacggatgggatcatagaagcggtatgccttgcttcctgcttcatagccgatgaagaccgccttgactccacgatcatccagcttgccttggtgcgggcggaggtgcttgacgtaggcaatgcatccgaacaccctgaggaaatgcacgggaggtttcttgccataccaagcctggaacggagtcatgccgtcaagtgcatttgtaggcgatcggttgaggagaaacacagcagtgtgcactgcctctccccagaaatagcctggcatgccccgcgcgcgcaggatgctccttgccgtgttcacgaccatctggttccggcgttctacaacgccgttttgctgcggcgagtatggcgccgaatgatggcgctggatgcct

SEQ ID NO: 36613 - DNA, 474 bp, Zea Mays
cgggattcgttcgttggggttgggtgcggaggagcaagggatcgcggcggggacgtaacgccattgacagcgattgcgtgtacggtgaaggttggttgggaggttggaggggtaagggaagggccggcttgaaaaaaaaatgtttgctgccatggctgcctcatcgactccctgggcgtgacgacgtcgttgctctcgtgggcgtggtcgtgctcgtgcctgcctgccactggcctaatttctccagatttggtgggtggtttgcactccactgattggtgatcggtctcgttttgcgctgtttgatctttgttttggttgccaaatggggaggtatagcagcttcttttgatctgccttttgggccttcttctcaaaccccgttcccattttgggttcatcgtttgccttttcgaatcatatattgcttagtaaggatcaaaactttagtgattcaaatatcgatcaatgttc

SEQ ID NO: 36614 - DNA, 657 bp, Zea Mays
acgtggagatcgcagcgagaaggcaagcaatccatagagaaaccccaagccttcagtttcagaactgacaaatccgacccatcaacagcacccggatgtaatccctgaacaatgcagtgtccaccgagcagatgctctgccgtatcaatcccccagaggtgtgctggaatcccgccaagttcaatatccataagcacagggagggcacctccaccagaggccgacgcctgacgagaccacctcctaagatgcagccggagggggggtatggaaatggaatttccaccagccaaggcgcgaacagcgtgatccacggaggggaataaaaccaggtacgagttggacgcagcacgtcggatttggagcgcatcagcctcaagaccatacttcgaggcgagcgcctccaaaatcacgacggcgcagtcagaaccctcttggccaagaacattgacgaacagagcacgatgaaattcctcctccgcctggtcgatcaaccttgaacgcttaagaataaacgaacgaggggggtgcaccaccgaaggcaaggaagatgaagccaacgatgagccccgaccaggtgcgcctaaatcctcccggtccaatcttcggcgcctctgtccacggcgagtgcgcttcgtcttcttcataccatcacca

SEQ ID NO: 36615 - DNA, 288 bp, Zea Mays
gatatacaaatatcggagaatagaaactaagttcttgcttaaaaagagtattgctaaataatgtgggagagataaatcaatacaactaataagttatagaataacaaagcaagaacccttagatgagaagagcactaggacaagttctttcttgcaacgtgttgcttcactaaatgggaatttaacttgaagcaacaccaaatgatattagcaaataatggtgcaagaaaaacttagagcaagggaaaacaaacaaatcacaagcaataaacacaatggacacgggtg

SEQ ID NO: 36616 - DNA, 401 bp, Zea Mays
gggcgagcgaccaagtctccatcgagaaattttgcgaggcggggagaacgaccaagttcccgcctagtggacccgcaaagaaggaactcaggctgacgttgctggcccacgatggtcgcgacaagacgcatcatcaccaaactacgttagaccatatgtacagtaccaaaagggctatgacaaacatgatggaacacctccgtgtgcaccctcggatatgccctcactgactcatggggccggtcaactccaattgcggtgaccttagcaccgaagtctctacagtgacccatatgctagaaaggacaggacaataccccatactgggtgtatgcctacgtgtgctagaaggtgacgcaaggggtttgacggaagattaggaacacgaccctgaacctcac

SEQ ID NO: 36617 - DNA, 492 bp, Zea Mays
gcaaccatttctgtaaagcacaggggctctggtgcaaaacttcgtaagacacagagacatcacgtgtggactgcgggttgatatgacaaaaagacaggggttcttaggaaacattactaggccgaaagggtatgagtttgtttcagtcgtccgatcgggcacggacggcccagattagaacgcgcatcacacgaaccggtatctatttccacccgtgggattagagatctacggtggagattttacgagggctaatccagtatcgtccgtccgatctaaacggacggtgatgaactcccagaccaaagcgtcaagcaccgacccaatcttggtcgttcgttggccaatcaacgatccgaactctatctcctacctttagcagactgggcacgacagcgcccacacccaccgcggcggcgcgttcagtcgctggtggcgccatggccacggtcacggtgagcagcgctccggtgagtccagcaggcgatttca

SEQ ID NO: 36618 - DNA, 346 bp, Zea Mays
ggaggatgagagctgctgaatagctcttgggaatctttgctctgaagttatcatacgaaggaacgaagctttggaaaaagataaaatattactctccttagtggatagattgaaatctaacgaagctaagcttgttgcccaagccgaagctcataaagctgaagtacatgaattaaagggaaagattgccgaaccaaccgaaaaatttgaagttgaggtggtgaaacatgagatacgcgagatcgaaaagttaagagcacaaatgaggaaacctccgccgtaatggccatcaatggcgctaatggctggccgtttcttctccctccccggtgccctctccccttcc

SEQ ID NO: 36619 - DNA, 505 bp, Zea Mays
gtaactttcaaattatggggtttgtgccctaggtcaccacatcaaaattatagcccaattataggacaacaagtttgcttaagagtgcaagccatgttcttgtgaaaggttgggagataattgagcctgaagttggactgtcagactgcttgatgtctgaaattcagattaacagtgggatgacatgaacttagggtttgattttaagcaagatccagtgactttttgtgggagcacattgtagtaaagttataaatggattgtagatctacaactttgctacagatcattgggtatgttgccatgaaaatttgtgagaaaatcgagcctaaactatgactgtcaggcgtcataaactgaatgtcccatggtacagtaaagggtaactgaagaagatcctatccctctgctcgtcgtcggtggtccgtcaccgttgatcaccgctcgccgtgattcgtgcgtcgtggccatcggataaacatagctcggtaaagatcctcaccgc

SEQ ID NO: 36620 - DNA, 641 bp, Zea Mays
tcaacacctaataatcgtttcccctcgatcaattgcatgatctgaactcttaatcacactgtccacggtgacagcgcgaactacggatgaacagaggtgttcccgatgatctagcgctgtctagcttaattgaacgggtcgaggagcattaggagaacataagggtactgaaacgggagagcagagggcatgaacggacctgtagcatgctgggcacggcgagctcacgcagtgcggtgctctagaccaaattggggagagtttcaaaatgaggctctctggtgagtaattggaggcacgagtgagtgtgttgggtgcataattacatagcggagccgagggtgtgctcaatttataggacttggggacggtggctcgtgatttggagttggcacggtggcggtcggagagggaagaggttactggcgcaagcaattcatggcgttcaccgtggcaagctcattggcgatgaatgtgtgggctaaggtgactcactgcgacgtggttaaagcaccaaagcacgtggcgcaaggttgagaggtggctaactctggtgagtctattcgaagcggccgtgactcaggcgagtacggtagccggagcagaacagtggcctgagttcacccacgacgcgatatttc

SEQ ID NO: 36621 - DNA, 490 bp, Zea Mays
accaagttgcagggaatgcccacatcttggtgacaatcattacaaacatccaacttcattataggttcatcacgacaagcatcaaaacatatgataagcaaactaactctaactaagactgacaaatactaagacactaaattaagcattattacagactctgactctatcgatctatggatacaaatctatctgggtcctacagtcaggggtaccaaaatcgaagcgaccacggggcgacaaacggtaagggtgctgaatcccgacaggggcgggagaaccaccatccaaatagtggcgtgttgcgcactcagcacgcaattccacaacctccgcccgaaccttgcccaactcgtcaagggcatggtccagctcagtgttgagcccgacgaccaggttgaccatgctattcagcctgggattgccctcaccaacgggagagacaatcacacctccagcactgccggtcgaacgacgaggatagtacttc

SEQ ID NO: 36622 - DNA, 326 bp, Zea Mays
gaataggtttatataggtgaatatgagtgaagtgtgtgcttggtttgaatttaggcgaagaaaaaagggatttgggcactcagctcggaaacgatcgctcaaaacgggaaatttggtgaaatttaagcctggaatctcggattggcgtgaaatttggcaagtaggttactggaagtgttgtgaaggtgcctgaaaaatttgggttcaattggagcatttttggctggtttgggcatttcaccgagcacgtggcgtgcggggaattaggttttcggtgaaacggctatttgaggtgtgaaaaacctcccgaaggagctagagacctg

SEQ ID NO: 36623 - DNA, 401 bp, Zea Mays
atgacagtgcccaagcctcctggtacagacgacaaacttgctgccctctatgcctacaggaaagcaaaatgtctctattataagtgtggcttaacttattctcgaggtcacaaatgtgctgatactgttcaattacacttggttgatgagatttggcaatttcttcaacttcctgaggaagaggagtcacccacagcagagcctgcagaagaattacatatgttgtccttatcactggccaccacatctgcgaaggacactcctaaaaccatccggtttttgggtcacattgaagatattgaaattctggttttattggattcaggcagctcggcgtcatttctcagctctcgcgtggcatccacactaccagcggtcaagcctctgtacccaccagttcg

SEQ ID NO: 36624 - DNA, 397 bp, Zea Mays
ctagtgcagtgtgagcgcgatatgcaacgagcgagaggcaaagatcaagcagctgcagttgtgcgatcaactaacactagtgcagtgtgagctgcagttcatatatatattatcggagacctattcttctacctttcgtcgtccatgttctgctataagctcacagaaccagaagagatagctgtagactatagcgtactaggcaacacctctggtcgcgctaggcggcagctagcacgcacaaggcgtgtgccaatctccttgcgcaagcgcaacggattaccattgctcagcctcagcaacaccgcccaggccagcaccacatgcatgcagcagggtagtaggcacgcacctactctctcagctcgtcgccttgtccctctgccgggtccaattg

SEQ ID NO: 36625 - DNA, 410 bp, Zea Mays
gtggccggggtcgcaatggccggtttaatcctggtcgcagcagcaacagcaatgcaccaggagggtgcagatctgatgggaacacaataacctgtcaggtttgtgacagaactggacattctgcccgcaagtgctggtaccgatatgatgaagacaactattccaactcaaattccaagagtgcagcagcagcaatgcacagctatggtgtcgatacaaataggtataccgacacagctgcaacggatcatctcacgtctgagctggacaaactgaccactcatgagaagtacaaggggacagattagattcacaccgcaaatggtgcaggtatgaacatctgcaatgttggtaatgctgtaattgacacccctactaaacccttgtttctcaataatatcttgcacgtc

SEQ ID NO: 36626 - DNA, 726 bp, Zea Mays
ctcgcgcattacttctgacatcctctgctcctcatttctgggttgaagttgtgtctacaactgtttaccttgtggacattcaaccttcagttgctctacatggtgtcactcctcttgagcgcctctttggtcggccaccgcaatatagtcaccttcgtgcttttggctgtattgcctttgtccttcttcaacctcgtgagaggaccaagctcattgcacagtctattcagtgtgtcttccttggccatgactctgagcgtaagggatatcattgttgggaccctgtcgttcgccacattcgagtatctcaggatgtgacctttgatgagtcacgtcatttctttcctcctgatttgtcctcttcttcctctccctctgagtctgttgatttcctccgcttggttccacctcctcctaccaccttgtctctgctaccctcccctattcctatttcatcatcgtcaaccccacctccctcgcctccaccactatcgccttctccacctccaccatcgcctcctctccatccatcacctccaccatcccctccgacacgtcctccaattcctttccactacactcgacgtccgcgtcctccaccatcccctccggcatcatctagcctgtctccacctgtacttggtgtgcctcctccgcgatatgaccttcgcgatagacgtaagctttgtcgtccggctcgtcttggttttgtcacttctgtttccc

SEQ ID NO: 36627 - DNA, 325 bp, Zea Mays
gaaccagcttgatgtacgtcacatatcttctaaagaccagctagcatacatcatgacgaaggctcttccagctccggcattcactcatctgcggcacaatctgaacttacttgatagatgtctagattgaggggggtattagcaatatcagatactttcctagctagttagggaatatccctagattacagggagctgtgtctccctccttgatttgttgtgtctgtttgattctttcctatgtattgttcctttctatctttgtatatctctgattgatatatatacatgacgcctgccaccatttgtggtcaaggtagatcac

SEQ ID NO: 36628 - DNA, 485 bp, Zea Mays
aggccaaggacgggggctccttcgtcaaacgcagatggaaacccggggtcgggacctaatcttatggaagtaccaaaccaaatcagggctccacaacactccccagctgggaaggacccttcaaggtaacgggaatactccgacccgagggcgactgtctagctacgactgaaggagtacctcccccagtgctggaacatctctgtatctataaagcaggcctgaggggtcgagttgtttccctttggtaactaggtaccgcatacgtgtatgccaacccggtggggtctgtccccataaacctggcctgttggtccgcacacatgcatgataagttataaaggaaaactaccctctcagatgcgcctctatgatagtattgtcctactattccatggtcttaccttgcagtcttctggatgttattttaccttacccacccaagcagttctcgttccatcaaacataatgacatctgaattgga

SEQ ID NO: 36629 - DNA, 656 bp, Zea Mays
caaggcgctcgacaaggggaagctcgaaaagtttgaggtgagtgactgtcgctgcattttctaaagtctggtattgattgggttccttaaatttgctcgacaaggtttctatggatccagtgcctgacagagttcatccccaattcactggtcgatttgaaccaaaagaatttcactggtagctgtatgaggattgtatcaccattctctagctcgtcaatgaatgggttttggaggatctcagtctcagttgtcaaggtgctagacacacataacgccactttggttcaagtcacgagcttggatggataactgtagggagctgtgcttaaggaaatgtgcatgcaatgcttatgcttacacactgccgagagacaccaaatccgtacaaatttgtggtagataaattgttcttgtatcgactttttcctgcttgcattgttattattgccttgaaaagcatgaaagctaaatctggtgacagaaaatatcccaatggcagagataactcagtggcagtagcgtccaatgtcaccatgcaggatgtttgttttaaaggtggtactttattgaagctttataatagattgtgccctttttctgaatgtaatattgtagaacatcttatgtgaaatgtatggatgatggttgcaaat

SEQ ID NO: 36630 - DNA, 307 bp, Zea Mays
ggtcggaggtaacgcacgagcaagtggtcaacttcgatagaagcagaattgcaattttccttctcacactcatcgcgttgccacaaaatcaatggctcaataccaggtggaagaggttcctccttttctgatgaactatcagaagcaacaactggtgactgtggaagatggtgtataatattaattgcaaatgtctgtgttgaaccccacgggacaaatctcttacgagctgaaaggcgtcgagcaagctgctcattactgtcactatatccattttggcatggaggtttgaatggcttacgaacta

SEQ ID NO: 36631 - DNA, 1616 bp, Zea Mays
ttcggcttccggagattagcaactgcagctcggaggataccaggatggtagtgccaggtgtcgcgagtgggtgggattactgtcgctgcatatgaatcatgtagttttgacaaccagtgctggagcagacggttccaatctgggaggaggaaccctgtataggaccatagtagtatctttgtcagggtcaagccatcaaagcttataacgccctgtggactgtagattgcagcttgcatattatcacaattagcgcccaggcagggggagcagattgttggattgtactctctctggtcataattagatgacaaattgtgctccctctgatcataattagatgacggattgtactccctccagtcctaatcatagtacgttttggacagcaaagctggcttgtaattagtgtttgtgctgtccaaaacgccatctaattgtggccaagggtagtaaaaatgtggtctgtgggttcagcttgcaagaaaaaaaaacaggacctaagagcatctttaagagcttaaaccaacatttctttatggcaataggccctccaacagttttgtatgcaactttctaaagatatgcgaatgataaatctcccctccgactcctcacatatgtgcaagcttcttatgtgctctgtatcctcacttgatggctatcttttccatccttagcacggttttcttcatccatgactgttcctgtggctggctgcggaggtcgtctgtggggcggcagcggctgcttgtggggtggcagtgtctggctcaaggttttcttatcggctgatcatttctgatcgccagagggccgatcagccgatcagatcaattactatggcgatcagacccgattaatcggactgctctttttttactaaaacacgtcggaagccagagaggtggcgcgctaggtacaaggcagggaaggagaaggacatgccaccggtgtcagctactgtgtgagcacgagagaacgaagacagaggcattgaggcatagagcagatgcaaacttagctagcagagatggatggagactggggagaagagatggaggtatggtacttgcagggcgtcgttgtgcttgggatggaggagtggagaggcgctgaatcccttcgccgatggcgcgcctccgttgccctcgtgttgacgtatgatgtgtgtgctgtgtatgcagggtgcccgcgactgcgtgtgctgtgggaaagagacgatgtcgacagggtttagaaagtttactcagtgatgtagccatcgtgggctgaccgggcctaaatggctaaacgaagtgggccaaaatcccaaaatagttcatttgatcgtccatgacctaatcactcgattaatcgtgactgatcggcgattagttggacgaccaacttcctaatcgctctgatcgcgtcgttgcctctgatcgaatgtgcagtaccgataccgatcaaccgattaatcgtcaattgatcgagattaatcggacgataagaaaacattgtctggctggtggcggcgtgcgaatgaggttggggaggaagtgaacaaaattgtattgtggatccctttttaatttttagcaaccaaatgttgcaaactattggcgcgagacaac

SEQ ID NO: 36632 - DNA, 463 bp, Zea Mays
cggttctgcctcctcacggcgcatacaacccacatgttagtgtctcccttctttcgcgtgcgcgccctctcccctctacccctgtatccgcatggtcctcgccgcaatcccctaaccgattaatgcctcagccatggaaggaaaaattctgtcaccgccacagaaggaaacacatcccctcgtcgctatccacgcctcgcagcaatccaccacgcaggaatcccattgccgacgacgtgcaggaccaccccattgcccaatcgttcttcccatgcaccgtggatgccccgtccatatcctccgcgccccaaacgcaatccacgcctcgccgccatgggaaggaatcacaacccaatcccctcgttgccatccagcgcacaggaccaccattggcctgcatcccatcgcaagtgcaggaccaccccgccatctcattcttcccattctacgcgctagctccacc

SEQ ID NO: 36633 - DNA, 481 bp, Zea Mays
cacatctatgggcaccaccagctgacaccaccatgatgctctacaatggcaaccctaggggcagccccaacgagcatctattgctgcctccgagggtgggcccccttgtccaagtgcgaccccaccatcatctagtgctccttgtccagcgactagctctggtggtggtcgtcgccgtcgccaggtcggttgtgattatggtggtggccctggttgtccactggtggaccggggtggcagcacatggccatccttctacaacatttggactgactccatctccatgtggcctggaccgtctgtgggtattccatcgcgtttagctaccccaaagtaggccttctacgttgctccgccccagttcgcactaccaatgcacttggctccacctcagcaccaactaggtctcctgcctcccctgccctcccctcctatgcccttgtggggcccttggggtggtaggtgagacacacagtctctt

SEQ ID NO: 36634 - DNA, 435 bp, Zea Mays
gcttaggcaatgaacattttattgccccgggatgaagtccctctctatattgctggccacttgttggtctctaaataccgtgataactccgcgtagccctggtatcttcatacataggtatagtccatggattgctactttgaaggcattgattgcccctctgcctaggattgctttgtacgggtacaccatgtcgatgacgtcaaaagtaatttgttctgttcgggcattcagactagcaccaaaagatagtggtaagactattttgccgagaggagactagctttgccttcaaatccaaacaaagggttatccgctggatgcagcagctttgggttgatgccattctatcgaaagtcatggaggaatataatgtctaccttgctaccattatccacgaggtccttgtgaatctcccagcctactatgttgcag

SEQ ID NO: 36635 - DNA, 419 bp, Zea Mays
ccacaattcgcgcccgcctgggagattcatgtcgcgggaggagtagataacgtcagggccgggtaaaaacatccggtaggggggtgaatccagtcgctggccggaccggccgtcttgtcccaccgtggacaaagcgctggcataataaccacgcctccacgtcatatgggtcgtggtaagcaaccagttattgaccgcagaccagttcccttttgtgcgccacagtgatcaagccactgtgaaatatcctagccggataaccgtgatcataatcctaaaattcttgtccagttcgatcgggacctataaattgaggatgccctctgctccgcttcttagtaacgcgtccaacccatccccaactagctcctatcgtgcaccaccgcgccccaatttcgcatttcccccaactcgcttct

SEQ ID NO: 36636 - DNA, 493 bp, Zea Mays
cttgagcatcgacaaggcgttgctttgcggactccttggatgtagtgtttggggtagagtttatgtgagtgccagagaagttcacgggcttacaaacaaggtcccgatcgcggtaagagaaggcagcgctcgggggatctctagcggcggcggcggcgcaagctcagtgaagtccaggcgagagggcgcaatgacgagctccccctcccctcccggttcgcgctctttattctctcaccctctctgcgttctctgctatctaaatatggatgtgagttatcctctgttgtagatttatgatagagcactggctctaatcctgttgcctctgtggatgtggatgcaaacacatatgaccctatggctgatccaaaactgatgaggacatcctccactattacccgttggcaaagacgcaattggcccagttggcccaattgtagtcggatgacgaccgtgtgagcctcagaattatcccacctcgcttaacttg

SEQ ID NO: 36637 - DNA, 322 bp, Zea Mays
ccggggccttcatatccttgcgatatgcgaagttataacagccaaagttctcatgcagtccgtcttctctggccttcgtctggtaatgaagctcatgcagtcggcaaaaagcttcagcattcgagtccattccttggctttgtagggcccagatgaagacgctgagcctaacaatagcattaggggtcagctgatgaagatagatttcgtaattatccaaaacttccccaatcatctcgttcaagggaaaccgcaatcccgctctgaagaaactcttgaaaactacaacctcatcatttttcgatgtcggagtggtttcttc

SEQ ID NO: 36638 - DNA, 273 bp, Zea Mays
ggattttgcacaaggatggagctactgagatggatgagctggtggggtatgaaatgttcatacatgattttgcgtggtctaacaagaggggtggcaccatcgatggagaggttttcaatacaaacatgccatggttgggtgtgttcagtccatggacccaaatcaacctgctacggttcagcacaataacgccatggatgtataatgatttcaattctgatgggcacgtgcttgcaggggatccaagaatggatcgttctcattggaatgatg

SEQ ID NO: 36639 - DNA, 328 bp, Zea Mays
gtcgtcacataaaatttggtgaaaatccgccctgaaggtgcttggtcagtcgttctgaagaaactaggcgatggtacagtatcccgattagactgtcagctcagtcagctcgccgccggcgatccgcgtccagatttgtgctggtcgccaggattcgtgctttgcacgtagaagatttctacgagaaggtaaagatctcacgggggggatggataggatcacggattggagtttatcatcgtgcctatagccgttgcgacgtggccggactaccggcgtcgccgtggaagcgccggtgaccttggttgcgccacgctgtagctcatgc

SEQ ID NO: 36640 - DNA, 302 bp, Zea Mays
ctgaaatttccgtccttatataatatagctcgtaaaaaagcgatacggtggcgaatgtttttaataggattcctctaaacatctttttcagtagagcactggtgggtggtaatcttttatgttggaatagattggtcttgagtattgctcatactcatctatccactgggagagatgagttcaaatggaatttgtcaacctcgaggctttttacggtccgttcaatgtacaatgctcttattaataatgccaagattttctatttcaaaccgctatggaagatgaaaatacctctgaaaatt

SEQ ID NO: 36641 - DNA, 290 bp, Zea Mays
ccacagagacgagattatcgcaagtcagttggcgaacagatatcaagttttcaaccaaatcaggggaaattaaaatgtaacgcatggaaagattatgaagtttggtgggaatagaagatagagcagtgtgagtaacaggtagacgagatccattgccgacggtgatagtggaagaaaatggatgaggttgaacatgttggagagattgtgttaccagagacatgcgacgaggcgccggagtcgaggaaccagtcaaaagtgggcaatgggtgtgctgcgatgagtcgttc

SEQ ID NO: 36642 - DNA, 402 bp, Zea Mays
ctcctgtccaggaggagaggcgctctgcgtggttcgtgaaaggagaaggtgaggcatttcgctccacgctagcagccatcagccatggcagcgggcgggggtgctgcctgtgctccgcaaccagacgaaacggcgcgcgtggagcggttcagacgttgtcctggtggagatggcaagtctgttttcatatgttggcagatgactgttgtgtggtgcgatgtgctgtggtcgatacggcacaagtagttgtgcttatctggcgaaaccatgctactccattagtccagtgtctagagggcaaagcatcacaagaccatcctgctatggataacaatacaggtggtaatctctactaactattaaggcattagtgtagactgacctcgcccccctctacgcgtg

SEQ ID NO: 36643 - DNA, 394 bp, Zea Mays
attatcaccttcgcctttgacacctctatatcttaccttgataccaatattatacctgtgctccaaaaccttctctcttttgtctcaattttaaaagttgaaggttacctattttcccttagttgtatcctattccttgccgcttgcgagtttttaactacaccctttgttgtctgttactacctttaccttcgtcgtctctccatcttaccttgatgactatcttatgtttgttatttaaaattccctctctcatctcaattcgagggaagtgttttacttatcccgcccttggtcggaacctcgtctttgctaggtgtgagtcttatcttaactccattctttgttgtactcataccactggctcttctatgccttcatcttttctcttata

SEQ ID NO: 36644 - DNA, 344 bp, Zea Mays
gctcggcttgcgatagttactcatcgccgatgaagtcgccacgatggaagacacgaatccactgcgccagtaatctcccctctctctggccgccagcacggctcggccaaattgagcaccaccgcttaagccctctataaattgaaggccgggtcagctgtgctatgtcatcacgaaaccaaagcacccgctcccaccctcaatcgttcgccagagctcacgaatttcgagttttccccaaatcggttcatcccaccgcaagaacaccctcgccgtggccagtgcaattgaggtcagttcaaaccttctgctccctcttttgagtgtccttatgtaactgtgat

SEQ ID NO: 36645 - DNA, 642 bp, Zea Mays
gttggccggtccttcttctcaccactcatagactcaatgggacccaagaaccttggcttgggtgtggagggatggaagggtttctatcagaccatcaggccgacacaaaaaggcttatctgtgatcataggtaagatttcacttcatttgaaaattcttatgatctgtccaagttttctgtgatatcttgagaaaaaacacgtttgtgatgcttatatgttagaaatgaccagccctgtgcaatttgatttcatatggctggttggcatatagtgagatcaattgaaacgtctgtacttttgtgtttcaatttttatatgttttaagttgttgacggctgcatattttccattgcagacatttcttcatcagctttcattcgacccctgccactgattgactttgttatggagattctgaacaaagataacaggacctttagaagtattacttccatggatcttgtcaaggtaggcatttttcccacacaaagagcattgtgcatgatcacacttgtgatggatgaggctttctgagtttgcagctcaagaaagccctcaagggtatgaggattgaagtcacacaccgaggagacatacgccggaagtaccgaattgccagcttgacaaacagtcctccatc

SEQ ID NO: 36646 - DNA, 454 bp, Zea Mays
gtggactttgctgcataataagatcttaacagctgaaaatctccagaaaagaggttggagtaatgatccgatctgcagactttgcaaacaagaaccagaagttgtaacccacttgttccaaaactgtatcttcactagggcggtgtgggcgcaactttctcattggcttgacctcgcgttgctgccagggatggcacaatctttgtcaatatacacttggtggaacaagtgcagagccaaagtcgataaatgctcaaggagagagtttgatggtttgatcatccttttctggtgggagatttggaaagagcgaaaccgcagaaccttccaaagcctagagaagtcagagtgtgtgattgcagggttaatcaaggatgtttttgggcagcaacgaattgctaattcttttgactttggttgctagtgtctctgcgtagcgttctttatctttttt

SEQ ID NO: 36647 - DNA, 455 bp, Zea Mays
aggactacccaatgaccaaggatgacagagatcacatggcttggacgatgccagacaataacccgagagccatcgcacacacctatcaaacccactacccctcactatcaagacatacaaccacccttttgccactaccaccaaaactacaaccaacaccaagaaagacttcccccacctccccatcaataaatgcttcccctcccaccccaccacaaataattcccctagcacaactccccctccataacctaaagaagagaaaaacaactgcttgtctcgggaataatccacatgatcactagagggtccagcatggacttcatgaacaatcggtagaagaaagaccactatcgaagagtgaatcatgtcgctgtcaacaaacccatagtacaaacaaaatggcctcacatgccccctaacctttgatgcaagagatgtagatctacgcagcg

SEQ ID NO: 36648 - DNA, 328 bp, Zea Mays
gcaatccacaaaaaaataagttgaatcagtgtgagtcatacaagggagcgcccatggtagccttggagctttcacagtcacaatggtcttgtcatgtgatggattttgttctctatatgaggtcaaataggtcgccgagacgccgacaggcgatagcaaggagcaaaaagtgcaatggtagaggcaaggaacgtgtttcttttgtcaaagttgaccatggagatcaagagggtgagaaggcgtgcaagagtaggaagaatgcaggatttgtatattactggagtccaccggccagggataggctctgcctcctcgagccgctctccac

SEQ ID NO: 36649 - DNA, 859 bp, Zea Mays
ttcagactcacagtgtgattgggcgatctttggactaggatctgaccatgatctagtcagtgtttggctatgattgctatagaaagaatgtagctggatcatcaggcaacaactttgatacaggtgggtggtgaggttgtcacatagattatagagaaaatctgctttgattgtggtctgtcaggcgctctatcgaatgtttccaatagtatagtaaacagataggatcaggttcagatcccctcaccaccgacgagccgtgcgctcagattcatgctcgccgtggtgatttgcactcggatcagttagataacatcgggggtatgtaaatatcacgttgtggatacactccggccactattttactccatccaccgtacccaagcagatcacggttgcttcggatgggttcgccggagatagccacttcacgaccttgcgccatgtgccttggcatgttaaccacaccaccgtgactcacgttagcccgtccggtggtcgccagggagcttgccacggtatttgccaccaatcgcgcgccagtgaccccctctttctccagccgccgcgcgtctctctcaaattcactagccaccgctcaagcctgctataaattgcgcatacccatggctccgttaagtagtcaagcccctcatccagcaaaccgtgcctcgaatcatccactagagctccccaatttgggatttcccccaaatcaaccaagaacaccgagcggtgtgacctcgccgtggccaacgagtttcaggtttgttcatgtctgttgtcctcttgtttcagcacccttacttgctcctgatactcgctgacccatccgattaagctaggaggtcctagatca

SEQ ID NO: 36650 - DNA, 1173 bp, Zea Mays
agtgcttaaccagagtttgctgacagtcagcttgaataagtccttccatagatggctagtgaagaccgggtcccgatcactcacaatagatgagggaatgccatgaagacgaacaatttccgcaaagaagatcctggcaacagaagctgcggtgtaggggtgactgagtgcaatgaaatgggtgtatttggagaatcgatccactactgtcaggatcacagattttccatgaactcgtggcaatccttcaacaaagtccattgagatatctgcccacacctgtgagggaatgtctaatggctgtaagaggcctgctaggtgcagatgctctgttttgttgcgttgacatgttgtacaggacttaacaaactctcgaactcgagctttgtcccgtgggatatagaaatcagcccttagtctggtaagtgttttctgaatcccttcatggcctgcattatggactgtttgcagcagcgccgtcaaacaatctgatgatgttggcacgtaaatgcgtcggccatggagaatgagaccatcctgcacgcgccatggaggaggtaaggtcccctctctaatctgggtgcacatggtctggcaatctgggtccctagcagtgtcccttctgaggtcatcatagagggtaaaagttggccccgatagagttgcagagaaaagggtgtccgcattgcgacgggagagtgcatctgctactgtgttgaggcgacctggctggtactggacagagaaatcaaacccaaggattttactaatccactggtgttgcgggattgtggagagtcgctggtcgaggaggaacttgagactatagtggtctgtccgtatgatgaagcggcgtccccacaaatatggccgccagtgtcgtactgcttgtacgagaccaataagctctctttcatatgctgctaatttgtggtgtcttgctgcaaaaggacgactgaagaatgccatggctcctgttccttgatgaaggactgccccaaagcctgtgccagatgcatcacaatcaaccatgaagtctttggtgaatgatggtagctggagtacaggtgcttctgttaatgctgttttgagggctgcaaaggcagactcggctgcttcagtccatttgaagccttctttgcgcaaaagctgtgtaaggggtgctgctatgac

SEQ ID NO: 36651 - DNA, 301 bp, Zea Mays
ccatggctgagaagggagaggaagaggataagcgcgcggtgtgccagggaagaggataagcgcgcgcagggagaatatcaggaaggggagaagcggcggggataaggctgaagatatttttcttctttttttacagaaaaattatagatattttgggtcccaattttcttagcgatttatacgatgtaaacagtaattgtgacacgattttgatttggcgaatactttagaatcagatgaatttacatccgtcatttatatccaaagttctggatcggggcgagaaacgacatactgaaat

SEQ ID NO: 36652 - DNA, 326 bp, Zea Mays
cacggttgtaattagttaacactgtgtgcggatggcgggttgaatactggaaaccagggggtttcttttgtaaatctgctcggctgaaggggtatgaagtatccagggccgcccgatcgagtctggagggtcgagataatatataacatggcccgaagcggtatgaaatacggaccaccggatcggaaacctacgtcccagattttattgggccagatccatttgcatccgatcaatatgaatccaacagcctgtatcacacatgcgaaggggtacgccaagctctactccctaccgtccatcgggaatcgacggtcacaaggttc

SEQ ID NO: 36653 - DNA, 501 bp, Zea Mays
gtttttttctcgaaccacgcaggagaggtgcacatcatttcattaaaaagcaaatagggaggccatgggagaaaagagtcccccaaggccaaaaaaatacaacacccactctcacaaaatacaatacacggccatgacctcctagggtcatccgtgcatcacattctaaaaagcccttcatcaattacagtccaaaccaccatctgtgcatcacattctaaaaaatgcaagcattttgatgcttccatagctcccaagtaactagaatcactagggagttaaattatttctgcatcaccttaggtagggagctaacaactctacaccaccaagaatttaggcgattgttaggatccggcggcctcacaatattattcaacctttgcagtactaaggtccaaacccagctgataaccgcagcatgtgaattcagagccatagtgctaaacgagctagcaagagtctactgatcccagctgccgggccatggaatccagctta

SEQ ID NO: 36654 - DNA, 437 bp, Zea Mays
cagaaatttgcgagaaccttagcattgttaccttctgtccgagtgtccgaggacagttggtcactgatgattcggaggatactgattgtggtaaacaatcttttgaatgatgctttcattgggcttgaagaaggtatactatagcagtttgctcctaatattgtttcagttctaccatttcaggttaatttttacccattctactgttacagaaaagaaaggccatgatattatgctgctgctagttccacctggaactgatcctctaccaacattgggagatgaagtaatgcctggaggcaatgtgcatatcatgaagaaatttcgtgtctttactgttcctaccatttcagctcttacgctttgctgcagcgtgatgctgactagttattatccagttcaggttttgtcaaaatcagaacatttctgtatatcac

SEQ ID NO: 36655 - DNA, 474 bp, Zea Mays
cccagtgtctgtgtgtgtaactatttataattactgtcaccaaagctcagaaaatcatggttttaatctgtcaacaggtttgctaagattagatgggtaattcgatgaaaccaaactcaaccttatttgggtgcaagatatacatattacatagaaaaagtacatggagaagtagaagggaccataccaagaaggcataaaaccacacatcgctttggaaatttgtttacagtcgaggcaatataggtgttgacctctataacttgctgttgtacctgtttcaattaaaatggcattacttccatagcaaaggaaaattccactcaacaaaacaaatagttaccaaaacagtaagaacctgaacattcttttcgctccatccaggcacagcacacaacaaacgaatcagaagttcagcagacttatcaagttccgtaagattttccacctcttgtttgagtacgccaatagctg

SEQ ID NO: 36656 - DNA, 443 bp, Zea Mays
aacattctctactttggagtctatgggagcgaaacggtcttctgaacaacggttgccgagggtatatgccattagcgtggtagtaatccttgttgtactcgtggccattcaccatgaagttcacatttgatgcttcatccttaagcacgtcagtgaacagtggcggttagttaaatacgtccccgtcaatgttcgatcctgccacctcaaaatagcatgctagatccataagtcatatgagacaaccgcctcgagcatgatggtcaggatctaatgtctcctcttgtcatctatcctctccatccaacaggacaatttcttcacttccaatgcatgcaatctatacttccaataatactaggaaatcctatttcctctccccttagctaatagacgcctaaggtcatcaatattgggacaacgcatgtactcctccccgaaat

SEQ ID NO: 36657 - DNA, 550 bp, Zea Mays
tggtaatgcgcaggacggcttgttccctgcaattccacgagcagctataatcttcagattctgaattagttgtaacacatgctacacacataccttggccccagcatggctgcacaggaagaaatcaaattctgttgggtggcagatattattatcaactacggtgcctgcaaattccataaacgtttcagcaaaagcattgtagaaaaaacgcaatagaaaaaacagcaaatgcgcctgcatccctaaccagctcgaatattcccactcttgtcctcgtattggctattgctggggaagagccttgtgtggtgcctcttctgcaccactacgaaggtgatctttggcttctcattgtaaagagctgtccatgcctgaagaaagtataaatgttatactaactgagggaacaacacttgatgtctcaaattgtttctaccttctctatctcatggatttcttgctccagcacttgtttgaattggctctcacttacgccatccctaacggtgaaagagggagtcaattaccattgcatgtcagtcagaaa

SEQ ID NO: 36658 - DNA, 358 bp, Zea Mays
tcgccagtgagcttgccacggcagtagccacgtactcaccgcgccgccttcatccttacctccggccgccaacacggctcggccaaattgagcaccatcgcctgggggctctataaattgagcgtacccccagctccgccatgcatccaagcatctactgcacccaccggcatcccgaaacccccaccagagcacgtgaatttgggatttccccaaaaccgttgaagaacaccgcgaagaacacctcgccatggtcagcccgattcaggtccaatctcaccctcggtttccttgtttcaacatccttgcttgctcttgatgctcaccgacccgttaaatcgaactagaccgccatgaa

SEQ ID NO: 36659 - DNA, 287 bp, Zea Mays
cttggtggatgcactggggttctcaatcttggcctatgtctggtggtcaatcttagtagactttagctttatgaaaaactcatctacgatgagagtctcgtagttgggtgactcgatgatcgtcgagactttcaccttctaatccctcctatctagagcatgaagtagcttgagcgctctctcatgatcatcatagggtagttgcgccttgtttgcacgcatcttgttttcaatcgactgaaactgagaaaatatagtgtctatggtctctccaaccaactatataa

SEQ ID NO: 36660 - DNA, 497 bp, Zea Mays
tgaggagatttaaagtcaaagggaagttgtccccttgctttattggacccttcttgatcctgaagcgagtgggagaactttcctatcaactagaactactcgatcatcttgcggatgtacatgatgtcttccatgtatctcaactgaagaagtgcctccgcgtacctgaagagcagctaccaatggatgatcttagtgttcaagatgatctgatttatactgagtatcctatcaagattcttgataccttgactcgtgtcacaaggagtaaagtgattaaaatgtgcaaagtgcaatggagtcatcatggagaagatgaagctacttgggaaagagaagaagagctacgagtagattttccccacctctttcctagttctacctaaatctcgaggacgagattctttgtaaggggggtaggatttgtaatacccaactttggaatataagggagagaataaaattatgtgtaatgcctactaattcatatgaattat

SEQ ID NO: 36661 - DNA, 341 bp, Zea Mays
atttggtcaggctcaagtgccgatccgatactatttaacgaacacccaaacaaacctgatgcagcatcaattaaaatgcgttgtcaaatctgaaaaaagtcccctcaaaaaaagaatatccctaggctcattaatgaatgaacagttcatgtattgcaaatcgtaagatctatctcccataacacaacaagcaaataataaactaatgagtaatgaggcaccaacaaagtatttaaatatcaagagaacctatttaagacgacagggcatatcaaaagaaagtaatcaaccaacaaggcactaacaaatcatttaaatgtgatgatagcgtttttttaaga

SEQ ID NO: 36662 - DNA, 352 bp, Zea Mays
ttcactaatatatttaaggcagaggcgaatcaagactaggtgggcaagctgcaaactcgattatcaagcaactgagagactgggtggtatattttagagaaacatgctattcatctacttcttggtgaagccgttgaccggagaattgtcttctaccgcctcttctcgtaggacatttatgagccagcactatacttcgaaaacccgcgatgtcgagtcgtgtgaatgaatccatcagtgctttgagcagagcatggacccttctacattgtacaatttagtctctcaatctgtttagttcactatagtttctgctatgatcagcatgtactttcatgtatgcgtctgccac

SEQ ID NO: 36663 - DNA, 775 bp, Zea Mays
cgacctgcaaattgctttgttaggacaactgaaacagccctgatggtacagtgtctgcaaaaatatctcaggttcagcccccccccttgccgccggtgatcttgcgctcggattcacaccggtcgccgtgattcgtactagacacgtagtagatatccacggggaggtaaaaagatctcacgggggcacggatttggtcgcggcagaagcttatcaccgtgcctgtagccgtgcgacgtggccggaccactggtgtcaccgtggaaactcctgggacctcggttatgccacgccgtggctcgttgctatgcggtagtaaccgtggcacatttaggattaaaatctttgagccgttgcaccggtgaacgccacgaccaagccaccagtgttctcccctctcttcggccgccagcgcgccatctcaaattcacgggccaccaccctcaggtcctataaattgagcgtgccatcagatccgctaggtagtcacgcacccaatacaccaacccgtgcctcagatcgtccaccagagcgccccaatttgagatttcgcccaaatcggtcaagaacactgtgtgtgtgagctcgctgcggtcagcccttcgcaggtccgatcacccgctccttgctcttgttttagcatccttgtgtgcttgtgatgcttcttgacccggccaattgagctaaaacacgtaggatcactgggaacgctttgggttgtccgttgatcgcgctgtcaccgtgggcagagagattaggggctagaaacttaaaa

SEQ ID NO: 36664 - DNA, 511 bp, Zea Mays
gccaaagtggaggcgagaggcctcaagagtgccctggaactgcggtggctggatcagctgcacgaagatgtagcagagataatgagcatacggcagctgacgtcgggcacgaagaccatccaatatcgtgtcctcgatctcacatataaggaagtcaacaacatcaaactctgaatgagagatcagggcaccaagtagccagagctggatatgagtggtagcctatctataacccatccggggcagtagcgtccgtctcatgagttgatataagtacttggtcgctggagtgaagtctgtcggagagcgttgcgacccatctgagaaaggcggtcggaacagggccgcgacatgagctgtagatggagcaactccgccgtgagggcgccgaggaggatcagaagtaccataacacaagctgtgaaggcgagtcgatgactcggtgaatccaaacagctggtgaatctggctggcatgaatagtaacatcctctcgctcaaagagaaacctc

SEQ ID NO: 36665 - DNA, 282 bp, Zea Mays
tacagtgagggacaggcaaccaaaccagagctatttacaaggtacctagagctaactcttggccggcacaatccagacagctaagcacaaacattacgcaactacaagtgcagagtcattccatctactaaagccagctgaacaatccatccacaaaagcgataaacagaggtgaccaagatgtacatccacaaaaggcaagacatcatttgtgactgaccaagatgtacatccacaaaaggcaagacatcatttgtgacgtgttcagattgcaggtttgtg

SEQ ID NO: 36666 - DNA, 473 bp, Zea Mays
aaccccgtaaactcggtctgatcatgaaccgcacacaatccggtgaggtcactcatgtaacctggtctttggtaccctctgtggtccagcccgttatgtgtcgatcttataaacccggatctcctctagatctctatgcaaggtctcgagcatccggaagaagaggaaatgttttactcccaatctagctccaagtgcacaatatccattatcatatcctcgaccaaggtacaattttctctttctgcctccctctcgagtttcttagcttcattgttaccatgaaatcttgattatgtagccagctttgctgcttagtttatatcatcactcaatactgaacaagggcacatgttgactcgtacctagtctaaaggaaaagcccacattctcgcgggtggtctggagctaggtagccgcttagcgtggtcccgtactgtaagcctacaccttccactaccctagaatagttg

SEQ ID NO: 36667 - DNA, 412 bp, Zea Mays
ctcatgggtcaggggaggtcgtctcctaccttggctccgagatgaaaacaaacgctgccgggattctctccgtaacaatcccccgataatcctgccaactaatgcgccaaccagccggttccaagtgtatatattcatccttgaccgacgttactcttcatcctcgcaaaccaaatctgtggtcgccaaaccgtgagcatatagactagaactatgtgccgccgccgtcgttcctcacttgtgcggctgctctaggtttgggcgatgatcaggggggttcgcaggagtttctgggtcgtatacagccgtgttgggggcacgcgggacctcgggacactcgaatttctcgacgaagcttagtggcaccgccgattgttgctgcgccgtcggcggctctccaggcctctcctct

SEQ ID NO: 36668 - DNA, 1265 bp, Zea Mays
tgagtctccaaaccatagtacacgttttggtccccggaggacggtaaggctattttggcctcccgcgacacatgtttttgtcgttgaacaacaatttgatgccacccgttcgccacccttgttttggccactaagacaggtaaggctgtttttggcctcgcgtgagctacaacacatgttttcatggccgaacaaccaatttagtgtccaaccatagtacactagtgttaaaaccatagtacacatttttgtccccggaggcctgtaaggctatttttggcgtcccgcgacacatgttttcttcgtcgaacaacaatttcatgcctcccgcccgccaaacatgttttggctactggcatgggaaaggttgtttttagcatctattgagctacatcacacaaaacacttaaatcctaaaccccgagccccaaaccctaaaccatgaacccgtaaccgcgaacccttagactaaaacccgacccccaaaacacaaaatcacaaatcccaaactccaaaccctaaacattaaaccccaaacgctaaccctcaaatcgaaacccgaaatctcgaatcccaaaagcctaagctctaaacctcgagccccaaacgctaaggcctgaacattgaaccccaaaccctaatttgtgaaccctatacctcgaaccctaaatcaaagacccgaccaccaaaacacaaaactccaaaccccaaacttcaaaccctaaaacacaaccctaaaaagtaatgtaaggctgtttttggcctcgcgtgagctacaacacacgttttcatggccgaacaaccaatttagtgtccaaaccatagtacactagtgtccgaaccattgtacacgcatttggccccggaggccggtaaggctatttttggcctcccgcgacacatgttttcgtcgtcgaacaacgatttcatgcctcccgcccaaactctaaacacagagccccaaaccctaaagcccgaaccctgaaccctgaaccctaaattgtgaaccctataccccaaaccctaaaacgaaaacccgaacaccaaaacacaactccaaacccaaaaacacaacactaaacagtaaagtaaggctgtttttggcctcgcttgagctacaacacacgttttcatggccgaacaaccaatttagtgtccaaaccatagtacactagtgtcactgtaaaccctaaactccaaaccccaaactccaaaccctaaaacacaaccctaaaaagtaaagtaaggctgttttgggcctcgcg

SEQ ID NO: 36669 - DNA, 279 bp, Zea Mays
cattggaatacttcagcggactttaatacttcgaagaatggtaagctttgtttagcggattttgagataaatctattcagagatgctagtctacctgccaaacgctgagcccctttccttgattttggtggttccttgtgaagtatggattctatcttatgagggttggtttcaattcccttcattgacaccagacatcaaagggactttccctttatgattaagcttcagattagcctttctaatgttattgatggtttcttgtaactctgaaatgtg

SEQ ID NO: 36670 - DNA, 376 bp, Zea Mays
atttcggctaagtccagggggttttgtgcaatgtcagtgactcatgcaaatagtagaccgaggactgttttgagagagaaaaaggagagaaaatccagggggttcagcgcaaacctgtatttcttttccctttcgaatttattcttcttttaaatattacagagaactaaataaatgcataacttgaagaataattatccaaaatttgtcaaaccaattttgctagactttgtgaaatataaactatcagacaaaaatagtaaaccctatagttcctgtattattttctatagttttgaattaaataagaaaactgctcaaaacttaatattagaaggaaaaatagaaatattattagaccagggttaagaaaaat

SEQ ID NO: 36671 - DNA, 493 bp, Zea Mays
cacagaccaaagcactaatatcttgggcaaagaggttccgcacacttgaaggcctaaacactcagcattaactcggccgaagaattgatcgaactccgtataagtaggaatacataccgtgataaaggagcaattaggtagaatagatagtgatcacaacttgtaaagggacaaccctttggtcacctatataaggtcgagggtgtacccctactaaaacatctcataccatctctgatcaaccacatcttagcaccaccacaaagatcattagcccacttgtagcatccacgagctactagattggctggagaactcatcttccaccacccatagctcatttgtaatctgtatacctaagtgcaattccattacacatcctcaacaggaagtagggtgttacgcattctagctccccgaacatgtataaatccttgtgcaaatttgacatgcccttgcatgtaccatcgagtcatagtcaacgacgacgtcc

SEQ ID NO: 36672 - DNA, 355 bp, Zea Mays
tggccaactaagttttgaaagtcaaaagtttcatcttccgaagtatcttcggtcatctcttccttctcgggttttgcggccgtagtctcttcggtggctgtggcagcttcttctacggccatgtttagtagcattttgtctatatcagcagctatgctctctaaattaatatcttcggatttggcatcttcggctctggcctcttctgtggcagcctctgaaggtacagcttcagtagctgtcatgctttcaatagctggcaccttcggagctgaagctcctggtagtgttgcttcaataacttctgtcacagtaacgattctttgcctctttgacgtaggtgccttcgtttttg

SEQ ID NO: 36673 - DNA, 362 bp, Zea Mays
ccagccaggtaggagttccagaaggtcagtactactgacgactgctgaccgaaggaaggaatgtgagcagaatgaccgaccgaacgacggaacgagtgagccgccagcccgatggaggagtgcatggcctggccccgacgagtgcgagtagttttcatcgtggtctctttgcagacaaaatgtcgaagaagaataagctgcaccctcatccgaatccgatccagtcggtcgtcgccgcgccggcccctgctagtgatcggagaccagaaagtccgcgcggggtggcgtcgtcggtcattaagtggccaccactgcactaccaccaccgtactgccgccggtgggagctagactctcatcgca

SEQ ID NO: 36674 - DNA, 419 bp, Zea Mays
tcaagcgcaaatatttctaagacacagtcgataagggttcatggactgcgtgttaaaatccagagaacctagggtctttttaataatttactcggccgaaggggtatggatgggtctcagccgttggattagaaaccaagggcccagatgaaatcttcactttactgaaccggtatctgatgagattgatgatcaagggttgcgatctattatgtgcacgatttgatcttgcccatacatcgacaatccaacagccgggacaagtcctccccagtcggtacacagcctctaatctcagtcgttggccgccagatcaatagtccccatgattaccccctctttcctgctctccgaccaacccgagacgacggcaccctggttttcaaggaggcgccatggccggagctcccaaacccccg

SEQ ID NO: 36675 - DNA, 369 bp, Zea Mays
cttgaggagaacttaaggatgctaggacaaatgattgaggagcttgaacaaacctggaacaagctggccgcggtgaggtgttcttgcggtgtattcgaaccgatttgggggaagttagaaattggagttcctcagtgaacgattgagggtgataatgggtggctgggtgtgtgatgaccttgcggagctcacggcgagctcaatttatactaagcgagagaggtggccgggaattggaacgatgacgtgcggcggtcggaggagggggagtttcactggcgcaatgaattcatggcatctactgtggcagtcattccggcgatcaacggagagtcacaatggttcacggcgatgcggtggaggtactca

SEQ ID NO: 36676 - DNA, 295 bp, Zea Mays
caattacggaggcttgaagaaggcgcccaaacccaaacatggcatgtccaatcggtcgtgctaacatgggcccgtcagccactggactgtgccatgttgcgggccatacagatggtccggacatctgtaccctcatgtcatggcaaccgtggaatctaaggagaggaatgctggatgcttttgagggctctgctatgacaacgcatgccttggtgcagctgatcaaatcggtggctgacaattggatttaggcatgtgcagtagtaggtcttggttgtttaccagttgcgtaatt

SEQ ID NO: 36677 - DNA, 340 bp, Zea Mays
tctaccctatttctctaccctaaaagcaatattctgtcctagtcagcgagattctctaccctatactacaatcctccgcactcatctctatcctatatttccaccctataccgactacccttctcttttttctccacactctccctaccatacggtgacctggcctgccacgtgaagaaagagaagcggtaggggagcgacggcagcaactccatagctgaggtgagagaacgttcaccctaccatacggtgaggtttagagcacaccgctgcagcattcgggttaccctatacctcactctaaagctttagggagagcttcccagtacctcactgcgcc

SEQ ID NO: 36678 - DNA, 442 bp, Zea Mays
agaagatcttaaagagtaggcgtaaagatgagtatcaaggtaagatcgatggatgacaaaggtaatgggaatagcaaccgaaaacacatcaaaggatggaattaggaaaaatcttgcaaggcgacactggggaaaataatcaagggcgaggtagtaaagcaccgctcacaaattgagatagaagattggagattttagataacagatatgacgtaatcaacaatgtgtgggcgagaaatgggaaaggcgacaacaaacaaaagcacaacaaaaggatggagttgcaaggaagaggaaaaggtgataaacatcaaggtaagatatagaggcgataagggcaaaggtgataacgatgaaaagcataatccatggacagagttaaggcaagactcgcaaagtgatgaagtggagaaaacaatcaaggataagataagtgaggttc

SEQ ID NO: 36679 - DNA, 1413 bp, Zea Mays
caagaagtaggagaagatgagcgagcaagtgccctacgagcggcagccctgcaatctctttcagctatggtaagttctgtgattgtgccatatctaactgatatcatatgttgatgttagcatgactttctaaaagttctggataaattaatacgaagttcaaaactcaaagtgtaagagaactgctatactcctattttaagaggtaagttaaaacattcttccagcataactctaagtcacagtttacttcgtttcttatgatgtaagcaatgaaagatcaaaggcagtaagtattcgtgagttgactaacttcatatgcataacttataaactaaaactagctcagttgtgtgcgagtgtggatgtatgcctatatcacccaagttcaaaccctatttgatgcaatgtttggctcctatttctgctttatcaactaaacatgacaacttgtagttcggcggagttgggttctctattattgtaacttcctatactccctccagtcacacgtgcatgtagttttggatataggcatggtgatggcatgttttgtttttgactggagggagtagctatctagaacttaaatctcttttcaaaaaatatttcagtgtatgcatggcatcttattaaagattactgattttcttattgttctattatgccaataaccactgagcacttaaaaattttaaacaaaatctttggtagtcattatatcatttagttttcttgttgagcaggtctggtttatgggggagctttctcatatctcgtcagagtttgacaatgtaagtaatatgcaagtgagctctttttcttgtgttactttcttgcaaggaaggttcattgcttatgttcattttgttactaccaaactgtcacttttgcaagcagattgcagccacaaatgattcaccagctctgttttttctactgtatcttttaggttgttcaagttgtactggaaaactacaaacctcagaagatgcaaaatgatgatcaaggtaccaatgatgccgacaaccagttggtgcaggaagaccagaaggctgagcaccccccttcccctttcattatcactccggccccctcttgggagagcatagttaatgttaagggaggagtcaacctaccagagtaatataatcttagttttgctcttttattgacttcgtcttttcttcatatataataagtgggtgattcctaaacatactcccgtgctgcagggaagatgctagagatcccaaattttggtccagaatctgtgtgcacaatatggccaagctttctagggaggcaaccacattccgccgcatcttggaatgtttgtttcggtactttggtaacaatagttcatggttatcagaaaatggacttgctttgtgtgtcttgttggacatgcaa

SEQ ID NO: 36680 - DNA, 377 bp, Zea Mays
cctccagcagatatatttttacacgtgaggagaaccttcgtcagcagaattactgcgcagcaactgtaacataatactcagcattgaatcaatagaagaggagtctttttcttcgtgaagcatgaaaagaagggaaggtgatggtatgtacgaaggtttcatgcatcacaaagaaatacattacattgacatacatacaaaaacttgatgtttggttcttacaaaagacgaaagctatatacaagcactaagctctctaaaataaaatgttttagtcttctttcaacaatttctcagcggtctcatttagcagtctgtcgatatcttcgtcaacagcttcattagcaatttttatcatatctagcgcttccttcatg

SEQ ID NO: 36681 - DNA, 573 bp, Zea Mays
gacaggatgagtggtcctatatttcaaagtggtccgtacccaacaacgacatctgtagttgaatactatcatttactgccatataaggaggtcttgttaaacgtcctgaacaggtatacataaagatttatctcagctgattatgcacgaaaccatcgatatcaaaaatgtgtctgcttacaactttttttaggttaatgactaaagatcactcttgacatgttgcagggactggcctttgtgttcttcactgagcgtgccaaaggagcaggtatttcaaaatgggaaatcttcatttccctctgaaatagaagaaagtttgaaggaacaagaagctaatagtaatagcaagactaaaatgaaaaaaatgccaacagacgtttctactccaaagaaaaataagcaggtagtaaaagcagttcgtgacagtggcaccaacgaaagcagcaccagcaaaaacaaaaaaggcagcaacacgaactgcaaaagaacatctgaagcctgcaagactaaagttgctacctacgcagagcatggggatggtcagagccctacaaaagacttacaagccag

SEQ ID NO: 36682 - DNA, 517 bp, Zea Mays
cacagccatgctcatcggaccgcgggttcatttcgcggttcaccagggactcatgtgctaattgccagggccgaagaggtacggggcaatcacagccgttggattgagaacgtgagcaccagattagatcggtctcccccaaagcggtacactccatcggccacacgattaggatccaacagctaggatttgcgtaaaccggagcccttggatcgttgatcggcgcacacgatttaattcatcgaagagttacgatcggtctaatcgcgactgttggtcaaagatccaacggttcccatgccacgggggcatcagcggcctagatccaatcccagccatacatctccgtttcaacggcccacgtcctttcccccaaactctcctctccctgtcaacaaagcggcggcgccactcacgagcacggcggaggccctcgccggccacagcattccccgcatccccgttctaaactccgatccgaggtgttcactacgcagcagatacatgggcgaactgg

SEQ ID NO: 36683 - DNA, 380 bp, Zea Mays
gagagtttgagcatttgtgaaatcaaatattagggggagaggcccaggtaattccgcaaaacttattcgtaaacaaatcagcaattgtatttttttggctagaaacctatcatagccttcctgaaaaaacacattaattgaagatgcccatattgtttgtataataacaacgaaccggttgacgacataaagacctactatgcacatggctgaggcaacgagagcatatgcccttatgtaatgggctagaatgtaacttaggcctccaaatatacttttgagaaggctacataggccctggagactgacctaatgtatattttccaaaaaaattaccatcattacctccattacgtcgggcaaatgagaaatgattcccc

SEQ ID NO: 36684 - DNA, 423 bp, Zea Mays
ttctgccagtgttcaacgacttgtttggtcgccttagcatgcagatctcagcaaaaatctcgtgtacggtctcttctctgcaaccaaatcctatcttttccatgtgagttccaagcaaagatatggtcgggtttgagagatataggggtgggaagttggctctgtccgagatgtccacgccaagacaaagatcatgtcaagtcatgtcaaacgtcttagggttgggttcaaacttttccagggtgttctaggggtctttaggcaccattttgtcaattgggccataaggttttgaggttggggataaggtgaacatgtttgatctttgaaagagggtcggttttgcacttgagaaaaacctgatttttcttttatgtccttctctttggtgacctttttggggcttttctgaattctttttgg

SEQ ID NO: 36685 - DNA, 741 bp, Zea Mays
tggactcggtgttgacatccgacgcagtaaggtgggcctccacgtcagcacggatggactccgacaggttggagaggcgccgatctgcttcagcgacgtgggattcgaggccgccgacccgagactcccacttagcctcgagcgattggaacctcttgtccagttcggcgaggagcgaacgggtttgattctctagtgctagggtgagatttgtctcagcaggaggagtgtgcgacatgtttgtggcaagggatcgaccctctgataccaatttgttagctacctatggaaggaaggaagaattctgggaaggatacagaagggagggagttcaggagaaggagaagaaggtagacgaggatggcatttccatagagttcagatagtgttcattacaagcataattcctgaagacagacatcatctcctacatatacttcacacacacggggacccaccaggcagactaacagatagataaacccaccacacagagacctgcatcaagcccactccggaccactcgtacggacattaggacgacgcttgcgagctcctcggtaagtggtttcctttgtgtgcaccggcaacggaggtgtaacataagggctctaggatcacctggtgccacctcaattgctcgttggggtttggattccgccgcgggaccacctcatcgcatggtcagtccctcccggcacttgatctgaggtaagacgccatacaagtcgttcgccttgt

SEQ ID NO: 36686 - DNA, 401 bp, Zea Mays
catctggctcgtgccgggccaagggggcatgtccccatctactgacacggagtacatgacctccacggcccccggcgggatgtagcccttggcgttggtgggcgacaggtctcatccacgtgacttggagagcagctccagcgtcctggcctagaaggaagggcctgttgtgaatcctgttttgctcgacatgcctacatagcaccgtgaggagaggatggagactatggtgtcatccttcactcttatcgtgttagtagggtgctgcgatagagacatggggctagcagtgttgcctcgtccgtcactagttgtacctatggtgcgtcgcgaggaggtgaagccagcggcagtgccccctccagctccttctacgccgatggtggcagcccctcagccac

SEQ ID NO: 36687 - DNA, 379 bp, Zea Mays
gtacgatcccaggaaattgattctcctctattgctctagcaaagagcactaccaacatatcagcaacaatgttgaagagtatcggtgagagaggcccccccttgtcaaaggcccttgtgtgtcgagaaaaagggtcctataccatcattaactctaacccccacgtgacctcccgagacgatattttggatccaagcgcaccactttggtgagaaacccttcatgcgcatagcttgcaggagaaaattccactttagcttattataagctttctcgaagtccaacttaagaataattccatctcatttttaacctatgtagctcatgtacagactcatgtaatacaattaccccttcaagaatattacgatcgggcata

SEQ ID NO: 36688 - DNA, 351 bp, Zea Mays
cgaagctaagggatgagcccaaatgccgaagcattctgccgagtgcacgagttgcactaccagacgaaggccagggcggatggtcttcatgaaaattttggttgctacaattttgtgtatcgcaaggatacgaagtctctagttctcagttaccgcagcaaatggccaaccggctggaaaggtgaatggttttatattaaggctgatgagaagaagagggggaaactgatgtcgatggtcatgtgcctgctgtccttaaacttcggaatgaccaggcccctgtgcaatatgcagctagggtcagcatgccagctggccgaggtagaattcagggtggtggctgagcaaatc

SEQ ID NO: 36689 - DNA, 454 bp, Zea Mays
aatagaagcactactgatggcccaaaacaagatgattgtggtggttctcctccttgccacctttcttgtggtggcaagatcgttgtgggttccagaagaaccctcaaatgcggatgacataagaggtgcttgcatcgaggagtgcaccaaagaaaataaggctcctggcgacaagaagacatgcgaagtgttgtgcaccaagctcacaaaaaagcctagcgaagaaggcaaacatgattgatgaagtagcactccgataatatataccctagtggatgagtggtcatctttgtagccatgtctgccacacgatggccttgattatattgtcttattgttttgtttttggtttccactagtatcctaattccttgttcatgtaacctaatgtcactcaaagcattttatatgcttcacttaattaaataaatacaaaggcaaaggcatgttctgt

SEQ ID NO: 36690 - DNA, 495 bp, Zea Mays
cctttgctggacaccgaattcaaccctacgcgaccatttcccctcacttaattgctagagttgagctctaaatcaccctgcccatggtgacaacgcgaactatggatgaatagaggtgttcccgataatctagcgcagtctagcttaattgaacgagtcgaggagcatcaggggcacgtaagggtgctgaaacaagagagcagaggacaagatcggacctggagcgcactggccacggtgagaccctccttacggcggcggaaaactgatttgggggaagtaagcaatttgggggctctggtgagtaattggaggcacgagcgggtgtgttgggtgcacagttacttagcggagccgagggtgtgctcaatttatagtgcccttgagcggtggcccgtgaatttgagatggcgctgtggcggccggagagaaaagggtgcactagcgcaagcaattggtggctttcaccgtggcgagctcactggcgatcaccgg

SEQ ID NO: 36691 - DNA, 317 bp, Zea Mays
gagcttcatccagtatcttctttctgagctcagggtccttaggaacaaccaatcgatctccaaaccatagaattcccttgctgtcctgtcggaaacacttgtattttttgccttttgcttgatcatatccttaataacctgaacacccttatcctcaacctgtgccctgatgatctgctcttgcaacgtgggctccaccgagatatagcttaggtcacccaaagaaacaacttccaggtgcagcttgcacaattcgtcacacagggtggtaactcccacatccatgctcatgcaattgcactgggcctttctgctta

SEQ ID NO: 36692 - DNA, 283 bp, Zea Mays
ccagggggtcgagcgtagggggagaaggggaaagtgcatcacaccagagagccagcctcttctgctaacaaattttttgcgtccttcctgtaagtgtgacatttatactcctccaaataaatatagccacgctaatacctctcttttttccctacccgattcatgcagggtctcgagaaatttgaagggagcagggagtgatcgggccacccttcgagaatgcctcagcctaaggaacaaatgaacatcgaagcatcgcttcccagcaaggactcgaacccat

SEQ ID NO: 36693 - DNA, 334 bp, Zea Mays
gcggcatgtgctgacagtgctccatcgtggatttgggtggcaccgccgcgttattacctgggaagggggtgagaagtgggcaggagcgggggaccattgatctgatccgttggatccaggctgggcgagggagattagtctataatgtggccaaatctcgaccatatatctgggatccaagggccctaatggcgtaccggttcaggtgaggttgatttaatttgggccgtccgcgtgggatcggatggccacagtttcatactgtttcacttaagatcagatctaatccgtgcagtcggctgttgatccaatggccctggatgcatgatacctc

SEQ ID NO: 36694 - DNA, 325 bp, Zea Mays
ttcgagtagtatcgattacacgacccaaattcgttgggctgtttaatatgtttgttttttcttgcgcttgatttcgtagcaccagttctggacgtttcggtttattcggtgaccgacgacgtgaccgacgatcttgtcggtagatcttctccgtcggtcaagtaaacccgcatatgtctcggctattctattttagtgtttttagtaccttggttagaacaagtcaagtgtcggccgttcgattgctgcagtcatgtcggtgctctgatccacctaccccttctctctcacgtctccttcacatgttcatgcacatgcactcgga

SEQ ID NO: 36695 - DNA, 666 bp, Zea Mays
gaaacaaacgaatagctagcgccagagtcaaaaagagcatgggccacaaacaaatcaactgaaatcgtacctgtcaccacgtctccttgctctctgccatccgcagcgggtagcacataagctccggaaatacccgttgaagaggaagctcccggagtgaaattaacagaagaatcccactgagcagccgggtgaggcagacacggagctccaaactgagatggcataggggtagtcggtgcaggagtaggcgcaaccagatactgaggaaaaccctgcaccggcacgaactgagaagtcccaggcacacaaaactgctgcggaggaagtggaactgaaaattgctgctcagcgcttgacatcatgttgacagtgccctgagaagaggaggaagtcactggctcccatgtgagcttcccactgggattcctcctacacaccacatccttatggtcttgactgcagattgaacacctgccgttccactggcactctgcacggcgatgcgcatcaccacaacggaaacacaccagccccagcccaggcttaggaacagcccgaaacctctgagtacttcctcctgaagtacccgagtcaaaggatttgacacgatagggatggtggcactgatgctgagacttgcccctcttgtgggctggacctcca

SEQ ID NO: 36696 - DNA, 488 bp, Zea Mays
tcttggacgtggtgccgagtgaatgacctatgagccggtcatctagcctgtgactcgctaggagtttatttgatccacccctcactctacgtgtcaaattggagcgcgatttggtttttacctggctggcatgacatatccattaggggcgatcgcgagagccgacagagtcgagtgcggatgggaagcgcgtggacgaggagcggcgccagggtgcagatggagagcaagaatatggaagggagcacaaagtagcccaagaggaggaggaacactggaaggagactcgtgcccacgacggtcgggcataggagggcggagatgcagtggtacatgacgccgatctagtgtgcacgggataggaggagcgcacgtgacgccaacggcagccaaaaagtgccaaaccctagagggaggaccgacgccaggtcgaagggggctggagtcgtgctctggtcccacaaagacgtgacatgtttcagtcccac

SEQ ID NO: 36697 - DNA, 323 bp, Zea Mays
tggtggagacaggtgggatcttggccgaggtcgtcaatttcacagaggaggcgggcacttcaacaacgttggacccagcaggtttccaggtaacaatcgtgggggcggctggagtcatgccaataatagggctcggtggggggatgatttgcgtgctgggcaactctctctccagggggatgtagccagtttcagttcaggacaagggtacggttctgctgtcagcaaggtggagggttcatcgttggggccaccaatggcaggtccattggctgaagctcttgcacaagctgtcgccctgattaatcatgctcttgccaaac

SEQ ID NO: 36698 - DNA, 284 bp, Zea Mays
cgggagtccatcctcaagaccgaggcggagtggctcaactctatcaaggccgaccttgtggtaccaatactatgatcactgatcgttaccggtttatgttgtcactcttctgtctgaacatctctacacaccgagtagagcttaactgaacccacttgagcaaacgctggcaggtttcagatgttgtacccgtcgtgtgtagggcagctacagatgctggcattcgatccgtgtgtgtcacgaatttcaggtaagcggtggtcctgttgcttctttgtttccac

SEQ ID NO: 36699 - DNA, 371 bp, Zea Mays
atggctttgactgccgcatgtgcttcagcttcagtgaatggcgcaattagcggctcagggtcaactctcggcaaggtgctgtacatcgcaaagacatcaaaatcccaaactggctctatgtttgctccaagcaaggcggaaaaatgattgtccagaatcaaggctttgtccacatggctcgtgcagcgaacaccatcaagctcgagcactctgatctgattctggcgcatccggtgtgaggcatacgcatggtgaaacttagtgttctcgtctgcctctttgacgactttgatttttccacgttgcttccagtacgcagcacgagctttgatcagctgcaagagcttttcacggcagtgagcacgtaggac

SEQ ID NO: 36700 - DNA, 340 bp, Zea Mays
ctatcttctaatctcggccgcctaaggaactatcaacggtccaggccctttcttcctccgccgcccaggtcagtcgacggcaagggtctgtcgcgcgatgctccctctaccggcgaacccagaaccggccctacggttgataacttccttccccagaacgtgctatgcgcagatagaaacaaagcgaaacagatcctgggtctcttaccacaatgcgcgcagaggggacgacgatccacgacgacaggcggaatatcgacggcggcggaatcctggcgagaaattcaccgagctctgccaccgcatccgtagttctggcggtagcagaaggttcgcgatg

SEQ ID NO: 36701 - DNA, 368 bp, Zea Mays
ctgaaattgagggaaaacgaatggttgttgttgtgcctgctctgaaaaccaagactgttgcatatacaatatattagttataggacaaatatcgaccgtgttgagaataaataagacactcacgttcattgcttgttgcgcctgtgcgttgtaagcagtgtgatgccactttatcattttctcaacaaatgttcacacttgtatcatccaacctattgacattcttcaatttcagaaacatgtggtcacagccaactctgatgctaccaagctgcagttgagccccaatgtgcgtaatgtagtgttataccaagggcgatgatgctacatcatatttggaaactccataccattgaccacaaaggctc

SEQ ID NO: 36702 - DNA, 274 bp, Zea Mays
agtccagaaggctcggtaatgatgagaccggtgaagttaaacttaagtacgcattgtctgaattgcctgctgattccagaccccttctaatttttatcaacaagaaaagtggggctcagcgcggagatcttctcaagcacaagctacattttcttttgaatccggtgcaggtcatgatacttctcacacaaaactttactttaagtcgagtcacttctcagctaggcaacatggtatgctaccaatatattcaattttgtagaatatgctcatt

SEQ ID NO: 36703 - DNA, 320 bp, Zea Mays
ggactgcaatacaatagtacactagttgtagcacactgattcagtgacggacccaagatttcttgactaggtatgcaaggcaagatcaagagatgtcctagggacattgtcgtagtggcctagtgggttgggaggatagctgcggaagacagaaactaatgggtctgataagatcgtggaggaagttttgaagagtagagatagtgttgcatacatacatatattatatgctatttatattttgcaaaacagcgtggaggaagttttgaagagtagacagagtgttgcatacatacatatactatatgctatttatattt

SEQ ID NO: 36704 - DNA, 985 bp, Zea Mays
gcggcgtccgcatccgcacgcgcctttagctactagctctagctctagctctccggagaggcgtctgcagaccaaccgcagccagccagcagactgttagacgacggccacgcggagccgagcgttgccgcgctttgcttgatgggataaacgccgcgcgctgggaaggttcagtgaccactccctgccgccgccgccgccgccgccgcgctggtttttattcgcttctttctgccttcttcctcctcgcggccggggcgggggcgtgctgctctctcctctccagggagttttctgcgggggttttggttgggttttcttcagcgccagccgtggatgtgtttaacgcaacagtattagtttcttcatgatcagctgtgtgtcctcaaattgagtttcgtgccgtgtaccagtcgcgcatgttccccagatcgattaaagtttcttcgcgcgtatgtatgagctctattcgaatgttctttgctctgaaaagattccccctgttcatggttacagaagggcctggagttgaagcacgaatcatcgaagcgcagcaaaactgagacacacgtcttacttcttcacaagtactgtcctctctattcatcatttagatgtatcatcaaattgacatagtaacctatgattcgtgcagtgaaactttgtatcgagagtgcatgtcttgatctttattttatctcactcttaatgacgtggtagcattgaaaacgacgcgataaaactaactcttatgttggccaggttcttggacgatggacatcttcgggagcccattctgctccaagcaagccgtcgcctcatgcggcggatggacggacatactcgactcctccagctgcacgaaccatatcctggaaaccggcaccgccgctctgatcaccgtcgctctcgcgctgcacctcctcgtcgtcaggattactacgaagaccagagcgtccgcacgccgcccccctgtcgcgcccgg

SEQ ID NO: 36705 - DNA, 352 bp, Zea Mays
cacgaatcacctcaagccatgtaaaagatttgtaaagtgtacatcaaggaagatatattctacagtgaccaggttccaattctaaaaggaaaattccaaaaacgtccgtccaaagtcgctctgccacctgctgcagctggctgacgtgatctaagatctgcagcagccgcccacgtccactaatgtctggccatgttcctgctaggagcctgtcgtgcctcgcctttaaaagggacgtcgcgcaccctctgagcttccttggactcctatctgcgctctgcttgccttggctccctcccctcctctattccagcatgccgcctgtagcatcaaaccgccatacatgatcgcc

SEQ ID NO: 36706 - DNA, 449 bp, Zea Mays
gcattcaccgcggatttccaccagtcgggttgtctccaccgcctcgggctcgatccctgggtatttaacaaacgcaccgacgccctttgctccttacgttgagagcccaaccatcatcgccggcgagagagcagcgagcagagagaaatcagagagaagatagccgccgcgaggcaacgtctgctacgctggtgattggaggctggaggtagatcatagagcatccctggtctgcgaggagtatgcacaaggaggctatggggcgtcggatgcctggcgccgccggaattgcttgttggagcaaaagaaccaccaaacccctaaaccgtggtccgcgttcaccatcgccgtaccaccggtaagaacatccccatgtcatccgccttgtcctttgctctgagtagcaccgtttggattgggtatgggatcaccggggcgtcggatgggca

SEQ ID NO: 36707 - DNA, 491 bp, Zea Mays
ctgtgttgtttgaagtggctaaggagagtctccgtaataggcttagagaaataagttcaagccaaaacataaaacatgtatgacggcccaaattgtgtgtgacatacaatgcctatatgactcaaatgatggaagcaaaagatctgtcttagcttgaacatgtaattatagcttagcaccatagaaaaatgtggatacatcatgctttattggtcgcgatagattaaaaacgtcacaggaggcaaatgacccaaaaatatgtagtagtgagttctatctaaggtgaaatgaatataaagaagctctataagactagtgaaaggattactcaaactaaattattttaccaaattaacaaattataggattgtaacattgtcgatatgtatgaagacacaaaataaaaaagtagcagcctttagaaagttaataaagcaaattaaattagagaagaagcgacgtaagaggtgaaagaggatgagaaagaagag

SEQ ID NO: 36708 - DNA, 348 bp, Zea Mays
cgatgaggttgagacttcttaatcctgtgcttgttcttgtgatctgtgctcgaaccccgaaccctaatctactgtgttgccttcttgctctgtgattgtacctgtgaggagccgatctggtgttccggctttagtaagtgcttaatctggtgcttgttcttgtgatctatgcttgtgatctgtgttcgaaccctaaaccctaatctactctactaccttcttgttctctgattgtagctacccgtgaggggccgatctagtgctctggctttggtaagttcttaatccggtgcttgatcttgtgatctatgcttgtgatttgtgtaccaaccctaaaccctaatctac

SEQ ID NO: 36709 - DNA, 630 bp, Zea Mays
ctctaattctctagactgggcacactaatacagagaagatcggggtttgatttgtaaaaatcctcaagactcagctacacctaagaaaggatcgcgggttgatttcgaaataaggcagggtctctttagaaatttagcatgaccgaaggggtatcagtggttttcggccgttggatctccgcgcgacggctaagattagaaggccgttttaaacgaaccggtatccattccacgccatcggattcgaatctgacagtggttattttatgaaagcgagatcggatcgggtccgtcagatcacatccaacggtccacgatcaaagtccgaaagggtatccctgcgatctatctcgaccatacgatcgttatcggacggcgctcctacgtccttccttcttacgatctcggcgacgacgaaaacagtgaccgcggcggcggtctcgccggcgttcgcccgattccagtgctagggccactaattctccaattaggtcgacctacgcaatgccacaagtgcgacaaagggggtgaacgacataccagcgcaggagacggtccgagggagactatccacggcgagaggcggattcacggcggagcgatacgacggcgaggaattggagcaaaacc

SEQ ID NO: 36710 - DNA, 365 bp, Zea Mays
agccaagttcgaacggcacaaatattgtgtcgtgttgccacggcgcagtcaatattcagctaatgccataactcagccgataataacatagcttgatcaatatgttcgagtacccactataatatttaatcgctcggcgtgaatcagaaactcaacgcaccacaaatatttagagcgatttaaaaatacgcaacatagccttcacatgcaatttaattattttctattaattatttgcagctagaaataattattaatacagaaaaattaaataccaaaattaatgcatgagcattgccacctaaggagcaaaaggcatttccccattattaaacgtgtattttgtactaattatttactgccag

SEQ ID NO: 36711 - DNA, 395 bp, Zea Mays
ccggggtggtagtggatttcgaggtcataatccttgatcaattcaagccatcttctttgacggaggttaaggtccggctgcgtgaagatgtatttcagacttgtgatcagtgaagatgtggcatttgttcccgatcagataatgcctccatatttttagggcgtgcactatggctgctaattccaagtcgtgggtagggtagttctgctcgtgtggcttgagtaagcgggatgcataggcaataactttcttgttttgcatcaagacacaccctaagccttaccttgaagcatcacagaagatgacgaaatcctggtgtatatctggcagtgtcaaaactggcgcagttgtaagcttctccttgatgatctggaaactctcctcacactttggag

SEQ ID NO: 36712 - DNA, 453 bp, Zea Mays
ctttattcttaagttaatttgatgctcatgcttactttggttcacataaaatgatggttcttgatttggcatttttaagagaaaccctaggtgacactggggtgtcacataaatgtcacaagattcaccatagagataatgcctccacgattttagggcaaacacaacagcggccaactcaaggtcatgggtaggataattcccctcatgattcttcaactgcctagagccataagcaatcaccctgccttcctgcatcaacacacaaccaaggccaatacgagaagcatctataaaaactgtgaaacccttaccactctcaggcaaggctaagataggagcattcaccaacttgttgttcaatgcctgataactaacctcgcaatcattagtccagacaaaaggaacacccttctccaagagtctagtcaatggcttagtaatgctagaaac

SEQ ID NO: 36713 - DNA, 308 bp, Zea Mays
gcgagatcatctaccaattttttgaatcgacccatcatagcccgattaatatgcgagttgtttttatcctcggcttgcaatatgagattgaaatccccagaaaccatccaaggaccctgacaagctgctctaatttgtttcagctcttgcagaaattcaatcttggcttcattagattgaggtccatacacacaagtaagccaccaatggtgtccctccactgaacaaaactgcacagaaatactatgaatgtctgtcctggtagctccagtgatccccaaatgtcgtctccaagcaataaggattcc

SEQ ID NO: 36714 - DNA, 417 bp, Zea Mays
cagaggattgtctgaatgaaagacgttacggggggaaagctccatttccactcaaatgttccaacagatagatttggagggatgggtgttgagttatatccacacaacgaacccctacctacgacgagtgacgacagggtccgtttccgtatacattgtatgtagtatacagagctgatggcatcttgtacgcacgcacatatgacacgaacaagctcgtacgtacgtacgtacgccatgtgtggggcgctcgcctcgctctcgtcgtagatgacacgccgcaccgcagcagcaacaacacatgtattttgttttatgacaatgtgacggtggactagtggtttatttctgttataaacggtggcctcaaagctagccctcacccgtcgtggcctggaccgcgaagcccatctgata

SEQ ID NO: 36715 - DNA, 457 bp, Zea Mays
ggctaccacacatattcagctttggctccttggtgccctggtctcccactctgagttcgacgtcgtggacttccttatttgtgagatcgaggacaccgtattggatgggattcgtgctcgtcggcagttgcccaatgctcactacttatgccacatctttgcgcagctgattcagcctcctcagtttcagggcacacttgaggcctcacgcctcgtttttggatcctaccgtcctgcgcctgagactcctgtgccagcttctgctcctgtttttgactctcaggccaaggatgcagcttttcatcagttcgacactcaggctacagcagttgatgatgatgatgatgatgattttggggttcctcttccgcctcctatgcctccacgctcacatgatcatgaggctgggagttctagtgctgcccctgctgcccctccggctatggaccctgctctt

SEQ ID NO: 36716 - DNA, 575 bp, Zea Mays
gggggcgaaggcacaccgaccgtactcatcatctatacgtgcccgcatggcattgagggcccagcgagactcatcagtttctctcatgttttcctcctgcatgcattgctggttgctgtggtgggcagcaaaagctacaatgctgaccagatccttctgttcatggtcatgtgggaattccatcatccattaggccactgataagggctgggagtgggaggtagaggacgcgaagccctacctggtggtttccacggcagggcaaaagccctacctggcctggccgctgccggcccatggacaacgaggatgtgggtgttggttgggactctcttttcctctggcaacatcattcatggggctacgcatgcatctcttggtcttggttggttggcggccgttcgtccgattcttccatgtgctgcagctgcactgcatgcctgtgggccgcgtggtggtggcacaacccaaatggctcgctcgtcctgttgctgctgcgcgtactggcacagggaccgagtacctggcgccattgctcctcatctttgaccggaaatctagtgcttccggtggac

SEQ ID NO: 36717 - DNA, 384 bp, Zea Mays
gtgaagatgtcggctaatcgagaagtggtcgggagtcgggacatgaagtacacaaacatccctgacaacgacacactcgaagacgaagtaaaagtctaactcgacatgtttcgtgcgttgatagtggagagtggacaggattagtagagaaatacatggcactgacgttgtcatagtaggcacaggtgctccacatcataagactgtacaatatctatatttttatattggttttatatttttaaaaactcggcaaagcagctgccatatccacgatattaatccagcacagcaccacactagtagaaattgaacctgagcaaggtttacaacatcctgaagcagatagaacgaatacacaatccatatccacgatattaatca

SEQ ID NO: 36718 - DNA, 297 bp, Zea Mays
ttaggaatgattgaggcaagtgccaataccgaatgaaggaaaaaactgccaggtgttcgccctctcccccttcgtggagttatggactttcctatttataggcccagggagagccaccttgtcgacgggagccgactatatggtgtgaaggggtgccttcatgtcctgtagacagtatggcttggcactttgttgttgacgtgtgcttgcctgtttttcgctgagagccgagggcttagtcacgtatccgagccctcctggagtggagttgcccatatcgcagttgttgacacagtg

SEQ ID NO: 36719 - DNA, 346 bp, Zea Mays
ggcccatggtattgcagcattcttttccatgtgcagaaatatatcttcagatgtgcatgagctggctcggcggcagcgggagactgacgacaatcttcgtcatcaagcttcctctatgggtatgccatttgccccccgttcgtctgatgtgcctcttcatccttctccagaaatcaatgagtggcaccagcaggcatatggggtgcccttcatttctccagaagatgaagaagaagatgaagaatacattgatgatcgtgagcagtttgccccgcctccccaccagggggatccgggtcaatcctcttcttatcctccgccccaggatcctccgggcagctatcct

SEQ ID NO: 36720 - DNA, 745 bp, Zea Mays
gtattatgttgcaactaaaacttgatcgtgggatgggcaagacaagtaaaagcaactcaaaggtataggagttgtatcaccctttaactcttaaaaactaaggacatgttatagtcggctttgagcaaatgttacttaacctttaaagcttcccttgctactaccacatgcatactccttgtatctatttatattgtgtaagtcttgcaagtacattcttgtactcatggtgctatgttggataagtttgcaggtgggccagatgttgtatatggctacttccttcttgtcgttccttcgacgggagaggagtgagccattatggtccttgttgcttttgtggctaataagcaatgctttgtggacagccatattgcttattgaccattttgctataataaagatgttgtgcgaggagttggtgtcaccgtatagtagagggctatgtcgttgaagaagatgaaacattgaacttctatttatgttgggaacaaatgtatcttagcttgatgtaatattgcactttaaaattttgctctcttggttgtatggtaatgtgcaacttgtgaggtacatgtgtcaatcctggtgtgacatgtactgggacgataagatttgccttcgttttaaatgggttgttgtgcgaccatgtaccttttgatgtggtgactcatgttaatagccaaggcgtgggcacatgtcttctctaatcatgatggagtggttaccaatctatttagaccga

SEQ ID NO: 36721 - DNA, 316 bp, Zea Mays
gaccaaggcatgatccatgttccgcgcattgcggatggtccggatcaccggcggacagtccgagaaactcctgcggtccgtccggttgtgcctagggacaacagtgactatgtacttttcaagccacgatgacccaaaataggcatgtggaagaaaaattcagcaaaggcacctggtcggttgatcaaagccgtcccaacttttgatcaattactatccaaatatgtcaacaaaagggtcggtcactatgatcggccagcaaagcaacctcacttacctacccagacaagacaggcaaaatcaattggatcatctc

SEQ ID NO: 36722 - DNA, 480 bp, Zea Mays
gaccgatgagcgcgttcccgtggattcatggcggtccagtacaattaaagggttcaggaagctttagaagagtctagggacgctaaaacaatcaacagagaagtatgaagttacctgcaacaggctgaccatggggagtatacaccgcacggtgttcttggtggatttgggaagaatacaaaattagtgcttactggtgagggtttggggatacaggtaggtgcagtagatgctggaatccatggcggagccgaggaggtgctcaatttatagctcccgttgtcggtggtgtccaattttgcaaggtcgtgctggcggccggagggaacatggacactggagcaagggatgggtggccttcaccgtggcgcttcctccggtgatcaccggttgaggagctacggcggttaccgatgagctgttacagctagggactacgtggtggaggacttggagcgtggcacagccgcagcaaagcac

SEQ ID NO: 36723 - DNA, 492 bp, Zea Mays
tctccaccacggcgcggactcaccatggcccataaatgcgtagcgcggaccccccctctatctccttactgtgagctctacccttctcgtgctcgagaacaccatcgccggccaccacaacaaagtgaggggagctcggattccgccgtgggagattgtgcgctcgccggtttacgccacgggctcgttcacagtcgtgatatcttcgccgcatcctgatcgagcccttgcattgtgccttggcgcttccttaggattgtgggagtgtgtccgacgccgtgccgctcagaaatccttgaccgcgcctccggaatttctcgttgtaattgcggtgccgccattcatcgtcgcaaggtcactacaccactcgactgccggtgagtatccctggaccaggttcctcgggcacttatcttcgtctagcgcctatcagacctcgtaatagggcaccggaacccggaatcgctacgctccggcggcaatccaccgcgg

SEQ ID NO: 36724 - DNA, 747 bp, Zea Mays
accatagtagtttgctgagaggtccccaaacggttcttgaaggcattaaaaagcactacttctttttcattatgagagagagccaaatttccattatcatctttaagagaggagataaggttatgtctgtgcttgacagtggcattggcgtgaaagaatttagtgccggcatctccaagggtggcccatttgatttgacctctttgcttccaataaatctgtttgtttagctaaaagatcttataaatgaagaagcaggatttctttgaagttccattccctgaatggttaaatctctgctctcctcaatgaagtctagcagttgcaccactaacttgaccttatcaatcaattttgttaagttggggagagacttacaccagccatggatatgcttgcatgcccttttaaactttgccatgagccttttagcagggtctggttgaaagataggctgattccaagagtcttgaaagatagagtggaaatcatcaagctgaagccaatagttttcaaatctaaagatgggtggcttggacacattgatttggacattgaccatccaagggatatgatccgaggttcctctaggaagcgagagtgcagaggtagctggaaaggtgaccgaccaagcttgtgagacaaagcaccaatcaagtttttcgagaagcgggtgacgttgcatatttgaccaagtgtatacttgtcctttgagtggaatttcctgtagccccagttgactgattg

SEQ ID NO: 36725 - DNA, 459 bp, Zea Mays
gattttgggagctcgtttttgtggattcaggagtcttcgaatgaagatttagattatttttctgcattggatgtggccgcggcggaggctttgccacagcttgaagcgcacaaagggtctgctcccccggctggggcgatagccgaagagcactgccagcgaagggtggtgtcgaagcataatgttggtgagatgtcacgaagtgggaggagtcgacagatgaggatggaacgatcccgtcttcgactagatcggggcggccaacgagatttgctattctcaacgtctgggacgtgtattggggagggggtctgcagaatctttttgagggcgaggagttgaagatgatgttgtttaacttccaagaggcaggccttattccgaaggctgagccgatgtagcatgtttgctgccctcgctctcgtgttgtggtagtgagtgaaaacgctgccctccccc

SEQ ID NO: 36726 - DNA, 325 bp, Zea Mays
tcatgaaacaagaagccatcaatgatctgcaatggtgtcgtaagagttgcatcctagatctattggtgaacacaaccaacctcttcatcatccatttttgcagcatagatcccgtcaagtaggtggaacgagggcctagagaggacgtgcaactttgtgaagtccccgatggtattggtgtcatgatgatgagttgaggcaacgaggaagggggtggtaccgaccatgaaatcgaagacgaacaacttgcaacttgctgatccacttatgctagggaacaactgacaatcgttagtccaagattaacttaagactgcagtggtcg

SEQ ID NO: 36727 - DNA, 1116 bp, Zea Mays
gcgagatcatcgatttcaccaaacatcaggaggggtctattgtgcgttttatttcctaacaataaatcctcatcactgaatgaaatactttgagtttggggtaatttcacttccgcttgcgagacctcggctttatcttttatttctgcttgtgagacctcaactttataatcttcagggaaggaaagtgcactaataaatgcatttctcaattcagaagaaagacacaaagcatcatacacggaaagcatagctggtattttcttcaagtgcgagattacatcatacttgaccgacacattatgagtatggtcagccacatcactcggagtgacatttaggggatctttttgtggaggagatggtctagctaattgacggcctgatctaagcttaacttcgtcaacttctagtgtctcttcttcagggaagtgaagagactcttcatcatcctcaaaaactccgatggggaaagcatcatatcttttatgggagttgtcctcgcacctctctacattttggtagatgcgcgggccttcaccctactctatcattcgttggagagcaagtcgtcttgagagttgctgttgacgctctcttgatctttgggaacttgatgatccaccttttggggtgtggatccatcgtaagaaagccttgccttcatgctggcgcttagcttgctgttgtggataccttgagaaagacatattaacatgctcaggttttgatgtcataaatttgtcataagttggccacatttttagagttgcacaactcaccggatcactttgaactgtggcgacatttgaggtagccgttttcttcccgctcttcatgcttttgagcaaatcagcatctatagtaccatcgtctatgagcttttgtatgatattcttaaccacgaaacagtctttgagagtgtgacccaagatgcgatgatagtggcagaagtttggttcatcaactttagaggattcttcgggtctttttggtttagggagctcaatgagtcctaggtcccgtaagcccataaagaggtcttccacttcttcagcagggaaggaaaacttctgattttgacgctcgctaagagttggcctcctagaagctgat

SEQ ID NO: 36728 - DNA, 362 bp, Zea Mays
ctagagcacaaaagactgaatgatttagtgtatgtttcatacaatagaaagatggccgctaggttccaaaaaatgcgtgaagaagggaagaactttgatcctttggttcttgaagattttgattaggacaatgagtgggttgatccattagctaattcatctgttgttggggatgaccctcttttcacatgggagcttgttgatcatgccatcggtgcatctacacaacttcaaggccgctactttcctaggagagctcatggtactcaagtgccaattcttgaggatggtgaagatggtgttgatgagggtgatgagaatgaagacgatgacaattttgtgcttgacgaccttgatatgga

SEQ ID NO: 36729 - DNA, 287 bp, Zea Mays
tgttcattacaaaaaataaagggtactccataaagggtactccataataaaccttctcgccctttttggaaacatgaaccaaaaagagagagagaagcgtcaatccaatgatcaccagtggggaggaggatgatgatgagcaaagaagtggtgcgccaggtcagaggcaaagtgttcctccccagattgggccggggcaggagcactgccagagggatcctggggtggagggtaagaggacgattggcccggatccccgtgatacggaggcgggacaaactgctccc

SEQ ID NO: 36730 - DNA, 449 bp, Zea Mays
gaaacgtgttgtggatgaatgcacgtgccggtggtgccagtaccgggcgtactaggtagagggccccaaccatatgtgccaccatctcaagggaccaacagagaaggcctccgcgacggttgtggtgcagcacagcgagagtgccggtgacacacggttgttagagcagagtagatgaagtagtcgaggacgagacgatgatgttggtgacgaggttgtgctggacgaagcgaagaggtaggcgaggcgacacatcgaggtttctggagtcggggcggcgagagctaggacacataggaaacaagcctcaatggcgtcagtggagcgcgatggtggtgtttgtcggcgaagaacccaatgacaaatgcggtgcagaccagcgatggtggctggcatgcctaggatacgcgcaacactagcgcaaggtgttgaagcagcatgtaggagga

SEQ ID NO: 36731 - DNA, 292 bp, Zea Mays
ctgttgaaggagtttgctgatattttcacagttcctactcaattgccacctgctagacagtttgatcatcacattccactggttccaggagcggtgcgccggtgccagttaattctaaaccctatagatactcaccttttcacaaggatgaaatagagcgtcaggtctgcattattgcaagctggattgatcattcctagttctagtccctttgcctctccagttcttttagtgaaaaagaaggatgggacatggcggttttgtgttgattacagacgactgaatgatctca

SEQ ID NO: 36732 - DNA, 1106 bp, Zea Mays
aaaaagtcttgagtcattcgagattcaggtaattctttctttccccttttacagatatttcctttctactattttctccttgtaacttctatatctcaccccatttgccactatttctttttgttctctttttttgcagttatttgagctatggacaacaattgtggggaattctagattagcaaaggtttgtatttttaatgattgttttgtgcgtcatgtgtttgtattgattttcaactttgttctaggttattgggggaaacattaaggagctagcatactatactatagccttgcaacagataactgaagaacaggtatgaactagctgaaacactaactttacacatgtgatgcttcctttgttctttttgaatcattgtttggacttatgcaattaattaaggataaacagaagtgaaccacatacacattaaattgtgtctttgtcagctacattttggtttcccaacttattttggggaaaactgagctttgtacagtgcaaagcacaaccaacaagttaagagtcgatttcgagttatgtttcttcttgacatgccatttaagaaaaaaatgtaatatactccttgcaaatagtttgtctattagtcactcttcatgtttcttttttctttttatttgttatccatgtaatgatcatgcattgatgttttgttttctctaggtgcaaaactggtcacgcgatgctaaccagtatgttgctgatgaggatgacctaacctatagctgtcgtgtgtctggtacaaactgcagtactgatacttttttgtttacttggtaggcttattaagagtgcaattcagttaaccagtgtattgccttttctttaagaaccgtacaattggcagaacagcaggagctagtattaatgaacggaatttctgctactattgttactgactcccttggagcctaagtgttcaaagatgtctttctttgagttctgttttggtttatgagacccttataacctacccttgaattggaatttgttagtcgcttggttgcattacttcctcacttgctggttttcaggatctcttttgctggaagagctagtaacagcttatgaagattat

SEQ ID NO: 36733 - DNA, 274 bp, Zea Mays
ctcaaattcaactactaatacgactaatgccttggctaattcacctattacagcccatagaaagattaatacggccctaatatggcccaagcactaatactcgaaggactcaactaatactcaatacctactgattaattccaccatactcgcctatgagccgccaccttgggtcatcacatctcccccggcgccaaaagacgcttgtccccaagcgtgagctgtaggaaacctaactttcaccacttcatagtcttcctaagtagccgcatca

SEQ ID NO: 36734 - DNA, 376 bp, Zea Mays
tccatgaattcttctaccactgatacacttcctgttgctagactgaacatcattggatcattggcgggtggctgggcctgacaagagcctgactttccttggtggtctgtgaggaggactgtcttgtctgcgcaactgatgatgcctttgtgtttagttaaccaatccattcctaagatcacatcaattcctttggatggcaagacggttaagtctgccaagaatactaccccacttaaaaggattctgacttgggagcatcttcgggtgaccaagggaatccctagaggagtagagggaatgccatgcttttccacaaaactagtggctatgaaggagtgggatgctccagaatcgaaaagtacggtagcgggag

SEQ ID NO: 36735 - DNA, 407 bp, Zea Mays
ggaatagtaaaaaaatggggtgcagagcgacagatagagctagtggaccacggtcttctctggcgtgaccaggtgcttctcttagttgttgtgcgggctcctctggccaaacccgtcttcgtctcgtcaacgtgtgggtaaatgctctagcgtgtgggtagatatgtcaacactgaaagaacatgtccccggtcgaaccctacgccaccaagcccggggtcaggtgtggcggaacctgatagggggggacgagtcagagggaaaccactcgagtggatcccgaacccggccccagattgactcgtcgtaaataaccggcctcattaaccacgcctggtaccgagccatcgcgtgagtgtctgcctgcttcccactcatgcctatgaacccctcaggcctcatatcac

SEQ ID NO: 36736 - DNA, 305 bp, Zea Mays
atctgaggcaagggttggtgcgttggatgcgtaaatacctagcggaactccctggggcattgatttatattgttcatcagtggtggcgcccaatttgaagaaatcgcgctggcggccgagagaggggtgagtcatcgcggcgatctaccgtggcggtcactgggtgatgagctacggcggtcactgggcagtcactacgactcgcgacgacgtggtaagatgtcctaaggcatggcgcaaccgcggtgaagggtgtacatcccggtgacggccgctcggccacgtcgccggcaagtggatgaggc

SEQ ID NO: 36737 - DNA, 292 bp, Zea Mays
tttgtggcaaagcagtgacatcatcagtacaagtagcaagataattggacatatgacagtctaagatgaagtaagtaaagcttacagttgggggaagattccatgcataataggtctaaggagcaccctcgttgacaatgacacctctcagcatcatctcaactcggtttagaatgtcttcctctgtaattgctctttctgtcacccaggaaggatccttgacaccggtgaacagataaataggatgcactcgatatttcaacgactaaatattcttgaacacaaaatcaat

SEQ ID NO: 36738 - DNA, 467 bp, Zea Mays
ggaacacatgggtatactatgtttagctattaggcagaagtagagaaggttgtggtaataaggattagggcaaagaaagatttcattatggatggtggatcttgactcatctgatgattccgttttgcccattgaagacttgagttggtgcttatcctcccatgacgtggttggtcttctttggccttcctcctggagttgctatccgagttgagggcatatggctatagctaggatagctagggtacatgaggtagttagatttaaacagagttttactttgcttttaggatatctagattaggcaacctatgatgtaggttaggttgttgtttacggacaagttagtccagggcattaatttagggtaagatatgtttatagaatcagggcctaatttatgtctaacttacttaagtaactcaatttggattagctcatgttagattaggtgggatctagatcag

SEQ ID NO: 36739 - DNA, 537 bp, Zea Mays
ggacgccgccggtgtgctgacatcccctcccccttcactgccggcttgtccccaagccggcgccgccgagaattgaagttggatcatctgcttgtgtattagcactgaccgcgggtttcagttgcgacacatggaacaccggatggatcatgctgttggctggcatgtcaagttcatatgccactgcgttaaccttgagcacctggaatggcccgaataatctaaaggccaatttatggttcttgcgttcggcaactgagatttacaatatggctgtaatttcaggtacactcggtctcccactgaaaacactctctgaacgacctttgtcggcttgttgcttcatctgatcttgtgcacgttgcagatgcattctgacctgctgaagaacctcttgttgactgttgagcagattcctgagatctgggattgtgcactggttaggggaatcaagtccaaagtgtgtaggtaagtgaccatacaagacctcgaacggtgactttccaagagcggaatggtagcaggtattataccaat

SEQ ID NO: 36740 - DNA, 514 bp, Zea Mays
gagaacgggacctcgggtatcagtcacctgagggggtcctcaaggatgttttcattggagactccaactctggtgatgacaacgactgccgcaagaagttgtacgtgatgtacggcgggagctaggagctcacctcccgtaggaacgtcaagtccctacgtcgagaggtcctttcgacggtcccaggggtcccgaaggctgctccacatcagtggtggaggagcaccactatctccttcgggtcatccgactgccccgaaaacatggcaggggccggtatactaccgctcatcaccgcccctatcatcgtcaacatgcggctgcatcatgtcctgattgacggtggggctaggctcaacgtcatcagccacgctgcattcaagcagctgcagatcctagggtctcgactgggaccctctcgtccattctccggagtggagccacaaccggtgtatccccttgggagcatcgcactcccagttacattcgggaccgaggaaaacttccgcacaga

SEQ ID NO: 36741 - DNA, 501 bp, Zea Mays
ctccgcccggaagagatggagccataggtcccagtggggctcgatccccaggcacccttcgcaaacggtggtgaagatggccgcctgggcaatggagttcgggttgaagttgtgcaactccaccccgtagtagtgtggcaatgcccatatgaaacggctcgatgggactccaaacccctgctcatggaacgaggtgaagctcaccacatagcccacggtcggagctggcacttgctcgtcgtctgacgcgtaccactctggctatgggccatgggagcagaggcgaagcagaccaacgtccaccaacgcgtccaaatcctcgtcgatgacgaaggagatggaccatgggtcgcggagaaggagacaaaaaggaggcaaagagcccttttgcggagatgggccatggatcttctcagccatcggaacaaaaggagacaaaaaggaggcaaagagctcttttgcggagaaggagagagtggtgtgtaaagcaggaaggctgaa

SEQ ID NO: 36742 - DNA, 331 bp, Zea Mays
caggtgaaaccatctgcccagcctcggttagttcttggtgcggtggagatggaggtgaagaggagtgaggataggtgggagaaaatgatggtggttgtagaacgtctgataggaaaggttgagaggattgaagaggtgcagcaaaggttacttgggcagacggagctgactgcttaagttgctgggcatgctgcagaagagagagtgataatagcttgtcagatggaggaagtagggaaggagatggctaggatgaggttggaagcaatggcaagagatatggagggtttatcaggaggatcgatagaggaggatggggaaaacagaagga

SEQ ID NO: 36743 - DNA, 484 bp, Zea Mays
tattggtctatggccggcgctaaagctctctcctatcttcaggttggtggttaggcttttagtgtgttggtcgtggtagtgtttgattgtatcaggtgacagttgtgtttgtcctctttgtaatagggtctttaccctcccctttttcttcttaatataatgatatgcagctgtcttgcgtattcgagaaaaaaacatcattggcataagggcaacaactcagagttaacagaaatagagtataaattattgtcataaaggcaatagttaaataaaatcaactgaagttcacatcattggcataagggtacatattattgtcataagggcaagaattaactaaaatcaactaaagttcacatcattggcataggctactgctcagattcaaagttttaacaacacaagacacaaccatgggcaatgagctcagaatatgtacaagaatcacatgcatcatagacattgcagtcattgactcaaa

SEQ ID NO: 36744 - DNA, 397 bp, Zea Mays
ctctgaataaggttcccatggtatagtagctgaaaaagatcccggattcagcccccctcgccgccggtgatcccgggtcgtgatcgtcgtcgccgttgcgattcgtgctcagtgaagtgcagataactgttgggggtaagaaatatagcatcaaggatgaacttaggccactgttctgccccggccgccgtgtccgcctgactcacggccgattcagataaactcaccggagttagccgcctatcggccgtgcaccacgtgcttaggttctctaccacgttgcagtaactcatcttaggcgtgtccatttgccgtaggtgaccttgccacgatgaacgccacgaatccttttcgccagtgctcttccctctctccggccgccaacgcgctatgtcaa

SEQ ID NO: 36745 - DNA, 390 bp, Zea Mays
tacatttcaatcaaacatacaatacggtccatacacagaagggatggtgttgtccccttttactgttgggactacactggggagaggatggatgggcaggcatcgcccgattgttaagacctacaaaaaatccacagaaaaggtgaggaaggcgccagcgacgaccaccacgagcaagaaccagtgtagaagaccttacctgacttgtgggcgacgacggcatcccatcccagtgggtcaccttcgggcatcggtgtccctctccacgtggtggctgtcgtcaccgtcagccgcctctgcctgtgcagcggtaaaaatcatcgtcacggcgagcagagcgtcgtgcacccggaccgcagcttcctcacccgccatcgtctccaccttctg

SEQ ID NO: 36746 - DNA, 516 bp, Zea Mays
actaacaatctcccccttagttcagagtcgactgcattttgattacaccaatcctcccccaaaggtcttggaatcgcaccttcgccagagcctttgtaaggatgtctgcaagttggtctgctgtgctaacaactttcaggctgatttctccctgatcaacacactcccggatgaagtggaacttcattttgatgtgcttgcttctcttatgaagaactggattcttgctcagtgcaatcgcagacctgttgtctatcttgatcagtggtgggttgatctgtttacctagcatctctcctatgagtcgagccaaccaaactgcttgacaggcagtttcagaccctgcaatgtattctacctcacacgaagatagagccaccacacgctatttttgtgaactccaggtagctgggcatttgccgatgaagaatatgacacccgacgtgcttcttctatcgtctagatcacctcccatgtcactatcactatagcctatgagcctcatttcatccccag

SEQ ID NO: 36747 - DNA, 513 bp, Zea Mays
cgcaggggtacctcgagtcgcggtactggtcccgcagtcgaggaggcgtagcattggcgtaagtggcggtggagcttcttgcacgtcgtaaccggatgtggacggagccgaaggggcgcacagttgtggtgcagttggatgcttgtcgcatagcagtccaccctttcgaccaccggtttctgtgaagatgggagagtgcttgtaaccacgggacggttacatgccttgcgtgcggcggttcgccttcttcgtgcttcggttcggctcgtatgacgtgtgggtcccagcccccatgtcgtggggggagaaccctggaggttgttagtggggacttcgcccgtgacactaaggggtgcaagcgaggaggtctgcctataaaagggggacttcgatcccctgggcaatggccatgcctttgtcctcccctcatgccttgtgagcccccggatggggtgccccagcgtcgccttgctcttgctgtcgttggaggagcgcggcctcgtggagatcggt

SEQ ID NO: 36748 - DNA, 523 bp, Zea Mays
tgttccagtaaggcgtataggaatacttcgcctccgtcgtctcccaaagggccacaaccgcctgagtgtgagcgactagcgagtcagccaaaccctggtaccggtagggtagcagctcttcgcccttcggttcgactcggtcccaacttctggcctgctgcctatgccgactgcagtgactcggactttgctctagtttccaggaatgcgcaactgcatgcacatgctccagtttccaataatatgctatagatctatataataaacgctgacgcaaagctcgcccagtgttcagccacattagcttaattaattcccgttgtccgaacgcgaatcagcgctttacatcaatctttcccttgcagatccaaacgagacgttgtgcccgccttcgggtccatgctggaaacctctagaacgcgattttaaaaacaaaacaaagggctaataaaaacaaagggagaaaacaccaccttctagctgggcgaaagagcaaaggtgcacccgcacggaggagccgagg

SEQ ID NO: 36749 - DNA, 1410 bp, Zea Mays
atctttgcatgtagagacctacaaagatcgctcatactatggtggcccatcagacgagtgccgacattgtggcgctgttttctggtttcaagaacgggtcaaaagcgcttctacaattacgcagcgcaggcttgtgtacaacctgtgttgcagaggaggtaagattgttttggagccttacaaacgtctgccgtctcccttaagtgacctactgcgattcgatggtgataatcgtgccaaaaggttccttaggcaaattcgctcatacaattcccttttcgcgtttacctcactgggtgccgtcgttgatagatcgataaataacggtacaacaccttatgttttcaaaatcaatggtgtcgtacaccatcgcattggctcgctgctacccaaccatggattgcgaccacagtttgcacagctttacatatgacactgaacacgatgtacaaaataggttggacatgtttgagaatgaggctgacgtccatgatcgtccggacccagaggtggcccgtttattgcttaacatgctagatgagcatagcagtctggtcgcagcatttcgctttgctaaagaacgtttagatgaagcaggcaaccaaaaggtgacgttacgattgttagtctgcaacacacgacatgatgcacaatataacctaccggccaatggtgaggttgctgctataatagtgtgcgattgctcaccttcacagttcaagtatgatgtcctcgtgcacgctagagagggtggcctcaaacatgtttcgtgcttgcacccatcctacatggccttacagtacccgcttcttttcccttacggtgatcgtggataccaccttggaataaaatattctgacatgggaggaggtgatgtctcaggccgcaagtatgttacaatgcttgaatttgttagacatcgttcccattacaggctcaacgaaccgaacccattcacttgctacggcaggctgagcaaccagctagcggttgatgcatattctacgatcgaggcgtctcggttgcagttcatagcggaccaccaaaaggaattgcgttgtgaatccgttcaggggataaccgacgccattggcaagggtctcaccagtgcagattcggttggtggaagagttattgtgccggcgtcttttacaggcgggcgcaggtaccatgtaatgaactaccaggacgcgatggccatatgcagagtatacggcccaccagatctctttgtcacgttcacatgcaaccctaaatggaaggagatagtcgatgcgctgcgcttcgagcctggtcagcaaccatgcgatcgttctgatatcgttgtaagggtcttccatatgaaggtcgatgaattcatagcagacattagagaaactaagattttcggtcctatctgtgctggtgagc

SEQ ID NO: 36750 - DNA, 516 bp, Zea Mays
agacgatcaaggcataggtatcctttgtggttgggagaatacccaaggaagacgcatagggtagagcgaggagatagtttgtggggtgtagtgggggtgagattaggatagcacttgcagccgaaaacacgaaggtgttcgtacgaggggcgtttgccaagtaaggcgaagtggggtgtgccggaagcaagtgtctttgtgggaaggatattgagaagatatgtggcagtaccgagagcagcagcctagaaagtgggggaatgctggcttggaagagaagcgtgcagacgacattattgatggagcgaattatgcgttcagccttgctgtttggggggggggagtataagggcaagacatgcgtaaaagaactccatgggaggagaaaaaattgcgagcgttgaggttgttgacttcgcgaccattgtcacattggacaccctggatggtgacaccaaattgggtgcgaacataagcgaaaaaatttgtaagggtggagaaggtgtcagacttaag

SEQ ID NO: 36751 - DNA, 560 bp, Zea Mays
caccatcccacgaactcagtcgtgtgtggccggagatatcccaccggcggtcgccatggtgcggtcacttccgccgcggtgtcacccatgcctcgttttccccttactgcgcctcttctctacgtggtagccatgcgtgaacaatgcaatccgcggtcgctgatcgttagtcggaccaccgtggctataaatagcaccatggaccacggcgaggtattcacatctccaccagtgagctcagttgaagcccaaattcacggaatcctctccacctctcccaaaattggtagtgcacggtgaaaccatagtactttacggccgtgtagccccaatctcacctcccaattccacccggaaccgtcgcggcgccgttttcccccttttctatcaccggcaagcaaaaatcctctgtgtcccgtggccagctacttccatgtctgctcctgctcgttttaatcgtgtttcagcaccaatatacactcgtgatactcatcggctccgcccttcttgctcggccacgctcaatcacccggaacacatgaacttgtgttcggtattcc

SEQ ID NO: 36752 - DNA, 413 bp, Zea Mays
tgtttgtgttggaccatggctattatgtggcgattttaatttgatcttcaagctcgaggataaaaataactccaacatcaataggacttttgatgggtaatttcaggagcctaattaactccatggagctgaaagaagttcctttgattggcagaaaatttacttggtcgaaccagagacaggaacccacccttgtgaagcttgatcatgttttttgcactactagttgggaggagttttttcctgattgtcttctgtatagcaacgcctctgtttgctctgatcattgccctttaaccctcaaatttcgagaggattgtaaagggaagcgcagatttcactttgaaggtttctggcccaagctccctggtttcaatgaggtggtggctgattcctggaatcagccaatgttg

SEQ ID NO: 36753 - DNA, 295 bp, Zea Mays
gatgaacacgacattgatgtccagaagctatagaggaggcccaacgactagggtctgcttgagggtgtcgaaggcccaccaccaaccctaccaccgcctgcaccaccattaactccaccactgccagatgtttgcaaccctccgactatgtcgtgtgtggagaagaagcaatggggtccgaggaggaggaattagatataacagaattcttgtttacaatcatcttggaaacttttccctactcccacaggacacaaataacatatgtcgacacatgagccgtcatcactcactt

SEQ ID NO: 36754 - DNA, 380 bp, Zea Mays
ggcccatacgtccttcacgtggctcactcggttgcaccacatggggtcatcccccttctcagcggggaagagtcccagtgggtgcattaccatctccaagggatggtatctgtagaaagtcatcggggtcttcatagctgcagcctcggtggtgtcgcacgccctgaatccaatagtcttggagtcaagggaatgccaacccgggtgtagagggtgagcctccagagtcagccagactcagcaacggggcacccgatgctcctcgtacaactgcaccgtgtacagagggggtgtagggtaacccggtggagctgagcacctcccacaagatggaagggaaaccctcatgggaaaggtagtcggaactgaatgagtgtctc

SEQ ID NO: 36755 - DNA, 425 bp, Zea Mays
acctgcaaatatcaccaaccgaactggatggcactctactaaatctagcaactatccaaatgcacacaggtcctaatgcaaatctcaaaaagaaaatgaaaaaactaagagcctaattcagtttaactaatttgtgactctgcgcacaggtccgcatccattgaatcacaaagccaagctaaccgccatgattagtttgacttgaaagagatctcaaacctaagattttactcctcccagtatccaaaatggttaccagaatgagggcagcaagaccgatccaaagagagtgaatcttacaggcagataatatgcattaccactcatttttatatgaaagtaaaacagaataaacaaataacaattatgttaatgggttaccaaagatgccacataggttatcttaccgtgctcgaagacttctc

SEQ ID NO: 36756 - DNA, 365 bp, Zea Mays
gatgccctaggcttcgagtaccctgactatgaaaggcttgacgaagaagccgggggatagaagagaaaaagggttgtgagtcgagcagtcccagtctttgtttatctggcttatgatcactagcgagtcaccatataccatcagtttcttgatgtcgagtgatacgacgatgcttagcccgtgaatcagtgcttcatactctgccgcattatttgacgatggaaatagtagctggagtgcgtacttgagttgctcacctccaggagtaataaagagaatccttgcacccactcctagcagcttcaacgagccatcaaagtacattctccacacctcagtaacttctaggctgtccaggacctggt

SEQ ID NO: 36757 - DNA, 463 bp, Zea Mays
cccgcgacatcctccgctcatccccacgtccgcggtcgcccccacaatcaacgggattgcccccgcgatccccttcacctcccagatctcgtgctacatccaaggaagtggtgatggttcgtggccacccccgcaatccccttctaccgacaacgctagccttccatcaaagaagcgcctcttcctctgctcgaaccctagacggtggtggcatgacgcccgtagcctggatcccaagtcccgctccccctatccatgctccttgtctgccctcccgttcccccgtcgtgtcggcctccttgtccgccctcccattccccgggatcgttggtcatcgaattccaggggcctcgacatgcccaacctgaagaagcaatgcgggaggttcgtctccaccatgccctgccctaggtgcttcgacctccttgccatgggggagcacaacggacacggtggagggcgc

SEQ ID NO: 36758 - DNA, 330 bp, Zea Mays
caccagagcacgtgaatttgggatttccccaaaatcgttgaagaacaccgcgaagaacacctcgccgtggtcagcccgattcaggtccaatctcaccctcggtttccttgtttcaacatccttgcttgctcttgatgctcaccgacccgttaaattgaattagaccgccatgaatcgacgagaacgcactcatcggtctgccttgtccacggtcgccgtggctagaccaaaccttgtgaccattagtgaaattatgttgggggaaatgctcggggtagtgctaattttgtgtccgctgctcagagaaccctgccgttgccctaatcggcc

SEQ ID NO: 36759 - DNA, 505 bp, Zea Mays
ctcaaattcagatttgatagcatgttgatttaatgccaacttaaattctcgcatgttgggatatatgttgcctacactcattggagggtcatttctgtcataacaaacaataggcatagggggtacatgatctttcccaacaaacccatcctcttcatcgtactcttcatcagattcaaaatcagactcagagtcactctcttcactcgcaattttttcagcagtcaagtaaaagccttcctcgtcaacaccaacatgttcattatggggttcaggatttgccaaataaccatcatcgtcattgttatatgtgctaggttcacttgtacaaggttgtgtgggaagctttgctataggttcggttatttggctcattgggatatcttcttcagtgtagcaccactgtgggaccgggacaacatcggtgggctcagtgtatgtaatggtcatgagcactatcttgctgtcaacatgtttggtaaacattttcaagagttcttggtct

SEQ ID NO: 36760 - DNA, 436 bp, Zea Mays
ggagatgagggacgacggtgacccggaggcgacccttgaggcagatcggaaggcgagcgagagcttcctgaaccacggcccactgcagctggagagaagtttgatgtgccaggacgacggtaagcatgctcaagcaggcttcatggtgtatttaccagaagtttgccaacaagccgaacttttggttcatgcagccaatctgggaccgggagtggggaggaacagcgaaaacaaggcgaagcttgggactgacgcccggaagaccaaggagcggaggagcacgcggcggctgaagaggtctgagatggatcgacgcacgaaggcgaagcagcaggagaaggagaacgaaggagccgcactgttccggacacccatgcctgccattgtcaacaagaaggccgtaggacccagatcggcgcggcgtcgccgtgttttc

SEQ ID NO: 36761 - DNA, 296 bp, Zea Mays
cggcagtcactttcaaaacaccggtgcgccacatcatcactcggctattatcctcaaagtggcccacgcagcccgctatcgctcggcgttacctctaaaacgctgacgtcgccttcaagtcgcacgacgttacctctaaaacgctgacgtcgccctcaagtcgctcggcagttaactctaaaactccgacatcgtgttcagttactcggcgtcacctctaaaatgctgacgtcgtcctcaagtcgctcggcagttgactctaaaactccgacatcgtgttaagtcgctcggcgttg

SEQ ID NO: 36762 - DNA, 378 bp, Zea Mays
tgggtcggtggttagttcggccgtcgccgtcggagacgaggcgcggaggccgtgtcgtacgcggcgggaacgtggcgtccaatgattggccgcccacgtagggggggtcccggatcccgtgtggaagggccgctgccggccgaaggctgctccggacccatgtggtagcttgagactttgggcttactatacacccatactactactacatgtgcagcgtactcatctacggtgggttccccagatacgcaggcggtaggccaagtctccatcacatgttccgtactgcactgcgggcagcggcgcggacacgcggtctaatgattctgtcccggcggtaagtggggccgtacggcacagaagatcccttgcccacgg

SEQ ID NO: 36763 - DNA, 589 bp, Zea Mays
ctttaggtagactaaaccaccttggctagagccactagcagtctccttcggcatttctgacccatttgcaagtgaccacactctgtaagcaatgtgctcctagaccagatctcttgtgcctatgtaagtacacactgtattgaaagccacctggcatgtttgtatatcattcccaaaagcactggtttgcctcctaatgctgaagcgagaccatatagggcgttgaataatccctctcacatcctccctttgactttggtcattcttcacgtaaaaccattccagcatccaggagcccggccacctcttccgaaatgtgggaactgggtagctcgcctcaaaccgaggcacgaaactgtaacaaccaaagttgttgtgatactgctcctttccggtagccttcatctcataagacaactaatggatgtcgcaaaaccatctggcatctggttccagtccttggctcctcatggcccatacaaagatccccactttaatgatagcttcgggagtaagttgatgaaggtaaatttcaaaggttttcagaacttcgaccaacaatttttctagggggaaccgaggcctggct

SEQ ID NO: 36764 - DNA, 272 bp, Zea Mays
gtggcgacccatgttttatttcttgcggggtcatggcctccgatctatatagaaggcgaaaaggggtgaacccaatcgccctgcactcagtcgtgttcagcgcccagaccgcttcaggtaacaggtcgacccatttgcctttttgtcgtcgaggagcattttcttgacggctgtgaaaattttaccattgccgtgctccacgactccgttggattgcgggtggtacactgaggcgaaggcaagcttggtgccaatggagaagcagaaatcct

SEQ ID NO: 36765 - DNA, 364 bp, Zea Mays
gggaaatccctggttgggtgtgccgagtcttcaccgtggaaaatacaatagaatcttcgttgctactgacctcggcctctacctctggatgcattgccaccacggccttgctgcggagggtagtcgtgacgacgaggggtgttgtctctggtatgctgctgatttgcgatattatgcacttgtgattgggcgcggtcttgccgagctgaacctggttgcgaagttctaacccatgttctgttggactgtgaagtctccttgggcttccgctgagactcgattttcctctggtggagctcttctgatcgggcatacttttcctaaaactgatataactcctgcatgttctttgttggatccctta

SEQ ID NO: 36766 - DNA, 540 bp, Zea Mays
gaggactgttgggaggaaaaaatacttacggtttacgccactttacggaaaagtaaatctatcgtactggaaaaagaacatgtaaatacacgatactgaggcttcttaaatttcaagaaaatctaggtagccaggtccactgcccaatcagatcccttctcctgtacaaaaacaggaacatgatttacttttagtttatgcgcgtatgcatctgaagctttgcccttctttagctggccttctgacaactgaagattctggtgagaaataaagagagattttcttcgatgcccttccaggtgtagaataaacaaaccaactgattccctgaccaatctgggtccagaactgtttcgttgatcagcaatatcaattttttttcttctgttggatggccatgtcaccaggaatgaattgaccatgttgtcaagaacttttatatgcaatgttaatcttgtgctatctgtgattaggcggcaaatggactgcctgcttaaggttctgatcgacacaatgatctgaaactgatcacaaacaaag

SEQ ID NO: 36767 - DNA, 388 bp, Zea Mays
ccgacacatgtctggaccataccgtgtacgcttctgctccccgctcaggcggagacctgatgctgccacgtagcatactgcccgtgacgtaagccagcgggcggagcctgacgtaaggcctctgggccacgcggcctctgcatttattgcggataaggcgctccacctgtccattccactagcaggtgatgtgccacctcggcatttaatgagccctgtccattccactggcaggcgatgtgtcgcctcagcatttaatgagccctgtctactccgctgacgggtagcgaccaggccatccaacagacggtgtgcctgtccatttcactagcaggcagtacgcccgtgctgtggcgtacactatgctcatcatcactcgcgtgttacc

SEQ ID NO: 36768 - DNA, 457 bp, Zea Mays
gcttaaacaagggagagagagagatgaactaacctggaaagggctggccgcggtgatgggtggtttacggtggcggagaacagatttgggggcaacgcgaaattcaggcgagctggtgggcaatcggatgtgggacggggtgctaaagcttcacaatttcctggcgcaactagccctgccctcaatttataggctccgagagcggtggctctcaatttgaccgcgcagtgctggcggccggaggtgaagaagaacctgggtgcggtgaattcgtggcaaatggcgtggcgagctccccgtcgacgatgggatggcttagaggagtcacgacggtacggtgtaaagatagagccacgcggcggacgccggtaatggctcaacggcggtgaaatccttatccgaaggatcggtgagcaagggggaatggattacggcgggccgaggtggcatccagccc

SEQ ID NO: 36769 - DNA, 1169 bp, Zea Mays
gtgttttagggtttggagtttggggtttggagtttagggtttacagtgacactagtgtactatggtttggacactaaattggttgttcggccatgaaaacgtgtgttgtagctcaagcgaggccaaaaacagccttactttactgtttagtgttgtgtttttgggtttggagttgtgttttggtgttcgggttttcgttttagggtttggggtatagggttcacaatttagggttcagggttcagggttcgggctttagggtttggggctctgtgtttagagtttgggcgggaggcatgaaatcgttgttcgacgacgaaaacatgtgtcgcgggaggccaaaaatagccttaccggcctccggggccaaatgcgtgtacaatggttcggacactagtgtactatggtttggacactaaattggttgttcggccatgaaaacgtgtgttgtagctcacgcgaggccaaaaacagccttacattactttttagggttgtgttttagggtttgaagtttggggtttggagttttgtgttttggtggtcgggtctttgatttagggttcgaggtatagggttcacaaattagggtttggggttcaatgttcaggccttagcgtttggggctcgaggtttagagcttaggcttttgggattcgagatttcgggtttcgatttgagggttagcgtttggggtttaatgtttagggtttggagtttgggatttgtgattttgtgttttgggggtcgggttttagtctaagggttcgcggttacgggttcatggtttagggtttggggctcggggtttaggatttaagtgttttgtgtgatgtagctcaatagatgctaaaaacaacctttcccatgccagtagccaaaacatgtttggcgggcgggaggcatgaaattgttgttcgacgaagaaaacatgtgtcgcgggacgccaaaaatagccttacaggcctccggggacaaaaatgtgtactatggttttaacactagtgtactatggttggacactaaattggttgttcggccatgaaaacatgtgttgtagctcacgcgaggccaaaaacagccttacctgtcttagtggccaaaacaagggtggcgaacgggtggcatcaaattgttgttcaacgacaaaaacatgtgtcgcgggaggc

SEQ ID NO: 36770 - DNA, 617 bp, Zea Mays
aaagtcgcctaagggtacagccggactagcacaacaagcgcgcaaaatcgaagtctctctcaaaagactacccatgcaacgaccgactacaggtgccgccggactgacataataaacgcgctagacctagtgcacaagtcccctacgggcacgaccggatcagcgaaggcacacagcctcttcatacaaattatagttacatacgtacagcgagggcatcacaccttatataggttcaaccttcgggataatacccatctccctatagttaaacatcattatcctcagctcctcaccctcaaaaagactttgcaattccccctcacctacactcgccccagctagcgaggacaacaattcccgcttgccagtcctgtccacacgaagacgaccaccctccacctcactcactctacgcttcgccaccgcccttcaccacctacgcccaacacttggaccgggaacttcagcacccatcacacgcggagaagcctccgtcgcagccacatccaatgccgcaaaataatccaaatcctcatccgaagactcttccgtccacaccaccgaactcccagaatcatcagactcaaaaaacttagacacagaatcacccgaat

SEQ ID NO: 36771 - DNA, 301 bp, Zea Mays
ggctcgttcgtggcccatgtcgcagcatggcagcacagctgagtgaaaattcggttcactgctgagataagcaatgcagatatacaaaaacgtcatttttcagaattaacaacactaacacagttgccacacattatttttacacaagttcaaaggaatataaacatactgcttgtcacttgtcagtatcagttcatcactgagaaggttcttttttgacgtggttatcaatcatcatcttcctcatagtcaaattcctcctcctcttcatcgctcagctcttccgcaggctcgtcatcct

SEQ ID NO: 36772 - DNA, 364 bp, Zea Mays
atcatcacacgccccaccatctagtatcgccccaatcttgcaaccgtgagcgccaagtttaagttttccccaaatctattctgagacaccacgaagagcacctcgccatggccagcgcgatacaggttagttcatccctgctgcccttgtgtttgagtgaccttaggtgctcgtgatgctcgtcgacccatttgattgaactaaattgccaccaatcaccgggaacacgttcatctgtctgcaacaccctcggtcaccgcgaccagagcgaattggatcaccatttctgaaattaagttaggggaagtgatcgggaatggttcaattccatgcccgctgctcgggggcaccggtcttggcctcc

SEQ ID NO: 36773 - DNA, 512 bp, Zea Mays
ggacgccccagccgtagtgggctgcgatggcgaggagcaagcgcacggactcctatcgtgcaaccggcgcaaagacctcgtcgaagtcgacgccaggctgctgcacatagcccttggcgacgaggcgggccttgtacttgacaatgttgtcgttctcatcacgcttgactttgtacacccacttgaggcctatggcgcggtgaccatgcgggagctcggccagtgaccatgtcttgttgtcacggatcgacgccagctcctcctccattacggcaacccaatttgggtcaccatcagcctccttcaaggtcctaggctcctccacgctcacagcatgtagtttagcctcctcgtcatggtggaccagcccaggcgctgcacccacgctatgaatattgtccagcgtccggtatcgaagctcccccacatcatcggcgtcgaagctagggtcggtggagagcggtgtcgcgaacttgatctgagttcgtggtgcctgcggtgtcgagggcgag

SEQ ID NO: 36774 - DNA, 396 bp, Zea Mays
gtgaggactccctccctgtgttcgccaggtcctttattacgtatcgcgcactgtggattaggacctagggcttgtctgtgtagtttcgccatgctccggcgagctctgcggtgggggaagcagggtgccgccgggtgccgtgactggagaatgggggcagaccgttcggccgtctgatcttaacggacggtagagattagtttgagcgtaccctttcgatctattgatcatgcgccatcggatcacgatcgtgtggttataattacataccggttcataacccagcgcgatctaatctcatccgctgcacacagatcggacggcacatattggcctgtaccccttcggccaactcttttgcatatgagcccctgaagaatcaagtattaacccgcc

SEQ ID NO: 36775 - DNA, 276 bp, Zea Mays
tttcaccatattgaatccttgccgtcgatctcgcagggacgactaggattggatgtagccatacgccttcgctgatttagccggggtcgttcgattacagacgtgtgctcgagattagatcaggagtggccgtttcaaatattgaatctggtccgtgagtgttgaatccaagggctagagtggtttgatgcggtggaatgattcctgcccgtggatcttggatcctgtggtgtctgtcgtttaccgcttcacgatttaatatgagccatgcaaaag

SEQ ID NO: 36776 - DNA, 509 bp, Zea Mays
aagagctggacctgtgaattattgagaaacgttcgaccttgattaagtataccacgcacaatgatatccagtttactgtatctcataatccagttgactgtatgatccatacatcaattatttgattcattttacctctatgctctgtttaatttatttgatgtgcacaatgatatccagatttatatgaaactcatttgttgatctctagatttatcctcaagaactcgacgaagaaatatgacatttaggggtatcttgagttctctcgttgtcacgtactattatgtctggctgctcatgggattagcatatagaagaaaatgtttgagaatagaaagaaggttaagaaatagggagcgtaggatggagaatttaaatgaactcattcgtgagactgatagaaaatgtattagtgagcttcgtatggatagaagaactttctttattttgtgtgagatgcttagagatgttggtgggctaaaggccacacgcaatatgaccataga

SEQ ID NO: 36777 - DNA, 455 bp, Zea Mays
gcgcgatagaaacgggtgcgatcggcaagcgaagagagacatcggtgacgacagatgtaggaacgtcacatcgatgtgtggcatggccggatcggagatggccgtagcgggaaggcccaagcgtgctcggtccacacagcaaacgaccaattaggcagaagaagtgtcggagaagtgaatgtcgtcggtcagaggagcaccagcgttagggtctgctgccctggcaaagttggatgagggcagggaaccatggtggtgctcggtagggcaagagatggcacgacaggagcttccacggcgacgaagaaatgggggctaggcgcaaggaacccaaggggcacagtgtcggctgctgggacgaaggggggacgtctggaggtgggaccggagaagatggcgaggttggaggtgatgtggggggcgttgcaatccgccggcaaggaggagaggtcgag

SEQ ID NO: 36778 - DNA, 311 bp, Zea Mays
ggaaatgctaactgagacagacacatcagttgcaagggactgaccttccttttggtaagtgtgttgaaaggtataaggttctttggttgacggtagtttcttcctcggaacatgatgattgttttggtattatgaatgttgatcactattccaccactcaatcttgtcagcattgctgccatttccttaatcttttcctttgggaagttgtcacagcaaacttgcaccgtctcatggaatttccagtgcatatgcatgttttgaacaacacctccaaagactccacgaactccaacaggcacatagtttct

SEQ ID NO: 36779 - DNA, 377 bp, Zea Mays
cctcctcccattgccgtccccaccgtcttctcctccgcgtttcctttcggtccgccacacccctccccctcaagtccagtagatccacttaatcttcgaaggtatgaacgacctagtaacagattattgtcttcattgccgcctacagactttcgtatcaagtcgaggtcaaggtgttcggatccaagttcaactgggattctaggttcggttccaacctccaattaagctaaggtaacgtcaatatcaatttctgtttgacttatttgtaagcatagctgcagtttatgtgttcgaagaccgtggatccatggccttgttttagttcataaacgtcactagacctgaacaatgattccacggttaggataaagaga

SEQ ID NO: 36780 - DNA, 469 bp, Zea Mays
ctcgactccatggtccccacttgatggaggatgggaccccacctccctcaccgccgcctttagcactatggcgatggcccaccctcctctgactgggtggtctactctagtgcttcctaccacaccaaccccactacaggcacactatgtcactctcatcctctccattcctcccatccctcctcgatcattgttggaaacggttccagtctgtcggtcacctcagtaggtgcctcggttctccctaggccattctatctcaacgatgttctcgtagcccctcatatcattcataatcttctttccgtttgttggttcaccatcaacaactcttgttccattgagtttgacccctctagttttcttgtgaaggatctggccaccaggaccccactcgcccgatgtgatagcttggggccactccacacgctttgaccctcctccaccgatgcgtctccgcctcccatcc

SEQ ID NO: 36781 - DNA, 331 bp, Zea Mays
aattcctcacccgcaaacagacttcgcagctccccctcacccacactcgccccagccggcgaggacaacaattcccgtttgccagtctcgtccacatgaagacgaccaccctccatctcaccacgatgacgcctatcacttcgcgacaactcacccactctccgtttcgccatcgccctccgccgcctacgcccagcactcgcacccggaagatcctcagcacccatcacacgcggagaagtctccgccacagccacatccaacactgcaaaataatccaagtcctcttccgaagactcctctgtccacacaatcgaactcccagaatcat

SEQ ID NO: 36782 - DNA, 322 bp, Zea Mays
cactttttctcgtccaccctcatttcccttcaaacagccaatcattatccgccccaacaatacccccactaccccaaaacagccgggtgccccaggcactcgattccctgccttgcctagttcttcaactgggtgttttaattgcggcaagtcggggcattttatcaaagactgcccatatcctaggcaaaatcaatcaaatgctccgcaaggatctgggaaatcagttcagcctaaaggaaatgctgtggggaagaatacaaagaagacagggcgagtatattacactcaagtggctactacaccggaaggagagccggtg

SEQ ID NO: 36783 - DNA, 361 bp, Zea Mays
aaaagattgaatagggtatttgatgctattggcttcgtataccctgactattgttacccgctgcgagggcgagggttaaagagaaagattactgctttgggaaagattgctgcttcggccatcacagctgagccaaagggcaagaagatgaaggttctgactcaccggccgcgttacattgaactagccgtgattcctgaattttgcaaaggtacttctttagctgccaaagcaaaagagagtgtttcaattatgctgagcattgtagagccgagtgtagtgccgaagatgactacagttgagccagtcagggctgaagataataaggccaaagagccacaagtggaaaaaagtgacaaaa

SEQ ID NO: 36784 - DNA, 350 bp, Zea Mays
atgacagaaactccttcttcttgatctttatcaatccagctggaatgtggtagttcttgaactgtgcactgaactctgcccaagtaatagtatcagcagcatcatgggcagcagtataagaatcccaccagtcagcagtaggacctgtcagacgacctgaggcataaagaactttctcccggtctgagcattgggcgatattgagcatcttctcaattgacttcaaccaatcatctgcatcaagtggatctggcgaactggcgaaggtcgacggcttgtgactcataaactcccggtgcttatcacgaggtggaactggtggtggtggtggaggcaatggtacttgttgc

SEQ ID NO: 36785 - DNA, 381 bp, Zea Mays
ccatcgctccctgtttgattgcggcgtcatgtggggtagatatctgaaacgtcgcattaaatgtgcacgtctcaacggttcccgaggcatttggctgagtgctggtcttgggtcgtcctcctgtctgagacgagctcgggcgaggcagacattaccgttctgtgaagaggggccatcgggcgagacgaggatttctcccgagcgccgcctctgtccgatgatgggatcgggcgaggcggagtttagagtgaccgtcgagtgggtcttgggtgaatcatgattcaaccctgcttgacctcggggaacgtgtcttatgatatctcggtaattaggtgttaagcatgtttaagggcataatctgggtacccctaattatgatac

SEQ ID NO: 36786 - DNA, 293 bp, Zea Mays
ctctaatctccagcgaattagcgcagttatatccagatccagaggcttataaacgcatagcaattgtgcactcctagagatgaactcccactacacccaattacaatgctcatggaccacaagagtcaccatctaaaaacataaatagcgactggttagaaaacacagtacgctgatttcgaaattcgtggtttcagccaaccggcatagccgcacaggtactagatcagctgatcattagaagttgtgaaccacgcgagacaacaagttggtccgcaaacccacaaaatcac

SEQ ID NO: 36787 - DNA, 311 bp, Zea Mays
gtcaaacactcccgctacgtaccctactgggttgattcctccaacccagctgctcgtacgaaatgggctccctcacggtctggaggccctgcctcctccactgagccacctcgccagcctccccatcatccatcttcctctccccccgctgctgcctcgcgtccctctcctggccgcggatctcccatgccatgtgctcgtggtcgtggtcgaggtcgtggccgagggatgggtgctcgcttggtccatgggtttgcggcatttttctccatgtgccgcaacatttctgctgatgtccatgaggtggcacg

SEQ ID NO: 36788 - DNA, 628 bp, Zea Mays
gtgactggtgccaattggaatgtggaattcaaggatgcaacatctgctgctcaggcagcagcagagtctgcagagatggctagcattgctgctagagctgctgctgaacttgctagtcgtggaaactattctggagataaaggcactggagcctatgattcagccgcatacagtagcaaaaacacagtgaggaagcaacgggcggaacatgtagtgaaggatgagagtttccatgaccagagttcaggtgttaatgatccaagcgagatgccaagtaactcaagaaatttttttggaggaacagaaacatcccatgttgatagtgagaatatatcgacagccccatatcaacagttccatgcctacaatccagacagccatccatatgtttatgaaatgccaactgaaccacctcgtgctcattcacctgacccacgttttgatgatttatatgagagggaaagtgacattggaagatctgaagttgatccgtttgattttcctagagaaaacttccaagatactgcatctgttgggcacaatttcaaggatgtggaaatcaggacacctagctacgatcaagaaagcacagatgactactatggtaattttaattcttcacatgata

SEQ ID NO: 36789 - DNA, 383 bp, Zea Mays
ctggtaccaaatctagagcaggactggaccgagagcgcgcgagatctctggcggcggcaatactccctttctctcggtgtgcggcgaagctaggcgatggcgctctcagctatggcttgggtaccgaggaaaggcataggtcttataggaggcgggaccgaggttggttgcgctcggtctgcggaaatcgcgcgcgtgcagagctcggagttcacggcacgctgagcggaggttgttgtgaggagggagataagtctgacaagtggggcccacacgccagtgatatccgcaagcacgcgcatacccgaccggtggaagaaagcggctcccagtgggccccagctaccagtgaagaggcacgcgccacacggctgacagaccgg

SEQ ID NO: 36790 - DNA, 276 bp, Zea Mays
taacgacgaagtcaccggcgcgatgcggcctctacgtggtcgtccgggcacagacgtgagagagtgagctgtagtagggtgaggttgaagatgaccttgggccgttgaataatagatcatcggttaggattgtgcctgcataccggttcggccaccttcgttttggaccgtccgatcggaatctagcgcttgtgagcgagcctggcagtttaaaatccgaggcgttaacccttgaccctacggctacgactgagtgagatgcgcatagcgcgcggc

SEQ ID NO: 36791 - DNA, 318 bp, Zea Mays
gattctttagccaacaaacactggcatgacctcagggcctgtcagagttcagcgtatgcaacataggcaagaagactctctgcggtccatgacacagggcaccatgttgtgcctgcccatctcttgcttgctctatcatttgggaatcatgccgctactactgtaccatcttggtttaaaaggaaggctaaagaatttttgactgggcacacagactgacaggcatgagtttctagcaacatcagtaattcagcatgcatgtatgtttgatcagtaggggttacctgtgatttagatgtggttcctgtttaatcgttg

SEQ ID NO: 36792 - DNA, 459 bp, Zea Mays
gctttcttgaaaggtccaatcatatccaatccccagcatgcgaacgaccaagttacgggtatggtttgcagtcgttgcactggtagatgttgctgttttgacaagtactggcaggcttcgcacctctagactaactcggctgcatcactctttgctgttggccagtagaaacctgacctggagaccttcccaaccagggtcctggatgctgcgtgtatcctgcattgcccagcatgaacctcttctagcagttgctttccggtggctgagagaatgcatttcatgaggactcctgatgcgccccttctgtatagtgtttctccaatgagagtataatgagctgactgccttgcaatccattctgctgtatttttgtcatctggttcctcctcattttttatgtacttgatgattagctccctctagtcatcagaatctgactatggttggctcagagcg

SEQ ID NO: 36793 - DNA, 336 bp, Zea Mays
gtcgacactaagagccggccaaatgctttataagtattttccttgcacataccttctagatgtcatggtttgaaggtctaacgtctccgctacttctggtcgtccccggatcgtctaggtattcgtcctcggactgtccacatgtggttcggaccgcccagcctaaggtctcggatcatccggcgcacgctggacaaacgatcatgatcgggtatccgatattgcttacacctggtgcctccgatcttattagtctttctcctgtacgaagccttctaagtgaccactcctcatgatagatttgacgtgtgaggattaccaatgataatgttcttg

SEQ ID NO: 36794 - DNA, 287 bp, Zea Mays
ccaccgcctctagcctcacgtcgcgctttgacagctctcctcgcctctagccccacgtccagcaagccccagaggaagccctgaggcgtatggctatgcggcaccaggattgaaacaaggacacaaaggtaagaacatctattagtattgaatctgtaacactgtgttagatgacagactttgccaaggttggggaaagaataaggcagtacggggggcagctggcagcaaggaaaggtggagattgttgaggaatctaggttatattttcccctaaataaactaga

SEQ ID NO: 36795 - DNA, 431 bp, Zea Mays
ggcaaagtactgcccaaagtgtaaaacctctaggttcatggaggtagactctggtgatggacaaaaagacatcttgacatccccatgacaatcttatgtcaccttccgttcatatcaaggatctagcagctatatatgactaaggaatatgcgaattagatgacatgacacaaaaatggcaaattatacaatcctaaaaaagattattcatgcatctgatggtgaagcatggacctagtttgtggcattcatcatgagaaagtcgaagaggcttataatgtatgtgttgcgctggccacttatgggttcggtccttatggactgatggctgctccatacacatgttggcccatgttctttatgccattcaatctccccctagagtatactttcaatggcaaaacatattcttgtccttgataattcctgga

SEQ ID NO: 36796 - DNA, 298 bp, Zea Mays
gggatgcatgcacatgtctaggaatggctgcatggcttggtccatgccagtagggtggcacctcagcatttgctgtctgatggcaatgaagcggtgcagcaatacaagcctgtggatgatcaatggccaccttaaacgctttcgagttagctgtgcatgtgtttccacaccatgttggtgttcagatatgtatatggccttacttgccacaggttatgcaatcgtaagccaattgaacctttaaaacaagattgctgactagattttttaattttcaaatcctatgactagattacac

SEQ ID NO: 36797 - DNA, 360 bp, Zea Mays
gcgcgacgtagtgttcgacgaagggtgaggatgggcctgggacaaggcgatggacgacgacacgactccgacgtacgacgacttcaccatcgagtacgtccactttgagggagccgggggaatcggcaactcttcttcgagcaggtctaccccagtccccaagtctccaactctagcgccacgctctccagctccggctacaacgagctcttcgccaccatgcaatccagccacgactccggctacagcaagctcttcgtcaccacgtactccagcaccgacgataccctctccgggaacgtcatcgccgacaccagcccatgtcatgcacgacccggtggagctcgtgaccccgctttc

SEQ ID NO: 36798 - DNA, 472 bp, Zea Mays
aggatcatgaagggtccaataaagcgaggggacaacttccctttaactttaaacctcctcatacctcggatcggtgacaccttcagatacatatgatcaccctccttaaactctaactgccttctccgggtatctgcatagcttttctgcctagaatgggcaattctcaagttctcctgtatcaatcgtacttgttgttctgcctcttgtacaatttctggcccaaagaactacctttcaccagtttgatcccaatacagaggtgttctgcacttcctgccatataaagcctcaataagggacatcttcaaactggcctggtaactgttattgtaagagaactccgcatagggtaaactcttatcccaactgccaccatgtttaagagcacaagctcttaacatatcttctagtacttggttggttctctcggtttgcccatcagtttgaggatggttggtcgagctgaaat

SEQ ID NO: 36799 - DNA, 364 bp, Zea Mays
gctgacaatgatgttgttctatgtggcactctttcggcactctcagaacaaagtgatgaccccaaatgggcaccaccacaagtaacacatgagttttcttatccttcggatgaggaaatagttcccaaccctaaagcaagctattccaagaggggacttcttcctaatctaggaaaggtccgtaagtggttcagggggtctaatgatcaagatgatgagagtgatatgaagtcttcaacagcaccatgcctccctgttacatcaaaaaattcaacagctagtgggagatcacgaggtgggctatcaccacatcattacataaatgtggagtcacgtctgccacaagataatccctcattggaga

SEQ ID NO: 36800 - DNA, 325 bp, Zea Mays
ggagggcatgttcttttatagctcaagggtaggaccttacagtggagacttgttctctactggtaagagggtgatttgttgccccgggttgaggtagcattcctgacgtcgttcgtagggtcatgtgtagtcgtattcccaggatagtgtaccaccttatttgtctgccatacaggtccctgtagtgagtcaattgttgatgtctttatagtagtgtgtggtaggtccaacagatcagactcatggtgcggtcatgcatggtgcgactccaattgtcgtcatgagccctacgtcacctgccagcgtgcgtaggcatacactcggt

SEQ ID NO: 36801 - DNA, 580 bp, Zea Mays
ctttctctctagtattctactagtactcgacgacgatgggcggtgcacgcaggaacatgtatcaggacaggaccaccacgcacgacggtacggtgctccgatccaccgtcgatggatccacagagaggtggagattttttggttggggtgggattggattggattagattcagaagatccttgcgcaggagaaggcgaggcaacgtgtgtggtgcgtgcgcactggtctctcgtctcctttcctgtatatctccctcacctgcactgcctagggacggccgttgctgctggctgcgatttggagccatcgaacatccaagggactccaggtttgcgatgaacatgagcatgcatgctgacgacgaagtaaagctaacggatgtctagctagctagctgtgcggaccggccggccgtgacgcgcgcgagtgccgtttcttgtgagctcatcagccctgtcactagctagctgtgtgtgtctgtatagttcccgtcgtcagcctgtgactgtgtctgtgcgtgagcgagcgaacggagcagctgcacgccatgaacatggaggccatcgaggcagcatgacg

SEQ ID NO: 36802 - DNA, 589 bp, Zea Mays
tcccgatccactgaacctcgccgccgacgagccgtgcactcggattcacgccgcctcggtgattcgtgcctagagcagatggataacgaagaagggtaagaatcttggtgctcggattagctcgggcttgctcatcgtcgtgtcgtcgtacccacttggaccgtgactggttggaatcatcatcgccggtgttagccactcaacgatcgtatgccatgtgccttggtgtcttaccacgtcgcagtagcttgtaatacacacgtccggtgatcgccggtgagttcaccacggtgaaagccatcgattgcttgcgccagtgccccttttctctccggccgccaccgtgccacctcaaattcacgggccaccgctcaagggccctataaattaagcacatcctcagctctgctatgtaattatgcacccaacacacccactcgtgcctccaattactcaccagagcccccgaattgctcacttcccccaaatcgattttccgccgccgtaaggaaggtctcaccgtggccagtgcgctccaggtccgatcttgtcctctgccctcttgtttcagcacccttatgtgcccctg

SEQ ID NO: 36803 - DNA, 675 bp, Zea Mays
actttgccaacctatatttttttcttttcatcctctgattgctagtaaaaacgagatctaagaaagtcaatcttttctagaaccttacggggtatttcaaagaaagataacatgtataccgggagactagaaagaaccgagttaataaggactaagcgtcctcccaccgagagatgctttcctttccagctactcagtttcttttctattctctctataacactattccactccgcattcctaagttttcttaagtgcataggaatccccaaatatgtgaaggggtacgcccccgctttacacccgaaaaggtctgaataggcctgctcatgttctttggcatccccgaaacagaagatctcgctcttatgaaaatttatcttgagaccggacagttgctcaaacacacataaaatgagtttgagatttcgagctatgtcaagatcatgatccataaagagtattgtatcgtctgcgtattggaggatggaaagatcatcgtccagcaggtgagggataactccctcaatatgcccctctctcttggcacggttgataagagtaaccagcatgtcaacaatgacattaaacaggactggagataacgggtcaccttgtcttagacctttctttgtttgaaagttattggtgagctggtcattaatctttatgttc

SEQ ID NO: 36804 - DNA, 404 bp, Zea Mays
gtcgtcgagagatcctgacgggggcacgagaccacacccgcccggagtaggagcatccgaagcgccggatgggggtacgaaaccacgcccaccagaagagaagatgccaggtaggggcacaggtccacgcccaccagacgaggagtcactagctgcatgatcagtaacacaaggcgcagtatccaagtcgcgaccaagaagaaaatcgaaggagctagcgggagtaggcgggtcatgtgcgaacggaaaactgagctcatcaaatacaacatgacgggaaataataatgcggcgcgtggaaagatccagacagcgataccccttgtgagcagaagggtaccctaagaagacacatgcggcagagcggggcgcaagtttatgcggggacgtggcctgtaagttag

SEQ ID NO: 36805 - DNA, 979 bp, Zea Mays
attgagcttgtctgcttggaattgctcttttgtagcatctggatgctgaggctcttggacttttaagctggctggcctcttcacaagctgcagaggaatcaactgatgatgaattaactaatgaagtcatcctcagccctttgtttgccaataagtccattgaagttgctgtggagtctgctcaattggattttgatagcgcttctcagcaggagtgtcaggatattcttgattcagttgaccccattagggcagtagaagaaccaaacatacatacatcttacctcgattctgtgaagtccaattctgctgcttctctgggcaattctattcctcagcttgatgggtcatctgatgagaacccaaaagtctcccaggaatatgatagaagtaaggtcactaggaaatcagtagtatcggcaagttacacatctactaagaagccttcaaaatcagccagtaagtattcaggaactgaacatctctggggttctttgcctctttcttccagaaaaaagaggcaacatggagatgctgatgattcatgcagtgcaatgtcaccgcagaaggatttaagtgcatctaagaagagtacaattgataaggactatcatgataccataggcagcactgattcagaatcttctagttttttaggtgtacatgattcagtttgtcattctgtgagggatttgatgaggcggaggagatcttttcggcgtgaacagttggagtttggttgttctggagctgcaacatgcaccatggataaagagagcgaaactgtgaattctgggggattggaatttcatgatttcacaagtgacatcccaaacttagcactgacacggatggcttttgttcagaagcctccattgaaggatgatgcatgttctggtttggagagcccttcagattgtgagcaacgtggatgtaagtacccaagaaatctttatgttatctcgatgaatggtactcc

SEQ ID NO: 36806 - DNA, 378 bp, Zea Mays
gttactgtaccatggaatgctccagcagtgctcctgacaggggaatttacagagccaataacctccaattttgtgcagtaacatgattgacaccctttaacaaagttatagtcctaagatccagctacaatattgttatagcaatcctaggcaaatacttgctcgatcatgcattaattcatgcccaaagtgcttacaattgcactgcttgtctgaaattcagaacttaatcagcctgacagccaaagtttgagcatgataatctctaaatttctcactagaacataacttgcccacttaagcaaagttgttcacctaagatagatctacatagttgatgtggtgacctagggcaaattctcaataatttggaagatg

SEQ ID NO: 36807 - DNA, 418 bp, Zea Mays
cacattttggattacataaatacctatatcatgcaaatcgggtatggtgggcgactagcatcaggtagtcgaggggggctagtctggcactccgtcgagatcgaaaagctgagtacctagatattcctctaaaagaacacataaaagggtggcactatgtgtggtttacacttgagaatcacaataactcccttcccccctgttctagaaggcagccagaagttagggtgcccagctggatagagggcccaaacgatgctcaggatagtgaagcaaggattctactaactaggatcgctgggttgaaggacagaggcctgatcgtcgaggcagttgtgatttattttgtatttaacaatatctagcctctaaaagatagagtgcatcctgcatatctatatatcggggttagagatcc

SEQ ID NO: 36808 - DNA, 540 bp, Zea Mays
aacggacctgtacatgtctggccacggcgagctcactcactgtggagttctaactgatttgggggaacttcaaaattagagcgctctggtggacaatctgaggcacgggcgggtgcgttggatgcatatatacctagagctcactagggggtaatttatatgttccatcagcggtggcggctaattttgagaagacgcgcggtggccgggaaagagagtgagtcatcgtagcggtctgtcgtggcggtcactgggcaatgagctattgcagttactgggcagtcactatgagtcgcgacgacatggtaaatggcctaaggcgtggcgcaaccacggtgaatggtgtatattccggtgatggccgctcggccacgtcgctggcgcaagtggatgagcgacagagcgcaatagtgcctccaagttcgtccacggcaagatctttttaccccgcgaagttatccgtgtgttaccaggcatgaatcagaatgtcggcgcgaatccgagcgcgaggttgcctgtggcgaggtgcactgtatctgt

SEQ ID NO: 36809 - DNA, 641 bp, Zea Mays
cccatgtcgcccttcgttgtacccaccaggctggcatgcatagtcgacagaacaaccgccagctgcccagcctccacccctacatcacaactaagttagaaaagtggaatcacctagctaagaagaatcaagtaatccaactcaccagcaggcggcagcctagcctaggcgtcaaacatggtaacacctcccaccaggtagtcatctactaacaactcctggcctgccccaccggtcctcgacaccattgtttccgtcacgagtggtggcgagggcaatcttgcagcgacagcgggcgctgcgggaggaggcatcgctgcatacggtgtggcacccttcacgccggctcgtgccagcttagcttcttggtgtgggtccaccagccaaagggggccttacgcttcttccattgagcatcctggcgatatttctccatcactactgacacaatagcaccaatatttcttctgtaagaaaaaaatctcagatcatgagccaaacgggatgtaaaaaatcattgccaatggcctagggtatagggtcattcctatgccatcggcccccagtaacccttagcatgcgcgaagaagtttctaggagttcgggcgaagacatcacttccccaggaaccgctcacgtcc

SEQ ID NO: 36810 - DNA, 335 bp, Zea Mays
ggagaagttgcatatcaactagaactactgatcacctggcagatgtacatgatgttttccacgtgtcacaactaaagaagtgcctcagggtacctgaggagcagctaccaatagaggaccttagtgttcaatatgatctgacttatgctgactaccctatcaagattctggatactttgactcgatttacaagaaataaggtgataaagatgtacaaagtacaatggagtcagcacggagaagatgaagctacttgggagagagaagaagagcttcgcatagattttccccatcttttccctagatcttcttaaatctcgaggacgagattcttt

SEQ ID NO: 36811 - DNA, 628 bp, Zea Mays
cgcagatgtcgtgctcgggtgctcggtggctaccggagtatggaggcgaatagtctgacaagtgatggagacggatgttgggggttgggggctggcgtcttgtgctgttgtgcaaataaaaggtggcccttggcaagggttctaaattttggatggatggtcgatatttggtagactgaaatgtaatggtccaaaagaatatatggaaaaataattggaaaaatgctttgtagagaaccgatatcaacacgacatgtatgcttgagacaggagacaaccatcacagaagctaaacttatttcatgtctcactggttgttttggtattatcgttctgttatcgttccaaaatgtcatggtccacgtttcactagtcaaaaaaatatgacaaggtttaccccctttgtaccatggttccaaaaaataatgttccttgatttgtgttcctgttcctcgatcccgtcgtttcagaaacatgacttcttagcccaggtctaactacatctgatgggcccaacacatcattctgccttgagataggtcaaacttagccaacccgagtcctcaacttctccgtggaacccttgggtcctagaggacatgggtcccaatcggcgtcgaagtataag

SEQ ID NO: 36812 - DNA, 437 bp, Zea Mays
acattgtcatagaagcaaagatcaaagggcttcgccaaggtccggtggcctagtattttgcaaggaaaccacgtcactctctggagcatctactataaaaatggatgagtacatcagggaagacaatgactttcggcagcactggcaagaggcacaaaagtatgtggaagtgactaaggcttcacaggaagatgtcaccctagacatgtgtgaaacattcaatacccaagccaacattatgacaatatgaatcaatctcaagaacaacacactcaatctcaagacttgactcaatcgtcaatagggcaacaaccttcaaacggcagtttccacccaccagctctaagagggggaagagagggtcgaagcttcggaggccacttcaaccaaaatacacaacctcgaaagttatattgcttcttttgcggtgaaaacaa

SEQ ID NO: 36813 - DNA, 344 bp, Zea Mays
atttacgcatacaacttgctgctgctaaaaagtttcttttaggaccagaagccaccgttgactcaccatctttgaactctgtgctgagaaatagagcgaactgtgtaactgatactatttcagcttatgacagtagatttggaagctctctgaacccagattggcaaacaaaaacagcattaacatttcaaagcaattctcagggctctgaaataacggagttgtttgaccatggtcattttgaacactactccagagaagatacaacattttctttaggacagacaaacaagtttaatattcgtgagatctctccagaatgggcattttcatatgagatcacc

SEQ ID NO: 36814 - DNA, 745 bp, Zea Mays
atcaaatatgcacaaattctgacattatcttactgaacttacatggctttggagaatgtggtgtgtcctgctcatgatcaccaattgtcctcatgggtatccggtgagttgctcccaccaaacttggatgaactgtgttgctgtcatcaaggaatcatggcgccggtaacgcagccagtggagttacagcatgacgaccatcagacccacaaggtaacgtcgtcgctgtagcctctccacactgcaccgatccactagtcgtcgccatcgtgtataccctacctctcctaggtcatcaaacaaagcggcgacggtgcgtagcccagtttttttggagttatcctactatattcgccaaaaccgtccttgtcgatattcatggcatgttccaaatatcccgcacgattcgcatgttgcgagatttccgtgagtcgacacggttacgattacctgccaattgtgttacaacaccataaacacggctcaaccccacgcgcgaccccaccacgatcccagtgaacaagcatggcacccccactacccgacctcaccacacacgacgtgtcagatggatatgcagctgttatcgacaaaaaatacaagcataaacgccgaaccacaccccgaccgcgtcccgaccacaccactatgccaatttacgcagctgttgccgtcaaaatacgcatgcataaacgcgtgaccccaccatgatcccggtgcactcgcgcggcacccccactatgcc

SEQ ID NO: 36815 - DNA, 311 bp, Zea Mays
ctgggggcaattattcttgtagtgactggggtcttcgcagtgccaacaggcattagctggaggttggttgcttgcaacggaaggggcctgaaaggagctttgaccctactgactaaaacgtgacagagtgggtccagctggcttgttgaagcttggtcccttgggtggaaacctaaaggatcgaattctctagtgcctgtcctgctgctgagctcggaggacttggaatttcctcttgaggtgacccttttcttcttcccttgccctttccacttgtatggccttgtttgagaggtgcgagaagctgagga

SEQ ID NO: 36816 - DNA, 287 bp, Zea Mays
gactgagccaccagtgaccttcttcctctctggccgccagcacgccatgcccaaattaggagccgtcgcccttggatactataaattggtgccctagcctgctccgctaagtagttgtgcacccagtgaaccaaccctcaccttcaatcgtcccccacaactcgctaatttgagatttcccccaaatcagtcaagaattccaccgtgtgtgagctcgccatagccagctctccacaggtccgatcacgccctcctcgcttttgtttctgcactcttgtgtgctcttg

SEQ ID NO: 36817 - DNA, 382 bp, Zea Mays
ggcggttccaggaagaagctctatggcaaactcaacttttcactcaggtggcatgcctggtatgtcctttgggaacacatctgggaactcagacacaaccttgataatctcgggtggacctgcttcactgctatcaatagctatctgatagcaacttcctttctttggctcaggcgggactaactcggtcaccacttcctctcctagtggggacatcaacttgattgtcctcttatcacatatgtaactgcctgatacttatctagccaattcatccctaggatgacatctattccctgagtacccattactatgagattagcaagaaacgctatcccccttatttccacacttacattcaagcaaatgctatcgactcgaa

SEQ ID NO: 36818 - DNA, 550 bp, Zea Mays
aaagtcgttgtcccctgtaggacagcgacttccctgaccaaatcctcgtgcttcctcgaggagatccccgcaacgtcaccggctgtgtgaagctaagcatcgtgatcaggctgtagtatgtatccatggggtgagcggagagagcgacctgccggtagatccgtagccgtagatgaagcctccaggccattaaacaatttccggtcgcgaagtccagatgcgtctctcttctgctagctggataagttttaaagaagtcacgagcttctgcaaagaaatattccaccctccagcggcagacttgtctgtatttgactgacaacacggctataaaattcagctgatgagcaactgcaatgacgaatgctcatcccgccaccagctctgaagctctgacaccacccatggcggctctcgctctcgcccttgccctcgccagcatcaccctctccacgcttgctccacgacccctgcccctgatgaccagcgccttctcctataccgcaccgcatgacactataccacggaaatcccggctcatcgtcgagga

SEQ ID NO: 36819 - DNA, 420 bp, Zea Mays
tgcgaaaaaaccagagtctatcgcgaagactatccgcgcagaagtcgccgaagggtgcagccggactagcacaacaagtgcggaaaaaccaaagtctatcgtgaagactatccgcgcagaagtcgcccaagggtgcagccggactagcacaaccagtgcgaaaaaacgaaagtccatcgcgaagactatccgcgcagaagtcgcctaagggtgcagccggactagcacaacaagtgcgaaaaaaccaaagtctatcgcgaggactatccgcgcagaagtcgcctaagggcgcagtcggactaacacaagcgcgaaaaaaccaaagtctatcgcgaagactatccgcgaaggcagaaacgacaacatcaaaccgtccgcgccaagaccaactataatcacatcagcacaacaaaacaaacc

SEQ ID NO: 36820 - DNA, 483 bp, Zea Mays
aagctatcaggcgcttaggagagcgcttttgtaatctgtcagaggaggaattggctgaccaagctctgaagaaaaagaagaatccgcctggctgtgttggctctagcaagtcaggcaaaaaagatgagggggacaagacacaagactcttcagatgatgacaactgatatgttaactctgccttgggtgggtgtcttttgcaggtctcaacctcgccaggctttttggctgtctcggccctggcgtttttatctgccttctgtgttcacgaacttggtggtttctggctgtgctctgttctgtcttaacagatacacttttgccctcccagttgttgggtttgggctcctttccgttgacgaacttaatctctatgatgaatagtcacaacgctattaattgctctgactggtctgttttaagttttaatgtccgaggtattaatgtcgtggctaaggggaatggaattcattgtgtgattcg

SEQ ID NO: 36821 - DNA, 620 bp, Zea Mays
tcaatctcacagataacaaaatcaacctcatcaaactctgattgtgagatcacggcaccaagtagccaaagctgaatgtgtgtgttggcctctctgtaacccatcctgggcagcaatgtccatctcatcacctgatataagtactttgttgtagaggtgaaatcagctggtgagcgtcgcgacccatctatgaaaggtgggttgaacagggccgcgacatgagcagtggctggagcgactccactgtgagggcgtcggggaggatctgatgtaccatagcacagactgtgaaggcgagtcaacgactcgggaaatccatacagctgatgtatctggctggcatgtatagtaacatcctctcgctcgaaacggaacctcatccactgatggtccaggtctatccacactatagcataaaagactttgacccactcctcaacgtatctaccactcgtagtcagtagagaaagaagtcccgacagataggagagatgcacttcggaatccgcaccagctgctagcagaaaggcaggtagatccaatagccggtgtgctcgtagggcaatctgtgctgacaactgagcttagaagaatgattcctgaatcccggtactgaacag

SEQ ID NO: 36822 - DNA, 866 bp, Zea Mays
acccacaccacatcgaaactgaaacaaaaattacatatgatcaagagagcccaatccgaccgctctaagagtatcaattatccctaaaatgctaaggtgatgagccccagtcaagaccaaacatgttagctcttctagaaaactttgctgcaccttgctaacagctggcaaatctccttcaaaaaccgtacgatttctttgccgccaaatgcaccaggcctccaagataatagcattgtttattcctgttctcttctctttatgcacattgttgctcacttttcgccacaaatctgcaaaggataagttcattctgactcggggtgaggtacccataccgaagggagccataatgttgtgccaaaaaagccttgcaaaaacacaactcgttaggatgtgttgagctgtttcctgctcttgatcgcagagggggcaggcctctaggtgagaaagccctcttctcctatctgtctgcagttcaacatttgttcctaatggctagccagagaaaagttttgcatttaggcggcgcccaagatctccataaccttttccacggctcaaagttaatcgaccctctgaaaaaggctttatacacagacttagaaaacagccctgaagcctcgtgtcttcaaatgtgtacatcttcaagttgatttttgaagtttgtgcaaggatcttgctgctcttgaagttttttgcaagggccattcatattgcgttaaaaaggctccaaccagaaccaaccaacatcagtgagaaataatggtgtagctaagacaacccccaagcaaaatcttgcaccatttccaaaaacagcaggtggtaccgtttattataattcagacaccagcgttgccaactat

SEQ ID NO: 36823 - DNA, 293 bp, Zea Mays
gtagacttcaaccgttggatcggcatttgagggctcggattagatcaccatcatatgtgaaccggtatccaatccgggccgcaggattcaggatccatggtccagatttcacggagaagggttatgtggtcgctctaatctcacccgcacatcgtccgatcgacgcccagatctaactgtgcgaaggggtatccagatatctaatctccaccgccctcatccggatggatggctgagatatcgtcttccactccggccgtttgatcaaaatcagacgacatcggatacaccag

SEQ ID NO: 36824 - DNA, 518 bp, Zea Mays
gtcgtctcaattcgtgctcaggatgacttgataaacgctcggagcacaccgccggggataagcccggccattaaagtatcccggccaccgtacaaagttccccgcggtagaacccgataagctcgctggtaaccgccgcctcccggccgtgcgctgcgtggcctagtcgttctacagcaccgctgtgacaccttaaggctgtcccatcgtcgccggggagcctgccacgccacgggacacgaattcaccgcgcccgccttcttcttcatttccggccgtcgcgcgtcctccccgaattcactggccaccgccttaccctcctataaattgagcccgtgaccagctccgtagggtcatcagctaaccagccaccgccaattagccacgatcgttcgccggagctcgggaatttcacgttcgccccaaattgggtttccgccaccgtagaatcaagctcaccgcggccagccctttctaggtcagttcatccctccttctcctttgttcgagcactcttg

SEQ ID NO: 36825 - DNA, 1423 bp, Zea Mays
ttttatattgttagacaggtatatgctccaataaaagataatgccttgcattgagtccttagacaatttatatagagtacatgacgtaggagataatgcaatcaacaaatatatatggcaaactctaacacatgccagtctaatagacacaatatatgggtcgggcctaagcccattacagctgtaacacacacatgtctaacacccctgtagtctcaactttaggcattacaaatgttgagactggatcgaaactccgagaacaccagaggggagccccttggtgaacatgtcgacaaattgcgaagtggtcgggacgcagaggacgcaaacatcgtgacgatgactcgctcgtggttgaagtggaggtcgattttcacgtggttcgtgctctggtgctgcacagggttggagaggtataccgcgtatcgttgtcgcagtagacgagtgtggcgcacatgaggggatgctagagcttttggagcagttgatggagccaggatgcctcggctatgctgttggccacaacacgatactcatcctcagagctagagcgggagacgacgggctgccgcttcgaggaccaggagacgaggttggtgcttaggaacacggcccagctagaggtggactggcacgtgttagggtaatcgacccaatcaacatcggtgaagacgaccaactcagaagtcagagagggccgaagaagactgtagtcgagggtcacagaggtagttaataatccccttggtagcgataagatgggactcctgcgagacatgcatgtgaaggcacacttactggaccgcgtaggcaacatcgggccaggtgaaggtgaggtgctggagagcctgatgaggcttcggtaggccgttgtatcgctgaccacgacaccttcgtcgttgtagaccttcccttgagtgtcaacaaacgtggagcagggcttgtagttggacatgttggccagctctagaatgttgatgacgtactagcgcaggtgaaggaagaggctctaggggcgtcactccatggttacctcgaggaagtgatggagagggcccaggtccttcatcgcgagctcacgttgtagggtggcgatcatgcgctggaggagggcgtcactagacaacgtaagcatgatgtcatcgacttagaggaggtaatcagtgccgtcgccgcgctgaaggatgaaccgagatgtgtctgacttggcctcgacgaagccaaggaagaccaagtaggaggcgaagtgactgtaccaggcccgaggcacgtacttgaggccatataaatagcagttaagcttacacaccatacttaggcgagtggagtcgatgaagcgacaggcaaactgcagcacactgtcttagtcagagtgttgtgaaggcattcttgaggttcagctggtggatcgcccagtccc

SEQ ID NO: 36826 - DNA, 274 bp, Zea Mays
ttccttttttccacttccacgtccagggctgttcagacctttgatcttgttcattgtgatctctgggcttcttttgtcctcatcctctctggttacaaatactacacggccattctggacgactactcccattttattttgactttccctttttggctgaagtctgacacgttcaccacccttacctatttctttgcctgggtctccacccatatctatcgtccggtctgtgccctccagtgtgataatggttgtgagctcgacaacaatgcct

SEQ ID NO: 36827 - DNA, 453 bp, Zea Mays
tactgagaagtgcaggggctaaacaataaaatttcccgagacacagaggttaacccgagtggactgcgggttgttttcaatatttggcgaggtctctttaacaaaacgcacgacgaaggggtatgattgattttcggccgtccagatcagatccagaggccaggaatggatcacggtcgcggcaaactaacaagcgagtgcgtccactcgatcaacgatcgacgaccgcgatttaatgtcgtgaaggggtatcgctgcttctaatcagagtcgttaacccccggatcaacggttcacgcgaccccggtcaaccccgacgcgaggcatctaatcccagccgtagggaacgatccaacggtacacgcaacttctccccacacccgcgctacggacagagacgctgcgccaacacggtggcgcttcacgccggcgacaggggacggccgcacccac

SEQ ID NO: 36828 - DNA, 435 bp, Zea Mays
gtcgctggaaatgaatcagatgagtctacgtctaagttttctgagtttgatgactctgggagttcggttgtgtggacggaagagtcttcggatgagggcttggattactttgcggccttggatgtggctgaggcggaggcttctccgcgtgttacggatgctgaagttttgcctggtccgagtgttgggcgtaggcagcgaagggcggtggcgaagcgtagagtgagtgaattggatggtggttggcttcgtgtgggcaaggctggtaggcaggaattgttgtcctcgccggttggggcgagtataggtgagggggagttgcgaagtctttttgagggtgaggagccgaggataatgctatttaactatagggagatggggatcattccgaaggttgaaccaatgtaaggtgtgatgccctcgctgtacgcgtgt

SEQ ID NO: 36829 - DNA, 413 bp, Zea Mays
taatacagatacatgttgggagaggcggagatatgagtagggaaaaaaggggaggggaaagaaaagaaagaagattacatgggggtgattacatattgctgaagaaattacaccatatctctatgtttagatgcaagtgagttacaagaaattgaagggattactcaatcatgccacgtaatgttcattgaatgtatttatatacaagttggggacagatggtacttacgatgcactaatctttggatggttttttcgccattgtccgacaggcaacaccttgctgcagtgaaggtgctagaacagtcgtcgacgacttgacctagacacgcgtgtatccagcagatcctgcgtgcgtgcacgtgtatccggccaacagatccttcgtacgcgcatatccggccagcagctcc

SEQ ID NO: 36830 - DNA, 677 bp, Zea Mays
acagccggacaagcacaacaagtgcgcaatacgaagtctttactaaaagacaaatccgcgcaaaagtcgcctaagggtccagccggacaagcacaacaagtgcgcaatgcgaagtctttactaaaagacaaatccgcgccaaagccgcctaagggtgcagccggacatacattacgagtgcgtcgtacgaagtctttacgacaagtcatccaagcaaaagcccacacattgttgcggcaagcgaagtccccatctcatttcacaacaaacaatgtcatagtttacatacacacagcagagggccaccggccacattgtacaaataaatacctaccgcattttgccaccatccctcttaatcgtgagccgggggagggcagcatcttcgctcactatcgtgatacaagagcgagggcagcatacacgctacattgtctcagccttcgggataacgcccgcctcacgaaaattaaacaacatcatcttcaactcctcaccctcaaaaagattttgtagattccctccccaatacacgtcccagacgatgaggacaacaaatctcgttggccactccgatctacccgtagacgggttcgttacatccccatccgacgacgtctaccacttcgtgacatctcgccaccactatgcttcgacaccactcttcgacggtggtg

SEQ ID NO: 36831 - DNA, 316 bp, Zea Mays
ctttactattgatatgttatgttattgtctatgctagtttgacattatctgaagtgatgctatgccaatcttatttacttattattctcacccctgtggcagcagctatgccgcctcgtagggctcggggtagtctgcaagttcctagtgaggactcgatgagtccggcgacaatgttagccgcgatggaggccatgcagcaggagttggccattcaggcaagctattcctgttgcccctacgggtgctgctcagggtgctggtggaggaggagtgcccgagggcgctgtccctgcgggtgctgctccaggtggcg

SEQ ID NO: 36832 - DNA, 512 bp, Zea Mays
gtcctgggcaatcccacaataaagtccatacttatatcttcccatttccatgttggtattggtagagactgtaatggaccggcagcttttaggtgtatggccttgacacgcttgcaagtgtcacatctagccacatagcgtgcaatctcgattttcatctttgtccaccaataatgctgtttcagatcttgatacatcttagtgcttccgggatgaatagaatagcgactaagatgtgcttcatctaaaatttgctggcggagctcttcattcttcagcaccactatgcggttattaaaccataccacaccttgattatcttcttggaagcaattggcttttccagcctttatcttttcacgtatgtgtttaataccctcatcatttttctgtgcctcaattatcctttgtaagatgactgactccagcttcaagtgatttgaagtcccatgttgaatcatacctaggtttagattctccatctcctggcataacgtaatgtcagaagtccc

SEQ ID NO: 36833 - DNA, 407 bp, Zea Mays
ggcgagggtgcttttacggcggcggtaaactgatttgggggaaaacggcgattctccggctaggggggctaatcggagatgggagtggtggctatggcttcgcaatttagagacgaaggtcggagctcggttgatttgagcgaagggagggaggatgtggtaaatttatagccgcggtgagtcactgccgcggccatggtgataaccatcaccggccttagctggcgatcaactgcggcgtcaagcgatagctattctcacgggtttgccacgtccccgccgcgacagtaacgcagtcacatccgcgcggcgtggataaacggaggggagcggcgccgatgaccggacacgaccgggaggagggatggccgcgtggcagccggagttagtgccctccaccgcggcgg

SEQ ID NO: 36834 - DNA, 498 bp, Zea Mays
gcgatgatggtggcatcgatttcatcaaagtgagaaaccatttagctaagggcgatgccaccaactcggcaaacaacttcagcaacagatcgctccacatggtcgggtagctcccatagaagatcagccaggagcgcttcagtcgatggtggaggagagaggtgggaacacaccatgctagcaactaggaataactcatggagttcagagctcctctccgaatgaagggagttcgctcggcatcccacgataatgacatttttgtaagctagtgaaagcttgcatgctttgtcaacggtcgccacctacacctcgtttgccacggtcttcacatcttgtgccagagcaagcatcttgtggagctctgtgggagaaaaggcatgaaccgaccaggggcgacagatgatcaaggcgcaaagaataaggaaggaagtggaccttcagtcgtgtcacactcccttgcaagctccaagcccacctgatccaagaaaacctcca

SEQ ID NO: 36835 - DNA, 379 bp, Zea Mays
atggggccagagcgctgtttgtggccaccagaacctgtcaatcaattagcttatgttgccttttgttcccttgcgccttgtgtcctccgaatatgacgttaacttcctgatcgatgcgcgggaaagctccgcctctacctctgccggtgtttagtaccgacaatgcaccatggggtgtaccatgagatgcttttgtgagtcgacaacatcaactgtagctcgatggttcgcttcaatatgcgacgaaacacacgatttatacaggttcgggccgtgagatgcgtaataccctacatcatgtttgcggtgggttgtattgctttgatatatggaggtttacaatgagggctagggtttggatgtttgatgagagagcggg

SEQ ID NO: 36836 - DNA, 450 bp, Zea Mays
ataggggtagtcggtgcaggagtaggcacagccagatactgaggaaaaccctgcatcggcatgaactgagaagtcccaggcacataaaactgttgcggaggaggtggaactgaaaattgctgctcagtgcttgacatcatgttgacagtgccctgagaagaggaggaagtcactggctcccatctgagcttcccattgggattcctcctacacaccacatccttgtggtcttgactgcagattgaacacctgccattccactggcactctgcacggtgatgcgcatcaccacaacggaaacacaccagccccagcccgggcttaggaacagcccgaaatctctgagtacttcctcccaaagtacccaagttagaggattttccacgatagggatggtggcgctgatgctgagacttgcccctcttatgggctggacctccagtgttgccc

SEQ ID NO: 36837 - DNA, 613 bp, Zea Mays
cgggtggaaatatcttctcaagcttacacagtaacatgggtgccaatcttttcaagtctgcaatcacggtccgagataactcttttgcataaagctagcggaagaaatagatcaactcagaaagagctagccagacatgctcagggacatagcctcgaaccatcgtaggaagaatccgttcaatccatatgtgtaagtcatgactcttcatcactaagactcacatagtagataagttcatcccctactcaagttagctgcatacccatcagtgaacatcaacatcttgatccactgaagtacttccttcctctaggccctgcttaggacgaaatcggccgtaggccttctccatgtatttccaccactaggcgacttcatctcttggtttggtttatcacataacgctgccagatccactcttgcctttacgttatcctttgacttatcaggaatgttcataattgttgcccaaagtgtctcggcaacattcttttcagtgtgcatcacgtcaatgttgtgtggaaggagcaggtcgtcataatagggaagccaagtcaagcccgacttatgtgtccacatatgctgctcaccatatcccacaaaaccacct

SEQ ID NO: 36838 - DNA, 350 bp, Zea Mays
gagatgatgggggcataattgtgatgctacggttctctccaccagtgattagcagcagctgattcgtcccagcttacaccgttagagctgatttggtgatccgggatctcgagaaaattggaggggattgagggggaaactagtcacgccattccgtcatccaggttgcaatttgacgacccatgctggttcgcggtgaaaacagagctataatggccgtcattagagcggaatccacggaattaaattatgacacggggggagatgatgggggcataattgcgatgctacagttctcttcaccagtgattagcagcagccggtttgtcccagattacaccgttagagct

SEQ ID NO: 36839 - DNA, 477 bp, Zea Mays
tgccccaacaacaactccccgcgaatcccacaggggggcacttcgacaactgtgctacctcctcccaatacgactgtatgccccaaggcaggttcgaccaaggcctcggaagtaacctctgtctcgcccgagcctggcctcggcctatataacattgaccaaaggacttcaccaacttcttcgtgaaggctaccggcaataggatggtacagaacccacgtcaagtctactttgcgccatacgagatggattgccatgcactttcaaccatacttatcactgtgtcaacaactaggacatggacaacgccaccatcaaacaggctcgggtatgcatccgatccccagaccctggcctcggctcagtactcgatcaaagaagcaaatacatggactagacatcctcctcttggttcaagtcaatagcaagtacgaaggccataccgatgaccataccggctacaggggctcggcctca

SEQ ID NO: 36840 - DNA, 540 bp, Zea Mays
gggtcctagtggcttcagctggggacagttgttcttgaagtgactgggatctccgcagtgccaacatgcattcaccgggggttggttgcttgcaattaagggggcatgcaaggagctctgactctattgactgaaccgtgatagggtgggtccagctggtctactgaagcttggtcccttgggtggaaatccaaaggatcgagttttctggtgccgatcttgctgttgagctcggagaacttggaatttccttttgagatgccctttttcttcctcctttgccctttcaacttgcatggccttgttggagaggtgggagaaactgaggaagtcttggctagccaggatggttttgagttctggcctgagtccctttaggaagcgggccatgttcttgacttcggtactgatgtcatctggtgcatagtgggctaactccgtgaacttgtgcacatattcactgacagatcttccgtcttgaatcagttcccggaactcgtcctccttgagctgaacgagcccttggggcacatggtgttc

SEQ ID NO: 36841 - DNA, 345 bp, Zea Mays
tgaatggcaggcagcacgacgacatcttcctcctctttccatggtatactggaggacatggccgacatcaaagatctctccagtaccgcctccgcgttcatagccgaggtcaacaagcttgcccctaaggttggtatttggcacagtaccgacgcacccattcagccatccgacgtgatgcgaagatgcgatgaacaggcgcgacgtggcctcttcttcctctatccgtggcatgctggaggaaatggccaacgtcaaagacagctctagggccgtctacgtgttcatcgtcgaggtcgataaactcgcccatggttggtacttggaacagtatccacacatcca

SEQ ID NO: 36842 - DNA, 362 bp, Zea Mays
ccatctgctctggccttcgtttggtagtgcagctcgtgcacccgacagaaagcttcggcattgggactcataccctggcttcggagggtccatatgtagacactaagtctaacgattgcattgggtgtcatctaatgaaagtatatctcaaaattttgcaaaacttctgcaatcatctcatgcagagggaaaaaagtccttccatgaagaagcttttaaaaactacgagttcatcgtattttggatttggaatcacctcttcctcagcaaattggacaagtttgctctcggcctccccaaagtagcccaatttcttcatcataaccatgtcgtctgtcgtcatagtagatttaccaaattca

SEQ ID NO: 36843 - DNA, 324 bp, Zea Mays
tgaagctcgatggttagcaacacgtcgctatcctctctgctctctactgccgttgcctgaaggtgttgctattgccatgtgtcgcgccatgtgggtcatctccctctccctttgcgccaagtgcgatctctccttccgtggtgtgtgcagctgctacacgacatatgacacacagtcgacaccgttcgtgccacccctcttcgtccgcgtcacctctctccctttgcatcgcccctctccctccatgcctctgtttgctagcaatcggctgctatcacccaacaatcgactcctctcatcccctctgcctctattttgttaagc

SEQ ID NO: 36844 - DNA, 467 bp, Zea Mays
ttcttagtattgctcgttgtttagcggggtagctgatggccttgacctgaagtactaccctcgccgttcgaccaacagtgctggaggtgtgattgtctcgctagtgggtgagggcaatcctaggctgagcagcatggtcaacttggtcgccgtgctcaaaatagagttggaccacgcccttgacgagttgggcaaggttcgggcggaggttgcggaattgcgtgttgaatgcgcggcacgccactatcttgatggtggttctcccgcccctgttgggattcagcacccttaccgttcaccgccccgtggtcgcttcgactatggtaccccaggctgcaagacccgcatagatttagatccatagatcgacagagtcggagtctgtaataatgcttaattcggtgtcctagtctagtcagtcttagttagagttagtttggttatcttttgttgggtgcatgcatgat

SEQ ID NO: 36845 - DNA, 354 bp, Zea Mays
attttataacttttatcgatgattctactacattttgttatgtgtatgttttaaaatcaaaagatgaaggtttgcattactttgagacctacaaagtagaagctgaaaatcaacttgagagaaaacttaaatggttaaggtctgatcgtggtggagaatatttttcgagtgatttttttgacttttgtgtggaacatggtattattcatgagaggacaccgccatactcaccacaatacaatgtggttgttgaaaaaagaaccgtactctaactgatttggttaatgccatgtttgagacttcgggactatctaaggaatggtgggggtgaggcgatcttgactacgtttcatg

SEQ ID NO: 36846 - DNA, 497 bp, Zea Mays
aggagtttgagggcctactatcaggacgggtggtgcttggcagtagggcgacgcagccaagtcggtgtaggagaaggcggcgatgttggggctatggtggacagggaggagtaggttgggtgtgtactctgctctagctgctcccagcagcggtgaattccgtggcagacgtcggtccacctccgttggtggtgcgcaagccaattgtcgctcgatgcggagaggaatgtgagctgctgctggaaataggaggagaatgaaaacactgtggccactgctagacacatggtttttacggatgcagagggttaactgctggagttggtcttataggccaacgcacaaggctaagtaatgcaaatgcaaccaacgcctgctcacgaccacacctcacaagtatgctagttgaaagcttcgtataagttgactaggtatgaactagtgcgttgcgatgagagtaaaaaatttgtatgaaacatagatacggaatgacaaac

SEQ ID NO: 36847 - DNA, 922 bp, Zea Mays
aaagaagctacaaggtggcaacacatttattgttactattcctttctttgctaacttgttgacttctattgtttctatcttgtgttggatctttttgctcacttcattgcttctttaggtagtcaaactatcagaattggatgtgcacacttgttccagtacaagcaagaagaagggacgagaggcttccactacttggatatctcaaaaagttaaggattgtaaaagaggatcctactttgggcgcaaagaagttacaaaaaagattggagagacactacaacattcaattgttactttaaagtttggtctagaaggaagtctacgatggaagatattcatgggatttgggaggagagcttcgaaatgctatggagattcaaagcagcactagaaaattcatgcctaggaagcattgttgagattgattgcgagaagattgatgggcaaatgcatttctttaggatgtttgtggcaattagagcatgcgttgatggatttctaactaggtgcaggccttatcttggggttgattctactcgcttaactgggaaatataaagggtagttagccacacaactacaattgatgggcacaattggatgtatccagttgcatatgggatatttggcaaggagaaaaattccaattgggcatggtttatggcacaactaaaaagagcaattaggaattcccctggattagcaatacacactgacgcttgtaaaggattagcctatgctgtgaacaaggttttcaaaggtgatgtggaacaccgtgagtgttttaggcacataatggctaattttaggaaaaaattcaagggttttgtgctgaagtatatgtggccttgttcatgggcatgtacagatcataggtatgatacactaatggagaaaattgtagcatctagtcctaaagc

SEQ ID NO: 36848 - DNA, 370 bp, Zea Mays
tgagcttgcaggtggggccaaaacttgtatcctgcatcgacgtggtatgactggtgaagtacgcgtcgttagttcgccctcggtcatgccaactgccacatctgtccccgtggctgactgacccacgtccccacgtctggcagttccatcgggtcatgcgcggggtgccttgttaccgctgcctcggttaggaaaaatatcttcctgtagttgccccgaagcggcgtgcaatcgtgcggcggatcgttcctcgcgcggcggtccatcttctctgcactcagaaaccagtactccaggtgtatgacatgcggacccaggcccgcgtgttggggactaggtcgcagcgggcgctaggcgcgcgtcggacggg

SEQ ID NO: 36849 - DNA, 326 bp, Zea Mays
attataagtcgagtctatacgcgttaggcgttccttaaattgtgcttcgcaaataagtgtattttgtgtagtgtggattgattgtgagtgcatgtgtcgcaagaaaagaattagtgcgcatataggcgatgaatgggtgtgatgaaatggtgacatgccttcgtagtcatcatgtcgtctgttggtgtcttaactgaaggtcatagagaaaggtcgattacctgtgtgttattattgtcaccttgcggttctacatgaattgcaatgtgaagtagtaggctctctatgtgatgctacatgtctaggtagactttcgtgaattgtgg

SEQ ID NO: 36850 - DNA, 1038 bp, Zea Mays
aggcacaacaaaaacatcttctaattcctttaaaatctcccgtagaactgcatcatttttcccaactatttcttttgtaacctactccagaagcacaaatacctagacttcctctcccttcatccatttctccagttgcaacacagatacttgtcgcacttcctacacctctctagcatcaccctgtaaccttaccatctttcattgatcagtaaaggttaacaccttgttattccagtcacactccataggactctgagccttcaaccaatcataccctaggatcacatcatatgcttccaaatccaacaacctcatagcagtgttgtacaggtgccccccagaactccacactatctccttaactcttttatcactgatcatagctgtttcatttgccacattaacccgcacagtggagcaatcttcagtgaccaaccccaattttgctacaattctctggatgataaaggttgcagaactaccagaatcaatgagcatgaccaacatctgattctgaatcagagcttggaccctcatacatccgtcacattatgtgccaaactcctccacacacttctcctcattctccaacttctgcaatacttcatcagtcaaaactagacccatgtcttccacgatcagattatgtagttgagttaccaccctcttcggacattttgcttgatggcctggctcaaatttatctccacaaataaaacacaacccattcgctcttctatattccctcaactacctgaactcaggatacaatattccttccctattctctccccttactcctgcaacctgagttttgagaaccagtcccttttgatttctaactctattcttctctacaatctcctgatacaccttggccaacctcttcgccttatccattgtcttaggcatctgagccatgacttggttctgaatttcaggttacaaccccttaatatagtgtgtcacaaatagggtctcatccaactcagaattgtgcaaagtagcggcatatctgatatcatcaaaagcttg

SEQ ID NO: 36851 - DNA, 400 bp, Zea Mays
atatcaggttcgacatttccctcttctagtctagtctgaaaatttgtgctgcatactcagtgcatgttcttccaagtaaacgccatacactggcgttgagctgtatttccacttgttgagaacccacatgctgtacagaagatctatggacttataccatttaaacctagggatcacagataaatcacagtaggaataacgaaacacgtcgcatttgcaaggctgtgattgtgaggttgggtgcattaacaccatgaataagtggaatcttcagctgatgctgatgaggtagttctcgtcatggaagggacatgactcttctgttattaccgaaggaatggctggagccttttcttttgttctgtgcaagtacttcaaatctgagctagttcgatactag

SEQ ID NO: 36852 - DNA, 876 bp, Zea Mays
agcaggaggggcagcaggggtagcactagaactcccagcctcatgatcatgtgagcgtggaggcataggaggtggaggcagaggtggaatcccaaaatcatcatcatcatcaactgctgcatcctgagcttcaaactgatgaagagcagtatcctcggcctgagtgtcaaaaactagagcagaagctggcacaggagcctcaggcgcaggacggtaggacccaaagacaaggcgtgaggcctcaagtgtgccctagaactggggaggccgaatgagctgagcaaaaatatgacatagatagtgaacatacggcagctttcgacgggcacgcagaccatccaaaacggtgtcctcgatctcacaaataaggaaatccacaacgtcaaactcggagtgagagaccagggcaccaaggagccagagctggatatgtgtggtagcctccctgcatcccatccacggcagaagtgtccgtctcataagctaaaataggaactttgctgctatagtgaaatctgtcagtgagcgtcgcgacccatctaagaagggcggtcggaacagagccgcgacgtgagctgtacccggagcaacaccgccgtgagggtgacgaggactcgaggagggtcagaggagccatagcataagctatgaagacgagtcgatgactcgtgaaatccaaagagctggcgaatctggctggcatgcatagtgacatcctctcgctcaaaacgaaacctcatccaatggtgatcagggtctatccatacagtcacatagaaaactcggacccattcctcaacatatctgccgctggtagtcagaagagtcagaaggccaggcagatatgagaggtgcacctcagagtcagcatcggcg

SEQ ID NO: 36853 - DNA, 288 bp, Zea Mays
agtatgcagagcaccacgaggtaaacgaccgacctcccgtcgcccctcctgtcttcctcttccctcgtgtattccctctcggtcatgctgctcggctgtacgcgctgctcggactacggcggcaaggcaacttcttctgctccgtgggagggggcagcaacagggacgacgacgaagcagtcgagctcaccatcgttgacagctacggcgaccttgaccaaagcataggatgcttggagctcatgtaccgtgaggcgacctcgtgggacttgggcggggaggagcgac

SEQ ID NO: 36854 - DNA, 485 bp, Zea Mays
cttgggtcttgtgctctctttctccaacctggtagagagcgtgaggaggttgtgtgtcgaggatgacggtacaatgtttataagaagatgaaggacatctctttgttggaagtctatgggttcgacatggagcacatgcggtcgtggctagagacgttggtgcacataaagagcttttgcaataggctgtagtatgcggttgaagatttggagcagaagaggtgatcgagtaggaggcacacacatatcaatgtgttaaatatgacggtccgtcatctggaactacaagcgtacctccgccgtccgttgtatccacagacttcgccaccggggcaggcaatgacaacgacgagagctagtgggtgcgaaatgggagagggagtggtttcggtgttgcacggaacgactccgaagatgatcatgctcgtctgtccccacatgcattgactccggaggcgactgtaacagcaggttgtcgatgggga

SEQ ID NO: 36855 - DNA, 743 bp, Zea Mays
cactccgcgcaaaagtcacctaagggtgcagccggaatagcacaacaagtgcgttaatcgaagtcttttatttaaaagacactctgcgtaaaagtcgcctaagggtgcagccggaatagcacatcaagtgcgttaatcgaagtcttttatttaaaagacactcagtgcaaaagtcgcctaagggtgcagccggaatagcacaccaagcgcgttaatcgaagtctctcatcaaaaagacactccacgcaaattcgcccatgggcgcagccggaccaacacaggtgtacgaatacggcaaacagaccacattaccatacaaattacaattacatacacacggcgagggcatcacatattacatcggctcaacctttgggaagatacccatctccctgtaattaaacaacattatcctcaattcctcaccctcaaaaagcttccgaagatcccctcgcctatgctcgccccaatcggtgaggacaacaattctcgtttaccaacccggtctacttggagacggcaacgctccatccccatatgacgacgcctgccacttcgcgaaaattcacccacactatgttttcccatcacctttcgccgcctacacccagtactcgcactagggagatcctcgacaccctccacacgcggcgaagtctccgccgcagccacatccaacgcaacaaaataatccaagccttcatccgaggactcctctgtccaaggaaacgaactcccagatt

SEQ ID NO: 36856 - DNA, 316 bp, Zea Mays
caactctcagatcaaccaaaggtctggtgggaattcgcatactcgtcaaggtggcatcgtgaacacacagaccaaaagcaacaacgcgccagtccaacccaatggctgtttcaagtgcggtgagcttggccattatgctaacaactacccaaggcacaaccaacagacaccccagaagaacagcagacagaggactaaccagaacacccccgctcgtggatctgcgcagaacaaaacgccgcagaaccataatagaggaagggttaatcacgtcacagcggaatcagtgcctgaggatgttgatgtggtgtatgat

SEQ ID NO: 36857 - DNA, 556 bp, Zea Mays
gtcggaactaaatctttgccttgtggaagattaacacctctgttagcggtcaagtcatgtcaactgactcttcatcacacaactctacctcaggtttcggtccgacacttccacttcaagttgtttgcctccttatactagtattagtatgcacaagaactctccaaatagcatgaacctgtcgtaagcaatgacacccgttctcccacctagaacaacgactcttcctacttctcttggccatctgatgctcccatcacccctataagtctcctcttccttctccaccctcgctttatttagtcgaggaggattgggacttccactaagacattgaccccttctcgatcgattatgcctcaacgatcgtcgatgagtccgatgcatattcgttgtttgttgcgtgagttgcttgcctcctacatgcccctttgtactctcctcctcggaagatgattgggactgtgatgaggcatacatcgactccactgaggaggaagtctcctctgaggagatcggaggagttggtagagatgtggctgcgtaacagcagctc

SEQ ID NO: 36858 - DNA, 811 bp, Zea Mays
tgtgggtggataatatagatatggatctaggggttatttagtgttttaagtaccaacagaggagggcaattcatgcacatactttagctttttattttggatataatatgtcagaatgacagaggtcaatctctagatataggttcaggaggggttaattgaagccatttttgtaatgaatatgatgggtatttttttaaccaaacaaaatggatttgatggctatggtcttctatgaggattactggattagagtgtacaactgcattgattgctaccaaaatagtatctaatctaattagtaaaatgacgtatctctttttctgacacgcttgtgacactgaggctgactcaaatatctcattaaacaacatgtgcatgtctacatttatgtgtaatgctcatgtcggctgcacataggcgtttcttagcttgatctgatggtgatcaattgaaaattgttgctgtagattttcctggagatcgaattgtccttttgtgatcctaggtttggatacagtgctgcgattttctgctctcccaccgtaagaacacaagatgtggatagagaattgttgatagtcttggtgttgcttggacttacttttagtgtccctatagtgaattactttcctgtcttcatagtcaattcaaagctccttacagacacctcatgtttcacagtgtaccacatttgcatgtacataatgcgctcgaccacaataatgttgtcgttaagagtcgaacgatggtttgtgttcacaactgaaaccattggattttgtttttgacatcctcaaggaggaattaa

SEQ ID NO: 36859 - DNA, 382 bp, Zea Mays
taaccatacacgtttcaagaacaattgggccacgaaacaaagctatgggggatcacagattatttcctccaatgacaccaccccgagcacaacgtttgccacgacatcaaagttgcttgttaggagatccaagtctgctgacgttgtcccggcaggcaggccgacaacatcatgagaagtcatcaccatgacctagtgaatcctgaattccatagcctcagaaatacacttcagaacatcaaagaggcgcaacctctgattcctccctcgcgcatgaacaaatcttgtagctcgatctacacatagaaaacccagcgctttaggcctaggacctgcgataaacccatatgtgataaggagtctaaagaaagactgtgagccc

SEQ ID NO: 36860 - DNA, 441 bp, Zea Mays
ccggtgattgggtgcggtctagctcaattgatcaggtcgacaagcatgccaagcgtgcctaagtgctaaaacaagggtgaggagggcgagaacggacctggagactgcggtccacgacgcggtggctcatggcagcgtagagaaccgaattgggggaagaaaggaattgaggcgctacggtggttaatcggaggcgagggctggtgctctggcttcgtaacaacctagcgaagctcactgtggcatcaatttatagagtgcgatcaggaatacgacgaatttaggcggggaaggacaggcagtgagaaaggggaggagtcaccggatctatctatcgtggcattcaccggggcactatcataggcgatggatatactacctacggcggtctactgcgacgtggtaacaccactgactacgtggcacatgggcggcaagcgg

SEQ ID NO: 36861 - DNA, 457 bp, Zea Mays
ccagccgaacgtggacaagaccttcgcagtcagactccggtcgggacagccgcagtcagcaacaggtgcataacatcgccaatcagcaccccaccggcgaggcccctcgccgtcaagattatccccccagggttgcggcaatggcacacgtggtcggggatagggtcgggcgcagcagccatgcagatattactgcctgtttcatggcgaagactgcgcgcacccaaccaaggatcgcccagaaactaaggccaccagggacaggatggctcgagcacaacccaccgacaacccaagagttgtcgcgcacacatatcaacaccaccacccacaatcatacaatcacggccccacccaacatctacccaaccacgcataccaacaccaccaggaggtacaattcctaccacccccgcccccacctccgcatcaaccaaacatccaccaccaaaatcac

SEQ ID NO: 36862 - DNA, 363 bp, Zea Mays
gtccttttatagccttaagggaccaaggagctatttgaacttcatttggaagttcatggttgccttctgtctgcaggtgcaccggactgtccggtgcacacctattagcgttgtggtagaggggatcaaacagagtagggcagatcgaagcaggagagagcgagaggtagaggaagatgtgcgatgggaagaaggaatctattagcttgttctgattttcggtgtcctctcccatgctacagcgctagatttaaccctttggtttacaatacgacccatcaggccttactcggcccactctggcccaagtactctcacgttacggcgcctcacgcattgtggaagcacacccgcgctctccgc

SEQ ID NO: 36863 - DNA, 496 bp, Zea Mays
gagctctggactgggcgacaatatctgaagaactcaggggctctggcgcaagattactgagactcagagggctgcaacattggatggcgggttattttctaaattctataggggtctttctgcaaagtggtatggcgaagaggtaccggccgattacgaccgtccgattagaaacgaacggcgtcgattagatctggcgcatgccaaacctgcgagtaaatcaaaccgtctgatcggagatctgcggcgtggatttaatgtgatgctaatgccccagagaacgtccgatcacggatcaacgggccctattctaccgagcgaaggggtatgctaactcctaatctgcaccggttgctccaaaatcaacggcgcgcaataattctgcgtccagccccgatcctagccgttgcttgatagatcaacggattacgatctatcccctacctccgagcacccgagacggcggcgccgcaccacgcttcactcccagccgagc

SEQ ID NO: 36864 - DNA, 421 bp, Zea Mays
ccaaggctttactagcttctgggagaggcgccaccaccaatgttccagcaggagcggcttcagaagaatcctcggctaacatatcaagcatggcacttatctctgcatcactgggatccaaaggcacctcaaagtgaacctggcgttcatcatcaggaatttcttcaagcgaagcaaccaaagcactaacttcttcggcagagggtcgcactctaaggcccaaaccgccatcaccagcaggaggatttgacacaaaatgagtaaaggccttggaaggaggcaggttctaggccgagtatgcaacaggggcaccaacatttgatgccttgcctctgagtatcatttcgagccggctcaccaagtccacagcaggaattcttctgttggtgacccgggtggagtcagctaggcctcggtacag

SEQ ID NO: 36865 - DNA, 287 bp, Zea Mays
ttgggattgagattgctagatcgtctaaaggaatcattctctctcaaaggaagtatgttcttgatctattgacagagacaggaatgcttgggtgttgtccatgtggctcacccattgataaaaatttccaaacttgtgccgagtcaggtgaccttgtgaatcaagaaagatatcagaggatagtggttcggttgatatacctttgtcatacgagaccggacattgcttatgcagtgagtgtggtgagtaggtatatgcatgatcctagaacaagacatatggaggtg

SEQ ID NO: 36866 - DNA, 354 bp, Zea Mays
tcataacaagcatccaacataagataagcaaactaactctaactagactgactggactaagacactgaactaagcattattatagactccaactctgttgatatagggatccaaatctatccgggtcctgcagtctggggtaccatagtcgaagcgaccacggggcggtgaacggtaagggtgctgaatcccgacaggggcgggagaaccaccatcaaaatagtggtgtgccgcgcattcagcacacaattccgaaacctccgcccgaaccttgcccaactcgtcaagggcgtggtccaactctgtgttgagcacgacggccaggttgaccatgctgctcagcctgggattgcc

SEQ ID NO: 36867 - DNA, 1775 bp, Zea Mays
agccactggctgtggaacatccgtaagtggaaagctagacatagtattaagtatggccactgaccaaatatcattgcccttgctccatttcagaaattgttcagcaggcaactcttgaagatgaagctggggttgagaaacacccttaagagtaaccactacccccatatcctggaaggttagagacttagcattccaatcacaaagcatgggactatgagatttcaaccaatcaaaacccaaaatagcatcataagcactgaggtccaaaactctcatatcatgcgtgaatgtgtgacctgctgtccaccactgcatatgtttcaccacagcatcagaaattagtgtatctccattagcaaccttgactgtcagcggagataaagcagtaataggtaaatgaaggcggttcacaaacgaagaattgacaaaactgtgggagctacccgagtcaatcagaataaggaatacttgattgcccaccaatgcacgaacgcgcatggaatcagcagattcagtaccggctagagcgtgtaaagacaactggcaaagatcttggactaagacatcttccatctccaactgattgagagtttcttcagtcagggtctgatccaagtcattcaccgccagtgcatgcacctgagccttaggccgcttcagacaatgatctgcatgagtagcatcatatttctccccacagaaataacaaagtccattagcccggcgataatccctcaactgtctttccctccacaagccagaggatgaggcagtagacgatttgtcagatttaggagtggaagaatgatatctgggtgtaaaaggtctagctgaatgcactgaggacctctgtaaagactgctgctggagtttggccaagaaactagcccgagcaacagttgcgggagcttgggaatgaaccacccttttaatatcctccttgagacctttcacataatgagaagtaaagaacagatcatccaaatgtgggttatgcatggccacctgatactgtaaagaggcaaaactttgagtataatcctcaacagtaccctcctgtcgaaactcaagtaactcatccaaagctgtgtgatagtcataggtaccaaactgatcaagtactgcactcttaagtctaggccaggctacaaacccatgctgtaatttgaaaacctggtaccacttggcagcatttccctccagatgtaaagagacagatgaagttttcagatcatcactcacattatatatgcgaaagtattcctcacacttgtcaatccagatcttaggatgtagaccatcgaaacgtggaaacgacattttgggaatggaggattgctgttggtatacctgatcatcatggtggtgacgaccctcagggcgcagccggtgatgaggatgacgcggacgcccggtaggcgcagaagcgaaccagttctcttcctctgcatcggatctgttggagactggagaagaaactgcatccatcttcatttgccacatggtgaggcgcgccacagcgtcacccgtagccttgagttgctgggacaagagaatttgatcctgggtactctggttcatcgccttcgctgtgagatcaatctgagccgccatctgctgttgcgaggtgtccatggaacggatctgcgcaaacagcagatcgagactctcctgcatcttgttcaaccggacgtcctccttgtgtgtcgcgtccgccatagcgtcgaggagcagctgggtctgcttcgacggcttaacgggaggcggcgccg

SEQ ID NO: 36868 - DNA, 430 bp, Zea Mays
atatctgtatggtctcacagtgaacagttgatcactagcaatttaaggaatggaatgatcacaatgtcgactcggtggcaaatccatgggatcaacaacacacttcagcattttgatcaagtatagtttgaatatgaggatataacccattcaccagagtactctcaactgacacgggatgtgattcatcataaaccagtaatacttcaatcattgtccccattaagaaagagggtaggataccctataaacatgcaatagagcccctataaggaatgtcgatccacttatttgcccaatccactttcataggactataatgttataactagtccatactgaccaccaagtcaaaagatgataaagacatgaagttaagatcagctgagaaaactgaaaatgaggtaactgaaaatgacaggtgagctta

SEQ ID NO: 36869 - DNA, 757 bp, Zea Mays
ctctagcttcgtgagaagagggagcttcatcaaaaatactcaacttcgttaaaacgcaagaaattcaacatcaaatggccagagtgcgctcaacagctagggttacacacgacggagaggacaccgaagctactgaaactgctccgatctccaaagttatgaggcggtcgggactagttttaacggagggcgctcctgatgaaggcgcccatgctactgaagtggagcaggcagacattgaagaaggtgatattggtgaagaagagattgattataacaccgctatgccatcgaagcctagccatttggattttggaaagtcgactgtgtctgaagctgatatggctatgatgacgaagctaggctacttcagggaagccgacaaggggttgattcgctttgatggggaagaaactatcccgaaaccagaaaatgatgaagtggtggtctttaagagcttcttcaaagcagggctgagattttctctgcacaggatgattggagatgtcttggaaaattttgagatttaccttcatcagctgacccctaacgccattgttaggctcagcgtgtatatttgggctctccgaagtcaaggggtggagccactcgccgaagccttctgccgagtacacgaacttcattatcagacgaaggctagggaagacggactgcatgagaacttcggctgctacaattttgcttatcgcaaagacatgaagacaccagtggtcagctatcgctctaaatggccgac

SEQ ID NO: 36870 - DNA, 453 bp, Zea Mays
tcatcggccatctctgatgatgaacccaccgtgctgagggagcaaccctccccagcgtgatgctcgacgacggagaaacagatgccgaaatgtgcgatgacatcacgaagccagagaatgggacccgacacaactcgtctcttgggacgaagcctcagagatgggggagaccccgatgaaagaacacatcgagaacagcgcaactcccaccgccgcgatcgacgtcaggctcaggagcgagagcggtaactagccgaacaagatgctaggctccaatgggagaatccgctcctcgccctaaacttgtaccctaacttagcctgagcattgaacacgccgagcgaagttggaggagtgctggcacagatagccgatggcctcccgcggaccccagacgcggaaggttatcagcgggtgcttactcaggtggccaatcatcttctacctctcgcc

SEQ ID NO: 36871 - DNA, 310 bp, Zea Mays
tgaacaggataatataacgatgatgagtaaacgggtggaaagtaccctggtctcataggatgaataggcgatgcttgttgtgtcgcctttcgggccattttgtttactcgtttcatattagcaagtgaccggggtttcttcgctgaccgatcacgtagaacggtcttcttgctagtatccttggagagcaactcatcaaaagtagggttctgcccttgcatctccttcccttttaaagctttgtgtggaggctgacgtctttggccataggcggacagtccggcagagttagccggaccgtctgtctgag

SEQ ID NO: 36872 - DNA, 300 bp, Zea Mays
ccttgaccgcttctcggatccttgagaggatccttcacccccttcacacccaaatctttttgtctttctctacccgaattcttggcctcgaccaaaagtgttgtgcttacgaccctgctataagtgagatcttgacaagtggccatcttttgctgtagtcgatcatttagacctctcatgaaacaattcttatttttcaggttcgtgtcaacttgctcaatagcatactaggagagatggttgaatttggcaaggtattgcatcaccgagtctcctccttgctttaagcgaacaaactct

SEQ ID NO: 36873 - DNA, 334 bp, Zea Mays
gcgaggggtcctagatcagtcatgtggaactcacgacggagagtaactatgatgagtgtaagggtggcatcagagtttgcagtgagaatgatgtcatcaacatatagtaatatgtatgcaacacgagtaccttgatgaacaatgaagagggacgaatctgctttggatgccacgaagccaattgtgcgcaagaaactttgaaactggagaaactaggtcattggcgcctgtttaagtctgtacagagacttattaagtctgcacacatgatctggatgggaagggtcaatgaacccaactgcctggcaacaatatattgtctcagacaaatccc

SEQ ID NO: 36874 - DNA, 455 bp, Zea Mays
acgatcttcttggacacaccatgtagacatactattcgtgccatgtacaactctgctagcctggctcctgaatacgtggtctttactaggataaagtgggctactttagttagcctgtccacaatcacccatataggcactgattggtttggtgcacagactgaagctggctcacgcaagtctggcccgttaaatacagcaaacctgagcttctccacgcatgcagctaaagggtcttttttaagcctgttctgcacccgcggatgcaatccacgccctccgtattcacgctaccaaacacaagctggtgcttggtcaaatgcgcatagacaacctagctaagcacccgcggacaaccaaacatgccaagatgtgtggggtagacccacaatgaagtctatgccaatctcttcccacttccactcaggtatcttaagcgggtgcagcaaaccagt

SEQ ID NO: 36875 - DNA, 587 bp, Zea Mays
ggcgggcctgctccttcctctaccagtgccacagggtgtctggacggacatcgcgatggattttgtggaggccctccctcgcgtccgcggcaagtcggtaatccttaccgtggtggatcggttcagcaagtactgccacttcattcccctggcacacccgtactccgctgaatccgtcgcccaggctttcttcaccgacatcgttcgtctacatggtgtccctcagtccatcgtctctgatcgggacacggtcttcacctccgcattttggcgcgaactcatgcgcctgatgggtacaaagctacacatgacgacggcgttccaccctcagtctgacggccagtccgagtcggccaaccgcgtcatcgtcatgtacctacggtgtttgacgggggatcgaccacgccaatgggtcaggtggctaccttgggctgagtacctcttcaacacaccgttccagtcctccctgcgcgacactccgttccgcgtggtgtacgggcgcgacccaccctcgatcagatcctatgagccgggcgacaccagggtgcaagcagtcgcaaagtccatggaggagagggcggagttcc

SEQ ID NO: 36876 - DNA, 403 bp, Zea Mays
attccggaactgtgtactgaactctgcccaagtgatagtatcagcaacatcatgggcagcagtatatgaatcccaccagtcagcagcaggacccgtcagacgtctagaagcatataaaaccttctctcggtctgtgcattgtgcaatattcagcatcttctcaacggacttcagccaatcatccgcgtccagtggatcaggagagcttgcaaatgtaggtggcttatgactcatgaactctctatgcttatctcggggtggaactggtggtggtggaggtggaggcagtggtactggtacttgttgctgttgctgctgctgctgctgttgttgttgttgcatttgctgttgcagctgctgttgttgcgccctcctttcctggcgtatctcctctcgctcctgg

SEQ ID NO: 36877 - DNA, 384 bp, Zea Mays
acctacctgaaccagaaagtctactacacgtcgctgattatcatggatggatccctgaccacgacgaaccgcggccaaccgatgctagaggggctccggtgagcaattcccgacccgccgatgagcaatttccctcccctgtgggacaccacacttcgaggattagccaacgaaaatgacgaaagcggtcatacctgcggcggtgctgtgattgtgccgacccaaagcgcgtggcggaaccgaggcgatgtcgagctccggtgagcgatttcaaccacgccttgctcacagccacgactctgactcgtgcacacaacacgagaggctccactgctccaccagcccggtcttcgaccacgagcgcaaccccaccgaccctctctc

SEQ ID NO: 36878 - DNA, 360 bp, Zea Mays
gcagagatgagggaagaggaagagtagagaggaaggagtggagatgagacgtgactgtggtgggagcagaggcggaccccgcatcatggcctctgccatcactcaagacggcgagacggccgtgtccatgcctcactgcctcacacagtggcctggcacgaatcgatgcagccaacagggtgcttgtacgcatgaagtgcggtggtgaggactaaggagaaatcagatgtggtttagaatagattcacgtccgctaccgcagccgtccacgcgtcgatctgttgatgggcaaaacctccatgaagtgcggacaggcctccaaacctgagcggcttttaagactttagattataatactaa

SEQ ID NO: 36879 - DNA, 487 bp, Zea Mays
cctgaggggtctatacgtcatgagtgggaagcggaccggagcgcatgttgtggctcggtgccatgcgtggttaatgcgacaactcttttatggcgagtcagtccggggctgggcgctggatccactcgagtggttcccttccgacacacctagcttcccttgtctagttctaccacgcccaaccctaggctcggtatcgcagggttcgaccgggggtgggtccttccagggttgacgcacctgcctctcccgtctgactaacgggccccaacaattagggacgcctttcctcggtgcactctctaaatgacaggtagcagggatcgggggtcattccaccgaaaagaagatgcccaggaggatcgacgaacaagaggaggacgcaccgacgaggacttggaggtcggagccctaccgccaagccacaaattagctaggactccactctgtaacacttagctccacctccaccatgatacagtgcctc

SEQ ID NO: 36880 - DNA, 700 bp, Zea Mays
gaattttctatgatttaaatgagttctagtattattcatacactagaaattcatttttctaattcatttatcaatttcccatgggtcctggattgcacgcacaaatagcgggtagtacaggggccacggtgtaaatcttcccaagacacataaccctctcgcgatggaccgcgggttggtttctatataaagcaggggctcatatgcaaatgtacgggatcgaaggggtaccagtgaaccctggccgtcggatcagaactaagggcacagattagatccagcgcccgccaatcccacgagttaattcaggtcgtccgatccaagatccatggcacaagagacgaccgcgcgtctgacttaatcctatccacccgatcagctctgaacgccccatattaaatgaactaaaacagtattcgctgctctgatcctgcccgctggtgcttgatccaacgaaccggagcctttcttctcccccagtgctgaccaaggcagcgcagcccaccgcgcggcggcgagactgccggattgtgcatcccaccaacccgagcaccattctccgattagctaagccctcacccaatcgatggctccttgaacctaattccccaaccagttgcatccgccatcaagcacaggcccctgcccatggcggagctccgatttgcagtcgtgccgacgccgttagcccaaattcgcc

SEQ ID NO: 36881 - DNA, 271 bp, Zea Mays
gcagcatattatataattgtgtacatgttactggatgtacgtattctagctttcttaaataattaaaacatcttaaatttcatcgaatctcaactacttattcccattccttttctgcatttcccgtctccctccacgcaaagcctacaccaattctcgttctcattcccctagctcaacccacactcattctcatctcccggtgcaaggggattcgaacccacgacctctcagaccaatataagtaatagctaccgttaaaccacatgtg

SEQ ID NO: 36882 - DNA, 368 bp, Zea Mays
ttcggctaactagagcaatggcatagcccgctaaataacatacacgtcggcttgcctattattatcactatctaagacacaacatacaccacatcatttttataaacatacctattcacatgtatattcacacatcgaccaaatcatacgaaccgtaaaccactaatctctaactcgaaaccatcatgcgcttacttcccaattcatgaacacataacgcgtattgacccgactcaagatatagaggaagcgatgactactttggcatgtcatcacctctctatataagccaaaacaatttctactatcgactaagagttctaagtattaaacacattatttctttcctcgcgcaaataaacttcaac

SEQ ID NO: 36883 - DNA, 400 bp, Zea Mays
ggaccacgcccagctcagtacactccataggggtctccacggacacctcccactcgtcaggctgctcccactggcacgccggcgaggcctacaggacagaagactggccccacatccttcaagtgcagtcatgttaggcactatgttattgcttgtctggcggggaattctggtacactagcttagaacaagcaacagactcctgacaagggatattctattactagggttaatcaagtcaccgctgatgctactcctgatggtgctgacatcacacttggtatgtttaacgttaatgcaattcctgcaacaatattatttgattctggtgctacacattcatttatgtctgctcgatatgccaatacaaatgaaataccactgcaacatatgagaaaac

SEQ ID NO: 36884 - DNA, 1174 bp, Zea Mays
cccgccaaattcgtcgtgcttctctggccgggatccgcgacactgcatccctgctcgcccataaactcgcggcccgtggtcacagcaacaacatctccgtgctcgcgcggattctgcggatggttggacctcgcccaccgcatccggctaggagaataaaagccaggacctcaccacctctccttccatcccgagccaatctgtctgggctaaaaggcacgcggagtgctttctcctttctcccctttactctcgtgaaccgcctctgtcgagttgccgtgccatttgactcgcggcggatgcaccattgccgccgatccctcataacggtagtacctcatgaagctacctttgagccatacagttggtcttgggcgcttcggttcagctggttgctggtgtgcctagactcgtagtgcaggattgacggcctgaggcgcgtcgattcgtcgccggtgtcagtgctccggcatggctgcgcaccctgccgcggccgtggactcgcacgagcatcgtcgtcttggcctaggtgtggggctgcagtggtttgccaagtcatggtgaagctacgactgccactagtccgatgtaggaggtcgcgaagccgtgataattcctcatcggagttattccgccgccgcggagccttgctgtgtcgtgggcagggatcatcgcgacataatcacaggtaatgtcaccatcgtggcactcgcctttccttccgcatcgtgtagcacctcgctgaagtccgatttgtgcacctgggccctgcgccggagaaacgccgatgaacctccgccgcggttcggggcggtgcggccgtggttggctgggtgaaggagagaaggcattgtggccgttagatctcattcaacgtccacgattagatctggggatagtgggatttgcgccgttagttctccgatggacgatccagattacttgcaaccatacccattcgcgcatagaatatcagtcgtagatctcacatcctacgcttgtcatcacgtaccatttcgcgtatgccttaatcctggcactctgttgccgagtggacggctcggattgcacagtaccctttcaattgtaacctttgctaaaagagaccctgatctttttcgaaatcaacccgcagtccgcggggtatgccacctgtgtctcagttccttttgcg

SEQ ID NO: 36885 - DNA, 466 bp, Zea Mays
ctgtatatgtagatttatatttgctgcatgcatatatgtgcatcagatacacaccccgaatatatgttgccaaggcgtaatccaaatcatgcatccaacccaacccgctcgattaaggtagtagtccctctatcattttgagcatgtagtctgatgacacgtgttttgtggggaaattaataaaaactaatttgacgttgtaaacaacatgttttgcggagaaattaatgaaaacgaacttgatgttggagaaagtaatgcacttttgtgaacacaaagtggatatatacccatatatgagtgatgaatgattgtccagaggtgatcaaagttttgattgagtgtgtgtgacagtaaccatggtgtgagtgacacagactgcacacaaatatcttttgacttatggtatgcaggtattcaatcttgagacgatcaacgacaatggaaaagctcaaccgaaaaatcc

SEQ ID NO: 36886 - DNA, 506 bp, Zea Mays
gcagcagtggaggtgaaggtggctaatggagaaaagatgaggagtgacaagaaggtggttgatctggagtggtggtctgggggtcatacctatactactactctgagggtattggagttggatgtgtatgacctgattttgggttttgattggctgaaaaagcatagtcctatgcaatgtgattggctgcagaatgtgctcacatttgtggacaagggagtgactgttcagctaagaggaaatgcgggtcagcagaaggaggttccacaaatttccattctacaagtgaataaatggttgaaaggcaatgaggtttgggctttggttatgctggagcaagtggtggataagaaagaagcattagtccctgagcatttacaaaggttgctggtggagtttgaggatatttttgctgtccctactggtttgcctccttccagagattatgatcatcatatttctttggtaccaggacatatacatgtgaactcaaggccctataggtg

SEQ ID NO: 36887 - DNA, 503 bp, Zea Mays
agaaaaggtcatcaaagtggttatcaagggtgtggatatatccggccatgtagattatggcagggtcatcttcattatgctctctccctgacagggcctggagtcttctcctccacgtagggttatttttgttgctgggtggaaagtagcggaggggtgtctcggagacttctttgttgtagttttggcatagttggcggagggatttttgggtagcattttggcaggtgtctgggaagcggtggccagtagcggtgatctaaaaaggagggtgattttgttagcttcgactttctcctaggttgactgccatagagcacttctcgactccattctcacggtattccttccagacatactctggcttcttgttgatccccatgcgaagcgcacaactccgaagaaaggtgaggaaatccttccacctctgagcaataggatgtcttaaggacaaaggtgccctccatctggtagcaagagaagaagggtcattaatattgggc

SEQ ID NO: 36888 - DNA, 354 bp, Zea Mays
atggcttgtaagataaggttgtgtgtcttcgcatattcggctatgcttgtgaaggcgttacgtacttggtctggtgtatttgttatgttggactggtgcgcatgtagtcggtctttgcgcggacagtttgttgtagtcgttttcgcacttgttaagcttcgtccggctgcacccttaggcaactgttgcgcggacatttttcgcacttgttgtgctagcccggctgcacccttaggcgacttctgcgagagacttcgatttttcacacttggtgtgctagtccggctgcacccttaggcgacttctgcacagatagtcttcgcggaagacttcgatttttcgcacttgttgtgc

SEQ ID NO: 36889 - DNA, 703 bp, Zea Mays
ccgctacaaggattgatcaagcattcaaggttccagctcaagagtccagagaagtgtgtacacgagcacaaaaaaatattccaggtttgtggccacatgctcgcctaatcgcctacaggctacaggtatctctcaattcctctccttcaccattcgattagttgtcatatttattgatccctcataggctcgtactagaaaatccatgctattgtgtttatttattaatccatgtattccatctaatttagcggttgtggccgctacagatccttgcctagctccagccactgtccattgctgtcagcaccatgacttcctcctcactgcctcaaagttcaggcgacgacgtcgacacaagaaggtgagaactgagaacataattcccactccatatttactttggaatttggatctacctgtataatcttatatgattgtggatggcttaattgttgagtgactaacgctaacccaccggtgatcctcacaaagggacacctcgaacaagaactggctaccacatgctaccagtgatgcagcagccacaacccctattgtgtcatctgctactcccaaaatagctgctggaactgctgtcatgccatgcgctagtgtcggtaattcctcaatgtctgatgccatggctccccgtcatccaccacaaccacgtgtgaaaaagaccatcgccaagaaaagaagt

SEQ ID NO: 36890 - DNA, 426 bp, Zea Mays
ggaagggctcgggatcgacacgcctatacgccatcgagacgggaagcgaagatcgccaaccagcggccggagagggagcagtttggggttttggtgaagtgacacccaaagaaagtgtcgggtactggagaggtgatgattcggatttttttaatacctcctgggcgaactcctcgaagcaactgaaacagggcggtccaccggacagggacaccatgggagagcgaaaccaagtagagtgatccggagaatttcgatttcccaccaaaatggcccggctcccaaaggcaggaaatgaggccaacgggaaaccgaaagaagatttctttgagggacaaaaaagctccaagtgaccgagcgccttacagaaaaacagcggaaggccgacgggcccagcagcccaaaaggcccccgaggccgaacggg

SEQ ID NO: 36891 - DNA, 389 bp, Zea Mays
cgccgattagatctggcgcaaaccaaacctacgagtaagccaaaccgtctgatcgaagatctgcgacccggatcaatctcgcgaaacggtaagatgtggtttaatctagaccgtcgatggccatctaacggctgagcggtcgtcttctacatcgcccatcacccgaccgaacacctagccacggcgttcaccagacacggccaagccattgccggccgcacctaaagctcgagtcccgcctgtaaacttcactctggcaaccgcaaaacgaagagcagtggattgcgagactggtacatgagttctcaccacggttggtagcgcggacagccctggccacaggaacctgtggattcaccaacaccggcaagggatttcgcgatctctgg

SEQ ID NO: 36892 - DNA, 360 bp, Zea Mays
gatgctgctcctactgggacattggtggtggcgcccctcccagaggctggtacgactttggatattcagaagcctgccagtactcgcccgaggcgcccttgccaagccaatcaacctgatccttctgctgatgagcagaaaaagaaaaagagacgcctctggcgagtatccagtttggatcgagacattggtacttcagttcctgttgctgaagaaacgcctgtgactgaatttattgacactaaccccaatgggtgtgcccaatctgctgctgatcccaatttgggtgctccatctgttgctgatcccaatgggggtgctgcctgtgttgctaatgaagacgacggggaggaaaaggat

SEQ ID NO: 36893 - DNA, 292 bp, Zea Mays
cccgagaggctatccccgctctaatctcaaccgcccaaaggggatcaaacggtgaccacccgtattctacccccgtccaccaacccgcggcagcaccggatctccacggcggagcgatctccggcgaatcgcaaaccggcattccactggcccaaaacctaattcctttaagctacacgacgcggaataccaaagcgaattcgaaggcgaggttctcacccacaatgctgatgaaggtggagcagcccgcaatgatgtgcggcacgacgtgttcctcgccgctcgatgagaa

SEQ ID NO: 36894 - DNA, 316 bp, Zea Mays
gacggaagatgggcgttgcaaaagcatagtagcacgaatatctgaacgcaatccatccacaaatcgttgcacaaaatataatggatccattggtttgtcgtacgccaccaaattatccatcagctgcgagaactgatccacatactcggccactgaaatagtctgccaaatacggaataatttgtgaatgaacgcctcatgttcatccttgccaaaacgttccagcagcaagcggcaaaattcgtgccaacccaacacacgcgatgactcttctagagaagataaccagcgcgccgccaccccaacaaaattcatg

SEQ ID NO: 36895 - DNA, 303 bp, Zea Mays
gtagactgaaaaagatcttcaggtgcatcacccctcgccgctggtgacccgcgcgctcggattcgcgccgacgccatgattcgcgcccagtaacgcgctgataatggctcctggtgaaaagatcttcgccggggatgaacttggggcactgtttcgctctatcgcctcatccacttgccggcaacgtggccgagcggccgtcgtcgaggtgtacgtcgttcgccgtgatcgtgccacgccatgaccctttcaccacgtgattgtcagccgtaatagctcaccagtgaccgccgtagcttctta

SEQ ID NO: 36896 - DNA, 488 bp, Zea Mays
gaaatgaatcaatttggagttagaatgaattaaatagatttctaacattatttttatacccaaaaacccattttatatattgattttcttcctttattcgatgtatggactgggggcattaattctttgaactacagggtgcactgtgtaaaaatctagggttatgcgcgttattcccagccacagtatggatggcgggtttatttcagtaaatcccaggggctcttttataaaatgggatcggcgaagaggtatcatgcgtccagggccgttggattgtcttcgcacggtgcagattagatcgcatccatatccaagcggtacgcactagggaccaccggatccgtgattgacggcccaaattcagtcaagtcggattcaatacccaaccgtcgattcacgcatcaacggaggttatcagatccgaccgaatcctttccctggcctaatcccagccgcacgcagacaaatcaacgacccacgctaat

SEQ ID NO: 36897 - DNA, 482 bp, Zea Mays
ctccttttcgtgctccctttgctcccttttctttcagtcgcttcacactccacggactcgagctttggctttgtggcgcctgtgaatctgccaacaaagaaaggactgaagggggagggaggagagggctgatccaagtgctttcacccatctgcttgtttctccatttgttggcctgcaatggcggggagcttcgacctgaggacgccaaccagaggcgtcgagcaggtgagtcaaaatctcctcccccccttacccatttccactccagttcttggaggatttcacgaccatttttagtagcctggagcgggaaggcttgatacttcttctttccttagccattttcgggggattctatatctgcatttttttggggggaaatgaaacgcagagcattgggatgcacctactgattgcttcagctcgttgctttgttcaggctatcgttgctctgaagaaaggcgcacatctcctgaaat

SEQ ID NO: 36898 - DNA, 336 bp, Zea Mays
ccaatatccaagggttcgaaagaggaaacaaaagcagagtgtgcaaagcggaacatctgttgatacctagagcgagtgactcagtcgtgaggctcaccaatcatttgttgggaagggtgatcatactggatatgacgtggagcatctcacacagaggtagcctccccctcaacagtagcctcagctcctccaggactaacactctctagctcgagcagaccccaagtcatggaataagtcatgttgggtccatcgttcgaagtaatggacataggctcaactgggatagccaatgaagtcggctcgggatgaccccaatcagcagcatgatgctcc

SEQ ID NO: 36899 - DNA, 610 bp, Zea Mays
gtggcggagcacccgttatggctaactatggcttgaaccatacctaaaaatcatgtttggtgtaatggtaagttcaactgcttgcaatcaaaaggttccaggttcgagtcctatgtgttgcatcatgtttttctctttttttgtccttcttcagccatacctcattattattttgtcctccgccactgtataggagatctcgtggcttatgacaatagagccaaacgacatctctttgtatctctctaaccatgtacaagggtcggcttgctatacctgacacatatccataccatttacacccgcccatttaggtagtcgaacatatgcaagggacgacctgctatacatgacacgtacccataccatgtatacacacaccatatatggtagtctaacactccccacaatcacaacgtcgatgaggcaaacattgagactggactgaaactccgtgaagacagaagttgacaaccctttggtaaatatgtctgactgagacgtcgttggaatgtgaagtatgtgaatagaccctaaggctaccagttctcgaacgaagtggagatcaatcccaatgtgtttggtgcactgttgctgcacgtgatcggaa

SEQ ID NO: 36900 - DNA, 448 bp, Zea Mays
atattagatgaggagcagaagactagagagctagaacaaaacgcagatatgcaagacgaaggctctcacccaatgcagtagaactctccctacataccagtcacagctccaaccactttccaggggataaattaccttgatgagcgaagctcacttgcaccacaactccaggcttcacctttgcctagcaacttcagagcgggtacttataccaagtacaacggtagcaccgacccagcacagtacatcatgagctaccaggttgcagtcgcatcatccggagggggcgacgccaccttggcaaatctttcattatagcactcgaagacccaaccctgacatggtacacctgaaagttgcctagaggggggggtgaataggcaagttaaaacttttttcaacaaaaactagaagcaaactgggtaaaactgaattgatctcgaaattc

SEQ ID NO: 36901 - DNA, 620 bp, Zea Mays
accccaagatacatagagcttatccattcagccagaggtaaaatagaccaactctcattctgatgatctaactgccacactcccttcataaagttgctttgccatgacataaccaccatgatggctccacatgtcatcttcgattccctccagaaccgcactatcgggttttgatgccaacccaatgaaatcgtcgttgggtggttttgaggcttaaccaccaaacctctataggtagcatactccatacgtgtcgtcacatgtcatgttgatcctcaaccacgttactaacataatccacttgcatttccttgcacatactgatgtccccaagtgttatcactgtagctagtcaccagtcttctctagtccctcaatcaagactcggtgatcatccttcatcgcttccgatcaatcagcacaaccctgcatgaccttcaccgtcgaccatgcctctagactccacacctatgcatcataagccaaaagacatgttgcacgtacacacgccccagttagttcacacgactcaacccaagatgctactccattgcaatcactcgtcataatctcaaaccaaaagggaacatatcaaccttatgtttacaatctcccctttg

SEQ ID NO: 36902 - DNA, 431 bp, Zea Mays
gctggatattaccgcggattcattccggatttctccaagattgttaaacctattacgagattattaaagagtgatacaaaatttgattagtcctcgaaatgcaatgtagactttgagcagctgaaggtgttgttaaccactgccccgatgttggtccaaccggatattgaaaagccttttgatgtgtattgtgacgcgtcaggcagtggactcggatgtgtcttgatgcaagaagggcaagtcatagcatatgtttcaagacaactacgtcggcatgaagagcattacccaactcatgatctggaattggctgtcgtcgttcatgcccttaaaatatggtgtcatcatctgctggggaatgtatgccatgtgtgtacagatcacaaaagtttgaaatatattttcaactagtcaaagctgaatatgggaca

SEQ ID NO: 36903 - DNA, 340 bp, Zea Mays
agacattagtaacaacgtctactaaccactcagaaataatctcgctatatgaagccgcacgagaatgtgcctggctacgacggatgactaactacatccagaagtcatgtggttataacaccgcaaatacccccaccattatctatgaagataatgctgcatgtgttgcacaaatggaaacgggttatattaagagcaatatgactaagcatatctgtcctaagtatttttatcctcatgaactccagaacgagggtgaggtaaaaatcctgcaagtcgagtcttgtgataatctggctgatttattcactaaatccttacctgcagttacattcagaaa

SEQ ID NO: 36904 - DNA, 521 bp, Zea Mays
ctgggctatgaccattatttcagaaaagttcaggggttaaactgtaaattttagggacctacttgtggttttctttcactaagcaaggacagcgggtaattttgttaaaatgtcagggagtcttttgcaaaagaatcagcggaaggggtacctggcattctggccgtcagatctaaacctacgcaccaaattagatctgaacctcatgaatcagtatggaacagggaccacgcgatctaagatcgacgacccaaatctaatacgatgtcgtacccatcctgaccgctggatcccaaaccgatgccctagattcttcactcgaagcggtactcacaagatctaatctgtgccgttgacggagggatcaacggtcttgaacaatatgccatactacaatgcccacattcgatctccgccttccgatctagatcctcggtccgaggatcctccttcccccaacacagaggaggtgtctcaccgaaaatgatcacgacgaggaagccggttgcagtgcagtctgc

SEQ ID NO: 36905 - DNA, 306 bp, Zea Mays
cttggacaagctatcaagaattttatcctttggcctcgaagggatgttgaattggttgattggtcgaattcgtcacaggcccaaccgtctctgccttttcaaattgttgttcctattgtacatccatcatcacctcctcaaacttcacatgctgctcctcatcctctttccgaccctccttttcctcatccacatggtggcccaccatctccgccacatacatcgcccttcagggatccaccttctccacagccatctccacgaccatcaaagaaatctaaagtttctataccaaaattagtgtcc

SEQ ID NO: 36906 - DNA, 461 bp, Zea Mays
ttccaggcggatacgtggttgtcgatgaaaagctgccaaggttcgcagttcctgacaatgactcatttcaaggtaactggcccctttttttctggtccacacttcacactttcacgacttcagagtttagacagcatcacaacctgttacgttggctaaggacgaggttgaggtccagtcctcgccatgaaccggatgccatgtgtgggcgattgcagctgaagccgttcgtgtcgcagtgcaccagggacctcgcagcgtcgacgacatcctcggcctctctaacttcagcacagactactgagagcaggagctgattgtcatcggactgctctagccatttgcaggaagcgagcgaccaagccttgcagtattgcggctacgttttcctggagagtgcccgtgttcagaggattagtcattagtgtcggcgtcttagcagctacaggtggtcatttcag

SEQ ID NO: 36907 - DNA, 400 bp, Zea Mays
gacctgaagaccttcccaactagagtcctggatgttgcgtgtatcccgcattgcccgacgtggatctcatctagtagttgcttcccagtagtcaaaagaatgcacttcatgaggactcctgttgcgccccttctgtacagtgcttccccaatgagagtgtagtgagttgactgccttgcgatgcgttctactgcagttttgtcatccggctcctcttcattctttatatatctgatgattggcttcctccagtcatcagaatctgactctggctggcttagaacattgcactcttctgcccgatctaaggaaatactcgggcgtggtacttcttgtacgaaaaccccaggtggtacctgggtccgactggatcctagttttgacaacgcgtctgctgccg

SEQ ID NO: 36908 - DNA, 448 bp, Zea Mays
catgacatgatggagtagatggaagacttagcgctacactggatggtcctagtaataaaagaggtcttccatcttttcctggtccaccttctccacttggcgttgcaccttgtgtttctaaaacagtgaccctccaccttctccacttggcgctgcaccttgtgtttctaaaacagtggatggtccaccttctccacttggcgcacttgaagattggatgccactaacagacacaagtacaaggctagtacaaaatataattttaattagtcattatatgacgacatttgaagcaagagagttataagtgaaatgtagctatcatatgtagacttcggagactgaatgtcggtctgtgaaggttcatttgcaccagcatatttgcgactcctctgtttcctatttctttttttggtaccgtttagtgggcacttataacttatttgtc

SEQ ID NO: 36909 - DNA, 356 bp, Zea Mays
caacagaacagcttatgcgacagataatgtttcacaacaacctgcaaagagacaacttgttacagatagacatgattttatgtctatggacccaaacattgtgaaccattcacctagctggtcacttagtgatgcagttggtcctcaagtacttgattttagtaaaagagtagcatgagatgttgttcaaacgtcaagaaatcaaaacaacaatccaagggccagttccggtccagttccgcctattgaaacatggtctaggcctggcgtggttgcaggggctaataccatgttgaagccaggtcaaaacctgaacgatcattccaaactgctatactccacaaaatttcctgttg

SEQ ID NO: 36910 - DNA, 346 bp, Zea Mays
caagtttacaattaattagagaagttacttggctagcttctagaaaccattatatagggcctgtcagcataccctccctatgaacagaatcctaatttacactatgacatgttctggtgcttctttagtccattataattctatgctttatacaatatactttcagtatctttcttgcattatattttcataatccacatcttattttacacatgaagtgttgagtgggtatttgtgtttgtttgtaatctaatggatgaaatgttctcatactcaaagtcctccatgtgctacatgatgctttatttttttatacatctatttcacaattgcaacgccatttgag

SEQ ID NO: 36911 - DNA, 365 bp, Zea Mays
cctactaacggagcaatcgacttaagtcggtaatgacttaagacggtgcgacatgctcatgcttacttaactcggggtgaccactatgccctactaacggagcaattggcttaagtcgacaatgacttaagacggtgcgacatgctcatgcttacttaactcggggtgaccactatgccctactaacggagcaatcggcttaagtcggcaatgacttaagacggtgcgacatgctcatgcttacttaactcggggtgaccactatgccctactaacggagcaatcggcttaagtcggcaatgacttaaaacggtgcggcatgctcatgcttacttaactcggggtgaccactacgcccttctagc

SEQ ID NO: 36912 - DNA, 568 bp, Zea Mays
tgcctcgccggagtgggaactccgccatgctgtcgcgcgtaccgtgggcagtagtcgtcgcggcaccaatcgatggtgagtcttcaatcttcgcatttgcctcggcctcctctgtgcgtagcactcgttggtcacggatcggggcatctactggggcgctggtcgtcggtatgttgcgccgccgcggggaatcggtggcgccgccctgggttagcaggctgggggaaggagaggactcatgggtcgtccgatccttctcggttggctgagattagatggggggcgttgggtcgaccggttcgacttgcggccatgggatgagaaatcgacggcttgagtttagttgcgcgtaccgattcggtcaaatcgatctcgactggtgatcagcgtgtatgcggtcgtaagggaggcgacactgcgaaccgttgggttggaatcttacgctcgcggcaagtaccgaatcacgttatgatctggaccgtctgtttagatctgacggcccgtgttctgcgataccctttcggtcgacagctttacaaaagagcccctctgtttcctcagtatcaac

SEQ ID NO: 36913 - DNA, 654 bp, Zea Mays
attggatcctgtcgtcgttgagagcagaataggacgtctacatgagcatgcaaaacatatgaaagtatgaaacgaaatcgaaatgcggtggtggggaatatatgctcccattggtgggaggaagcaagagcgcagaaataacggtccacgtgtgccgggagtaatccgaatgaatcgctacactttgggggaaaacaatttggggaaaaaaattctacacaacctagatgcaaacgtggcctttaacagccccgcacatccaccactccatgcagcgccacgattttactacgatggagcagcgtatcattcatagcgctagttttctccacgcatcgaatgccacttggattttctatgtccccgtgcatgcatactggatgccatgggacatcatagctttcgtcagcattgaagaaggccttttttttagttgcgaaaggccatgtctgccccgttcgccgcggcttcatcgcctgcttccttttctctagaaaagagaccaaagcttcgctccgctcatcctccacgccgcatgtgtcctaggtctaggaatatatcctccactagcacatttttgttcggagccaggggaggaaaaaaaaccaggcttccaggaggacaagaagtacactccacgagaatacacgaaac

SEQ ID NO: 36914 - DNA, 275 bp, Zea Mays
gatgcaccccttgggactcttccccgctgagaagagggatgaccccatgtggtgcaaccgtgtgagccatgtgaaggacgtatgggctatgtatcctgacttggttgggaggatcactgtttagtgcatgagcgaactgtattacctattggccctgcagagcgatgctatggcacatcttgctaacctcgctcagaccaccaagctcaccctcgacagccgagaggacttcgtggtcgacttgtcctcagagttggtggagaaggacctacaag

SEQ ID NO: 36915 - DNA, 477 bp, Zea Mays
cgggcagctatggctcgctgaagatcaagcaggcgagtatcagcagcaagagatcacacctcagtctcgtcacgctcctagaagcgagatggaggaataagtggagtggaagtgggagcgggagcagtggaagctggagtggtggaggtggtggaagcagcgggagtagtggacgacttgagagtgacaggagctcgcgaagtgggaggtggagtggagactgggtcggaaggagtggagcgagcagtggaggagcgagtccgagactcgaggcaacggactcggaaggcgatctaatcagaagaaatatgtaactggcctccctgctctgcctgatttgttggtgctgctactgcaagcgttgcacgagcggctctgtccagatgcctcttctttctgccctcttgctgctcaaggtagacagtcctgcccatgacctgtctgaagggcgaggagggtctcctcgtcatctcctcc

SEQ ID NO: 36916 - DNA, 604 bp, Zea Mays
caggaatagaaataaaataaaatcggttgcccaatgagaggggttttctggaatagtgatgggttcagagaccctatgaaacatagatttgtgtctgacttgtctaaagaacacactttgtcttttatagctatttcggaaacagtgagaaaatctttctctgactctttcctgaggaatcttagtgggggaaggaattttatttggcacacaaaagaacctacaggccgttcggggggtattctgttgggtgttgatttagatgtatttgatattggtgctattgatgaaggggagttttatgtcaagttcaaggtgtgtaacaaaagcgatagcttcaagtgggctttaacagtcgtctacggtccagcccaatttgagaggaaggaggcattcctgacggagctagtccaaatggcgaaccatgaaaccttacctatcttaataggtggtgattttaacatccttagacaccctcatgaaaaaaataaggacaactttgatcaaagatggccttttttgttcaatgccgttattgacgggttaaaccttaaggagcttaacatgacagggagacaattcacttgggccaataaccttccac

SEQ ID NO: 36917 - DNA, 295 bp, Zea Mays
cgagatcaacggtccgaagaccatcgcctccacccgactacccacatacggcagcgcagagctttcctgcggtggcgccatcactagagtatcatgttggcgtgcccagtgcccccaaacacgcaaccaaattgagaaacacgtggagcaggacaaggaaaacggcttttatgatttcttacctcagatcgagcaccgggagggactgaccacgcgatgaggtggtcctacggtggaatccaaaccctggtgagcaattcaggtggtaccaggtgatcctagatctcttaggcgc

SEQ ID NO: 36918 - DNA, 674 bp, Zea Mays
atagcgatcacgtccggcgcaacgacatgattacgtctacacgacagtgcacgcacgccgcctgacaccttccgatggggcgcctaatataggaactaaccaatcaaatcttatctttgtaatctatccactaatacctacttccttatctatgcgcgctccgcggccctgcgcatgtcgcgcgcccgccaccttgtgtaggatcggctccacatgacatctctcccctcctcgagagacatctcgtcctcgagctagaattgtgggaacttgtcgcggagcgtgtcgacgtcctcccaggtcgccgaagccggtgaggtgcccttccaatgtatgaggacctgacgcacggcgcgtgccaggcgcgccttgacaacgcgttccagttcaggtgtgaccacctcgtgccggactggagggaggggtggaggcgcttgcggaggttcgccatggaatttcttcaggagttcgacgtggaagacgtcgtgagttgagcttgcggtggtagggcgagacgaacatcgacgtcgttgatgatctcgatgacacggtaggggctgtagaacctaggcttgagcttgccacctgaagcctggggaagagacgtagctgcgcgttgccggaggcggagaagaacccagtcgcccacttgataggtgatcgaacgatgagcc

SEQ ID NO: 36919 - DNA, 384 bp, Zea Mays
ctgcgggttgatttataaaggttccaggggcaaaataccattgccgaagcggtatagggcgagatcggccgttagatcttgatccgacagtctggattacatggtggctaaaccgaacaggtgagcgacccaaaccgcacgatcaccatcctatggctacgatgaaaacaaagtcataaactcccatagtcgttgatctgcagaccaacagacacgatcatcccctgagcgaagcgccacctagatctaagctcggacacccatagctcatccaacggttggcgccgcttcttcttccgtcgcccataccaaccggcagtaggtccccaccgcggcggcgccctcaatggcgaaccccaccccggagttcgagcaacccttttc

SEQ ID NO: 36920 - DNA, 419 bp, Zea Mays
ggcggagtggaaatgggagcgggaggtggaacaatggaagctagagtggtggaggtggtgggtatggtgaaagtggtggatgtctctggagcgacaggagctggtgcagtgggaggtggagtagtagttgtggtggaaggtgtagagggagtggaggagcgatgccgagacgcgaggcgacgaaccctgtaggcaatctggtctgaggagatctgcaactagccacctcgctctgcctgctctgtcgctgccgctgctgcaagtgctgctcgggcggctctgtccatatgccgcttcttccagccttcctactgctctagatataatgtcttgcccttgacctgcctgaaggggcgaggagggtcctcgtcgtctcctccccctggcgctgacacattcttcgtgcgcaccatcctgac

SEQ ID NO: 36921 - DNA, 470 bp, Zea Mays
accgaattcaatccctaaccaacgtttcccctcaactaatttcacgaacgacgatctaacctgctctgtccacagtgacagtgggcatcacggacattcaatcgtgttcccgacgatcctagggactctagctcaattgggtgggtcagcgagtatcagaagcatccaagaacactgaaacgaggactcagagggcatgaacgaacctgagatgcgctggccacggcgagggctataccacggcgatggagagcaggtttgggggaaatgagaaattagtgagctctagtggatgattcaaggcacggtttgcttcactagttgcataattacatagcggagcaggcggggttggtaatttatagcaggcttgagcggtgaccggtgaatttggattgagacgcgcggcggccggagatgaccggggttactggcgctcgggatcagtgtcatttaccgtggcaagctcc

SEQ ID NO: 36922 - DNA, 359 bp, Zea Mays
caaagatccaacttcagtacatgtccatcataacaagcatccaacataagataagcaaactaactctaactaaaactgactagattaagacactgaactaagcattattacagactccgactctatcaatctaaggatacaaatctatccgggtcctgcagtctggggtaccatagccgaagcgaccactgggcggtgaacggtaagggtgctgaatcgcgacaggggcgggagaaccaccatctagatagtggcatgctgagcagtcatcacgcaattccgcaacctccgcccgaaccttgcccaactcgtcaagggcgtggtcgaactctgtgttgagcacggcagccaggttgacc

SEQ ID NO: 36923 - DNA, 293 bp, Zea Mays
cttgttcgggttcagcttcgtgcgcatcgcgcgcagcttgtcaaagaccagggtcaggtcttccaccagagtcgaccccctcctagtcttaaccacgatgtcatcgacatatatctctaccttgtccctaatcaggtccccaaaggtcttactcatcgcccgtataaatgtccgcaaggcatttttcagaccgtaaggcattacgacatagcagtaaagcccatccactgttacaaaagtggtatgcttcctatcttccctagacatctggatttgatggaaaccagagtaag

SEQ ID NO: 36924 - DNA, 311 bp, Zea Mays
gtacctgtaggtcgtggcggcacaggacgctaggacgaacaggcggcggagcgggcggtgctgtccatgtcgtccaggcaaaggttgagcgcggtggactggtgggcaaaaaacaatgaatacggatgaagtttctagagccgtatggaatgggaaaaggcaccagagctccgacggcttgtagcatttgggcagacagggaccgtagatgaaaaatcggacggtgcataaataaagacatgacgtggatagcctaatcacacccgttttgaaccgtgtttgtaaataaggaaatatccggtgatgtgcca

SEQ ID NO: 36925 - DNA, 951 bp, Zea Mays
aatcgtacacaatcctatcaaggagatccttgcttattgtgaccaattaaccaaataagggacaggtgcacaaggcaacaatcatgtgcctaaaatagcacaagctaaccccccaccccccgcgcagtcagatcgtcagccattgtgcacgttcagactggtcctgaattcgttgaagacagaggatgggaggcctttggtaagatatcggcatactgtgatgtcgtcggcacatgtaggacacgaagagcaccggcggcaacccgttctctgacaaagtgtagatcaatctcaatgtgcttggtgtgttgatgctggacagggttggaggtcatgtagacggtgttgatgttgtcacaatacactagtgttgtgcggcgaagaggagcatggagttccaggaggagctggcgcagtcatgtggcttatgtaactccattagctacaacacgatactcggcgtcagcactagacctggagacagtgttctgacgcttagaggaccaagagatgaggttgtcaccaaagaacgtagcatagctcgaggtggacctgcgtgtatccgggcaaccaacccaatcagcatcggtgtagaccacaagatcagtcgttatagatgatcgtggcaggaggccaagatcaagggtgccacgaatgtatcgcggaatccgtttcagtgcggcaatatgtggttcccggggagagtgcatgtgaagaaaaacttgctgaacaacataggcaatattaggccgagttaatgtcaaccaattcaaagcaccagcaagactacgaaaatctgaagcgtcagttaccggcgcaccattagctgaagcaaccttcagatttgtatcaccggggtgagacaaggcttgcactctgacatccctgcgcgatcaagtagttccaccatgtactgcttctgagaagaaggccatcgcctgagggcagaac

SEQ ID NO: 36926 - DNA, 792 bp, Zea Mays
aacaaacttcttgaaggttttgatgaacataactgtgtcttcatcacttgaactatcttcatcacttgatgtttcgaccactttctttgtcctgtgatctttgttcttcttggaggaatcttgttcatttgagatcaaggcatgggtgtctcttgtcttgattggagcttcttcggactcatgttgttgaatcttagcaaatagttggtgaggtgtcatttcctcatagtcatcacggtcccttatcattctttgtagacttttatccttttctttgtatgctctcataaatagtctagtgaccttagagtcactccaatcttcacttccaagcactcttattttgttgaccaacaccattagccggtcaaagagtgattgaagtgactcacccttagtccaatcatatcgtgcaagctcatcacttgaactatcttcatcacttgatctttcgaccactttctttgtcttgtgatctttgttcttcttggaggaatcttgttcatttgagatcaaggcatgagtgtctcttgtcttgattggggcttcttcggactcatgttgttaaatcttagcaaatagttggtgaggtgtcatttactcatagtcatcacggtcccttatcattttgctagacttttatccttttcttttgtatgctctcataaatagtctagtgaccttagagtcactccaatcttcacttccaagcactcttattttgttgaccaacaccattagccggtcaaagagtgattgaagtgactcacccttagtccaatcatatcgtgc

SEQ ID NO: 36927 - DNA, 443 bp, Zea Mays
ggacgcacctgcagacccgcttcggagttccctgatctgggtggcttaaatccatcgatgatgtatttctaggacaggaaaggctggacaacagaggggatctaacctctgaagctctgcgcattctgaagtgccaaagatgtcatcttagagaggggaacaaagtaagtgtggccaggacagatgcacgggcgttgattaccatggcagcttgtaagccagggaagcgagtccagcgacgatctgaatccgatggaggcgcccaagctggtgtgtgttgaaataatccttgtgcatgggtcttagttagtttacttaacactgtttttttattcccaagttaggcgcatggtcatctgttggctgtacgcaagtggagcaccgacaagcacgtttgtttcgcttgcgtgcgcgtagttgtggccgacatgccttgatgtgtg

SEQ ID NO: 36928 - DNA, 471 bp, Zea Mays
agaagttactaggggtgagtggtgtagagatgatcccattcctatggcttgcggagaggacgattttacgtcttttttggcttggtattttaaagtttttctagcttggatgctggaagatcaccaggagtcttcgaaaaagaagaggaagactctactgtagctggtggaccctcatcgcgagatgaaggctcttcgcactggcacgactggggggtcaaagtcaagagctacaaagactacgtatgctatcgcggcaatgcctccacccgcgacgccgactgttgcggctgcggtgtcacctttggctagcaaagctagctaggacgtggaggtagagggggatgagacgggtgcagctggcgaggtggtcctcaatctttctgtcgaagactacctgcttgaaggtgtcagcgagttggacacccacactaggttggcggtcggtggtaactattgtgtatatctggg

SEQ ID NO: 36929 - DNA, 294 bp, Zea Mays
tggaaggagtattttgaaggcggaatggagaaatgctctatggcagtctacctgggagaaagccgaaactatccgaaccatccttccttccaagtcacttttaccggataccgctttccagatacttgccagaatgttgcccgaacagccctccggcaactatgccagaactacaacaaggtgatccttgaaaccccccttcgctactttccacccaacaacaagaatacccccacctggaggaaaagacttcaggccctgtcaggaggagatcctattgaggatgatcccacc

SEQ ID NO: 36930 - DNA, 329 bp, Zea Mays
ccaaatattgagttttggacttaaatgcaaaatggacctcaattaggttctattctaagtctgaaattcagtgttgagggctcaactttggagcattgtatcttgcaaattctagggtttttgccctaggtcaccacatcaaacttgtagcctaatcataggagaacaaccttgcttaaggttgtgagctcggttgttaagaaaaatccagagataattaagcccaaagttggactgtcaggtcactgagtctgaatttttagagaaacagtgcaaccactgagactttgagcaaagattcctctatggtccagcatgaatctgcccat

SEQ ID NO: 36931 - DNA, 272 bp, Zea Mays
tatgtatttgggaaatgtaattaaacggatgaccaatacttgcattgggaagttaccaagtgcaagcatacagaatgtttagagtaaatgtacaaagcaatagatagtaaagcacactgtttatgaaaaggattctataatgaaatgtaccttgatgaagaaggttttctccctgaccagatatgtagcagttaatgaagcccttcctttttccaaaccaaagataaggattttctataaattgaaattaacaaaacagtaagcagtgaatg

SEQ ID NO: 36932 - DNA, 315 bp, Zea Mays
gtccaagcgcgggctggaacccaccggtggcggcgacgacgacgaccatgcgcccaagcgcccgcgcgtccccgccctcgctaggtgcgcgtgtgttaatgctttgattctgctacctagagttttgtcattggttaaggtttgggttccatccctagttttggtattgttattgctttgattgattgagatgactgggaagtagtgatttctattctagtgctgccgtttctattaagcttagtagtatcggtagttcggtacaagtgagtgcaggaacaggaagtttgcctatgagtctttttgtcgatttga

SEQ ID NO: 36933 - DNA, 616 bp, Zea Mays
tgcaccgtaccgaccaggtgcgcaggcttttttggttcactgtaccaccaagttacgtcaattataactatgtgttatgctcaatcttgttatggtttacacactttttggtgtgcgcatgtttcgtggcatcgggcccacgaaaagatcgtgtccccgcaatctgggcagccgtactagtccccacataaatatcgatattacgctgtcttatgcttccgtttatgatatagtaatccatgtgtcggtccatgggccttcgcgttgatctcgccagcagttacgtgtatcgggcccacgaatccagcaaccgagcacgcattttttcagctcacctctcccgtaacgctcgcgcggcggccgaaccctagctaaatcgccgtcgtctgcttcctctcctccgcgcccgccgaaccctagattaatcgccgctgtgagcttcttctctaccgcggccgccgaacacatagagattctccccccgtcgttccaccgccgtcgcattcaccttctccaccgcagagacccggaatcgccttctccgctgcagagacgctgtcgccttattcttcctcatcgggaagggacccggaatcgcggaggcggtggcgccgcc

SEQ ID NO: 36934 - DNA, 287 bp, Zea Mays
gtttgctatatgttttagtatgtatatgatacatttaaccattgattcagtttccttgtgtttgtttgaaaggcgtatggtacatgttttttatgtggggggctctctattacagttcacgtgtgcgctattcatgttctacaagtgctaggtgtgtgtgtcatgtggtacatgtcgcggtgtgcccatggctgatgctccgtatgcacgtgttgcccgttcgtatgaaacaaggcgacgcaggcgccttgcaagcgcacgcggtatgtcgtcttagttgtgttaca

SEQ ID NO: 36935 - DNA, 464 bp, Zea Mays
cgccataaggcgagattgagctcgacacctaggtaccccttgcacagggcgatgaaagcagcaatgtgttgaatcccattcggattcagtttatgaagctacacctgcaaatacttgaagaaggtcataatgaaaaggttaagggggaaggcaagacctcgctcatggaaacgaacaaacaaaaccacataactgtgaggcagggttgggccacctcgacacccagaatcagccagccaccatcagaagcagacctcaccagacgagggcccaaaggttctcctggcttgtcaaggattggcgccaatccgccgtagcgagcgcaacggacaacccgagtatgagaagcatgggccgagtgaggaagacgaggaacaagggaaccgaaagcaaggtgggaaagacacggagagtggaacaattaaataaaatctgccctgtgacaccttgctgcttagtgccag

SEQ ID NO: 36936 - DNA, 311 bp, Zea Mays
gaaatccattaatgtaatcatgcaaccttatttccgctgcaggttgctgcatttttggctggactgtttcattctcgtctagtcaagagggtgctcattgttgctccaaagacacttctggcccattggacaaaggagctttcaattgttggccttaaagaaaagatcagagagtatagcacactacatatattttatcaattccataggatccagtcctgtaagttggtgctaatcatcttttcctttcaatttttgacagctactctggccccagcacaaatattcgcaattatgaactccaatatgcc

SEQ ID NO: 36937 - DNA, 342 bp, Zea Mays
gacctgagatacgttggccacggtgaggtctttttcacggtggcggaaaccgatttgggggaactttggaattggcacgctctggtgggcaatcggaggcacgagttgctggattagatgcttgactacctaatggagccaagggtgtgctcaatttatagcatgcttgagcggtggctagtgaattggacggagacgcgcggcggccggagaggaggagggcactagcacacacgattggtggccataaccgtggcaacctcaccgacgatcactggataagttagtatgagtcacgacgatgtggttagagtgccgaggcatgtggcacaagtccgcgag

SEQ ID NO: 36938 - DNA, 714 bp, Zea Mays
ggaaatccctttaattcggaagaatagtcggcgctacatagccagcggggagagtagtggtgttccttctccagctttgtctgccctcgttggtctgcaagaattgtctctagaaaattttgatcagactctcgaagatatggtcccagaagatctgttgtcgaagccggcagatggtgggatgatggaaatttgtgctgatgtgcctgatgccgggttggagttatcccgagcggcgtatcgtgcctcatcgaccttggagcgtggtcttacgagtcaggaggctggtctggattgctctgttcccatggaagtggttgaaggaccttcagccttagaggtggctgttacagagggctcggtcctcaaggatggcgctagtgtttacctagcccccgagggtgtcgccggagatgatccggctcggatgggtagcgcgagctatgacccaacccccgagggtgtccgagttggttctccctctcatacttccatggatgttcacatagggtcttctcctccgcattttggttgcatggcagcagcacgagctttaggtcaggaagtcgccttagaggctggcactcctgatgacagagttttgatttctgctgatgacactgaattggtccccactgatgcattgcggattgctccggttggtgatccttcatcgagctatcaactgacttcccacgatttgggggttccttc

SEQ ID NO: 36939 - DNA, 467 bp, Zea Mays
aaattccagaaagcacaggggcttatctaagaaaactccccagactcagatgcaacccgagctggacagcgggttctaatccatgattcccgaggggttcatgtgtaaaacgaactagtgaaagggtttggatgattctcggccgcaggatcacacaccaacggtgtggattagatcgggcctcccaggtcccatcattgcactacgaccgttggatcaagtatccacagtccacggttcgtgacaccctattctccccatagccgttagatgaagaaactgtggatcggatttaacaacacccatagtcgactttcacccgtcagattccagatccatggtccacatctgatttcgcgaaaagtcatgccctggcctaatcacgaccgtcggttacttgatctacgatgccgaacccatcttcttcctcccctggctgtcaacacggcggcgcactatccccgcgg

SEQ ID NO: 36940 - DNA, 428 bp, Zea Mays
tgcggacaaagaatgtcacaccgtcagggggaggagatgaccaggaccctcctcgtccctttagacaggataagggcaaagcagtttaccttaagaagcaagggggcaagaagaagagacggttggacagagccacccatgcaaaagttgtcgcagcagcagcagatcaggcagagcagggaggtcagctaagaatcgcctgtgaccagattgctttcagaatccgttgtctctcatctcgtgcttgctcctccactgctcagtccactcccttagaaccagtcaccactcgacctcccacttcgccagctcctgccgctcttgagccttccaccacacctgctgcgtctaccacctccaccacaccaatttccaccgctcccgctcctactccacccattcctccacctcgcttccgggagcgtgat

SEQ ID NO: 36941 - DNA, 295 bp, Zea Mays
ctggctaacccacctatgcgacacatcaaagcacaaaactaccatgaatcattgttaccgagcatggttgcatagcattcaacagctcttacttcccattgcagactctagacgacacatcctaaccatgccagacaaatgggccagaagcaagagtctgttacaatacaagtcatcattgccaagcagccaagctcaaacgcgtcgtgaagagtatctctgacttcctatatcaaaccaacacccagcctcgacagatgccaaacctcaaatgcaaaaccctagtcatcgaagg

SEQ ID NO: 36942 - DNA, 384 bp, Zea Mays
cacctgccctttgcaacctccatcctttggtcgtgttcgcaggcctcaaataatcaccgttctcttcatcaatttgttgctctctaatctatacactcgcagcttctactactagtcatggcgtcatcagtctcctcgtcacaagtaacctcttcatttttttcccaccacgatcacatggctgccttctcttggcaatccggcccatttggactaaaaattagcatttttcacacgtccttttgtctaggatactgcatcctgaatggtggagccctaacggtgctgctgcaccacgaatagattactcatgctgaggcgatcgttgcctggagatccgagaagaagcatagaagaatctcatctcattaattgctcgcctta

SEQ ID NO: 36943 - DNA, 291 bp, Zea Mays
aggagccaagttggcagagttgtacatggcacggattgtatgcctacatggtgtgccaaagaagatcgtgtctgaccgggggtcacagtttacctctcggtattggaagaagttgcacgaatcattggatacgagattgaattttagttcggcttaccatcctcaaactgatggacagactgaaaggactaatcaagtattggaagacatgttgagcggttgttcccttcagcatggtagtagtggacaagagtctaccttatgctaagttctcatataataatagttacc

SEQ ID NO: 36944 - DNA, 308 bp, Zea Mays
aggcgccccagtcactggtcataccaagttgacgtaagatacaagctttggccccacctacagacttgtatcctcccctaaggagggcctaggggccactgtcggtaccctggatcaagggtaccacctactactgtatcaaggcatagttcccgtgtggctacctcttagccacatggtagcagggctgtgtctgtgactaaagcgtgcctcagcccaaccaagggcggttgctcagggccaatagcggcgtccggcctcaccacctgggtgggtccgggaccgccacgtgtctatcgtggtggaat

SEQ ID NO: 36945 - DNA, 1032 bp, Zea Mays
aggctggtttcatttggaaattcagctactcagtgtaacagggtcagctttgagtgtgaattcaaccatgatatagtgatcaaatgagctcagtcactatagtcgaaatttaggtggtacatagctctccaactttgctgcagagcatggagtatgttcctattggaatttgtgagtaaatcatgcctgaatatcgactgtcagactaactgaatcccaatccaatggtacagtagcctgataaagatcaaactgccagcgctgctcgctcgccgccggtgacctgcctgcgctgggattcgtgctgttgtcgcctagattcacgctcgggtgggtggataacatcgcgtgaggaaagatatttgtcgtcggtgggctggaggtcactccggtgactcaccgtcaccatctcccttctgttttgcggctgagcagataagctcgccggggaaccaccctcgcacggccttgcgccacgtatccgagtacctccaccgcatcgccatgattcgttttagctttccgtcgatcgccggagcaattgccacggcattggacacgaagcacttgcgccagtgaacgtttagtcctccgaccgccgcgcgtccttctccaaattcccggccaccgttgatgccctctataaattgagtgcgccacagtctccgtagggcagtaaactatccagccaccacgaatcagccgcatccatttgctagaatccgcgaattttgaattcgccccaaatcaatttccgtcgccgtgaagaacagctcgttgcggccagctcgattccggttagctcgcgtccctctgttccttgttctagcgtcctcatgtgcccttgatgctcaccaaaccgtccaattacactagaagcccacccatcgtcaggaacatccccctccatccgcaaccttcacggtcaccgtggccagcacaaccctgttgatcattagtgaaattaagttgggggaaaggtgtgggatgggtccaattccgtgtccgtcgctcgggaaccctagccgttgc

SEQ ID NO: 36946 - DNA, 281 bp, Zea Mays
cccccaagcggccgtcgcttctccctgctcctctgtccctggtgcatggcgccatgtctctaccctcccagcgcccttcctccctacgccacgccaccccctcggctgtccagcaggaagtccagcacctccctctagttagtccctccgacgtgtatgttatttagcggactatgccgttgctctagttagccaaagtgttagatgggttggttaagctcgtaatcacgatgatttgcttgttgtagtctaaatgtgtatggttacggttccgggtaaaa

SEQ ID NO: 36947 - DNA, 381 bp, Zea Mays
cagcgatacacgatgacttagctaggtagagaacacctgatacatagtcccttagaaccaacgtcgcatagagacctatgatccttccctctctcgccttcttgtaaccccaactacgagcgatcaacaacaaggtgctggaagagcgagcaaccaaagactagaagtagggacattttgcacgaaccattataaatcttacgcccactgagcacaccatctggacttagaacatgcatacacatatttggaagctcaacccctagatttccccgctaacctagtagtaatgggtattcaagggttagatgtcatcctagggatgaattagctgcagagaaaccaagcaaccgtcagctatgacaaaaggacagtaaagtt

SEQ ID NO: 36948 - DNA, 708 bp, Zea Mays
gtgggtttcactttcttctctaacggcttccccttccactctcaggggaaaccctgctccaatcccggaggcggtaggcgtggttttatccgaagccatcttccagggaagagtgttactattatgcacatgcaaattgttttcaaccaagttattttattcattacaccatcacattacaagcataagactacaacaggtggaactacacgagagcattccccgaggtactaacgaactccttctctaaggtgtccccaaatgccttgagaagatcatcaaggcttgctagggatatatcctcgtcgtcggaccaatcatctattctggggggaggtagggatagaggggccttcttcttcttcttctctgtttggcatccttggtcggtggtcttcttctggattttctttttgggggcgagcttctttagcttcttgtcatagtccatcttcaaggttcgataggcctcatgggtgttggcttcctcgccttctgctatgttgagactctcctggagggatgccttctcttgcttaagctctttgacttgctgctctaggctttccactcgggagtttaggtgggtgcagtgggaggagagctcatcgtagtggttgtcgagggtgtggaggtatccggccatgtagacgatagtggggtcatcttctgtgggatctcctcctgacagagcctggagtcttttcc

SEQ ID NO: 36949 - DNA, 344 bp, Zea Mays
gtccaagccccagactctagccttgactctctgcttggtcaagatgcaaaaatagggtccggacgtcctcctctcggctcaagtcaacaagcaagtacgaaggccataccggcgaccatactgactacaggggctctgacatgcctcctctcccatacgcgacaaaccatggcgctcctggaagccctccttgaggctataaatagaggagcccaaggcttcattcggggaggagaacacttcactttttcacctccacaactgatattggcactcgccttaatcaccaccagagacttgggaacttctccctctccctatcagcttgtataccctattacaag

SEQ ID NO: 36950 - DNA, 371 bp, Zea Mays
ctgagggatctcccttaggcacgaaagctaaaaactagatctactattaagagcttgaactagagtgggaaactaaaaggcctggaaaatatggctggttaggagttgtcccttcttatttatggagcctattacacattcctaaccttcccttagatattttatgctaaaaaccttaaccctagaggcacaatggtctaagttctcataggtgcatccaatgactataggctcttcattactttgcttcacctcgatgtaagcttcgtgatgacgccacatgcatgtcgcctcccattcatgctataactcaagtaggattttgaggcccaaaccactaaacccctcatgagtagtgtatctaatatgct

SEQ ID NO: 36951 - DNA, 324 bp, Zea Mays
ggaccactagcggtgttatacaaagcacatgagaacaacagaggagacatcaaaagaatcatttgaagaaacctaaactctctacctctcaactactactgttcatcttctccacccctctcctctcatgtacctagatcctcttcctctacaacactatagttgttgtgcttctccattctatttcccttactgctaccttcccgaactcttctctgattttgtacctaattcttatattcagcgttcttcatgttgttgttgagttagtgagattacagtagctaacaggttggcacggttccgtccgtgtgtccgctccgg

SEQ ID NO: 36952 - DNA, 434 bp, Zea Mays
tgaagttggggcactgttactgcccagttcctgtacccacttgcgcagcaacgtggccggacggtcatcgccgtggagatcgccgttcaccgcgattgcgccacgccgtagtcctttcaccacatacccgaagccgtggcaagctaagagttaccgcccttgagtcatagtgtcgttgaacgccacgacgagctcaccagtgcaacatcctgtcaccaccgtgatccaaatctccttcaaattcgggacaaccgtggctagctgctataaattgagtgcactgccagctccgttagcttatcacgaactcagagcacccactcccgcctccgattagccactgtagcgccctaatttagttcttcccccaaatcggtcgtccgcgccatggtgtgacgtcgtgtcgtggccagccatctccaggtccgctcttg

SEQ ID NO: 36953 - DNA, 669 bp, Zea Mays
tgaaacgacatgactgatgaaaaaaacaacgaacgagaaaagtaaacatgtacgactctgttgtcggacgtccagcagctaagtgctctttttagtttctaactcgtaagcattgcgaagccaagcgattcttccttcttttgtctccaagtttgcaaaaacatctctatacttcttatgaatcagaagatgcgtcgcaaacaaatgtagttcgctcccttcaggtgatccatcttccttgacttgtagcaactgctttttaatctctaatcttaccgggtcattgtcagaagaggtaatggacttgtttgtggtcaatgagcgggactcaaaagcatcgacaagtcttttcatgtactcttccctcgaatcttttttcttctttggttttggggaatcatggcgcatcttacgcttcccagtagcatttgtgcagggatcaggtgtgctgttttcacccccacctaaagtgtactccaaatgatcatcagaagatgaattagcatcctccacgccaggaactagggttctttcatttgtgcagacaatgggaccaaacataacctttagctcgtcctcattctctaggggggctgttttgaacataatacaacctggcattgcctgcaccaattcgtagtcctacttttagatggccaatactaatgt

SEQ ID NO: 36954 - DNA, 440 bp, Zea Mays
ggcaaataactataaaatcccacatcaccacagagcttgaagctaaattagacattaacatgttcttggtccttggagccagaagagtcatatgtcttgaccattagactactagtgatgataatttgtgatagaaatatgaagatcttgtagagacctattgtatcctctctactcctgatgatttcttcatatgagagcagtactatctgttgttgaaggtggatcctgggcggataccagtcttgtttcgttcttgccaagcagttatcgtcatttgattcatcaaaagctagttatatggtgattttcctagataaaataaattcttggccttgtctgttctattccaaagcttctcttttttgctgaacaatgaagagatcgaaataatgctatatagaacaatttggtatataacatgatgagaaatgtttgcc

SEQ ID NO: 36955 - DNA, 387 bp, Zea Mays
caagaactagggttcagagctcaagaggatgtcaccagaagtatgggttagcacactaagtcgggcgcaaaggggcaggtcgatagcttgggagagttttggttgtagcaaaataacatcactcgggcattacctctaaatgctagcgaactgtgagacataagagcggagtatgcaacagtagattggcacaaaaacaggttttcattcaccaatgggggaatcattacaaaattgagatcgactcattatgagtcggcctcccgcccctcgatcttacattacattaataattacattactacttagactatattacactactagttaaactacattattctactactaactactactactatactatactaatatttaagccgg

SEQ ID NO: 36956 - DNA, 449 bp, Zea Mays
ccggtgctcccgagcagtgggcatggaattgaaccaccccaaatcacttcccctaacctaatttcatcaacgactaactaataagctctggccacggcggccgtgagcatcgcggcttggcagtcgtgttcccggcgatccctggtggcctggttcaattgggtgggtcggtgagcatcacagacacatgagaatgcttagacaagggagcagaggggaggagctgacctgagttgggctgaccacggcggggtgtgtttcacggcagctgagaccgaaattgggggaagttcgaaatttgggcttgctggtgattgactgggagcaatactggttggggtggtgcgtgataatgtggtggagctagctgcaggctcaatttatagaaggagcaagcggtggtgatcaatttggccgagccgtgctggcggccagagatgaagaagaac

SEQ ID NO: 36957 - DNA, 427 bp, Zea Mays
aaaaaatttgcggagattatcaatgttccaagaatgctccaagtcctcgccggatggcgttgtgagcctgtacgcgctgggggacgcctttgtcttgacgatgaaagggccctcccacttgggctccagcttgccccgggctctgtccgagctgtccggacgagtacgaggtctccttcgctgaattccctcgggatgaccgtgtggtcgcgccatgcttttgtttgggcttggtatttgtttagagcctgtagagcgaagacgcggtctccgtcgatgaggtccttcgaagtgggctcgtccacgtcggggacggctaatgggattgtctgtggtgacccatgttttatttcttgcggggtcatggccttcgatccatatagaaggcggaaaggggtgaacccagtcgccctgcactcagtcgtgt

SEQ ID NO: 36958 - DNA, 627 bp, Zea Mays
ggtgctagtgaagtgttgcaaacgtagttggtcgaagccttccattcgtcggctgtgggtggccattcaggatttccaatcacatacgccaggctcaaacatttgtttgcttggcagggcatgaagagcttcgtaagcactttcgtcagtcagtgtatgctttgtcaacaggctaaggctgatcggacaaagttgccagggttactccaaccgttgacagtacctattgcgttgtggcaaattaattccatggattttactgaggccctaccacgttcgcactgcatcttggtggtagtggattcgtttacgaaatatgccaacttccttctgctcaaacacccgttcacagctctgacagtagcccggctattccatgatcgcatttataagcaccatgggcttcctcaatctattgtgtctgatggcgacaagatttttctctgcaagctatggaaagaactcttcagattgcctgatgttcagcttcgcatgagcttggtgtaccaccctcaatctgacgggcaaactaagcgggccaaccaaagtttggaaactttctttcattgctttgtgcacgcatgtcctacacagtggagctactggctttctgtggcgcagttttgg

SEQ ID NO: 36959 - DNA, 366 bp, Zea Mays
cttgaattccgatgtaacgacccggggaagttctagcgaagggggggtacgtgtgcgcaaatcggggcgtccatgtgccgatcgacggtgcacccaagtcaacacgctccatcatcaaaacagagcggcacctccatccggccacggtggaggccatggccggagttgccgaccacgacacaaccatccaaaattccaagctaatcggtgctacgcgtttcggaaaggaaagtaaacttaaaggcgtggctcataccggaaatcgcagggcaaagttatcccgaccacgacgctgcggaggcgatactcgacggcgagcaaattcgaggtccccgaccactaatcccgcgcgccaaggccaccagc

SEQ ID NO: 36960 - DNA, 814 bp, Zea Mays
gcgaagctctaaatcatcgagtccacggggacaacgcagacaacaagtgaacaagcgtgttcccggtgatctagggcagtctagctcaatcaaatgagtcgagcagcattaggagaacctaaggacactaaaacgaacgatcagagagtatgaacagacctggaacaagctggccacggtgagggctctttcacggtggcggaaaacagatttggggagaaagagaaattggagagctgtggtggctaatcggaggcaggagcgggtgctctggtttcgtgattatctaacggagctagcagtatgcttaatttatagtgttcaagagtggtggcctccaattttggattggcgcgctggcggtcggagaggaagaggggcactggtgcacacgattggtggccataaccgtggcaacctcaccggcaatcactggataggttactatgagtcacggcagcgtggttaaagtgccgaggcatgtggcacaagatcacgaggtgtctaactccggcgagggtagattcaaagcgactggggctgagcggacacggcggccggacggaacagtgcccatggcttaatagcggcgaagatctttctaccccgagtcgttatctgggcctaagtgagcacaaatcacctcatcagcgtgaatccacgcgtggggtcgccggcagccggttcactgaaccaacagatccttttggtcactataccatcaagaacttcttcagtcggtctaacagatcatgtttggggcgaatttcctccagattttgtatggtgactagatcaatgctctgcatcaaag

SEQ ID NO: 36961 - DNA, 341 bp, Zea Mays
gtttccgtagtatgtctagcttgattgtaccttacaccactgtaatgaccctgtaggagggaatattctgggaatgtggcagataaccgggggtataacggtacttggggacccacctacccacccggttacctataaataccccagcactgtacgcagatgggacacgcataacgagacgctacagttccctacctaactctcgagctgtgcccccgtgctcccccatctccgagtgtttgtcccactagaccacgtgtcggtggtcacaacatttggcgcccaccgtccgtgcgacgacaaaccaaacccacgatggcccccaagaaggcgacctccag

SEQ ID NO: 36962 - DNA, 448 bp, Zea Mays
cccttgcacttggatattattcatctaccccctagccaccatcaaccttctccacttcttctccccacgccatcctcctctctggtttcccaggacagcaaccaccaaggcgccaacccctgctcgtggtctccccaagatggcacctctccctgttctccatggggctcagcagcaggaaacctctccatctgttgtccatggcaagcacctcccttgctccctcaagacggcatccatggaggcaggtggttcctattttccccatggtggacgccgacgccccctctgttgcagccatggcaccctcacctccagcccctccactcagctccctgggcgcaggtactcctcttccccatggtcgagcctcctgaaccttccccttcctcagctcagcacccaagagcagcagcccttccttcccttccttagcgccccattccag

SEQ ID NO: 36963 - DNA, 443 bp, Zea Mays
cggcaatggcgccaccgtgttctggttagtatgcgcggcggccggcggggcgtctggtgagagtgatagtggtgggaggcgtgcgtcgttggattagatgcctgcggctgcgattaaatctggcgtaccgatttggaccaggaagatcggggccgtcggattttgtgacaacgctcctgattagatcacggccatttcgtttcaccaccgtagatcaatcaacggacggtctagatttaatcaggcgtaccgtttcgatctggcgcgccttgaccgtcgatcggcgatcgatcggtttccggatgatccgttctgctttggatccatgccgtcgatttttaatcctgtggctgtgctgatgtagccatctgcgtggtgatcagatctaatctgatcccttaagtttcgatctgacggtcctggtcagcggataccccttcgcg

SEQ ID NO: 36964 - DNA, 658 bp, Zea Mays
cggacatgaaagtatgttggattgaaccgtgaattcttcctagcaacaaacttgaccaccaatgaattaacagcagtatcattgttattagcattgtcaagggttattgtcatgatcttgtcttctattttccactcaatcaaacagtcaaagatagcttgagctatgacaagcccggtatgtggaggatccaaatcaacaaaatttagtacacgacattgcatcacccaattaggatctatgtaatgtgcgatcagacacatgtaaccaatgttttgatttgaagtccacaaatcacaagttaaacttattgagtcaacatctttaagtgccttcttcaagatttctttttcagattcatataccttcatgcattcttttcttatacccttcctaccaatgtactgataatggggattcaaccaattcatcaagacattgaaccaagtatgctctaccattctaaatggatactcatgggcaatgatcatctttgcaattaatagacgagtgtggtcatgattgtattcataggggttgacaacaagagaatcaaccttgtcgggagcaaagttgagtgtaccttgagctttaagctttgccaatttgtttagcaatggtgtgcactttcctatgtggcggttcagctgtgaagttg

SEQ ID NO: 36965 - DNA, 326 bp, Zea Mays
gatgaaataaacacaatgatttcacaatactactttcatgtcgtgaaaagaaaaagacagcatggttgcatgcacaaggattaaaatttattgatattcatccacttgacagtttcatcttggcctattcatggttcacatgacgatttaacactccaatggtcagcaacctagtattctaccagcagtaagaaaaaacatctactaatctaacatttagtgcatattgggtctaataagaacaaagcaagaacagtcttcttttgaaattcttattgtgcatatatgaacagtacatcctcacataggcaatccatgaaaaaaat

SEQ ID NO: 36966 - DNA, 544 bp, Zea Mays
gttgtggcccttggtccgcaatgacatcagttcactaagtgagtgccatatagttgggtagttgggttctcttttcctgctctcctcctttaatccatctacgcttacctcttttctctctctacctgtttcctcttgtacctgctcagttggcagagtctgagtcgaatcaaagaatctatgttccaaccttgttttattgctagtcttcccttgaaacacaataccatcaacctatccctgtcaaaatacaacaccatccttgtttcacgctcgctgtcacttcctttctagtataaatgtctaaatgtccttgtttcatatttgccctttgtgtatatcatgaaccttgtgaaatcttgtctcactctccctttttcccctacctagatgatgaatcccaatgaagataaagtggatgaggtcaacgacatgattccgaccccaatagtggtgaaaaggaaggatgagtcacatagatatctgctgaatggaatgaagaacaacaagaggaccagaaaaatgtttgggtacaagattaaac

SEQ ID NO: 36967 - DNA, 551 bp, Zea Mays
aagccatagccaccactcccgtctccaattagcccccatagccggagaatcgctcacttcccccaattcggtttccgccgccgtgaatcgtaccctgccgtggccagccctccacaggtctgctcataccctccttgttcctgttctagcatctttgcatgctggtgatgctccccgacccctttaattgatctggaccaccatgattcattgggaatgcgctcaacagtccgccatgttcacggtcgccgtggctagaacaaaccttgtgaccattagtgaaattgtgttgggggaaatggtcggggtggatccaatttcgtgtccgccgctcgatagcgccggtcatggccccgttcggccagtctgcaagctcgccggagcttccccgcgctcgacgccgtcggggaccttcccctgcgaagaattagaactacagggtctcttctgcaaatcgtcagcgactcggtgtaatagtgatagaacccagttatggttagccaaaaccccgaggacctctgcgcaaagtctccctcgcgggcgtgggcgcg

SEQ ID NO: 36968 - DNA, 515 bp, Zea Mays
gtgtcaagcgtgcagtgccaatttaaatcagcgttaatttaaaccgcctactccgctagtagggcgtaatggtcaccccgagtttagataagcgtgagcatgtcgcaccgccttaagtcattgccgacttaagccgattgctccgttagtagggcatagtggtcaccctgagttaagtatgcatgagcatgtcgcaccaccttaagtcattgccgacttaagccgattgctccgttagtagggcatagtagccaccccgagtttagataagcgtgagcatgtcacaccgccttaagtcattgctgacttaagccgattgctccgttagcagggcatagtggtcaccctgagttaagtatgcatgagcatgtcgcaccaccttaagtcattgccgacttaagtcgattgctccgttagtagggcatagtggccaccccgagttaagtatgcgtgagcatgttgcaccgccttaagtcattgtcgacttaagtcgattgcttcgttagtagggcata

SEQ ID NO: 36969 - DNA, 433 bp, Zea Mays
gcggaagttcgaggtacaagtccatcagttgacaccgaatgcagtggtggcgcttgcgaagaacgtctaggatgtctcctcatacggcgggcagccgtctgtggaagtcttcgctaagaattattgtctgcactggcagaagagaaaaataggtgataagatagcccaatttggatcgtgcaccttcacgccaaggactgggaagacctcggctgaagttgtcgagatagttctatgtgctacgaataagtggggcaattggtgggacttttggttttatgtagctcccagggatgtcgaagggttaccgagtttgccccctaccattttgtgctcacattgttatgtggtgtttccacagttcgaggtggcagaagaagacgaagacgaaggggcccttcaatatgcggcccgcttgagtagcggacgcgac

SEQ ID NO: 36970 - DNA, 281 bp, Zea Mays
gttcaatgtaacgcggccgatgggtaagaaccttcatctttttgcccgtagccttcggcacaggctcggctaaggaggccaaagcaacagcttttctcttcttcccctgttcccgcaacgggtagcggtagtcagggtagatgaagccgatggcgtcaaaaactctattcattcttttttccccgacctccgaaggctgcagatagcgcattatcctctgccttggaataagctccgagcagttcatcacttgtagctttgatgcatttcagccagttatc

SEQ ID NO: 36971 - DNA, 562 bp, Zea Mays
gtggttgccaacattgttgtggcttatcatttaggtgtgcatcttagaatggttatcattggccccacaacaatcttgtgagtcggtatgttgcacatgtgccatgtagcactcccaaagagggagaggcaatcatggttctcatcttctgagacatagttctcaaggtactctttgtacttggtttggtcgatgatgttggtgaagctcttatttaggttcaatgtagtgagattggcatcatatgcatcgagcttggtgttagttggtgtctcaatgttagtgtttctatcatcaagactatggatgcacacaattatgatgaatcgattcacatcattgttacaatgtccctttggctagtcctcaactatgagggagctaagattgagggtagccatcgtagcttagcagaactaatggtggtaacttcgctttgcgttcttgaacctgattgcgaagtaggtaaggacgtggtgggaaaatggtgttggatctatgtcagggacccaacacagatctaccatgagcatgcatactttatctaagatgaagtcgtgac

SEQ ID NO: 36972 - DNA, 506 bp, Zea Mays
cccatcataaccggctctccctccggtgtagtggccatttgagtgtaatatattcgcccagtcttcttaatattcttgcccgttgaattatttgccatgtttcccttgccttgatttgagctccctgagttctgctgattgttggatttgttctgcctcggatatgggcagtctttgataaaatgtccagacttcccacaattaaagcaaccagttgaggaactagggagggagggaaaatgagtaccaggggcactcggctgacttgtagaagtgggggcagtggcagggcgaatgaagacaggctgtttgaatgggtaggagggtgggcgagatgaagaacgattctgattgaaagttcgaattaccaaccttggtcgctttgcaggtccctgattggacctgtcacctccgaaaccttttgattttcctgggcctgtattcttagcttctactgccagcgctgtgctgacagccctgctgtaagtgagatctaggcaggtggc

SEQ ID NO: 36973 - DNA, 458 bp, Zea Mays
aggacatctctcctgactatgaaacctcgaggtgaccgcatacgaggtcaatggccgcagatagacttgagtgctcagcgtcaagaaagcccgaaagccctcctctgcacgcgaaaactcctccagcatcatcgttggtgaaaaacagaaaatcccatgagacaactgctggggccaggagggccgaaagttgagaatgaccgagcacaagcctcaccttcttttgagaacccagacgaaggtctctcaacgttgtgcctcagcggccatgctttggtaaggtccggttgggccctcgaagagccctccctaacttcgaacataggatgctcaggccccaccgtcataccgagctcgtaccccaccgccacagctcccctagtagtggtacctcgagcggcagcacgagcctcacgcctcctcgaaaggctaggtcaccgccgaacaactgacgtcgg

SEQ ID NO: 36974 - DNA, 336 bp, Zea Mays
gccttccgcttgggcgccatctcaactccaccggcgagcagagcgggagccgaattgcaaaagggcagagagggtctgaaggcaggaaagcaagaactagggcacggaaagcagaggcagccgaaggtgcagtacatatggggctttcccggggcagataccgtttccaaaaagcgcccagtcatcacccggcggttacttctaaaacaccggcgtgccatgtcatcacccggcggttacttccaaaacaccggcgtgccatgtcatcacctgacggttacttctaaaacaccggtgtgccacatcatcactcggccattatcttcaaagtggctg

SEQ ID NO: 36975 - DNA, 647 bp, Zea Mays
gatggaacacccctgacaaactgaacaactactaatggagccattagcagaactaaccaaaattgggtgacccaacctctgcaccgaaagaccagcacgcgacacaaaattctccgaaataaacgaatagctagctccagagtcaaaaagagcatgggccacaaacgaatcaactaaaatcgtacctttcaccacgtctccttgctctctgccatcggcagcgggtagcacataagtttcggaaatacccgcagaagaggaagctcccagagtgaaattaacagaagaactccactaagccgacgggtgaggcagacgcggagctccaaactgagacgacataggagtagtcggtgcaagagtaggcgtagccagatattgaggaaaaccctgcatcggcacgaacaagaagtcccaggcacatagaactgctgcggaggaagtggaactgaaaattgctgctcagcgcttgacatcatgttgacagtgccctgagaagaggaggaagtcactggctaccatctgagcttcccattgggattcctcctacacaccacatccttatggtcttgactgcagatagaacacctgccactccactagcactctgcacggcgatgcgcatcaccacaacggaaacacaccag

SEQ ID NO: 36976 - DNA, 303 bp, Zea Mays
accagctattttctgaaaagggaggtatcatgccctatagtacctcccatattgatcgtagtcttggtatagtttctgttaagcaataatttctacagctggccaatttcgctgcaaccatttagttttgtaagggcacatgtttgcttgcttgcttggagaactctagcttcattggtttatagcttgcagtgttagattggaggccatgaaaaacagtatcaatctgaatgccagttcttgtttattgcggcgagttgaaaaagattcatgccaaagtgtattaggttcttaacttgttat

SEQ ID NO: 36977 - DNA, 453 bp, Zea Mays
tcagaagaggagcggattgggtcgcggggtgaagtttatcaaccgcgtctgtagctgtgcgacgtggctggaccgccggtgtcatcgtggagactctggcgacctcggttatgccacgtcgtggcttgttactgtgcgatagtaaccgtggcacacttaggattgcaatctttgaaccgttgcaccggtgaatgccacgactaagccaccagtgctctcccctctctccggccgccagcgcgcgattccaaattcacgagccaccgcccttgggtcctataaattgagcgtgccatcagctccgctaggtagtcacgcatccagcgcacccactcgtacctcagattgtccacctgagagctctaatttgggatttcccccaaatctgtcaagaacaccgcgtgtgtgagctcgtcgtggccagctctccacaggtccgatcatgccttcctc

SEQ ID NO: 36978 - DNA, 344 bp, Zea Mays
catatctacacatatatatacataataaaaatcatgtacttaaaaagcaaaatgacttataaattaaaataggtgagagtacttgattctatttttattgattcatattatggttggtttatcattcatctcccttctctgattcgtggtttcatttgtttgacattattggttcatgagcctagtttagtaggtgtggatttagcaatacatatagcactagtcttattatagaaaagtgcaacattattgaaattgtcacatatcataccctttttaagtgtagctatcgtccaaataatttgggaccaacaacaaacaaccaactaaataatcgataacag

SEQ ID NO: 36979 - DNA, 338 bp, Zea Mays
gttaggtggtcatgtggtgggtggcactagtgtagagttaccagtcgtcgatcttgtcatccttggaaccgttgccaaggaagacgtgggtgcgcggctcgtcgaggtggagaagagctgcagtggatgctgcgggaggggagtgcagcacgatgctcctatgtactaggaacatagccacctcatcaccctcctgcgcttgtgtgcatgtgcctgaccgccacacttcgcctgtgggcagtccttggcccaatggcctgtattgccgcagttgaggcagaagtcgtctcaggtagtcttgtgctcgctgtcggtgtcaccatcagcgcctgtgcgcg

SEQ ID NO: 36980 - DNA, 287 bp, Zea Mays
gaattttcttggctttttgtagtggctaccgtagtacatcaacttgggcacttggcgacatgtccggtgcccagctccatcacatatcaatctgaaattaaacatgtgtctgagttctgaatgaaaaaattcagctaacagctaacactacgcactactaacagacctcaagcataatactgttgatttgatgtccttatatttatcttgaagcattgcattcatgcagtcatgtaaatagtactttatttatcttctgaccaacacactaataaccaacctttgca

SEQ ID NO: 36981 - DNA, 292 bp, Zea Mays
gataaccaaactaactctaactaagactgactagactaagacactgaattaaacattattatagactccgactccatcgatctatggatctaaatctatccgggtcctgcagtttggggtaccatagtcgaagcgaccacggggcagtgaacggtaagggcgctgaatcccaacaggggtgggagaaccaccatcaagatagtggcgtgccgcgcattcagcacacaattcctcaacctctgcccgaaccttgcccaactcatcaagggcgtggtccaactctgtgttgagc

SEQ ID NO: 36982 - DNA, 357 bp, Zea Mays
gtgcagaaggatgatgatgttgccatggaaaatttggagaaaacctgccctaaacctcggctgtcaggctaactgaaaaagcttccaatggtacagtaccaaaatatcaacagaagcagatccccctcgccaccggtgacctcgcgcgtagattcgcgccgatgaggtgattcgtgcccacttaagcctggataacgccgcggggtaaaaagatcgtcactactgttgggctatgtgtactaattcggctagccgccgtgctcctttctgctttgtgacccgtccggataagtcaccggagttggctgcccgtcgaccgaacgccacgtgcctcaacaattaccacgtcgcaatcac

SEQ ID NO: 36983 - DNA, 620 bp, Zea Mays
aagacttcatgccctctcaggaagagatcccactgaggatgaccccaccatcgtctacatggccggatatctccacaccctcgataaccactatgatgacctttcctcccactgcacccacctaaactcccaggtggaaagcttagagcaacaggtcaaggaacttaaaaaggagaaggcgtccctccaagagaatctcgaaatagcagaaggcgaagaggccaacactcgtgaagcctaccgaaccctgaagatggattacgataagaagctaaagaagcttgcccccacgaagaaaatccgaaagaatatcaagagccaaggatgacagactgagcgaaagaaggaagcccctctagcactacctccctccaggatagagaatttgtctgacgtcgagaatatgtccctagctagccttgacgaccttctcaaggaatttggggacactttagaaagggagttcggaagtaccttagaaagcgctcgcgtgtagtgcgacttgtggtaactgtatgcttgtaatgaacttgtgtgatgaataaaataacttggttgaaaaaaattggcatatgcatagtagtaattctctccccctggcagatggcttcggataaaac

SEQ ID NO: 36984 - DNA, 423 bp, Zea Mays
cttgcataaagtacaatgatcatgatgagtaatattttttgtaaagaaaattctgactttgactttaccatgtaataataggtactgggaataatatgcttcaatatccaaactctcaagcacagccatttccaaccacggcagctgttcaaggtggattctcacagggttgccttagtatgcctgttcccttgacagaacagcctctttttgggcatgaaagacagccaattgatccaagtgaccaacctttggaatttaacagtaggaaagctcctgatttggcagtacatataaatgtcaattccaatatcccagctcctcaaacactagcacctaatcatgatgtagctgcaacctctacacattcatggacgccatctgctacagtagggtacctgcctcgagctcctgtgccaccac

SEQ ID NO: 36985 - DNA, 482 bp, Zea Mays
ggagcactaggctcagctatagccgctactagatgcccagtggaggctttgggatcatggacttatcgaggccagagtcgtcgccaccttccaccggaggaaggtgctgccgttgattgagcgttagcttcgcttggacgagatgacatccgaggcttccatggaaagctctcgaattgctttgaccgccctctccacggacgtgctcctcccataggtgaagggggcggtggggaaggtacactacaccgcccccgtcccaatgcgccctgaccaaggctatgtgtctctagtaagtcttcggattctccttctgttctcgcatccctttcttcttcatctcatccttctcctcccttttgcaggggctgcggggctactgaaccacccaacctctagtcccaaaggacgtagccggctggacagcgtgccggttggtcgccgagaagaagaagaaagatgcggacatgaaacgagcccac

SEQ ID NO: 36986 - DNA, 340 bp, Zea Mays
attctacccaagatgcagaaacaaaaagaatgtgtggcaccagtatcaaatagtacttttgctgggtaggattcgattggaaacatacctagtgccacatcctgagcatcctggattgcttcggactccaggtgattcacctttccacggttgtaggcctgaccatggactcctggtgcttgctgtggtgctccttgtcttgctggggcattgactgctggcggttgctgggctgctttatttggacaattcttcgcccagtgattttgttctccacagtagaagcatgcacgacctcctacttgttctagggctgcttggccattctggttggttgcgg

SEQ ID NO: 36987 - DNA, 353 bp, Zea Mays
aaaatgtgaagacgaacggagcgtacaaggagagggaacacactgccgccggtccctgccgttgcgttcggagacgctggagacgacaggccttttggaaggcccttttggaaacaacaggaaactggggtggaggtattcgtacagtatacgccttattggaattggaactttccaggcgtatgtagccttttggaaacgataagaaactggggtggaggtattcgtacagtatacaccttattggaattggaactttctaggcgtatgtaggcgtgggcaggctgagaagcagcctcagtcgtagatgaaatatcgtgcgaaccctattttttcgccgacgtggacgaacg

SEQ ID NO: 36988 - DNA, 420 bp, Zea Mays
cgtcttcgtcgggtgtctagcttggatcagggtgccggtccttctgctcctgttgctgaggaagtgccagtgcctgaattcactgaagctgaccccaatgggtgcgacccgtctgacgctgatcccaatgggtgtgctacccgtgttgttgatgaggatgatgaagaagaggacgaaatccctctgattcggaaaaatagccgttgttacatagttagtggggaaagtagcagtgttccttctcccgccttgtctgcccttattggtctgcaagaattatctctggcgaactttgatcaggctcttgaggacatgattccagaagatctgttattagaaccggcggacggtggcgcgatggatgtatgtgttaatgtgttcgacaccgggttggggtcctcccgggcagcgtcccgcgcc

SEQ ID NO: 36989 - DNA, 922 bp, Zea Mays
ctgctgtgaagggtgagtcgacagggagtcttcgggttgccattctcgtccatcgtgctctacggcggggtgctgggcgggaggtgaaggaccacacctcgacaactcaccaaagagattcgcgctccgccgcaagtccaccggtgactcatccacggtgagtcgattttcctcctgcgcggtatcttggggattagttaggacgtcgcgagagtgtggggtggaagcggaccggggatcagtgcgctgccggtggacggcggtgtcgcttactggctagtcagggccgggcagcgcgctagttgacgtctagagagagaaagagtgccgggaggtcgcgccgccgtagcgtgtgagcgtgaggttaaagaagtgcgggtgtccgtggattagggaatcgacggtcgcgattgggcatgagcgtaccatttcacggagtaatccaagccgctgatcccataacgaccgtattggattagatcctggcagatttgatgttgagcgtcggatcagttttgggcggcgaggattagttgggggatattacttcgcccggacgcgatctggagcattgatccaccatcggacggctgtgaaaaccctgatcgtggatctcaatatcaacggtcagtaatgtttaccgattcatttaatagttaatctaatctgagccctaggtcttagatccagcgacccacaatcagtcatacctcttcgccatgtacatttcttaaagagaccctcagttcttagggaattaacccgtagtcctggcgccagtcattctgggtctttggaagttttacaccagagacccctgcacttcccagaaatataggcccagtccagagatgtttaaaaacagagaaataatattagaaattcatttttaatacaaaaacaattctagaaacttgtttat

SEQ ID NO: 36990 - DNA, 364 bp, Zea Mays
cgtactcctccccggtcctcctggtacggaaagcggatgggccgtggcagttctgcatcgactaccgcaagctcaacagcaagacggtaaaggactcctttcccattccagtagtagacaagttgttggatgaactccgcggtgcgaggttcttcaccaagcttgacctccgcaacagatatcatcaagttcgcatgagtctaggcgacatcagtaagacagccttccgcacacgctgcgggaaattcgagttcctcgtcatgccctttgggttgacgaacgcaccctccacctttcagtccttaatgaatgacgtcctcaaatcctatattcggaagtttgtcctggtattttttgatgacat

SEQ ID NO: 36991 - DNA, 331 bp, Zea Mays
gatgggtgctcgactggcccatggtattgtaacattcttttccatgtgcacgaacatatcttccgatgtgcatgagctggctaggcgtcagcgggagactgacgacaacctccgtcgtcaagcttcttccatgggtatgccatttgctccccgctcgcctgatgtgcctcttcatcctcctcctccagaaatcaatgaatggcaccagcaggcctatggggtgccctttatgtcagctgaagatgaagatgaagatgaatatgaagaatactttgatgatcgtgagcagtttgccccgcctccccaccagggggatctgggtcaatcctct

SEQ ID NO: 36992 - DNA, 425 bp, Zea Mays
gagatggtggccgttcatcagaaaattgacggctacgattagatggggaggtatcctttcggtgatctgatccgaaccgttgggtagatcggatggcccatattggatcacgttccgttaaatactgaccgtagatccaggatctggcggccagtagtgcgtacggttcacttaaatgggctatgtaatctgggcggtcggtagtttatccaacggtcccggtgcagcgatacctcttcgttgtggcaggttagcatatgagtccctgagcttcgtagaaataaacctgcggtccaccgcgtgggtagtctgtgtcttggtttcatttacaccgtagcccctgcgcttttctgtaaatgaggcgcggtccacagattaggaaaaccagggaaataaaattagaaaacagatttttgttattaaat

SEQ ID NO: 36993 - DNA, 338 bp, Zea Mays
agaggagatacttttctgaaccatgccctatcggacggctgaacgtataggtagggcatggagctcagcacaaacttgataaacataaaaaacaggagaaaccagcaccacataggttgcatggactaacatacgtgtctccccagtatgaactctaggtaggctcacagcacaactagatacactgaacctgaccagttcatacaaccccaaatatccaacttggccatttctgcagataaatactaaagcagataagacttcagctgcgaatggcactaacatgtgcaacacctaatattttagaaggggtgaagtcactagatattctgctgtcc

SEQ ID NO: 36994 - DNA, 301 bp, Zea Mays
ctcggcggctacctctaaagcgccagcagtgtcacccatcactcggcagttacctccaaaacatcggcaacatcagatatgactcagcggctacctctaaagcgccagcattgtcacccatcgctcggcagttaactctaaaacgccagcaacatcagacatcgctcgatggttacttctaaaacgccggcaacatcagacatcgctcgacggctacctctaaaacgccagcaacatcagacaccgttcgacggttacttctaaaaacgccggcatcatggaacatatggttgaactgtca

SEQ ID NO: 36995 - DNA, 410 bp, Zea Mays
gaagcaaggattactaggttggctcctgccttcttcccttcctctggttgctctttatatagccaatgaaaagatcatggggggctggatttttaaactggcagcagggataactatgagcaggaagtgtagtcgtggttcacacaggaagatccacgcaggttcacagagcatggtcatgcacggtgaagtttatccagggcaaaagagagggggggtaaggataggagctcactgtagtagatatttctactgatgataattcagagatgtgcataaatctgaatatctttgctctcccatatctctactatcccccataccaaagtaggacacgacaaggaggaaaaagatcacagtcagatatttctgttctttttggatctacagttcttgactgactcactcag

SEQ ID NO: 36996 - DNA, 497 bp, Zea Mays
cagacacatgaggatgctagaacaagactaaggacaacaggatcggacctgaggagagctttcccccggtgagcttggtttcgcggtgttcttcaaccgttttgggggaaatcccaaattgggaagctatgggagatgatcggagctgagagtgggtttactggctacataattccctagcggaacatgctgaggctccaatttataggctgctcaagcgatggtgatcaatttgactgaatcgcattggcgaccggaggggaaaagggctctggcgcttgatacaggtggcctttcaccgtggcaggtgctccggtgatcaccggacatgcaccgcatgattcaccatgacgagagccagcgctaaggcatgtggtgcgcaacggcgacagctcgacggcggtgagagttatccgagcgaccgacgagctgggggggaagtacggcaagcttagccgcaaccgagctcgagtggatcagacgccgagatttttact

SEQ ID NO: 36997 - DNA, 510 bp, Zea Mays
cacgaatagaacaggggcggcccaaggcaaggtgcttggccggatgtaacctttctctgacagctcatcaatctgcttcttaagcttaaccaactctggtccagatactctgtaagctctcttaaagatgggggtggttctaggaagaagctctatagaaaactcaacttttcgctcaggtggcatacctggtaggtcctttggaaacacatctaggaactcagacacaaccttgatgatctctagtggatctgcttcactgctatcaacaaccatctgataacaacttcctttctttggctcaggcaggactaactcggtcaccacttcctctcctagtggggacaccaacttgattatcctcttatcacaactaataactgcccgatacttatctagccaattcatccctaggatgacatctattccctgagtacccattactatgagattagcggggaatgctatcccccttattttcacacttacattcaagcaaatgctatcagc

SEQ ID NO: 36998 - DNA, 345 bp, Zea Mays
tgtttgaaccagcatagatggcgggttagtttgaccattcctcgggggctctttagcaaaagtcatggccgaacgggtatctgcgaattcaggtcgttggatctgaagcccgtggcccagattagattgtctccaacctgaatcggtatccagcatcgaccgcacgatttaacatcgaccgcccagattcgatcacgggttccgcgcgctggatcaccatctaacggtcctggttcatccacttcatcttcctatagccaccgttgatcactagatcaatggattccatgcttcttcctgctcccgactgagaagagctccgccacgatagctcactgatgcccg

SEQ ID NO: 36999 - DNA, 298 bp, Zea Mays
agactctagggcacaatcctaaccccagctaggcctacagactatggatgtcaacccaaatagggttatagatacctcaccgttgaaggcgttatggcgaagtcggttcacggggcgaggcggacacacggtggtggacagaatctggtgataaattcttcacggccctaggcttccctttgatcagtgcttgtcatgtgtgggttccaagtgactcaagcgaccctcccagacctccactcagaggtcagtgccgtgtaggcccgaatcagccatggtcgcaatcctgaaccccctg

SEQ ID NO: 37000 - DNA, 530 bp, Zea Mays
agcttagcgaggacgagagagaagagatcgagaggggcacggtggtgaaagagagaaaggagtggctttgtctatatctctttgttagcttttgtgccctgctgctgctgctgcatcggtgtgtggatgtgccctccttttttttttgaaggccggggggaatgtgtctcatatactcattggatgggcagcctttatcaagcctttgtttgcttgcttgttttaattagttagggcttcgtcctttgagatcgtgagatcgagctgagcactatcctccccctgctacctcctcactccaattgattacggtggttagctcttaacttgcacatatccttccttcgcatgcatgcatgtgtccgtgataactgctatacctagctgtatgtgtagtgcccactactagtagaacgttttgtttcccccttttcagtttccttctttcttcttgggcagacatgatttaggcagtgatataatgggaacacttctcttattcatgcttgcattgcatgcatgtggtcttt

SEQ ID NO: 37001 - DNA, 483 bp, Zea Mays
gtggccagtcctacagatgctggacttcaatcgacagtttgtcgtcaactgcgacgctttgggaatgggttttggcgccgttctccactagcgggtggtcccatggccttctttagccgacccttcaccgctctttgccacaagctggcgacatacgagtatgagctcatcggcctggtctaggctatgcggcacttgctgctttacctctggggttgcctttttctcgtccgtatcgaccactatagccttaagtttctccttgacttgggactgttgaccgttccccagcactagtggatcaacaagttgtttgccttcgatttcgtcgtcaagtaccacccttaatgcctcaacttggcagcagatgccctcttacgctgtgatactgacactaccgggactctgtacaactatacaccctcttggggccctcattccacctactcgacgagatccgtgccacaatcgtggatgaggagg

SEQ ID NO: 37002 - DNA, 336 bp, Zea Mays
ctcaggggctgggttgccctcatcaccaccctcgggggataggtcctccttagcggcaacctccaaagctgaagctccctcggccatgcccagaggagccgggcgactctgatcagtggcttgagggccagcgtgtcctcgcaagctagaccgccctccaaggtcgacgaagcacgagagaatgtctaggttgccccttgcccaataggatcgcatgacaaaggaacatcgtctgggacctctgaatggatgatggaactgtcaacctcagggggctccgataaaaggttctcagggatgatctcttctaatgcatggtcaaaatcagacatcgac

SEQ ID NO: 37003 - DNA, 544 bp, Zea Mays
atgaacatagagtaaggaaatgggtagctaggagttcccttttgttgtgtaaagaatagcttgcccccaatctcaatacccctcccggccccaaacaaggcgtagacatccgcccccatcaagccccgcgccacttcgttgccccgacattgtcccgctggagaggaaggacgacgaagaagtagcttgccccgccgacggataggaactgctattgctcaaccgtgcgggcctcgaccaacgtatgatcgactcatcattcggctatgatttatactcagttagctaggagccatttttaaattgtataccatgtactgttttgattgattcttatcatttaaggctcatgtggcaccaattgcgggagtacaaatgggcacctaatgcgcccaaatgcggcctgtgtttgactacaaactaatggagacccagctaatagaccttaaatgtttagaactcttggttagctcactaaggattgatattccgccttggcatgttgctatgttagtctcaagttactaaccccattgattatcac

SEQ ID NO: 37004 - DNA, 383 bp, Zea Mays
gtgggtggggtagttctgctcgtgtggcttgagtaaacgggatgcataggcgataactttctcattttgcatcaagacacaccctaagccttgccttgaagcatcacataagatgacgaaatcctggtgtatatctggtagtgacaaaacgggcgcggttataagcttttccttgatgatctggaaactttcctcacattttggagtccatacaaacttattgtcctttttgagaagttcggtcataggtttcgctatgctggagaatcctttgataaagcggcggtaatacccagccattcccagaaagcttcgtacttcactgacgttggatggttgtttccattttgaaacggcttccaccttggatgggtccacctcta

SEQ ID NO: 37005 - DNA, 361 bp, Zea Mays
gatgagtttggggcactatattgccctgtcgccgtacccacttgcccggcgacgtggtcgcacggtaatcaccgaggctgccgccgttttccccagtgtcccgcgccttaggtggtttactacatcgctttgcgccgtggaggttaaccagtaatagccatacgcctatgttcagtgaatgccacggtagaacgccgcggtgactcagtccctcttctcggccgccagcgcatcttctcaaaattgggcgccaccactgatgaactctataaattaatgccccagtgagccctgttaggtggttacgcgtccagtgcaccagccctcgcctccgattagccaccgtagctcgggaatttcg

SEQ ID NO: 37006 - DNA, 332 bp, Zea Mays
taaaggctactggtttaagtgtagcatgtctctactgaacatgtgattatgtagtgcagagaaatgttggaaagagactgcaaataactcaatgcactcgctatgttagcttcataagtggaaattgattatacttaaatcttggcactgtagtgctcatgtgttgtttagcaacttttgtttactgtttacatgctattcaaatggcaattttatcctaactgatagatctactaaggcacagtcccctttaatgttctaagctctgtgagtccatctaattacatgtgtgtacatgcacctgccaccttcgatccctttcaaagattatt

SEQ ID NO: 37007 - DNA, 425 bp, Zea Mays
caggaattagccctcgtgccgaggtcaatcatgcattgcacgattgataaccagaggagaagtggtgctgcgattgcggggttctagtcgtgttgattggaagccggatcgtctgtgtgacatctccaccaaatcgatagttatcttcacctgacggaagatcgggcacccccattcctattaagtggtattcaaagactcaggtattaccgtcaggcttaacctagtttagtttaggttttttcatcctataactccagataattgccatacataaaaaaattccactgtccgataaccctgtttagccttgcaatttcgtttcagattgctttgttgaatttgtgtccgtgttcgagtcttgttgctggtttaggtcgtgtcgtaatcgtagttcaaccgctccgtcgttgttatttttttcc

SEQ ID NO: 37008 - DNA, 344 bp, Zea Mays
accatatgaaggaggatcaccatattcgggaggagcacaaaataggggaagaaatagaggaggagcaccataacatgaagaagtgccatatgggtatcgaggagggtatggataagtgagtggtggaagggagctttggtggtaggagcttcaataggaggatgaaaatcgtcggtggtaggatcatcattgggaggagaatgggcatctatgaaaggtgggtagagaaacataggaggatatggataaggaaacaagggtcgtcgagtgtggagatcgacgaagggcagaaacactctcctgacaattatgtacgagagaaagattgttggagaagacctccc

SEQ ID NO: 37009 - DNA, 468 bp, Zea Mays
cttccttatccttacattgcaaggacaataattcagtggcaggctattcgcatcatgatctctgatctgatacacaaagatttgggctcaggcatcccaaagaacaatgccaaggacctgtgatccgatcaagcaaccatagcaatataccatcaccactgggtcaggcaagcccatattataacggtaagcgtcacacgtaagtgatccaaacaggcaatcatacaaccatcttttaagaacagtcgaacagtggaaagaaaatcgcctcaccaggggcgaagggcccagtgtggccctgtattgctcgagcaataccttagtatagcccaagaaagtaccagtagtaaaaaaatcctatccctaacgtagtaatgctttcagccttcacaaacaagttcgtctccggccagccttccaggatcgccccctgcttttgcccgcactcccacagcccaccactttgtg

SEQ ID NO: 37010 - DNA, 327 bp, Zea Mays
gttaacattagacaagccaattccttcaaaaaaatgtcatacaaggcaaggcatttctggtggcacttgatgcgcgtcctcattttaagcatcgcggctagaatataaccatatttctgcttgctcatcgatgtgtgtaattcaaagggaaagtcctacaatggttggacattcctttcttgaatattgtgtttctaggtttgttgcatgcacatatccctgctattcatattctcatagctctagcctttgccactccccatgcgtcctcatgtgaagccactcgtctgtccctatcgcgaccgtgtgaaggcggacagatcttca

SEQ ID NO: 37011 - DNA, 380 bp, Zea Mays
cgaagcctgtcagaaattttccccatgctcgggacaaccctcgcagttcacgaagctgatcgcccacacgtggccccttcagcgctggggcctagacattatcgggcccctgcccacggctcaggggaacctcaagttcaccttcgtcgccgttgaatacttcaccaaatggattgaagcgagggcagtatccactatcacatcgaagacagcccagaaattcttctggcaaaatattgtttgccgcttcggagtaccgtccgaactcacggtcgacaatggcaagcagttcgacaaccaagatttcaaagatttctgcttctccatcggcaccaagcttgccttcgcctctgtgtaccacccccagtccaacggagttg

SEQ ID NO: 37012 - DNA, 373 bp, Zea Mays
caacaacatgagagtagcctccaaagtccatcatgctaccacttgtttagtactgaatcttctctgcatagtctggactggctgcacgcatgataacctttcaggaccagatgttaaaatgcattcaagtagtccagtagtcgtcctttcttcagagcaaagccaggcatggaccaggaccacacatgcagatgggcatccagcctgcaatcagctccccaacgtgcagccacacgctgtcagttccagttcgtctttctacatagacatagtactagcaacctttttttgtaggacccagacgaacgatagatggaccagcctatgcacgcaggttcttcctcctctctcctccaaagtgattccagctcca

SEQ ID NO: 37013 - DNA, 322 bp, Zea Mays
aagcaactcaaattgaacttacatatccaaaagagctaagaagtgcaaattgatgtcaaattgaagaccaataagatcattataggatttggcatatttagatcacttttgccaccacttcgtttactttcgcaaaacaaattcattttcctttctctatgtcaaaaacacttgttttggcaaatcaaaatatcgtataagactagttttgatcaaataccaaaaactcccccttttcccatagtcaaaatttctcctcataagagagcaatttttgcaatgaagtattcttactaaaaacttttgagaaattcacaagtgg

SEQ ID NO: 37014 - DNA, 393 bp, Zea Mays
ttgaaatatgtcccaagcagctcgtcgctagtagcttcaatacatttcaaccagtcatcatttggttcatcaaacttctctctaaatctgaaggtatatttcactcgaaccagaccaccttcactggattcggtagtagtctccttcggcatatcccagctctccacaagtggccacaccctataggctatatgctcttggactatatctcttgtgccaatgaaggcacaaacattgctaaaagccttttggcaagcttcaacatcactctcgatagccaccttcgtccttcggaggctgaagcgagaccagatggggcgctggataatttccttgatgtcttcccttttaatcagatcatttttaacataaaaccattcctccatccaggcc

SEQ ID NO: 37015 - DNA, 394 bp, Zea Mays
cacggagattggcaaccactacacccgacccatcatgttgaagctcgcgctcgcggaataagaaggggagcacaagatggttgtcatgtgcgctagggtcctcgccaccgcacccccagccgtcgtatcttgagagggagcgaggccggctggccaccagaggcctcctttttgctccacctcacccgccacctcctgacctagcctttattccttcattccattggcttgcctggtgtatctactacctctgtttcttcttctattcctcatcgtcgcttccctcccccgttgggtgtcttcctgctcccttcagttctcgcctcctaaaaacagacaagacccgaccgtaggtcctaaaggtaaacgcaactccttagtatccacctgctcc

SEQ ID NO: 37016 - DNA, 310 bp, Zea Mays
cgggaggctggttggctgtctataccaccgctgcccagaccgctgggacaactgaggatgtgatgattgcgtacttgcccatcgtccttgggcaagatgcattgcaatggctacgacacctaccccgacactgcatcgacgattggagcgacttcagtcggtgttttatcgccaacttccaatccctctccgacaagccagcgcagccatgagacctcaaatccatcaggcaccgaggggatgagactcctcggtcgtacctcaaaaggtttcagaccatgagaaatcgtattcctgaggttgctaaagc

SEQ ID NO: 37017 - DNA, 307 bp, Zea Mays
ccgcatctttaacttgccctttaatctcttgatatatctgttaccacagttaaattgattagggcataagcgttgaaaaagcaagagtgaaaacgaagccagaaataagtaactgatgttttaccaactctcggaagcaagtaagaccaacttctttaagtggggtaagtgacctccttgatatgaagtaccggtcaaggtaatgaaagaaacgcgagagccaacgaaccatgactttatggtttgaccacctttgcactagctccctcagcataaactcatcatgtttctcccttagcgaaggtag

SEQ ID NO: 37018 - DNA, 276 bp, Zea Mays
ggccggcaggacggccctggtactttgtgttgtcttttgtgagatagagagtcgaggctgggtcgggagcacgagcaggcgtccgagcccatcgtagacaagacgtttgtcaaatcatagttgcttaaaacagtgctcgacatggcggaagagtgtggtgatctggtcctggcgtcatccgagatggcggagagtagattggacaccggtcttgttgttcctattgccatcctatcctcagcgaggttggcggtagagcacgcgacatcgcgcttt

SEQ ID NO: 37019 - DNA, 679 bp, Zea Mays
acggagtgcagccaattgtggatcagccatggcctcagctcgtagaatgtcgaagatctcgaatgttgggcagatatgttgtggatggctgccgcctcttcaccccgataagatagcacgtcagcagtgtcgttaagcttgtcgggcttgtattccacctccaagtcatagccgaacagcttgctgacccatgtatgttggagaatggtggatagccgctgatcaaggaggaactttaggctgtagtagtccgtgcgtacagtgagctgtcggcccccaaatgtaccgacgccaatggcgcaccgccttcactagactgatcaattctcgctaataggccgatagcttttggtgaagtagagccactggcctgctgaagtaagcaatggcattgtccccttggtgcagcagcatgccaaagcctatgcccgagacatcgcagtcgatgacgaagcacttgttgaagtcgggcatttgcaatagtggtgcagttatcatggcctgcttgagctgcaggaatgtcgcattcgcttcatccatccatttgaaggcgttaggggggcacccaccaagccataccccgcgatgaacttgcggtagtacccggtgagcctcagaaaccaccacatcgtccgtaggaagagcggtagtggccatatctccacagactccaccttag

SEQ ID NO: 37020 - DNA, 673 bp, Zea Mays
cacagatgtatcatgcatgcatatgcttgtcacttcagtagataaaaaaaaagattaaaagagggaccactcatcgtagggtttcacaaatatcatgttgtaagcgagaaggagcaggcaaaacagttgccacccccgggatctccgtctcgggccacagtcgacatgggtgggcagaagtcagccttggtggatgcgcgaagttcgtgtcgcctcgctgtacatgctggttcaaggccacggagaagccccaccatcacttactttcggcaaaggaggaaggacagtcagccaagacagctgctagacacgtccccgcctcccccttcgggtgcaaaagagttcatcgataagctgaccagaccagcaggtgggattctgagggcgccagtcagaaggtcgcgacaaggcaaagctacagccactgaggtggtgccccgacgtagcagaagggtcgtcggagtaggagtggagcgactgccacctcctccaccggccaagcagcgcaagaagcgtattttgaaggagcttggtattgtgaatgctggagaaactgagactatcaggccagaagatcttgatgagtatgccagagttttcagaaaaggcctttcagaggtgcagatcacggccatggcagcgctattcggctggtctaggcctaaggagctgc

SEQ ID NO: 37021 - DNA, 341 bp, Zea Mays
gaggccaccaaccgcgtcatcgccatgtaccttcgctgcttcaccagcgaccgaccccggcagtggcttcgatggctcccctaggtggagtacacttacaacaccgcctaccaatcttcactccacgcgacgccgttcagggtggtgtactgtcgtgaccctccgtccatccgctcctacgaacccggcgacacacgggtggcagcagtggcgcaagagatggaagaacgacccgccttcctcgataatgtccgttatcgactacaacaagcccaggagtcccagaaacgtgcctacgaccagcgtcatcgtaaggtggtctaccaagtgggcgactgggc

SEQ ID NO: 37022 - DNA, 390 bp, Zea Mays
ggcgactgaagctgaaggctgttggattggttgttggttgcgtacatactctggaatgtatggagagtgatatgaagcagtatagagaacctgctttggctgattatgtcttgcctcaacattggcaagttccttctgcttttgaattgtaacttggcaggttcttgttatgtgccctttattttctccacagaataagcagaatagtcttctttcttgattgttgtatcttccttcgaagcttcttcctccccttcctcctcttggagctagcggtctgaaggaactctgttgagttaccgttgactgggagtgactttgttgtccttgaatattgttgtttttgtcttcactttggccttggttgtggattgttctggcgtgccttgg

SEQ ID NO: 37023 - DNA, 738 bp, Zea Mays
gttgagtcctacctaggtcagttgttgatcgagaacttgtatgccttggaaaatggaagctttattgataatgaaaccctctgcttacaaagtacaactcgccctcaagagttttgaggcactgctgggggtagaatcttctgaggtgctcaattttccatgaattccccacttcggtgccgtccatctgagtgggctggtaggatctcggtcgtgtgacctctgtgatgatgaacgacccttcccacggtggtgatagtttgtgtcgtccctcccccgtcagcactcggtggaggaccaagtcttccactgcgaaggatcgatgtcgcaccgctttgtcgtggtagagcctcagggtctgctggtatctggccgactgaattaccacatttagtcgttcctcctccagtacattgatgtcctctagcctggttgcttttgcttcggctatgctttcgaatgttaatctgggcgttccaaagatcagatctactggtagtactgcctccgatccataaaccatgaagaatggggtgtttccgtgtaaagctcagctcggctgggttcgcaggctccagactaaatatggttgttccctgatccatttccctacaagattctcgcttttgtcaaacaccttccttctgagtgtgtcgagtatcatcccgttggctctttccatctgcccattagctcttgagtgtgccactgatgcatacttgatctggatgctcctct

SEQ ID NO: 37024 - DNA, 355 bp, Zea Mays
caggacttcactgatgaaataaacgggatgctgtactgggtatgcatgtccttccgctgcccgctcgactactaacgcggtgctcaccacatgagtcgtgcaggagatgtataacaacagatcttctgtcggctggtctagcatggctcggcgtggcggctttagcactggcgatgtagtcaagaacttattcagtgcatcaagagcttcctgagcctctaaggtccactggaacttgtccaacttcttgagcaatttatagaatggtaggcctttttctcctaaccttgatatgaacctgcttaaagctgccatgcatccagtaagcctctgcactttcttttgtgatcatggt

SEQ ID NO: 37025 - DNA, 401 bp, Zea Mays
gtaattcccgggttcgcgctccttcccaacccgctacccgaggtcggaccggcggcagatgtggatggcggcgctctctctccgactacacttggttcgtcgcggcggagttatttgtgatgttctggtctcggtgtaaaaaggtagtgtgagatggtgtggcgagcgtggcccaggaatctttctccccccattatctagttgcgagggaaacgaccggtgcaggattgccggcacaaaccgtggcggtgggtgcggtcggttccgttgaggagagaagctgatagagtcgacccatgcgtcagtgacttagcgccaggcgcggggagaacactcggccactgacgaccagaccccgcaacatagaaccagctcgcgcgtgcagcgtctgttgacccggg

SEQ ID NO: 37026 - DNA, 385 bp, Zea Mays
tcatgcaaaagtcgcctaagggtgcagccggactagcacaacaagtgcgaaaaatcgaagtcttcctcaaaaagactatccgtgcaaaagtcgcctaagggtgcagccggactagcacaacaagtgcgaaaaatcgaagtcttcctcaaaaagactatccgtgcaaaagtcgcctaagggtgcagccggactaagcacaacaagtgcgaaaaatcgaagtcttcctcaaaagactacccgtgctaaaccctacaccaaactgttcgcgcaaagaccgactacaggcgcgccggacagacataataaacacactagaccaagtgtgcaacgccttcatgagcatagccggatgcgtgaaggcgcacagcctcatcatacaagctac

SEQ ID NO: 37027 - DNA, 447 bp, Zea Mays
aagaagaagtaccttcagaaggcaaagatcaaggagcgtgccttcctcgcctccctcagcgacctcgaccacgactccgacgatgttatatctttgttgagcgacgaggagactgagaggctggtcgaggacaagctgaacgggctgtgcttcatcgccgacaccgcaggaggcttctgtaccatggcacttggtgaggacgtggtcggcaccagcgacgacaaagacatcggcaacgacactacttctgaggtactaccttccgtcgatgatcttgccactgagatagaagagttgaacgctgctttggctagtcaggataagttgcttaggcaggctgctcgtgagaggagagagtttagatccaagtacgagagcacgcttagggaacttgagtctgctagagcttcagttgaggtgtccgacgagactgaatgtgatgagtgc

SEQ ID NO: 37028 - DNA, 421 bp, Zea Mays
ggagtatgaggcggtatagtcgagaggagagggcataccttttgaggcggagtgcggaacggtgctcggtgtgttttttcctcggaggggacatggtcatttattgcgacgagacgttctgcctgccaaccgaccgttcgtggcacgtgtgctcgtgggatccgaaacgactgtcgtccggctgcttttcaaatcgcaccttggtggctctgtccgtcctataaagctgaccgagagggagggcttcagaccattacctttgcagtctcaatcctttgccttcaaacaccgttttcaccttttgccaagagagctcttcgtcttcttttcacccctcggtttgttttgatggcagaaaagatcaccgtccttcctccccgcgactcatggtctatgtcttccatcaccgatgcggatctgg

SEQ ID NO: 37029 - DNA, 493 bp, Zea Mays
tgaatcttcaggcccaagggttcaccattgtgaaggcttaacttttctgaagtagagagtggtgtagtggtaggcttgcaatttatcataccaactcgactaagaacatctgaggtatactttctctgcgagaggtgaataccattatctacattctgcacttctattccaagaaaataatgtaatgggccaaggtcttttagtgcaaaatcagttttcagatccttgagcaaagctgagacaacatcctgagatgaacttgcttcaattatgtcatcgacatatacaagcaagaagatggtgatacctttcttgatgtaaaagaatagagaggtgtctcctttggatgcttgaaaacctagctgcaatagtttgtcactgagtctagaataccaggctctaggtgcctgcttcagaccataaatgaccttgtcaagcttgcaaatgtgtgtggctgcagcttgtcttcgtaacctggtggttgcttcatata

SEQ ID NO: 37030 - DNA, 624 bp, Zea Mays
ctggggcctctatttctcataagcacagggttgaatccgcaaacaaaaggagccgactagaattatttttgaatcagcatggatggcaggttagttttaccataccccgggggctcttatgcgaagttgccacgccgaaggggtatgcatgcgctccagccgtccgatcatggaccaaaggctcagattagatcgggactccactgaacggttatgcaaccaccactgatggataaagatccaacgacacagatttcattctgccctaactaaccacaaccacccgatcgagatccaacagtcgcgggcgaaacattacctagatctaattcgacgcgttcatcggaagatcaacgaccaccgccatcccacatccgatcggtacgccgatcccatccagatcgctcatcatgagatcgacggctaccaatacctctccctcctcactgtgacccgagctcgacggagctacagccccccatggcggcgcactacgcagtccggcaggagatttcaccgacgtaggccccaccaattccccgacgcacacaacctgaccctgtgaggtccatcccaagtaaacaaccaaggaaaacatggaggatgaccacagacatggaattg

SEQ ID NO: 37031 - DNA, 335 bp, Zea Mays
caggacgcaacctgcgacaaattttacaaccgccttccacattctctcttttctataaataccgctctagtcgtcgcaaaacctcctgtcttcccccagatccagatcgtttccccagattgcaggcgtgaagggcagcgcttaccaggtacgcagacatccctcctcttgtttcaaatcgccaaaccgcctccgatttcccgagacccagatcacacgagcatgccccttcggttaccagcgacgcaggtaagccttctcttctcccttttccttccggtggcgtgtagcagccctttcccccaacgaagccctcccacggacgcctgtctcga

SEQ ID NO: 37032 - DNA, 289 bp, Zea Mays
ttgaaactattgaacaggatactgaacaaggaccttcagatgccaccctgatcttggaaaaagaaggcgcatccaagaaggttaaatctcctactcccgaagcgtttactgaggagctagactttatcatacgacatgctttgggtaaacagttgttggaagagcagattgccgaagctaagcactatgtcatggaattaaagtacccaaaaggatccttggtgtataatggcactgatgaagatgactttctgtactgccttctggacaacaaggagttatctatttg

SEQ ID NO: 37033 - DNA, 363 bp, Zea Mays
cgacgatggccagcctcgtcgttgattgtgtcgatggccagcctcgtcgttgattgagcatcgcggccaagtctgttgtgaccgggattcttcaacacgttccacctcgaggtatggatccaaatgctagcagcagcatctctcaactacttccgcgtgatgcgatggtgctgggtacgtagatgtgcttccgctctctgctgcatgccgttgtaggccatcctattgcctctcacgccctgaaaccgggtctccggctaaccacctagcttgcggacaaactctcgccgacgaaggttcaccgtgccgcgtggacagcttcgccttgcctcctaaccttcggtaatgccccttggatcaatt

SEQ ID NO: 37034 - DNA, 535 bp, Zea Mays
gatgcttagccatgttctccatccatatcatcagcgatatatatacaagtgcagccacaataaggatgaaaatatcttcttcagatattcttggagcacactaaactgctactgcttgactgagttcacaacatcactccttcatttctcccagtttcaaaccacaacagggaatcaaccttaatgaactttgttcaccaactaaccctctaacaattttccgttgggaccttagtcttgtacctcttggatcagacacaaaacagctccaaattccaaggaaaaacactaaaccaaaccaacagtgaactgaatcagcacaacactgatcccttgcagacctccctgttcaaaccttggtttctcacaattccatatgtcaactggtcaatcttccttaaccaaaactattcttcacttatagcccttcctacttggtataacactccatggcttaaaatgctcagaacaagagtggtggtgcactggagttgagcaacaacactggaaatccaatttcaaagtctgaaatagc

SEQ ID NO: 37035 - DNA, 400 bp, Zea Mays
taaccaactagtaaatgtgtcgcgtgaccgactctagatggtgtgcgagaagacacaagtagttatcctggttcgggcaacacaaggtcctacttccaacagagggggatgaagcttatattactcacaccgtggtgcctgtagtaggggtttataagcacaacgggagaggggaagtccccaagcccctaaagatgattgaggcaaatgccaatatctaagacaatgtggaggagtgagtgttcattggcgtgtgtgtcgatgtccctccctagagggatcactgcctatttatacacgaaggggagtgtccgtagtgatgtcgagtgctgtattcgaaggagggacgccctgacgtatacaagccgacgtgacgacgaactgtgttgttgattcgcgc

SEQ ID NO: 37036 - DNA, 392 bp, Zea Mays
cttatgcactaagcaaatagaaattttacagcataacagtatacttacaacaaggacacgtatgattatgcaagggttcctatacttcaacactactttacttctaccttgcccttgaatgtgtgtggatgggagtgggatggtatgtcatggcaagaggggggcacatccttatataggcacctaggagctatggatgagtgacacctcaccatgcatatgtcatctaccactttaatggggggacacttcaccatgcatgtgtcacctccacctttcatggggggacacttcaccatgcatgtgtcatttaccactttaatgggggaacacttcaccatgcatgtgtcacatccaccttacatgggggacacttcaccatgacacatcac

SEQ ID NO: 37037 - DNA, 443 bp, Zea Mays
aattgagctcgaaagaggacatagtgcaaatctatatggaccaagtaaaaaggtaagctttggacacttagtcaactgttatgtgtactaatcatatttgtctaagtgccagggactttatgaagtcaagtcaaaaggagcaaaagagaacaagaaagaaaaaggaaaaagtgtgttggactgcgtagcaccggaaagtctggtgcacggtccggccaactgcctactctcgggaattctagcctgcgtcggctataattcaccggaccgtccgtgcagagcgccaggcagtccggtgtgccagccaccaatagctagctgccacgttgggtgagggccaacggtcaagtggtgcaccagacagttcggtgcccccatatcaggaaactagccaatcatgtgattctttgcccacacactgttcactatctggtgtgcaccgg

SEQ ID NO: 37038 - DNA, 372 bp, Zea Mays
ttcgggattttgcatataggaaggatacgaaggctcctgtgcatggatatcgtacaaaatggccgactgactggaccaacgagtggttttacatgaaagctgatagcaagggtagggagaaggttaagaatatagtgatgagccctatgaagttaagcttcggtataacaaggcctctgtgttttatgaaaataggctccccgtcccaaatggctggagtccatttcagagttgtcgctgaacacattagtactcgggacctggtacaagaatatcttgccaataggggttttccaacattgagtggataggggatgccgaagttcaagggcaaagcgaacaaatttgaacttgtaagattgccataccgat

SEQ ID NO: 37039 - DNA, 411 bp, Zea Mays
cttaaaaatgctatgaacaatgtcttccggtatgccgagaaaagggagtgcttcagacatctgatacaaaactacataaagcagtttggtgggtctgagtacatgtatccagccgctagagcttataggagagaggtcttcgaccactattttagcagcatccaagaaatccctaaggtcagcagttggctaaatgagcatcatgacagtctctggtaccgaagtggcttcaatacggacatcaagtgcgactacgtaaccaacaacattgctgaggttttcaacaattggattaaggattggaaggatctgcatgtatgtgatttgactgacaggataagggaggaaattatggagatgtttcacaggaggaggattgcacaaaagttgcaaggacagattttaccgtcg

SEQ ID NO: 37040 - DNA, 427 bp, Zea Mays
gtcgaaggcgctggtacaggaaaagctgcgggactggaacatgaagctgggcccattagggatcaattgcttggagatgactggtgacggtgaattttgcaacactaaagccatccatgatgctgatttaatactcaccactcctgaggtccatgtcactacttactttgacctgtagaagttaagattagcctgctaacccacttcttgctttctcactggaattgtaatacatgcagaagttcgattctatgagtcgacatggtataaaaagtggtagattgggtttcttctgtgacattgctcttgtccttattgatgaagttcaccttctaaatgatccacgtggagctgcgttagaagcagttgtcagtaggataaaaatgctatcgcgacatgataacatgaaatcttttcctctggctaa

SEQ ID NO: 37041 - DNA, 390 bp, Zea Mays
ctggggaccgtcggatcggtggcctgtgttgaggatgagtggatgtcgatgcgtgctgggaggcgtggatccggtattggacggctccgattagaagtagaaaaactattcgggctcgtacgtctgggtcgtcgatcggggatcgaatggctgaggttaactcgcgatgtgggtggttttggtgcgcagatgccggatctgacggtcagggctgcgcgcggggttggcgtgcgccaaatctaatctgtgctcttagattttaatcgaacgacccgtgttctgtgataccccttcaccgtgccacaattgctaaagagcccctctgttatttattaaccaacccgccatccattggtgctgtgcgctgtgtcttagaattattaccccgag

SEQ ID NO: 37042 - DNA, 311 bp, Zea Mays
ctttgttttaaaccatagagtcagttcaagcctcatttttcctttgcacgaaatatgattctgaagggatatatagatgtgcatgttgctaaaaaggtggaaggtaacataaaataacagtatgcttgctgattggagagaagggattcattttgttcacagaataattgtttggcttctataattcctctggtgtcttaaactaggttaatgtattgtattgttgtagggttataggaggctgagtcactgtgagagcaactccatcatggccccaacttgagccctcatagctaaatataggtgcccag

SEQ ID NO: 37043 - DNA, 282 bp, Zea Mays
gacacgtgtcagcaccagacccctactcacgccagggtcctcctcgttccgggaccttgctgaggtttggaccttactcaaaggctccggacttatacgtataggggtccggtgtccttctgtggaggtccggaccccacgatacatactgggatgtgttgtcttttcttgccatgtggtgccctttggccggtccatgcggtggggtcaggcgctgcctctgcgtggcctggagacgtcacatgggtgctgcgtcttcatgctgtagaagagggtacccct

SEQ ID NO: 37044 - DNA, 1004 bp, Zea Mays
tttacccccttaccgtgccacacggtaccacttgagtgaatatggggggaggaatccacagaacccaaaagagctcttcaaccttagacattcatcactaagggtgacaatagagagggccttcggtgctttgaagaacagattaaaaatattatacaataaacctttccatccatacaagacacaagtaaagctagtcctagcctattgtatcctccacaactagattcttcgtcatgggaatgatgaacatgttccactagaagacacatgggctgcaaatcaacttcatgagggagctcccactgaccttgtcatggacaatgctgcctggtctgctaccagggacaattgggctcaacagatgtggcaaaatagtgcctcacataggggatagtgcctcattatgtactgtgctaagttgctcatagatctgtaagaactggttccatgctgagaacattgtctattagcaatgatgaactatctacagttttgaactcactttctttgtgtgatgtgccaagttgctaatgatgacattacttacatcctgataccattgttgactagcaatgatgattactgctactcctacttctactttcctatgctgagattactgctacttctactttcctatgttaacattactgctacttctactttcctatgctgacattactgctacttctactttcctatgttgacattactgctacttctacttctattgtaagtaatggataacatggtctctgaggttgctacttctacttctacttcttcccctaattttttgcttgttccagctatggctgacatggtctctgaggttgctagccagggggctaggcctgctcttaggtggagtgccgcaatgtctgggtttgttctacgccattttgttgacttgataggtactggggtttagactaacaagggttttaaggaaatccaccttaactctgttgctaaaaatgtctctgagttctgtggccaag

SEQ ID NO: 37045 - DNA, 293 bp, Zea Mays
ggcgcacgatcgttaagcagctaacgccggtgaggatcatcccggccagccgcagtccaagtgggtacgacgagctcaccgtcgaccgggtccgagccaatctgagcgctaagatctttactcccctcagttatccacttgcgctgggcatgaatcgcggcggctggtgcgaatctgggcgcaagatcaccggtggcgaggggcgatgaacctggggatctttttcagttactgtacaatgagacccttactcagagcgcttgaccgagcacatttggggacaatttattcca

SEQ ID NO: 37046 - DNA, 328 bp, Zea Mays
ctcgatacagataagctgggtatgccctgtctttcaatgactgaatattcttgaagacaaaatcagcaaccacaacttcagcagtcagacccctctctttcagcaatccaacctcagctaacaatgcacctgcttcagctacctcctgatctgtgggagactcggtccaacttggggtgcgaacatccggatgtcttcccgaccgggaggggagagaattcccgtaattctcaactatgaaccactccaagcgccatcccttgatactgtctttgagagggatctcgagatattcagtcttcctcctacggcgcatctccaagctggc

SEQ ID NO: 37047 - DNA, 470 bp, Zea Mays
taagtatatgggagcataaaatgccatccttgtcaaacttgccacatacacaagtgaactcttccattccatatgttaggttagccataacaaggtacctccttattttatgtggcttttcttcttggtttgattttggatacacctcaaaagtatgcagattagatgttctgttgtaacttagccttggtgttgattgcaactggaactggaatttcttgaatatgtttctattgtagacttcttgtgcttgcctctctattgtgtatccaaacattagttcctttggacgtttacgattgctttcattatcctcatactcctctgacacattcacttgctccacaatcctttggtactcacgcaaaaagctaatcacactataagtcgaagtcacattgtctttaaaccttgagtttgtcccctcgcttctacctgtgctttgcaagaatgggaagaagtcatttttg

SEQ ID NO: 37048 - DNA, 648 bp, Zea Mays
gcttcagcgacagaaattccttcttcttaatctttatcataccagcgggaatatggtagttcctgaactgcgtactgaactccgcccaagtaatagtatccgcagcatcatgggcagcagtataagaatcccaccagtcagcagcagggccaatcagacgtccagaagcatataaaaccttctccctgtcagtgcattgtgcaataatcagcatcttctcaattgctttcagccaatcatccgcatcaagtggatctggtgagcttgcaaatgtgggtggcttatggctcatgaactccctatgcttgtctcggggtggaactggtggtggtggaggtggaggcagtggtacttgttgctgttgttgttgcagctgctgttgttgcgccctcctttcctggcgcatttcatctcgctcctggcgtaactcctgtcgtatatcttctctttcctgccgcatctcctggcgttcttgctgcatctgagcacgcatatcagccattgtgtctgccatctgctgcatcaccgccatctgagcagcaaccaatgggtcaactccgcctggtggaggattgggaggattcatccctgcaggttgtggctgaggttgtcttcgagtgtgttggttaggaggcaagtcaattccac

SEQ ID NO: 37049 - DNA, 513 bp, Zea Mays
ccggcatgccaatgatggcattgaaagggaggttaacctccgcgacgtcgaactggacgttctcagtgcggaagttgtcctcagtcccgaatgttactgggagtgcgatgctcccaaggggatacaccggttgagggcccactccggagaatgggcgagagggtcccagtcgggatcctgggatctgcagctgcttgaacgcagcgtgactgatgacgttgagcccagctccaccatcaaataggacatggtgtagcctcatgttggcgatgacaggggcggtgatgagtggtagtatgccggcccctgccatgttttcggggcagtcggatgccccgaaggagatagtggtgctccgccaccgttgatgtggggctgccttcaggaccactggggtcgccgaaagaacctagcgacacagggacttcacgttcctacgggaggtgagctcccagcttctgccatacataacgtacagcttcttgcggcggtcattgtcatcaccggagtcgg

SEQ ID NO: 37050 - DNA, 467 bp, Zea Mays
ccggatgctgtactggatatgcgtgcccttcctctgcccgctcgactactaacgtggtgctcaccacgtgagtcgtgcaggagatgtacaacagcagatcttctgccggctgatctggcatggctcggtgtggcggttttagcactgtggcatggtcaagaacttctttagtgcatcgagagcttcctgtgcttctgtggtccactagaacttgtccaccttcttgagcaatttgtagaatggtaagcctttttctcctagccttgatatgaacctgcttaaagctaccatgcatccagtaagcctttacactttattctgtgatcatggtgcttccattctcatgatagcctcgattttctccaggttagcttcaattcctcaatggctgataatgaatccgagcaacttccctgctggtactccaaagacacatttttctggattgagcttccaccggtatcgcc

SEQ ID NO: 37051 - DNA, 605 bp, Zea Mays
tgtgaagaatgcctttcttcagggaactctgtctgagacagtgtactatgttcagtcgtccggatttgaagaccctgcacacgccgacctcgtttgtcgtctgaacaagtccctctacggattgaagcaggctcctcgcgcatggttcagtcggttttccacatacttgctcacccttggatttgttgaggccaagtctgacacatcactctttgtcttccggagtggatctgacgctgcctatttgctgctatatgttgatgacatcgtcctcaccgcttcctcgcctgcccttctgtgtcggatcatttcagccctacaacaggagttctccatgaaggatctcgatgtgctacatcacatctttggtttgcatgttcatccctcaggcgatggtcttctctcttagaagcaatacatggtggaactacttgatcgcgcaggaatgtcaaagtgcaagccttgtctcactccggatgatacaaatccaaaggttgcttcaaccgatggtgcgccagtaactgacgcttcggatttccgcagtcttgctgctttgcagtggttgacattcactcagtccgatattggctatgttgtttgttgga

SEQ ID NO: 37052 - DNA, 952 bp, Zea Mays
atgagattaaatcaagtccttctgaaccagtacaggcccacagccgtaagatcctaatcctacggtcacgattttatgaaatgagatccaacaggatccgtctgttaacagatcagtggtccagatcggatttccgagccgccatctaccgcatctatctttggcccacgatcgagatcccacggtcaatatcgccccacctttcatcacggatccgatggctcacgagcttcttctccccccggccgacccacaggcggggcgcgcttgtgaacacagtggtggctcgtcggacttcacaaatccgtgccccgcgaacacagctcaaatcctaagcactctatacgcacagggaattcatgtgaatccaacagttcccatcttaccttcaatcgtgcagccatgccccccgacatcgacgtccagcggtctaagtccggcgagatctactccctgcgacaccgatcgtccctggcctccaaaaccgatgtccacgcatccagcgccccggtgagatcctccgagcgataagacgagaccatgtggcatcataagtgggtagcggcgcacagattttctctcccacattctctcctactccatggatgttctcggttattgcagctcccaggtcgagccccagagatgaggaggaggaacaatgccccggttatataagcactaggaggcgggccccgatacgcaacaaccgcgcgagttacacgcagcgcagagtccgttgcgaggtcgccggcgcaagcgtcgcaacggccgcccgaggatgggggaagatccgacaggtaggtctctgcgcgattctagagggaaacacgacgccatgctttataggggaagggcgagtccgtgcagagggaaattcatcggcgaggaagggaagaccccgagatctccggcgacggccatggcggcaatcattctcaccctcacagtt

SEQ ID NO: 37053 - DNA, 331 bp, Zea Mays
gccataacaacggaaattgttgtggtattgttcttttccaatagcctttgtctcataagtcaattcatgtaagttgcagaaacattttgcattcggctcttgtccttgactcctcagggtccaaatataaacccctatcttgatgatggctttaggggtaagctgatgaaggtagactttgaaggttttcagcacttcgaccagcatactatccaaagggaaccgaagccccgctttcataaaacttctatagacaactacctcgtcagctatgggcagagggacattactctcccctccagccagcacaatagaaatgtcacgaaaatac

SEQ ID NO: 37054 - DNA, 372 bp, Zea Mays
ccggggcagaaccagaaatttttcccagactcagggagcgcctgggatggactgcgggtttattcctgaaatccccaggatctcttacgaaaatatgccagggcgaaagggtatcgtctaaatctggtcgttgggtcttgcgcggatggtgcggattagatcgaactgccagcgaagcggtacgcgttcctggccacaggatccaagatctactgtcacaggttcatcgcatcccaattccacctagtcgtccgaccgtgaaccgaccgccgagataaactccgcgaaggggtacgtgctcattctaatctccaccctcgctcacggatccgacggctgacataggctcccatccctattcccctcaacggc

SEQ ID NO: 37055 - DNA, 328 bp, Zea Mays
cgttgtctctccatcgttggcaacttggtccgcaatctcattggcaccacgagatcgactagcaattccattggctggcacgttctggcagttgtgttattagtctatactaactctatacacatcgcagccaatccggacatagaccataacaaaaatgattaagagattcatatacgtcgttagcataccggcccataaataaaaccgacaaaggcgtaggcttaaactagagcgcatgattagctcggggcatgcgcactcactggcaaaaccttagagggttgtatgcaaccagacaagcagaatgatccatggacccgatgcc

SEQ ID NO: 37056 - DNA, 286 bp, Zea Mays
gaatattcttgaatacgaaatcagcgaccacaacttcagcagtcaaacctctgtctttcaacaagcagacctcaacaagcaacacttttgcctctgttacctccgaaggggtcggagattctacccagcttggagtacagacatctggctgcctccccgaccgagggggaagggatttgtagtgattctccacgatgaaccactcgaggtgccaccccttgatgctatccttcagagggatgtcgaggtactctgttttcctcccgcgacacagttctagactggc

SEQ ID NO: 37057 - DNA, 373 bp, Zea Mays
gcgggctacggtggctaatcgggggcgaggagcggtgctctgggttcataacaagctaacggagtaggcgggggcatcaatttatagtgtccagaagcggtggcaccgaatttggggaagataagttggcggccggagcaaggtgagtcaccagagtccgcttaacgtggcattcactgggcaaaggcttacggtcgtcactggttatcctccacaacccgcgacgacgtggtgaaatggcgtaaggcgtgtcgtgaccgaagtaaacggtgagaacgacagcgatggtcgcgcggccatgttgtcggtcaagtgggtatgacgattgagcagtaacagtgcacaagctcatcccccgcgcaagatctttacc

SEQ ID NO: 37058 - DNA, 510 bp, Zea Mays
gaggtctcccaaagccgagaggcagagctctacgcttgctggaccgtagcacactctaggaggccccagatttcaccgtggatacgacgaccctcggtggtagatggctctggcatggagcgaagcaagattgcggcgccaacgaggttttggctagccctgtgaaaggacgggggtgtctcggttctggcattctccatgatccgacagtggatgtcgcgtgccttggcgtgtgcaccttcgtcaagagccttgcctgctgcctcttgttctagaatcaactaaagttgttacaaccattgttgctcttccctgagcttggtgtgcaacttgcggagttgctcgaggtgggccatgtgactcctcggaggggtctgaacgccaccgggctctcctgcctccccgtgtgtgggggtgagacgttatcttcctgaggcatgccgagctagttcccttcatcacgctcctcgtgatctgcacggaagcactctcgagttgggtcgtaacccc

SEQ ID NO: 37059 - DNA, 390 bp, Zea Mays
ggaccagttaatacttgtgaaatagattagaccctatccacatgttttaacctagttcaccctacactaaataaagaatgacagaccaacccataaagtcatgatggattgcataatctgtctattcccaacaaacatcaaacaaacttttgacctacatcatgtattctatctcatacatatctatcttaaccacacttcccaactctgatgatatacactaacctcgaatcaatgagaccaagaccggagaaggaaaagatcaaccacgtcaaggaaggagagaagtcaaactcgatcttcaagatgcattaccacccaacaaggagtcctttctcaccgttaactttcttaccccaggatattcttgccctaacttatctatctttt

SEQ ID NO: 37060 - DNA, 456 bp, Zea Mays
accaatgacaccaacaatacctactgacccattattcaccacacgaacacagttacacgccgcacactagtttctaacatgattctcacataactcgtaattcaactactcactaacaataaatcacgcacgataactaccacatcaaccgatttatttatttggaacaccgcctgcctagcgtaccactagtaccccacattttgattcaagctcaataatacatcctttattcgattatacaacaacgacctaagcgtcgtgttacccaatgcgtatatcttccctcgtcgcgagtataaccatattacggcatatacccgcacacctcaatcaaatatcttacgccactatcactataatacaccatgtcacacacacacacatacgtgtactaatttaatcctcacataacctgtatttccaaacttactcatcatataaatttccatcgat

SEQ ID NO: 37061 - DNA, 582 bp, Zea Mays
ttaatcctagccgcacaatccgagatggacgatgaagacaccatccccaaccctatgacctacgcgcgcaatggcgccgcccacccacacggcggcgaccatggccggcgatggccaggccacgattccgggacgcaagcttcgatctaacgcgcgccatgcgatgagtggacaaaggcgaaatggtcggatgtaggcttacccgagatggcgacggtgcgggcactggtacgacgtggtgtatcccatggcggaagttcttactacggtgagcaattacggccaccgcagacccaattcatgcatgccaaggtggtgtacatcaccgccacaccaaggcggttgtcccgcggcgtccaattgccttcaaacggtggtggaaaggcagtccgacgatggcggtcgccagctgcgggtgtggtgctcggtggggaacttggtggatgcgattgtgggtgagagagggtcgcgtagggataggaggttcgtatgtagcacccggtcgtgcggattcagcgacatggtccaatccttccggaaaaggggcggcgagatctctggcggcagctttgtcacacatcc

SEQ ID NO: 37062 - DNA, 561 bp, Zea Mays
aaagcaggctgttttaatcggtagcagtacttatctgttattagcaaatttaatttcgtccgtctccttttttttttttgggtaagactctatggtcatggtcgtaaataggggtagttcggagggggttaagatgatagtcggagcctttttcgatctctccttatccttccttggtttggaaatttgcattagcgccctctaaattgtagctctaattgcattagcacccacggctacaccactgaacaaaatgttggggcaaccttaacacagtactacataaaattcacaaaacagcctcaagcgttcatcttaatttgatgctagcttccaatgcattgcaaagctccgtagtagttcatgtaaaagctgggggatctgggactctgatgtggcagtaggtggtatcgattttatttttatttttatatttttgctgtgagtttaataatataataatactataagctaacgctagtagtatagtttggctttaaacctgtggtacttggcatgattgattgcttcaaaaagttcgccttgtctgctctccgcgcc

SEQ ID NO: 37063 - DNA, 391 bp, Zea Mays
cttgcttgaccatgttaaatcttcggtgcctgggtattgtatttgaccttgatgagacattgattgtcgccaatacatcacggtcttttgaggacagaattgacgcacttcaaagaaagctgagtaatgagactgatccacaacgtaggaatggtatgctatcagagatcaagaggtaccaggatgataagtccatcctaaagcaatatatagaaggtgatcaggtctatgatgatggaaaagtgtataaagcacaacctgagattgttccaccattgtctgataaccagcaaccaatgacacgtccagttataagattacaagataaaaacattatcctgacaagaataaatcctctggtatgtactaaattgcttgaacttggtttggg

SEQ ID NO: 37064 - DNA, 313 bp, Zea Mays
ggtgggggtggaggcagtggtgcttgctgatgttgctgttgcgcccttctctcctggcgtatctcctctcgctcttggcgcatctcctggcatatatgctctcgctcttggcacatctcctggtgttcctgtcgcatcagcgcgtgcatatccgccatggtgtctgccatctgttgcattatccgcatctaggctgcaactacgggatcagctccagttggtggaggctgtggaggatccatctcaggttgttgttgttgtggttgtctaaatatccttcgagtgtgttgattgggaggtagatcaattccac

SEQ ID NO: 37065 - DNA, 439 bp, Zea Mays
gataaaaaaagctaacaaagctgattaaccaatcaatacatatgtgcacggaataggcagccctttcaaagagattacgtactatatattgtgacgaaggaaattattataatggcacggcgtttggagtctgacgagaggagcatcatcacatgtgatgcatgcatgcatgaatggatggatatagctctaaagccaagggaacgcatatcggcttttcctctctttggcttgacgaccacgcgagggcgaggcaagccagcgagcgaaccacctctagctaggctctaactctagcctgcctagccgcgcgctcgatcgagcagcgtaacggcgtctgcatgcccgttccgtccgaccccgctaattaacggccgcgcgccgacggtatccgttcttctcctctgtcctgtgactctgtgagctgtgactgtcccgc

SEQ ID NO: 37066 - DNA, 419 bp, Zea Mays
tgcgtggatggagagggcgagatgcttaccgatgtcgaccaaatgtgctcgcttgaggcttcggataccgaagaggggttggtgccgcccgattcggtcgcaaggttctgggggagcaaggcgtcagagcgtggttgggaactcagggtgcttcactgatggaataatggaaccagaattcgaggagatgcgagggtaatggttccgtgattttaggcacacgattgtttacttttcaacggtgttgtggttttaggcgcatgggtgtgttgctatggtttggttgaatcgtgtccgggtgggaggccaacacgtgaggcatggggtcggtatattggaagcccaatagttacagaaagccctagctgcccctggaccgtggcaacaaccaggcgcatgcggtcgggtgcccaaccccc

SEQ ID NO: 37067 - DNA, 418 bp, Zea Mays
gctgggttcgcctcttcgattcacggtgagtagggtcctacgcaataccctattgttactgcttcttcctgccgcgtccggattagagtttaggggcggaaatcacgtgtagctcggactccggcgatggtccaccatgctttcccctgccagtgccgccgtggcttggtcgggaggtaggagagggtttgcgagccgttgatccagccctatgcggtggatatttgacgatagcagcgactctgccggttggatccgcgaccgtcgatgcgggatcgtgcgcctaggattggagtcggtcaccaaaaatataagccgtagatctttcatccaatgggtgtgttcccgtaccgattcggcttgtggcgcgactaatctggagcgtcctgggtggatcagacggttgatctacttccgt

SEQ ID NO: 37068 - DNA, 1221 bp, Zea Mays
acgcccgtgggcgactttgcgcggagtgtctttttaatgagagacttcgattaacgcacttgttgtgctatttcggctgcacccttaggcgacttttgcgcggagtgtcttttaaacaaaagactttgattaacgcgcttgttgtgctattgcggctacacccttaggcgaattttgcgcggagtgtcttttaaacaaaagacttcgattaacgcacttgttgtgctattccggctgcacccttaggcaacttttgcgcggagtgtcttttaaataaaagacttcgattaacacacttgttgtgcgattccggctgcacccttttgcgacttttgcacggagtgtcttttaaataaaagacttcgattaacgcacttgttgtgctattccggctgcacccttaggtgacttttgcacggagtgtcgcacgcgagggtagtttacgctgcccctcgtggtgacttcggagtggtcgaatgccgaagaccgttgatgcagtcttttttcgacatgctgtatctgagtttttgttttttgcgggggcttttgcaggtatattacatgactccgcctcgttaaaaacctcaccccccgggaggaaaagagtgcgagccgagaatagtattgtctggtggattacaagggcgcataggccctgaggtttaaacaaaaaatttgcgtagattgtcgatgttccaggagtgctctaagtcttcgccggtgggcgttgatagcctgtacgcgctgggggatgccttcgacttgacgatgaatggaccctcccatttcggctccagcttaccccgtgactctgtccgggtggtccggacgagtacgaggtctcctgtgttgaactctcttgggacgaccgcgttgtcgcgccaggccttggtttgagcttggtatttgttgagggcctgcagggcgaagacgcggtctccgtcgatgaggtctttagacgttggttcgtcgacgtcggggattgctgatgtgtttgttcggggcgacccatgctttatttcctgcggcgtcatggcctccgatccatgtaacagacgaaaaggtgtgaatccggttgcccgacattcggtcgtgtttagggccccagactacttcaggtagttggtcggcccatttgcccttcttgtcgtcaagaagtcttttcttgatagcggtgaaaatcttgccgttggcgcgctcgacgacgccgttggattgcgg

SEQ ID NO: 37069 - DNA, 362 bp, Zea Mays
tgcgtgtccaagcactcgtgcaacttctgccaaaaccaagtgaaatgggatcctcggtctgacacaatcttcgtgggcactccgagtagacaaactatccgagccatatacaactctgctagcttggcctccgtgtaattagtcctcacaggaatgaagtgagacacttttgttagtctgtccacaatcacccaaatagagtcataccctgcagaagtgcggggtagaccgacaatgaagttcataccaattgcttcccacttccactcaggtaccttcagcgggtgaagtaatctagctagtctctgacgttcagcttttaccctctgccaaacaccacacactgccacatgtgaagccac

SEQ ID NO: 37070 - DNA, 288 bp, Zea Mays
tcatcacacccattgattcaccgagggaagtctagcgccaattcgacctccacgttcggtgagccctcgattctttaccctcgtcgtattcccttacctagctaatgtcgcgtcgtcgttaatcgtgggcgaattgggcacgaatttggcctttgtgcggggaatgtcgttcgggcaccgcccgtatcatggtcgggggtgttcaactgtgtggaggtcggcaaaatcattacccatgtgttcgtccttgggctagctccgtgttgcgccaactcccttcaaggttga

SEQ ID NO: 37071 - DNA, 303 bp, Zea Mays
cgctggtcatggcgccaccgtgagatcggtgcactgtggcactatcttagataggtatcgggacatagaagatcatcactgaccatcgaattctggattgagggtgtgggttagactcgagtaccgattcggggtggatccacctcagtcgttggattgcgatccaatggatctgtgtgcgtaccgtttcggctgaagcttgatataattcgggtcaccggatcaagatcgcacgctaggatagactcataccccttctgccgcgacattttcctgatttgacccaagaaaactagataatat

SEQ ID NO: 37072 - DNA, 403 bp, Zea Mays
tcttggagctcaccatggtcttatatctacttacgcattggagatgcttgttctatacatattccatatatttaacaactctttcatcgaacctcttggaagtgacagacatcactcgatgttggcctcttggatatgcttgttctatgcacaatatggcgagctatggagttcaggtagtgctccgacagatctagcaggcaatcgtaggaagttagtagataagatgactgaattttcatgtgtgaagggctacatcctgtttcgttcagatttcctttgtgtcgcttaggaatcgtttgtttgctagattgccattggtgggcaaaatgtaacaggaataagcccgaacactgggtataatactccagatcaccattgtttgtttttgtcattgataaat

SEQ ID NO: 37073 - DNA, 658 bp, Zea Mays
ccactgccagcatatgagcctgcatttgattgggagaatgagaggtctttgatatttggccaaagggtgccagaaagtataccagcaataagcaacaggttgcttcagcccacagactaaaccaatgcatccatcatttctctctccccaccccttcttctggtgatcaatggttattaattaatcccgttttaaattgttttgtactaattacagtggcttgaagataactatcaaggtactatctttgtcattccaagctggattagttggtgagcaaaactagaatattttgtgattgcttcttaacttctttactgtaatttatctcatttacactcaactgcacaatcttgactttctgttttcatgatctatcatgtgcgtttagaacctttcagtggaacgatttccttgtataacagagatagaagagaaaaactgtcagaagacttctactttcacatacttccaacagatatgcaggatgtaagctctcagcgccagttgctttcttcttcttgttttatatctgcatatatagaatattgtagcatgttaacaatgttaagtttacactaatcaaatttctattcttactgatcatttaacttcctctgggcttaacaggctcagggttctttggatcgtcgaggca

SEQ ID NO: 37074 - DNA, 373 bp, Zea Mays
gtcttgatttttatggatgatatattggtgtatagcccttcactggagacacatgttgttcatctacaacaagtttttcaagtattagaaacacatcagttgtatgcaaaaaggagcaaatgtgcttttgctctcactcaaatagaatacttggggcatattatttcagacaaaggtgtgtcaactgacccttctaagacagaatcaatgagaaggtggcctactccaaagtcacacacggaacttagaggatttttgggactcacaggctattacaggaagtttgtcaaggggtatgggatactggcaaaacctctgacggtactgctgcaacaaaaacagtttggatggccaccatcagcacaaactgcct

SEQ ID NO: 37075 - DNA, 537 bp, Zea Mays
aaaaaacttgcaggaaaatggattagagagctgccatacgtggtctggagcctgagaactcaacccagtcgagctctgcatggaaataccccgtttttcatggtttatgggtcagaggcagtgctgcccgccgacctaatcttcgaggcaccaaggttaactttcgaaagcatagctgaagcagaagcgaccagactagaagatattgatgtgctggaggaagagtgattgaacatagtaattcagtcggctaggtaccagcagaccttgaggcgctaccatgacaaagctgtgcagcaccgatcctttgtagtgggagacttggtccttcaccgaattctaacgggggaagggcggcacaagctatcaccactatgggaaggaccgttcatcatatcagaagtcactcgaccaggatcataccggctaactcagatggacggcacaaaagtggggaactcatggaacatagaacacctcagaaaattctatccttagcaaggcctcaaaattcttgaaggaacattgtactctgta

SEQ ID NO: 37076 - DNA, 421 bp, Zea Mays
ctgcagttgtagtggaggaagggaagaaagcagagacgggaaaggctgcaacccgatttatatgcgctccgaaccaagaaatctacgcgagatgtggatctgtaccggattgtagtgcattgcgcgtggtttgtaggagcatgcaggtgcggctgaggaagatgactagtgggtcccaccagcaagtgagatctttcctccagcccaagcccgcgcacaagaaagtggagatcgacagtaggggcccacgcgccagcgtctaaccggctgactgctggagtggcccacggcagggagtgtcggcccatggggctacgtcggtggagacggagtattgggccaaaatgtggagcagcgacccaattggcttctttttcttttcttttcttttcttatttctattttcttttatattctattt

SEQ ID NO: 37077 - DNA, 814 bp, Zea Mays
cgcgaacagtcacgacgcctccgtgattcgtgttcactggcggttggataactacggcggggaggggataggatcgcgtcgtggatattttcgggtcgccgtggcctcgcggtattccgaccacgtgcatcgacaacgtggccgtgcggccgtcgccggagtttgcgtcctccgccgcgattgtgccacgcttccggtcagtgaccacgtcgccgtaaaccataatcattccccagtgactgttgaggcttctcatcccgtgaactgccacgaatcaccatgccggtgactcacttcctctgaccgccaccgcgctccacccaaattcccggccaccgctatcgtcccctataaaattgaagccaccgtgagctccgcaaggtcatcacgcacccagccaccatgaatcagcctcaatcattcactgagagccgcgaatctggagttctccccaaattgttttccgccgccgtgaaacccacccccccccaccgtggccagaccactctggtaaggttccgcgcctctcaagtattgttttagcatctgtgtaggcatgtaaagctcaccgtagcatccgtttgcccaatccgggcctgtataattgggaacatgggatcgacgccgcggttctcgccgtggacgtggacaggccattcgcagggtgctcttgtcaaattaatgcgtgttccgaggtcgtcctaggtcagtgaagcctccccgatggttaatccgggcagtcgtcgctggccatggccggtacagacctcgtcggtgatgggcggggagcgcgccgtggccaggggtactcgtg

SEQ ID NO: 37078 - DNA, 836 bp, Zea Mays
ggaggatgatgggttccctagagctgtcgcctcccctaccgtgcatgcgacagactgccttggcttaggttctgatcgcccagggccctcctttgggtttggctgagcccaacacttggagccagggattgacccatgatatctctttccacttttcctattagtgccttctcactgaattaccgctcaagtggagatacatcggggggtagaagagctcatgttggtatttcctccagccttatgatgagtcgtcaaaacaccataactgaaaagtggttttgttatgttctatcgaagagaggtgggtgaggtactttagagagtcgatgcaatagtggaggtagaaccctgatgttggggctaaggcgtatcgtcattgttccatgggcgtcgatgatatggcaagggacacaatctcctagtagtaacatttgtatagatcgtgcgagtctattgaagctaggtacctggagtccatcgaagttgttgtgatggtggtggatggtattgatgtcattgcatactgtagattatggttgtcttgatgtagaagacaatgtagttgtctcgcctcttgctacgcagcccgtgcctcccttcccaccgtggagtgtcgaggatgacatgtgttgcaatttaaggctactagaagagctttgatctcatatgtcttcgcgtcaacgtgaagagggatgtcaaagcaggtaccacagtaggtgattgtcatcggtaccaatgaagtccaaagatattgatgttggtgcgacgttcgacgttgcccgccagtcgtgcgaaggttgtgttgatgatgttatgcgtggcgtctattaagt

SEQ ID NO: 37079 - DNA, 524 bp, Zea Mays
ggagttaagacgtaaaagttatgggttaaacaagttttaggttatttttaatatttattttgcacttaaataagactccaggggtattattgcaattcccagggacctatctgtaacttgtttcaaactgtgcggggatggcgggtttattttaagggaaggcggggtctcttttgcaaagtggcggccgaggggtacagccaagccccaaccgcccgatcaagtttcaagggtcgagattagaagccgaaggggtacacgatttccgctgatgggttcgtgaccaatggctcggattcaatttacacgagatcaaaccctaggcgttggatactcgatcaacggtccacggtgattgcttccccagatctaatcccatccactcaatctaaatcggacgatgatcgcatcatcttctctctcacgcgctccagccattcttccctctctcatctcacgcggtgcctgctccagcggagcccatccacccgacgacgcaggcgggccatcgcccagctttgttg

SEQ ID NO: 37080 - DNA, 663 bp, Zea Mays
atgtgttctttcatcaggggtctcccccatctctgaggctttgtcccgagagacgggttgagccgggtcctattctctggcttcatggtgtcatcgcacgttttggcgtctgtttctccgtcgtcctacgtcgcgctggggaggttcttcccctagcacgttgggttcgtcgtcagagatgggcaatgactccagtctcccctaaatgaagaggatgtcggggaagaaaggagtaggtgcagcggtgtgcttcttcccatcctcctttgagggcggaggtatcgggtgatcgtctgttgcgcttttccgccctggctcagaatattcatctctttaagccgggtgatccgtgtccactccttagtgggtgaggtggacaacagagttcgttgggttggggaggccgtggttgactggccttctaccctctgggaagtcccgagcctggcctcgtgcgggaccatgtcccgtcgcgctattagcaggggcacagttcgtggtttcacagcagctccctttggcgctcccgaggaggatttcttctcgagtggagtagctatgcggtgcagagttccctctacgtccgctacgcaggagatggccctgaagcaaaaggctgctcataggttgaaggtgatcttgctcttgaaaatgatggccatg

SEQ ID NO: 37081 - DNA, 1540 bp, Zea Mays
atttgcaaagactccattgcagccagtattgcctctactggaatcagtgccaagcgagtttcatgctacagtgccgtatcttctcagttttgtcatgggtacaactcctcttagctcttctttgaaactatgaaacactcaagaatataggtcatctttatcctggtcttcttttcacccctttcccctataagaaaacatagtcttaaatgttcacgcggaatttcttcttaaatatacttgatgtcaaattcgattgttgctccacattttcttggtagagaaatcgttaccttttttcaactcattttagtattattatccctttgttatacactaaaaaggatagttccttttccttgacaatacttttgctgctgttttaatctctaataatctccacttatacactaacaaaattctcttatctctttttcgcattattatgtatttcatttcttttcatgccacccctgctaggtcagttctgtttcttcatcaactaaacaaagagcagagaattcagaacaattcaaaaattaaaggcacataaatgcagatagtatagtatagtatagacagtatggaatcaacgaaaaatgttgtcatttataaaaatactcaaactttttgatgaaccacaatatgcatggaacgtactagggaaatcacttgaaactttgaagacgttcaaatagaactcttggatttttagggtatccaacatcttccttccacaaaaaatcttatacataatagcatctatattttaatgtattatatatatttttttgtacttagtggcaaaagagaggcatgtttcattggtaggaaatatattagagctgtaaccatgtagaaataaaaaataacttatatatatatatatatgttcttacttcagaagatatgtttcaacaggtgacccactgaagatggctgcagttagcattgaaaacaacctatctcctccagaaactctgcagaaattgtcagacagtctcacatcaatgcttcctttgctttcagtatgtcatccattgttcccgcttttccttcccagttacatacaagtttcaatacttttgaaaccataaacctaacgctcataagtattgtcgcaccagtcttcttccttttccttaaacacgcaagagagttgcatacgtttctactaactcagttgttctataatctaagacccaattaacaaaaaaaaggtgttaggaacattgcttttagaaatgctccatttttttgtaaaagatggaataaacatgtctttcttttaacttattattttaaagattatgtcctttctccttgcatgatgaaatcgatcagctacaaatgtggctgcataatggaattccttgttcattttgggaagcatttcgtctcatcattttttgacatcatgttttttcccccttatctcaggaactgtctgatattataccaagggatactcttctatggaagctcaaacttctcaaggcaggagcagcctatgcaaattctcgtctccatgccgtgcaag

SEQ ID NO: 37082 - DNA, 804 bp, Zea Mays
ccggtgtcctagatcctacagccgcgcactgcgtaccacgcaaactccacctcggttcctggtaaggcgcttttcctatcaaattatccatttgttccgcactcctttgcgctgggttttagggttgggtggtgcagatgggcgcagcgccggtgaggtcgtcaccgttgctgtgggtgcaccgccctgattggacactggtggtagaagatgatctctggaccgtaggatcaaaatccagcgatcaggggcgtaccgagtcgtgggggtatctgagtcgtagatctaagtggctacggttcagatcaatgagggggaaacatttcactattttaaatctaggccatcgatttgagatccgatgacgcgaattagtgcgtggtgtgggtaatatgggggccatagatctatgatccatgggccacggtcgctcgttgtctcatttaagcgctgatgtaatccaaaccataggatctgatctgaacgaccctcatcagcggatacccctttgggtttgggtttttcacatatgagcccctggttcttgtcgaaataaaccctcagtcccttggagttcaatgaacatagcgcataggtccagattttcacagaaaagaccccgacttttttaataataggagccgcagaccacaatttatgttattttgctaaaataatttggaaaataatttccagtataaaatcaattcgataaaccttagaaaatcataacttattcattctaacttctttttgatccattccagttgtattaaattcatattaatattgtttatcccctgg

SEQ ID NO: 37083 - DNA, 610 bp, Zea Mays
attctgcaaatttccatttttgtacatctgtgcgaggcctttctcgggattctcccccacttcggtctctggaaatatctttatcattatcggcccaggatggttgggggacaacaccagcttgttggcggcgcaagtctggagcttcgtcgggggaggaaagcagagtatcttgacattcctctcaaggacaacatcaaggggtggcaccttgagtggtttattgtggagaaccactgcaaatctctccccctcggtcagggaggcggccagatgttcgcacacctagctggatagtctccaacctctttgtagatagcagaggccaatgtgctgcttgccgagatctgctcgctaaaggatgggggtctaactgctgaagctgtagttactgacttcgtattcaagaacattcaacccttaaaggacagggcttaccccgcttacttgtatggcgatgtcaacgattctacccgggtcacgaacagaagaattcccactgaagatctgctgagtcgactagacatgatcctgaggggcagggtttcaaatgctggtgctgatgtggcctattctgcatgggacctgccaccacttaggccattctctg

SEQ ID NO: 37084 - DNA, 551 bp, Zea Mays
caccatgggaagggccattcatcgttgcagaggctacctagccaggatcttaccggctcactcaaatggatggcaccgaaatgggaaattcgtggaatattgagcacctcaggaaattctatccataataatgcctcaaagctcttgggggtgagtcgtactttgtaagcagaagatttcattatcaataaaccttccatgttccaaggcatacgagttcttgatcaacaactgacctaggtcggtctcaacttgaaatcggcgcggcactcttacacgacttagggtgatcactataccctactaatggagcaatcgacttaagtcagaaacgccttaagtcggtgcgacatgatcacgatcacacgactcagggtgatcactataccctactaacggagcaatcggcttaagtcggaaacaccttaagtcggtgcgacatgctcacgcttacacgactcaaggtgatcactataccctactaacggagtaatcggcttaggtcggaaatgccttaagtcggtgcgacatgctcacgcttacaggactca

SEQ ID NO: 37085 - DNA, 597 bp, Zea Mays
ttcgagggtttagaatttcaccatgttgaaagggatcgcaatgcagcagcagatgcattgtcaaaattggggtccagtcaggcccaggttccatctgggattttcgtccaagaggtacagcgaccgagcgtcaccatagagcaggctgaggagtgcaacaccttagaacaagcagaagcagatcccaatgactggagggagccaattatcaagtacataaaaaatgaggaagaaccggatgacaaggccatgacagagcgcatcgcaaggcagtcggcccagtataccatcatagggggtctgttgtatagaagaggtgcaagaggagtcctcatgaagtgtgttcattcggctacaggaaggcaactactagacgaaatccatgcagtgtggtgtacatgcagcatcaaggacactggccaacaacaaagaatgatgcagcagaattggttctgaagtgcgaagcatgccaatttctatcaaagcaacaacacttgcccgcccaacatttgcaaattattcttgtaacctggccctttgcgtgctgggggctggacatgattgggccatttaaaaagctcaagggggatataccca

SEQ ID NO: 37086 - DNA, 274 bp, Zea Mays
gtcgtgtgcgggaagaacatgagtcacacatgggaataattgtggtgccataggagaaggattgcagcgtgcctccctactatgcgttttggtggaatctggcactctaatgctaactttaacagcccaaattggtagcataatagcccacctctaaccccagttgagcaagtccgcaacaaccacagcaatcagtctggtcatccccctcatagtcggacgtttaattgtgattaaggtatgacttagttgaacgactaggtttctggtcgag

SEQ ID NO: 37087 - DNA, 539 bp, Zea Mays
tgttgcttcgggtctctggcacgtcccacgttgcctacctgcttctctagtctctacgtagacgacataattctcaatgtatcctcgacacagctgctgcagctcttcaccctacgtctccacaccaagttcgccatgacgaccctaggagctccttcacttcctcgacaactctataactatcatgcactccattgacgacatcttcctctccaagcggcaatatgcagttgacttcctgcaccgtgcaagcatggccgaatgtcactctccaactcttattaacactcacatcaaactctcttacaccgacagtgtgtctattgctgatccgaccaagtatgggagcctcgccagcgcgttgcagtatcttacactcgctcatcccgacttgatgtatgctatccaacatgcgtctctttatgcatgatccccatgactccatgaacctcatctcgtgttgatcaagcgtatcagttgtgttaagagtaccgtttagggtttggggtttactctgtgtatttaccttctcacccctg

SEQ ID NO: 37088 - DNA, 483 bp, Zea Mays
cagggttccacaaagctgttgtgaatgtgaatacttcaaggagtggagctttctaaggtttacaactgatcaccaaagccttggtcttttattgaatgttcccttgagtaggaacaggtcagcacaatctacacttgcttgctattcctcacgagacttgcaccagctgcaaatttgatgataaactagatagtaagccaaggaaatggaaagacgtgtaaaacaacagagttgcataaggattactggctcttccatggatccctgaatgacctgttgtctgatgactctcgcaggtaataggtctttggtgccttggtggctcggtgcaagtcacaaactcacaatgctgtcaacacattcctttaaacttttgaacgtggacgtattcgtgacaactggtgtctgttttgttatttaaatttgtgtagcctgctcatccttacaggttgtaacttcatgtcgctgggatacagttttttt

SEQ ID NO: 37089 - DNA, 323 bp, Zea Mays
ggggattatctgggcactgacgtggtggccccgctcgtcagtcgtgcgcgcacccgattcgttcactgaagctgcgcgatggcaattgggccccgaccttcaaccttctatgctgggagaactcacgcgcccgtgccactagattgtggggccaacatgtcaggtccgtcctcaaccaccaggccaaactccgcagacgccatcgcgatcctcgcgtccgtgagcgttgacccggacctcatcgccacacgcatataaaaggaccggaccgcaaccttctctcctttcgcaaccactcacccacaatcgcctgcgctgggtcc

SEQ ID NO: 37090 - DNA, 310 bp, Zea Mays
ggggaatcgggatgaagatgggttctgaccgttgattgggtgatcagcagctaagaatagatggggtaatgcgatccgtagatccgctggcggacggttaagatttgtgtacggataatgattcgatctggactgttgctctcgatcctgtggccgggatcagataccggttcgcgggtgtgtgggagccgtcgatcttgatctgatggctgccgtctcataccgctttaataaaagcccgatctaatctccgccgctgatgagggatccaacgactcacgtgtgccgacaccccttcggcctgtgcatt

SEQ ID NO: 37091 - DNA, 337 bp, Zea Mays
gaaaaggagagaggagccaactgaaacatataataggctcaaggccctggagaacaagattcgaagctatgaaagaacaagatggatggatcacgacgtcgtatacctcatgttaagatcatttactgtaattgatctccatcttgtcaatcttatttgtgaaaatcctaggtataccaaaatgttgtccaaggaaatccttggtaagtttgtaagtgggcgcatgatggtaaaagaagtaaggtacgtcgacgacatcgccaacaaacctcttcctctctacgagtcgcaacccttaacactcaaagcaacgaccagcaaggagacgctcccaaac

SEQ ID NO: 37092 - DNA, 338 bp, Zea Mays
gtggtcaccttgagttaagtaagcgtgagcatgtcacaccgtcttaagtcattgctgacttaagccgattgctccgtttgttgggtatagtggtcaccctgagttaagtaaacgcgcagaaaacaattcgagtgcctttgagaatgaagtcattttattgatggtgtatctcccaattacagaatacaatgtcgtcccaatagcttttgaaatctagctaggggtaaaacttcctgagatgctctatattccacaagttccctatttccgtgccatccatttgagtaaggtgatatgatccgggccgggtgacttctgttactatgaatggtccttcc

SEQ ID NO: 37093 - DNA, 408 bp, Zea Mays
gtggtgggatattccactggatgaatgcgtcgtggcgcccgctggtacaatggctcaagggcagtaattctaggcttgccatggttatagtacgtggtgaaatggtctcggtgtggcgcaatcgcgaaggacggcggccaccatggcgatgatcgtccggccacatcgccgtgcaagtgggtacgatgaactgagcagtaacaggacccaagctcatcccaacgccaagaacttttacctcaaggagttatctgcacgccactaagcaagaatcacaacgccggcgtggatcgtggcggcgagatgtttcgcatctctgatattttcagtcattgtaccatcgcgatcttgttcagtccatttgacagagcgatttgaagagcttcgttctcgaattttcatgtgaaa

SEQ ID NO: 37094 - DNA, 289 bp, Zea Mays
ccaggcttcacccccagaagccgacgatatcatcgaggacgtcgaagtcctaggcatctcagccgaggaccagctcaagttgtgcgcacttcgcataaaaacaatcacctacagaagcaaaaggaaatacttgcagccaagtgcgagcgcacaccatgcaggtcaaagtaagacagatgatactagatgaggagcagaaagccaaagagctggaacaacaaatcacagatatgcaaggcgaaaacccccaccaccagcagtagaaccctgttcacataccagtcctggc

SEQ ID NO: 37095 - DNA, 272 bp, Zea Mays
gtgtcatcagcagaagccagaactctgtcatcgggtgcactggcctctaaagtgactccttgaccgaaggcttgggctaccggcatgcaactagagtgtggaggagaagaccctacatgaacatccatggaagtgtgggagggagaacccactcggacaccctcgggggctgggtcacagctcgcgctacccatccgagccggatcatctccggcaacaccctcgggggctgggtaagcgctagcgccatccatggaggccgagttctctgc

SEQ ID NO: 37096 - DNA, 1126 bp, Zea Mays
ccggggagttcttttgggcctgaacgagagccagaagagcacggtacgcttcaactgcttccatgggcgacgactgagcaaccttcaacttggcctttaccctaagcaaagatccttgatccagcttcgcagtctcatctaaggcagcgtccgtcgcgacttccgcttccgagaacctctgctgcgcagaaagaatcaacgctagcagcctccatcctttcgaaaccgacccgcccgttgcctcgatgaactccttggcgcatctcagggcggcattcatgttcctttgctcggcgtactcaactcccatgtcgaatatgaggtcggcgttgtagcggttaaggccaatcgactctgcaaacgacttgagagtctccgtctgcagcagagatctttggtagtccgacgaaacgaccttggacttgttgcctagacagctccccaagaaatggaggccgacgctcttcagatgaggatccgatgattcggcacaggcgattactcttcttgcgtattcgacgccctcagaagcaagatggcgctccttgctacatatcttagcagctaacaataaggcgaggacgtcatttggattctcaagcttgtttaaggacttcctcaggaaattcagcgccacatctttctggccagctacgtagtagcagagcgctagtgtggcccatctctccgtgcgaggatacactccaggcaaaacctcttcaagctgctttgcaagaaccagtggttcaccacaaagagacagggcataggttaagtgttccatcaccgaaggatcccaatgggtcttgccctggtaccagctcctaagcactaccatcaagagtagaacggcctcttccacgctattcttcggaacaaaacagccttcaacttgctgagccatgcttggagggctccaatctatgttgttgttgtacagtagaaaagacgcgaatctcttttgaaccctagtccgacattcatcatcaagattccatggactaagaagagctcgtcggtatgacgctaatgcttcctggttggagccagcgtgtttccaggcttcaggaagaagttcaacggatttattcacagtttcctgtaacttctgctcgatatcaggagc

SEQ ID NO: 37097 - DNA, 506 bp, Zea Mays
ctcgaaacggggaattgggtgaaattaaagcctggaatatcggatgggcgtgaaatttggcgaatatgttactggagatgttttgaaggtgcctgaaaaatttgagttcaattggagcatttttggctagtttgggcatttcaccgaacacgtggagggcggagttttagggtttcggggaaatggctatttgaggtgggaaaaccctcccgaaggagctaggaacctgcaaggatactcaaggctcacagaggaacacatatgaccacttggtttcactggatttcacaggaaattggaattgactcacaaggggtggaagagggggcatcactaggctgaatcagagagaagagagaggggtgaaggcaaagctgctcaccagagggagaagggacgagtgcaggcacaggatcgccggaggatcgccgccggggaggggagatcgtcggcgagggtggagatcgccggcgagggtggagatcgcctaaacccgagagcagagg

SEQ ID NO: 37098 - DNA, 628 bp, Zea Mays
ttctatttctgacatccttgaagatctcatcatttccttataacttcccttcgtaataatttatgttacttcaaccattctgttggaaccttagctatctcacccttgattgtcttatccactttgccacttcatgagtcttgccttaactctatccttagctatctcacgattatcatctttacccttgtcacctctatatcttaccttgatgcttatattatacccgtcctttaaaaccttctctcttccatctcaattttatagttgtattttacctattttcccttggtcatatcctcttccttgtcgcttgcgagttttaaactccatcctttgttgtgtttcggttgggtattacatttacctttctcatctctcgatcttaccttggtgattacactatgtccgttctctaaaatctccaatctcctatcccgaatttgagggcggtgttctacttatcttacccttggtaatatcatcttctttaccgcgtgaaagcctggacgtaactccattttttgttgtacacatactgctggctcttcaatgccttcatcttttctctcatacccttgtctattatcgcctttgacccttgcgatattgatgtcttctacctgaa

SEQ ID NO: 37099 - DNA, 659 bp, Zea Mays
gcgagttccagtgtttggtcactaaaccggtggatgccttgctgccaactccacggtttcccacgagaaggaataagcctctacccagtaattttataccaaggtggagcaggagggtggccaaatttcctccagaactcggttctgaggctgctgcccaggtctgcaggcatctgggtttctgtgatgacaatgaagttatttctgtccaggatgccgggaaatatgcgaagctatttgtttctgggctctctagtgttcatattgctgctttggcaacgctgtttggctggacggtgccgctgaacggacctatttaggtgcggttgggatggtttgctggtggtgtttgttcgttgtttagatggattcaagctgctttttaatctggaatgtgagagggttgaatgatcgtgtgaagagagattctgttaaatcattggtggttgatattggaccttcgattatttgcctgcaggaaaccaaacttttttctatttcagattttgatattctctcaattttggggtctggttttagtaaatttgtttacagcccagcgattggtaccagaggaggggtgttggtatcctggcgtgatggagttttttcatctttggctttagttatcaagcaattttcggttttagttaaattgc

SEQ ID NO: 37100 - DNA, 330 bp, Zea Mays
ctctaaatttcagtgagattgagccaactttggagccttgtatttattaatccatgaggatttttgcttaggtcaatacatcaaaattgtagagccatgttaggagaacaactttgattaagtaactaagcattggtgctgtacaaaaatttgagaaaaataagcctgaaaatgggctgtcagtcactacttaagactgaattttgagcaacagtggaattggatgaactttgtgattgaattgtgggagatttagtggatggttgcgcaagaactttgtaacaaagtgatagccggtacattggacaacaactttgctacaaatggatt

SEQ ID NO: 37101 - DNA, 423 bp, Zea Mays
ctgggggtccagcccacaagagaggaagtaacaacaccagcgccaccacccctatcatggcaaaccctctgaatcgggtacttcaggagggagtactcagaggtatcgggctattcctaagcctaggttggggatggtgtgtttccgttatggtgaagcgcattgccgtgccgagtgtcagtggagtggcaggtgctctatctgtagccaggatcacaaggatgtggtgtgtagaaggaatcccaatgggagacttaaatgggagccagtgacttcttcctcttcgcagggcactgtcaacatgatgtcaagcgttgagcagcaaatttctgtaccaccccctcagcagcagttctttatgcccgggactcctcagttcgtgcctatgccaggttttcctcagtacctggtcgcgcctactcc

SEQ ID NO: 37102 - DNA, 358 bp, Zea Mays
tccggccatgtccagtcaccggcgccgccctcctctgttcagccacgccatcacgaatttgactgccttacggccgtggttgaacgtggcaagctctcggggagcgacgtgctcggtgccatcgctgatcgccagcttgggccagcactggttatcatcgtaaccgcggcagtggctcacacgcggctataaattcaccccgccctcgcccccttctctcaaatcaaccgagctccggccttcgtctccaaattgcgaagctgtagcaaccattcctgtcctcgattagttaccctggccggagtattgccattttcccctaaatcggtccgccgccccgtgaagagcagctcgtccg

SEQ ID NO: 37103 - DNA, 501 bp, Zea Mays
accgggattcgtgcgctgtggattgtggataactgtgggcgggtaaagatcttggcgcctggatcagcttgagtccggccgcggttaagcccgccgtacccccttgctcatcggtggatcgggatgagacctcaccgccgttgatcgatcactgccgtgcgccgtgtgtccagacactttaccatgtcacgattagttgcgttaggggatccggtgatcgccggagggagcgccacggtgaaaaccactaagcacttgcgccagtgctcccttccctctccgaccgccgcgcgtcgttgctcaaattcgcggccaccgctcatgtttactataaattgaagccacagtgagctccgtaggatgatcatacaccaaaccaccaagtattgtctccagtcatacaaccgagagctccaatttcatacttcccccaatctgctcaaaaacaccgcaagaacaccctcaccgcggccagctcaattcaggtatgctcatatcttc

SEQ ID NO: 37104 - DNA, 339 bp, Zea Mays
gccaaaagaacttattgcattctggatgtgttcttgagcacagtaatctagaggaaagcccaaaagcattaaccaacattctttattaaagtttagagcactatagtccaagcttcattatgcctaatggtagttaaagtgaaatccattgcttgttgcgggcctaagctgatcaagttgtctctatcataaaaattacgaaaatgaaccatcgtttgccctaaatgagacctttgcacatctctaatcggaatgtggcgatgatcaaccaaaaactctctaatgaatgtggccatatcatcaaagtccaactcaagctcaggcaaagagtgaactgac

SEQ ID NO: 37105 - DNA, 583 bp, Zea Mays
gtgggactaccgcgcgcatgcaccgagtcaaggtggggcgtttatgcatacggaatttcaatgaaacagatgcataaatggtaacgtggggggacccggtatggagacgtggctcacgcgatatgcttgcgtattttgctgttattggctgcgtaaattcgcatctgacgcgacatggactcggtggggcgtttatgcatacggaatttcaatgaaacagatgcataaatggtgacgtggggggacccagtaaggagacgtgggtcacgcgttatgcttgcgtattttgccgttattggctgcgtaaattcgcatctgacgcgacatgagtggtcagaacgggtagtgggtagtcacgcgcgcgtcattccaggaatgtggggcggtcgtacgatggggtgatgcatgtttatggaaaagtaacacaatgggcatgtaatcgtaacggatcggttcacgtaaatctcgggacatgcaaactgcgcatcaaatcgtgcaggatattggatcatgccatgaatataggccaggacggtttaggcgagtataggatctgcaaaaaatgggttacacacagccgccg

SEQ ID NO: 37106 - DNA, 773 bp, Zea Mays
gttgttcctgctcttggattgagctggtgttttgattattcagattggcattttgtctcttttaattgcattctggggatcactcatcgttttaattaattgaggatgatttcgttcagcgatttgatcattccctgcttctgtggcctagtttgctaggcttagcacacagttttcctattatcagcttggtcttatggtcaaatttttgatcttttatttgtcagcaattcgtattgtttggtttggtcaattcattaagaatctgagattaagtgacaaacttgtcgtcttcaaatgttttgacctttgctagctcgaggtgaacatgtcaaagaattccagggtaggtgtaggtcttactttcttgtttatatgagatacacacgtggactgattcctcctgttgttctggtaaattttggttggtagttagcttgctgaaatctagagatgttatcttaaatccttcattctatgattcatctgtcattactagttcctttcaccaatgaatgtagttacccaagtggaaaacactaggctcttgttaaattgggaattctgggactggttactgatcatattaccatatcctatttttaagtatatagttttagggtcttagtgaatagtagtcatactcctgaattttttgtttagtccaatctaggatcttttaggatttaaaaaatttgatggtttcaattaattcttcgccctgcaaagactttgaaccatttattccatcttactatcaatgttatcagatc

SEQ ID NO: 37107 - DNA, 338 bp, Zea Mays
acacgggtagctgtgtacgtggcgctcaccgttgcaacgacgcaaggaaaatactcctaagggggccacgaatacaaccacacagtaataagctacggtgtggcacaaccgaggtcactggagcttccacggcgaggctggcggtccggccacgtcgcaaaggcaacagtcatgatgataaccttcaagctgcgatcaaatccatttccccgggagatcttttaccttcccgtggatatcctctgcatgccaagcacgagtcacggcggctagcgcaaatccgggtgcgcgcatcaccggcggtgaggttctctgaacctgatccgattaggttactg

SEQ ID NO: 37108 - DNA, 707 bp, Zea Mays
cacatatatatctgttgtatattatatatacgtactagtatttattactacgtgcctgtgtcatcgtacgtcgatcagcatcgatgatctaataggcagctagggctgtatgctacacgtacgtacacctgcgtcggtactgcggcgtgactacgtgtactcgatctctagatacgagtaggactgtaggagtacagtacaatgcatgcacatatacatgtacgcatcaagtccagcctgctagtctctcttgcgagtacgtgcaacaagaaagcatgccattgcattgcatggttcggcgcgccatggacgtatctcctacacatcagcattggtttctgcgcatcgcatgcatgacatctctcccctccccccgtgccgcatgcagcatatcgttccgtgacataaaaagtacaagcaggatatatatactgctgcactgcaggccacgcacttggctagctagctagcttcggtggacgcgcaaagaatgtttagtgccgcgtaattcagggttagggtttttgtctcggtgcgtgtaaaccaacaaccttttgttcttgtgttgtgcccgtgggagagagagagagagaaaggagagggccggggggcaggcaggagccaggcaggcaggcaactgcatgcacgtgaaatggccattgtcttgtactccgactagctagctactactagatgcgaatgtcgtc

SEQ ID NO: 37109 - DNA, 522 bp, Zea Mays
actactagtattagcgtgtgccgttcggccgatgaccactgcctgccgccgtccgtttggctcgccaccatttcttccctgcccttccctgtttcctggcctggctttataatctctcggtcgctactgattgcccgggtcactacttccttcggttttactatcccttcgtttccgctagccttctccttccagagcaaccgcgccattcgtctcctccgtctcgttcgtagtgcaacacatacagcctcgtctggtgaagtgaaagaacgacaagatctgtggtacggcggtgccggccgacatccacccactgtgctaccccttgcggttccagccagcgcagcgatcgattcccgctggccgctgccgtcggtgcctgcccggtcctccactcctcccgctactagtactagtaccagcacactccactgtccactccactgccagtgccatcccattcccatccgaggtaaacgcgtcaacgcgaccagctcacctcgtcatctcccattctctttc

SEQ ID NO: 37110 - DNA, 465 bp, Zea Mays
caagagcgcaaaagtgtctgtgactcagccacctccgcgcaggacggcgagtttataccaataaaacctagggactctttgtaagttgggacagcgaaggggtattggtcattactggccgcccgatcaaatatcgaaggccaggattagatcttggctttatcgaactggtacacaatcgtacccgttggatcagcgatcagcgctctagattttatgaagtccaaatcgttcctagcccacggatgccagatcgacggcctagatcttaagtatcgaaccggtatacatggggctaatcgtggccgttaacttatatcagatggtgatcaccctttctcccttcctccaactagtctaacggcggcgccgccgatgaccagcgccatcactggcgataggcggttcgcccccagtgccccaaacccacgcacggtctcacgtaaaacggagaggagagtaagg

SEQ ID NO: 37111 - DNA, 742 bp, Zea Mays
taggaaaattggtttcacaattttaccatttttctacatttttttataattgttttggctctggaaataaaagaaaaaggaaaactagtgaatagttctgggctggttttggcccaagcggcccagtcagagggagaaaggcgcccgcgcgcgcccgcgctggcgatcttgcggaaaggtccctgggattctgggtaactggaaataagttcctgtactattcctgtgtgccgctgccagattacaaaaaggcccttcggttttcatttcttcacaggggaaagtccacgacggcggtgggcgcagggaggctccggcgagcacctgcaccggccgatttacctaaggactgatgccctacttcggtcgaaaccgaattcacgccccaaccattgattcccctaagttaattgcacaaatcgtgaactactgtggtctagccacggtgagcgcgcggatgaaccaaggatccatgcgttcccgacggtcagtgaacccttagtccaattgggcgggtcaacaagcatcgtagacatgtgagaatgcttaaacgagggagagggagggttggactgaccggaaaaaggttggcgacggtgaagcacgtttcacggttgcggagaatggatttggggggaattagaaattcgtgcgtgctggtggacgatcgagggtgggagcgggtgctacagcttcacaactacatggcgcagctacgggcgaggtcaatttatagtgctag

SEQ ID NO: 37112 - DNA, 409 bp, Zea Mays
gcaaaccgcgccaccacctagtcagctttcttgcttacactaagaacaaattctagcttcctgtcaaagccatttaggttgataatgggcgcgagttcatcaacgatgccctcggctccattctagattcctcaaacatctttctttgcttttcctatacctatacatcacaacagaacgataaggcagaacatgacatttggaccttgcacaacgtctgtcgtaccctcctgatccacgctcacgtcccacccccatactggactgaggctatcctcactgccgcctatctcttcaataggcaccattttcggccatcggcaactccattacatttgagcgcctctttcatcgttcccctaactatagctccctccccatgtttagttgcctatgcaatccaaacctt

SEQ ID NO: 37113 - DNA, 498 bp, Zea Mays
ccaatatttgactcttcagccttatccttatcagtcttcgactcagctaactcagctgagggtagcttcggcattgtagttggctcttcaatcctttgcgcaggaggagcagtttcccttgattcagcagctgaagaggcctccccgccaaactcaggcaccacggccggttcaatataatgtggccggtgggtaagtaccttcatctttttgcttgcagccttcggcacaggttcagccgagggggccacagcagtagctttcctcttcttcccttgcccccgcagcgggtagcggtagttggggtagacgaagccaatagcgtcaaaaactctgtgcaatctcttctttcctcgacttctgaaggctgtggataatgcattatcttctgccttgggaatatgatccaagtagttcatcacttgtaacttcgatgcattttagccagtcatcgtttggttcatcgaatttatccccatatctgaatgtatacttcag

SEQ ID NO: 37114 - DNA, 586 bp, Zea Mays
ctcccgtctctgcccccggcgttcatcgtccggtctccgacaccaggccctcagctacagcagtacagcaccagttcccgcaacagcgaggtcatcgacgccgccatctaggacggctcttaaggtgtgcgcgcccttttctgcgtcgccaaattcaccgtgctttactgatttctagcatttgatgcttgcttagaggaattttgtggaccactacctccatgacatggctccatcccttccacctcttgcggcaacgaagcccaccattccgtcccgtcagtaaccctcgcctccgcgacctaattgctctccttctgagacaccaagacaggaggagccatctcctccaaatccacacccaatttattgcccaccaggtgttcgaccaaagtcccgcgccgtggcgcgccttcctcaaggcctactcccacggtcctttccccctggaagctctgcacctcttcaagcacgcgcgccagcacctggctgatgacacatttgtcttcacgttcgtgctcaaggcttgtgcgggtctggggtggcatcgagctggtgcacagctccatgcgctcgttgtccagaa

SEQ ID NO: 37115 - DNA, 306 bp, Zea Mays
gcggtctctcctgttcctttgaagaaagatcttgatcttgttcgtcctgcgttctgtcagaaatgtggtgctggaggtcatcatgccagacagtgttttaacgctttgtggtgtgatatttgccgtaaggaaacacatgtcacagcccgctgtgttcttcctaggcagaacaaacccaccatgcccattgttggtttggctgctgatggattagggttttatctgtctcatttcgctaaacctttgatcaaaaaaccaaagagggtttttatcggtctggttaaagtgattgagggattagtctcg

SEQ ID NO: 37116 - DNA, 346 bp, Zea Mays
cacacagacacataactggaactgatctccaattcttagataaatttcacaacaaagcatcagcacaggttacactcatagcaatgttcatacatcataagttcacagccaaatagcgatgtgccactgagtccaacacattggcttcctcagcgacgacactggccacaacaatgacgacaaatcccaccttgtccatagcgatggcggctagctttgcagtagtggcggccttcttatccatctccttggcggtagtgtgcgcttcctacggcagtgactgtagtggccctcgtggcgtccagagcttcaaccatgcctaacgtcggggaaccatgcctcatcc

SEQ ID NO: 37117 - DNA, 539 bp, Zea Mays
tgcaggactccttcctgatctacaatgcaggagagggatcccatgaagatgatctctctagcattgaaggtgactgggatgttgaagaagatagccaaggagtcatcgtagatcaacgtcgcaccccctacctggcaagccagttgtcggtgtttgtgactcaattgtgcaccatggggttacccacatgatgcttttgggtaggataatgtcgttgactgtgactcgatggtacgtgcaggagcacgtcagacttgtacatggatttatacagatttgaaccgcttgaatgtgtaacaccctacttcctattgaggttgtgtattgctttggagtatatggattacaaatgagttatgatggtgctcataggtcgtggatgagggctagtgtgtgatgggatgaaatgagatatctttttgcaaggttactctcttgggtcttatataggtgaccagagggttatccctttacaaattgtgattgctatccattctacttatctccttcttcatcgcggcctgtagtcctgcttatct

SEQ ID NO: 37118 - DNA, 461 bp, Zea Mays
ggacagcaagggagttctatggtttgaagaccgattggttgttcctaagaatcccaaactcaggaagaaaatattggatgaagctcatctttccaaattttccatgcaccccgacagtaacaagatgtatcatgatctcagatctttgtattggtggaccagaatgaagagggaaattgctaagtatgtatctgaatgcgatacttgccaaagaatcaaggctagccatttgaaggtagcgggtaccttacagcctcttcccataccatcttggaaatgggaggatatttgcatggattttattgtgggattgcccaacacatgccgacaccacgattctatttgggtcatttttgatagactgaccaaaacagctcatttcttgccagtacataccacccacagggcagaaaagtatgcagaaatctatattgaccagatagtgcgtttgcatggaatac

SEQ ID NO: 37119 - DNA, 310 bp, Zea Mays
cattgttaagataaaactggccagaaagaactgtatctcctactgaggtgaccggcagactggacccgtttccaacaacgatggatgaaggaatagcagaagttggagaacgaaaactagggagatgttaccagaatccggggtcgtatggttggaggcctcggagtcagcaatccactcggtgatggattggggctgctgaagagtcatcgtgttgaaggaagaggccggtgactgctgatcccaggcaccctgccacgggttccagggtgattgggcagcctgttgttgctgttgcgcaccataagca

SEQ ID NO: 37120 - DNA, 406 bp, Zea Mays
cacgtcgcatgtgtggccaaaagaaatgatcagagaggatgtccaatgtctttttgacaccaaaatgaccagctagtccaccttcatgtgcttcctgcaaaagaattgggcgaatcgaacaagctgggatgcatattttgttagtccgaaataagaagccatcatgcacataatatttatcccaaccttttccatcaatgcaatgagagaaaggttctttaaaatcagcatcagcagcataaagtgttttaatggattccaaaccaagcacttttgtatctagttgtgtaatcaacgcacatcttctaaacaaggcatcagcaacaatgttatctttaccacgcttatgtttgacaacatagggaaacatttcaatgaactcaatccatttagcatgtcggcggtt

SEQ ID NO: 37121 - DNA, 401 bp, Zea Mays
gaaacaatgccgaagatgaagcaccccaacggcggcaattcttcctccctcggtctctctctaccccagatggattgcgattctctctctcctcacgctgatgtcttcaaggctcccatcctaggtgccggtacaaggtggatgagggcacgaccggttttatataaggctggagtagggcggtgtcaaagattgaatcgaaatcgattccaagcgtagtttgcggaacagaatccccaagcagactccaacgttcggcaaaacccacgcgacggcaatgggttgagagaagcatgtgcccagtgtgacaggcggtcgaggaaggcggagttccatacggaggttgttgccaggattcgctatcgcttggccgaaagctccgacctccatggatttctgcg

SEQ ID NO: 37122 - DNA, 576 bp, Zea Mays
gtcaccggtgaccttgcgcccggattcgcgccggtcgtcgtgattcatgcttagcacgcagtggatatccatggggaggtaaaaagatctcgcggggagcggatttggtcgcggagaaagcttatcaccgcgcctgtagccgtgtgtcgtggccggaccgccggtgtcgccgtggaaacttcggtgacctcggttatgccacgtcgtggctcgttattgcgtggtagtaaccgtggcacactcagaattacaatcttcgagccgttgcaccagtgaacgccacgattaagccaccactgttctcccctctctgcagccgccagcgcgccacctcaaattcacgggccaccgccctcgtgtcctataaattgagcgtgccatcagctccgctaggtagtcaagcacccaatacaccaacccgtgcctcagatcgtccaccagagcgccccaatttgagatttcccccaaatcggtcaagaacaccgcgtgtgtgagctcaccgcggtcagcccttcacaagtccgatcaagccctccttgctcttgttttatcatccttgtgtgcttgtgatgcttc

SEQ ID NO: 37123 - DNA, 848 bp, Zea Mays
gggggtagggttagagggttttattccttctgcttagtttgacatccttgacttttggtcttcttgcgtatttttcttgcgggggcgagcttctttagtttcttgtcatagtccatctttagggtgcggtaagcttcacgggtattggtttcctcgccttcagctattgcgaggctctcttgaagggacgccttctcccctgaaagttccctgacttttttctccaggctttccacccgggaggttaggtaggtgcagtggagggtgaggtcatcatattggttatcaagggtgtgaaggtatccagccatgtagacgatggtgggatcatcctcaataggatctcctcctgacagggcctgaagtcttttcctccaggtgggggtattcttgttgcggggtggaaagtagcgaaggggggtttcaaagatcactttgttgtagttctggcacagttgtcggagggctgttcgggcaacattctggcaagtatctgggaagcggtatccggtaaaggtgacttggaaggaaggatggttcggatagtttcggctttctcccaggtagactgccatagagcatttctccattccgccctcgagatactccttccagacgtattccggcttcttgcggattcccatgcgaagcgcacaacttcgcaaaagatgtgggaacccttccacctccgagcagtaggatgtcctaatgaccagagagtcttccatctggaataggaaaagaagggtctgttaaaatcggggaggaggagagaagacttttcttggggaaagaggtattttctttttagggcaagttttagggtcagggttgtgacctacggccag

SEQ ID NO: 37124 - DNA, 664 bp, Zea Mays
cttgcgggttgtatcacaaaagtgataagtgattctcaatatggtttcattaaaaacagatacattatggatggggtcatatctctcaatgaaattcttcatgaggttaagaggaaaaatcaaagtggagtggttttaaaaattgattttgaaaaagcttatgacaaagtaaattggcatttcctctatactatgatggagaaaaaaggttttgggaacacttggtgtgattgggttatgaggattgtgcggggtggcaaagtagccatcaaagctaatgataacctgggtccctacttcactacacacaaaggggttaggcaaggggatcctttttctccccttctgttcaatttggttgctgatggtttagcttgtatgtttaagaaagctcaagatgagggtttgattgaaggtctgatccctcatatcattcacaatggttgttgttgtttacaatatgccgatgataccatttttcttattcaagattgcttagaaggggccaaaaatcttaaatacatcttatgtttgtttgaaagcatgtcaggcttgaaaataaattttcacaaaagtgaaattttgtgctttggtaatgctaaagagattgactatttgtacgctgatatctttacctgtccaattggtaatcttcatatgaaat

SEQ ID NO: 37125 - DNA, 433 bp, Zea Mays
gaatcttctgactcggcccatgctgaaccgatggctgttacggttggacaagagcttaacaaaatagtggacacccgaaagcctgagggtactcacccaaagcgtcctcgccaagttagttgtccgactgtgcctgttgaggaaccagagaagaagaagcggctttggcgactgtcatgcttggaccaggatgccggcccttctgctcctgtttgtgatgaagtaccagcagaggtccttcctgaggttgatcccaatgacagtgtacatgttgaagctgatcccaatgggtgtgaccgtgcaccagctgatcccaatgggtgtgaccttgttgaagctgatcccaatgggtgtaatcgtgctgaagctgatcccaatgggtgtaaccgtgttgaaattgatcccaatgggtgtgaccttgcaccggccattg

SEQ ID NO: 37126 - DNA, 285 bp, Zea Mays
cggccacgttatattgaaccggctgtggtgcctgaatttcgcgaaggagcctcttcaactgccgaagcaaggcaagctgcttcgattgtgcagagtgctgaagagccgattgtagtgctgaaggtacctacagtcgggccagccgaagctagagatgataaggctgaagagccacaagtggaagaagtgatgaaaacgctagaaatcctaagcccaccagcagaggcagatttgccaaagatgtagaagattcctgccgcaactcccaagaggagaaggatggcc

SEQ ID NO: 37127 - DNA, 283 bp, Zea Mays
gagtgtgtcccttgtaacgctgtgtgccttcccttttatagtttaaggaaggcacatacaaggatgctgagccccgacatgtgggcccaggagcataatggaagaaatacattatgtgaataattattgctgacagcacaccaagatctttactggacgctgtgttgctccctctgtcttagtaacgcatgagtaatcagcgggagtcatgatgactgcagtccatgcagcattgataggcagtaacccttttcttggaaacgcacgagtaatggtgagtcat

SEQ ID NO: 37128 - DNA, 304 bp, Zea Mays
ggacagtggagagtggactgctgcagtgctgctgctattgtgcttgctgtgtcttatttcatcgaagcgaccaagccaattagccaagcactcaactgctatgtttgtggactactacctgtaacctgtgtgactgtctttgtgaaatgaactcttttatgtattatctgtctttagtctgtgtttaattgttttattagtggactcgcctactgtcttcagtctgtgtttaattgtttattagcgcagtggactactggactgccttatgcccttatgtatttgtgtgcacttgtattctcgc

SEQ ID NO: 37129 - DNA, 312 bp, Zea Mays
gtgcttcactatttatgcacttaatccactagtcttttaagcttttgattgatctatgtcgctaagtcattatggggctggactggtactaattatgccactaagactagcatatgttgttgctgctattttatttccaccaatgtattgtgggtttaatttgatatacatgtatgctgctgttattttatgtcttattgttttaatatgtaaatattcataggttaatgtagcttgcagcttgaaagaaaagaagaggggttggatcttcgataagagagatggatcatggatgctacaagaacaacaaag

SEQ ID NO: 37130 - DNA, 295 bp, Zea Mays
ttttatgtgacactaggctatgatcaccgtccattttgagacaagatcttttccttagattacttgtcatcgctatcgtgcttcacacatcacttaagctgatagcgaagagcgcgtcacatgtgctcgagcttgaactcagatttttaggcttgttgaagaaactatatttggccgctttaagtagcatagcatcatctgctccactcgaccaggtcatgtacaagtggttgtagatgcagttaaggaggatgatctttcggttgctcgtcgaccaccattttttcaattgctt

SEQ ID NO: 37131 - DNA, 289 bp, Zea Mays
gaagcatcctggcatgacaggatgaacaggcgatgcttgttgcgtcatttttcaggccattttgttttagtgggtgatcgaggtttctttattggccgatcacgcagaacggccttcttgccagcatatttggctagcaattgatcggaagtagggccggcttttaccagccgaccatgtgtgtcatgttggctttgcccttgtgtctctttctgtgctttgtatggacgttgacacctctagccatgggcggactgtctggctgagtcagccggaccgtctgtctgag

SEQ ID NO: 37132 - DNA, 464 bp, Zea Mays
gtcatcacatattaatgatattaggccagcctcagtggaagttccatcagagttttcaataagctgtgacataagcacttctgaccatgttgcaaatagttttaagaatagataaaagaagtgagtttcatggagatcaaactcttttgacacgattagcaactctatgaatcatgaaattaaatatttatgaaactatataatgaaactttatgatgtattgagtgtttgtttcatccatgtttcatttcattctatatgacacaggagtcttgaaaacaatgccactaaacacccactaagacaactatatgtttaaaactaaacaactctgcaggcctattgtcggacagaacactctgcagctaacgaaaaatctataccaataacaaatgtgacatcaaagacattgcaaggatgcattattggtggcatcatcagacgcaggcttacttatcaatgac

SEQ ID NO: 37133 - DNA, 507 bp, Zea Mays
caaaaaaagaagaaaaaggtcacctcaagaggaaattccaagttctccgagctcagcagcaagaccgacaccagagagctcgatccttcgggcttccacccaagggaccaagcttcaatagaccagctggacccactccatcacgttttagctagcagagtcagagttcctttcaggccccctcggttgcaagcaaccaaccgccagcaaatgcctgttggcactgcggagaccccagtcactacaagaataactgcccccagttgaaggcacccggacctacctactccaactcggtgaatggccccaagaatacctcggcacctgcctccaaggcactcccctccaatagtcagcagagcaggacccagtatcagggtagagcacgagttaaccacgtcgatgctcaagaggcccagcaagctccaggagtagtgctcggtgagttccttgtcgaatttactcccgctgctgtactttttgattcagtagcatcccattcattta

SEQ ID NO: 37134 - DNA, 425 bp, Zea Mays
gttatcgtctctactttctaggagttggagctgaacagcacttacggagctaataattttgtgtgaaacacagaatgttatttttgattcaagggagcatgatgcaagcttgctgagggtcattgcttctgaatacgaagttttacattcataatattgattgactgttgctcaagcaaatgattgtgttcctgttacctggatgtcctttcgtggctatattctatacaatttattaatcaacttaactcattgaatgcatagttgtatatacaatacaaccaaccgtacttttctttgaaggtcgtaaacttattttggtgttgcagattatctgaaacatatgggattgtccatgtgaattaagtgttataatgttttcacaaaggcattccacgagttgcaatattactggctccaaaatt

SEQ ID NO: 37135 - DNA, 283 bp, Zea Mays
ttgaacgtcgatcatcaatgcatctcgcccagtctgcatcggtgaagatgcttagtaaactagatcttgatggtcgtaatgacagtccagtattcaaagttccttttacaaaccggagtatgcgcttgacagcctcccagtgtaggattgtgggtttggagaggaactgacatactttgttaactgagaatgacaagtcaggtcgtgtgagagtaaggtattgaagagcccccactgtactccgatagacaaaagcatccttgtctgtaagaggtttcccaat

SEQ ID NO: 37136 - DNA, 629 bp, Zea Mays
gacacaaataatgaatgttgtggtcattggaggcaaggctgtgaggaagcgattgatgagagacccatcagccaaagtacagcctcgtactatgagaccactgcatttactctagggccccaacatccgagcaccccgcagagaacctgcgggcatttcgaagctaaaaggagagcttcccccaaatggcatggaacccttagacataaacaacagaagcatcaaatcaaatacagaacaacataataccgcagcttcaaatcctgattagatagcccttgaaggtttgcatcaccaacatacaagacacaaccactagcttgcattaaaactgacagaggtgtgtccaacctgacatctaaacactcgcatcatgtaacactgttagatattcaagccagtatttgcgtcactgatagagaagcattcaagctgacatgtaaactggtatgatatccaacaaccagcacaccacacagtcgaacggctgaggtgagcaaggcattctacctcggtctagagtcggacactgctggggtcgcttgtagccaatgatcgtgccccgcacgcacgtcatgcgccagaaacaaaacggcggcggggtgggatcacatggctgcttacccggc

SEQ ID NO: 37137 - DNA, 552 bp, Zea Mays
agccgaagcagaagcaactaggctggaggacatcgacttactagaggaagaacggctaaatgtggtcattcagtcggccagatagcagtagaccctaaggcgctatcacgacaaagcgctacgacatcgatccttcgtagtgggagatttggtcctccaccgagtgctaacgggggagggacggcacaaattgtcaccaccatgggaaggaccattcatcgttgcagaggttacacggccgggatcctaccggctcactcaaatggatggcaccgaagtggggaattcatggaatattgagcacctcaggaaattctattcgtaacaatgcctcaaaagtcttgaggacgagttgtactttgtaagcagaaggcttcgttatcaataaagcttccatactccaaggcgtacaagttcttgatcaacaactgacctaggtcgggctcaacttgaaatcgacatgctcacgcttacatgacttagggtgatcactataccctactaacggagcaatcggcttaagtcgaaaacgccttaagtcggtgcgacatg

SEQ ID NO: 37138 - DNA, 279 bp, Zea Mays
atctgtgagttttacatcaaattgagtctactacatgtggtatgtatggctaagaaagttctgcacgccatactcgtggcatgaattaaacacatgtctaagaaattgtagcgtgcctaatttgcagtgtggcaagttcctggccacgaaccaaacagtcccataatttggttatcgcaccgagcaacagtgaatgcgggaagtggcacccaatcataagtgctatatgagctctagtgcgattacaagaagcttttcacacaattggtttctagcttg

SEQ ID NO: 37139 - DNA, 829 bp, Zea Mays
ggatttctcggcacaatcccaacagcttgtgcctagtttctctatcgcagtgtataaatacataccctcgccccgcccctatataacccagccgctcccgctcccttatccatctagccgagaacccggccaccaccaacgggaaccgtagacggaaagagagttagagaccgccggtgcggatcttcttcgcgcgcgtggtattgggatggacggcgactccgggggccagttcgtggggtcttcaggcttggtgattcggcgtgtgaatggttaattgcggatcggagttctcactcaccgccatgtcgtcgtacaccatggtcgggcgctgctgtcactctgcttgcccaggtgagagttctccttgtttcgtaatgctcctagcaacttgtattagcttccagatcgtatattggggcagtggggtggaaaatggctgttgcgtcggcgtactcgtcgccatgggagcacggtgccgccgcagattaggtacgaccgcctggtttggaacctaatctccagtagaatcatgccccgtggacttgacccaaaacccgcggtgtggtcgccgttgtcctgttggggaagacgagggtcttcggaccgttcgatctttcatggacggttaggaatagatctggacgacccccttgatcggatgaacttgcgccttaggatttcgaatgggcggtcgatcggaacctggcatcctcccgggtcggtttgattcgagccattggtagtttgatcgggtggctctgagcgaatctcgtctcataaaatcggaaccgtttatcccagatccaaccagcgtgattgaataccg

SEQ ID NO: 37140 - DNA, 430 bp, Zea Mays
gtgagatctcaaaggtatgtgttgttgatgttgatgtgcgtcgggcaagtgcgttgtcgaatcgacagttgatccggtcagtcctcagcccccgccgtgggagagccatggttctggttgtagtcttcacggtgcctcatctcttcttcatgtcgtcgggcacatgacaagtcgatgtcgctccatgcgtcacgtcggtcattaagacgatgacatagatctccctccgggtgagctagctggaggagctagttcaccgcttgggtgaggatttgcctgtactcctccccttcaggcatcggtggtagctcgctcgcaaggcgggccaatgcttccccgacttggctcggggtctgggtagccaaatgaacttgggttgtaggttgtgaaggatgtgtgaatgatcgcgaggaggccgggaatggcaccc

SEQ ID NO: 37141 - DNA, 311 bp, Zea Mays
gtggcaactgctgcggagctgcctcctcctagggtgcttgctgctcctgctgagcacgtcttccacttttgcgcctattctcagacatttgtaggaagcacacatatcatatctgactctgcagtcttttagcataagaaaagacatatggaaatcttcatagcactgaacaattgatcatcttcactgactcccaacacaactcttcagataaagaggaaagtggaaatgaataggttgcccaactaaataactgactttattaataactataccaagttgtaggggatgcccacaccttggtgacaatc

SEQ ID NO: 37142 - DNA, 456 bp, Zea Mays
ctgcggcacaagtccctgatgaatacaagaataatacatattcatgagtgcagtgcggcacaagtcgtcgtttttactgtgtaactagataatggacatagaatttcttaccggaggtggaggagggcccatagggacgaatgtccattgcggcggaggcggaggggccacgtagggaatgccctgctgctgagctagtaactattgaccaagcatattagtagtatgcattggatgtgtaaagcaatgaataaacagtaataatgcaatgggcttacttgaagcatctgctgctgctgcgcgtggactgaggcatagtactcactttgagccctcaactgctcagtttgagccctcaactgctcatcgcgctgacggttctcctcacgcagcctcacaatctcaagctcttgctcagtgagccgacgagagctaggaccagagctcctggacccg

SEQ ID NO: 37143 - DNA, 532 bp, Zea Mays
aaaaaaaaggagcacggggtcgacaggttcagggcttttgttcctcggcagtcggcacctgcagacggctagctaacatttaaaaacatgcaacttgaggtagcacatgcgcttcattagcatgagcccggaatcagtcgtctagctacgtactggcgctaggagaggtaacactacaacaaagaccctgggctagtcgcgtggtgggtgtgcagccgaaaaagaaaggggcaaacacatgagtgctcaatttaaagccagccagggcagcgtcagatgcatcggcaacaaaagcagccaccctaccgagccccctggatccatctgtccgcgaccgcgacaggccactaactaaacaccaccaccgttcgagggtgccgctgcgggattaaagtatagttgacacgatagacggcgagccggctctccacactccactggtgctcgtgcctcgtgctatggggaaaaaaggttttatagacctgcttatgcagctatagtattcttcactgcaggtatcgtggtcgtgaag

SEQ ID NO: 37144 - DNA, 326 bp, Zea Mays
tccttcgacaagaatgatgacatgtctgaggatgagatgacagtgctaggtgggagaggtgaggatgttgttagagttgatgaatgcaatgatggtggagatgtgactaaagttaaggcgtagaggagtgactaaactagttaaggttgagggtggcagcaaaagcaaatccaaggtttgggaggtttttgataaggtgaatgtgccaaatctgtctgataaggagaatccattattaaaggcaaagttcaaatattgtaaaaagctttatagttatgcacaaggatcaacaacaatgacattgtcaaggcatatgaagaactgtg

SEQ ID NO: 37145 - DNA, 358 bp, Zea Mays
tttcatcattatcacatttatcattatcacccctatatcttaccttgatgtttatcttataccagcctttaaaatatcctctgtttcatctcaatctgagcattgtactttacctactttcccttggtcatatcctcttctttgtcacctatgagtttttaactctatcctttgttgtgtttttgtttgttatttcctttaccattctcatcactctatcctaccttgtgattacattatgtttgttatctaaaatctccagtctccaatctcaatttgagagcggtgttttacttcctcacccttggctatatcctctactttactgcgtgtaagcttggacataactccattcttt

SEQ ID NO: 37146 - DNA, 343 bp, Zea Mays
tgactattgattgtggatcagtggtggtggtggtggcaaatggggccaggaagctggggaatgacttgctgaagcaacagaaaccatatgttgttggttgcctacgtattctgggatgtatggggaataacacgaagcaatgtggaggacttgcttcggctgactctgccgcgcctcagcttcgacaatttccttctgcttctgaattgtgacatggcatgttcttgttgtgtggcccttgtcctcgccacaaaaaagacagtacaactttctgggtttattgccaaaccttcctccactgaaacttcttcctcctctgcccctcggagccggtggtctgaaa

SEQ ID NO: 37147 - DNA, 906 bp, Zea Mays
aagcctagttgttaagaagaatttagagataattaagctcaaagtcgcgctgtcagtcaatccctgggctgaattttcagtaacagtgtgatgggatgaactttgagctcgattttgaatgggatttagtgactatttgatggtaagcattgtggaaaagttgaagattaactatagctctacaactttggtacagaggtttgatgaagttcacatgcaaattttagagaaaatgtgacctaaacatgatctgtcaggtgctctgatgaggtctcgccatggtacagtagaccgagtggatcagaatgccagcgtagcttgctcgccgccggtgaccccctgcgcgaagattcgcgccgccgctgttaggattcacgctcgctggtaaccggataacgcttcgggtagaaaaatcttcgccgccgtcaagctggaagccaccccggtcagccgcggtactcctcccctggctcaccgcccgcgggtaaagctgctcaccgtcgtcgtgccatcgccgttgtccatcgcgtgtcctaaacgcgccaccgcatcgccgtgactccctctaaactccccgtcgaccaccggagttactgccacgacgatgaacatgtgttcactgcaccagcgttcttcctcacttccgaccgccgcacatcaacgcccaaattcacggtcaccgccgaagagtcctataaattgaagcccccgctagctccgcaaggtcatcctccacccgaccatcgctaatcgctagcagtccttcgccagagctcgcgaattttgaattcgccccaaatccctctccgccgccgagaaccacaccctaccgtggccagccttccccaggtctgctcactcccttcttgttcctgttctagcatccttacatgatggtgatgctcc

SEQ ID NO: 37148 - DNA, 380 bp, Zea Mays
gatcaacatcgacgcgaatcatccaatcgatgaggcacactctagattctaaaacccaaacatcaaccctcgcccacctgatctcacatccacggttcagatctgatcacagtagagatgccttaggttttaatcacagccctccatggctcgatcaatggcatacaccacaccacccttcgccccagtcagacacggcggtgctcgtgcacccacggtggcaccatggcaagaatcataccaaccccacaccacagccctgaactttgattcgaacgacgatacatattaaggagaagaaggtgcagcatttggggaggtgctcaccggcttttggacgaagcaggctctcgaccacggtcatctgcggagccgtggcg

SEQ ID NO: 37149 - DNA, 325 bp, Zea Mays
cgccggtgagctcgccacggtgaaagccaccaattccttgcgacagtgctctcccctctctccgacggccaccacgtcatctcaaattcacgggccaccaccctcggccctataaattgagcgtgccattggctccgctgggtagtcacgcacccaatacaccaactcgtgcctcaaatcgtccaccagagctcaccaatttgggatttcccccaaatcggtcaagaacaccgtgtgtgagagctcatcgcggtcagccctccacaggtccgatcatgttctcctcgctcttgttctagcattcctgtgtgcccttgaagctcgt

SEQ ID NO: 37150 - DNA, 375 bp, Zea Mays
gcatgttataatgaatgagtttaatgtcatatagttggttccgtaatgaattcgtcttgatatgtaaaattgctaaagggtggaacataaaaagattaaagaataagaaaatcgagaactaaggggagaatgttgggattgttctctagctcgatcaagatcacatagtatgagtctatcctatccgcaccctaattggtggcatgactctatcattggtcaaagccctcgatcataagcactatattattcgcgactagggatacacacgagagccaaagcttcatgctcctaaaatcctagctgcctcaaaccacatgacccaatctttcttttagcgcctgattgaccagaaatgcccaacgatcgatggtg

SEQ ID NO: 37151 - DNA, 559 bp, Zea Mays
aaaggaacaagggaaatcccagggccgaaggaatcgagatactatcagatggaaaagcactaacagaagtagtatcaggagtagggttagacaccaaaggaagattgtagtccatgctaagcgcgacaccaagtgggatctcagccccaggagcacccattggatcctcagtactaggaccaccggcatctaaggtggccaggccagttggactaacgggaagaccagaacccatcgccacagctgagggagaatcggtcccaggaccctcgggggcaggatcatattcagctgcaccctcgggggctgaggcatcctcgtaaactagagcaccctcgggggctggagatacacggcaagctggttgggttgcttcttgcccaaccaaaaaactagcagagggtgcgacgtctgggctctctatacggacgtcgtcagctccagtttcagatagctccaacaaaatgtcctcaggaataacctcctccagcacgttgtcaatgacagacattgtcattccctggaggctaaccagccctaagagagcttggtctggaac

SEQ ID NO: 37152 - DNA, 297 bp, Zea Mays
atcaatcctaaatgtatcataactgaatcaagccaagaggtttttagtatggatataccacggaccgctgcaaatgttacaaaccaaaacacatcaatagatgctaccgatggataatcacagcagccgcaacattgtaattccactcagcatgaacaaaatatcggtctgtcagtgtctataaatattcgcaaaggcatcaagagctctgttggccggggatgcaaatcgctggatgactcttcgaatccaaacgacgacaatgacttcatgcctcccccaaaggacaagtgtcgc

SEQ ID NO: 37153 - DNA, 383 bp, Zea Mays
catgccgagtagtcggtcgacgtcgtcacgccactgcttcatggaccccggtgaggccgtggagcttggaggtgacgcaacaactctctggccacagacaacgcccccggtgcagccctcgacgacgtccgggatgtctgcgcagttgtatgctgctgtgcagcgtgcacagcggtagtgctcggcactgggcggttgggaacctgtggcgcggaagaggcagcttcctcctccaccacgaaatcctccatagtcccagcgcggtgctccacgatttgcaccatcatgctgagcgagaaaacaagcaaaaacctaaagcctagccccctacctggcgcgccaaatggcggagaggaaatctccggccgggtggcggaatgcac

SEQ ID NO: 37154 - DNA, 394 bp, Zea Mays
tgaaaaagtatggcaattactagcagatgatatccaatacaatatgagaaaaacattgaaccttccctcttaccagatgcccataaatgaaattagggaccatttacttgacaaattatctatacttttcaacaaatgcgactcaaatataagggattacaatttgccactgaaaactaattctgcgggatcatcctacggtaatcgatatatagaagaagagttatcatacaacttcaatgctttattaagtgaagcgcagaatcttcacatgaaattgaatgagcagcaattgtatgcttttaataccatagttcatattgttttatcaaatatatctggattcttcttcttatctgggtatggaggcaccagaaagacttttctttggaat

SEQ ID NO: 37155 - DNA, 630 bp, Zea Mays
gagagcccctggcagcgatgtcgccgccggcgagcgagtccaacgctgtgggggatagatatccctcgggtcctcatgaacacaaaaacgtgtcatgggccacctaacaggccttctactgggtcgtcctacggaatgggccagcgagatgtagctcggttgggcgagcccgatctaagccggcgaagaccgacacccgtgttaagcgccatgggggcatggatacatcgggtggggcagttgggcacacccgacaggctaaacccttcgcaataactagggcggataggcgaagaggactctagatatgttgggatacagtttgtgacaaaggagataagcgaggagacagaactcacaccttgtaatgggatagctctctcttgtcgtgtatataagaccgagagggaccccctacaatttcatcttaccttagcccacctactcacacctctcagcctgtaatcctcatatcaataccaaaaccaccacaagaagtaggatatcacgcaactctacacagctcgaacctatataagtctgcgagccatcccagcgtgctgtgtcacgaaccatcgagtcgcaatcaacgacgtcgtcctacccaaaagcatcacaagggtaactccg

SEQ ID NO: 37156 - DNA, 348 bp, Zea Mays
cctgtgccaccgtctctgccgcgtacgggtgcgcgagtggaatgaagtggcagtacttgctgaagcggtccaccacggacaggatcaccgtcttcccattcacgcggggtagcgcctccacaaagtccagcgcgatgtcggcccagaccgccgagggcacgggtagaggcaagagcaaccatgctggatggagatgctcggacttgtaccgctgacaagtggagcacgcccgcacaaattcctgcaccaaacgtcgcatgttggggaaatagaaatcacggcggagccggtgcagtgtacggtggacgccctcatgcccgtcgccgtggacggcctccaaaatttttt

SEQ ID NO: 37157 - DNA, 487 bp, Zea Mays
tgtgaccaaggggcgtcttggtacgcagagcgtttagcacactgtcctggagtagtaacttgatgtgaccatggagtgtaatcataccgccgagcagttgaccttggtccaaatggtgtcatgttccccgaagcggaacctgttgcctgactcattttcaggtggcttgaatttaccttccaatcgacacactcagaggatatttagacaaccccagccacaaccagcagagatggatcctccaccaccgcctccaccagcaggagttgacccactggttgcagctcagatgaggatgatgcaacaaatggtggacactatggcagatatgcatgctcagatgcagcaggaacgctaggagatgcgccaagagcgagaagagatatgccaggagagaagggcgtagcagcagcaacagcaacaacaacagcaacatcagcaagcaccactgcctccaccaccaccaccagttccaccccgagataag

SEQ ID NO: 37158 - DNA, 457 bp, Zea Mays
cgaggaggtggccagagtacctctagccacgagtgcaggtggatggagttcgccagagttggtcggtcgaccgtcctagcacgataggggttcgggagagtgatccgggagcttcactgggtcttggcgaagatggtggcgtgctcagatcaggcggaaaacaactggattgtcccagccatgtggaccgagcattggtgatggcggtggaccgcgacgagctcaccggagggcggtagagctccaagattggagcacgctggctgtggcatggtgtggcaagtgttatggtgtgcttgaaatgggaggagagcggccggagctgtgagtccactagacctgttcaaatgtcgggttgggtcaagatcaggtcgtggatcagatatcagggctcgtacccaacacgcgcctagtgttaggtcatcccattccttcttgtttgatgtgacaggtcggg

SEQ ID NO: 37159 - DNA, 765 bp, Zea Mays
ctctggactgacaggggttaaactgttaaaaacagggcccatatgtaatgttctttgaactatagcggatggcgggttgattccacaaaacactagggactctttagcaaaataccttgcccgaaggggtatggctactcgtgagccgcccgatcagattctgaaggtccagatcagatcgcgcgaaggggtaaatccgggcctgatctacaccgtcgatttcgtcatccacgaacacggtttcttgaagggaaagggtatggctgttttaatctcgaccatccatctcgatccaacggcgagggcatgttcttcttcccttactcctccgaatcaacagccgacgatgcatcattttcccccaccacgctccccagccgtggcggcgcgttcacttcacacggcagagctcgcctgagaagcgctacccggcggtccagtgctcgattccccacatcaactgcatctacaagatcctgcgttcaaagctaatccacgggaagggtccttaccagatcttatcgcatggagaccaccgcccatggcggagtgcggcctgatggtggtgcccaagaaccgatgaacaattcgcctccccggcccgaccgcgtgcacagaacgacggcgcgagcgagtttgtagagcggcggcagtcccggcctacaacctcaccagaactcgttgaatcatcgtgcgattcccaatcggatggaggaacgaggcgaggtgccggtcttttatgcgcaagagggagaccgagcggtt

SEQ ID NO: 37160 - DNA, 450 bp, Zea Mays
cgaggggtctggggaggcgggctgggtcggggaggcgacaaggggaagagagggggtgtgggcgtgctggtgtggtggaggatggaaggggtgtggatgacgagctcggggcggcggctgtgtcggagctcggggtgaggggcgactttcatggcgaggactcgcttgattgatgggtgatggaggcagaaccatggagcacggtgtggacgcctacacaccgtgcttatagagtagtagggatacacacatatacacacgagaggttgggggcggaagccactgcctgccggctcctccactggatttagtggaagatatgtttgtaccgtatggaacaattgattagaactaggccgttccgctaatccggatgttcggccccccgacgtgcctctcagctctctgtgtccgaacagttaggccttgctcggcacgctagtatttaat

SEQ ID NO: 37161 - DNA, 299 bp, Zea Mays
ctagagacgatggtcgacgacgagggtgtaggtcatatgcaggtttatgctgatagaccaagagtggggaaggacgaatgttgtgtcttgaccgagtgactagagaagcgaggtgaccagccatgatagctaacacttagagacaccaacatacataaggatatgacggagcagaccgtgtcgtcgacatggttgtggaccggcaagacacatgtttaggagatgtgggtcacgtgtggagtacactacccagggtggtttcagtggttgagcctcaaaaccacccagtgtgatagttc

SEQ ID NO: 37162 - DNA, 614 bp, Zea Mays
cagttttaatctggatagatctggctgtgctttttgtcactttaaaaatcatcttactaaggattgtcgacatcgctttccttgtgacatttgtggttgtgatgatcatgttgtgtttgattgcaaaaaacgcttgccttggaattttggtccggaactttgtgcgacacaagttgaggatcatagttttttctatattgaagaaaaagtggataataggatgattaaagaaaaatccagcactgctattatcactgttgttcaagggaatgttagtgaaaaacagattgaattggaattcatgaacatgttaggcaagaatttatggcggtggtctgctagatctgtgggagacaataagtttgttatgagatttccagatcctaaaatgataggggatcttggatactttagacctttgggcatgagaacagcgaaagctcagattacaattgatccttggacacctgctgttaatgctaaaggttgcttgcaaaaaggatggttcagaattagtggcattcctatggaacaaaggtctctggtgacaatcgctaaagttggtgggctcgtgggtaaggtgattgaaattgatgaaaggactagacttagaa

SEQ ID NO: 37163 - DNA, 350 bp, Zea Mays
ggagtatagccaaatcaagaaaagctaaattacctgaagattggagaagaataaaggaagccccaaaccatgagaagccagttgatggctcgatgaaggaatatcaactgaggcaatctgaagagcatcatcagggatcaactcaacatcaccagcaggaatcagaactctagcatcaggtgcatcggtctctaaggtgacttcctgatttgaagcacgtgctgctgtcatacaatcagaatgtggagaagacccgacgtggaaatccatggaggtatgagaaggggagcccgctcggacaccctcgggggctgggttgcagcccgcactgcccattggagctagatcac

SEQ ID NO: 37164 - DNA, 336 bp, Zea Mays
aagcctggatgcataaaagcaaaaatagggcacgcaacgcggtggcgtgcgacagtgcagtacatatggggttttcccgggcccggcgccacttccaaaacgttggcatgctctgtcatcacccgactgttatttctaaaacgcgggcacgccatgtcatcacccgaccgttatttctaaaacgcgggcgtgccacatcatcactcggccattatttccaaaatggccgactcggtccattttaactcagcggttatttctaaaaacgctgatgttaccagacttcacccggccattgtttccaaagcggccggcgtggcccgttatcactcggct

SEQ ID NO: 37165 - DNA, 307 bp, Zea Mays
cgggtgagtcgtgactgtgtctcccattgggggttggcttctagcgagtcgtgactgcctgtctcgctagaggatggcctcgggctagtcgtggctgcctgtcctgcctgggcttagcctagggcgagtcgtgactgcctctctgacacgagggttgcctcgggcggactgcctattctgtgttggcttggcctcgggcgagttgtaactttgtatcccactggggttggccttgggcgagtcataactgtgtatcccacccggtgggttggcctcgggcgagtagtgactgtctgtcccgcccgtg

SEQ ID NO: 37166 - DNA, 348 bp, Zea Mays
cgtcgggtggctggtattggggtggaatttcagatgcaggatctggggagcagatcaacaaagaaagttatgaggactttacaaatcatcacagaatatgaaggaattagccaagaggcaatcgaagaatataaaaaactcttcactcatcctctgtctcaatgtcatattgaagccctttcagccttgtttggttggaacactccgcctgatctggtgttcagttaagggctgtttccttggtgtcgtgttacttttactgtaataaatggatccttcaaaaatattggtttggaatgttagaggtctgaattcgtctatgcgtcaagattctgtgagagaacttat

SEQ ID NO: 37167 - DNA, 396 bp, Zea Mays
tgccaatttgtgttcattctttctcaattttagccagattttggatctagggtttcaccatgtgttagagataaagtagttaggttacctaatccaaccgacgtaaggggccggacgagtcttgtggtgggctctacgtgactccagactgtccgacgtatggggccggacggtccgaaggagggcgagatggtccgagatcgtgcgcggattgtccggccgtgcttagagctgatccgccgtatagagaagatgacgacagcagttgtcccagatacgagttcatcgggataccataatatggctgggactaaaaaactatttgttgctgatgtttttggtgcggttgtttcggtgcccaatttaggtgacaaaatcaggcgtacacctcatttt

SEQ ID NO: 37168 - DNA, 446 bp, Zea Mays
attgggttcccatggtacagtgtttggattagaacgccatcgcagagaagctcgtcgccggagacctccgggctgcgattcacgtcggccgctacgattcgtgcacagcacaagtggataactgaggagagtaaaggtcttggcgcccggatcgactcgagctacggctgagttcaccgtacccacttgctcagtcgggatagacctcgccgccgttggccgcttaccgctgtgcgccatgtgctaaagcgcagtaccacgtcgcagtgaatcacgtcatgcatgcccggtgatcgccggagagccgccacggtgaaagccactaatctcgtgcgccagtgacctctttcttctccgaccgccaccgcgccaacccaaattcacgcgccaccgcctccggagcctataaattgagcgtgccttcgggtccgtaaggtagtcaagca

SEQ ID NO: 37169 - DNA, 453 bp, Zea Mays
atcaatggtttccccccaatcaatttcatatttggtgatctatttcgctctgtccacgaggacagcgaaagctatagacattagttcgtgttcccagtgattggtgggcttctagtttaattggacggtttggagagcatcaccagcatacagggacatgagaacaacgcgcgaattggatggtgccttaccagaacggactggccacggtggagtggtgctttacggtggcggagaccaatttgggggaaaaggggaattctccggctatggtgggcaatcgaggggaagaacgggtgtgtgggcttcgtgatgacttaacgcagctgcccgggggctcaatttataggcagcttcgtcggtggcgcttaatttggccgggccgtgcgggtggccggagataaggaagagcactgtcgttgcgacttcgtgtcccccgcagtggcaatctca

SEQ ID NO: 37170 - DNA, 538 bp, Zea Mays
cgggggacatccacatgacggccttctgcacccacgacggcctctacgagttcctggtgatgccgttcgggctgtgcaacgccccagctacgttccaggctttgatgaatgacgtgctgcgaccgtttcttcgtcgatttgttcttgtgttctttgacgacattttgatctacagtaagagctggggagaacaccttcgacacctccgcgccgtcctcgaggagctccaacgcaaccagctgttcctaaaacgcaccaagtgtgcgttcggcgcgacgaaggtcggctaccttggccacgtcatctccgaggcgggcgtcgccatggatccgaccaaagtccaggccatccgggactggcccacgccgcgatccgcacgggcggtacggggtttcctcggactgacgggctattaccggaagttcgtccaccactacggtaccgtggcagcgccattgacggccttgttgaagaaggatggattctcttggagcgcaggagccgcggaggcgtttgtcgccctcaaggacgcggtcac

SEQ ID NO: 37171 - DNA, 299 bp, Zea Mays
caagaggagcgagccgtcttcaccttccagcaaaaacttctggacatgaacttgctgcctgacaaacacaacgattatcactcgttgctgaggtttgtgcactaggaatactgtacacatcgagagctataaaagcacatatatagctcctatcaatttgcagcataagaatctgacaattggaatttcatattcttgttgaatccctgcaggtttttgaaggctagaaaatttgacacagagaaagcgatccatatgtgggctgagatgctccagtggaggaaagaatctggagcaga

SEQ ID NO: 37172 - DNA, 302 bp, Zea Mays
gcgaaacaggagtgaagatagagtttggagaaggaaaaggaaggcagcggggtggagggtccatgcggtggttcggagggcggcgtagattatggccggccggggcaacgatggaggagtaagagcaagagatgggtgatgggttcaacgatggatgaagcacgagacgacgctgactgacctggcgacggtgtggggagatagagggagaggatggggtgggggaagtgcgtggaggacgagggcgtcaggcagtgatgacaaagacacattgcgggggattttcagaagaacagccacaa

SEQ ID NO: 37173 - DNA, 448 bp, Zea Mays
aaaaagcaaactgaaacttgcatgatgtaatgctatttgctggaatgaggaagagcatggcagaacgctcttaataatttgctagaagtagcaaccaagtatgatgtaatgctatttggtgcttacttcttctccttattcatcactcagtgattaaggaactctaaaaaaaatgatatgcttctgtaacacaagcaacaaatgggggattggtgaactctaaaaattgtgaaatcggattcgtactcctcaattgtcaggaccgtgcatttaggcaattagcggtccaccacctgacgacgggaggcgagcagctgaaaacgatgacagactagactcggactggtggtggggactagtcagggagaggaatcactgattgtgcaaaagccaagcgttttgacttttgaggtccagctgtgctagtgctgcatgtccacgtctgggc

SEQ ID NO: 37174 - DNA, 328 bp, Zea Mays
attcgaacgacgagaaagatgactctactccatcgtgaaccatctgggccagagcacggaccgacactgggaagacgtctctcttgcgcctaggtcgtggactatccggctcaaagctgcggactgtctacgccgccgtagatgacacaaccagacgatacaccctaatgattggcgcctaaatcgacgctaacatgaaccttttgccatctctagactgaggggaaatgaactctccatcaatcccttattcccttcctatctgatttcaaactccccctaatgcgaaatgcgtgtcgcgcatggcgtctgagagctagctcgactg

SEQ ID NO: 37175 - DNA, 1109 bp, Zea Mays
cgagggagtggatccagcagactcgccgatgtgcgagcaggagcgtgatcgatggcggagtggatcgagcagaagacggatcgatgggggagtggatcgagcggatttgccgatgtgcgagcaggagagtggccggcgtggggagggagctgtagcctagagctccgatttacctggggatgtcgtggggaatggggaatgtgttcgtctaagttctaaatgcaggttttgatccatataaacagacgaacgtaccgaataactattgtccgctttgctacgtcgtcactaagtgtcatgtagtgtagtggtatgccttggttaccagagaatatagatgccaggtttgaatccttgctttgatatagtttttgcccttttttgcattattttgccaatttaaaacatgtaaacaaaattttgtatgtttcattgaattttttatatcaatcctttttgcattattttgccaatttaaaacatgtaaacaaaatggtacaccttactctagtctttactcggcatcgctatcatcatcatcctcctcgacaagaattgttggactttcatcatcactaacatattgccatatagtttcatcttcatcatcgcttgtcccgtctccttgcacattgtcttgccttggtttacgaaactcgtcaactaaacttgtatcgacgtggtgacaatcttcactatccagtacttcatcattcaaattgccttcattcacttgtacatgaaaacctgcacatgtttcatcttggtatgatagtcccaagcccatgggtgtttcctcgttttcattttcagtgacattccataagtgcctatgtgtaaacttttgaacaattctccagctttcacagtgtttagtgtcatccaagtaaaatacttttgttgcttgtgttgatagaataaaaggatcatccttgtaccaacaactaccatggttgatgcttctaaaatatccatcatctttcattctaaccttcttgctataagtgtcaaaccagtcacaacgaaatagaaccactgtgcgacatttggacatatctgagttataacgcaactcaattatttctttcaatcgaccataaaattcgata

SEQ ID NO: 37176 - DNA, 352 bp, Zea Mays
tgccccaacactagccttgtgcgatgggaaactagggatagaagatttctcatatgcgtgtgtaagtttgttgaacaactcctccattaatagatctatgtactatttaaattgatcttttaatgatttatataatacctaagggattctcatatgcgcgtgtaagtttgttgaacaactcctccattaatagatctatgtactatttaaattgatatttttatgatttatataatacctaagggattgggtatcatcagagttactaatagtgggggctgttgtagtgatgtcatcaggaagcgagctttacttccctctcctagatgaccctctagtggcgatctatcat

SEQ ID NO: 37177 - DNA, 500 bp, Zea Mays
gtgtaggtgttgtcactttctttttccttgtaggtgtcgtcgcttttctcttcctagtcttctccttcggtgtagccttttccctacaaaagaaacaagaatgaaaactcaataaaatgagtgaaacaagagtgaaaactcaacaagatcgggaatatacatacctagatggcccatcttgcatatcaacactaggtggtccaacctccaactcaacatgacagggcacaatttgcatatcaacattagatggtccaacctccaactcaacatgagagggtacatcttgcaagccaagactagagggcacaacctccaactcaacatgagagggtacatcttgcaagccaagactaaagggcacaacctccaactcaacatgagagggtacatcttgcaagccaagactagagggcacaaccaccaaatcttctccaaaagatggatcaactgcatttttacaattcttggcaatatgacctgttcctccacatctttta

SEQ ID NO: 37178 - DNA, 275 bp, Zea Mays
cagttttgtgctaattatttgtctcttgttgatttaaggtattccttccttctaaattcttgtaatactaattgctgccctactttaactatacctattttttattcggggtcttgataagagaaacttgttcccatcagatgaggcccactacctaccagtggattcaataaatgattccttccaatagcttttatgaggaaaatgcttggatgattaagacaaacaaaataaagcacacatgttcatgtaaatgacacttgaattcaatccat

SEQ ID NO: 37179 - DNA, 434 bp, Zea Mays
agccggaataataggtgcgcacaatcgaagccgctcccaaaatactctccgtgcagaagtggcctatgggcgcggctgtatcaacaaaggcgcgcaaccttatcatacaaattatggttacatacacacaacgagggcatcatatattacattggctcaaccttcaggatgatacccatctccctgtagtttaatagcattatcctcagttcctcaccctcaaacagatttcgcagctccccctcacctacactcaccccaatcggcgaggacaacaattctcgcttaccagtcccgtccacgcgaagacgacctctccccacctcgctacgataacgcctaccacttcgcgacaattcactcactctccgcttcgccactgcccttcgtcgcctatacccagtactcgcgcccgggagttcctcggaaccctc

SEQ ID NO: 37180 - DNA, 492 bp, Zea Mays
tgcagacttgagtttgtttagtagtttggggaccaaaatagtgggcacctaagtttacgactttggaccacaaaactacgaaagaacatgaagtgagaaacaatttggtagcatgtggagacacctctgagttgcccttgtatggtaattggctaggttagacagtagggggttactaaaataagtaatgatgacactataaacaagagtagtggtttcccaatacaataacaccattcattttctagggctagctaagtacgcgggtatgtagcaagaaataagctagaatatggctcaaggactgtctaacattgtgttacttagtgggttcgcccactaagagcatattaccccaccaaccctagttatacaatttctccctctagccttcccacactttcgcccttgcctgacgctattctagcacccctcttagatctcccttctcgccatccattgtccctcactgactcattgtcttcctctctt

SEQ ID NO: 37181 - DNA, 342 bp, Zea Mays
gacagcgcgccacctgtctattccactagcaggcgatgtgccgcctcaacatttaatgagccgtgtccattccactggcaggcgatgtgccgcctccgcatttattgagccctgtccattccactggcaggcggcgaccagtccattctgcaggcggcgtgcctgtccattccattggcaggcagtacatccatactgatgcatgcactatgctcatcatcactcgcgcgttgccaaggaagcagccgccgcatatcaatactgtgtgaactgcggacatcagggcgccaggagattgcacaggcgttagttactcctttaatatattccttctgttatgtt

SEQ ID NO: 37182 - DNA, 1851 bp, Zea Mays
gttttcaaaggtccctttgaactctttctgtagaatgtaacattgttgtccagcaactggaagccagtgcgacaggtattaactgccactggccatccaaaagtaaatgaaaacaaaattgtagttgccatatttaggagaaaattctgctatgccgaaacatgatattaatgaaactaataaggtcagtttagaataggggtcctctcacagtctagcattgtgtatgtgcgccaatgcctgcgatacatggctttgttcttctattgtgactgattattgatttttctagtgagctacatcattctgtctggtaatcacagttccttgggactttcatgtgatttaatatggaaatttttgtatggaatatcaatgcctcaaatttcagcgaggaaagcgaagtgatggacggagtccttgggaacttcggcccatcaattctcaatgtggcttacttccaagagctcatggtagtgctctgttcacgaggggagaaacacaggtaaggtaatacacctcatttgagagtatgttgtatctgtcatctctgattgtcatagtatggcatgtctcgtggttttatttgtcacatatgctgctgttggtgtcttgctgatctgttcgatacctgatgatgtttacagaaatttgcgtgtgtgttctatttatatccatcccacttttatttgtaagaatcctactttattacatcaaacattaactgttgcaaaacttaatttggtgtgttttattgtggagttcatttctaaataatacataacgcaaccattaactgtactttagagcattatactttctgctggtttatttatagtctgtttcagctagagtcaaatgcatattaggtttgatatcttatatatttttttcacttattccttttgttcgaccatacagtcactggctgtggtcactttaggtggctatcagatggcacaacgaattgacaaccttgttgatacggaggactcaaaaagcttctatcttcaggtaaatggaacacctttgctgactgaatgatacttcaccttgctaggtcaattcctagtttcctacttactatgtttcttgtgcagcattcttgtttagattgttttattcattgggaatattaccctttttaaggggggaaatctttagatccatatttctgataaaaatatgtgaaaaatagaatgagtttacgtttaaaagaaagaatgggtagcatgtattgcctccttgaaagatttgttatgtaaattgtaaagggagacatgtggtatgtacagctgacaagattatatcctgctttattgctgtgacgattttaaatggtggcaaatggcattgaatctgagctaattcattgtagattgcaagtaaaaatgagttgtcaagatgccatcttatattaaaatgtcttgggtttgtgtggatgttatgttttgtattttagctgtgtcattgagattttttttatcagggtttacatgagtatctagccaagctctgttctgtcctctgaggatcactttgtgatgttctttttgaaggctgtatgcttactattttcactgctaacctgtgaaatggtccaaaatagtttttcattctagtttggagttttgttatcaacacagttagactattagattatcctgcattgttaactaatttctgtgacattctgcagtactcatttcctccatcatgtgttggcgaagttggtcgaattggagcacctagccggagagagattggacatgggatgcttgcagaaagggcactggagccaattttacctctggaagaggattttccgtacactattcgtgttgagagtac

SEQ ID NO: 37183 - DNA, 498 bp, Zea Mays
gagaattctacctaggatatggtgttagcagcagcgtgagcagcgcagtatgcatcccaccaatccgcagcggggccggtgaggcgacccaatgcatataacactttctccctatcggtgcactaagctatattgagcatcttttccatggactttaactagtcgtcagcttgtagtgggtccaaggagttagagaatgtaggtggcatataactcataaactcccagtgcttatccctgggcgaagctggtggtggtggaggtggtagttgttgttgttcctaccgttcctagcgcatttcttggcgttcctgcctcgtttcctatcgttcttgatggatctgtgcttgcatttctgtcattgtgttgtccatttgatgtagtagtcgcatttgagcagcagccatgtcatcaacaggcgggggatttggtgggggattcatttctggttccggattagctacagcccttctttgacaaattcatgcgggtagatca

SEQ ID NO: 37184 - DNA, 560 bp, Zea Mays
cgaggaggggcaacactggaggtccatcccacaagaggggcaagtctcagcatcagcgccaccatccttaccgtggcaaatcttctgactcgggtacttcgggaggaagtactcagaggtttcgggctgttcctaagcccgggctggggctggtgtttttccgttgtggtgatgcgcatcgccgtgtagagtgccagtggagtggcaggtgttctatctgcagtcaggaccacaaggatgtggtgtgtaggaggaatcctaatgggaagctcagatgggagacggtgacttcctcctcttctcagggcactatcaacatgatgtcaagtgctgagcagtagttttcagttccacttcctccgcaacagttttatgtgcctgggacttcttagttcgtgccgatgcagggatttcctcagtatctggctgcgcctactcctgcaccgactactcctatgccgtctcagtttggagctccgcgtctgcctcacccggcggcttagttgggttcttctgttaatttcactccgggagcttcctcttctgcgggtatttccggg

SEQ ID NO: 37185 - DNA, 349 bp, Zea Mays
caaaggttcaaataagggggatagagttccccactgatttaatagttatgggtaaccaggatacaactatagatgtcatcctagggatgaattggttaaccaagtaccaaaccagtcttaattgtgacaagagaacagtgaagctagtgtccttatcaggagaagtgttagtagagttggtcttgtcaggaccgaggaaagggagttgtcatcaagtcaccgcctgtattgaggagattaaaccatcagaggctattaatgtagtattagaattcccagatgtgtttcccgaggagttactgggtatgccacctaaaaggaaggttgaatttgccatagagctcattcc

SEQ ID NO: 37186 - DNA, 314 bp, Zea Mays
gctcgctggagttgagttattgctctcggaccgccatatgtcgtggtcgggtcttcagtcgcctccaccaccggtacgaccgggtccctactattcgcctctttctccacttcgcgtagagtctatccatggtaggaccgtgcccctgtgtgcttgagaaaggtcaagatggtcgtttggctggggcaccagtggtgctctgctgctaggtgtccgcgctgccgtgtttagggttggtggggaagaaatccaaggaccgttggatccctgatgtgggattgtggtgtgaagaggtgatcaaccgttagattggc

SEQ ID NO: 37187 - DNA, 678 bp, Zea Mays
cacggccacgcgcccagttctggcctgttccccttccgtgaccggacgctggagagccacgtccaggacctctccctgccctgccgccccgaggaaattgctctctgcgctgatgatggcgaggtacgaaggttctctcaccatgatgggctttctcctccattgttggcatatgctggcgctgaggcttgaggtttgcaggctgtcttgcagctatctcagcgtatgagggtcggattaagtgttgcactggtatgggagaaatttgacctttcttttgatttaatgctggccgtcgtaatgattcacgcgaagcgccatatgtctttgctttttgtaccagctgagccctgcttaaaggcaataaatgcctctgttcctctcccgaagcgtttagcagctgcacattttctaaagaggtttctttagtttgaatgttgtgtgttttcgtcacccaagaactcttgaacttctcatctgataatggccgtttcaaactatcaagcccattgatcaagcttggcatgaatgcctcgagagtgatcaaccgtttactgatcctgggcagaggaccgcgccaaggacgaattttacatccgtagcatctcccctttctttttttcattttgttctgattttcgatgctctccttgcggctatagatagagacattgctcg

SEQ ID NO: 37188 - DNA, 1016 bp, Zea Mays
ttttgatgtaccgcgtcctgacccatctggacatcacaccattcacatcgaactcctgctcttcagggatttgatatcaagcaagctgaattagcttccatcctgccatcgtctgggtttcatagagaagttgtcacattatgatatgaaggttggtaaggcttatttagttattaaacagactcttcagcagattgttgagaaacaatacaatctatctgatgtttttagcgagttaatagatgaggtcctccgtgccgagtcgggagacaatgaagatgtttatgatgtgcagaaaacaactacaaaatcagatgatattcttccccagtcggcaggttagtcagttttatggtctttacgtcaatataaaaaaattattcaaacatttgtcgatatcgttatgatgccattatttaaaacgatgtttttttgtttaaatgatacgtaaagaaggatgtacgtgttcggccccacaaactgtaacagatatgtctactccagcatttcagcaggatacgtagttgacagacacacagatacatgaattactgttaaggcaacaacatattcgtgtactattagaaagttgccccgatgaagctgacattgatccactggtttatacaaatataacgaaatagaccaaaacacctacaaccccagtggtaatgttttttttattacttgtattttcattgaagggttgtattcatcgttttctttaaaaagcatataaccattacaattttttcagggtaaacatggtgacgttggcaagaacatgccgaccaacacaaacgtcactcctcaagcaacaccacatacggaatcttgctcgccgatatttgatgcgacgccgcaaataaaggtatgagtacatcacctcgttgtttttctatattattattagtagtttactaaacatctaatttatttataccataattgttagtctcccggcggcgtccaacaggcggcagaaacagatctccctgacaatggtccatgctttg

SEQ ID NO: 37189 - DNA, 272 bp, Zea Mays
aaaggatgccttacttgcaaagcatcatgatgtgttgctagaaaagattgagaatggtgagattatgactggaagaggtttaaaccaagaaagtagcatagcaaggcctggagatactagatggggttcacatctaaaaactttgcttcgcattttggtgatgtttgaggcaatcatagatgtccttgaaatagtgaagaaagattctattaaaccagcatgtaatggtggagctttaggtttaattggaaaaatggaaatctttgattttg

SEQ ID NO: 37190 - DNA, 334 bp, Zea Mays
gttccggttgaattcctcaccggattcatgttggccgtagatctgcttagaccggaaacaacgatgccgctgggcgttggacaagctccctccacggcttcaacggccggtaagtcggctacttacatactcaccatgtcatcctcagtacgggttgtggcttcagtttggacggggctgacaatggcgccgccgtccttttgttttgcgtcgtcgggttggcaccggtggaagagagagaggaataagggaagaagaaagacaggagccgtccattcgttgatggacgggcgagattagaatgaggctatatcaagccggtttgatgtcttag

SEQ ID NO: 37191 - DNA, 551 bp, Zea Mays
gttggccaacccggcactggttcgaaaacagagcgggaaatgtgcgtacactagcttgaacaaggcctgccctaaagatttgtttcccctcccgcacatcgaccaggtggttgactctacctcaaggtgtgaggtactgagcttcctcgatgcctacacgaggtatcaccagattgcaatgaaggaatccgaccaactggtcactttgttcatcactcctttcagctcgtacaacatgacaatgtcgttcagactaaagaacgtggggcaatgtaccagtgatgcaagattaaattctttggtgacctcatcaagagggtcatggaagcatacgtctatgacatcatggtaagaccaggcaatccgaaagcctcgtatctgacctcaggttgacgttcaacatgctaaagtcaaacgacatcaaattaaaccccgaaaaatgtgtctttagcatcccagggggcatgctactgggcttcttggtctctaaacgggggatctgggcgaactatgagaaggtcgccaccatctataacatgggaccaatagga

SEQ ID NO: 37192 - DNA, 444 bp, Zea Mays
tcccaaggcttcaagctcttaaactcagctaatattgtcctgcagtcctgctcctaaagaaggctaaggctctcagaatcatagactacaggcccatcagccttattcacagcatcgctaaaatcttcgccaagctgctggccaacagactcacccccacctaaatgatatggtttccaactgtcagagtgctttcatcaagaagagaagcatccatgataatttcctctacgtgcaatccaccattagggaaatgcacagacataagatgcatgcactcttcatgaagctcgacatccataaggcttttgacacaatcaattggagctacctcatcaaagtactacatgctctgggctttggtcagtggtggcgcgaatgggtgtccattctcttccgcacggccacctcctttgtgctcattaacggccggccgggcccaaa

SEQ ID NO: 37193 - DNA, 339 bp, Zea Mays
gcacgtcaaaaacagagaaaactagggactcccatgtgaaaaaccccgagactcagagttaactactgtagacggcgggttgatttatggaaactgtaggggctcttttacaaaggtgaacagctgaaggggggtatctagggttttcggccgaaggattagatttggacggccctgattaaaccagcaccgcgaggaattaatgtgcggtcccaagcgctcggatcctgatccgatggtccaaacgaatccagcatcgacccgagccggtacgcgctgtggtacgttagatccccatccaacggtttcgcgcaactctgcccttacgtccaatttcaa

SEQ ID NO: 37194 - DNA, 307 bp, Zea Mays
tgtggctaggctgatttctgacaatcaaaccttcactgatgatgatgagaaggccatgcttgtggatgactactacactagactcttgggcagcaaggtggaaaggtcgctttctattgatctagattatctggggctgcctagccacagtttagaagagttggactcaccatttactgaaaaggaggtatgggaaataattaaacaattgccttctgataaggctcctgggtcagatggctttactggcaggttctataaagcatgttggccaattatcaaggaagatgtgatggcagttatatct

SEQ ID NO: 37195 - DNA, 278 bp, Zea Mays
acagaagacgatgaaatcctggtgtatatccggtagtgttaaaacgggcgcggtcgtgagcttttcctttatgatctggaaactttcctcacactttggggtccacacaaacttattgtctttcttgaggagttcggtcataggtcttgctatgctggagaatcccttgataaagtggcggtaatatcctgccattcacagaaagcttcgaacttcactgacgttggatggctgcttccattttgatactgcttctaccttggacgggtctacttcta

SEQ ID NO: 37196 - DNA, 371 bp, Zea Mays
catcagttgcgcaaacaagacagtccttctcacagaccaccaaggaaagtcagtctcttgtcaagctcagccacccgccaatgatccaatgatgtttaatttagcaacagaaagcatatcagtggtagaagaattcatggatgtgttcccggaagagttgccaggaatgccaccggaaagagaagtggaattctacatagatctgattcctagaacaacgcccatcgcaaagagaccataccgcatggctcctaccgagttagcataattgaagctccaaatcgcagatcttcaacaaaaagggtacattcgtcccagctcatccccttggggagcaccagtccttttcgtctctaagaaagatggaagta

SEQ ID NO: 37197 - DNA, 278 bp, Zea Mays
aagggcatgactccttcagcatcttgtcgaagacccacggcccccttgcggtggtcgagggctacgcttctccgcggcggcaacgagcttggaggcgagggcctcgggcagccctgctgcgtattcctcttgcccttctttaggttgcgttgggtggatgccttggggcgcggcctcgaccgcctcctaccccgaagcgaacttcatggcgatatccataagctcattggccttggttggagtcttgcgacctaacttgctgaccaggtcccgacagg

SEQ ID NO: 37198 - DNA, 505 bp, Zea Mays
gcagctaggggaaaacacgacaactagggaagggcggtgcagcaatgaaggactacaggggcagcccttgctgtgcgacggaagtagcggtccttgctgggcgacgcaagcaagatctatgtatgaaaaatttgtcacttaccaccaccaaggtctgtgcgtgttgtttctccaaccatccttctagggggcatcttgatctcggcccggcagcgaagaacggatcgacgacgatggtggatggggcgacgacgaggaggtggacggatggggcaatgctgacgaggatggggcagtgaatacagcagcgagttggatgatggggctgtggcgacgaggatggggcggtggatgcggcggcgaggtggatggatggtgcggtggatgcagttggctgcaaaatttcttttaggtttagagttataggcgatggtgtatatagaatacgctagaatttggtggtaggatggctgatttggtgtgattatttggcgggaataaaaat

SEQ ID NO: 37199 - DNA, 381 bp, Zea Mays
tgtcgggtctaccgtctaatcgttgggcgatctctcgcctgccgtcaaagtccagtccaaggtgctcactcgtgctcgtgctcgtttcgtgtttgggttgtagggggcatgtgctgcaagtatatatgagcatgtcccatttaagaagttagtctattttcttaggttatttataccctatcatgtgagccctcctcccctgcgaccctataactctaattcatttcccctacactcacctcaaccacaactcctcattttctcgtctctcgtcttcaccttctctcttctgtctcgaaacttgctcgtcttggtgagatggacgtcagtgagccaccatcgacggtcgacactaccacatcatggcctccaatgctccac

SEQ ID NO: 37200 - DNA, 304 bp, Zea Mays
cgtataaatatggactcacaccagctgcatttgatacgctgtttctgccatttgcattattttctcaatcttttagctcctgctcactagcgctcgctagattttcaagctctctgaacttcggtttaaaaggcgcatttttaccatgtctggtgaaaaaatgtcccaggaaaagaaggttgttgcggaggcgaagctgtttgaggagaagaaggttgtggatccttatgttgctagatttgttgaatcgatggcaaagacaaacactgagaagattactagagagatactgaaaggtttatct

SEQ ID NO: 37201 - DNA, 589 bp, Zea Mays
aacagaagtttgggttaattcgatgcacggagacgaaaaagcccctgttcgcagctcagcagctaagagggcctgccagtacctggtgggcaaatttttcagcaatccaacccggttgggcatcatgttacatgggaagaattcaagttggcattctgggaacattatgttccagagggagtactccagatgaaattagaagagtttatcgggttgaggcaaggaggagatacggtgatgcagtatctcaacaaatttaaccacatctctcagtatgccattgaccaggtggatactgacttgaagaaaaagaattgttttatgaggggactcaatgacaggcttcagcggaaaatggcaacatgcttggacctcacctacagtaaggctgtcagtacaacactagcaatggaagccaaaaatgcgggacatggaaaatcaaaggggtttgggggtgaaaggtcaaatcaagggcctgaaaagagaaccaggttggtgatccgaccttttaatcaaaattgttcttcgcctcacccaccttcatatccattcaagcagctagtctttattcgtcccactactgcccccg

SEQ ID NO: 37202 - DNA, 334 bp, Zea Mays
gatgctttcacctatcgagtgtggacacttcttctccactgaaggttgctcaccgtttcataccggctgggaaggcgggctgcaggcgtccaacagggcagactggatcgctagtgctcccttctcaacctgaaggtgattggcaggaggtggtgcataggagagctagacgtgctgcatctgatcctcgtcgatggtccccaaaggatctccgaggtagatgcttcaactgtctgtctccctcccacttcgttgctgcctgtagacgacctacacgctgtttggtgtgccacggtctcggccaccgggcttctgcgtgctcgtaccagaagaa

SEQ ID NO: 37203 - DNA, 632 bp, Zea Mays
caactccatcatcacagacaatgggacccagttcacgggagagccattcttgcagttctgcgatgacttcaacatccgcatcgactgggccatggtggctcacccaaggtcaaacgaccaagttgagcgcgctaacggtctaatcctacagggactcaagccgtgaatatttcgataagctgaagaagttcgtcggacggtgggcagccgagttgcccgcagtgctctggggcctacgtaccacgccctctagagcgacggggtgcacgctgttctttctggcattcagggcagaggtggtcctgcccatggggctagagtatggctcaacatggactaaaatctaaagcgacaagcaagcaacggtagacgcgcaactttcagtcgatctgctcgacgaagcgcgagacgaggtcgtgatatgctccgccaagtaccaacaagatctacgccgctaccacgacaaacaagtgcgaggcaggtcattcaacgtcagcgaccttgtcctaaggagagtgatggccacaaaggacaagcacaaactctcaccaccttgggagggtcccttcatcgtcgcctaggctttacgcccgggggcttattgactcaaggatggcgacgacaatctcctg

SEQ ID NO: 37204 - DNA, 342 bp, Zea Mays
gacatcttagcgtcgcgacacaggtcaaccagttgaagagggaccttctgtttcttccgctgggcctcttggcgatccttatccatcactgctaacacaacaacaccaatatttcttccgtaaggaaagattttcagctcacgagccatacgagacgtaaaatagtcattgccgacgaccctaggaatagggtccttcctatgccaccgaccccggtaaccttcaacatttacgaagatgtttcccggagtttgggcgaagtcataacctccccaggccaagcacatgtccctgtcaaatcctcaacaaaaaacctataggccttcggccccaccgcttccc

SEQ ID NO: 37205 - DNA, 373 bp, Zea Mays
tcttcattctggtccaccagtacaaggatgtgaggtcatgatacatcttgttactaccggggtgcatggaaaattttgaaaggtgagcttcatccaatattttctttctgagctcggggttcttgggaacaaccaatcggtccccaaaccataggattcctttgctgtcctgacggaagcatttgtatttttccgccttctgtccgatcatttccttaataacttgaacacccttgtcaccaatctgtgccatgactatttgctcttgtaatgtgggctccactgaaatatagcttaaggcaccggaggaaacgacttctattttcagcttgcacaactcatcacatagggtggtgatccttgcatccatatt

SEQ ID NO: 37206 - DNA, 966 bp, Zea Mays
ttcagattctatcatatctaattccactatcgacccaggtggaaaaacagcagacaatccatgtaatagcacccaggaacgttgatatggaatgatcatccacttttgggaccaatgcaccttcatcggactattagctgccaaccaatccataccaatgatcatatcatatgaagccagatccaaaactctcaagtcagtgtcaaacacgcagtgttgaacggaccatctagcgccaactagctggcaagaacacttcaaacgattgccatccgctacctgaaccagcactgacttggccatatcagttacacctgataacctcgatgccacccgggatgcaatgaatgaatgagaactacctgaatcgatcagcatcaccacttcaatgccttgaatcagtccccgcaacttcagagtatggttcaactccaatcctttaacagcagcaatggagatggccaaacattcagtctctatgatctgatcctcgaccacaacatcctcaggaatggtgtcttcatccccttcatataattcccagagttcctgtagagcatgtaactggactgtgggaggacacttatgatcacgcgaccacttctccgcacaacgctggcacaaccctttagctcgacgataagcgcgcaaggcagcaagtttgtcatccaagacacgagcacgatgttgttcagccggctttgtttcttcgatcacagctccagtcttgtcgggtcgtgctgtcaagaaaggaggcactgaagatttgccatacccctttcctgacgacgcccattctggacgtcgatgctccaaacgtcggtctgacgtggccacctcttcctgcagcaaggcgagagcgcaagcagaatccaaggaagaaggccgttgaagaataatagcagcacgaatgtctgaacgaagaccatccacaaaacgttgcacaaaatagagaggatccacagg

SEQ ID NO: 37207 - DNA, 296 bp, Zea Mays
actatgataacttaaccaccgaaggaacccagtctggaggtatatgaaattgtgttacacacacggtagattggcctcttctaacattgaacatgtatagttaatatcttcgtgttatgaatttgatggctagagtacagaaagtttggaatttagagcgagacaatttttgaataggactgcctgagcacattcattttgtgtcatgatggaagccaacatgatctgctagcaaattactatctacagtgtcaatgtaatacgctacttaacacagtttcctttttcaatttcag

SEQ ID NO: 37208 - DNA, 399 bp, Zea Mays
gtggaggtggtagcggagactaggacgggaggtgtggacgcaccggaggacgaagggctgagtgtgtagagtggcccggtgctgtcacatcgggcgagaggggtcctgatggccagatccttcacagaaaaaccaaaagggtcaaactcaatggaacagaaattgtcggtggtgaaccgatgaacagaaaggagattgtgagtgatgtgaggggcgacgagaacgtcattgagatagaaagatccaaggagaactgaggcacctactgaggtgatcggtagagtggaaccattcccaacgacgatcgaagtgggatgggaggaataaggtgggtgagaatgatataacatgcctgcaataggggtggtgtggtaggatgcaccagagtcgatgacccag

SEQ ID NO: 37209 - DNA, 1202 bp, Zea Mays
tgagctcaaagtagtaacgatagttgctagaggtgaggatcgatcggtgtatggctacgtcaagagtgaatatctgcatagcttaaggagatctctcaaagctatgtaccttgttgctgcgaaggatgaaggctgccatacgacgacaaattgtcaacatgatgcacatagattgtgttgttgttaggtctagcaagtcaccaaacatgaacttgccccgttgaagttgtttggcgagaggctcgagtgtctcaagtcatggatggtgttgatgtgttcttggtagcgaggaagtggcaattggcgatgtcgaagaagatgaaattgacgaaggaatgataccttgcggccactcacggatcataaggatgctgatagggaagctgcaggtgatggctgcagtcgttggtggcgtgtagaaccccaacactagtagtcgtagattcctcatttcgccaatgacgacgtgtctcgaagaggtcgagcaatagtggtaatgtcgtggggaggtagaattgtccgttgaagaagaggagatcttggtccatggactaagttgatgcagctctcccgcctatgatggtggtggtgatggcgcgtagctcgagtaccattgcctatgatggcgtcgtacaatgctgattttgtcgagggcattaggttgacacggttgaattgccttgctcatgttacatcatggctgcgatggagaccatgatcgtgggagaagtgatgggtgtcgaggcaccggtaggattggcataagacaggaagaacaagcaaattctatggtgctcaacggtcagggacattgacgaagatgatggtatgttcgtcccattagaattgcttctctagggtcacaaagttctagatgatgttgccatggtcgaccaaccatggcatgtcgaagatgacgtcgatctggaacgtcttggtgttgatgtgaagccaagtgttgaggcaggcttcctggcgagcaatctcattgccactgttgacaagctttatggtttggatgcgctgttccgcaaggttggccggcttggcaaagttgatgtcgatgatgttgtgggtggtgcctgttttgacgaggatgagcaccaagttggcaccttccaggaacatggtgtgtcgaccacacgcacactagagtcttggggctgatcatcatcatgaggccagggtcgacaccgtcgttg

SEQ ID NO: 37210 - DNA, 868 bp, Zea Mays
gtgatgaccagtacagtacgcaaagatcaaagaaagtttgacgccggattgttcaatcgtgcttcctccaaatcgggaccattaccactgcctttgcctcctggtctaggcaatcgttcagcaggctttcctgtcaaaggggaggacagcaagatggctgcgctgaaagcttacagaaaagccaagggactatgctttaagtgtggtgaacgttggggccaactccatcgttgttcaaacacagttccgttacaggtagtggaagaaatgtgggcattagctggttctgctgaggagcacatggtggaaatggaggagtctgctctagaagccaaccaggaaagcgttgaggctatctctgtcgcagctgccacaggaagtgaaggaaataaaaccattcgactctgggcttctatacattgccaacaagtacttgtattagttgactctggtagtactgctagttttatggacagcaacctgtcaggagtgatgactgaggttagaccactacaacatcccttgcaggtgaaagtggcagatggaaggaaattgtggagcactcatatggtacctaagtgccagtggctatgtgagggaaccacctttgtcactgatttcaagatattaccgttaagtggatatgacttaatagtgggcatggactggttagagcaacatagtcccatggccattcactggggacacaaatggttatcctttgtgtacaaggggaaacagatcaaattacaaggagtaaaaccaaagacccaatcatgccccctcatcagtggcacccaattcgaatccttggttcgacaagaggccattgagcagctgttggagttacatactgaatttcaacgtg

SEQ ID NO: 37211 - DNA, 714 bp, Zea Mays
cagtggtattgagccagatgcggcctctttcagtgccatattgtatgcttgctgccattctggtcttgctgctgagggacggagattcttcaaggctatgcaaaaggaatacaaaatagagcccaagttgaagcactacacctgcattgttgacctgcttagccgtaccggcgacctgaaggaggctcttgagttcatcgagtcaatgccgattgaacctgattcaagcatttgggtatcattgcttcacggatgtagaattcacaagaacgtcaagcttgcggagaaggtagcagacaaggtctttaagctggaacctgagaacacagggtactatgttcttcttgccaacatctatgctgaggctgagagatgggaggctgtcaagaagctcaagaacaagattggtggtcgagggctccgtgagaacactggctacagttggatcgaggtcagaagcaaggttcatgtctttattgcagataaccggaatcacccagactggaacaggattgcagagtttctggatgatgttgccagaaggatgcggcaagaaggccatgatcctaagaaaaagtatgctctgatgggtgccgatgatgcagtgcatgacgaggcactatgtgggcacagctcaaagctcgccgtcgcattcggtgtgctgaatttaccggagggacggccaattcgtgtgacaaaaaactcaaaagtctg

SEQ ID NO: 37212 - DNA, 363 bp, Zea Mays
agattatcgatattccaggaatgctctaggtcctcgccggatggcgtggttagcctgtacgcgctgggggacgccttcgtcttgacgatgaaaggaccctcccactttggctccagcttgccccgtgactctgtccgagttgttcggacgagtacgaggtcccctttgtcgaattctcttgggacgactgcgtggtcgcgccaggccttcgtttgagcttggtatttgttgagagcctgcagggcgaagacacggtctccgttgatgaggtctttggaggttggttcatctacatcggggacggctggagcgcttgtccgtggtgacccatgtttgatttcctgtggggtcatggcctccgat

SEQ ID NO: 37213 - DNA, 335 bp, Zea Mays
tttcttaattgcgtgtttgagctaaagtttccaattcaaggaaaaactaatcttttatttattagcgtatctatatagttttctatgtgtcaagagcatcgcttaatgtttactgcatacccatgcaatagtttctaaattttctctgtaaaacatgtgctcaagagatatggacaaacaacaaaaacaattatatttgaaactatgcagcttcttgtccagtggacacgatcacatggattgtctctatagtaaagttttcaaactttgtaactctgactttagagggttgtgaagatatgttaatgagtattgacgtaaggattctgaagtaa

SEQ ID NO: 37214 - DNA, 465 bp, Zea Mays
ccttaccctcgtttctgcacccttgcatgctaaggatgcttatcggcccaaccaattgaactagaccacgctagatcaccgggaacacctcgggttgtcctcggtttttgctgtcgtcgtggacagagggattttcagctagaattgtgcatatgattgagggattagggtcaccaggggtagaatttggtgtcgactaaataagaagcttagccattgcgtgtccctgtcggtacaagttcgtcgtagagcgcgctcaccatcgttcaccgtcgggtacttgacgatgtgaggaaatagaagtgcaggggcttatatgtgaatgtcaaagagacagtgaaatagtgccaatgattctttactagttattcaaatagtcggggtcctctatgcaagatcgccagcgcgggcacacgcgtgggtgcgtttccccccgttcgtgggctgatttgggctggtttgaac

SEQ ID NO: 37215 - DNA, 383 bp, Zea Mays
ttagacccaacctcctatttgttgtagatttgtgctaggacattcttgttcagtgttggtatttgttgacccttcaatgtttatatttttagatagctattaggggttatggtaaaatagtcagggaataacaattattttttaactcctcttgtccattcttagatctaacatccacaatatctatatctgaatgcaatcccctcgcattatgtcttgttgacagttctgttccatgaccttttcaggattttactcctacacctattaaattatttaaggtaccctttgatgcttcaatctgttttagaaatgtctaaattccattggataaagaacgcataagttatacactcattttttttctttagaagcttaagtac

SEQ ID NO: 37216 - DNA, 300 bp, Zea Mays
ccgtcgccgacggtacgtagccatgtcgtcttcttcttcatccgctgtgaatacgccattgggcgaattgtcgtccgagggtacctcagtgatttggcagcggtggagctacacccgggccacacggtggaattcggcgtttccaggatctcctcggttcgcatgcaagacatgcatcagttggggtattttgggaatggagttggacgagtttcgggggcggaggagattcctgagccggagggtaagatagttgtgttcgaggcattttttactgccgaccttcggttacctgtgcat

SEQ ID NO: 37217 - DNA, 280 bp, Zea Mays
ggagatattcccggtacggggtctgccaatttaggattggtgtgaccccattccgctctaccttgacgtgcagggcctcaccctcggcggtcgaaggtacctcgagctgggccgaggtcccttcgggttcgggtgcgtcgttgagttttacggatggttgatatatgtccctggagaagacattcgggggaaccgtcgttcgtcccgaggctattttagccagctcatccgcggtctcgttgtaccgtcgagcaacatggttgagttccagcccatagaa

SEQ ID NO: 37218 - DNA, 432 bp, Zea Mays
agcagtgactgaagagcgcaaacccccacgaggtcgcgctcctccaacggcaggaagaagaaggcaacaccgatgcaccccatctagaggcccggaagatggaaagatgcgatgaatgcgagaagagcaaaggcatggctactacccgggggatcgatccctttttaaagacggatctccccactcgcgccccgaagcatcatgggtaaagactccctcgacgtgctccagggctcccaccctacgacacgggggctaggtcccacatgtcatacaaactgacccaaaatgcgaagatggcgaaccgctgcacacgaaccatgcaaccgccccctggttaagcgctctctcatcctcgccgaaaccagcggtcgaaaaggcgggccgccatgcgagaagcatgcaaccgcaccacggtcgtgcaccattcca

SEQ ID NO: 37219 - DNA, 395 bp, Zea Mays
aacacatttgaagttagcaagttcaaaaaagggatgcaaaatggagctagagatggtatttggggggcatcgaactaaagtaatggacaccagactagatggatgccaagtttggtgactagccctagctccacgatgtctgagtcacaccaatctatgggaattggcctaacagtctcggtcgggcagcattggaccaaatggtagcactattcatcgagtaggccccacctatcagtgcatatgcctattttaaaggaggcatcaaaccatggtcattggtacaatcgtggcattggcctagtttgatgcatgttttacttttcgcaaatgcactaaaccatgggagccatttaaagtagtttcaacattcgagtgtcgtgtggaagcaacag

SEQ ID NO: 37220 - DNA, 480 bp, Zea Mays
gccggcgataagaacaccaacgcagcgtggatggtcgtcggtggccgcggtaaatatcctcggcatcgtggcagaaggtcactgaggtggcaggctccggttaaacggcgacccccgtgccatcaccggaatccgccgcgcggaaagcttgccagcacatctgaaatccgcacttcttctccaactccggtcgacggcctataaattgagctcggactccgcttcttctccacattacgcacctcagtgcttaagcaattgactcaattccgctagagaacttgcgcagccccaaattccctcctcctccattcttgctccgccgcaagggactccaccgtggtcagcgcgcttcgggttagtgtttatcaaattgcttcttgttctagttttcctttgatctcctattgctctccatgccaatcaattgaaattccgccgaagcccatcaccggaatgcacccttgctctgtaaaacgc

SEQ ID NO: 37221 - DNA, 432 bp, Zea Mays
ccctagtaccaatgtgctccgcaataactcgcctagtgcaatttggcatggactatccggtttcatgttgcactgcggcctagtaccaatgtgccgaaggcttcttttctaatgggctttgaaccagcttctcctttttctcatcaactttgacataaaaccattcagtcttccagccagctggccatttggtacgatagctgataactggagacttcacatctttgcgataagaaaaattgtagcagccgaagttctcgtgcagcccgtcttctctagcttttgtctgataatgaagctcatgtgcccggcagaagccttcggtaagcggttctagtgtggagggacgtataaggtcgggcgacaaccatcggaacaaccaacgctgcgaaggccacttcgaccccaatagggaccgaagcctgagcctgc

SEQ ID NO: 37222 - DNA, 568 bp, Zea Mays
aagccctgggcttcccctactaatggaagccccagccaggacgcggtcaacccagcacccgcgcagccatgcagtcaacagccaggaatccaggacgataagcgcgtaaggcaatatacgaatgcatatatatatggataaagatgcgtaaaccatgcataaaggaatcttttgacgcccgaaacacgtggaatgaatatgacactgtggacaacgtttacgactgcataatgacatgtacttgacagcataaatcatgcagtatgtggttctggttctggctcgggcggattccagcgtaaaccgtgagctaaaacagcgtaaatgagttcgaaatttagcgtaaatcctatttctgttttgtaacagcaaacggggcctaaaattacgacgtgaaaatcgcgtgcaaccgatcgtgcgcgggtccttgctcgggccgattccagcgtaaaccgtgagctaaaacagcgtaaatgagtacaaaatttagcgtaaatcttatatatgttttgtaacaacaaatgaagcctaaaattacggcgtgaaaattgtgtgcagccgatcgtgc

SEQ ID NO: 37223 - DNA, 274 bp, Zea Mays
gtaggatagcgtgggttgaaaatataaatcatgtgacatgtgattcgtgttttaaatgcgagatgtgcgaataatcggttagtgtttcactcgtctaatcgctaagtgttgtcataaataattgcgctaaaattgggttataagaatgcagtggtcacgtggtgtgtttgggtgtgacaagtagattaggagtgtggggtctgtcgaagcactgtgatgtcaaacatgtatatcgaagtgcattgtggtggtaattgcgttaagttaatcggta

SEQ ID NO: 37224 - DNA, 325 bp, Zea Mays
tctaattcacttacgcctaaattggtgacttagatcaactcggccatacccaacaacttgacctacatgataggttacataacctatcccacccgtctagaagcaaacgaccaaaccagattctgactaacctcattagactcatagccatctactaaaccagctgctctacctacgtgttacatacagatctatcttaaccaagacaccaatacgaagaagatcaacctcatcaaaggaaaggataagagtcaccgtcaaggaaggtaatcgtcaaggataaaagtcaaaccagatctctagatgcatcaagatccaccatccg

SEQ ID NO: 37225 - DNA, 768 bp, Zea Mays
ttttcatatttaaaatctaatttctaattcgtttaatcgatttaacacagttctggatcgggcctcgatttccagagaagtcaggggcccaggcgtaaatgtaaccgagactcataacactgcagaggtggacggcgggttaaatcctaaatagtccaggggctctttaagaaaagtgcacgacgaaggtgtatcctggattgccagccatccgatcaacaatcgagggctcggattaaatcgtgggtggtcatgaagtcgtcatcccccgacccaatcctagccgcccgatcctaaatctacgggtgagattttaagtgggcgagattgactagggaccgctcgatccaaacccacggcccggatccattcctcgaagcggtacgtagtcgtctaatcctggccgttagttacgcgatcgacgaacaggggtcatcttctttctcacgcactgaaacccggcggcgctctgctccccaacggcggagagttggccggagtttgccatctccgcgcacaagcacccagacgccaattccctagtgctacacgtaaagcggaataaggcgatctcgattgagggctccttaccagatttcacagtgtgaagagctcggcccacggtgagcggcggatccacgacgattgcgtcgcgccggtgagaaattagctcgccccgccgccggattcgctctgtcgagcccacgaacagcctcaccacactcctgcgatgcaccacaccccgacacagcgcgagtctcacctctc

SEQ ID NO: 37226 - DNA, 804 bp, Zea Mays
ccccgcaaaaattacaacgtcgaaaaagaccgcatcgacggtcttcggcattcgaccacaactaagtcaccgcgaggggcagcgctggctaccctcgcgtgcgacacaccgcgcaaaagttgcctaagggtgcagccggactagcagaacaagtgcgcaaaatcgaagtcttccccaaaagactatccgtgcaaaagtcggccaagtgtgcagccggactagcacaacaagtgcgcaaaatcgaagtcttccccaaaagactatccgtgcaaaagtcgcctaagggtgcagccggactagcacgacaagtgcgcaaaatcgaagtcttccccaaaagactatccgtgtaaaagtcgcctaagggtgcagtcggactagcacgacaagtgcgcaaaatcgaagtctccctcaaaagactatccgtacaaaaaccgactacaggtgcagccggaccgacataataaacacgctagatcaagtgcacaagtcccccacgggcacacccatctccctgtagttaaacagcattatcctcagctcctcaccctcaaagagacttcgcaactccccctcacctacactcgccccagctggcgaggacaacaattcccgcttgccagccctatccacacgaagacgcccaccctccacctcactcactctacgctttgccaccgcccttcgccgcctgcgcccagcactcggaccaggaaaaacatcagcatccatcacacgcggagaagcctccgccgcaaccacatccaaggccgcaaaataatctaagtcctcatctgaagactcttc

SEQ ID NO: 37227 - DNA, 552 bp, Zea Mays
ctattaaaaagataccaagctcatataaatgttgaatatgtaaacaagagtacagtcttgaaatatttatgcaaatatgtaaacaaaggacctgatagagcaaaggttatattcaaaaaatccaaaaagaagaagaatcacatgtaaacaaagaagcagaaactatagatgagatacaagaatatctaaaccgcagatatatgtgcgagcaagatgctctttggagattattaggatacgagatacattaccattggccacctgtagaaagactgtcagttcatctaccattgatgaatataattaagatgaaatcaaatgataaattggaagacatagctaaagatccaaagtatagaaaaacaatactaactgaatggtttaatgcaaataagcaatatgaagatgcaaaagaattaacatactatgagttccccaaacaatggcgttgggatggagaaaaaagacaatggaagaaaagacaacatggtttcaaaattggaaggctctattatgtaaaccctgctgaaggtgaaagattctatttaagaa

SEQ ID NO: 37228 - DNA, 324 bp, Zea Mays
atggcatactgtgttgtacagcctgtaataatgtcagagctttggagtttggatcatcaaatgttgatgaaattttacgtacaggttcagtaaaaggagaatgaggaaaatgagacacaatgtattcgatattcatagcttcaaaatacgcatacctaataacacagtagacaaactggtcttattaaattagagaactgaaaagtaaataagcttttttgggtgtcaagtatagaaaatcaacaggcaatcaatgaaaattaataagcacattccagcaacacactgacaacaaacactttatagttcaactgctaagaggac

SEQ ID NO: 37229 - DNA, 342 bp, Zea Mays
caggcccgaattaaagaacttagctcgactgtcgacaacctgcaggtttactgcaatacgttgcatgaggaagtccatatactatactcacaactacaccctagtgagcctgcacaccctgctgaggcggaagccggaccatctcacgttgcgggacgcgcgctgggtggggagttagacctttttgagccccctccttctttgaggttggttgatgtctggactcccacacctgacgatgaggccgccaagagtaatggcaagcaggaataatggtgtaataaaagtagagtagtgtattgtagggtattgtagggtgtactgttgtataataggttgaac

SEQ ID NO: 37230 - DNA, 519 bp, Zea Mays
atctttcttgttcacgaatagaactggggctccccatggtgatgaactggggcaaataaaacctttttctagtaattcttctatttgtttctttagttcaattaaatctttcacatccgttcggtaagctctttttgaaattggcgcagttccgggtaatagttcaatagaaaactctatatcacgatcatgtggcatacctggtaattcttccagaaatacgtctgggtattcacacactattcaaatgtgctccaaagatttctcttccaactgatttatcattgcctctgctgttgctggcatactgacattgacttcaattctttctccttgcggactggttaatgtaaccatccttttggcacaagatattactccatcatacttggtcaagtagtctattccaagtatcacatcgattccactcgattccaaaattatcagctctactagaaagcttaggcctctaatttcaatcttagtctcagggcatgagtgagtgactctatgttcacc

SEQ ID NO: 37231 - DNA, 334 bp, Zea Mays
aaaatttcctacacagagcgtccctgggtgtactgcgggttgatttcctagtaatccgagggttcttttgcaaatcggatggccgaaggggtatcgtgcacacggagccgtccgattaaaaggtgacggcgcggattagatcatggctttaaacgaaccggtacaagactatagccaccagatctatcctagggtctaaattctatgaatacccaatcccaacacatccgttcgatcagatccggacggcacagattgaaaccccgaaaaggtatagctagacctaatcaccaccgttcatcagaaaaccaatgatagaggcaccccttccatg

SEQ ID NO: 37232 - DNA, 600 bp, Zea Mays
ccatcctagccagccaagacttcctcagtttctcgcacctctccaacaaagccatgcaagtggaaagggcaaaggaagaagaaaaaagctatctcaagaggaaattccaagtcctctgagctcagcagcaagaccggcaccagaaaactcgatcctttggatttccacccaagggaccaagcttcagtagaccagctggacccaccccgtcacggttcagtcagtagagtcagagctcctttcatgtcccctcagttgcaagcaaccaaccaccagcgaatgtgtgttggcactgcggagatcccagtcacttcaagaacaactgtccccagctgaagccatcaggacctgcttactccaactcagtgaatggcctcaagaatacctcagcacccacccccaaggcgccctcctccatcatccagtagaacaagacccagtatcaaggaagggcacgagtaaatcacgtcgatgctcaggaggctcagcaagctccgggagtagtgctcggtgagttccttattgaatttattcctgctactgtactttttgattcaggagcatcccattcttttatagccactagttttgtggaaaagc

SEQ ID NO: 37233 - DNA, 497 bp, Zea Mays
tagcgatttcagctgcaaaaaaggtcaaatatgtctatgcaaatgacataaaccctaatgcagtgggataccttgagagaaacatggttcttaacaaacttgaaaagaaaatagaggtattgactgagacatctggaagaaacatgcttttgacatgtaacatggagttattttgtttgtatcttgtttttatgtttcgttcttcataaaatgtgttgggtgattaaaaatagttttcattaaccaaccatatttattatatttggtgaattttgttaatttttttgttggataggtttttaacatggatgctagaaggtttgttagtgcaatatattcaagcaagcacgtgcaaccaatcacacgttattatatttggtgaattttgttaatttttttgttggataggtttttaacatggatgctagaaggtttgttagtgcaatatattcaagcaagcacgtgcaaccaatcacacaaatagtgatgaatttgcc

SEQ ID NO: 37234 - DNA, 299 bp, Zea Mays
ggagtggtgtgcgaatgaacctaaacatccctctctatttatagggtgaattcagtttttttattcaagaaatgcaccacatgaacaccagacgatcggtattgatacggacttcaacgcggtggatggtattgaccagtatggttctaaattctaatgtggtggattgattgacaggtccgtcgagcgatcagtcggatcgtttgccatcgaaaccgtgctcgtcactactaaccacgcgccaagacacacgtcagtggatggtaagggctagggctcgactcaatatataaaggcca

SEQ ID NO: 37235 - DNA, 454 bp, Zea Mays
gccgaggatgcagctcttcatcagttcgacactcaggatacaacagttgatgatgatgatgatgatgatgattttggggttcctcctccgcctcctatgcctccacgctcacatgatcatgaggctgggagttctagtgctgcccctgctgcccctccggctatggaccctgctcttgcttcgattctccagtctatcactcaacagcaggctcacctggcagccgagcaggcccggttatccgagaggatgctctcgatgtttcagaacatgcaggacaggcaggatgcgctttagcagcagctactccaggatcgggctgagagcagggcattcatggctcttatgctacagcattctggtgtctccgtacccccagttcagtctgctccacctcctccgcttcaggctccagttgtgccagcgattcagaccggaccccctattccttctg

SEQ ID NO: 37236 - DNA, 297 bp, Zea Mays
ctgtgcctgaatttactgatgctgaccccaatgggggtgttccatctgctgctgaccccaatgggggtgctccatctgctgctgaccccaatgggggtgctccatctgctgctgaccccaatgggtgtgctccatctgctgctgaccccaatgggtgtgctccatctgctgctgaccccaatgggtgtgttgtctgtgttgctgatgaaaacgacggggaggaagaagatgaggtccctttgactcggaagaacagtcggcagtatgtcgccagtggggaagtagtggagttccttc

SEQ ID NO: 37237 - DNA, 489 bp, Zea Mays
caattatggggctgggcagctggatataaatgaggaccaaaattctggtaaagcaaggggtgctgatcatatattgcttcaagagcagacaagtttctacagaaatctggtaactttgcacaaagatcagtcaatatactatgataatattttagaatatatctgattggcatatcacaggctactagtgctgttcaagcaggtgtatgcgtggacctttttgcaattacaaatgaatacactgatcttacttctctgaaagttctgagtgttgagagtggtggatcactgtttctatattccagtacagatgaatcaacacttccacaagatatgtaagtttagtcactaactttatgtttatctatgtattcagtagttagatcattacttaaaagatttattggataaatgcttaagcacttcttctttatactcatagtggaaagctgtcccaattaatagattatcaatattcttattgtgtgg

SEQ ID NO: 37238 - DNA, 592 bp, Zea Mays
ctaaacattgactgtcaggctgactgaagaacaatcccatggtacagtaaactgaaacagatcgcagattcacccccccccccccttgtcgccgatgatcttgcacctagatccatgtcggcatcacgattcacgcctgaccgaattcagataagcgctcctcggtaagaaatatcacgctggagataaactccagccactgttctcaccgtcgtggtcagtcacgctggcatcaccggagttctccgttaccaggcctagcaacgtgcctcaacgttttaccacgtcgtagtgagtcaccgtaagccactctctgctactggttcgtcgccgatgaggccgccacggtagatgccaccgagctctcgcgacagtgctctcttcactctccgaccgccaccgcgccaactcaaattcacgagccaccgcccccaagtcctataaattgagcacaccgtcaggtccgtagggtagtcacgcatccagccaccaagccgtgccctcaattgatcaccagagctcactaatttctcatttcccccaaacctactttccgccaccgtgaaagaggcctcgttgtggccagcttgat

SEQ ID NO: 37239 - DNA, 774 bp, Zea Mays
gttttggacagatttggagagacattttgagtgggctgctggccacttcatccacacagatccttcttaatggaattccagggtcaagaatacagcttagaaggggactgagatagggtgaccctctgccccctatgttacttatcttggtgatggatgttttgggatttctagtttctaaagctgaggatgaaggattattgcagcccttgtcccccagaccgttgccacatagaatatctctttatgccgatgacgtggtgatgttcctgtagccaagagaaaatgatatccagatggctcttaacattctaaaggtgtttggtgaagcttcaggtctaaaaaccaatgtgcagaaaagtcatgtgtttcccataagatgtggtgaggaagagctgtcaattctgcaagaacatctaccttgtgaaatttcctccttcccttgtaagtatcttggattgccacttaccttgaagaaactaacaaggaatcaagcgcagcctctgattgatagaattgctgatcagttacctgcttggaaagctaatttaatgacgagggctgggagaagagttcaggtgcaagtggtgatgacggggatgcttacttaccttgccatggcattggatcttccccttggagcacttaaagctattgatagaatcagaaaaggtttcctctcgcggggtagaaaggacgtgagaggtggtcattgtttagtggcttatggcagagtctgtaggccacttgagcttggtggtcttggtattacta

SEQ ID NO: 37240 - DNA, 543 bp, Zea Mays
cagaatacgagcagaagagcaggtcgtcggtgagggtgggtcacggcggcgttttacagagcaagggtgcattctggtgatgggcttcggccgaatttcaattggttggcatggagagcaataggagatcaaaggaaaactagaacaagaagcaatttgataaacactgacccgaagcgcgctgaccacggtggagtcccttgaggcggagcaagaacggaggaggagggaatttggggctacgcaagttctctggcggaattgagtcaattgcttaagcactgaggtgcgtaatgtggagaagaagcggagtccgagctcaatttataggccatcgaccggagttggagaagaagtgcggatttcagatgtgctggcaagctttccgcgcggcggattccggtgatggcacgggggtcgccgtttaaccggagcctgccacctcagtgaccttctaccacgacgccgaggatatttaccgcggccaccgatgaccattcacgctgcggtggcgttcttatcgccggcgaggggctgaccctt

SEQ ID NO: 37241 - DNA, 306 bp, Zea Mays
aagctaccggcacgagcccgtatccacgatgtatttcacgtgggcgtcctcaagaagtaccagggcactcctccacaagctacgccaccactgcccccgcttcaccatggagccgtcaccttggagccagcccgagccgtcaagaacaggatcgcccgcggagtgcgccaggtactcattcagtggaaggaccagtccccagcatcagcgacttgggaggatgtcgacaccttcagcgccaagttccccacattccagctcgaggacgagctgcctctcgaggagaggagagatgtcatgtacggg

SEQ ID NO: 37242 - DNA, 452 bp, Zea Mays
cggaacaacacaataagtacgtaaaggtcgaagtctttcaccaaagactccgtgcagaagtcgcctacgggtgcggccggatcaacgaaggcgcgaagccttgtcatacaaattttggttacatacacacagccagggcatcatatattacattggctcaacatcatcctcaattcctcaccctcaaaaagatttcgcagctctccttcacctacactcaccccaatcggcaaggacaacaattctcgtttaccagtcctgtccacgcgatgacgaccactctccatctcgctacgatgacgtctaccactttgcgacaatccactcactctccgtttcgccaccgcccttcgccgcctatacccagtactcgcacccgggagcccctcggaaccctccacgcgtggcaaaggcttcgctgcagccacatctaacgctgcaaaataatccaa

SEQ ID NO: 37243 - DNA, 434 bp, Zea Mays
tctgcccgtgcctcgccgtcgccttgctgcctcctccggtcctcccaccgtcgacggccgacgactcgccacctccgacgtctctggtgctccctgactccctctcctccctccctacgtctccctgttcctaaccctaaccctaatcccattcggatctggtgattggtgataccctaaccccaatcccattcagatctggtgattgttgatgctcgttcatcgttggtgctcctcgctggtcggctggtgctcctcgcctcctcggatcgagttgtagcttcacagctggacggctggtgctccgtgcggtgctggtgcgtgtgcgtgattcccttcctgattcttctctgtctccggtccggtggtccgtggctctgcgccttgtatggtcactggctcactcctcactgcctcactggtgcggtagtgcc

SEQ ID NO: 37244 - DNA, 427 bp, Zea Mays
gttctgtggttcagatgatgagtttggtgggcgcaatatttatacggattcgagtctaacgtctctacatacaatatacggcggctcgtgctactgacatctttgttgctcaataatcgtaatataggtcacaagtgggcgagagagaggagctcccaagtctcttatgcgtcggttgacctacaaattacgggactagagttctaagctaagtcttagacgtctcgccttggctccaccctccgggtcttcaggtctcatcgagcgtgagtggtcgtcttccgtcaaatgtcctcctcgtggtttttcttgtggtcctctccttattttccatacccatacccgcatacccaatggtgcgaggattttgttctatatttatacctatgggatattttttgtcctatatcctaatagtataatttcc

SEQ ID NO: 37245 - DNA, 467 bp, Zea Mays
cgctgagatcggagcagggagatggagatgtggaatcgagggtaggagagagaatttgacgccgcctctagcaatctacgcttgcgtggtggctcgggggtttgggaggacttcgcaggagcaggccagtggccgaccggtggacttggcgtggtcgtcggtgcacgctcggaaccgcgcatgtccatggcgaggacgtttcttctcgctttgtcacagccaccagaccgcatgaattcgtgggcaatctggtctaccgcctctgcgtaaggtatgacaccatgaattgattcgcctaacatgtagcagcatgtagcacctatctgcatttcctaaagtcactctggcaccgtgcggtactctcaccggcgaagtcgccgccaaggtgggtctgggcgccaccgtggtgtgggtttcaggaagaagataacgtgatggccgtctgttccatggatgtgcggtcacga

SEQ ID NO: 37246 - DNA, 351 bp, Zea Mays
caaaatcgtgccacaaatggtgctcctctgtctgatactatagtccttggtatcccatgcaaacgaactatctggtcaatgtagatctctgcatacttctctgtccggtgggtggtgtgcactagcaagaaatgggtggtcttggtcaatctgtccacaataacccaaattgaatcatggtgcctggaggtattgggcagtcctacgataaagtccatgcaaatgtcctcccatttccaagatggtatgggaaggggttgcaaagggcctgctgccttcaaatgactagctttgatcctctagcaggtgtcacactcggatgtgtacttggcattttccctcttcattctg

SEQ ID NO: 37247 - DNA, 278 bp, Zea Mays
attcatgcaacttttgtgccgtttcggttttatgccatatctttcaacatcttattctacgttatatttacctgccgccattacaccccatgcaagatccataaattccgcgcccacgtaacatagtaagcatgtttgcatgtggaaactattccctataatttcgcgcctttaccatatgtttaccgccttgccattaaaacaaccgcgtaatggcgccgtctgtcctgcatgccgcctgtctggactacgttaaacacaggcgcgcctgtctcaac

SEQ ID NO: 37248 - DNA, 711 bp, Zea Mays
cttgccactgtgaagtgccacggtaaccctgagccagtgaccacccctttctccggccgccagcacgccatgactaaattacgagccaccgctctggtatactatatatagagcacacctctagctccattaagtcatcatgaagccaaagcacccgctactgcctccgattagccaccagagagccccaatttctttctcttcccaaatcagttttccgcacccgtgaatacctcgtcgtggccaaatgcctttaggttagctcatgctcttctacgtgatgttttagcctctctcaagtcccctgatactcatagaccctttgaattgaattagatcgccctgggtaacccagaacacgtcggtgtgttcttagtttccaccgttgccgtggacagtgaattcctaacccggaattgtgcaattgattgaggggtaatgatcgttaagggttgaattagatgtcagtcgagttaggggtccgatcgttgcttattttggtcagtataggatcgccggagggcatgttcaccggcgttcaacatcggggacttgggtctgcgaagtaacaaaagtgcagggacttatgtgcatatgttagtgagaccaggaaacagtgccccggattctttactgactgtttaaaaagccagggttctctgcgcaaagtaaaccacatgggcgagcgcgcgggcgcgtttttcctatcgt

SEQ ID NO: 37249 - DNA, 346 bp, Zea Mays
tcgacagtggaggaagtcccctcaccaaattcaggcactacgaccgtttcaatatatcgaggccggtgcgtcaaaaccttcattttcttgcccttcggcacatcggtggtggccgaagcgacatttttcctcttttttcctttcctcaaggggtagcagtaatcaggatatatgaagccaattgcatcaaaaaccctgtttaatcttttcttgccccgacccccgaaggctgcggacaaggcatcatcttcggccttggaatatgtcccaagcagctcgtcgttggtagcttcaatgcatttcaaccagtcatcatttggtttgtcaaacttctctctgtatctga

SEQ ID NO: 37250 - DNA, 301 bp, Zea Mays
caggaacagagggtccatctacccgaagaactccgctgtccacctcttccacagagacatggacacagatcactaggagaaaggaggcgaacaaggtcaaggatcgtcaaattgctcttctggtacctccgccctcaaaggagaacagaaagaagtttgtcactacaatggtcccattctaccccgacgtcctcttcatcggaggaagagtagaatcaactcccatctccgacgatgaaccaaccgcgccaggagaagaacctcttcagcaggaatctcgccgacgaaggaaccgacgctg

SEQ ID NO: 37251 - DNA, 349 bp, Zea Mays
ctctgttctgtcctcagccaagccccgcgagtcccttgctcacatccaataaaaccctagcctacttgacgccctagcgcgaagcttgggactgctgtctccattgttaggtttctccaccatgttctaagcctgccataggaccaccatcgtagagatcaagccaagaagattcgccaaggtagggaacgcctagaacacctaaccagttgaactctacctctttatgttggcctatccacgatctcacccaccgccaccgcacaggacctcgttgtcaatcactgccattgcatccccatcacggattagctcaaggagctttgccccaagggtaaggatatattcc

SEQ ID NO: 37252 - DNA, 582 bp, Zea Mays
ggtcgttcacggggccgtggagaacctgggcgcggggtcccgggagctggcgggatagtcgggacaccgaaattcgtcgccggtgtgggctcttcgccgcatgtcgtgaccagggcgctacaccgcgtcattcacggtatgaactcctcccatgtatttgaattagtccctatcgcgcgtagcacctgtcgggatggagtttagggcactggagcacttgattgggatttctccggcgaggttcgccgtgaattgagggcggcgccgccgtcgtccgtgtccagagggtgaagacgatcgcgggccgttggatgatccctgagcggtttagatcaggccgcgtataccggttcggttcaacgtcacagaaccgtccgatctaaatcgtgtgcacaggataagatcttaggttattaaatcgggagcattgcatttggatctgacggctgctatcgcataccgcttcgcgggagatcagatctaatcgtagttgtccctggttgatctcacggcttggattagtcgataccctttcgccctgtcgtttttgcacaagagccctcgggaaaaatgaaaatcaac

SEQ ID NO: 37253 - DNA, 590 bp, Zea Mays
cagagctcaccatccacagatccgtttaccaccgtcatgttccctgttcgcagttcgatttccccaaatccgtttgccaccgtacgtgactgtctgtgtgtggcgcccctcgccataccccgcagtaaccttccgccagttcgcccatgctgatcccgtagacccacacgcagcagctgcaggagaagacgtggtgtggtgcgttcccctcctagtcaaaatcgccgctgcacggatccacattgtctccacgcctctacactgtcgaggcatgggcgacggacctgttctccggtctgcggcaacagggacagtacctctttcactttatttattattaaatgcctccctctatctctatgctctccctcccctcttcgcattttaggtccctacatctaccgctgtcctcgaggactctttgggtttgttattttttttggagttgccagctgccgtgagagtccctcgctttgctgctgaaccctagaacttgccaaggcatctgttggtgcgcgtgttagctattattttagccagtcatttgctttacaagaaaggaccagatgaatctgtcttacgttcttgct

SEQ ID NO: 37254 - DNA, 840 bp, Zea Mays
ggaaatgggtctagtacccttttctggtctgataattggctgcagggtaagagcatctcgaccattgcccctagactatactctataatcccaaagaagataacaaaaagtagaacagttcaggaggccttgttaaacagaagatggatatctgacattagaggtggtcttactgttggggttttggcagattacttaaagctctgggtctgtctctccgaaattgagctgcacccttacattgaagacagacatatctttagtgtagccccagatggaaagtattcggcgaaagcagcttacaagggtctcttcctgggatcctgtacatttggccactacaagagggtctggaaaacttgggctccatcaaaatgtcgtttcttcctctggctggtggcccataacaggtgctggactgctgacagattggcaaagagggggctgaatcacccaagcagttgtccattatgtgaccaagaacctgaatctattaaccacctgttggtctcatgtgagtttacaaggattttctggtataatctgctcagaaagtttgggctggataaccttgctccccagccgggcctgacatccttcctggactggtgggagacatcttctgaaacagatcaaggaatggtcaagaaaggattgagctctttgatctctttgggggcctggatggtttggaatcaccgcaatagatgtgtgtttgatggtcagactcccagtctcccctctatccttcggcaggctgacgacgagagaagactttgggaattagctggggccaagggtctctccttggcagctcctttgtctgacgtctgaaccccc

SEQ ID NO: 37255 - DNA, 273 bp, Zea Mays
ctgaaccataattacagccttattgtcatgcctaagaccatcaatgaaacgcatagtgtaatacaatggatcggtgcgagattcatatgctgctaactcatccactagtgacgcaaattgttctatatactcggacacaggacctagctgcctaatatgaaacagctgtctaatcagtgattcatgttgctccctaccaaatctctcatgaatgagctcacaaaattcttcccatgacatgaaacgtaaacgacgctctacggactgcaacca

SEQ ID NO: 37256 - DNA, 404 bp, Zea Mays
gttagcattctgttgtatagcgtagccaaggttgttagcatctatgctagattaactcctagattagctcctagacggttttagttttgtatctatcctgtgcacatgctatctatataaagaaacaaagcaagcaccgaggtgctgtgccaccaattatattcttcctattgcattgttcaactgacttgtccgcctcccaaccactgatccaataaatacactaagcaacgcaacaacaaaaaagctaaataaatatatcgactttgttggtctcttcctcttcactcgcaaccctacgctagctgtaatagcgttgaaaggaatccaacaaatcagcacatcgcttgaatgcccaccatggaatttacagcaccatcaggaaggaaggggcttgggctgtg

SEQ ID NO: 37257 - DNA, 403 bp, Zea Mays
tcgggttcgggttttatgcccaatcctaccctctaggcttagggtccaggatcccgccatcagggcaccagatctgccatcataggccctggagcagcctaggtgtgtcctgtcggttccgccacgcgaggaggaaaggagacggcataggggaaaaaggaatagaagaccaccacggtcggtagcaccctacgcctacgcgggccactagccagagccactgtagatggccaagcagactcaccgagccccacgcaactcagaagaggcgatgcctaccggcccatgacctcccacgtcgccacgccacaaaatgagaggagggtccacgactccgcaatactgaccagccgtgcagccctattggcgacctactgtagcagtggcgtagcaggagagggga

SEQ ID NO: 37258 - DNA, 497 bp, Zea Mays
gagcaatagaaggccagagtcaagctagaataggaagtaatttggcatgtactgacccgaggagtgctggccacggaggggtttttcacggcagcggaagaaaccgattcaagggaactccgatgatcactaagggtggtggacagaatagagtgactagtgattcattggcttcgcaacgaagggacgaagagctgtgctcggttgatttggatgaagggggaagagagcgtggtgaatttataggcccaatgagccaccgcgacggccatggtgataaccatcaccggaccttgcttgccaccaacgacgacatcggcactgcccttttctaagagtttgccacgttccgccgcgacagtaatgccatcagatcggcgatggcatggatggacggagaagagtggcgctggtgaccaagcttggccggaaggatcagtggtcgcgtggcggccggaataattatcttccaccgcgacgatcttacccacttccag

SEQ ID NO: 37259 - DNA, 862 bp, Zea Mays
accatcctcgctagccaagacttcctcaacttctcgcacctctccaacaaagccatccaagtggaaagggcaaaagaggaagaaaaagggcacctcaagaggaaattacaggttctccgagctcagcagcaagaccgtcactagagagctcgatcctttgggattccacccaagggaccaagcttcaatagaccagctggacccactccgtcgcgctacagtcagcagagtcggagctcctttcaggccccctcggttgcaagcaaccaaccgccagcaaattcctgttggcactgcggagaccccagtcacttcaagaataactgcccccagttgaaggcacccagacctacctactccaactcggtgaatggccccaagattccctcggcacctgcctccaaggcacctccctccaacagtcagcagagcaggacccagtaccagggcagagcacgagtcaaccacgtcgacgctcaagaggcccagcaagctccgggagtagtgctcggtgagttccttgttgaatttactcccgctactgtgccttttgattcaggagcatcccattcatttatagccactagttttgtggaaaagcatgccattccctctacactcctagaaattcctttggtcacccaaaccccggggtcagacctcctatgccaactcaagtgctcccaagtcagaattctcttaagtggggtagtgttcctggcagacttaaccgtcttgccatcccaagggattgatgtgatcctaggaatggattggctaacaaagcacaagggcatcataagttgtgcaagtaagaccgtccttctcaccgaccgccagggaaaagcagtttcctgtcagg

SEQ ID NO: 37260 - DNA, 331 bp, Zea Mays
caagggcccagattagatcctgatcctaacccaatcagtatgtaacaatgttcgcatgatcgtcgattaacggcttggatcaaaaggagtaaggcactatcacctacaccgtatagattagatcagacggtcaacactaccccgaccaacgccttaccaaggatctgctcctgaccgtccaaagccagatcgacgtcatgggtgaaacaagcgaacgggtcacacggtcttcaatcccagccgtccatccgttgatcaacgatcggccgacatcagttttaccgccaccacacgcctctcaccggccagacgcgcagggaccccccttccc

SEQ ID NO: 37261 - DNA, 442 bp, Zea Mays
actgcctgcacgccacgcccacgacgcggacatgggttccagattcctgaattaatcctgtccagtactgcatgagatcactgtagcaattagtgtttgagtttcattaaaaagtaataagagcaacgcaattagtgtttcacaccgtagcaacgtactccgtatctcgtactttgccctttttttcttcccgttcggatgctaaatcatattcttttcccgccaaccacggattggaaatggaaaaggcccggcccaagttgagattctgtccccagccggccagccctcgcagcagtcttccctgaccgtccacccatcacctcactggctcactcatcactccctcagcacctcggccctctgcagtctgcgtctgccccctcttccaggtcccagcgctgtctagatccagatgggagctccaccgctgcccttctcc

SEQ ID NO: 37262 - DNA, 364 bp, Zea Mays
tcacaacaattttggttgttatggcttcgttcctcattctgatgtaagttacccagttccaacatttcgaaaaaggtggcccggggcttggatgtaggaatggttttatgttaagaataatctgattgaaagggaagacataaatgggattatccagtgccccatctgttctcgctttggccttagaaggctggctactgcgcttgggaatgataccgaagcatgccagaaggctttcaacaatgtttgtgccttcattggcacaagagacctagttcaggagcacatagcctacagggtgtggccacttgtgaattactgcgagatgccgaaggagactgctgccaggtccagtcaaggtggt

SEQ ID NO: 37263 - DNA, 347 bp, Zea Mays
gcgtaagagatggccagctttgcatgcctaatgcacatgcttcctcatcaatcacataacacatatataggggcgtggtgctcgtagtacgttagtttccgtctcagcagacagcaggcatgcaatgacgctcgcggggagatgatatgatgtcgtgcgtctctatatctcctgtctgcccccgatgccacaagaaccagcccccttggccctgacgtggccagcggcggcatacgtatagtatcataattcataagcactcctcgctctgtatatctctttctatcctctccccgacgccacaacaagaaccagcgtgttccctccccacccgtcctccacctcca

SEQ ID NO: 37264 - DNA, 364 bp, Zea Mays
aagcaagtgctacatattgcttcatgctattccccgtacattcttgagtatgtgggcaatcaacaaccattttcacaacccacaatgtcagtagcttcggcgagccactccccagctgcatgggccttgccaccaccatcggtcatggctccaacttcgtcccacaaccaatagcctgaagggcatcaccaaattcagcaacaaattgatgcaagggaagagttcgaagcccggacagttaacaacactgtaccagaatcaaggcacatctactaaagcaacaaaggggctggatcaaaaaactttcatacacacctaatgtaatttcatttctctcaatttcatgtttttgcctcaaagacaa

SEQ ID NO: 37265 - DNA, 299 bp, Zea Mays
gggaaatccacgatcctcatccatcgccggtcagccgtctataaatagagcgcgggcacggcttcgtcaccacattccgcacgccagcagctaagcacttgactcgagctcgccaaaaatacccgcgcagccccaattccctctcttcttcgttcttgctccgccgtgaagagcttcttcgtagccagcgctcctctgttcagtaatgatcaaattgctctttgttttagttagtatgtgatctattgttgcccctggatgcaacaatttggagtttgaccgaagccccttgtcggaac

SEQ ID NO: 37266 - DNA, 466 bp, Zea Mays
aagactgccagccgaaggggtacgcgtggcgctggaccgttggatcaaattctaacgactcagattagatcgagcgcgcaccgaaccggtatgccttaatagctgcacgatcccagatctgcggtcacagttgcgtttagcctctgatctcaccacgaccgtccatctagatctacggttctcaacacctctccgctctgtccgcccctggccgttcaaacccggatcaacggtcgatgctacttcttcttccccaggcgacagaacacgaccgtgcctacgtagccgcggcggtgcacagggtcccaacggcggagccatggcggagcgattctccggcgagaaatgaacagcccagccaccgtctaatctccacggctcaccacacatcaacggcgcagggcgcgtcttcaacccttgacccgaaccaggcggccagcagcggcgccagagcgccacccggcgg

SEQ ID NO: 37267 - DNA, 526 bp, Zea Mays
cgaaagtttgcgataaatcggcgatagaaatcccccgaatcgtcgatacagtgtcgaggtagatatcgtagccattgcagtgcgtcctgccccaaaacaatggacaagtaccctgtcatgatgtcctctgttgccccagcagcctaggcagcagttgtgtagacggccaaccaaccccctgggtccttcttgggctcatatgtgtcgacattggagactttaaaattgggaggccattggatggccaagaggcgaggggtgagcgcggagacctcgcacatattctcttatcgatgatcatgtcgtcgatcccagagaggggagcgagtattaggtcgcctcgaccatccttgggtcggactgttgtttgaggctgctgctgactcgatccgggttgtgcggctgtgtgccagcataccatgatctcggttgtattcctcccggtgccttatttcattctcatgccaacgattgcataaagcactaatatttctccgtgcatcttgtcggctgttgatggcgtgac

SEQ ID NO: 37268 - DNA, 510 bp, Zea Mays
ggattagtgaacgtgtgccgtgctgcatcatatttattgttgcgctacgtggatcaaagtgtctcgagtgcatgccgccacatggttgtatgcgagacagagcaatataagatgtgctcgacatgaagttcaatcagagtaggtagaaattgttttggcttaagtagagaggtgatggcatgccaaagtagtcgttgcttcctctatgtttataagtcgagtctatacgcgttatgcgttccttaaattacgcttcacatatagtgtatgattgtgtttaggactttgaatggatgttttcgagtggacaaatagtttcctaatgcaattatgtgtaaggtgtttatagtgacactttatctcaaaaagtgttatgcgtgcgcataaataagaaataggtgtatttggtgtagtgttaattgattttgggtgcatgtatcgcaagaaatgaattagtgcgcatataggcgatgaatgggtgtggtgaagtggtgagatgctccttttaat

SEQ ID NO: 37269 - DNA, 430 bp, Zea Mays
ctctcttctttcctttccctcgatgcagtgagttggagagagaaattgggggagcacctcgcgaagaactcagtggcgcttgtgattggttgtcgaggcaggatctgggagctgcgcgtgctcatcctgtgccgatcctaggaccctattgtgcctattgacttggttccgcggtggaccaccatcgctgggtggatgctcatcggtgggtggatcgtgccatggtctgggtctcctacacatgatagctcggtaagaattccgtcgaacacctcgcctcagttcttggaccgtgtaacgcgatttgattagcagtttgggcgtgctgctcgctggaggggcaccgctgtaagggaatgagcgccgctgcctgttcggctaattggagaaaacggtcgggcgtgatctgctgggcggctgtccgccttgc

SEQ ID NO: 37270 - DNA, 338 bp, Zea Mays
gctataagatctttttgtgccttcggcactgtcacttctgccgaagggctcagaacttctgatatttttgtttcttcgattctaggttctttaattttgttaatcttcggcattgtagctggttcttcaatcttttgcgtgggggtaggttcgtcggctttagtagctgaagatttttcaccgctgaattcaggcactgcggccggttcaatgtatctcggccggtgagtaagaaccttcacctttttcctctttggcgcgggtttgcttggagcagctgaagcatcatccttcccggaagttgcactttttcttttcagcccccgtgacgggtagcg

SEQ ID NO: 37271 - DNA, 428 bp, Zea Mays
ttgctctggtaggttgttacgaagccagagcaccagccctcacctccgattagccaccgtagcgccctaattccgttcttcccccaaatcgaccaaaatcgccgccgttagcatcacactgtggccagccatccataggttgattcatacttctctgattcgtgttctagcatcctttgagtctcttgttgctcgtagacccgattgattggactagaccgcgttgagtcattgagaacacctcggttttccctcgagtctcgccgtcgtcatgggtagaagaactccaggccagactaactcaattaagggatgaattaggattgctagaggtggaattaggcatagaccgacttagggcatgaatggttaggtgttgcggccagtgcatgtttgccggagagcacacacgtcgtcgttcactgtcg

SEQ ID NO: 37272 - DNA, 528 bp, Zea Mays
aaaggagcaagggatgagtgtcctcttgtagaatcctccaacagccacctgtcaaggaaggagacgggcattaaaacaggtcgccaacaggccagcacatagtgagcaggagaaacacagtgaataacagcacctcatggatgtacataggccataattagatcataggcatagcgtagaactgaaccaatcacacaaactaaaaattcacgaggtacaagcgtgcaagcatgtcaactaacaaaattgtcgaaaggagcaagggatgagtgtcctcttgtagaatcctccaatagtcacctgccaaggaaggaggcgggcattagaataagtagctggcaggcgagcaaacacagagaacatgttgagcatgttaaataatatttagaccatgtctacgaccattcttccaccagtaccttagcacaggaattgaactggtaaagaaaattgtaatttctctactacctattaaggggcagggggcatccacaggcgaggccatgcccccgcggccccatcctcccc

SEQ ID NO: 37273 - DNA, 317 bp, Zea Mays
catgaccgggcggtcaaataagaggaaggcatgtgcgctcgagacggggaagggggaggatgccatgagggcatctccaaagttgaagaccaaagcagtgtcgaagggcacatcgaaagctcaggatgctgatgtggggcccactgtggtgcttgatgtcaacgattttgacatctctgatatgggtctgggcacaaaggtagggacagagtttacatctccgtcaggtgcgagtatatatattttattgtgattgatattgatggggttgtttttaaactcctagcaaacatagggggtgtcttggctaccgtgtg

SEQ ID NO: 37274 - DNA, 461 bp, Zea Mays
ggaagcggtggcacatcttcagaagaaccattttcttctgcatttccattagttggatgagaaggaaagatattgaatgacttctgcgttgcaccattgagcatccaatcaaagcttgagatgactgacggtgcatcatctctggagtcgggagctagtggatctccaaaaacttcagcactgctattgaatgaattcgatggttcctgatacacagcttgatgaaactcatgctttgtctctgtgtttacagttagttctggagttgtagtcgcagtggttgagctgcatagtggaacttccccattttctccaacaatcttatagctgccaagacacagatcttgtccaaaagtagcttttggatgtaaatagtactgtccattatttggcatgtcatgtttgctgttgattactgactcagttaccacattaggtagatcaatgcccttgaatgtttc

SEQ ID NO: 37275 - DNA, 277 bp, Zea Mays
gtcgtcataggcttgaccccaggctctactaaccgctcgctctgcagacttcttcgctatcctgtacttctctatgttgtctgcacacttgtcatgatgtaaacgtttgtagcaatctttcttctccttgatagccttttggacatcgtcgttccaccaccaagtgtctttaacttcccttctgtttccttgactcaacccaaactcttctgaagctatctttcggatgcatgtcgccatcttcctccacatgatgtttgtgtctccctcttctgcc

SEQ ID NO: 37276 - DNA, 522 bp, Zea Mays
catacctctgcggttagtacgtagtcgccggcgattaggtgcttcttggtcatcttgttcagtatcagcaacatagtcatcccagttaccttcgacgccctcatcatgcccaccattggtattagcatgcatctcatcaaatcgcctcaagagtgcgacaaggctcttgtcaatatgagcaactgtcatttccacatttgcaagtttggtgttagtgtcgatctgtgtggcctccaattgccccatcttttcattcgtcacgtgcaagtcattatcaagaccttccgtgtgcatcttcaccagccttgcaaagtgttgcatgatgcccttggtgcgaggagagtgtggcatattacgagaagcatcatcaacctccaatcctgccatggttagacgaacagaggcaacaagataaaaaaagtgaaggaataaagactccaactattaggatgtagctactgcaaggtgctcactctcaacctgccacactggctcttaccaattcttaccttgctcaacagg

SEQ ID NO: 37277 - DNA, 396 bp, Zea Mays
gaacgagagagtattgagtatgtgtatacgtgcaacaatactgatgtgtatacgagagagtatgtgtctgtctgagtcatctccgagccgttcgacacatctgtgggcatctaccagagattccctactagggatacggagccgcccccattccatcctcatctgctcgctccgtctcccggttcatgccatccccatacggccactaactcctacattccacagatgcgtttccgtagcaattccttgcctggtgggaaactcagggcagatttgaagactgccggcaaagatccagcgaggaggtggcgtatccatcccaaaatcgcaacatctggactaagggaaggagctgaataagcacgtatcaccctcgtcgtcctcgccgccaatgcc

SEQ ID NO: 37278 - DNA, 721 bp, Zea Mays
ctcctgggggctgggacactaactcttccttagttatgctggtatctagcctcgacacatcgagcctacatcccaggggggccgggtatcaggaaaggagttgataaaaccacacacatcaagaacaagcgtcatacagataagagctatttaattgatagttcccaaaaatatcttacaaaaacaaagttattacatcctccttcaagcgaggccctagccttatgtctacaggtatgacctactcgacatcagtagggtcacgctggaagcacgcggccgccatctccgcgacatcttgtacgacctcctgggtggcgtcttcagtagcagcagcagggccagcggtcaccgttggaggcagcaccgaagccatcaaagccaaagagatggagccgcagcttggctcgcttccaaccccatggaattggagctagaccagttcatggcggtgtaccatgaggcactggtgaagctcacgcgaaagatggagccgcagctcagcttgctttccacctccgcaaggctgatgaacatccttgaaactgagcactagcggaacagcgccacccccacgaggccatgctcctccgacaacagcaagaagaaaggcgagatcggcagcgccaacacgcaggaaatgaagagcacgaactccccggtggcgagttcgccatgaggagaggcgccgacacggatccttccggcgaacgccggtgca

SEQ ID NO: 37279 - DNA, 453 bp, Zea Mays
cgaattaggggaaaacggcgttacggtggctctgggtgaaattgggggcggggattgaggctacacagccgtaagagactgtagtttcaccgtgcactatcaatttgggaagaggtagagaaggccgtgtgaatttctggttgtactcaagcttgcttgaagaacagcaagcacctcgccgaggacccaatggctatttatagccgtggcggtccggcgatcacttcgcggccacggacagcatcactagcgcatgccgaccacgtcggtaggaggtacagtgcgggagaacttcggcatgagcgccaccgcggcggaattcactggtctcggtggccgccggtgaagtctccggctggactcagggaacggtgccacgtatgcgccgtttaacttcgactctatccatttcctatcgcgcacgaacccggacggcggcggcacgaattttgg

SEQ ID NO: 37280 - DNA, 327 bp, Zea Mays
aggctgaaggtctcgtcatagtccacctcggaacgccgggtgaagccccgtaggatccaacgagccttgtaccgatccaaagagccatccgccttcagcttgtgcttggagacccatttcccggtgaccacattggtaccagaggggcgtggcaccaggtcctaggtgtgtgtggttcgcttgtaaggcctcgtactcctccatagcgcgttgccagttggggtcgacgagcgcactatggactgaaggatggctcgggggagagcgccgtagaagatgacgtcgagaggactaggtggtcgacaggccggaggacaccagtggctt

SEQ ID NO: 37281 - DNA, 344 bp, Zea Mays
cgacggggcaatggagaaaatgtcctattggtgggtgtctacatcgacgacttgatggtcaccggtgccaaggatgcagaggtggcagcgttcaaggaagagatgaaagccaccttccagatgagtgacctaggacatctcttcgtctacctggggattgaggtgcaccatggcaactccgggatcacacttcgccagactgcctatgccaagcacattgttgagctggctgggctcaccaattgctacccagctctcattccgatggagaggctgaagctgactcgcgacagcacgacggaggaggtggacgctacacagtaccagcattgtggggagccttc

SEQ ID NO: 37282 - DNA, 358 bp, Zea Mays
aggatcctctatctgcttgttcttcaagtattccaacaacgtttgtgcatcattggattctaggtacttcttccgctcgcgtccaatctcattattgcaatccattcgcaagaagggaactttgtcagccccgccgtaaaactgcttcatgaactcatacacttgagtcggcttcattccggcttctcgtatctgagcaatcagatgtctgtctgcatctataacatgtcgttgtgacctcagcatgtgcttcttttttggtgtcgctaaaatatgattgtgatcaagttcaaccttttgcaatgtccaaattccctctctgctgacattaaactttaccagagctttgcaacctgtc

SEQ ID NO: 37283 - DNA, 401 bp, Zea Mays
tacaaccttcaaaatggtatcaaagctaggtttagcccccctctatccctcctacgatcaccttcgtgtattttggtgtgcctcctatcctaatctttctgccattgcccctcataagcttgcgccccgttccactcgttgcatcttccttgggtactcctctgatcacaaggggtaccggtgcctagacctctccactcaccgagttcttgtctcccgtcatgtcgtcttcgacgagtctgacttccctttcttcgtatcctcttccgctgcctcctctgagtaggacaccctcctcgagtgcggattctattgctctttctgtcgtgccacacgtggcctcgacccctctcgcgctgccacgtgtggccccggcatcccccgcgcttccacgcgcagcc

SEQ ID NO: 37284 - DNA, 315 bp, Zea Mays
tctgtaatagctgttattttccaaataaattggggctcaactgactgagggagtaattatggagcaatgtgtgtcgtgtgcctgagggagcaatggagcaatgcgtgtcgtgttaaccgctatgcctatactaggtcattgaaattgcttagttatgcctgaatttgattgaccttgaccccttctattacttgtttcttttggtcatcatagttaggtgtattcagtatgttcttcctgggttaccacttcagttgctgatatgcattgcctctgcttattgctatgcattcctatgctgacactaatttcccc

SEQ ID NO: 37285 - DNA, 684 bp, Zea Mays
cgtaggtcaacccgccaacggtccagaccccttcttcctcagctctcccccgccgatctcccaggttgcccagcctagctccggcgcgacgacattcctcaacccaaaccccgatctctcaccacgcaacccgaccatcgagtggccaatacggtagcctcccagacacagatcgctccaccactacagcggtgcgcccaaccccggaagcatccacaagcaatgaagagggtacacagaggaagcgatggctcaccgacggtgatggcggggcaaagcgctgtgcgatccgaggtcgtatccaatcgccacacgaacacaccggcttgctaacggcgtgaacctgggaataaccgcaagcggcccgccgcatttccccgtcagcaatggcgattccaaggagccaagggcaaatgggatgggggaaggtcgccgtccatacatatataggcatccatgcggtacccaaaccctaaggagtccttctgttaggattcggcgccagggaaatctaccagtcccgcgaaggttgcggcaatggcgcagggaacgcggcctgaccctgtgggtccacaaaccggtgactaaaagcgcaaccgagattcaggattttgtttcattgcgagctgacacccgggcccacgtggcggtagagtctatggcgcgcatcagaggcagacgatc

SEQ ID NO: 37286 - DNA, 341 bp, Zea Mays
ctctgatggctccattgagtgctacaaagtgtgacttgttgcacgtggttttcgacaagagtatgggcgtgactatgaggaaacctttgctcttgttgctcatcagaccattgttcatacccttgttgatgttgcctctattcaccggtgggctatctcacaacttgacgtgaagaatgctttccttcatggtgagttgcgtgaggaaatctacatgcatcctccgcctggttaccttgttcctgatggtcatgtatgtcggcttcgtcattctctctatggaatcaagcaggctcctcgtgcctggtttgagcgcttcacctctgttgtcacttttgttg

SEQ ID NO: 37287 - DNA, 583 bp, Zea Mays
ggccctcatggctccatccgacccactccgcttcgccacaattgtcgacgttctgtcgctcgtatcggcttgaccttatacgttgtcggtcgcagccccctcttccaccttggtggtagcccttgccactatctaggctgccatggatgttgcccaggatcgcgaacgtgttgcgtcccttgtttgggagcacgagcacaccgtggtcgacgctttgacctctcagatggccaaagctcaacaccttctcagtcacgttgttgcacccacttcggtgccccaatgacccaccctgctcagtgctcgattccactaccatcgccacgctccaagctcaagcggctgatgtccagatacgacgtccactaccatagctcaagctcaagcggctcgattccactaccatcgccaaagctcaacaccttctcggtctccgtcgtcctagatacgatgtccacccactacgcttgttgacgtgactaagtgctcctcacgctccagcgctatgcgctcgacgaccatgttcgtgtcgacgttgttcccccgttggctccgtcttgggtccatatggatagtgtggtcc

SEQ ID NO: 37288 - DNA, 311 bp, Zea Mays
cccactcccaccgctgggtcgtcgtcacccgttgctccacgctgacattgacacccacaagacgtgcggcctcggccccgccatgcccttagcgcactccctcccccgtagtcagcgtcccacgcactccctccctccgcgacgcccagattccactccatcgcatccccgacaacgacaacgagggcggcatacggtgacaacaagggcgacgacaatggtggcgacaacaacagcgagggcgaggccgcctatggtaatgtgccactcgcttaagtggtatagtttagtagtagtagtagtagtagtag

SEQ ID NO: 37289 - DNA, 374 bp, Zea Mays
ttaatttgtaattcagtaggggctctttaccataattgccgaggtgaaggggtatcgcgaatccacaaccgtcagatctaactcaacgcgccagattagatcttaagcgcagtgaaccggtacgccatcccggccccttggatccggaatcgatggttgcaatttaaaaaagcgaagacttgatttggatcgtggattcaaagatctacgactcagattaaatgacgtgaagcggtatgggagtcctgatccggttcgtccatcctcgcatcaacggtcgacagccaaccctcccagatctaatcttagcccttagttcaaatccgacggccgcgcgaggtcttctacctcacggcctcccagcgttccttctc

SEQ ID NO: 37290 - DNA, 310 bp, Zea Mays
tagagggagtttcagatggtgtttgaattgtgtaatttgcattagagcttgtttggaacaatggggtttgctctacaaacttctaggattttacaaggatttggaatttggatctcagttcccaattccaaacagagccttagtgtcatgactcatgtcacctagtcacatgtctcttggtgcgcccccttcttgttgcacatgtatggaatattatgatggacgtttcacattaaaggctggcttgcatactttggcattttgaatcttaatggtgcgtaatttatgaagagtacacgaaagaaacttg

SEQ ID NO: 37291 - DNA, 387 bp, Zea Mays
accatccaagaatcgcatgatgtaatacaatggatctgaattgggactgtatgcatgcaactgatctatgagctgggaaaatcgatcgacataatcagacactgtggtggtttgcctgacatggaacaactgcctaataagaacttcatgctggtccttgcgaaatctatccatgaccatgtgaccaaactgttcccaagatattctactcaaatgacattctaccgattggagccatcgtgctgcagaccccgtaaaatgcatgcgagcaatcctaatccacacactagtgtcaacagaatacatggtgaaataatcttgacatcgtgtctgccatagtttaggattttccccatcgaaccccggaaatggaaccttaggtatgtt

SEQ ID NO: 37292 - DNA, 400 bp, Zea Mays
aaaatctcttcgtcgaccccgccgaagagtatggatccgggctggtaaccgcaggatatagcaaattctctcaattttgatttatcctcttcagaaagttcttggccacctaagtgtcaaaggtcaaaatccttgtcttccgaagaggcatcttcaattctttttcctttgtcaggcgccacgactacgatttcctctgcaaccacattcgatatgagtttgtcgatttctgacattgtggttgcgagttcatcagcttcggctctggcggtatcttcggcaacaataggcacaaatgttttatccgccgaagctaggggcgacatttgttcaatagcttgcatcacattcatcatccgtcgtttcttctacttcccggccttctcttttgtagatggag

SEQ ID NO: 37293 - DNA, 332 bp, Zea Mays
ataaatgcaagcacagatccgtcgggacgataggaaatgaggcatgaacgccaagaaatgcaccagacacgacaggatcgacaacatctaccacctccaccaccgccagctccacccagggataagtaccgggagtttatgagtcataagccgccgacattctccaactcccccaatccactacaagctgatgactggttgaagtccgtggacaaggttctcaacatagcccaatatactgacagagagaaagtgttatatgcattgggtcacctcaccagcccctctgcggattggtgggatgcatactgcgctgctcacgctactgccaa

SEQ ID NO: 37294 - DNA, 406 bp, Zea Mays
gcgaaggggtacggggtaatctcggccatcggatcagagatcagcggcccagattagatcgcacgggcgcgcaggcacggctgacaagtggggtgtcggtaccctgaatcatgggtaccacttactgcagtgtgaaggcgtggagtccatgcgactgcctctagccacgtggaaaacagcgcctgaccccgccacgtgggcagcaccggggccaccacgtggccggaggagacaatatactccatggtgtcaaaagtgggtccggacccccacgggaaagtgccggacccctggatacacagcccgaacctcctagcagggtccatgacctccatgagtacagactggaccgccgacacgggtcccggacctccctgtgtggggcccaggtcactcacaacaaggt

SEQ ID NO: 37295 - DNA, 292 bp, Zea Mays
gccaggatacgtgcattggaagggcagcaactacttgaggacgacccctcagtcgtgtacctcactgcatacctgctcaccctggatgcccagtatgatttcttggctcggcaccaccatcagatgattgcccgagcagaagatgcagagaagctcaaccgtaagctccatgtggatctcaccatagctcaagcccatgcaactgccttggaaagtcgtgaagtcattgctgttgaagccctaaagcaagccaaggatgaacacgtccagaagttgatggaggcctacttgg

SEQ ID NO: 37296 - DNA, 589 bp, Zea Mays
agggcacagatgacattaattcgtacaggccgtggacggcgggtttattaccctgaaccctgagggctcattagcaaaatcaccacagccgcccacatacacgcaaaccacagccattggatccccatacaactccccacaacatatcccgaagcggtactcgactacatcagcccgatctaagatcaagggctgacacacgccctaatctactgaccgccaggttcgcatccaatggttgcgaccaaatatgcgaacgagtaagtgttgttatgatctctctcgttcatatgagatcgacggccacaagccttttcttccccacggtgccgagtgaggcggcgtaaacggaccacacggcggatgccctcaccggcgaacactggtatggctcctacgcaccccaaaaccaaaatagaccaaccctacgtgaagcaaaggtgttcgggaataagtttataggcgacatacctaggaagatgacctagagaggtatctgcgatgagtagcggcttggcgatgctccgacgagcaattagttgcacccagatatctaattccccatagtagggccccagacacctttggc

SEQ ID NO: 37297 - DNA, 295 bp, Zea Mays
gaaaaataagctagagaaaaatgttaaagaacttcgcgaatccaaggaaaagtgttttgaaaaatccttggattgcatgaagaaattaaaaactagcttctccaaagtgggcgcttactcttctgaagaaaattttatccgaggcgaccccaaaggtgttattgaatggataagtggagaagctgaagctttcgaagaaatactgaatgaccgcggggacatctgtgccttctccggtgctcgaggaattgcagctatcctggagaaggctggctgtgaccatgttaagactata

SEQ ID NO: 37298 - DNA, 417 bp, Zea Mays
gcggatgtggggcggatgcggaggcgcggcagaaccatgtgggtgtgaacgcctacagtagtaacataaggaagggaagggcatgcttacatgtagcacaagttatatgttagagactgcagagcatctgcggtgaacttgttgtcatctcgtagcacatggtaatgcgtaggacggcttgttccctgcaattccacgagcagctataatcttcagattcctcatttgggggaaaaatgtctgaattagttgtaacatgctacacacataccttggccccagcatggatgcacacgaagaaatcaaattctgttgggtggcagatattattatcaactacggtgcctgcaaattccataaacgtttcagcaaaagcattgtaaaaaaacagcaaatgcgcctgcatccctaaccagc

SEQ ID NO: 37299 - DNA, 897 bp, Zea Mays
ttttgctgggttatttttgttattcatgcctgaagaaaatgcattttggtatgtctttcttgtatatggaaggaaaaaagattcaatggccaatttttagtgcatgactgtatggcttctccattttcacttgcttttgaatttcagggctttagtaggggttattgatgattattttgatggatactacactgaagaaatgattgaatcacaggtacttttgaatttatggatcttgatgcatgcactcttgtccttggaacatttgaactatgttgctgctcaatacacaggttgaccaactcgtccttgaggaggttgtacgagaaaggttccctaaattgggtatgttttccaattatatcgctatattcatctctgtaatgtttaattatatgttaaaaacacacatataggtttctgtgactattgcttaatagtttgaaggcaatgtatgtcaaagtatctacacctaatgtttcttccattgaaggttcttgttatggttattacttggcacttacatcaattgcaattttcttcagccaaacatatggatttcttggaagttcaagtgggatgggtgactggaccatggttcctttctattttcgtcaatatgcttccatgggaaagtggtcaggttttatacagtgtcttggttctttcattatgatatgtactattacaatatttttgctagtagttcactgctgtaagattggttaatccctttctggttgactaacaattaaatctcactgtcaccatatgtagaatcttcttatgtctttgtatgttacaaattctgttaccatatgtgtgctattgatatttaagtaagactttacgtctcttgtagtactccgtgtttgggatgtcatcctttttgaagga

SEQ ID NO: 37300 - DNA, 351 bp, Zea Mays
tggcatgttgaatagctccacattagtatgtgttcgcaaggtcaattctagactatgtccaaaattccaaaattaccacgcccacagtttagacaaaacgccattccatgcaatgtatatgtacatctttgttggagtaaggcatcgaatcattggacattatcatggtatgaaattgcttcgattcttgacccctatacattttagaatgaaggtcatatgagtcagagaattacatggctatattgactttattttaatgtttgatgaagcaactcacagcgatgtcctatagaatgaaatgttagctatcatagcgtctagggaacataacaactatcctcacaacaa

SEQ ID NO: 37301 - DNA, 409 bp, Zea Mays
ctagtacaatagagtcttgattgacatatgtgattgagcacttgatggtaatccttttttgttggcttctatatggttttagaggcgctcgacgtcttgacacctttctcactactatgtgtctcatttctccttccatatccatacacccacttcatgaccaatgatgatgtcttatcataggtcattaccattttggggtcaattaactatttttggcattagggtgtcaagattgttgagtgtctttatttttcttgataagggtggattcttcattagcaatgatggtgtttaggttgttgagcgtcttttttcttgattagggagggtagattcttggttagtgatggtggttggttaggtatatgatcctaaggtttcaaggcaccgtgaatctcagttgagg

SEQ ID NO: 37302 - DNA, 616 bp, Zea Mays
atcctaggtctatgatgctgctgttttgtatcccgaatctgaacattatctcttgaatgaatttcaccgcttttgctgaagtcaaagaggtgatgggtttgtactctatccattttgtgaacttatcaatggcaaccattatgtgagtatatcccccttgagctttcttgaatgacccaatcatgtctggcccccagcatgcaaacagacaagttacaggaatagtctgcaactgttgggcgggtaaatgctattgttttgataagaacttgcatgcttcacactgcatcattcttagttgttggccagtaaaacccgaacctaaaggctttccctactaatgtccttgatgctgcatgcacgccacattgccccacatgaatctcatctagcagctgccttctagtagccgagtgaaaacacttcatgaggactcctcctgcgcctcttctgtacagcagaccccctatgatggtatagtgggatgactgtctcgcaatgcgctctgctacggctttatcatctggttcttccttgttgcttatttatctgatgattggctctctccagtcattgagatctacttctgcctgacccagaacatgacactcctcaa

SEQ ID NO: 37303 - DNA, 563 bp, Zea Mays
atttgggggaactaagcaatttgtgggctctggtgagtaattggaggcacgagcgggtggattggatgctggaatacctaacggagccgagggtgtgctcaatttatagggctcttgagcggtggccgatgaatttgaaggagacgcgcggcggccggagagggggaagagcactggcgcaagcgattggtggcagttactatggtgggctcaccggcgatgaccgggtgtgctagagcgagtcactacgacgaagtactgtgtctaggcacgtgtcatccgagcggcagacggctaactccagtgaacttatctaaattcggccgtgaaccaagcggacacggcagccgcgcagaacagtgccccaaagctcaatagcggtgaagatctttctaccccgaggcgttatccgggcacaagtgagcacaaatcacctcgttggcgtgaatccatgcgcggggatcgccggcggcaagttcactaaaccggcagatcttttcggttattatactatcaagaacttcttcagtcagcccgacagagcgaatggcagggagatttgc

SEQ ID NO: 37304 - DNA, 428 bp, Zea Mays
gagaacctatggctgtaggatagtacattggcgggtgagattagggctctgatggcgagctcgggacggctcgctaccacagctatggcgttcggccatggaagatcagctgaggaaggagaaaaagaagagagagagggagtcaggggttgaagacggcgtgcaggccgtagatttggatttcgacggccaggattagaagtgacttacctcttcgccgcgatagatccgagccgtcgatcctgcattgtatgcatcagattagatctaggttctttaaatcgtgatcgtttgttgttgatcgggcggtcatgggggtgagcggttgggccatgcgcgggatctaatcgtggccctcgaatctgatttgaatggccctcagctaagaataccccttcggccgagaacatttgctaaagagaccctga

SEQ ID NO: 37305 - DNA, 385 bp, Zea Mays
gtggttgggcctaaaaacaacccagcactacagatggtaggtttcatcgagtttgagcctcaaaacttggcggtgctgttctgacaagaatcagaggtggcacatggcgtcatcgcgaagggtgcatcgaggtaaagcaacttcgtgtgcagcgtgtggccgtcagatgcatattccaggagttggtccattttgcccccagttaactggataagctctttatatctaggggtaatttcgattagcgaaataactctatataaatacgagggagggctgttgtgtacaaccatctctttggttatctttcattaggttcttgtttagaaaaacttagtttctttctataggttgcatagtttagcccgagatccacagatgattt

SEQ ID NO: 37306 - DNA, 311 bp, Zea Mays
cgggtggggaagatgggctactgtcgtccgatccattttgggcggccatgatcacgccaacctatctgtgtggctaggttgattcgggtccgtccgatcgtaatcgggagaactcggggctgatcgcttgtacattaaacctgggccgtagatctcacatcctgcgctcgtcatcgcgtaccggttcggatagacatgatctaatccctaccacccgcgcgaaatctgacggccaggaaccgaccgtaccccttcgcctggcatttatctaaagagaccctagattattaacaaatcaacacgcagtccac

SEQ ID NO: 37307 - DNA, 1058 bp, Zea Mays
gatttttgtaatgcactgctgctagaagattctagcacaaattatgagatgacagtttgcttgcaaccctaccaggcaactttgcctgggacacaagcaaaccggcctgaagtgcacatggtatcaaccatatcatacagtgcaaatagccctgtggaatcaactatacatggtttgcacctctatacttatggaatgtgacctgctgttctattatctctcctgtcatatttaaatcattaaatgcacatcaaagccaaaatgctttcaacagcaaactattctgattcatctcaacttcagagtatttggttacgaagtttcccttacatgattgagcaaaatagtataattaattttatactgaccattttatcctcataatcataccgaccatttatgctaggattaggaagtaggaaatatgatttttacagttcaatacaattgcttcgctagtataatgaaccctactaccgtagggttaaatgctgatatgctagggattataaattggaatggcttaaattgattcttcattgcttgattccctctaaagggtgccaaccgtgtgccctgatccgggtcttgggcctaacttgactaacaaactatagtctttcgtttcacatttgactaacatcaagctgttacaaccatgttactgctatcaaggcgcagggtttattaacaggactacagacaccttccaccaataatagttcgttaatgttgttcacaataacccctttggaggcctaccatgtctccctgaccatttatgctataggaaatcacataacagcttcgccctcaatcaattctgacaattaatcattttattttaggagatatgacagtgactcctgcacataactgtgaccattcctctttctatgcttcctattgcatcttctgcaggaacttgcacttcacatgactctagcacaagtgcgtccagctgtgctgacgatccaagtatgtcgactgacagcatggttaaatctgtggacatggatggtcagaagcacatgaaaaacgacaaaattaaggtgcac

SEQ ID NO: 37308 - DNA, 463 bp, Zea Mays
ctggacttggcctcaattaccagaaaaggcaggggccccggggtaaagtttcctagacacagggaatagcactctctggatggcgggttgttttctggaattcataggggctctataacaaaattgacccgcgaaggggtatagagctacaacggccgcacgattaaaaatagatggcacggattagatccatgaccgtgcaaatcggtacacaatcctagccactggatccgagatccacgaccactatttaatgaaactagaactaacataaaccgagggatcgcggatcaacggccacgatcacactcaagcgaaacggtacgccaagctctaatctataccgtccatcggaaatcgacggtcaccaggccctctctagagatctaatcttacccctccatttaacatccgacggcaagcgacattcttccccgaccaaggctgagcagcaagatacccg

SEQ ID NO: 37309 - DNA, 350 bp, Zea Mays
gttgggtgggtgtagctcgtgccaacggtgttgcctactatggcttcactgtggatgttgctggagttgttgcggacctagatgatggacccttacgaatcacaacagttgataactacctcttgattttctccttcacattgacgatgcgatgcaaagctccactctgatcagcgatgcacgagatggatccaaaatggaacatctaacccagagcgaagttgacgatggtggcaaaggtagcagccatggagctatccattatcgatgttgcactccctacccggcacaccaactgttggtgattagcatcgccaacatattatgggatgtaccacatagtgtttttg

SEQ ID NO: 37310 - DNA, 284 bp, Zea Mays
aggagatccaactctacagcctagtacaatagtttgtgcccaaaagctaagcttatgtagttttccccatcttcctaacatgctttttcccgacccatcttgccctgagtagcagaggcatcgctggctgcaggtgaaggggtactccagagtaagacgtgtcaagactggaagctctctcaatctcctcgggatcctcctcctcctcgcgattctcgtctgcctccattgcttggttcatatcctgatggtgcatatccagatgagagttagcctcatccagc

SEQ ID NO: 37311 - DNA, 356 bp, Zea Mays
caaggtgagtctagcaggaacacccgcccgaacaacgctcaaggttcgcagttccgctctggaaatcaaggcggaaacaattatcaagtgcaacactctggacagcaaggccagagaaataatcaaaatcagaaccaacaaaggagcaactctcagaccaaccagaggtctggtgggagttcacagaatcgtcaaggtggcgccagtaacacgcaggccagaagcaacgcaccaatccaacccaatgactgtttcaagtgcggtgagctaggccactatgctaacaactgcccaaggcgcaactagcagacaccatagaaaagcaataatcagagaaatgattagaacacccccgc

SEQ ID NO: 37312 - DNA, 653 bp, Zea Mays
ctagaacaagctttaatttgattaatccggaccaggatgttcctgaccacggtgacagcggacaccgaacaccgatcaagatgttccggttgagtgggtaaagtcaagctaatggggtgagcagatgacgatcacaagcacgtgtgggtgctaaaacacggacaaaaagagcgagggcggacctggaagcagctagccgcgatgaggcggttcacggcggcacagtcgaccgaattgggggaagagggaaattctccggctatggtggctaattaaaggcgggaatgggtgctttggcttcgggataacatggcgcaacagatccggccaacaatttataggagcgctaagcggtggtgtccaattttgaaaggggagaccggcgtccgagaggagaggtgagtcaccggcgtaaactattgtggcgcttcccggggtaatgcctccggtgacgaactgacctcctacggatatctactgcgatgtggtacatcttctaagcacgtggcgcagttacaagccagcaaactccgactaggacaccactgtccactgcacggcaagtgtcacggtgaacagtccggcgataagcctctctcccttccccgagttgcgatctttccttgcccacggttatccgcaagtcacgacgc

SEQ ID NO: 37313 - DNA, 417 bp, Zea Mays
cgccacttcctttttccctaccttcttcctccccacgtcgtctccttcctccctggttcccacgacggccagcagggagaatcggccagcagccatggtgtcccccccatggccgcctccctctgccccagccagtttccataggagccgagctcctatgccagggagcagcagccccttccccaagtggacgccccatgcaggaatggatcaggaagcacaggcctccttcccccatcgcgcctccccccatccaggcctcccctgccctatccaagacgccagcaacagcgcccctgctcgagcccctccttcccttcttcttcctcaagccagcaagccgacttcccctctctgcccgcagggctgcttgccggagtgcagcatggccggaacctcgaaccccctgtgctcggc

SEQ ID NO: 37314 - DNA, 344 bp, Zea Mays
cacaaaagcatacctttcgaggcgcaatgtgaaatggtgtcggttgtctggcattatttcaataggaagagcgggcatttaatgcgatgggatgttttgtcccacaaaccgaccgttgaggcgcgcgtgtacatgggattcgaagcgccctaacctattttaacttggaatggctcggccttcgtcttggtgactccgctcgtctctataaatttgcctgagaggggctcttcaaatttttaccttatcgttttgccttcctgcttttagacattgtctgcctctgccttgaaagagctacttgcctccttctcgtctccctccatagcctccatggccgagaa

SEQ ID NO: 37315 - DNA, 369 bp, Zea Mays
gctaaacatgatgttacttaagaaaatatgttgttaacagaataagattaatattgaaatggaaacatatgtaaattagaatcatccgacaaagctaagagatgtccatgctttgagaaccttctttagatcacgaccacagaagtagctctccaagactcaacgaaggttgccgcaattcaacaaatacatggcatgcatgctcatggctgtcatcgccgccataagcacggacaactcaattccccgctccatcaatttagaagcgaacaagcaagcaaccgatcactcaccccatacgcaccaatctgactcccaaactccgttcgcatcagtaccgccagcactccacctgcagctaccaattga

SEQ ID NO: 37316 - DNA, 477 bp, Zea Mays
ggaagagtcttcggatgaaggcttagattattttgtggccttggatgtggctgaggcggaggcttctccgcgtgttacggatgctgaaattttgcctggtccgagtgttgggcgtaggcggcgaagggcgatgacgaagcgtagagtgagcgggtttgatggtggtcggcttcgtgtgggcagggctggtaggcaggaattgttgtcctcgccggttggggcgagtatgggtgagggggagttgcaaaggctttttgagggtgaggagctaaggataatgctatttaactataggaagatggggatcattccgaaggttgagcctatgtaaggtgtgatgccctcgctgtacgtgtgtaactgtagtttgtatgattaaggttgactgccttcacgcatctgggtgtgttcgtaaggtgttgcgcacccggtctggtacattattgtgtcggttcggctgcgcctgtagacttccgg

SEQ ID NO: 37317 - DNA, 397 bp, Zea Mays
ctcgtcgatcactcttcttcctcctccgcacacgcgcacatgcgaccagagcttagctcagcttagcttatagcagtatagcttattgcttatactgtctccccctcggcttcgtcgctcggaggtgtgcacacacacaaaccgaagcccttgccctcccatccccctccaaacgcgcgcaaccatggagagtggcggcatcattgcgccgtgtactccccaatgattgatctctcatcgtctcttcttccaaccacctcctcgtcctcgcactcgcactcgcactcgcccttctctcttccctgcccggctgcccgcttgtctccccaaaatgaccagcaacagcagccagaacatgagcagctgcagcaccggcggaagcgacgcggcggtcggc

SEQ ID NO: 37318 - DNA, 375 bp, Zea Mays
cgcggcggagggtggaggtggaggatgtcggcgacggtggaggagcagatggtggtgaaggcgatccgggaggagtgcccctgggagtcgctccccaagcgcctccagtccacgctccagaccaaggacgagtggcaccgcaggtactcacttctttgctcttgccctctatggatttgctctgctgcatttctgatgtaatcagctacgcttagttttgagctctgatagtcctagtactagtagacgccaacgctgtgtgaaatggctgctcttgtggcacttatttggatctcgttctcaactactccctatctaaaaaagtcaaaacgtctaataatccggaaccgagggagtagctgttttgaggtcctc

SEQ ID NO: 37319 - DNA, 389 bp, Zea Mays
gatgcatccgtggccatcgattgttaagtgaacggatcgggcgagatctcgtccggatgatgtctggaccgttgatgtggatagacggtcgggattaaaaagggagaataccaggttgggtttttagatccgagccgttgattccgtagcgtgtgcatcggattagatctggcttatttgaaatagtgaccgtagatcggaggatcaacggtgctcggtggaagcggatcgagttgcgatcggttttgatctgggcccttggtttctaatccaacggctcagagagaaccgtaccccttcggctagcgtaatatgcaaaagaaaccctcggttattttagtatcaacctgcagtccgtgcacagcgttatgtgtcttagcagattttac

SEQ ID NO: 37320 - DNA, 299 bp, Zea Mays
cgacaacgaggggattgtcagcgtaccggcggatggagatgcaagcgtcagtgtgggagagagatggggaatggagccaggtgtgcgcgctgatgggcctaggagaagccaacgggtgacacggcccaacgtccggctctcgggccatgaatgggtgaaatgatttaggcccagatggtttagcagctagcagagagaagaatatacactgccgtggagaggaggaaaggattggactggaacttggaactggatccggctgcgtccggcgaaccgacggtgtgtcgtcgtgtacccta

SEQ ID NO: 37321 - DNA, 636 bp, Zea Mays
tggcgatgcggtggcgcggttaggacacgcggcataaggccggaagggggcagtgcaccggcgaggttatctggttccaccgcggtgaactttgtacggtggtcgggatactttaatcgccgggcttatccacggcggtgtgctccgaacgtttatcacgacatctagagcacgaattgagacggcggcggcgcgaatcttagcgcagggagggtcaccggcggcgagcaagctacgctggcgttctgatccactcgggttactgtaccatggaatgctccagcagtgctcctgacaggggaatttacagagccaataacctccaattttgtgcagtaacatgatcgacaccctttaacaaagttatagtcctaagatccagctacaatattgttatagcaatcctaggcaaatacttgctcgatcatgcattaattcatgcccaaagtgcttgcaattgcactgcttgtctgaaattcagaacttaatcagcctgacagccaaagtttgagcatgataatctctaaatttctcactagaacataacttgcccacttaagcaaagttgttcacctaagatagatctacatagttgatgtggtgacctagggcaaattctcaataatttggaagatg

SEQ ID NO: 37322 - DNA, 279 bp, Zea Mays
ttatgttttttggtaggtgattatgtctacttgaaagtttcaccaatgaagggtgtaccgcgtttcggggttaaagggaagcttgcacccaggtacattggtccattcctggtacttgagcaatgtggaccagtggcatatcgactccaactacccgaaacactgtctgctgtgcataatgtgttccacgtgtcacaattgaagaagtgtcttcgggttcctgatcgaaccgttgaagtgactgatgttgtcctggaaccagcattctgaccaatttag

SEQ ID NO: 37323 - DNA, 301 bp, Zea Mays
agctagactccaacaagttgatttagcagaatttatagcacctgagtagactaccggtaaccatatgacatcaacatcaccctcgatagttgacttagaaaagctgttacaggcacaagctctgataatacagaaagcatctcaactcacctcctcataccaacaagtgttggcaagtcgaaacgtcactagaaatgaaacaactaatgaacagacacaaaaggatgcacaccaacagacaaatgatcttggaacatgttgttgttgtgagtactatggaattccttgtcgccagatcagt

SEQ ID NO: 37324 - DNA, 490 bp, Zea Mays
caaaatcttctttcgataaaccaagttcagcccttaaattgttggtagcaatagcttcatcaatgcccaatgtcgtccctccgccagcatttggtaaccccaaaataaagtgcaccgtatcctttgtaattttgagctccttccctgggccggctcgaattgtcatgtcattatggtcaatcttttccatcagccaaactaaatgagatctactgcccagtgcgtcaactctcatatcaagaatactggagaaccccctccgtgcaatagcttggcgctgtctgtcatttaatatctggatgcttactaatacgtcttggggattgcatctcacattaagcctctactaaaaaaatgtatacaatgaatagagtaaacatttacatctgcataatcgcaactcaatgtttaaatcaaacctcaacacaacataatttcacgcataaaaatgatatattgccattgaccataaattctaacctgtcggggg

SEQ ID NO: 37325 - DNA, 545 bp, Zea Mays
gttagggggacctcttcttctcattctcagcctcatccaaggacctatgttcgaactaggaagcgtccaaggaatactcaagatgttggagaagaagatggtagttatcatgatgatgaagatggtagtgatcatccagctgaacagtcagtacaaactcaaggagaagtggatgaggaagaagaatctgagtcaggtggaggggctgctagtgatgctgcttttcaattggatgaggctctactgctttaggtcaatagtaagtctgtagttctattatgtacttgcctacttggcatttatatactagtaagtctgaattctgaaatctgaatttctatgatgttctgaaatatgaattgtccactctccagtctccattttgtccagttctactgttctattattcatatttgttttgtttggtaatttggttactttgatattgcctcctatatgctatattgctatatgctatgcatatatatcaatattacattattacacatatatataattatatatataggtcctgtacctgtaaa

SEQ ID NO: 37326 - DNA, 368 bp, Zea Mays
ctgaattctgcaaagttgatccttcgaagttatgccctgatgccctgaacagctccaggacttccagcactgccattcagaggccaagtgcttcctctagcagcaggacagatatgcaaaggaagcctaaagttcagagggatgattctgacgctgaagatgatgcggggtcacgcgccctggctgggaagtaaggcttttgccttttcccttgggcctagcagttttaactgtgcccgtgttggtggaaaacttttggtgcaaacttatgtataacaacaaaacaactctttccggtgatgcgcttgtggcgccttttttgtctgccacaacaaactctgttcgagcttatggctcttgggttgtca

SEQ ID NO: 37327 - DNA, 680 bp, Zea Mays
gtgatcaagtggactaaggtgttccggataaccgaaggcttggctggccaaaatgaagctggggaaaggttcctgggttcaccagagatgacgcacatgctaagttttggactaggcacaaatagaaaggtggggcgacagagagggtgtcacggcggcattctacagagcaacagcgtgttccggtgaaaggcttcggccgaccttcaattggccgcattcgagagcaataagagatcaaagaccgactagaacaggaagcaatttgataaatactgacccgaggagcgctggccacgggtgttgcttctcggtggagctaagaacagaggagagagagatttgggggctacgtgggtttttcggtgagcttgagtcgagcgcttagtcgctgagatgcgggatatggtgaagaagcagcacccgcactcaatttataggctaccggccggaaccagatgagattcaccgagctgtgaccgcgctagcgagctcacccgcgtggcagagccacggcgaaagtccggtggccgccgtttaaccgggtagcgccacctcaacgctttgaagccacgtcgcaaaagcctttaaccgtggccgccgacgaccatcccacgctgcggtggcgttcaaatcagctacaaatgttgaggctcaatttactctcaaatttactcccc

SEQ ID NO: 37328 - DNA, 348 bp, Zea Mays
atcaagttgatgtctccactaggagaggaagtggtgaccgagttagtctcgcctgagccaaagaaaggaagttgttatcagatggctgttgatagcagtgaagcagatccactcgagattatcaaggttgtgttagaattcccagatgtgtttccgaaggacctaccaggtatgccacctgagcgggaagttgagtttgctatagagcttcttcctggcaccgcccccatttctaaaagagcctatagagtgtctggactagagttagttgaactcaagaagcagatcgatgagctatcagagaaaggttatataaggccaagcacctcgccttgggccgcccctgtc

SEQ ID NO: 37329 - DNA, 376 bp, Zea Mays
gttccatggttgatacctgcttgaaaactagcattttacctgcctaggtgcttaacttggaatgagattgtgatggagccatgaaattttgcctagacgtcatcttcctttccatgaatatatctttggtaattatttttggtgcctggacatatttttatggtgcctggacatatatctctgtccctcttgtggtaaaatcaagggatggtaaaatcaccacttgaacatttcactttctttctctatttatagaactgaaccactaagtgaggcttgctttccattgcagagcttggaatcgaagggccttcaggataaggatgccatgacgagaggccttgtatgtaccccacctgaacattcactatccttc

SEQ ID NO: 37330 - DNA, 330 bp, Zea Mays
cgtctcgctcgagcccgcctcgggcaagggagacaaactcaaggcaagaccatcacagttcgtcgggggacagtcgcattcaatacatatacctaactcgctcaggcatgcgggtgtacaaggacaacaaaactgctgtcttgtcaaagattcaccaactatgattacacatgtgactactgttcatgcacgccatgtgcaaactcccgatgggacgtgtaatatgacaggagcacaggctagccctcaggcgcaaacttcttctcccgacgcagaactcatcctcgggacaaagcttcgcctcgcctgagcccggtctcggctatctgc

SEQ ID NO: 37331 - DNA, 380 bp, Zea Mays
cccaagggaacctcaagttcaccttcgtcgccattgaatatttcacaaagtggattgaggccagggcagtctccacgataacatcaaagaccgcccaaaaattcttctggcaaaacattgtctaccgctttggagtcccgtccgaactcactgtcgacaacagcaaacagttcgacatccaagacttcagggaattatgtagttccatcggcaccaagtctgtcttcgcctctgtataccacccacaatccaacgacatcgttgaacacaccaatggcaagatcttcagttccatcaagaaaaggctccttgacgacaaaaagggcaaatgggccgaccaattacctgaagttgtatgggccctgaatacgacagagtgc

SEQ ID NO: 37332 - DNA, 1466 bp, Zea Mays
gctgattcaaacgaccagagtccggacactcacactcccctgctgcgcctgccgcctgcgtttcggccaccgcactacttccccaatccccttgatatcgcccacccgcgctcgccgccgccgctgggcggcgatggaaaccctaatggtagaccgcgtccacagtagcctccgcctcttcatgtaccgcaacgccatattcctctgcgagcgcctctgcgcacagttcccctccgaggtagcccccttttatccatgttccttaacgaggctagtacgtctcgattcggtgtattgcgcgtgggaatggtacatctgggggtcggatcaggcgtgtggcagtgatttgagcgcggggctcacctccgttgtttagttcgattcagtagtcttctgtcgttttttttgaagtgtctagggttgcattaggagtagagtagcagagtggtgagcttttggtctgtagcttatctaggcttgaattagaacagctctctatagctggtgtagggaactggagtatcccgcgtgattcatctagggttcatagtgaacttttactggagagggtgattttctgcctaaatttttgaggcaatttcacaggtaaaagctctactggtgtttatgcataatgggcattggttacagtaacgtgtatgcctgtgagttcttttccttgtcagaaccttggggtgacaatatttatagcccattaggtattcagttgcttgaattctatgttcttacaggacatgctcacccactttcttttctaaccttataattacttgagggtgtgggttttaattttaattttggttcttgacgtggttcatgggtcttcatgtgggatgaagttcaggaatttgaatgcatggttttgtgttttagtttttatttaggttcttgatgtggatcataggtcttcatgtgggatgaaagtcgacataacttgaatgcatgtttagtgtgtatgagactatgcattcaatttcttagcagatgacctcactgattaacctgaatctgtgcctgctttacaatgctttcttttcaattagtaattcttgctcacaaaaaatcttagtttattttttttaattttaagtccatttgcaacatagttgtgggcactaaatgttcttgctctacctcctctgcacagaccaatgtgcaattgctagcaacctgctacctacacaacaatcagccatatgctgcatatcacgttttgaaaggtaagtttggatggttatatgctcgccatgtaacacatatattatataaaggtagtttggatggtttatggattttgtttctgatgttatatgaagggaagaagctgccggagtcccggtacttgtttgctacatcatgctttcgaatgaacctcttgcgtgaagcagaagaaattctatgtccagtcaatgagccaaacatggaggtataaatcatattttaga

SEQ ID NO: 37333 - DNA, 370 bp, Zea Mays
gccgtgccaagatgccccaagcgccgtctctgggtaagtgacctttcctcgtccctcttttgcgccaattccgctttaccgtggggattttggctcgttggagtctccctcatcgggtcgccccgtcttcacggcgttcgaccactgcaacccctccccgagcccgaacttaggcctagggcaccccaccctatccctagagcttatgtcggtcgtagagcgccggattaacccccaccgcgatgggtattgcttgccggagtaaccttgggtttgcccgagggtccccctccaccgtctgcccgtctcagtcttgtctcgccacctagacctcaccatagtgcttgtcgagtcctcccccaacctctcc

SEQ ID NO: 37334 - DNA, 449 bp, Zea Mays
taacccaataaccttagaacaaaacacacttgttgttgctccatcatcttttgtgaaagatcgaaacaagaatgaccttaatgtccagttttttatgaagtccagttagtggtatccgtggcaactaaagaggacactttccatcttagaaccaatgaccattcaaaatgtgaggaaattaaattaatcgaagattaacttattattgactatttgaaaccaagtcagacatttatgatgcctcatatgaactatcgtcacacatactactaccaaccaacttttatcacattagaaactcttgaatcatatggttttcagtcatatggtccaattgtcaattcaagagattatttcttggtgtcatgtccatattttctggtgaatcgcaatggagagactagtttagcaggatcgcctgtatttactgaggatagcagttttgcaat

SEQ ID NO: 37335 - DNA, 450 bp, Zea Mays
caaaagttggaataggttgaatcgctaaacaattcagaccaagctcaaatgtaccatcctccgctgaatactcacaagtgtcaagattaaaatctgcaaatacattggtaaactcgtcctcctcttcactttgtgaatcataagaaccgtcagaaagggcaataatagtatgacgattgggacatttagcttgtttatgcccatgaccaccacacttaaaacactcaatcttgcttgtcttgcgttgggtggctgcagtagaagaagtgggtttatttgaactcacagctttacctttcgcatccacttgtttggatgaagttgaaatagatctatttgctccacgatatgaggatttgggcattgcatcttcttgctgttgggaatgacgccatgagacattgtatttgtaagacatagcaatttgcctttcagccctctttgcaaaat

SEQ ID NO: 37336 - DNA, 603 bp, Zea Mays
agaagatggcccgcttcctgaaggggctcagacccaaactcaagaccatcctagccagctaagacttcctcagtttcttgcacctctccaacaaagccatgcaagtggaaagggcaaaggaagaagaaaaaggccatctcaagaggaaattccaagtcctccgagctcagcagcaagaccggcaccagaaaactcgatcctttgaatttccacccaagggaccaagcttcagtagaccagctagacccaccctgtcacggtttagtcagcagagtcagagctcctttcataccccctcagttgcaagcaaccaaccaccagcgaatgcgtgttggcactgcggagatcccagtcacttcaagaacaactgtcccagctgaagccatcaggacctgcttactccaactcggtgaatggccccaagaatacctcagcacccgcccccaaggcgccctcctccatcagccagcagaacaagacccagtatcaaggaagggcacgagtaaatcacgtcgatgttcaggaggctcagcaagctccgggagtagtgctcgatgagttccttgttgaatttactcccgctactgtactcttcgattcagg

SEQ ID NO: 37337 - DNA, 449 bp, Zea Mays
cacacggacccaaacgaaccagagagatacagacgtacgaagaagactcacgacagaagacgctcgacagaaggcaaccacacatgcccggagaaacctaaggacttggaggtcggagtcaaggcttagcgtaggactccaggtccgtagtctttaggaccactcccacataagagacctagaagccttcccaccctctctcgcctgcttgtaacccgcttgtaacccctactacgagcatcgagcaacagaggtgtcggtagtgcgagccaccgaagactggatgtagtggcgttatgcccaaaccactataaacattgcgccaaccgaacacaccatccggagccctaaacgcgcacatagaaatttacttctcggagcggaggttcgaaacatcaacagttggcacgctaggtagggggcttgcgcattctcgacgaacattcaat

SEQ ID NO: 37338 - DNA, 334 bp, Zea Mays
aatggctgagggaagatccatcgagccgaagagtgacttgccgaagcaactcaagccgatggtttcagacttggctactggttatgaacatactctggaatgtatggggaacagtatgaagcggtatggaggacctgctttgactgattctattgtacttcagcttcggctatttccttctgtttctggattgtgacttgacagattcttgttgtatgccccttatcctctccatagaaaaggcataacattttccttggttgagagttgaatcttcctctgaaactccttcatcctcttccacctcttggagtcagtggtctgaacgtatttt

SEQ ID NO: 37339 - DNA, 338 bp, Zea Mays
aacaacgacccaacctcccgggcaaagactatccccacgtgacacagatctaccactcatgacctagctgagtgtaggacagtcaaggatctagtcgagcatttccaactctatgaccaaaaatgccccaatcaaaggcgcctgaagcaacgacgcccccaaactgcagcaacaaaagcaggcttgggacccaaaagaaaaggaaaggccagaagcccaagattgcttggaccacatcctctgaggagaatgacattgacatggaatttcaagacccaaagcggatggtggatgtcatccaaggagccatcgagaagttgatttcccagcgagacctg

SEQ ID NO: 37340 - DNA, 278 bp, Zea Mays
gagaggatggaaggcggatgaggggcaactttcacagtggatggcgtggcccaggggtgatgatgaaggggggcacgacatgtgggcgaggatggaagggtagcgcgacacaggggggaggggcgaagatggaaggcaggggcacgaaaggacgacgagaggcgtgaggtttgtcaacttccaggccaacacaggggcaacgatggaacgtgggcagtgattttgcatacgccgcatattttgctaggaggcggggtgcgcatgtgcggcgttgggag

SEQ ID NO: 37341 - DNA, 435 bp, Zea Mays
cgtaaaatgacccaagacacagatcgccaggcgttggactgcgggttaaatcctatttcccctggggtttcttttgcaattaccccaggccgaaggggtatcgttgtgctggggccgctagatcagttatggacggtccggatcaggccgcggcttttatgaaaggggcatgttgaacccaccgtgggatcgagatcggatgcccacaattaactcgaagcccaaacgaaacagtacgcaatctcgattgtacgatccgagatctacggtcaatctcctacctccatcccgatctaatcctggacgcatacgaccgatccaacgaccatcgctcttcccttcaatctccagccgaacaacccacagaacgggcggtcgcggcgcacaacagaacccagatcgccgccgcggcgccattgccagcgcacgcaatcc

SEQ ID NO: 37342 - DNA, 393 bp, Zea Mays
gcggggtcggctccttctcatcccaaggggtgagccactcggggtgcgtcccgagggagcaggggcgaagcagcccatcatccaccaagccctacaagtccttgtcggttatggaggagaagggccatgggtcatggggatcaaggatgttgagcttctcagccatggcaaacaagggaggcggcagagaagaggtgtgtgggatccttttcgctccccttgtctcggtgcgcactcttcactgtggccaaaaaggacagaggcggctagctgggaaggcaaaagcaaatgcaaggtaagaaccaagagggatccctccatgacatatatatagggaccaatggacccaccgaggtcaggaacgagccctcccgcatcgaaagatcaaatcca

SEQ ID NO: 37343 - DNA, 447 bp, Zea Mays
gcagccttgaaaatagtgtgatgaaactatctcatatctacgagatgctggccaacacgtgcactaaggaattcgtgccctgcgggatggcggccacggtattcatctggtcgtgcgcacccccgtcgctcgagtaattcatcgagtacacgctctgtatgctctaggtccttgacaacttcaacagccttgacaccggcaacctcgtcctttcaccactgtcatcgcatgttgcttccaccgggcactcccctcctgtgggtgttggtccctagctccggcgatcgacattggagatgatggtctgcagcgacggatgcttgcgacgcagaataatgatgatcacgctgagtggcgagggaggtgagcgtgagcgcggtgagcgaatgcggaagactaaaaccataggtgacacacacacgatgtattaccttgcgttgatctcgt

SEQ ID NO: 37344 - DNA, 312 bp, Zea Mays
cttgggtgtgttagctaaaaatgtcggacagtctgggcccttgctccaaacagtctggacccagtcaccggatagttcggtggtcctcggaggcaacgactaggtggacacgccaccagcaccaacgggcaaactggagcaatggacagtctggtgcaggcactagacaaaccggtgccccatagaagcggaaggtggccaatcaaggatacgacgatcgttgggcggaggcgcacggacagtctagtgcccctcagaagtagcaaattttcataggattgagatattcgttgcaaggaaaggggcaacggc

SEQ ID NO: 37345 - DNA, 760 bp, Zea Mays
ctggacgtcagtgccacacgaacggatccaaagttgtccgttacactgccatgtgggtccgctcgctcagatgcgttaattaacaacctcgcgagcatggcgcggccaggtgtatcagcccgactcttcggtaccgcccggatccaacccttccccatgatataaaccaccaatcgagccccgcctcatctcaaccactcgacgccgccaccagaagcatcgacaccgagacacagaagaggtcacggtagggagctcggactgcaccgccaggggagcgtggatagacatcttcgctgctccaatcatcgtgagtttactctcgagtctacccctattcctcctctttcattcgcgcccgaaatcactcaaaggtgaacgttttactgccgacaattgctcgtcggagctaggcctccgccgcggggcgacaacccacatgggcacgttcctatgcctccatctctagtgagcgctctacctggcaactcgtggtgttccaaacgtggggtagagtcctcgtggttaggtagctgggtactcagtcgtcgggcggtgtttctccgacgaggcgtccaccgtggatggtgctcgcgcgaccgtcgcagcgtggagttgggggagagagtccgctggtcgttcgtccatgatcggacgacagtgattgagtgcagcttagcactttgccgattagatctacaccgttggatggggatcgaacgcataggaaactggccagggttatgataaatcagatcag

SEQ ID NO: 37346 - DNA, 412 bp, Zea Mays
ttggtatgctaggatcttcatcaggaatgggtagactgatggtggaaagtgaaagatgttgatattattaaactacttgtggtcttgttgatcataatacttttttattgtagcaagccttgttggtcggtgtcgtgatttattgttcctgtgtactaggtgttcctatgatatttctgattttctttaatatgtgaatttgacatttctgcaggttgaacatggattagggaaacttggatggcatgacagccaatgaggtcattgagttcttctgtgagttgattgtgaattgattgttacacgcacatgcgatctgtgattaatctaatgttcctcatgaactgcttctctttctttatcaggtttgaaagtctttatgtgcacttctagcacttctttttaattcaag

SEQ ID NO: 37347 - DNA, 636 bp, Zea Mays
tggttatccaggtgaccctggtttttgtcagcagccccgcgcagcatattaaagtcaccgatcagaagccaaggaccagagatgctggggaggaggtctgagagttcagcaaggaaggtgggggagtcctggtggttggatggggcatagacgttggtgatggttatgggcgcattggcaaagtgcgagctgaaggtggtggtgagggagaaagagcgagagatgctggacgtgagctcaagcacagcgctgtcccaggcggtcacgacgcccccctggaaccgtcggcattgacgcagagaaagctggctagatttttaggcaaaaacgagcgcgctttaaggcagctgaggtcgcacagtttggattcttgtaggcaagcaacggacggggaggcaagggagataacaaacgatagtgcatttatccggatcgcctaaaccacggacgttccacgaaagcacaacacagtttttacaacccggactcatgactgaactgacagaccaccaggggacacactacgaccacggcagagggggaacacaccacggcgacatgtgacatacagggataggtatgaccagacaacagacttggggagacagcaggataacattacagaccacagaccga

SEQ ID NO: 37348 - DNA, 724 bp, Zea Mays
tggagctaaaggatgtggttgtttaccgttgttctgcttggtgtttagacacgtccttggtgcctgcttcaagagagctttggattgtcgagcctccctttgccattgatggtgtgtcttctggcaggagaacgttgatgtacccaatccgcatcacattctcgtctgccccacggagggatggatccgatcctaagcttcaggctattacttcgagcggtgatggttttggtaatgtgcagcagggatctcctttttcaagacccccccattcgcttcggggaaggggagaagatggtcatttgggacgtctttcagttcatgagcgtttgggtccaagagatgagaacatgcaacagcggaacattagctcggagatggcggtttcagatttaaggacaacattggaatctgattgggggaccttgtcccctaggttgatagagatgactgatgacagggttcttacttcaccggtgaaggcgaagcagctgaaagtttactctcgtcaaaggctcaagaacgtcctgactttggagggggctggagctcccaatactgtcactgtgcttcctccctcccccacagacgtggcagatgctgacacggttccatctgagtatcctgtcttagatgttgacgctgtgttggcaactccgtttggaacgctaccttcctccctgtcagatgtggcagcagcacacgcggctccgtcggaggctag

SEQ ID NO: 37349 - DNA, 434 bp, Zea Mays
gctgaattgtgcactgtatgaccattatcaatatttggtgtgctggtgtcatgaactaaaccggcatgtggcctatggaggtgttgtgatcaaacttaacatttggtgtccagttttgagcaattcaatttcagtggagttgacattcctcacagagcctaaatccctgatttactgaatgtgcagtctttgctttatttcaccttgctttccctgcctattgtgattttttaataatctcaatgttcgatgtgtaacttcgcatgacatgattggttagcaaccagcaggtggaactgcttgatttcatactgttgtttgatgtgttgtttgtaagtttggatgtggaggcctgccaagttctattgtcgctggtatgctcggctgcacagatttgttactttggtttgtgtgattcagattcaaaccacttc

SEQ ID NO: 37350 - DNA, 509 bp, Zea Mays
cttctctctgctgcctcacgaaaagttggtagcgtgacaccatctactgtccttagatccacataggaggtggcgcaagtcacatggtttaggagaacacggagatagtagagctcccccttagcgggatgagcagagactattctaccgacttgtccacccgtatcacgcttcctccgttgccatactttgcccttaccactttgccaagtgtaccactcagggaagtcaccatataggatgccacaagccccctcatgtagcctattcgcttcaaaatatgccgtgagcattgacctatcagcacctggacggttgacgactcgctcgaccatttgtcgttcgtgaaacgccaccatgtgcatgtttggaagatggagttgcaattgcatcacaggtggagagttctgactaagctcaaagccgtatatcctccataacgcttctagaggagtcacccaccttgcatctctgtactgcttgatctcatctacatcatcatctgcctt

SEQ ID NO: 37351 - DNA, 424 bp, Zea Mays
aaataactatcgtatattgaaaatattcaaagaagacatgtctgatttttttgcagttgttggtgtagaacatggtgggttgtttccttcatatgaaatatacttacctcatgtttattctttgctggagaatatgttagcttttggctcacctaagggtgattgaaatatatgtcactgtatgaaaatttaagaatgaaaaggtaattgataagtatgatttaacttacacttgatgagtccgatgtggaaagtctagacatggccgtagaaggagattgaacatgtcgtggaaagtacagatgcagacctaggtcactgtaatgttagaggcaacagactaagtattaatgttgttagtcattgtaactaattaatatagtgaattatttgtattcattggtaccttgggggactaatcggt

SEQ ID NO: 37352 - DNA, 331 bp, Zea Mays
atccactctccgccaccgtgaactcacctcaccgcggccagccttccccaggtctgctcattcccttctcgttcttgttctagcacccttacatgttagtgatgctccccgacccctttaatcgaactgaaccgcctgggatcgccgggaacacaacatcttagccgccatgctctcggtcaccgtggccagagctccgtagttgatcataagcgcaattaagttaggggaaatggacggggtggatccaattgtgtccctgtcgcttgggagctctagccgtagcgacatccggccggtccagctcgccagtgctcagctcccagcgcgg

SEQ ID NO: 37353 - DNA, 361 bp, Zea Mays
tgcgagttgtcaacgtgtgttagcgctagggatggaagagaaggagagtagacacaaagtggcggctgcaggaggaagataggttagcgacgaagtgtttctttctgtttgttctctgattttcgatgcccgtttacggttccagcgtatgtatatatcccatattacagatcggcccagccagccatcaattgatccattccggcccagttactcggacgctaccgtgcttgatacgctgaggccgccctgagacacagggccgaccctgaggggtgcggagggtacggccgtaccgggcctccaaaaatagagggccccttagctactggacggtagcattttttgttaaacctatcta

SEQ ID NO: 37354 - DNA, 397 bp, Zea Mays
cgttgctgctgctgctgccgctcctgctgttgttgctgccgctgcccccgcggtgacgacggtcgatctaaggctggtgacggtggtggtggtgtcagatttgaaggtggtggtggcagagggttcacgcccctctgcccgtcctggacctgaggttcggcctccttagtcccaccagctgtcttctgacgcttctggggggagtctgaatcaaggggaagatccgagacaaaagacccatcggtgcggcgcagtcggtgtcgccttactctctccgatctcctggcggcacctggagcagaggatccactcgcaggccccttgcccttgttcgaggaactgggggccacaggaggagcactagagcccacatcagcaggctgggaacctccgaccg

SEQ ID NO: 37355 - DNA, 311 bp, Zea Mays
ccccgccgaagagcaaagatcttggctagtaaccacaagatattgcgtattctttcaactcctccttgtcttcctcggatagctcctgaccgtccaggtgtcgaagatcaaaattcgctttgtccgagggagtattatcggtctctttccccttatctggcactaggccatggtttcttctgcaactacatttgtctctgcgatcatatcttcaaatatatctaccacaatcctatcaatttttgacgttgtcgttccggcttcaccagcatcttcagcttcgacaacaccttcagcatcagcttcggcat

SEQ ID NO: 37356 - DNA, 376 bp, Zea Mays
ctggagtagtggaggtggtggacacatcgggcttggtggatggctcaggagcgacaggagctagcgaagtgggaggtggagtggaaactatggcggaaggagtgggggagcagtggagcgaggtcgagacgtgaggcgatgaactcgatgggcaatctgatcagaggaaatctatagctgacctccccgctcagcttggtgtgctgctactgcctctgcaagtgctgcacgtgcgactctattcgtacatctcttcttcttgccctcttgctgctcaagatagacagtcttccctttgacctgcctgaaggggtgaggagggtcctcatcgtctcctccccctgacggtgtgacattcttcatccgcaccatcctg

SEQ ID NO: 37357 - DNA, 1052 bp, Zea Mays
tggaggccggcttcaggccatggaacttgacattgacatacagttttgtggtggctgtgctcgtgaaggcaggaaggatggaggaggcactaaagttgaaggatcagatgttgctggttgctggaaagatggatgtggttctcgcgacaacattgatgcatgggtattgcttgctcggtgaagttgggaaagcgctggatttatttaacgaggctgtcagggatggtgtgacagcaaccaatgtgacatatgcggttctgataaaaggttgtgatgcagaggggatgacagataaggcatatgagctatgtcgtcagatgatagagcagggattgctgtcaagcacgcatgggttcaatttggtgataaaaggtctgttaagagacaagcggtgggaggatgccatcggcttgcttgaggttatggttgatataccttctgctggtactgcggctaagtgggaagagcttgatatcatgacagaatgtgttgttcaatgcaatcttgtcactactgcgtcctctgattttcatcctgaattcatcagtctgtttgtcaaaaattttggtggctctgtggcagtatcaagcaagagagtattgtttctcagttggggctacatggaggagtatgaggttctgattccatttcagttcctccaggttcgtgagagccaagtaaatgatgtttgccaggacatgggtgtgggagataagtgcttggctgccattcatgactttggcgatgttcggggtgtagatgaagcaaaggaggagcttgttgagatagtgagctgtctgcatggttcactgaactccaagaagcttggagcaaaattgcccaggggtgtcctgcttgttggccctccaggaactggaaacactcttctagcaagggcagttgcaggagaggctggaattccatttttctatgtttctgctagtgagtttgttgaagctttcgttggaagaggtgttgcccgtgtcacggaattgttcaaggaagccaaagaagctgctccatccatcatttttattgatgaacatgttgtg

SEQ ID NO: 37358 - DNA, 518 bp, Zea Mays
taaacttgctttgcaggtacccgccaagaaacagaattgaccatcacctgcagcaccttccagtggtcgttcttcgggtattgtttgccaccattgtcatgagattggtcacgtgaagaaggattgtccgagtcagcgaacatacattgctacggatgatggctacattagtgcttccgacggtgaggatgacgatgatgattccagtgatgttgctgctaatgatgatgccatgcttggtgctgatgctacggtgaaccttcgaagcatcatggtgcagcgtgttcttagttctcagcctgaatcatcagagaagcagcaacgccataatttgttccagactttcttcgccatcgagaatcggcatgcacgtgttattattgatggtggaagctgcaataatttggtgagttcagatttggtcaagaagcttggcctgaaaacacgtccatggccacatccataccacattcagtggatcaatgactcaggcaaggttaaggtaacacacatggtac

SEQ ID NO: 37359 - DNA, 312 bp, Zea Mays
gaattgtggtgcccaaacggaggcacgtggcacgcctcttgaagataggtaaattatgtgcatcttgtcagttccttgaacatactataagatcatgtacctctctaaggtctaagacaaataagtgctcttaacactctacatcaccatgcacaggcactggttggaaacagattttgttggcgctccaagagttcatacttatgtactttcctttctcaaatcataacaaatcttaggcagttcaagcttagctgaatgtcaacttgcctccacgtgcaagatcccagaaacattgctatgtctcgtccg

SEQ ID NO: 37360 - DNA, 404 bp, Zea Mays
agccgactcaacacaagtctcctctaaataatgctccactcccttgcctcctagaagcacatgcatccttctggaccagcttaagtaattattactatcttctaacttcatagcatttggcacaagttccaacttcaactcagatgggcctgtattggtcttggcactaatcagccctaaccccatcagctcctggatcatattcctcatcttactttttgtaatcccacctgaaccgccaccaccaactgcagtcttcattgcattctcttcttcctttctctttgcttccatctcctctgtactcatcttcacagaaatcctagaacaagcagcacaacctcactgagtgactggacaaaaatgtgcagtgagcacacgatacaactagcactggaaagcac

SEQ ID NO: 37361 - DNA, 540 bp, Zea Mays
tcctggaacatcgataatctctggaaattttttgtttaagccttagggcctacgcgcctatgtaattttgcaaacgatgttgctcaggcccacactcttttcctcctgggggtgaggtttttaatgaggcggagtcatataatataccagtgaaaagccccctcaaaaatatccaagtatcaccatgtcgaaaaagaccgcttcgacggtcttcggcattcgaccgatttgaagtcaccgcgataggtagcgtagactaccctcgtgtgcgacaaactccgtgcaaaagtcgcctaagggtgcagccggacaagcacaacaagtgcgcgatacgaagtcttactaaaagacactacgtgcaaaagtcgtctaagggtgcagccggacaagtacaacaagtgtgcgataccaagtcttactaaaagacactccgtgcaaaagttgcctaagggtgtagccagacaagcacaacaagtgcgtgatacgaaatctttttactaaaagacaactctatgcaaaagccgcctaagggtgcagccg

SEQ ID NO: 37362 - DNA, 2918 bp, Zea Mays
cataaatcatgtatagaaggaatcttttgtgccacgaatcacgggaacaaatattaccatgtgcacaccgtttacgactgcataacgctgtgtaacatgatagtataaaccatgcaacatttaaatctccaccgctttgagataaggaaagacgtgctccacgttcgcgtaaataaaggcacagttacgggaggaaacaaattctaatttacagccgctcgtccacgttcgtatctttgatattggcggcggttaacggcggcggaagggagagcaccgggtggcgattaacggcgagaaaatgtccagcatcggcgctggcgatgacatgcaacctgtagcgtctgtgcatagatcaacatgtacgtctatttcaatggacatgcatcctgtagcgtctgcgatcaccagttacacagagggtgtatctgttactccccccgcgacattgagggcaccttgacatattgatgagcacacaaaatcggtagacgtggtcggcgcagataagcacattcccatgagacatattggggcgcatgaacaggatacacctcatattcttcaaagccatgtaagttctcccaattatgatactattattttcttacatactttttttaatgttgtacctatattacgttagatttaatcgctattgaatcgtaaacgttaaatttttgtgcgcagccggacaatattgatataagattgatacctaaagtcggtatgacatttagtaacgtggacgaggcgtataatttttatagtcaatatgcatacgaggttggattttcgttgaagaaatatagggagcgtaagaattgtaaatggttgaattgttcaatggaaggaaagaatgctgaaagggtagctggaaatccaaggatacataacacatgttcaaaacatagcgttgaattgttcagattgtgaaacttataaagcatagaacattgtcgaatgtagcatacatatatgtgcaactatgcataacatggcgttgtttattgtataaactggtcagcctgtgaagcatgactgtacaaagagatgtttccagtataaaacggtgataattgtatcataaacttgagacaaaacaagcataaaacagtgataattgtattataaaagtatgggcaacaatgcataacacgacgttgtttactgcataaactggtcacacagtgaagtttatgactgtacagcggtgataattatatcataaacttgagagaaaacaagcataacacgagattgttgacaacataaaatttaaatgacactgcacatcatataaagtggagtttcatttgtaaatataaacgacactgcttctatccatataccatatataagacaaattaaattgataaaaaaaatatgataaacgcataaaaaaataccgaacaatgtacaaatggttcttgtccttggcgtatcttgcccttgtcagctcttgtcaatgcttgaataatattcctatcaaaatatttgatgcgtggtgttccacgtttattctgaggtgtagctgaatcatgaagatgatccaaataatacagctgcaaaagcataacatgaatcattgtgagacataacaaaatataatctaaatgtatatgaattttgcataaaaaaatatggctacatataaaagacaaaaagtgacatgcttacaagaatgatgatggaacatccgtaaattgttgtagaaacatttgtaacgctcctagtatgtcacttcttggcagtttggcataaatcattgaatattagctggtaccagtctatctcgtggaaacgatacatttcctcagttaaaagaacctcatggttagttattccccagctggcagtagggaacaacaacctattgcacagtatcaggaagaaggatctgctgcttagatcatcgtcaaaccctttccttaaacgatcttgaagagctgcaacactaaaatcttcttttgataaaccaagtttagcccttaaattgtttgcagcaacagcttcatcaatgcctaatgccgtttctccaccagcatttggtaaccccaaaataagttgcaccgtctcctttgtaattttgagctccttccctgggccggctcaaattgtcatgtcattatggtcaagcttttccatcagccaagctaaatgagatctactgccaagtgcgtcaactctcatatcaagaatactggagaaccccctccgtgcaatagcttggcgctgtctgtcatttaaaatctggatgcttactataacgtcttggggattgcatctcacattaagcctctgctgaaaaaatgtatacaatgaatagcgtaaacatttacatctgcataatcgcaacttaatgtttaaatcaaatctcaaaacaatataatttcacgcagaaaatgatatatcgccattgaccatcaattctaacctgtcgggggggggatccactactttcctccgctttgtaactatcttcttcaagacttatggaggactgtcatcaaagttacgcttcttcgataatggcataaagttatcgtcctcatcaccagcctgcattggtttgtgtctaacagttttcgccggaacacggggtatgtcgacactaaagcactcttgagtagactgaattataatccgctttggattagatggaggtcggtctacgttcttcatgtatgatgttcctgccaaatcaaacaacacatatacataaaaaacgtaatggagcaataaaaattctgctcatatgcaacatccaattaatgtataagctggctatttcgtgcgtactggccctaaatgtacggcgagatgtttatggcataacatgttgacgtatatatcataattttgtcaacaaaatagcataacacggtattgtttagtgcataaacgtgtgagacgtt

SEQ ID NO: 37363 - DNA, 345 bp, Zea Mays
cacaggtctcacaaggtcactgaaatgacagaagaggtgagcacgtattagtcacatagtcataagcatatgaaatgtgaatagatacatacacagagacatatggcacgagacgggacgatcaagaagtcaaacgacgtgaaaacggcgtttgacagacaaatagtgacataggatgattggaattcgaattgaggcacgaaatgatacagaattgagccgatacttcacgaataggtttatataggtcaatatgagtgaagtgtgtgcttggtttgaatttaggcgaagaaaaaggaattagggcactcggctcgaaaacgatcgctcaaaatgggaaatttg

SEQ ID NO: 37364 - DNA, 367 bp, Zea Mays
ttcatacgtctgaagcaaggggcagactcagtaatgcagtatctcaacaagtttaatcatctctcccaatatgttatcgatcaagtggacatggatttgaaaaagaaaaattgcttcatgagtgggttgaatgatcgactccagcacaagatgcccacatgtctagatctcacctatagcagggttgtaagtacagcgctatcagtggaagctaagaatttgggacaaggaaaacccaagagatatggggtgaaggatcatctcatgggtttgaaaagcggacaaggttggtaattcgtcccttccacccaaatcgttcttctcctcgtccacccacatatcccttcaagcaaccagtgttcatctg

SEQ ID NO: 37365 - DNA, 337 bp, Zea Mays
tatccagtttggatcgggacgttggtacctcggttcctgctgctgaagaagtgcctgtgactgaatttactaacgctgaccccaatgggtgtacccaatctgttgctgatcccaatgtgagtgctccatctgttgctgatcccaatgggggtgctgcctacgttgctaatgtggatgacaaggaggaagaagatgaagttcctttgactcggaaaaacagtcggcagttcatcgctagcggtgaaagtagtggagttccttctcctgctttgtctactctcattagcctgcaagaactgtccctggccaattttgatcagactcttgaggatatggt

SEQ ID NO: 37366 - DNA, 300 bp, Zea Mays
cacaattaaagcagccatttgaggaactgggtagggcggggaaacgagcaccaggggctcacgcctgattgttctgggcgggggcaggagcgggacggatgaacacgggttgcttgaaaggatatgtgggtggacaaggagaagagtgatttgggttgaagggacgaattaccaaccttgttcgcttttcagacccctgagatgatccttcacccccatatctcttcgtttttccttgtcccaaatgcttggcttccacggaaaacgctatgcatatgacccggctataggtgaaatcca

SEQ ID NO: 37367 - DNA, 320 bp, Zea Mays
gcttattggagtttctcttccagtttcctttactattccttaggaactatgtacatagaataagtaatataaattgttggtgtcttcttctcatgattctgtttttacttggctacagctccaaaggttgtaggattaatatatcattttggtgtcaaataattggagttagtcatttatttgtttgtgtcagaaatctggagtcttttattgctctgaatgcccaacagctaaataagggtattgttctgaatttagtcacaccttttcattaataagaccaaaacatttcataaatgtcaatgaggtttggagaagag

SEQ ID NO: 37368 - DNA, 954 bp, Zea Mays
aaacaaacaacctcacaaccagcatctcgaatagaacaacgaatagcattccacttggcggtagagttaatccctctgacattgtggctcagcacagaccactccatgacgttaacagaaatgggattactcattgagaacaccagacgtttttggggcatacccacaccagtgggtaaagcccgagtcagtccacatgccacaaattaacagaacattaaaacaggcacgcccaggtgccagcccagagtccaaaatacctgcaataaccaaaagaaaaaccgagtacacccaaaagttaatggggcccacaccgaagcccagatcccccaccatccgcctaatggttgtcttgtttatcctcatcagatgaatcattagttttttcatcggccaggtccttcctgtcaaccctccgcggcccaacaggtcccacagacgatttcttttgcttcagcctctgctcagaaaggtcctcctcagacaggttacaaagcctggtgcccagattccgcagcaccttggaggatagcgggggtgggccatcgaggttatgttggcacatgaggcagttcttttttgggcaggccccatgcctgaacccagcacgtgattccttcaatcgtttgcttcttctgagccctgactccacaatgattggagacggcccaccataaccatcggaatccttggcgatcccagaggtgacatcccccagggaggggacaactggacaatccttaggtaccacaaaagggatggaattcattccttgctcctgcaaatttggagggatatctgacagaagaaaagtcttggaccaattgaaagactccggctgaagaagattcgaaagaaaaaaaggtgcccacttcttagggacgtccaccgagtgatcagtcgatccagccagagcaaagtatttggcccagagcctagagaactggacaactc

SEQ ID NO: 37369 - DNA, 339 bp, Zea Mays
attttatgggctcgtggaggaaggttaatgatcaggtgcaaggcatcgctgaaaagggcttaaattcattaatcattcttggattctggacgctttggaatcacaggaatggtggtaccttcgatatgaccactccaagtgtggattttgccatcagaagagctgaggaagaaagagagctatgggagatggcaggagctaatagtctctctcctttcggcccccattcctggactgttggtttagggtggtttggtttcagttatggatacatttatgtgttttcatttttggccaccataaggtggtcttttccctccatgttttggtctatttcgg

SEQ ID NO: 37370 - DNA, 308 bp, Zea Mays
tttgcatctaatccagcccgttcccatgagatcgacggtccaaagaccatcgtctccactcggcatcccagaacggtggcgccaccagaacacacgccggggagtatgccggagacagccaattcgacgactcccagagctatcacacatgtggtttagagcaatgcaaagagtcgagtaaagcgaagctaacagtggtatctcacaagagcaatagaccacgaaggtgtctgcccacgatttcctgcggcggcgccccgatgtttatgtgtggcgctaaagggatgagaggagagcggagaggtagg

SEQ ID NO: 37371 - DNA, 304 bp, Zea Mays
cgcatggatcgtgcatgaataggcacacctgctgaacggcataggcgagatccggccgagtcagcgtgagatactgtagagctccggcgagtctgcggtattgggtggcatcggccaccggggcgccatccgtagcggacagcttggcttgagtgtcaacaggagtcgtcgtagggtgacactcagccatgccggcgtgttggagcaggtccgcagcatactgacgctgggagaggaagaggccgtccttggaacgcgtgacagagatcccaaggaagtggtaaaggtccccgagatctgtcat

SEQ ID NO: 37372 - DNA, 401 bp, Zea Mays
ggcagtagtgggacgaataaagacgggctgcttgaatggatatgaaggtgggcgaggcgaagaacaattttgattgaaaggtcggattatcaaccttgttctcttttcaggtccttgatttgatctctcacccgcatatccctttgattttccgtgtcccgcgtttttagcttcaactgccagtgctatactgacagccctgctatatgtaaggtccagacatgttgccatttttcgctggagcctgtcgttcaatcccctcataaaacaattcttcttcaagtcggtatccacttggtcaatggcgtactgggagaggtggttgaatttattgagatactgcatcaccatatctcctccttgcttcagtcgaataaactcttctagttttatctggagca

SEQ ID NO: 37373 - DNA, 298 bp, Zea Mays
agcttcttggaagcacgcagctccttgatggtggaatccttggtggacaacaacttgccgagtcgagagacttcatcctgaaacacccgcagttcatcgcgatgatggtccaagtcagcatagtaaagcgatggctcctctccaggatggtcaaggagttactagcatcacgatacagcctgtctagatcacaagatgcaacgagtgcttgttcctcctcctgcaagcaagaacaacactaaacattgaagcaaggagagcaaagcagaagcagccaaggaaatttacctcgtgtgcc

SEQ ID NO: 37374 - DNA, 549 bp, Zea Mays
acagccattgtttcagcaggggccgagtgagaagattctccagccaacatatcaagcacaacattcatctctgcatcattcggactcgctggcatctcaaaatgaacttgcctctcatcgttgggaagatcacaaagagaagcaaccaaggcctcaatatcttcgggagagggtcgaactctaagacccagaccactatcaccagcgggaggattagacacgaaattgaaaaggacttaggaggtggcagattccaagcagagtaggcaacaggagcaccaacatttgatactttgcctctcaagatcatgtctagccggctcaccaaatctttagtaggaattctcctattagtaacccgggtggagtcggtaacaccactgtacaagtaagccgggtatgctctgtccttcaggggctggatgttcttaaaaacaaaatcagcaaccacggcttcagcggtcagacctctttccttcagcagacatacttcagcaagcagaaccttagcctctgttacttccaaggcagtaggagactcaatccaac

SEQ ID NO: 37375 - DNA, 786 bp, Zea Mays
gcatacctagacggtgtttatgtccactgaaataaaacaccacatattaatatgccacattgtttctcaataaaacaaagaccatggaaaatttagccaaattgagtgagagaactgtccaaacataggttaaagttgtaaggcaccttttttccaccatacagttgctaaaaagttggaatataaagaattctaatcaatagatcaccttttaaaccacaaatgatgtttccatgatattgagggcattgtattcacatgagagggtattagagtacaactagtggatgaagacattgttgggctagctactgaccttttgtgataccaggtttcctataatcctctctattcaaggcatacctaggtggtgtttatgtccactcaagtaaaacaccgcacatcattatgccacatcgtttctcaaaataaaataaaataaagaccatgggaaatttagaaaaattgcgtgagagatctgtccaaacataggttatagttgtatgtcaccttttttccaccatacagttgtgaaaaggttgtaatacaaagaatacaaaacaatagatcaccttttaaacctcaaatgacgtttctatgatattgaggacattgtattcagacgagtgggtattcgagaacaactagtggatgaagacgttattgggctagctaatgaccttttgtgatactaggtttcctataatcccctgtattaaaggcatacctagatggtgtttgtgtccactcaagtaaaacatcgcacatcattacgccacatcgttt

SEQ ID NO: 37376 - DNA, 399 bp, Zea Mays
gccgagtggtgcttggcgacgtcagtgttttagagataacagccgagttactctgggccacgtcgtcgttttagaggtaacagccgagttatgctgggccacgtcagtgttttagaggtaacagccgagttatgctgggccacgtcggcgttttagaggtaacagtcgagtggtgcttgacgatgtcagtgttttagagataacagccaagttactctgggccacgtcagtgttttagaggtaatagccgagttatgctgggccacgtcggcgttttagaggtaacagccgagtggtgctcgacgacgtcagtgttttagagataacagccgagttactctgggccacgttggcgttttagaggtaacagccgagttactctgagccacgtcagaaatc

SEQ ID NO: 37377 - DNA, 276 bp, Zea Mays
tattgtattgattctacgtttttgaatttctcaggctgcacccgaagctaggatagaagttgacattgaagagctctctccattgggggttgaagaaacgaaaaatgaagaagatattgacttgatagcacagaaggttaagcctttggagacactcctagagagtgacgaagaagaagatgacggggagcagatagctccagtaatgagttaattcttcgatattttcaaagaagaaactgagaaggatactgcctccatgccacctgctgaaga

SEQ ID NO: 37378 - DNA, 448 bp, Zea Mays
aaatcacaaccagattggccgaaaaggcctcatcagcaagaatgacggaacactcctgacaaactgaacagctactaatggagccattagcagaactaacaaaaagtgggtgatccaacctcggcaccgaaagaccagcccgcgacacaaaatcctccgaaacaaacgaatagctagcgccagagttaaaaagagcatgggccacaaacgaatcaactgaaatcgtacctgtcaccacgtctccttgctctctgtcgtcccagcgggtagcacaaaagccccggaaatacctgcagaagaggaagctcccggagtgaaattaacagaagaaccccactgagccgccgggtgaggcagacgcggagctccaaactaagacgacataggagtagtcggtgcaggagtaggcgtagccagatactgaggaaaaccatgcatcggcatgaac

SEQ ID NO: 37379 - DNA, 441 bp, Zea Mays
tgccaagcagggcatcaataacagagcatcacgcacggtgtttagtgtttactaggagagcatcgagcatgtatccaggaaagggagactgtcaaagatggcgagtgatgagtggtggcgttgcaatcagtcagtcggaatgggatgtgcccttttgtgggggcattcacgtcggatcatgtcactcatcacagtctgactgactctgatgactgtacatgctctgagcttttagcctggctgacagtgattattcaccaatcaccactgcctttaccttcctctcctgcgcgcgggacgtcgtcgtcgaccgtcgttctaccctgtctcagtctggtctggccttcttttgatactcgatagctctcctgtctgactgcttcgtttacaaaagtaacagcagtgaattgcttgcgactacaagtgcaatgcatgcctatg

SEQ ID NO: 37380 - DNA, 376 bp, Zea Mays
agaaaattaaggaaattaaaactttgattgggttgggtaaagccccagatttcacagaagatgatcaaggcacagtatggtttaaaaagagaatctgtgtaccggaaatcgaacacctacgccaactaattttgagagaagctcatgattcggcttactctattcacccgtgaagcataaagatgtactaggatctaaaggaaaagtattggtggtacggtttgaaaagagatgttgcttctcatgttgcattgtgtgatgtgtgtcagcgagttaaagccgaacaccaaagaccagcaagattactacaacctctcaaggtaccggaatagaaatgggaagagatcggtatgtattttatagttggactaccccg

SEQ ID NO: 37381 - DNA, 1089 bp, Zea Mays
tgacgaaggcggtgctgtgggcgaccagtgtcctgcggcgcctcaagcgagcgaggtggacgagggtggcgccgcgggcaaggagcggtctgatggtggtctggcgaatggggcagttgagggcagcagcattgcgggggaagtgccagatgtggctcctgtggtatctgaagcacggatggacgaggacgggggttgctccacaggcaatgagtactctgaaatgaagatggaggtggatggcggctgcgtagcagaacgagagggcgatggtcaggaacaggaacaagagtgcactgcagctgctgtggaaagcgaggttaagacgggggaaggtgacggcggagtggtgaatcaagggactacggcacatgctgggggtcttcaggttaaagaggaggtgggggaaggcttggtgggccgctacattggacgtagcgctccagggcgcacgaggattcttattgggaaggttgtgtcctatgatagcacagctggggtctacagcctggtgtttgaggacggacacgctgaggagctggggcttcctcagctccaggagcttctcatgtcggatgataatggtgcattaggcatgaaggtgagctgccggaagaggaagctagacttgctggtttcatcagggagcgccttggaggtcaaagagccaccaagtactaggcagagggttgatggatgcgagatgtctgccaggcctgatgagctgcagcatagtgcgtctggctcggatatgtctgaggatgttgagtcttcgagcaattcatcagatttcactagagaagaaacatctgagccatgccctcctgtacaggctgtggagttgcctccgtcgtcaggcgacattcctgtgccagaagagtccataagttctctcctctctgtttataacttcttgcggtcgttcagtgtgcagctgttcctgagtccatttggactggacgattttgttgcggccattaattgcagcgtgcagaataacttgttggatgctgtgcacgtctcgctactgcgggctctgaggcggcatcttgaatctagatctgcagaaggatctcgatcggcttcaaa

SEQ ID NO: 37382 - DNA, 329 bp, Zea Mays
acaagaagtaatgaattgaaagccacccacaactgtccgctagattcagagttttctatgattggccgggtattatcgatgatttattccagacttctcccgaattgcgaagcccatgacagaattgttgaagaagggagcaaaatttgaatgaggtcagaaatacgaggatgcattccacaccttgaggcaacaccaaaccacaacacctgtgttagcgcagcatgacaacaacaagccgtttgatgtgtactgtgatgcctcgagcactggactgggttgtattttaatgcaagacaaccgagtcattgcctacgcgtcaagagcac

SEQ ID NO: 37383 - DNA, 511 bp, Zea Mays
tattccagatttctccaagattgttaaacctattacaggtttattgaagaatgacaccaagtttgactggtcctcgaaatacaatgacgcttttgagtagctgaaggtgttattgaccactgctctggtattggctcaaccggacattgaaaaaccttttgatgtgtattgcgacgcataaggcagtggactcggatgtgtcctaatgcaagaaggccgagtcatagcttatgcttcaagacaactacgccggcatgaggagcactatccaactcatgatttggaattagctgcagttgttcatgcccttaagatatggcgtcattatctgctgggaaatacttgccatttatatacagatcataaaagtttgaaatatatttttacccagtccgaactgaacatgaggcagagaagatggcttgagctgattaaacattatgatttagaaatccattatcacccaaggaaagccaatgtggtggcagatgcactgagtcgcaaagcttcc

SEQ ID NO: 37384 - DNA, 864 bp, Zea Mays
agcctctgctacggcacctctgaccctcctcgtcgccctcatggcggtgtggctccgggtacagctcacgtcgcggctctgttccgcccgcccttctcagatgggtcgcgacgttcaccggcagattttactatagcagccaagtatttatttgagcttatcagacggactcttctgccgaggatgggatacagggaggctaccacacatattcagctctggctccttggtgccctggtctcccactctgagtttgacatcgtggatttccttatttgtgagatcgaggacaccgttttggatgggattcgtgctcgtagacagttgccatatgctcactacttatgccacatctttgcgtagctgattcagcctcctcggtttcagggcacacttgaggcctcacgcctcgtttttggatcctaccgtcctgcgcctgcggctcctgtgccagcttctgctcctgtttttgactctcaggccgaggacgctgctcttcgtcagttcgacacttaggatacagcagctgatgatgatgatgatgatgattttggggttcctcctccgcctccgcctcctatgcctccacgctcacatgatcatgaggctgggagttctagtgctgcccctgctgcccctccggctatggaccctgctcttgcttcgattctccagtctatcactcagcagcaggctcacctggcagccgagcaggcccggttatccgagaggatgctctcgatgtttcagaacatgcaggacaggcaggatgcgctttagcagcagctactccaggatcgggctgagagcaaggcattcatggctcttatgctacagcagtctggtgtctcaattcctccggtt

SEQ ID NO: 37385 - DNA, 422 bp, Zea Mays
gtcaaccctaagggccccgagacaccatgtacttggagttttctgaaactcgcccgtcgctttttgttaaagctaaagaaccttttgaagcagatgaatggatacgagtcatggagaaaaaattcggactgatccgatgtactgagacccagaagcctctgttcgccgcccaacaattgagaggtcctaccagcacctggtgggcaaatttttcagctattcagcctgccggacatctggtcacatgggcggaattcaagcaggcggtcagggaacattatgttccagaaggggatttatagatgaagctggaggagtttatacgtttaaagcaagggggagactaggtaatgcaatatctcaacaagttcaatcatctctcccagtatgctatcgaccaagtggacacggatttaaagaag

SEQ ID NO: 37386 - DNA, 303 bp, Zea Mays
catcaacaccaccgaagagtagtgcccctggttgatatccacaggatatggcatattcttttaactcttctttctcagccttcgtcaactcttgtccaattaagttttgaaagttgaaaatttcctcttccgaagcatcttcaactattttcttccccttctcaagtactgtagccatagtttcttcagtggttgcggcagcttcttctgtggccatgtccagaagtatcttatcaatgttagaaattgtgctttctaaatgtacatcttcggccgtggcagcttcaacagctacagcttcag

SEQ ID NO: 37387 - DNA, 1226 bp, Zea Mays
aaaaagtcagggattatcaacttatgaaaaggaatatttggctatattgatggctgttgacaagtggcgtcagtatcttcagacagctgaatttgtcatttattcagaccaccgcagtctgtctcatctgacggagcaacgactatctactccgtggcaacaaagggtgttttccaagttgctagggctgcagtataaaattgtctataagaaaggtgctgataatggagcggcggatgcgttgtctcgaaggccatcatctgaattgtttggattaacttcagctattcctcaatggacgcttcagatagtggatgcttacaaacaggatacgcaagctcagcagttactggcagcattatctgttgatcccagcagttcagggcattacactcttaaaaatggtcttatacgttacaaggaccgtatatggataggaaacaattcagctcttcagcttcaaattatggcagctttacatgacagcccagttggaggacactcggggtttcctgttacctatcgcaggatcaaacagatattttcctggccatccatgaaagcaataatcagagcctatgtgacatcctgtacaatatgccaacagtccaaaccagatcggaataaatatcctggacttttgcaaccattgtcagttcctggtcaggcttgggaggtgatcagtatggattttgtggaaggtcttcctcggtcgggcagtgctaacactattatggtggtggtggacacattttcgaagtatgctcactttattccattattacacccatttactgctttgaaggtggctcagctcttcattgatgcggtgtacaagttacatggtcttcctcaagctattgtgtcggaccgagatcgtattttcacaagtaagctttggcaggagctttttcgattggctggtaccacattgaagatgagttcctcatatcatccacaaaccgacggacaaacagaacgagtcaatcaatgtttggagactttccttcgcagttttgttcatgcgtgtccgtccaaatggtctggttggttgtcagtggcggagtattggtataacaccagttttcattcctcacttggacgttctccttttgaagttttatatggacacactccacggaatttgggcttaagactttcagatgccactgctcatatggacctacagtcatggttacagcagcgtgagttgatggttcggctgg

SEQ ID NO: 37388 - DNA, 360 bp, Zea Mays
agtaagtctacgaggtgcggcaaacgagcaagttcccgccgagcaagtctacaaggcggagcgaacgaccaagtctccaccgaacaagtccacgaagagggacgaccaagtccccgccaaacaaatctacgaagcgggacgagcaagtctttgccgagcaaatctgcgagcggggagaacgaccaaagatccgacaagcagacctgcaaggaaggaacataggccgacgccgctgggccacgtcggtcgtaacaagacgcgtcatcaccaaaccacatccagaccgtacgtacaacaccaaaaggaccctgataaacacgatgatacaccctcgcatgcgcctcggatatgccctcacta

SEQ ID NO: 37389 - DNA, 291 bp, Zea Mays
tcactatccagataggaggtcaactctgtgtcaagtgaactaaggccagcactagagtgtgcttgttgaagcaaagcagatgctgatgttccactaccaaggttaggtgttgtagaaccagaatatgggaactcagaggtacaatcaaatccataaatcaatccccagttttgttttcttttacctgtgacagatggaggaggaggcacttgttgcctaactgcaccaaacttcagatcatatttgttaaacattgtagacaattcacttttcacacaagtatagtaaagt

SEQ ID NO: 37390 - DNA, 350 bp, Zea Mays
acaagcgcctgtgctgagcaagtatgcgtaaaacagcagaccaaatttccacgagactaaaatggtccctgaatggctggctggctggaggtagaggacaaagccgcttgtggcctggtcaccaaacgagccagatctagatcaacacgcctagttttctttccgtcagcgtcagggatgtaaccagggttacgagtcccttgccgcgttgatacccaacacacgagcttcgtggagaagtgggggtttcccctagcagaaaaaggctaacacacactaaaagcagagccagtagtacatcaggctagtgtagttgaaatgaggttttctccatttcagtcaacaacccg

SEQ ID NO: 37391 - DNA, 359 bp, Zea Mays
tatgaggtggtagagaaatttgaagtatgaaatatgtgaataagtttaaacatttcgcctctattttttagacagaagctctagttggaagaaaaggacgtattcagttccgtaggcatcacgcactgtgcagggtaaactcccccaaaagttgcaactcaacgtgacagaccatctgagaagagaaaatcctgcatcagcagtccctttcagtgcttccatgatgtttaatcaatgcacaaagcaagtctgagttgcaggtcaacccttcgaaattcaggaatattgcaaggatgtatcgaggagcagaaaggacagtcagggaggcgatcctttcgttcgttacgagagtatctttt

SEQ ID NO: 37392 - DNA, 549 bp, Zea Mays
cagctgcacaatggggcgtgctgagtttgtctttttcaaggtgctagaatttgtgccattatatttaaacattagataccaacctgtctgatttctgtcactgagcagtcaatttgggtggttagaccacggctcgttataagccttaggttgtccaattagaaccccatgtctagcacccaagccttagctactcctataggatacttcaatttctatcaagggagtcatagtagaaatggcacacttggcgagcataatgctagtggaaagcagtcatatgtattgttgtttgacatgttttggcaatttagaatcatgctagtaatagtttattcctactctgtttaattaggaagccaactacatgtcctttcttttcctttttcttttggtttatagtatagctggattcattgaaactattcagcaaatgccctggttcctgtatgttttgtttgtttagatcagtatgtacaactatctttagtctccacttttgaagactttatgtatttgtatctattgccagcttactagaacaatgag

SEQ ID NO: 37393 - DNA, 318 bp, Zea Mays
acacccatacattgtaatgagcagcaagttgacatgtcccagaagattttcccttgtaatgtgcagcagttcccttgtagatatttgggactgcctctatcggtaaagaagcttccaaagattgcttttcatgaacttattgacaaggtggctgacaaattgccagggtggaaatctgccctgatcaccaatgctggaagactgacattggttaaggctgtcctcactgccattcctatataccatcttcttgtccttttatgccctaaatgggttatcaaagccattgacaagattcgcaggggttttgatagtcgc

SEQ ID NO: 37394 - DNA, 418 bp, Zea Mays
cacgagcttcattatcagatgaaggctacagaagacgggctacatgagaatttcggctgttacaactttgcttaccgcaaagacatgaagactccggtggtcagctatcgcaccaaatggccaaccggctggaagaatgaatggttttatgttaaggttgatgagaagaaggagaagatagttcagagcccactggacctaaccttcgggttaactaggcttttttgtgacatgctgcaagggtcaccatgccggacagctgtgggtgaattccgagttgtgtctgagcatatcggtactagagaattggtgtaggaatacttagccaatagagtatttccgacgttaaaggaatggaatatgtcgaagcttaaagaagaaaagaaaaagaatgaacttgttcgactgccttatcact

SEQ ID NO: 37395 - DNA, 1291 bp, Zea Mays
ctggtccattctgaaattcagattctcagtggaacagagccaactttgtgtgtgaattcaaacttgaattgttgagaaattgatcaaggttgttgtgacaaagttgtagctggtttgtcaggctataattttggtacagggagttagcttggtcaccacacaagattgggagaaaattaagctcaaaaacggtctgtcaggatgactgaactccattcgccatggtacagtaagctccaaccttaagaagatcacgattcacccccctgctcgtcgccggtgacttttcgccggggttgctgacggatcgccacgattcgtgcaccgtggacagcagataagctcgcgctggtaaatatcttgcgaccggattgagttgaacctcgtggcggctaagcccgtcgtacttcctccccagctcatcggccgaacggatagcctcgccgtcgtcgagctgttgccgttgcgcgccacgtgcttaagcactagtcctcatcgtggtgactcacggtgtgcatgtccagtgctcgtcggaccagcgcggctataaatagcccatgatccgcggcaaactatgaacaccacgcacaccgtaagtcgatccgaagcaaaaattcgcgctgcctctgccccctcctcccaaattgagtatgcacggtgaagctatagtttcttacggccgtgtagcctcaatccccacccccaatttcacctagaaccgccgcactgccgtttttccccaattcggtcgactgcgccgccgtaaatcacctgctcacggccagaggattccaggtccgtcctcgcccacgttgttcgtgtttcagcacccacatatgcttgtgatcgttacctgcccagcccttggatcttgacttcacctaattaaccggaacaccttgatctgagttctgtatccgcggtcaccgtggtcaggcacatcctggcccaaattagtccgattagagcatgttctagggtaaccttgggtcggtcatgccttccccgtagctagacatggcgaccatcgccggtcatggccagcctgtgcggtgtctgtgatgaacgacaagcgcaccgtcgccagggacgtttgtggagaagaaatagaagaacgagggtatttctgcaaatgtcagcgactcgccgaaatagtgctttgaccccgctttaagttattctgtttgtcagggccttttctgcaaaacccgcagcgcgggcgcgcgctggcgcgtttctgcgcttgttgggccgacttgggctgatttcggcccgagtctgttcattgttt

SEQ ID NO: 37396 - DNA, 361 bp, Zea Mays
ctccgtgcgaatcccctccatccccgggcctatatagcttagtgccgctagaccctatccaaacacaacgcctctcgtgccgcatccttcacaagcacctcaccctcggggtggacatcgggcagggatcgagtgcagaccgtgggtcatcgtcgtccgacgtctgcagcgacgttgtgtggacatacgatcgtctgtggtcttcaagagttcacctcgatggtcctcgtcgacatcccgtgcaagaacgatgactgggttgaccggaatcactcgtcggggcgtaccgccaccgtgtggccgctggtcaccatgggcgagggtctgtgctgcatgtgtaccggtagggcatccatcctcc

SEQ ID NO: 37397 - DNA, 545 bp, Zea Mays
ggagaagggaggaggaagaagaaaaagagataaaaatgagccttcctaccagcttgtgctgcctccgccactggtcattaggaaatcagaccccctttagcccattcctagatctgccactggtgacgggtttttacatggcagggtaaaaaatggctctgcatagcagggttggggaagactagcctggtctgttttgagatgaatgtgtcttggacgatggatggtgttcttttggtctaagttcagtctgtttgctgttatcgccagactaggtgtgtaataagggttgttttgaagcacagttatttgtttgtctgtcgaaactttgttggcggtaagaatagtggagcttgagtaggagcatgtttgccgggtggatgaaccctttgtgttcatgcttctgggtaggaattcaggatgtggtcgtgttatttcatcgttaaaaaacttctataattctgttgttcttgagtaatgaaatttggttcgtccgtgttgaaaaaaaggtgttgatgtctttgaccctgttttatgtgactaga

SEQ ID NO: 37398 - DNA, 584 bp, Zea Mays
atggcagcctgcggatatgccaggagtcctgtgagaactggccgagcacaaactgaaggtctatccccagacaaggccgacccgacaaaagctgcgtcgtttcacgcctgacaagatagaggctattcgcgccgagctagctcgcttagtcgcagcagggttcattagagaagtaatgcgtcctcagtggctagcaaatcctgttcttgtactcaaaaagaataaagtgtattggcgcatgtgcgtcgactatacagatctcaacaaacactgtccgaaggatcccttcggacttcctataatagatcaggtggtagattcgaccgccggatgttctatgttgtccttcctggaccgctactctagataccttcagatcggcctcgcaaaagaagatgaggaaaaaactgcattcattaccccgtttggagctttctgctatacctccatgtcgtttggcctcaagaacgctggagcgacttaccagagagctattcaaacatgcttagccgatcactggggcaagcaggtagaagcttatgttgatgatgtggtgatcaaaacagaaaactcagaaaacttca

SEQ ID NO: 37399 - DNA, 568 bp, Zea Mays
tgagctgctgcccacctcgacgactcaccgcttcgtcagctcgggagctggacggttgtccaccttgttgactcatcgcttcgttagctcgggggttggactgttgtctgccttgatgactcatagtttcatcagctcgggggctgggctgttgtctgccttgccaactcatcactccaaatggccaacttctagcatcctttgaggctcgacacaatgatttggtttggtagtctataattcatgtcgctcgacatcaagtacgacatggtgctcctcccacctagacacatggctgacactcaggggcatccagacatctacccctgtcctcctcgccgtaggaggcagagacggaacaaccgcaattgcaccgcgagcaacgccccatgcctagtcgacgctcctaggctggctaacgacgaagactccctcgcaagggacctgacgaacgtcagcatcacgtccggagcatcgacgacaacacacgtcaccctagcaccgactctactggctcctccccctatggtgtggggagcaccagcttcgtcggctccccatacactac

SEQ ID NO: 37400 - DNA, 447 bp, Zea Mays
gccgattcggagtcccgtccgagctcacagttgacaatggcaaacagtttgacagccaggatttcagggacttctgcttctccatcggcaccaagcttgccttcgcctcagtatatcacccggaatttaacggcgtcgtcgagcgcgccaacggcaagattttcactgccatcaagaagaggcttctcgatgacaggaagggtaaatgggccgaccagctacctgaagtagtctgggcactcaacacaaccgaatgtcgggcaactggattcactccttttcgactactatatggatcagaggccatgacctcgcaagaaataaaacacgggtcaccccgaacaagtgcatcagccgtccccaacgtcgacgaaccaacgtccaaagaccttatcgacggagaccgcgtcttcgccttgcagaccctcgacaaataccaagctcaaa

SEQ ID NO: 37401 - DNA, 562 bp, Zea Mays
gcgagcgcccccggcgcggctgcccaaccaagctctgtccagatctgaccgtctagggcgaggtgaccccctcctggcggcgagcgagacagcccccactccaccccacctcgcaacagccaccggtacagccccctcccctactggtataagcggtttgcatcacctttgactggatctctacttcctccacaaacttgtctagcgtaccttgagtgacctcgtttgaggccttgacagccacctcggtcttgtcaggtaaattccctttgtgaacctcaccaaatcatcccttgccaagagacaacgaattgttcatggttattttgccgagttcatcttttgtgaatatttttagagttttcacgttttaagcctctcacttccattctttatctcgatcgcttctagttctatctgcttcagcatatagcatagcataccccaattccaagtatgaaaaaatacggaatcgccaacaatgattccagtaaaaaatatggcagcagcatatacaaatcaaataagtttggtggaataactgcaacgcctaaataagaag

SEQ ID NO: 37402 - DNA, 391 bp, Zea Mays
ctccagccggtacgccggatttaaccagagtcgttgcttggtggatccacggtctacgctcattatggcctatctcgcgctccttgacttaatctatgccgttgactttacaatccacggccctgccctcgtcttcaacctcccgacatggtgggagatggcgctacgctcctccaggtgatgcggctcaaataacgcccacaccagtgcaagacaccagcactatccgagccctagggtcctagccgaagggatactacaagtatgggtgaaatacgcagtagcggctggaaacaaggattcaccgaggtttagacatcgcggtcagatcggtggcgaagctccggtctggtgggtattcggctacacttgcacggcactcacttggcgc

SEQ ID NO: 37403 - DNA, 685 bp, Zea Mays
gttctctggatggcgggttgatatcctgaaagcagaggggctctttagcaatgttgacccgattagattggctcaaccatatagggttacttctctcaatgaccattgatcaccaaatcaacggacagggtcctaaacgatctaagccacacaatcctaaaccgaggactctgattttataacgcgaagaggtattcttcgttttaatctcgaccgtctatttcctaatgtacggacgcctggtgtcttcaaccacaggccgtccaagcatggacgccgcgccctcctggcactctctctctcgttggtcaaccgaaaaggggggtacgtcggcacaggtggaaagcttaccggaatctagacaagccggctgtcaacgtcgcgtgcagagctgaccacagaagatcggggcaaccaagcgcctagattcgccggggttgatgcgtcggtttccaacacggtgatgtttcagccgaccaccgccacaggggagacaccgcggaacgcttctccgcctaactccacccaaagccgtacacaccgggaaaatacaagcgcatagcagacggcctgccgacacccacaccgtggcaacctatgctctcgctgctcccctttctctttctctcgacggtgcgaacacgacgacactacgcgctggatcactctattcggccgagacgac

SEQ ID NO: 37404 - DNA, 353 bp, Zea Mays
gaacacgtcggtgtgttctcagtttccgccgttatcgtggacagtgagttcccaacccggaattgtgcaattaattgaggggttaatgtcgccaggggttgaattagatgtcagccgagtcaggcgcccgttcttggcatattccggccggatcatgctcgccgaagggcgcactcaccactgttcgacgtcggggacttgggtttgtaaagaaatagaaataggaggagctttacgtaaatgtcagtgaaacatagtaatagtgcacaggaatctttaagggttatttaaaagatcagggtcctctgcgcaaagtgaaccccacgggcgcgcgtggacacgcgctatcctgg

SEQ ID NO: 37405 - DNA, 347 bp, Zea Mays
ttaatttcaagaatgatgagctaatttggtctggccacggtaaccgcgcggatgaaccaaagaaccacgcgttcccggcgattggcggcggtctagttcaattaggtgggtcggcgagcatcgtagacacatgagaatacttaaacgggtaagcagaagacacggactgacctgaatcacgctggccgcggggaggctaaactgcgcagtgttcttgagcagattgggggaaatccaaaattcgagttctctggtggggggtttgggatgcaggtggatgcagtagctgcgtgaatacttgacggagttgaggacgcgctcaatttatagaccccaaggtcggtagc

SEQ ID NO: 37406 - DNA, 434 bp, Zea Mays
ctaaactaaaaatcatttttatgaaatgttttatcctttttattctctgattgaactagggttactattatgcgaaagaccaggggctaattcctatatttctccaagactcatattcaccccgcgtggatggcgggttgaaactctaaatttgcaggggttctttagataaaaatcacggcgaaggggtatcgacgatagtgggccgttggattacgatcgagcggatcagattagattcaaaccccaccgaaccgctatgcagctccagtcgtccgattttgatcaaacgaccaggaacaccccacaccatgatctcatctgattcatccgtgggtcgatcgacgacacggattaatctcaggaaaggggtacgtgcacatcaaccgcaaccgcggatttcaagatccacggccatagtacttcttctccac

SEQ ID NO: 37407 - DNA, 502 bp, Zea Mays
tggcgaagcgtagggtgagtgaggttgagggtggtcgtcttcgtgtggacagggctggcaagcgggaattgttggcctcgccggctggggtgagcgtaggtgagggggagttgcgaaatctttttgagggtgaagagctgaggataatgctgtttaactatagggagatgggtatcatcccgaaagttgaaccaatgtgatgtgtggtgccctcgctgcacgtatgtaactgtaatttgtatgatgagtctgtgtgccttcgctgatccggccgtgcccgtaggggacttgtgtatttgatctagcgcgtttattatgccggtccggctgcgcctgtaatcggtctttgcgtggatagtttttcgacgaagatttttgcacggatgtgccttcgattttgcgcccttgttgtgctagtccggctgcacccttgggcgacttttgcacggatagtcttttgaagaagacttcgattttgcgcacttgttgtgctagtccggct

SEQ ID NO: 37408 - DNA, 571 bp, Zea Mays
gttgtagtttgtctatagcactacacttttgctgcaaagtgttgatcatgttaccattgaaaattgtgagaaaatcgagcctggattatgactgtcaggctgactgaatgaaatagcccatggtacagtgctctcgggtggatcaggctgccagcgctgcttgctcgtcgccggtgacctccctgcgcgaagattcgtgctgccgccgcccggattcgcgctggggactaacggataatctcgcagggtaaaagaagtttgccgccggtgagctggtagtcactccggtgactcaccaccgcacctttcggctttgcggctggagtggataagactcgccagtgaaccgccatcgcacggccgtgtgccacatatctgagcaccccagtcgcatcaacgtgactccctatcgctgtctcatcgacgccggtgaggttgccacgacgggggacacgaaatcgtgacgacgatgttcttccttatctccggccacccgcactgcccggccaaattaagcgccaccgacgaagcttcctataaattgagcccgcggctagcttcgcaacatcat

SEQ ID NO: 37409 - DNA, 307 bp, Zea Mays
ggaggctggttggccatctatacaaccactgctcgggccgctagggcaactaaagacgtgatgactacgtacttgcccatcgttcttgggcatgatgcactgcagtggctacgacacctgccacgacactgcatcgacgattggagcgacttcagtcggcgtttcatcgccaactttcagtccctctctgacaagccagcgcagccatgggacctcaaatccatcaggtgtcggggggatgagacactttggtcgtacctcaagaggtttcagaccatgagaaatcgtatcctcgaggtcactaagg

SEQ ID NO: 37410 - DNA, 407 bp, Zea Mays
ctagggaaaaggtggggaaaatctatgcgaagctcttcttctctctcccacgttgcttcatcttcgccatggtgactccattgtactttgcacatctttatcaccttatttcttgtaactcgagtcaaagtatcaagaatcttgatcgggtactctgtgtaagtcaagtcatcctgaacactgagctcttccattggtaactgttcctcggggacacggagacacttcttaagttgagacacatggaacacattatgcacatccgacagagtagcaggtagctcgagttggtatgccatctccccaactcgcctaaagatcaagaatggtccaatgtagcgaggggacaatttgcccttaactttgaatctcctcattccacgaagtggtgacaccttgaggtacac

SEQ ID NO: 37411 - DNA, 327 bp, Zea Mays
gcttcaaaatattaatcacctcgactaattttatgttgtgctcctatatgtcctcttgccaaaaagtattttattctagtatggtctatactcttctcaatctattagatctaatctcacttttgtgcttgcgatatctttgtagatgccccgtgaccataaccttcttgtctttttgggattctttcctcttttgtcattaaattgctaccatctggcgaactctagtcctttggcattgacatgcttgtacccctttaatactcttgtttcgaatacttgcctctaaatttctactgcctacttagacatttcagtttatatgtc

SEQ ID NO: 37412 - DNA, 602 bp, Zea Mays
ggtatctgatgactggatccgtcggatccatgatgtacgacgatgattaaaagcaaactggactccatcggcggtcgttagatttaggatctagggtcgataagaaccgagtgtaatggaccatcaatccgttgatcggcgacccgcgctaaacacatcgaatggttaccccaccatctaatcacacgcgtcggtagcagatccaacggtggagataggatctggcccccaacttctaatcctcgcgctcctcctaacatcaacggccctgcgcacgccaaccctttccccggtcggacgcggcgccgccgcccaaatctacggtggagcgccgacgacgcatgccgcactttgctcgttgaggtttgattactaaaattgacaagtgcaacttgaagtgtatatcattgcgagtgttgaggaggtattattaccggcaatgaagtcacgtagccccctgacgacggtggacggtggagtggcaagagagacggagagagtacagagagggcgaggcccaggaggacgtcagtgcatcatcggccaagtcaacagaaggaaaggggtgagtacgtggttggatccttgaggatgtcctcacc

SEQ ID NO: 37413 - DNA, 458 bp, Zea Mays
taaatttctgcatacttctctgtcttgtgggtggtatgcactggtaagaaatgagcggtcttggtcaatctgtccacaataacccaaatggaatcatggtgcctggaggtattgggtaatcccacgataaagtccatgcaaatgtcctcccatttccaagatggtatgggaaggggttgcaaagggcctcctgccttcaaatgactggctttgaccctctggcaggtgtcacactcggatatgtacttggcaatttccctcttcattctggtccaccagtataaggatctgagatcatggtacatcttgtcgctgccagggtgcatggagaattttgaaaggtgagcttcatccaatatcttctttctaagctcagggtccttgggaacaaccaatcgatctccaaaccatagaattcccttgctgtcctgacgaaagcacttgtatttctccacatt

SEQ ID NO: 37414 - DNA, 298 bp, Zea Mays
tggatatttaaccaaaacctctatggcaaagttagagctggtttgttaggctacaactttgatatagtgagatgatcaagtcactgcataaattttggaacaaatctccctgccattcgctctgttaggctgactgaagaagttcttgatggtacagtaagcaaaaagatctgctggttcagtgaacttgccgctggcgacccccgtgcgtggattcatgccgccgaggtgattcgtgctcactggtgcccggataaagccacggggtggaaagatcttcaccgctattgagcttaag

SEQ ID NO: 37415 - DNA, 446 bp, Zea Mays
acgcaatgctcaccacgtgagtcgtgcaagagatgtacaacagcagatcttcagtcggctggtttggcgtggctcggcgtggcggttttagcactggcggtgtggtcaggaacttcttcagtgcatcaagggcttcctgagcttctgaggtccattggaacttgtccaccttcttgagcaatttgtagaatggtaggcctttttctcctaaccttgatatgaacctgcttaaagctgccatgcatccagtaagcctttgcactttcttctgtgaccgtggtgcttccatcctcatgatagcctcgatctttttcgggttagtttcaattcctcgatggctgacaatgaatccgagcaatttccctgctggcactccaaagacacatttttctggattgagcttccaccgatatcgcctcagactgttgaagaccagctacaaatct

SEQ ID NO: 37416 - DNA, 396 bp, Zea Mays
cctgtacgtccctcggtcctcccagcgatcttctcgggcatggtcacgatgacggtccctgtgaggcgagtgacaccgtgcatcatgccgcctctactgggctgactggcctagagctaggctgtttgtagaggcttttgctgactcagctctggtgtcatgactgcgtgccagtgcaccctgatctcggtcatactcttcccaccgcctcatctgctcttcgtgttggcgatcgcgcaaatcgttgatgttgctccacgcatctcgtcgacagttgatgacgtggcacatgtcgttggccagatgggtgaggggaagaagatggttcgccgccttagtgaggacctgccagtaaccttccgcgtctgaggtgcgcggcaagtcattggcgatctg

SEQ ID NO: 37417 - DNA, 522 bp, Zea Mays
gagcaagtaagggtgctgaaacaagaaagcagagggcgagatcggacctgaatcgagctggccacgacgaggcctctttcacggtggcggaaacacagtttgggggaaatgagcaattcgtggtctctggtgaacaattggaggtaattgctggtgctttggatgcgtgactaccctacggagctcatggcgtgctcaatttatagagtccgtgagcagtggcattcaatttggacgaattgtgctggcagtcgggaggggagctgagtcactggcgtggtgattagtggctttcaccgtggcgggctcaccggggatcaccgggcatgcctaacacgagcgactgcgacgtggtaattgccgaggcacgtggagttcggtcggcgggcggccaactccggtgaattatctgaaccggccgcaaagcagaaagggggtgcggcggccagctgcaaccgtgcccatactcaacagcggtgaagatctttctatcctggggtgttatccgggcctaagcgagca

SEQ ID NO: 37418 - DNA, 440 bp, Zea Mays
gatcgggtattctgtccaccgatagggggcgggggcactggtggttgccaccagtatctatcggtcgttgagcttctgttgccttttgttctcctgttacccgtgtcctccgaagatgatgttgacctccccgtcgacgcgcgggaatgctcccatcttcccccttcctattgctgaggtcggcgaggctcgccaggccctcctcgcggtgggggagggggtagaggctagaacggtcggccattcccgacggaatgcttcaagtatctgcagttctgcaaggcgtggcgcatatccttgtgatacgggcactaggcattgaggatgtcgtccagtgtccgctcgcctccgcggggtgcacctcgagcatgagagacgggtggtccggcggcgtggacctcttcacgaggcctcttctcccgacgcttgttgggttgctg

SEQ ID NO: 37419 - DNA, 392 bp, Zea Mays
gcttctttgacctcagctaaagccgtggaattcatacaagacataatattcaggttcggaataccgaacagtatcataaccgacctgggatccaacttcacaagttcagagttctttgatttctgcgagcaaaaaagcattcaggtcaagtatgcttcggtagcacacccgagagccaacgggcaggttgaacgagctaacaggatgatattggaggcactcaggaaaaaggtttttgataaaaatgaaaagttcgcaggaaagtggataagggaattgccctacgtcgtttggagcctaagaacccaacctagccgagctctgcatggaaacactcctttcttcatggtctatgggtcagaggcagtactgcctgctgatctcaagtttgg

SEQ ID NO: 37420 - DNA, 680 bp, Zea Mays
ttaaaaaaaatccaggtggaatttctcgtgctagctagacataactttggaaaataagaatgtgaaccaaccagcatggcggcctggattctttgtgctctttgcaactttcttctccttggctgtaaaaagttttggtcgacagccctgaaaggcaagtaaaatgaatatagtttagttccgtttctgcataatgcgattaaggtaatgcaatcacaacaatattcacctttgttttttcctttgcagtagacgccattacctgctgaaaccaatggtaaggtttccttagtgatatttaagttttaacttgaacaccgatataattaatcgtctgcgatcggtttagacttagtaaaggtacataaggttaaagcacgtaagaaaaaaaacttaatgcaatgacggatgagttttgcttaaactctaaaacggtttttttttgtaataatatgcaaatttggaccaaattgaagcgaatcacgttcacgaaaattgtccacgtgtgatgatttagagagtgagagaatatgcgatccaaaacaaatcacacgttgcgcctgcgacagaggagaatcacacaaacaaaacacgacagccgttcctaccattcaccgactatcatgaaagccgcaccaatatgcaatctatcaatcgccaaaatcctcccctggaaaaac

SEQ ID NO: 37421 - DNA, 948 bp, Zea Mays
aactacgagcaaatgcataatagaactcaaaataatatgggcaagggcaacaccccacgcagtaaaattacaaaacaagcacataaagggctaggaggctccaccttcgaaatgaagccacactccctataagtatacagtagcaattcaagttcctggcctttgaagagcaacctaagttccaactcttcatcacgacaatggtcacggaccccgcttaactcccccgtcaagacagcatgacgggggctgatgtccaactcacccagctccccctcgttaacatacaaagggcccacccctaatacctccccgagcgaaatccttgaaacagatccttgcaagcccattcgcctttgtttacggccaccatcgcacccatgcctaaacactacggagaaggtctcccttcgcttcagaacatcaatttgcgtactttttagtcaccgctagcaagcggagccccacttgaaggccttcacctatttcagtaaagatagcggcataacacatacgacatcgtaaagaacattctttcccttacccgagaaaccaaaattctcctacgtaggccccgtcatcaaaaaatgtgcaggcaccaagcaaatgttaatatcatgcccccaccacaaatatgcccccaaaactatcaacacatcctacacctgcgtgacactgatgtcttcattggtatcacggtacgaggtcttcatagtgctcggctcgacactagtagcggcatcccacgaagaatgtccttccacgctaggttcatccccaacatcttccagcaaggcagcggagtccctaaattcctcaacctcctcatccttcaactcctggtatagaagtcaaaatattagaacccccaacaaataaacacacaaccaagacctcgcaaaaaataattacccgatccatcacccgactgtccctcttgctaacaat

SEQ ID NO: 37422 - DNA, 474 bp, Zea Mays
gcagcaccatctcatgggtggtgcgagtttggagatgcgccgtgggaggaagacagagtacctcgacatcccactcaaggacagcatcaaaggatggtgcctggaatggtttattgtagagaatcatggcaagtctctcccccctcggtcagggagacagccggttgttcgtgctccaagttggactgaatcccccacagacttggagatagccgaggctagggttctgcttgccaaagttggtttgttgaaggagaaaggtctaactgctgaagctgtagtcaccgattttgtttttaagaacattcagccactaaaggacagagcgtacccgacttatctgtatcgtggtattactgactcaacccgggttaccaacagaaggattcctgctatggttttggtaagccatcttgagatgattcttagaggcaaggtgtcgaatatcggtgctcctgttgcgtattctgcttg

SEQ ID NO: 37423 - DNA, 336 bp, Zea Mays
ctgtatgtcggcgagaacagtctgacagggcatgtaccgccatcgctcggcaatctctcggcgctgcagaggctggcactgtatcagaacaagctggaaggagccatcccagagggcctttcccgtctgaggtatctccggtacatccaggcggcgaggaacagcctctccggcacgattccgcctcgcttcttcaacatatcctctctccagtacttcggtttcagctcaaacaggctgcatggtagactgccaccagacgcaggcaggcacctgccggacctccaagtgctccttcttggtggcatcgggaacaacttttctggaacactcccg

SEQ ID NO: 37424 - DNA, 578 bp, Zea Mays
gattaataaagagttaacttgaattacttatgaattttacaagattctataattacttctacattggaaatcatttcctatacccttttattcgattttatttattatctggattgcgcgcattattctggagttctataggggtttctctgcaaaattcaggacctcggcgtaatgattttataaaagaccaggactgcaggttgataactaaaaacatcaagggcacttttacaaaatggcacggtcgaaggggtatcaacgaatcctggccgtccgatctcgaccgatcggcccagattagaatcatgtgatacaacacttcgcaatccgtcctggccgctcgatccggttttaaagtttgagagacgaccacgccccgacttaatccaaatcactcatcaccgaaccgacatcccagatcaaatcttgcgaagtggtacgtgatggttaatcttagtcgcccacagctgaacagacggctaggagaccttctccttcgtcggtcagcccgcgacggcgcaacagtggatcacagcggagccctcatgccggcgaacccaattccccatttcctc

SEQ ID NO: 37425 - DNA, 747 bp, Zea Mays
tagaggtccccactactattgcaaccgataatcacttcccgttcatggatccttaatagaaaaaccaaaggcatcaatagagcaatgattattacgtataaactgacgaacataaaggagattgcacataagagtgggtgcaataaggactttatcaaggtaaaatgaagtgtcagctatagtaagaacggacgtgccatgactcacaacgggaatagagtgcctgttggccataataatggatgaagaacaatagggtagacatgtgagtaatatatcattcgatgaagacatgtgggaggtagcaccactgttgagaacccaaggactgcccccttgaagggtcatttggttcaatgtggcgatgaggcctgcctggttttgtccactggccagagggtgtggtagtggggcgaactgttggcgccactgggaggagagaactcaacaatgacaaatgctatatgggcctatgaagtagcccctatccgcaccactctggctgcagcgatggacgcaaccaaggctgttgtggctattgttggtcgtgtagtagtagacctactagccagtcggaggaggtgggcgctggtcaccctattgctgctatcatctaccaccatcaccatggccctttttgttgttgcagttagaagtattattgctgcctcatgggttgattacatagggtacataggactaacaacctacgtgggtaggcaatgtggtactattcttgtttactct

SEQ ID NO: 37426 - DNA, 590 bp, Zea Mays
ctgctggggagggagctcgagggttgaagggagagcccgcgcagcgcccgtatttatgcctgggaaggaagggagattacgattcctgccagcgcagatcacggattccgtttggtggtcggcgagtatatcgcgggatgcttccattgaactcggccgcggagtccgcgacggagtagatcccggcagcgttggcccaccagtcagcggagaactcgacacaggcgcgcgcagcgggatcctagcagctcgtgcagggtagttgagatacggggaggaagaagctgaccacctgtccccacaaatcagtgaaagaacaagcgcgcaggctggctatgaggctgctgcgtgggtcctaaggcgcagtggcaagcaaatgggccacgcaagccagcatttggggtacagatgggccgcggggagggagattcagtccaagcgtgacagccgttttccccattctctttttttttgtttttattttttttattttcactttcccttccatttgaatctttattttaaattcaaactcacactcaggttttgaattcaaaatgcacaaccaattaagactcagcatgaaatgc

SEQ ID NO: 37427 - DNA, 355 bp, Zea Mays
cacttaatgggatcatattgggggcagattgagcatcatgcacagttggcacgacctcaacaccacgatcatagttttcatcttcaaggcgagaggcaactaacaaacgtcgtaccactacctccatgacttgcttttgtgtcttcatagctgatttaacataattatcccactctcactgacactcaattgggatgataagtctttgcacgctgggtagaggacctacgtttagcaccccatcaatgacgatgtcatcagcatcatgacaataaatcttctccttagccttagcaaccacctcattaaaggagggtctatcatcgaatatcacagccacacgttgcatgtcaac

SEQ ID NO: 37428 - DNA, 643 bp, Zea Mays
ctacgtaccctactgggttgattcctccaacccagctgctcgtacgaagcgggctccctcagggtctggaggccctgcctcttctgatgagccacctcctcagcctcctcatcacccatgctcctctcgcgccgccgctgcctcgcgtccgatggaccgcaacgggagaggaagtggtccggaccagggtcagggccgaggccggggacttttcattcgtctggccaagggccttcttggcgtcttcaccatttgtcgcacccgggcggtcgaggagtctgtgcaccgtcgcaggaccgaccggctgcatgaggatcttcgtcgttatgcagccgagactggtcatcctctccctcctaggtcccctccacctccagcccctaccttccccgcagaccttaatgagtggcaccaacaggagtttggtgtgccattcattaccccggaggatgaggtcgaggactatgatgaccctttctacacctcggaccctcctcatcctcctcctccctactcgggtcagggacccactcccggtgaccctaggtcgtccggctctggtcactatcctcctcctccctacccgggttcgggacccattcctggtgacccgcggccttccggctctggttaccatcaccac

SEQ ID NO: 37429 - DNA, 306 bp, Zea Mays
gtggggtagtgttcttggcatacttaaccgtcttgccatcccaagggattgatgtaatcttaggaatggattggttaaccaagcacaaaggtgtcataagttgcgtagacaagacagtccttctcacagaccaccaagggaagtcagtctcttgtcaggctcagccacccgccaatgatccaatgatgtttaatctagcaacagaaagcatatcagtagtagaagaattcatggatgtattcctagaagagttgccaggaatgccgccagaaagagaagtggagttctacatggatctgatccctg

SEQ ID NO: 37430 - DNA, 589 bp, Zea Mays
gcccgaagcgtcctcgccgagtcaatcaaccaacttctcctgctgaggggaagaaaaagaaaaagagacgtcttcgccgagtgtcatgcttggatcaggatgccggtccttctgctcctgctgctgaagaagtgccagtgccagtttttgctgaagctgatcccaatgggtgtgacccgactgatgctgatcccaatgggtgtgaccttgatgatgctgaacccaatgggtgtaatctggccacagctgatcccaatgggtgtaccgtccgcattattgatgaagatgaggaagaggaggatgaaatccctctaattcggaagaacagccggcgctacatagccaacggggaaagtagtggtgttccttctctagctttgtccgccttcattggtctgcaagagttgtctctggcaaattttgatcagactctcgaagatatggtcccagaggatctgttgtcggagccggcagatggtgggatgatggatatttgtgctgatgtgcctgatgccgggttggagttatcccgagcggcgtcccgtgcctcatcgaccttggagcgtggtcttaagggtcaggaggttgg

SEQ ID NO: 37431 - DNA, 464 bp, Zea Mays
cgctcggacaccctcgggggctgggtcatagtttgtgctacccattcgagccggatcgtctccggcaacaccctcgggggctgggtcacagcttgcgctacccatccgagccgaatcaccccccgcaacaccctcgagggctgggtgagcgccaacaccatccttgagggccgagttctctgcagcagccacctctaaggctgaaggtccctcagtcacttccatgggagcgaggcaatccaagtcagcttcctgaccctcaagaccgcgctccaaggtcgatgaggcacgggacgctgcccgggatgatcccaacccagtgtcgagcacatcagcacaaacatccatcgcgtcaccatctgccagttctgataacagatcctctagaaccatatcttcaagagtttgatcaaagttcgccagagataattcttgtagaccaattagggcagacaaagcaggag

SEQ ID NO: 37432 - DNA, 806 bp, Zea Mays
ctcagacttatggcgaagaagatagatccaagtaaatttactataatcatcaatgaagctgacataataccttttattacaaaaagaatcaatggcgggtccccagacatcgaaaaacaccagatctaaaggagcagcagactgactggtcgacttaggataaggcaactgatgggccttagcacgaaggcaggcatcacaaacatactccgaggaatctaagcctgaacacactaaattattatttctaatgacacgagcgacaatatcacgcgatggatgacctaatctgcaatgccaacgctcataggatggctttattgcggcaaggtcgtgcttctgggtaggtgtgcaagagatgtcaatgggtagaggccacccctacatggtccgcgcaccagcacttgcctcgtggcctgatccttaatcaagaaaaagaacggatggaactcaataaaggtgttattatcaagattgaaacgatgaatggaaacaagatttttatgggtatgagggacacgaaggacatgatttaggtgcagagggcggaaggaagtgggcaaaacagaataaccaatgtgagtaatctccatacctgcaccattagccgcccgaatctgatcattgccattgtaacgatcatgctgttagcttttccagctcgtcggtgatgtgatcagtcacaccgaagtcaaggtaccagtttggatcagcagcagtggaggatgatgccatggccgcaacccgatcatcaggagtgaattcttcataaaagcggtaccaacagatattagctctgtgaccga

SEQ ID NO: 37433 - DNA, 698 bp, Zea Mays
caagtggataacggagaggagtaaaaatcttggcgctcggattagttccggctcgctcacagttgtgcccgccgtacccacttggaccgcagctggccgagatcatcctcaccagcgttagccgcttaaagatcgtgcgccacacgtcttggaagtctagcatgtcacaatgaaccagtgttgcaagcatgtccatcgcctgagaatttgccacggtgaaagccacgaattccttgcgccagtaacctcccctctccccggtcaccaccgcttctccaaattgagtgccactgccgttgagtgctataacttgaagcctcagggaactccgctagctaattatgtgtccaacgcaccaacacttgcctccaattgtccaccagagccgcccaattgcccatttcctccaaatcggtctaaatagcgccgcgtgagcacctcgctgtggccagcgtgctacaggtccgttcatgtcctctgctctcttgtttcagtaccttatgtgcccttgatgcttctcgatctgaccaattaagctagaacccattagatcaccgggaacactttgaattgtccccggattgtgtggtcaccatgagcagagaggttgggagctcgaaccgtgcaattgatcgaggggaaacgattgttagatgttgaattaggtatcaaccaagttagagcaccggccattgcgt

SEQ ID NO: 37434 - DNA, 299 bp, Zea Mays
ctggagttagacacctcatggtcttgtgccacgtgcctcagcactttaaccacgccgtcgtgactcgtactgacctatcaagagatcgccagtgaggttgccacggttgtagccactaatctcgtgcgccagtgactcctttcttctccgaccgccaccacgccaaaccaaattcactggccattgcttagcgccgctataaattgacagcacggtctgctgtgttaggtcatcaccaagcctgagcacccgctcctgcctccgattagccaccacagctctccaatttcccatttccc

SEQ ID NO: 37435 - DNA, 369 bp, Zea Mays
gcggtggataagtctgaaagcctggtcgacatgagacaaggagaaaagggcagtggagaaaaagaaaaaaaatggctttttcctcttcaagttttgcttttaacaatagcaaatatattattagacaatctaaattattttagtggattatataatctgaggagtcttatttgtttacctagattatttgagttggtggttgctgctgatggtgccacgaatgaacgccgcagcctggcgtcgactgttccgagccaccgcgacacgagacggcctctgacggcggcgattcatggggttcggagtccatgattattgggcggcggtggcagttcctaagtgtggcggcagcagttcttgagggaggcg

SEQ ID NO: 37436 - DNA, 295 bp, Zea Mays
gtagggctcagatctcaaattttcatgtgatgacttgctaatctatctttaagaaagttgttgttctactatccagcttcaatcttgctatagcaatcactcccaaattcttactagatcatgctcgaatcccagctcaaagatgctcaatcacactgtcagtctgaatcagactaaggcagtctgacagtccatctttgggcctaattatctcaaaacatttcatggcaccaaggcataatccctatagcaaagttgtcctccttttatagctctacaaactttatgtgttgac

SEQ ID NO: 37437 - DNA, 666 bp, Zea Mays
gttgagttccgcttccacagctcgtgtatggccgacacggtaatcgctgcgaaacgaggtcatgcgcgtcttccttgtgctttcggatgcaccgaggcttgccatccaaaattcgctgcaatgcttagctagatcgaaggcctacttacgctcagaggtgtcagcttggggatccccatcttttatctcttgtcgtggttaaaacagcggcctgatatgtcaggtgtttgttccgcaaaagggttggacttcccacgttttgggatgagagtttgttcggaatagcatgctcaaagtcatggaatttggtcgcagggagtgatcaagtaggtactaggacagtcctctccctttggtggtgctgttgattccttgcaagacctgtacctctgtgctcagataatccagcatgtgctgcattcagatgggagattgaatgaaagtgtgtaataccagtagcttcctcaaatactgcagattgaatgcacgacaggaacattccaactttgttgtcggtatccattcttcatgaagacgtcagtatagccggctccactgaattcttcaaatggaataccttgttaattatctgcaaaattttgtaaccaataatggagcacttggaggctcatagaagctacatttactagctggatttttaaattg

SEQ ID NO: 37438 - DNA, 286 bp, Zea Mays
aagaattcctgctgtggacttggtcagccgactcgagatggtactcaggggcaaggtgtttaaaacatcggtgctcctgttgcatactcagcctggaatctgcctccttccaaggcttttaccagttttgtgtcgaatcctcctgctggtgatagcggtttgggccttagagtgcgaccctcccacgaagaggttagtgctttggttgcctcacttggtgaagtccctgatgacgagaggcaggttcatttcgaggagcctttgaatccaagtgatgcagagataa

SEQ ID NO: 37439 - DNA, 309 bp, Zea Mays
ggtggacatgggtcataagagaacaaaaggtagtagaagctcaatgatcgccaaatactggtggcgaccaccagtgctcccgccccgtatcgatgcttagaacacccgatcacctttactcgggcggatcaatggctcaacttcgatcatccgggcaagtaaccgctcctcgtcgattcggtgatctgaaagagctgggtaaagaaagtgttggtggacgggggaagcagcatcaacgtcactttcccccggacactcttaggcttgggagttgcactcaaagagctccacgagtcagacactcctttc

SEQ ID NO: 37440 - DNA, 367 bp, Zea Mays
gtttacgtgagagctagcgtgaccaccacgtgtttcgctagctacctctaaagaaatgaagggagggtcgtctataaagcacagcacgctcagcacggaataataattctacccccctacagccctacttgtcccattcgtcgacctgtgttggtgcagatgcgtccagaaaacccaaacagtgacgcctggtgtgcataatacagtgcgtgagttatcagcagtcagagaggagagcagaggacacaccggcgatcacgagccgggccgacgggcatgccaccgaggacagcgcaggcaggactggccataccacgtctagcctagcctgtatgctgtactatgcttcccctgtgcgccggcagcc

SEQ ID NO: 37441 - DNA, 676 bp, Zea Mays
gcgaagatcaccggattcgcgtgtaattgctcgccggggtcaacttccgctgtggtgcgtggtcgtgattgtctgcgtcataactttaggtaagaagctacccgaatgttccgctctcgtatctagttcgcgtgggaccgattagttgtgagcttggagttcttgctcgacaggagggcgtgcaccggcgatggtccaccttgggttgtcggttgcaccgccgctctggggattgcagggtggaagaaggccctcgggccgttggattcacaaacgacgatcgggattaggcggaacataccccttcgcctatctcgaatccggaccgtggatgattgatcctgcgaccacgattgcgtatcggtccggttaagttgtaggcttgatctggaccctcagattctaatcggacgacacagattgacttgtaccccttcgcgcgtgcgatccgagacgttgatctcggctgcggggatcatgatcatgcactggttcgggtatgtgggtcggtctaatctgggccatcaaaaacagatcgggcgaccgatcttcaccgatacctcttcgttctgattcttttgcatataagcccctcggctttcacagaattgaacccgccgtccactgcgggattagcccgagtctagagaattttatacgctagcccctgtaaaac

SEQ ID NO: 37442 - DNA, 440 bp, Zea Mays
ggaggtcattgtcttgtagtctggggttgagtttgccgaccacttcagcttggatgtcttggcatatctagttttcctgaattatgttgggcccttcgaatgcgttggctatggctgcagaagactgatcctactcgcccttggtccgatctccacataaaagttcctggaaaagctagagctttcttcatggaggtggtcattactgaggtgggagatggcacaaatacaaagttttggaaggataagtggttatatggtaagtgaattaaagaccttactccaagttttataatattatacccaagaggattatcaatagcaggacaatttatgaggcaattacagatagaaaatggatctctgatattaaaggtccactgacagtgggagtcttaacagattatcttcagttgtgggatatgacttcagtttggcag

SEQ ID NO: 37443 - DNA, 331 bp, Zea Mays
gaagggaagatgttgtgctcttgagtgggtagagtgggccggagctatcacaccgaaggatcacgcgccgagtgggaagatccttcacagagcagccaagagggtcaaattccacagaatagttattgtcagtggtgaattggcgaacagaaattaaatctttaatgagagacggtgaaagaaggacaatgttaagacaaaaattgtaaggaagttgagtggtgccagtggaagtgacaggaagaaggttgccattgccaacaacaatgttagagggtagatgattggaagaggagaggtgggaaagtataccagcgtcggaattcatgtg

SEQ ID NO: 37444 - DNA, 1073 bp, Zea Mays
ccttaacttcatcttcttgtgccaactgctgtaatgtatcatcagacaatatctcagacatatcctcagtagccactacatttagctgcagtgctccacgctttgcacatttggcaatatgaccaggctcaaacttttccccacaagcatagcataacccattaagtctcctgaaatccctaagttgtcgtgctcttgtgagatctgccccgggtccttggtcatctgttttctggccaaccacaggttgtttcacatgcatagacaaccctgaccgttgtccccaaaatttagtgcgctccaacacctcctgttgaagctgagccaagtgaatagcacggtccaccgtagaaggtgtttgaacctgcaccacatcctgcaattcatacttaaggcctcgcacaaaataggtaacaaagaatgtctcatcaaactccgagttatgaacagctaatccatatctggcctgttcaaattctgacacataagaatccagtgtaccagtttgcttcaaagccaacaacctcctcaatgctttaggataagcattagcaccaaacttagcaaccacagctgaagtaaactcctgccaaccaccgaacccatgcctcaacttgtgatactgccaccactaggctgcaacatgttccaaattcatagaagcaacagacacccacatagcattggaaaccctgtaagtggtaaaatattccatgcattgatccaaccatactacaggatcaccccctgaaaacctgggaaaaggtaacttgggtaaaccctgataatgtggatccaaagactgtctgtcttctccctgcatcctccctgaatcacctttgaaagctctaccaccctccacctccttctgatgacgacctctcgtatacagagacccactatgctgcacctccaatgatggtgaaccagaaccccagaagattcacctaattccttccccaactgttccaacctcatctgtgctactacccttccagtctcctccaatttaagacccaaatcatttctctccttcgcagcctgttcagcaactgatgccgctaattccgtcc

SEQ ID NO: 37445 - DNA, 517 bp, Zea Mays
ggcgagctttggcttgccagcacatgggaaaatgtgccatgctgaccagtgggtgaacttcgttgcagtagcaagagaccaccaaaatacaggagaaggaaggaaggattttgctcttatacaaggaagaaggggaggaagaagggatgtcattgatggcagtggaggggatggggaaaggaacaggaaggagatgaatggaaggggcacatgatgaagaaagggtaggggtgcaaaagaggaaagtgggaagtgcggaatgggatgggcatcggcgaggaagatgaaggagcacatgtgcataaggtacaagaaagggtgctgcaatagtgtacctggccggcttgcattagaggcattcgtgcctggccgagctcatgcctacaatgctggcactgaaccacaccgtagccaactgcatgcccacctatccgcttcttggctggtcgtacccagcccctagctacgcgctcacctacacagggtcgcaccacagcctagcatgccacgcttgcgc

SEQ ID NO: 37446 - DNA, 386 bp, Zea Mays
ctggtggccgcacaacgtggtcattaccgtggcgacttctctggcgatcaccggacatgcgtagcatggttagccgtgacgtggtaaagtgtttggacacgcggtggacgacagtgatggctcaacggcggtgagatcttatctgcgtaatcgatgagcatgggggtacggcgagcttagccgcggtcggactcaagctaatccaggcgccaagatctttacccgcccgcagttatccacttaccccaagcacgaatcgggacgacgatggcacgaatcgcggcggagggatcgttggtggcgagctgagctggtgacctgatctatttcagagcactgtaccatggccattcctcattcagtgcacctgaaagtcaaagttttag

SEQ ID NO: 37447 - DNA, 335 bp, Zea Mays
tggagatgtcaatggaggagcccgaggtcaatacgccctggtggaaagatgtccccgagatggatgaagcttgggagccgatggtggaaagaatcaaggagcccatcggggtcaggcatagtatgtccaccctcttggctcacttcttagcccgacaggtagccccgcttcaaaggcatccaaggccacttaggaatactctggagagcatgacgagatgcgagttgggatcatgtccaagcggacctttcatcctgccacccttagtagcctagtacaactctgtgtcgggttgtattacttgtatagcaatgtgatgctatcgaccccagtcg

SEQ ID NO: 37448 - DNA, 345 bp, Zea Mays
cacgggtatgtgatatcactcaaacgagagagcagaggggacgagctaacctatatcgcgctggccacggcgaggtgtgttttacggtggcggaaaccgtgattggggaaactgagcaattctcgatccctggtggataatccggggcaaggtttgatgcaatagatgcgtgattaccctacggagctgtgggtgcactcaatttatagagcgcaacagcggtggcgctcaatttggcagagaagtgctggcggccggagggaccatgagttactagcgcgcgattagtgtccggttaccgtggccatctccccggcgatggacagaaggttacagcgggtcacg

SEQ ID NO: 37449 - DNA, 301 bp, Zea Mays
ccaaaacggagagatcgagatcgatctttctctatgctgatctattcctttattttagaggtcaagaaagggcagagtaatacatggctgagtaatacatggttgtgggtcataggctcaactatttatatcttgtcttagatgtggagttatactcgtgcacaccttggacatgccatagtgttgagctcgtcatggtaaaaggatagatacatcatatcagagtgacaagtattggataccatgccgacgggtacaacatagttggtaaacgacatagttgcttgcactttaactccca

SEQ ID NO: 37450 - DNA, 288 bp, Zea Mays
gtgaatgaacaatcgtgttttaagacttatgtgttgtgtgttaaaatttaagagtggacatgtatgagtgtatgaccaattatatgtggacaagattgtgttttgtgtacttttgtgaatgagacttgtatgtggatgtgaatgaacatctgtgtggttagaatttgtttattgtgagcttttccgattacaattaccgtttcccgatcaatttcgagctattttgctcggatttatccgttttcgatataccggaatttaccggtcgttatccgtttccgactttcc

SEQ ID NO: 37451 - DNA, 519 bp, Zea Mays
cagaatatggtaggacaagtcacatctacaactggtatgattattaaccatccttctcactggaagttcccaatcaattattttttctcatttataaacattttttacctgtctagcgatacttttgatgagaacactcctccattaagtgacccgaattatatatcttcgttgggtgctgcaacgttcaggggtatgcagagcggtgacaacgatgctatttggttgatgcaagtatgttctctgtgtgttagtattttgcttattattggatttttctgtaaaagcagttattagagatatgaatatagatcatggatgtcttggttgttgcactttacattttcacttctggaactactttcagatgtgtgattcttttctccagttgagagaaatgccgtgctctattgtcacgttcttggatatatggatatgcaaggttctgtaacatttattactctgcagggttggctgtttacctatgatcctttctgggaacctccacaaatgaaggtg

SEQ ID NO: 37452 - DNA, 325 bp, Zea Mays
ggtgttatgccctccaggtgtgaggctgtcaaccagggcccaaaccctgagttctcatacggaaaaaagcccattactttccgttccccatggttgtgtcacagttgctaaagcgatagcctgcaggtagtagccagctttcaggatcttttcttgatgttatgtgcaacgtcatgagaacttctctcccctggggctgagtttcttcaatgaaatggaccttatgttggttgtagtgcaaactttttttccctggcctctgagattccatcaccatctttattccaaatgaaccaacttgtgatagccacttataaattgactg

SEQ ID NO: 37453 - DNA, 308 bp, Zea Mays
ataaagctgattggcaaaaagctagaaagatggcagaatttcttgagcacttttatgaactaaccctacgtgtttctgccacaagtcatcccacatctcacacctatttccatgagattgctgatgttttggttttgttacaagaatggtgcaagtctgaagacaaattgtgcagtgcaatgggcaaaagaatgctagtcaaatattacaagtattggggagatagagaaaaagaaagaggggatcagatgctcaacttggtgatgtttttctgcgtggcaattgatctgaggtataaactttctaat

SEQ ID NO: 37454 - DNA, 474 bp, Zea Mays
ggacaatgtcaggacatcagccaggaagatgcaagacaaggacagtgaggggctgagtcaagaagtagacggcgttcggaggctgggccggcgtgatagaaggccgaagcagcgtgtgtctggagctgagtgggtccagtaagaaatagcagtgggctgtggccatgggccgtattgtaatagagacataaatactggtgttgttgacagagaaaggggagaagaaatttaccagaatcataattccccaattcttgttcctctgttcttcttccgctcccttcttcctgtccgacagtggtcaccggacgtcgagttcgctgacacagtggcggggatccatgccgccgcgcgcgcggcctccctactacgagtctccaccgccgatgcgtggtaccagctgaacaaaccctgtagaggagagggcggtccttcactcctggtgtcctagcgcgcaatctgagagcctgtttg

SEQ ID NO: 37455 - DNA, 398 bp, Zea Mays
ggcgccgccgtgcgtttggtcgagggaagaagaagggcctgtggccgtcgatcgcgaaataaacgatggagattagatcggggcatacctcttcggtgtttagatcccgaccgttgatctgactgctggcggcccagattagctaggcgtaccgctttaggtgattggatctgtgccgtcggatcggtatcctgcggatccaaacagatcgtgttccattaatctgtggccgtcgatctccgatcttgcggccgttaacgcgtaccggttcagacttatgtggatctaatcgtggcccttagagttggatccaacggctcagattcaccgataccctttcgtcgtgcccatattgctaaagagcccctctgtttatttaaaaacaacctgcagtcccc

SEQ ID NO: 37456 - DNA, 457 bp, Zea Mays
gccggtcaggcggagaagactatcgactcctccacgctggtaagtccgcgcaagatcaatccgaagttgcaggggcgtgccagcgaggtcctcgagtgtctagctaaggaggtgctcctgcacggccatggatctcctctaccgcagcagggccagccgggagcggctgaaccttacttttactgcaaagacagagccaatccaggagagcatagagatttcaatgcaagcagtaatggagacggagttgcagagcaagcttcaagtgaagatccacagaagacgattttacagaagagaatcccatcctctgagaagatgaaatggacatttgacagcgccccgtctggtttcaatgccgttcaggtccgaagcgcgttgaagaccccatcccgggagtccggtgaggtgaacctttttgacccgacgggcagtgggcagtaccgcgacagccgac

SEQ ID NO: 37457 - DNA, 672 bp, Zea Mays
gaaatttgagagaaatttggccctaaactttgactctcaggtgcactgaatgggattcgccatggtacagtgctctgaaatggatcaggccgccagctcggtttttctcgccgccgacgatccctccgccgcgattcgtgccatcatcgtctcgattcgtgctctgggtaagtggataacgctcggagtacgtcgccgtggataagctacggccagtaaaatattccggccaccgtacagagctcgccgcggtggattctgatatgcacgccggtgaccgccgccttccggccttgtgccacgtgccctggcacctccatcgcgttgtcgtgacccgctgtaaccttctatccatcgccggggagatggccacggtaaccggacactaatcgcgcgctagtaactcctggtccctccggtcgccgcgcgtcatcgctcgaattcccggccaccgctctcacttagtataaattgaccccgccgtaagctccgttgtatcatcacgaatccagccaccaagaatcatcctcagttgatcgccagcgagctcgaatttcacacttcccccaaatcggttcgaatacatcgcgaagaacacctcgccgcggtcagccactcccaggtttgttcacgccctctgttaccttgttttagtattagtgtactcctctg

SEQ ID NO: 37458 - DNA, 285 bp, Zea Mays
ctactagcattttttgaagaggaaatcgaagcccagccttcataaagctttggaataccaccacctcatcttttttgggatgcagaaatatatcctctccgccaagtctcacaatacaaatatgatgaaaatatttgttcttcatcacctcgatatgccctttcttaatgaacgacttgtcgaagacaacatggcttggtttctaggaccgagattcggcgtcatcgatatcttcttcaaaatcaaactctttgttgtcatcaaaatcatcaaacaggtcggcca

SEQ ID NO: 37459 - DNA, 647 bp, Zea Mays
gaaatgatgggtgctggatcctctagattggattcatcctcgattcctatatcttcctcaaaatctgtgacctccagatagaacagacgcgggcaccgatgaccacgaacgtattgttcgtcacagttgtaacacatgccctgtttgcggcgctcagccatctcgccgggagtgagcttcttaaatggacgttgtgcccccgtgctggttggtgctgctactgttatagtggactgttgtgctggaataggaaatgacggtcgctggggaggcctcgacgacttgctggtagttgatgtctgttggacgtcgagtgcctgagcccttcgttcatatgctcttgccaaacataatgcatgattgagatcccgaggagccataagttcgacatcgatcttgatacgctctggaagacctgccgtgaagagttgtaccttctattccggagtgagtggcgtggtgtgggccagtaaatcccagaacctatcccgataatcctccactgttgtccggaatggaagccttgccaattccccgagtgggttgctacgaagcggtggtccaaattggagttggcatagctgcttgaaacgcccccatgacaggggtggttcatcacgcaggagctagttgtaccaagtccgtgc

SEQ ID NO: 37460 - DNA, 397 bp, Zea Mays
agcgtacgaaacagacgaaggccttggcggttcccgtcatagccaggaatggcaaaggcctccacgactaccgaaggctggacatatttagcacgaagactacgtgttgttatcagcgcgttattgtaatagggaccgtgtaaaaccgccccgtgtcatagggtcccacttgtaagcatctgtgtggctagagttgatagtgtgtctttctgtgggtgtacataatcacattgtaatgacccgcaataacccctgggagtggaatatttcagggataacgtaggtaaccaggggcataatcgtatttgatagggtggaaccgtcccttggttacctataaatacctccgtacaacaccattgcgggggacgaaaaaaacattgttgctctaatacat

SEQ ID NO: 37461 - DNA, 617 bp, Zea Mays
gtctggttcagtccttgactccttacacagatgttgactgggttggctatcctgattacccagcgttctacctctagttaatgtgtctaccttgggcgataatatcgtctcttggtcctcaaaacgacagatgattgtctccctctctaggttcgagacaaagtaccatgccatcgcccatggtttcgctgaatggtgctggttacgacaactgctataggaacttcacatctccgttctttcggtgatcattttgtaatgtgataatgtgagtgttgtatatgtgatagccaatccagtgcatcaccatcgcacgatgcatattgagatcgacatacacttcgtccacgagaaggtcgccttgagccaagtttgggtgttccatgtgccgttctctcaccagttcgccgacatcatgaccaagggcttgtcttcagttgttttctgatttttggcccaatcttcgcgtctggttttctcttgctgcgactatggtcaggtgttggagattgtatctaggcatatcttttagatttgtaagtgcctcatactccaagccatattggcttgccttgtactccaacccatattggctctatatatatggttacccctca

SEQ ID NO: 37462 - DNA, 294 bp, Zea Mays
cttttcaaagaattattgagcgggcgatccagtcaggaatcctttcgcaaatcgttccacgaccggcaacccttaattgctctttgtacgctgacgatgcgggtatttttgtcaaaccagttgaggccgagctcggcgtcctccaaagtatcctgcaaactttcattcgttgctcggggcttaagtttaatcttaataagacataaatttttcccatccgttgtcatgcagatatggtcgaatctttgcccatgtggttcccggggaagctggcatctttcccgagtagatatc

SEQ ID NO: 37463 - DNA, 589 bp, Zea Mays
gttttgcaacatgtatttaatcacatcggtttgactggcaacggtgcaatgactagacagtaaataacatctacacttggtgcatgcataaaataggcataagcataacttctcgataaaagtgtaccttgtttcagcatccaccagcctccgacttaggtaggtcaccacatgctcctgtccttcggtctcttgcgtcagaacaactccaataaccttatcttcagctgcaatgtataatctgaacggtactcctacctgtggtgcttttaacacgggagtcgaagataaatactttctgatgagaccaaacgcttcctgttgttctgccccccaggtgaattcgacatcgtttttaagccaaaggataggagtgaaggcaccaatcttcccagctaggttagaaataaaccttcgtaaataatttaccttgccgaggaatttctgcatctcaagtttataggtcggaggtcccaccttccgaatggatttaattcggtcagggtctatttctataccatgttcatgaatgatgaatcctaagaacttaccagccgacactccaaaagcacatttgtgtgggttcatt

SEQ ID NO: 37464 - DNA, 611 bp, Zea Mays
gcgaggcagagccgataggggggtcgggcggagcgagttgaagccactcgagtggattacacgcctgacccaggactaacccgttgtgtcgcattaaatacggctggcaccaagccacagagtgagggtcggtccaacttcactcatgacctaagagcccctagtcctgcgacccagtcatgacctattgagcctagacctgagtgcattggccgcctgcaggacctgcaacaccacgggatgcgccgagaccaaggctacaacggctagggtcggcgcggcacagagatgacaatgatggtgccagatctcttcgtcgcccacgccacccgccataaagaatgcgactacagaagcatagacgaccgagacacatgcggacaaacacaactttaccaatgtagaacctcctgttttaccacgatgtagtacctccttccttgggacgctaccggtagccgactctcaccttggcctataaaaagaagaaggtcagtcagaacaagggagatagacgaacatacatacatgcatatggacgacgagactagaagacctggaggccggagccaaggagcaagccaccacgacgtccaaggcttatcagagag

SEQ ID NO: 37465 - DNA, 334 bp, Zea Mays
caccaagcctgtatttgcctcggtataccacccacagtccaacgacgtcgtcgagcgtgccaatggcaagatttttaccgctatcaagaaaagacttctcgacgataaaaagggcaaatgggccgaccaactacctgaagtggtatgggccctaaacactacagaatgccgggcaaccaggttcacacctttttgcctattgtatggattcgaagtcatgacaccgcaggagataaagcatggatcgcccaggacaaacacatcagcagtccttgatgtcgacgaaccaacttccaaagatctcatcgacggagaccgcgtcctcgccctgcag

SEQ ID NO: 37466 - DNA, 331 bp, Zea Mays
ctcagttttcacttcaaagtttgacgtcggcactcttgggagtttgaggaacttccttcagaatgtgagagatttttatgggaatgctctgcttgagtaccatgcttgccatatgataaagataacatttcttgttctgaggcatatatgaaaacaatcaaacatatattgggctgaccgaaatcccattgttcctaaggaacgaaaattggtattgatgcaatatataaagcatgtgcttgctgaacgtcttttctattcgtcatcacatttcttttctgctttcctaattttctcgaatgcttctttgcaaatacaccatggattagga

SEQ ID NO: 37467 - DNA, 273 bp, Zea Mays
cgattagatctcgggttgggtgaatctgggtcgtaggatcggatggatcagagtagcgccagcttcataaaatctgaacccttgaattttaatccagcggtggcaatcgcataccgcatcatgaaacgtctgatctaatcccagccacaggtcttagatctaaaggctcctaacacctgataccccttcggccacgtgttttcacaaaagagcccctgtgcttcataagatttaacctgccgtacacggctttggcgctgtgtctggtgtttc

SEQ ID NO: 37468 - DNA, 303 bp, Zea Mays
gtcgatgatgggcaccagtgaaaatcctttgcgagctgggctggagatcatggtttggagtcttggacatggagatggttaatagagccatgaagatggttaatagagccataaagatggctggtggatagtgtgcatatagcacgatacaaaggaggagcgaaggaaggcaaaactgtaagaaactatggagagttgcgagttgtgtcttctatcgaagcttgttcgaatggacggagactctagccaaggtaggtatatgtatatataaccttatccactttaagtgtaacctctgttttg

SEQ ID NO: 37469 - DNA, 344 bp, Zea Mays
cgatcgcctgcctctgatgcgcgccatagactctaccgccacgagggacccgggtgtcagctcgcaatgaaacagactcctgagtctcggttgcgcctatagtcaccgccttgtggacccacggggtcaggccgcgttccctgcgccattgccgcaaccttcgcgggactggtagatttccctggcgccgaatcctaacagaaggactccttagggttcgggtaccgcatgaatgcctatatatgcatgggcggcgaccttcccccaccccatttgcccttggctccttgggatcgccattgccgatgggtgaaaagcggcgggccgcttgcggctattcccag

SEQ ID NO: 37470 - DNA, 391 bp, Zea Mays
cgagtctatacctggagcaaaggcatagcatgttttgctcaagtgattaataactatcacactggccactggtttcgtgaatatgcttgtaataactatcccactttttgatactgtcttgcccaatttatcagcatgatttatcatgtagcatgttatagtaaagaaatatagcatgcctcttgtggtttcacttggaacttggaagtggataaacattgtaattgttctccatccatacaatccaatgtaaaatgtgtgaaaagtaagacagtttgttgtagcagctatctgaaaggcgtgtcgattcagttgtgccggtgaagcttgctccatggttataggtttttcattttggttttctatgtgatattctatttggtattttcag

SEQ ID NO: 37471 - DNA, 506 bp, Zea Mays
caagtccccagcaaacaagtccccattgagctaccctgctaggcagagctgccgactaactcccaaccgagaaaaacccgcgaggaagaagtccccatgacgacaaggacaggataggcgtcaggaggtcaccatcaacacgactgtacgccccctcgaaaggtctcatgcgtatcgctagttctttatggggtcaatcaacctcagtcttgggaggacctcagcactagagtctcaatagtgacccatatatcatgaaagataagacattatgacgtatcgagtgtatgcctacgcatgctgttaggtgacgtagggctcatgacaacaggcaaagccacgccacgcatgaccacaccataagattgacccacgggacccgccatgcactactacgaagacatcagcaatggactcgctacagggaccagactagcaaggcgatacgccataccgggactgcaggtctctccctctataaggttcttcccttgagctataaaagg

SEQ ID NO: 37472 - DNA, 476 bp, Zea Mays
taaatgagatatgtttttattgccgatgcgactgtgatgcatgttgttcattgatttggtaatggttagagcttgcagtcagttctaggtaggagttgggaaggctcaatacaccaattgtaccccaaattcatttctgattttagtgctatatatatgtgagaccaaatgttttttttctaatgggtcccatagtttgtgataacctatctgtgccacttatacacaagacattgtacaacactattggtctagaattttatttctcacatgatgttgcatattttgctttgcaatatagtcagacaaattgtgttgtctatgaggatccctttgccctgcacatttcatcactgtttggcactttggagttccatagttcatgtttagcagtggcaggatctaggcataagcttttctaaatatgtttaaacgctagatctgacaccgatgttcactagcgaatttagttcctc

SEQ ID NO: 37473 - DNA, 349 bp, Zea Mays
attcatttacacccatctttctccatttcactcatctatcttcatattgtagtctctcattctgtatttcaatatggatctagatggagtccaaatttttgaaccttcactgtcttgctcaatgatcaatctccacaacttcacgagacacctactggtgtaggggaagtcttcttcgatgccctttctcccgtacattgtcgtcgggatgatgttcatatccgtctgttccctcactcgagaacctttgttttcatacacatatcctcctccttcgtattcctaacgatcttccatggatgttcctcctagtaatgatgatcatattattgacactccttccgttgaa

SEQ ID NO: 37474 - DNA, 512 bp, Zea Mays
gtcgccagcacgtgtgtccgctctcccgtccagcatcgctgatcaaccaaatcaagctacgtcgccgaccgagcttgggcagcagacagaatctcatgcgcctgattcctatgacccgatcggcgccgattccacagaggatttgccaccgccagcaccgggatcgcctatggccgagggagctgcgtcccaaattgtacagcctactgcacctgaagattcaaggccaaggacacgtctacaagctggaattcgcaaaccaaaggtatatactgatggcactattagatatgggtgttttacatcatcaggggaaccacataatataaatgaagctttagaagataagaattggaaagatgctatggatctagaatactctgctttgatgaaaaataagacctggcatcttgtacctccaaaaaagggcactaatattattgactgtaaatgggtgtataagataaagagaaaggcagatggaagtcttgacaggtacaaggctcgtcttg

SEQ ID NO: 37475 - DNA, 294 bp, Zea Mays
caaagctctggactgagcacactattttaataaagcccagggtctaactcataaagtctaggaccgatctgatactgtctttgtgtcctagtggatggcgggttagttttaggaaaccccagggtctcttttgcataatggcatggccgaaggggtatcctataatcagagccgttggattccccatcagtggcccatattagattacgtattataacgaaatggtaagcaacgtggatcacaggatcatggatcagtggtcctaagccctccatgccctgatcgagcgtcgat

SEQ ID NO: 37476 - DNA, 349 bp, Zea Mays
gtaaaatacaacacactaacattactcccccttacacattaaacatatgcaacacatgcattggaggaaaattaagattcaaatacgcaaaaaggttaccacttccttttgtacctttaccctgttgtgatgtactttccatcttgatagtttaatatctaggaagttccttcacacttgtgcctgatcctttatcctgatctttttttgttgaacttcagataccaattacttgacttgcggaggtactcaagtcctgattgctccatttctcgctcatcctcccttttccaccttgagactatacaagatcactcaagaaacaattagtctcaaaagacacaagtta

SEQ ID NO: 37477 - DNA, 1504 bp, Zea Mays
aacgttgttcgtgtccttcccaaagtagctgaccatggtggcaaggatccagatcatattgttgaattgtgtaatgaggtaaatctgttatttacattgcaggtcttagtttttctctgttaaacactacaattttgaagcaaattgaatattgtacttgtatttgttccaggttgttcttcagggccattctgtgcttttgttttgctccagtcgtaaaggctgcgaatcaactgcaaggcatgttgccaagttcttgaaactaccctctgttggaacaactgatgttagttcggagttttcagatgctgcagctgctattgaggccttgaggaggtgccctgctggattggatccaatattgggagaaacccttccttttggtgttgcatatcatcatgctggtcttacggtatggaagctatcttctatcttcataagatacacaaaatatcaaatatatatatatatatatatttatttatttatttgaaatttgcactgctaaatatctgctaagtggtgagagtggtctcactaagctaccaggtcgcgggttcaaagcaaccccttcacatttgcgggggaagggttgccttagttttatcccttccctagaacttactcacatggcctccgtcactgggtctgacctttacactgctaaatttgataaagtgatgccatttttacctaaccacagctgggcaaagggtggtaggaactgatctgccattacctgttctgattgatccaatgagcgtcatcgccttctgttctgtggcaggtcgaggagagggagattgtggaatcatgctaccgtaaaggccttgtccgtgttctgactgccacttcaactttagctgctggtgttaacttgcctgctagacgggttatattcaggcagcccaagataggtcgtgattttattgatgggactcgctatagacagatggctggtcgtgctggtcgaactggaatagacacaaaaggagaaagtgtaagctacaatatctttgttccactttattctattagagaatggttctgacatttcactagttctgttttaattgtgtttttaactttagcctaccccaactgcttgggagaaaagggctttgttgttgttgtctaataatctgacatttgaaatgcatgcagatacttgtatgcaggcctgaagaggtcaagagagttacaggtattattagaagcaattgccctcccttggagtcctgcctctcagaagataaaaatggaatgactcatgcaattatggaggttgttgctggtgggattgttcaaactgcaaatgatattcatcgttatgtgcggtgtacgctgcttaattccacaagaccttttgatgatgtcgtgaagtcagctcaagactcccttcgttggttatgccataaaagctttcttgagtggaaccatgagaccaagatatactccgctactccccttggtagagctgcttttggaagttcactcaaccctg

SEQ ID NO: 37478 - DNA, 655 bp, Zea Mays
tctgaaacgatttcttcttcacctttttattataagctctcgccactctcagcttttctttttctatttcccttaaggctgttaatcgactttcaatatttccatcaattctgtctagcattagctcaccatatacctcagccgataaagaattctgacaagctactctgcaagcctgtaaattcacctcaataggaagcaccgcctcttgtccataaaccaattcaaatggtgtcactttagttgctccatgctgagatactcgatgagcccataacgcctctgacaacacttcatgccacctcttcggctgatctgcaattttcttctttatcaacctgatcaacaccttgtttctagattcgacctgcccattagcttgcgcatagtacggcgacgaattcaataacttgatccgcaaagatttgcaaaatctttaaattggtgagacataaaagcagctccttgatctgttgttaattttttgtggaatgccaaatctgctttcgctgtccagcaagcgacgacttaaataagccaccacactctccttctcgctatgttcttgtataagaacagcaccaatcaccctttcctgcgctgcaatatacaatctgaaaggcactcctgccttggatgccttcaacactggtgg

SEQ ID NO: 37479 - DNA, 296 bp, Zea Mays
ggtagcctatccatcgcctgtgacagtgccccggtgaatgccatgatagataactccggtgactccttccctttctcactgcctgcccttccccgcctaaattcgtcgtattcacgatcgctctctatatattgagcgctcagcgtgctccgttaggttgttacgtgcccagtacaccagccctcgcctccgattagccaccgtagcgcttcaatttggaatttcccccaaattcggttctccgcgccgccgtgagccaccgcgccgtggaccgccgtctccaggtccgttctcgc

SEQ ID NO: 37480 - DNA, 556 bp, Zea Mays
tccttggctccgcgactgggccctgttcaatagaggtctaaccactactcctatcttgtcatagttgcaaagtcgtatgtggagcatgccttggtcgtgctagtgttgagcatgtcgtgctgcagtggtcggtaggtgtgtccatgccattgagtacaacatagttggtagacagtataacaacttgtactttataatacctttgggtacacccaccaccataggcgtgattacaatgacacctgcacctgcacatctaatatagtggtattggttcgcttgcgccacgagcattgatgccttttgaccataacatcgaccataacattgctttaaatatgatgtacaagagccttctctcaacagctaggagtcacgtgattgatcgggtcagagtcgcacgaggcaccggtgtcgtcacacgacactgggctgtacaacatgtggccttcctgcctcgtgggtgtcttggagagttggaggatcctggcgtgagggcctccggtcctgcagggctccaggatctgccgcttctagggcttggcctaatggtttc

SEQ ID NO: 37481 - DNA, 1183 bp, Zea Mays
cccatggtacgtttggaacgttgttttgtacagatcaggaggtgccattctgatctgatgaaacctagcgcggagatccaaagtggagaaccatgctgccccatggagttcatcaagaaactcatcaattatgggtacatgaaacttggccttagccatgatggcatttagatggcgataatccacacaaaaccgatgagtcccatccttcttttttaccaaaattaccgatgatgcgaagggacttttgctatgctggattatgtcagaatccaacatctcattcacctatttctcaatctcagatttgaaagaaggagcatatctatacggacacatttgcataggattagctccgggtagcagagggatctggtgatcacagtccctgacaggaggaagactagtaggtaactaaaacactgatgagtacttgtccaataacagttgaagatctgtgggaagctctttgactagttcttgttcagatgcgggcaaggtatccaggctacatagctacaccagagcaccgtgtgtttgtgatgcctgcacgccaaaaagcttaactgaaatgccactagttgatagagatagccacttatctgcccaatgcacgaccataggactatgtgtagacaaccaatccatccccacaatcatatcataggttgggagatccaatatcttgaggtcagaggtgaaatggtatccttgaatagactaatcagctgtgagcacctctgaaacacaagacacactagcaccattcgctacttggatccataaaggagtcgagagtggaacaatatttggacagtgccttgttatggtggagctgacaaaggaaactgaaccacccgattctaataaaaatgagcaatgaaaatcttgctagctagctgacaaatctcatggttttcaggtttgctccagtggttacaaccgactgacatagatggagcaccctgagctcggctttgatccccaacactgattgattatctttagatggaggttgaaactgatgccataattcttctaccaagtgaagcggaacagtatccggacattgatggcctcggaaatatgacaatccacatttgtagcagaggccctaggccttacaaaaagcatagacggagtagagacaatccgccataactggtgcatcaagatgttctag

SEQ ID NO: 37482 - DNA, 293 bp, Zea Mays
agctccatagctttgatacaggtaagtgattatgttgtcatacgaaatttgagagtaaatcgcgctcaaactcgctcggtcaggcgcactgaagatgaattccatggtacagtgactggatcagactgccagctcggtcagctcgtcaccggtgatccgcgtgaccggatttgtgctggtcgccgggattcgtgctttgcacgcagaagatttctacgagaaggtaaagatctcccggaggggaatggataagatcacggattggagattatcaccgtgcttttagccgtggc

SEQ ID NO: 37483 - DNA, 341 bp, Zea Mays
cttttctgtgtttgtttttgacatagactcaataaactcggcgataaaaggatccgcaactttcttttcttcgaacagcttcgtctcctcagtcagttttgtctcctcagtcagcttcgtctccgcagtcatccttttttcctcagtcatcttcttttcctcagtcattttccccagacatggtgaaagcacgtctttaaactaaagctcgaaaagcttgaaaaccaggcgagagctagtgagcaagagttaaaaaatttgagaaaataacgcgaatgctagaaatggcgtatcaaatgttgccggtgtgggtccatatttatacgctcagtgctttgcaa

SEQ ID NO: 37484 - DNA, 336 bp, Zea Mays
tgaaaagatgggggaggtgaatgtggtctctaacaccggctcgacgactgtgattcacttgctccgcaacgtggccgagcggccaatagcgtcatggctgtcattgatcccagtcatgccatgccataggctaattcaccacgtacccgagacggtggtgagcagtaagtaagcattcccgagccattgcgcctttgcgtgtcacaacgactgacctcagtgaaaaatctgagcgttgccgtgggcacttctgtcccaaattagcgaagcaagcgatcaatccttttaaattgagtgccctccctgctccgccctcttgttacgcacctagcgcac

SEQ ID NO: 37485 - DNA, 348 bp, Zea Mays
caatgtttaactctatcatgagcaccatccatatatagaacgccatctaacagttttattaaacaaaggaattaactgaacatcaaagatactaagcaatgttgtcaccaaatggcaccaaccaaaaattacttaagccacatataacataatatccacttgtcattgatatttttcagatctctgtgtactgattaatgggtgatagcttagctaactgttgggtacctggaaacagggtacccaaagaaggcccgaaggcctcccaaagacaacccacgaaccgagcagcccgcctgccaaacaaatcggcgggaaagaccaaaaggccgcccagggacggcctac

SEQ ID NO: 37486 - DNA, 305 bp, Zea Mays
ggaattcagagtggtagctaccgaaatcagcactagagatctagtacaagagtacttggcaaatagaacattttcgacctctagtggctggggaatgcctaagaaaaaggatgggggcaaaaagtatgaacttgttcagctcccttatcgattcaaatttgagaagcaattcaagaagccatgcaaagagtggctagaaatcatcgaaacgatgtgtaacgaaattcatggcaactacaccaagaaggaagaccaattaatgactgctgccttcggcacccagccgaaacgaaggctgaatctgg

SEQ ID NO: 37487 - DNA, 272 bp, Zea Mays
ctgaaggatgtcttcgccggagactcctactctggtggcgacaactagatggacctcggagggaccccgtactccccggtctacggggccgaagtctacctccccccggaaacccttctagactcgccacgggttcaggcttctgacaaatccatgcagaaatggctacagcacgaggacgaggactctgtcatcaaacacagatgggaacccagggtcgagacctagtcctacagcaagtaccaaaccaagaagggctccgcaactctccc

SEQ ID NO: 37488 - DNA, 606 bp, Zea Mays
tattcttcaaggcctgaaatattagagagttacatagctaaatgtactacatgctacgtgaaatggtacatttaagtagagtgcaccccaataggctttacattgcacttgcgtaagttttctccttttcaccagcacctaatttaccacaggtggaacaaataggtaatcttcaagatgaaagacaagatcgctacacaatgcacacaatagctcaggctcatgtgtgtgttgcatcccacagtctcatgcgcatgtttacttacagaagttcatgaaaagacacgtgcacttgtaagttgtaaccaccttgaagaagctaaagtaaaacaacatgtgttttctctaattacaacacattatgttctatcatttttttgtaaccttcacattttctgattttgaaaacctggtaaatgcgtcaaccatcaaactgtaaatttactaatcccagtccatgtatagtgatgccattattttgtgtcaacctaagttatgagtactgtgaacagataaatttatttgcctggtgtgtttctgcaagttgcatttgttttgcttctggttgctagatgaaaacccttgtttctgcactaagggctgctg

SEQ ID NO: 37489 - DNA, 426 bp, Zea Mays
cgggcaggcttggaatccaggacaacaacattggcaggggtggtgtttggggcgacgatgcattgaagatcggagctcggggcagtgttactcagggcagcagagttcaagttgatggtgtgtgtagcaccagtcaggaggccgggagcaaggtggcagtgtcctccaaacagccactgcccatggcaaagggcatctctctgtgtggtagtattgcagcgctgaccttggcggggacttgataccgaccttgctggggttgctgaggttgacgagggaggactggggtgtggttagtttgctgggggtggttccacatcacttttttagtgatgttctggctgctcgatgaatatagaggatggtagcgatccatgtatcaatctgctccaaaagaacatggagttgccctgtttagggttgtca

SEQ ID NO: 37490 - DNA, 420 bp, Zea Mays
ggctaatcgaaggcgagggttggtgcactgggcgcgtattaacctagtggagcaggctagggtatcaatttatagaggctttgagcggcggctccgaatttggaagggaagtgctggcggccagagagaagaggaagtcactggcgcgagctaccgtcgctgtcactagctaatgagctacggcggtcactgttgcattcttacggctggcaacaacatggtgaaagggtcacggcgtggcgcaatcgcggcgaacagtgtacacctcggtgatggccgctcagccacatcgccggcaagtgggtacggcgtctgtgcagaacagtgtctcgacttcatcccaggcgcgagatcttttacccagagtcgttattcacatgctaccgggcacgaatcgtagcgtcggcgtgaatccgggcc

SEQ ID NO: 37491 - DNA, 276 bp, Zea Mays
tcgaccaacacgggccacccgatcgagtctggacggacgagattagatccccatcgaatcaaacggttacgcaacgctgatcctcggatctagatctgatggccaccgttttaaatagcgcggatcgaacgaagcccattcgatccagatccaacgaatcatatccatcatgtgaaggggtatctccaagttctaatcacatctgttcgcatcagatcaaacggcgccgaccacatcacccccatcggtcaccggactcaggcggcgccacccacg

SEQ ID NO: 37492 - DNA, 351 bp, Zea Mays
taagataacttgtagttcaaacccaccttaaaaacataaaagaaatagaaggaaagaaatgaaagataaacctcgctccaataagttcaactagaaatcttgataaattctcactaagacattaaaaagaattcagtggaacaccaaaatggacttacaacttagtttaactaagcttgaccctaaattactaagtataccccaagaatcttcaagtagcaagatttagccctaacttattaaaatgatcattcaccatccaagtttaattgctatattgcatagcataccatgcatatatcttactcatttcattcattagattgcaatctcgctgacggagaatacgtg

SEQ ID NO: 37493 - DNA, 693 bp, Zea Mays
acctacatgggttacgattcctgaagatttgttgatacacatggatggtgatgcagctgcgtccctcatatccgaggtctacccaaatttgttagagagatatatggaccctacatacttagctacacgcgccattgtatgtcctaataaccttacaagttacaactgataaaataaacgactacattgtctcaatgctccctggacatggtgtccaatgccttagttgcgacacaatctcaaaggcgtcttaacgcatacctgattttgacaagatatatcctattgaattcctaaactctattaatgcgacaaatttcccctgccacaaactcgtgctaaagagaggcgtcacagtcatgctgctatgtaagttgaaccagaccgcaggactttgtaatggaataaggatgcttgggcatcgtgttcttagatgcatggtgttagcgccctcctgagtcggcgaagaggttttcataccaaggattgtgcttaacactactgacgtcaaatggcccttcacgctgcaaagaagacaatttccaatacgaatatgctatgccatgacgattaataagagccaaggtcagaccctctcaacggttggcctgtatcttgacagacctgtgtttacgcatggccagctttacgtcactgtttcaagggttacatctagaagtggtcttagaattt

SEQ ID NO: 37494 - DNA, 327 bp, Zea Mays
agccggtacgggttaaagccaagcctcacaactaacagatgggtattcctcaccaagaaaccaacctagcagataagagcaagcttttgatgcatggtttggatgggacatccatgctgcttggttcacatgttgggactagccagtaccatgattgttaacgactgtacaagattcagaacactaaggttatctgatgttaaaacagtatatgaatcatcatatgcacagacatagcatgttctccattaaaacaataccctaaaagtttagtagcatgtattgaagttgaaggagagttgttggatgtttgaccataacactgtt

SEQ ID NO: 37495 - DNA, 758 bp, Zea Mays
tattgcttctcgccgtggggtgaatcgtgtaccggggcgccgttgaatttctcaccggagaaatacgtctccgtggatccgcactgcgctgcggccagcatcgtcgagagctcggttcgccgctaggaattcgcgtctgccgtgctcggttccgatccatagccggtaagcactcctttatccatcttgagaccctctctgtttcaatttagtgcggaatcaaattctttccgtggtctgcgcgcgtcgcactgccattgtcggtatgaatttggcacctgctctcgccttcgtctcctcactgcgcgacacgttctggattagagattagcagccggggtgttgagttagccgtctccggccatggtcgccgccgtatctgcgggcggcgccgccgtgcgcggatttcagacgggggatgatgcgtacgtcgtcggatctcgagcgaacgacctgaattagaacaccagcgtaccccttcgctaatttcatctcggcggtaggatggtgatctgaggggtgggagcggatactagcgtggttggatctcgggcgttggcttcgaatccaacggttgcggtcaattaccggttcacttaaagcgccttctaatcgcgactctcggtgtgagatccaacggcccagatcctaacgtaccccttcggccgacgactttgcgaaagaaaccctgagctttacagaaatgaacccgcagtctagtgtcactgtcggctgagtctaggataatttacctgctg

SEQ ID NO: 37496 - DNA, 378 bp, Zea Mays
gcaatgtggtgtgcatgctgcatcaaggactctggtgggaaaggctttcagatctggtttctactagccaactgcgaagagtgacgctaccgagttagtccaaaagtgcaaggcatgccaattcttgtcaaaacaccagcacttgcccgcccagcagctgcagaccattcctgtaacctggccgtttgcatgctgggggctggacatgatcggacctttcaagaaagctcagggaggttatactcatatactggttgccattgacaaatttacgaagtggatagtatacaagccaattgcttccttgacctcagcaaaagcagtggagtttatccaggagataatgttcaggttcggaataccaaatatcatcatcac

SEQ ID NO: 37497 - DNA, 911 bp, Zea Mays
gtgcagcagcgctatgcaccggcggagagatcagagacacatgggcagtcacttggtaagcaagcaaacttctctcaagtgaggtcagagccaggcgtcatcatcaaaggttccagaacaaggagctccaagaaatttggaatgaggtgtggacgtcggcaccatccaaaaaccttgaaagaagagaagttgtgttgattcatcgtatcaggatggagctccacatcagtgcaatgatacctcaacaaattttaggcagtagccaaatcccaagcatgaattggaacccctttgaactccacaagaacaggggatggaaaggccaccacctcagcatgggcaagtctagaccatcttaagaacttgaatgacccagaaagagaattgaaaacagcaccattgttgtacacctgattagccacctcttccgaattcaggatcaagacaaaatcttctgggcatgaacgatgaacggagaaggacgatgcatccagctcgaaaccagcagccacctcatcagcaagagtttcagcagccaccctcagccttgaaccagtgacaacgacgaacagagcacaccatcgcaactgctattcttctcttgcaagcgcatccgcacggtccaaaatgcagagatgtgtggcttccaccatatcaggaacaacaggttgtcgaggggcatgcgccctgaccggctctggggaagaggaaccgagtggaggtgcaacttcactggaatcctccgtaggtgcaacgggggcagtcttaggcctttgaccccacgtacgatgacgatgtttcttggtgccacccaagggaggctcaggcaccccagacctctggatggccgggatcggcgaagagaccctgcgccactccatggcgcgtctaggaatgtccaaaggcttgtg

SEQ ID NO: 37498 - DNA, 482 bp, Zea Mays
ttcctgcgaatttctcgttcttgtcgaagactttctttctgagtgcttctaatatcatcccgttagctctttctacttgcccgttggcccttggatgtgccaccgaggcatatttgatctgaatgctcttttgctcgcagaaatcgaagaattccaaactggtgaagttggatcctaggtcggttatgatgctattcggtatcccgaacctaaatattatatcttgtatgaattccactgccttagctgaagttagagaagcaatgggtttgaactctatccatttagtgaatttatcgatagccaccagtacatgagtgtatcctccttgagcttttttgaaaggtccaatcatatccaatccccagcacgcgaacggccaagttatgggtatagtctgcagctgctgtgctggtagatgctgctgttttgacaggtactggcaagcttcgcacctctggactaactcggctgcgtcactc

SEQ ID NO: 37499 - DNA, 314 bp, Zea Mays
gatgggacatcataggacctaggtggcgcttccccaactaggggcgatgctccagctccagtgtgccaaaggcgcaagagttgggaccacggacagaggcatgaacatgaactcaacaaggatgcatgttgatcagggttgtgagacgcggtgtcatagtggttactgtggtcctcaccgacaaccttgggctcacgactaggcatgaagatgttgcaaagacatgccaagcgagctctctatctggtgcgctagctgtcgttgtctgacagtcagggatacaagaaagtgcccctgtttaggttcggctgggg

SEQ ID NO: 37500 - DNA, 295 bp, Zea Mays
gagcgctcggtgtgaagagcccgaaggcgctccaccgcacgagaaagctactctatcaccatcgtaggcgaaaaacaggaaatcccatgagaaaactactaggtctaggagggctaaaaattgaggatgaaagagcatgagcctcaccttctatcaagaacccagatgaatgtccttcaacatcacgcaccagcgaccgtgcttcggtaagacccagctgggccctcaaagagccctccctcgcttcaatcgtagggagctcaggcctcgccatcttaccaagctcggaccccgc

SEQ ID NO: 37501 - DNA, 652 bp, Zea Mays
gttcagcccccctcgccgccggtgacctttgcgccatgatttgcgtcgtcgccgcgattcatgctctctggtaagtggataaccacgacggagtaaagatcttggcaccagatcagctcaggctcggtcgcggatgagtttcaccgtacccacttgctcgtcgtgcggccgggatagacctcgccgccgttggccgctcaccgctatgcgccacatgctaaagcgctataccacgtctcagtggaacacgtcatgcatgcccggtgatcgccgaagatctgccacgatgaaagccactaaccccgagcgccagtaaccttcttcctcttcggccgccaacgcatcatcgtgaaattggacgccaccgctcaagcctgatataaattgccgaccccacttgctctgctaggtagttgtgcaaccagtgaagcaaaccgttcctcgaatcatcccgtagaactccccaatttgggatttcccccaaatcactcaagaacaccgagcggtttgacctcgccgtggccagcgcatcttaggtccgttcatgtcctctgagtcctcgtttcagtatcctaggatgctcttgatactctctgacccatccaattgagctagagtccctaggatcgtcaggaacgtgttcggttaccca

SEQ ID NO: 37502 - DNA, 400 bp, Zea Mays
ccctcgcttcttcctgtactttgcaagaatgggaagaagtcatttttgaagtatatcgatatgaacctagctcttgtttcccacattttgttgaaatacttattgttttctaggtggtagtcctcaaccattttcttccagtccctctcaaattcaggcacagttagtgaatagttaactatgtcctcaaagtcctctgccattcctaaatttcttgcaaagcaatttccgtttttctggtagtatttgctttttatgtggaagaagcaattcctatgcaccgtttcagggaagacctctttgattgcggttctcattgctttatcttgatctgttattattgttcgagggtgttttcctcccatggcctcaaggaatgtgttgaatatccacttgaatg

SEQ ID NO: 37503 - DNA, 444 bp, Zea Mays
tacgggacggcaggtttattccttaaaactacggggtctcttttgcgaaagtgcaacgacgaagggttacggtggatcccccgccgcaggattagaaatcaagggcctcgatcaacttcgtcgattcaatgaaacagtgctcatccagaaccgtcgatcgagtgatccacgaccgagattctatgtggacgaaggggtatacataatctaatctaaatcgttgcttctcggatctgcggtcaatatcctaccgccatcccgatctaatcctagacgcccctaaccgatccaacggccaggaggccttctcctaaccccgcaccgggtcaaggcggcgcacacaggcagcacggcggcgcacgccggtgagatgtgcaaacgacttagttcacgatctcctaaaatggaagtcccaacccacagcggagacaaaggcgaacccta

SEQ ID NO: 37504 - DNA, 383 bp, Zea Mays
ctaactgttatagtctttgagctatagggaatggcgggttgatactaataaagttcagggtctcttctataaatcgaccgaggcaaagaggtatcgtgtattcctaccagttggatttaaatataagggcgcatattagatcctcgtcttcccaaagcggtatgagttttacaccgtcagatttaatgccaacatcctggattttaaacgaccaagattgatcctcatccctccatgccagattgatggctcataccaccccgaccaaactattatttttcccttttaatccttgccacatatcattggatcaatgatcccggcatcacctcctaccccgcgatgtcggcacggcagtgacgtgctagcccctcggcagcgct

SEQ ID NO: 37505 - DNA, 318 bp, Zea Mays
gtaatcatattgcttgaacagttgaccttggtccaaacggtgttgtgttacatgaagcgacacatgttgcctgactcatttacaggcggcttgaattgcttattgaatacttgcgactgttcggcgagcgtggtaggaagtggatggtcaccccgggctctataaatagcttgctcgcaccgttgttctcttcactcatccttcgatcatctgttgctttcttcttctttctctccttctccaaccaaccatgggtagaggcaggagaggtcgacgtttgtctcgccgtgctgccgacaagaggaagcgtgctccaac

SEQ ID NO: 37506 - DNA, 298 bp, Zea Mays
ggcgtggggaggaagaagacagccggtgatccgtggagtgggagatggacggtggggattggtcggtgctgggccgttggattctggttgggcgcttgagattagtgctggcgcggtgatgaatttctttaaatcagaaccgttggtttgggaacagacgggtagatttggttctgcgttccaacccacggattggctatgggtcgtaggatcccgatccaacggctctggctggccgataccccttcactttaccagttcgcagaagagaccctagaaaacttaagaatcaacccac

SEQ ID NO: 37507 - DNA, 339 bp, Zea Mays
ggtttattgaaacttggtcccctaggtggaagcccaaagggtcgagctctctggtgacgttcttgctgttgagctcgaagaacttggaatttccttttgaggtgccctttctcttcctcttttgccctttccacttggatggatttgttggagaggtgagagaagttgaggaagtcttcgctggtgaggatggtcttaagctcgggtcttagtcctcttaggaaacgggccatcttcctggactcggtgccgacatcgtcaggcgcgtaacgggccaactctgtgaacttgtgcacatactcactgactgttctcccgccttgagttagctctcggaat

SEQ ID NO: 37508 - DNA, 314 bp, Zea Mays
ctcatgcacatctgaagatatatttctgcacatggaaaagaatgctgcaataccatgggccagacgagcacccatcccacgaccacgacctcgaccacgaccacgaccacgtggtgtgggagatccgcgaccaggagatggacgcgagggtccggcagcagcaggtccacgagagctggaggacgctttcctcagacgccttgctggattatttggatcaatccagaagggggtgtaagatagatgtcttgtgcctttctcatagcgaaattgagtcaccacttcaatcatcttcatgatgaagggggcgtgaa

SEQ ID NO: 37509 - DNA, 599 bp, Zea Mays
tttgggggaaattcaaaattgaagctctctgatgatcgattgagggcacggtttgggtggcttggtgcttgactaccctacggagctcacggtggcctcaatttatagtaggcaagagcggtgtccattgaatcggacgacgacgcgcgacggtcggaggagtgggaggtcactagcgtaaggaattcgtggcatctaccgtggcagccctcaccggtgatgatcagacagccgaagtgagtcacggcgatgcggtgaatgtgcccaggtatgtggcgcaaggccgtgaagcggctgtcaccggcgagctcatccgaagcgaccgtggcaaactcggtacggtggccggagtaaactattggtcggaagatatccacggcgatgatatttactcaatcccaagcgttatccaaccgatccgagcacgaatcaagacggcgaaggcacgaatctacgcgcggctcgtcggcggcaaggttctctgaacttgatccgccacgttcattgtaccatggtgattaccatgcagtcagtctgtcatagcaaaatcagagccacttttctcctcatttcatgtgacaaccccatcatcccactgc

SEQ ID NO: 37510 - DNA, 362 bp, Zea Mays
ccggcccaacattaagcggaatacaggggcacgcccgtggcagcgctgtaggtttagcacaaaggtcctcgccggcgccggaattagtaacaaagtcctcaactgacttctgcgagtcactgacactttacttccagccccccttaaacttcttatcttttaaaatggaatccccgacgtcgccggtggcgcggatgcattctccttgcgatactacggtggagaagagctcgggcagccatgggatagtgatcggatcaaatcttaacctaacccgcacagttttggagcatgaatttggcttatgaacacatggagcggccagaccgtatccacggcggaactctagcaccatggtccta

SEQ ID NO: 37511 - DNA, 271 bp, Zea Mays
gcccctcctagaaggatggaaagaaatgaccactcctatgagccgcatagggcaagtattaacgggccacaaaacccaagccaatggagaggaagacaacatactaatatccaaacaaccacacccacgttagatcagagagtcggtggagtcccaccgtctgccattgatatagtgagggaagagatagccggtgcgttctaagataaacttggagttagcatgatcccagaggcagtgatatcagagaccttacgatagtcgatttgac

SEQ ID NO: 37512 - DNA, 324 bp, Zea Mays
aaatgttgtacagaattccaactcctgaaccgaccaggtagcattgggaagctccaatggacaatgcagaattccaccattagcaactgttactgctagtggagtctccaaactcacgaacccagacaatgaagaagtgcgagaagtgtttagaaaacagtgagaactgcccgaatccaagagtatcaacatgttctcatcctgaagctggccttgaagccggaaggatctagacggagccttctttggggatatggcttctgttgacagcaggaccatgaaggtttcagcagaatcttcaaattcgccctctgaatcctgggg

SEQ ID NO: 37513 - DNA, 350 bp, Zea Mays
gttttgccagaagaatttttgggcggtcttagatgttattgtggagactgccctggcctcaatccactttgtgaaatattcgacggcgacgaaggtgaacttgaggttcccttgagctgtaggcagtggtccaacgatgtccagcccccagcgttgaagtggccatgtatgggcgatgagcttggtgaattgcgaagggctgccggagcgaggagagaacttttggctgactcgattagcagtgcaaattattgcgggccagtaaaatccctgacgaatcaccttggcagcgagggccctgggttctgagtgggagccgcaagttccactgtggacttcacggaggattt

SEQ ID NO: 37514 - DNA, 382 bp, Zea Mays
attagaactcaacaacaacgatttttggtccgaaataaacccgaccgagtgcgctgtcctcagcaaagaaatcgatggtgttcggaggacagatacattttcgtctgatttcaactaaatcaacccccatctccatatccaaagccgatgttctttggtttggtttaattgttttacaccctgatccaactgcccggatagtgagcggatttttgtttggtttcagattaatttaatacgatcagaattatcacgataacgttcaaatctgaacctttaaagatttatcaggtttaaatcaaatcaaaccgtgtcacaggtaccgtggacccattttatatatcgctaaaatctgaattcacaaatatctgcggaatcttct

SEQ ID NO: 37515 - DNA, 492 bp, Zea Mays
gacattagtaactgcttcaaaacgattttaaaataattacctttgaatattctttcattcttaccttgattctttcttatagaaacttatcttttgagaagtcgggtaaaagaggccaaataataggctatacataggaggtatgggataaacaagaggttgattccataatcgtaggtcatgcatgcatcatatttaaacaataattaatcttcccctgttatagagacatggaacgcaccaagaccacccagcggaaggctaccgggcctcagggtgtacctcggcaccagttggctcctcgacatgagaggaggagtagtaagagtaatgatcccatagggggatctagaggtcagagttgaacgtttaacgatggaactgcgccatggaaacagggagcgtgcgcgtgataaccgtcgcatcgctgagttgtcagcagaggttgactgtttgcagcaagaggttgtggagcgagatatggctattaat

SEQ ID NO: 37516 - DNA, 338 bp, Zea Mays
ataaggtgttgggatatgaccaactactagactagaagctgaaatctaagataggcacaaggcttattatatcattctcctccttgtgtagtgacttctgaggaatttgaaccatctcaattctagcgcgaaggtcctgaaacttgacccttccaagtgacttggtaagaaaatcagcgagttggtcctgagtgctgatgtagttggcactaacaatctccttgtccaagcaactcctaatgaagtggtacttgacctggatgtgcttgttgcgctaatggggttcttcaccggctaaggcaaatttgttgtccatccgtctaccaacggtgaccgac

SEQ ID NO: 37517 - DNA, 384 bp, Zea Mays
cggtgagtacctcgccgtggttcatagcgctatttaaaggaacaacgaccatgctaacgatccgcggtcacgaaacacatcgatagcgcatgtccaccacgtaatgaaggagcacagtgaggtagaattgaggcgcgagtgacaaggcgatgaaagtaccgcgccacggtgagcaccgatgaaatatctccgaccggaccctggcctaatccgtgagaccgtgaatcggctcaaagttatcttgccgcggccgtctctatctcaaattcacttgaacacatccgaatccacagtaccgcagatcttttcttcagatatttcctaagctactgatcttcgttgttccactgaaccgacctcctttcaccccctctttctcttgat

SEQ ID NO: 37518 - DNA, 383 bp, Zea Mays
ctcagaccaaaaaattctactgcttagtcttctccctcaccaatcccttgttgatgaacattagttctcagccttgtcagacatgacatctacttgcttaagttcttgcttgtcactaagcaataggtgtcataaaacaagatctgaccacatgaaaatcatcccaagttttagagtccatcgacacccaaaccatttgatcaacacttgagtgacaacgacgttccctttttttaccggcctatgatccaagatctcctttggctgcaggccatcctaggtaagatccaccaatcgaggtaaaaattggacaccactgtagatctcgatacaaaaggctttaactgagacacatggaccaccaggtgaatgtgagcaccatc

SEQ ID NO: 37519 - DNA, 480 bp, Zea Mays
gagctgtccacggtaaggtggcaatcccgccctgccgcgcacaccgacgtgaaattcaccccgattaagggtcgcccagctcgttctgagagcacggaaagattccccggacgctggctcacaccgacaaccgcgcgcagggattggaacaacgacgtggagggttctcaccggcggcacggcagtagcccaggcggcgcaacttttgctatgcggcaagggaaaagggaaatagtgggagggtatggggcgaacaagtccacgaccacattggctttttatctatagaagcagtcaaccgagcagaggagaaaacgcaacaatggcgggatcacccctgtcgagttcggaccgttcgttgaggaaggatctgaacacgtgaccccacgcgtaagtgtcaaagcaccggcgcaacggctggaagccacaggacgctgggtccctcccgtcagcgtatacttggtagcgcgcagagcaaca

SEQ ID NO: 37520 - DNA, 439 bp, Zea Mays
cggtgatcaccagaatcgctcacaccaccgcctgcagttcttccctggcgcacgacaaccgtgaccatcattgcccaagcattccctgccccaaccaaggccccctacacactccccagagcctcatgaaactttccaacaaactccctcacttgctatccaaccacaacggcgagccaccgctcccacatcttcgccggtgaacgtggccaaggccacccagtgcaccatcatccaattcctcctacccatggcaccaccgtaacctagtgaagctccatggctactcaattgaagctctaccaccaccgacaagccgaacaattcaccgtcattgagcttcgccgcctgctcacgtggtccgagcgactccgaccacctctggtcgcgacccgaccattgacgtgaccctcacgacatccctgacctcaccgaccac

SEQ ID NO: 37521 - DNA, 566 bp, Zea Mays
gaggaatggattggggagggatgaaacacaccaaaatatgagggagaggaggctatggatgcgggacgctaattttttgggggaagaatgagggagctgttggagtaagaaaaaccactattcttgactaatatctgttttggggttagtttacacgttcatttggagttgctctaagacaagattatttacgcaaccccatggaattgagctggggaaagtcctccaccctaggttagtttagggtacgcgacgccactgagaatcttaacatatcccggtcagtttgactttggggccgcgtcgtggagctttgttggtaaggggaccaaagcaaagggaaacgaggaactcaactaacatcacgtgctttactagtttttaatgaaggcggacatggtaaatatgctcccgaagcttagctggacatgctgtggaaacacgagaagccattctaatatgcaatgcaatatggcattcctcactgctgcgaccaattctagcacttatgtcactgctattgttcttttgcgcgcttcgttaggtgttgtgcttgctattctttt

SEQ ID NO: 37522 - DNA, 675 bp, Zea Mays
gcagaacggaatggccgaggaagcactggagttctttgcaaggaacgttgttggtcagggcgttttggtgacaccagtcacacttgtgagtgtgatgtcggcagcagcacagttggggcatgtccggaagggacaggcgtgccacgcttatgttgtcagaaacagcttgagctatgatctagctttagtaaatgctgttctcggcttttatgtgaaaattggtgatttacaggcatctatgaggttatttgagggcatgacagatagggatgtgatcacttggagctgcatgatcaaagggtatgtgcaacacggagacgcacacacagggttcagaatgtacagggagatggttaaggcacgtgtccagcccaattcagtgactttagtgagtgttctgcaggcttgtgcgctagttgtcgatgctgaggaaggtaagcgacttcaccgtgttgctgtcagcataggttgtgagcttgagctgggtgtagcgacggctttggttgatatgtacatgaagtgctcatgtcatgaggaggcaatgcgcttatttcatcggatgccaaagaaagatgtggttgcttgggctgctgtcattggtggcctcacacaaaatgaactccctggtgaatccctccattcgttcaaatgcatgttgttgaatgatcatgttcc

SEQ ID NO: 37523 - DNA, 587 bp, Zea Mays
cactttctagccgaagctgtgtgtaggtcccagtcgaggctgcctcctgggggccgggacactaactctttcttaggtatgctggtatctagcctcgacacgtcgagcctacatcctaggggggctaggtatcaggaaaggagttgataaaaccacacacagcaagaacaagcgtcatacagataagagctatttaattgatagttcccaaaagtatcttacaaaaacaaaagttattacatccgccttcaagcggggccctagccttatgtctacaggtatgacctactcgacatctgtaggatcgcgctggaagcgtgcggccgccatctccgcgacatcttgtacgaccacctgggtggcgtcttcagtatcagcagccgggccagcggtcaccgttggaggcggcaccgaagccatcaaagccaaagagatggagccacagcttagctcacttcccacctcatggagttggagctagaccagttcattgtggtgtaccatgggatgctggtgaagctcacacgaaagatggagccgcagctcagctcgccttctacctctggaaggtcgttgcgcaacaccca

SEQ ID NO: 37524 - DNA, 513 bp, Zea Mays
ctcggggtggacctcggtgacctgatgtatcgcgcgggggaagatttcggccggacattaccgtgcgccgccatcagactattcactcccttgtgacgttgtcggccaagttccctccattggtggtgagttctcctgctcggtccctgttgagccttcgctgtgcgcgtagtgtcggacgagtccacagatagggtcacgtcggtccggttcgccggaatgatacgcgcgcgcgccgctgctatcctgtctgcggcatgttctgaggaggaagatgagtacctacgtcgttggatgatcagtggactgtccagatctgtcaatagcgtattcctcaaccgtaagcagtgtgggtcgtcgatctagacatgtctggctcagataaggtctagtatttgactcgtgccgcgtgttctggttcgtcaatctcggatcgaacacgcagagtgagagcgagtggcgggtagtagagattctaatctgaaccgtcgggctctgatcggacggtccgat

SEQ ID NO: 37525 - DNA, 336 bp, Zea Mays
ttgatattgattgctcgtagagatcatggctacataggacatcaagtagattgtcgtgatgttgattgaattgagtgtggcctatgtgtcttctatattattggtcgtccttccctagccttctgacatcgatattgtggtggtggtggagattcggtgcatataggtagatgttacttgtgatgttgtttgtcatactcgaagcattactgatgtagcttctaaaacgaccttgtagcgttcgagctcgaatgcaaaattttcttcatgccataagagcaattacaacccagaaactactaagtgatttccataggtgccacctcactaagaaat

SEQ ID NO: 37526 - DNA, 524 bp, Zea Mays
tgcaagataaccgagacgtattcgcatggcaacctacggatatgccgggagtcccgagagaactggccgagcacaaattgaaggtctatccccaagcaaggccgattcgacaaaaatcgcgtcgtttcacgcctgacaagagagaagatattcgcgtcgagttagctcgcttagtggcagcagggttcattagagaagtactacatcctgagtggctagcaaatcctgttcttgtactaaaaaagaataaagtggattggtgcatgtgcatcgactatactaatctcaacaaacactgtccgaaggatcccttcgggctccctagaatagatcaggtggttgattcgaccgctggatgttctatgttgtccttcctagactgctattctggataccatcagatcagcttggcaaaagaggatgaggaaaaaactgcattcatcaccccatttggagctttctgctatacctccatgtcgttcgacctcaagaacgcgggagcgacctaccagagagctattcaa

SEQ ID NO: 37527 - DNA, 295 bp, Zea Mays
gggtcggcacgagtgcgccttggctccacgtagccaaaaggcacgacgcactggccagttggtgacgcgcccgtcgcctaaccctaaatcatctggtcctctcctcctgtacttcgctccgttgcgactgcgctctctccgcctccgcccttcttctcccactccggtgtccggtacgactgcagcatgcctcctcccctcagatccgtcgtcgaagatcctccctcgctccacccgacccttggatttgagtgttggggactcaggctagtcggtagccacctgaaccctaacc

SEQ ID NO: 37528 - DNA, 290 bp, Zea Mays
taaacactctagagaagcgtatcagctatgtctccttcaccatctcaacatgtatcatcgtcgtccttgaccgcccaatcaccagctcctccagtgcctccgcttgactttgtcaaccactaccttgacttcatcaacacacactactcctcttcatgcattcttttttgttgatgaatgtcagctagcataaccagtcttctggccaccttggttccttagggcaagcctcgtgttcgtccttcatcgctccatgtccattggaatggcacgttgaaagcatctaggcc

SEQ ID NO: 37529 - DNA, 970 bp, Zea Mays
caattgttcagaacataccataccatttgatcaatggcactatcatcatacactagttcaggcgcagaggtaaaattaactccatgcccaaaaacatcaacagtataggcttcctcattagaaaaccctttatttcttggttcccgattaaattttgtttcaacatcatccatgtatttagagcaaaatgtcaagcactcgtccgcaatatatgcctcagcgattgagccttccggtcgtgccctgttcctcacatagcgcttcaaagtatacaatcgcctttcaattgggtacatccaaccataatgcacaggacctcgcaataatgcctcatcaggtagatgcacagctagatgcaccatcacatcaaagaaagctgggggaaatattttctcgagcttcaccaaaattattggaatttctttcctcatttcagccaacacatcctttttaagagttctgctgcacaattccctaaaaaatttccccagatccgctagtgcttcataaatatccttgtccaaaaatcctctcatggcaactggtaatattctttgcaaaagaatgtgacaatcatgtgttttaagcccttgtaatttggttccctcagcatttaaacatcttgatatgttggatgcaaatccatctggaaacttcacctcccgcaaaaaatcacaaaaggccttcttatattctgtgggcaaggtatatcttgcataaggcatctcacatgaatctacattccctctaaaatgcaactcctttctaatacccatatctttcagatcaagcctagctttaattgtatcctttgtcttcccgggtatattgagaatagtcccaatcaagttttcacatatgtttttctcaatgtgcatgatatcaagattatgtctcagtttcaaattcttccaatatggtaacttccataaactaaccatccaactccaaattaccacatgatccttgt

SEQ ID NO: 37530 - DNA, 688 bp, Zea Mays
gagccggatggtctggggtcaccgagaatgggtccctgacccgaatagggaggaggaggagtcgaggtatagtaggagtcatcaaactcctcggcatcatcctcaggagtaatgaatggcacaccaaattcatgttggtgccactcattaaggttctcagggtaggtgggagtcggaggcggaggggacctaggaggcaggagatgacccatggcggcggcataacgacgaaagtcctcatgcagtgcctcgttctggagcctgtgcatggactcctcgattgcccggtcgcggcacatggcaaaggcgccaaaaatgcccttggccagacgaataaacagtccccgaccttgaccccgtccctagccctgacctctacctctcccgctgcggtccatcggacgtgaggcagcgacgacgcgagaggactcatgctgaggaggtggctcatcagaagaagcagggcctctagaccctgtgggagcccgctttgtacgagcagctgggttgctggaatcaacctagtatggtacatagcgggagtgtttgacaggcttctcgaagcgagtctggttgaccacttcgatcatattcataataaagggtgcatgacaacccttgagtggagaccaggaagcacaaaggatgtcttcccaaatcatatcaaacacatttatgcaagcaagac

SEQ ID NO: 37531 - DNA, 319 bp, Zea Mays
gaagtcggccgtgtttgtttgtaagaggtagatcatccttattttcatttagttggactgacgactaaggacaattggcaaaatctttgtgatttggtgagccctaggttgggcgtttggaagagtggatgtgattgagtgatttgtctgttgtggttgctgcaagttagcacctctcatttcactctattgttttggatttattctataatgaccatctccagttctaatttccttagaaaagatgtttcttagtatgttttgtatctatatgtaccctcttgattctatactacatttaggatttctgatgtctttt

SEQ ID NO: 37532 - DNA, 399 bp, Zea Mays
atcaagcctaatagatccatcttattttaaaagattctatcttatccttatggattcatcttgtcctaataagcatattaaccccatcctatctcaaaagattctaacatatcctaacaaggtatatcatatcctggtagatctatctaactttaaactagtctaatcttgtcatatccaagctaatctagattttatctaatctattatgacataatctagattaagttatttaatgctagtactaaagataaggccatactcctaattcacctaagcttaaatcggtgacttagatcaactcggccatacccaacaacctgacctaaataacaggttacataacctatctagtagcaaacaaccaaactagattctgactaatctcattcaactcat

SEQ ID NO: 37533 - DNA, 318 bp, Zea Mays
aagtggatatgaatgttcgtttctttcatttgctacatctatggttctattgattctctattcggtatgtgtggagtgtggacaccaccatgcatcgagttccaacagaaattttactgctacagatgcaagagcacaactatagtgcaaggttgccaaaggaatggtagatctatgcagattgattagatcgagccataagtcatgtgagaaggaaaatccagatgtgtcaacttcctagtgtaaaatatcaatctttttacctttttccttctttacttgagactatcagattacttccattatctagaacaatag

SEQ ID NO: 37534 - DNA, 434 bp, Zea Mays
tcacgtagtgcaacatgagtagcaacatctcttttcaaaccataccaccaatatttttctttcaaatcctggtacatcttagtacttctagggtgtatagaatgcgctgaatcatgaccttctcccaaaataagctggcgaaggtgttcaacttctggtacacatatcctctttttaaaccaaactgtgtcttgctcatcttcagtgaaatctggggctttacccaaactaatctgagtcttaatttccttaatcttctcatctgattcttgccctttatgaatttcttgctccaatgtagattccacttccatgattgttgcctctatattattaaccataccaacgttaagttgttccgtctcccaacataactcttgctgcaacagatatgcactaacactattcacttgacctttacggctcaaagcatc

SEQ ID NO: 37535 - DNA, 577 bp, Zea Mays
gccggaataacaagcacgaaatatcgaagtcttttccaaaagtctccgcgcaaaagtcgcctacgggtgcagccggaatactagtacgaaaaatcgaagtctttttctaaagaactccgcacaaaagcctacgggaacagtctgaccaacgaaagcgcgcagcttcatcatacatactcatggttacacacatacagcgagggcatcacacattacatcggctcaaccttcgggattatactcatctccctatagttgaacaaaattatcctcaattcctcacccgtaaacagaattcgcagctccccctcacccacactcgccccagccggcgaggacaacaattcctgtttgccagccccatccacacaaagacgaccaccctccatctcaccacgatgacgcctttcacctcgcgacaattcacccactctctgtttcgccaccgctcttcgccgcctacacccagcactcacactaggatgaacctcagcgcccatcacacgcggaggagtctctgttgcagccacatccaactctgcaaaataatccaagtcctcttccgaagacccctccg

SEQ ID NO: 37536 - DNA, 421 bp, Zea Mays
ttgacccctaaatcgactaaaacttccttgtgcacttgttgcgtcaaaaaaacaaattattattgttggtgtctagttgcgcaaaccctatcaaggccatgtttctttccataaatccttgccccaaaaacttcatagcatttctgttgatcatcctagctgatcctgtttgcatacctctcctttcacttggatctagtaatctttttccttgcgaatcatgttgtggctttatcatccaaatctctgatccttcattgattctgccctattatctggttatctgctataacccgttctcaagtatcaaattttgatcttgcctaaatctctcatttctggtcagtctcatacccccttctccgaggatcatgacgatgttttatcaattttatctctaaattgtgtatccatttagttc

SEQ ID NO: 37537 - DNA, 296 bp, Zea Mays
gtttattgtgatgaagtaattgattttagggagagatcaaaaactaaactatgtgatacaaaaccattattgatttcagtgatgaagttgtttattgtgatgcaactggtccaatatcatgccactagaaatctttattgttttgccacatttacttacgtgtatgatacaagtgtaggaaaagttatacatgacaagaaaaatgtagggacattagtgtggtatactttgctaaattttagtcgattattttgttctaaaccatcattctaacttgtataggtgatatcgccacc

SEQ ID NO: 37538 - DNA, 274 bp, Zea Mays
gcgacgtgaaatttaatgaacgcctaatgggtattgactcacttatcacatacggaagcgatgactactttggcatgtcgacacctcaccatttgtggatacatgcgcgacacatggctattgtaatacatcacaagtacatacaaccccatcagtaaagcaccagcacatttccaaaaattccccgagactacgacgacaaggcatcgatcttatcatgcatataaaagcatcacaagcgtgttcacggaacctacctgttaacttgatcgac

SEQ ID NO: 37539 - DNA, 303 bp, Zea Mays
gggtacccgtcacagagtggtggagtgtgcaggcctagggtacggaaccgggctaagtggctacacagctccggacctctccatggaacgagctcccgttctccagagccggcccccaggctgccagaccctcctgctttcgcagaggggtcctaaactgcaagcctggctattcaatttggatgtcatcataccagcaggggtgggggaccgtatgggtgggttaaataaaaaataataatatctggaatttgtagcagaataaaaccatcacaggggcacatctgagggggtaaattcttt

SEQ ID NO: 37540 - DNA, 518 bp, Zea Mays
cggcgataagaacgccaccgcggcatgactggtcgtcggtggccgcggtaaatatcctcggcgtcgtggcaaaaggttactgaggtggcgagctccggttaaacggccacccccgtgccatcaccggaatccgccgcgcggaaagcttgccagcgcatccgaagtccacgcttcttctccaactccggtcgacggcctataaattgacccctccccgaactccgtagggtagtaagctgtccagccaccacgaatcagccgcagtcgttcactggaatccgcgaatttggaattctccccaaatccactctccgccaccgcaagaaactgctcaccgcggccagccctttctaggtccgttcatccctcactctcctttgtttgagcactcttgtcaccctgtgatgcttaccgagcctccaatttgaactaagagaccaccactcgtcgggaacacgatcaaacgatcatggtcttcgcggttctcgtgggcaggctagaataggtcaccaattgtg

SEQ ID NO: 37541 - DNA, 338 bp, Zea Mays
ctttagagcatagataggtttggttaagaaagtgtagggtaagaaaagactccatcctagattgtggcttttgactcatctggtgatcccgcttgatccttgaagacttgagttggtgtttatcctttcttaatgaggttgatcatcttcggtctccaatctcggtgtcttcatctgagctagggagatatagttaagatagctgggtctatgagtaggacatttttttctaatcaataggttcacataaatggattgtgtaacttattgggagtgtatggctgagttgatctatgacactaacttaggcttaagtgacttaagagtatggcttaatc

SEQ ID NO: 37542 - DNA, 451 bp, Zea Mays
gcacattacattggctcaaccttcgggatgatacccatctccctatagttgaacaacattatcctcaattcttcacccgcacaatctagagattcgtcgcaacagacttcgcagctccccctcacccaaactcaccccagccggcgaggacaacaattctcgcttgccaggcccatccacacgaaggcgaccaccttccacctcaccacgatgacgcccactcaccctccatttcgccaccgcccttcaccacctacacccaacactcgcacccggaaggtcctcatcacccattgcatgcggcgaagcctccgccgcagccacatccaatgccgcaaagtaatccaaatcctcgtccgaagcgtcggagggcaaggcctcgcctttggctgttactttggccaatacatcggcctcctcgttcttggctcggtccacatgctgcaaggta

SEQ ID NO: 37543 - DNA, 321 bp, Zea Mays
aaaagaatcttgtcccgagatttaagatcctagggtaagtattggaaaaggaaacacgtcacatctttatttccttacttgtcttacagagcaggggtggtatggggtttattccaactatacaaacaaatgtatatatcttacaggttacatgaagctaaaaacctaggaaaattctcttctaagaaatcttgagtctcccaggtagcttcatcttcagtccttttttgggtgattctgtccttctgatccaaaactcgaatgggatgttcagaataagccaaatctggttccaaggtaacatccacatcgatggttcga

SEQ ID NO: 37544 - DNA, 590 bp, Zea Mays
cggggggtgggggcgggcggagggatcatgagctagagggggagatcatggagggagtgggcagtttggagggagatcgtgggggaatcctttgcgtgggcgtctaggagtgagcgggtgctcctgagatggctaagatcgacgatgaacaggagagcacgggacggagacggcgctagcaggaagagctagagggcgagggctcgctgggcagagaaagcaagggagactgaccctaaagccaagttgggtcagggtaagaagcgtgcggcctcctggcagctacttgggccgcaccaaagaaacacagcccacgcgacctatgtcgttgtcacggcttgcacatttttatgaccataccggccagccaacatagcttctactgccttataagccttccttcttcagagaaagcaatcgtggtcaaatgttcttgccagtatcaaattgaggcaactttttgcgcgagcagacatgggtccggtgtgtgcaaaactaatggtggctgtcacgtgggcgcccgtagtctgcaatgtgggcccaacgtccggagtgtgtgatggcttgcacgataggaatggctgaatggg

SEQ ID NO: 37545 - DNA, 293 bp, Zea Mays
ccacgtcgtagtaaaccactgaagcatgtctggtcatcgtcggtgaccttgccacggtgaaagccacgaatcctttgcgccagtgctctcccctctctctggccgccagcacgccatgcccaaattaggagccaccaccctcgggccctataaattaagcgtgccatcagctccgctaggtaatcacacacccaatgcaccagcccgtgcctcagattatccagcagagcacttcaatttgggatttctcccaaattagtcaagaacaccgccgtgtgagtgctcaccgtggc

SEQ ID NO: 37546 - DNA, 426 bp, Zea Mays
gcgacatcaatgaatcaccgaaggagatactcaccggcgctcacgacacggaggcccccgaccacgacggagtacggtctacggtggaagagggacaccatcgagcgattccacgcggcccccagtcgtaatccgagacggtgagggcacggttcccatctctaatcaccggcaaacgtccccagggtgtcttcgtgggtgaacgcgcagtcaaatcactggtccacgaccgactcgcgtggagctccaccccggtgaggaaatcatcaaccgaggcctccacacggtggcgctgctacgaggcgaaagttgtggcacaaggtagatggcgagaggggggcagcacgggttttatacccagggtagcggccaaagtccgagtcagagcaagctgcgagatccacgatggtttgttgaaccacccgc

SEQ ID NO: 37547 - DNA, 499 bp, Zea Mays
acgcggtgcaaatgacttcacttggggcccagaacaagctattgccttcgagtctttgaagcaatatcggtccgacctagcaacattaacaagtccagacccagggttacccctgctactctacatcacagcttcactcggtgtggtcagcgcaaccttggtccaagtgaagactagagagggcaagactcacaaatgcccagtatattttgcctccgaagtacttacaaggtccaagtgcaacatgatagagctagaaaagatagcatacaccgtcatcatggtttcatgcaagctgagacattatttcaaggcacacaaagtacgagtcactttagatcggggtctcgaagagttgctcaggaatccagaggtgtccgccagaatagccaaatgggtcgtagaactctccggttacaacatcaccttcgagcctagaacaacaatcaaatcccaggttttggctgatttcatagtagcttggacagggccttcggaa

SEQ ID NO: 37548 - DNA, 350 bp, Zea Mays
gtggattgagtttgccggtgaaaagatctcgtcgcagatgggttcaagtactgcgaccacgctgtccctcggttccccgcgccggcgacgtggccttacggccgtcaccagaatctgtgatactcaccgtggttgcgccacgcctccagcctttaaccgcgccgccgtgactcacgttagccatccgatcatcgctggtgagtccaccacggtatttgccacgaatcaactgcgccagtaaccctgtcttctccggccgccgcgcgtcttcgtccaattccccggccactgctcatgactgctataaattgagcccgccgtgagctccgtagggtaatcacccatccata

SEQ ID NO: 37549 - DNA, 457 bp, Zea Mays
gcgtctcgattcgtgctcggggtaagtggataacgtctcgggtagaaagatcatcaacgccgttgagctggacaccaatccggctagtcgccgtacctcccccttgttcaccaatcgctcgggtaggatctcaccgccgctgatccctcactgccgtccgccacgtgtccaaacactttaccacgtcgcggctaattgtgctacgcatgttcggtgatcaccggaggagcggccacggtaatagacacgttgcgcggccaccagtgactcacccagttcatacctatcgcaatccgccgcttaaattcgctgtactcgtgatcgatctctataaattaaagccaccataagctctgcaaggtcatcacacacccagccaccaagaatcactagcaatcgttcgtaagagagcttgaattttggttttcccctaaccaagtttccgccaccgcgaaga

SEQ ID NO: 37550 - DNA, 308 bp, Zea Mays
ttgggatctaaattaagtgctaacagaatttgcatgtatatgaccaatggaccatattgtttcaaaatgtttatacactttggaataatattgtataatgtttacttattgagatttttctgtgctctacctcatcctaagtattgtgaaagagtatttaaacggggtatgtatggtcagtggttgctaatcatttttgttatgcttagtgcttcccttgcctttgtgcatgccgaggttgacaaatattgtgatattgagagagtttgtgttagaactttggtacagcctggttgttatatccaatt

SEQ ID NO: 37551 - DNA, 385 bp, Zea Mays
ttgatttcgtaagatactctttaggtactacttatcgggtgatattacaacttatctgcatgccacttttcctttgacgtgtgctttgttactaacttcttccctggtactcggccccccctaggatatggcttcgacgcgtcggggctggatgccaggattcataaggaggaactagtgtcgtgacccccaaggggtacccccaactaggacccgacctgcacacagtcttggctaggtatgtttagtagcgcacccatagggtccgctaactggtatttcttatcctttgattcacgcaacaagatcggccgtaggacggtggggcgtgtaggcttacggtacttgaccatacgaagcgacttcacggccccaaaccaccccg

SEQ ID NO: 37552 - DNA, 391 bp, Zea Mays
ggagaagactacttgagtttaaggagggagattatgtttatttgaaggtgtcaccactccggggtatgagaaggtttaaagtcaaaggaaaattgtcccctcgctttattggacccttcttaatcttaaagcgagtgggtgaggttgcatatcaattagagttaccggatcatcttgcggatgttcatgatgtctttcatgtatctcagctgaagaaatgtctcagggtgcctgaagaacagttaccgatggaagaccttagtgttcaagaagacttgacttatgctgagtaccccatcaggattttggatactttgactcgagttacgaggaataaggttataaagatgtgcaaagtgcaatggagccaccacagtgaagatgaagcaac

SEQ ID NO: 37553 - DNA, 936 bp, Zea Mays
ggggaagaagcagtatgggctattttccataagggaaagggcccccacgacattggcgagcccagcggtgggatgagagagcatcgaggacaccccaacaagcgccggaggaaccaccgggcccagcgcgatgaagaggaagtcaccaccacggaccgaccacccaggccactagccaagaatagtgatgaccatttccataagctgatggactccccatgccaaaaccacggcttcgtgtccgccacaagcttcgggtgtgcgaacgtctgaatcgcttcatctcaaagtcgcccaccaaaaaagcgaagccaaaagagccggtgaaacccgcagagcaggagacactcaccgaggaattccttgagacgacaggatgcctcatgatcttcggtggggttgaagcatacggcaacaaatgctgcctcaaggcggcacaccggaaggtccacgtggtggaacccaccatcccgcgatatctccggtggttggagttcccaatcatcttcgaccgtagtgatcacctagacaggatctcgcatctcggggcttaccccctcgttgtcaaactaagtgtaggctcgaagcatctcaccaaggtgctcatgtacgggggtagtggcctcaatatcatgtacattcaaaccttcgacggactaggaatcgattgctccgcgctgcgaccaagtacggcactattccacagtgtcatccccagaaaccaagcctacccactcagacatgttacactgcatgtcacgtttgacgatccttccaacttccacaccgagcggctacagttcgaggtagtcgactttccggggtcctacaatgccatacttgggagaccttactatgccaatttcatgctcgtgccaaattacacgtatctaaagctaaagatgcctaggtcgcgagggctcatcacaatttctg

SEQ ID NO: 37554 - DNA, 701 bp, Zea Mays
cacaaacatatcaaccgagaaacactttgagaagggctgtccacgaggagatgaagagccggccggcgtgatcaccagaatggtggacaacgaagacgacgacgtggggcgagttcaggtaggatgagcggcacaacaaagttcactacgagcacggggacatggatggataaatcactctctggttaaggatacgagtcatgagaaggcggggagaacactactacaccggcggccacggtaacggaaagggcacggtgaacatgcagtgtttgcccatctcactatgcacacacagagaggctaaaggtttcatgaaactggacacgcgacctcataaccgtagcacacgcaggaccaaaatcacagcagggcagtaactgattgacagagaagcaggcagacagcttagtcaccactaggagataagctgcagacttctctagcctcagatatttgagtgctcaaaacttatccttacccacaaatgccaatgcctgtttcacttacccaaactgaccagaacagcaagggaacacagtggttgagatccttccatttctccacaacctgaactctcattagttacctacaccgagcctttcatttgcccacattggcttactgtcaaacaccacccaaccacagttacaaagtcccagctgaatccagggagtgagaagctttaaaacaccccgaac

SEQ ID NO: 37555 - DNA, 344 bp, Zea Mays
tatcagcttcagacacagttgatttcccaaaatccagatggctgggcttcgatggcataatgatgtcataatcaatctctccttctctagcatcaccctcttcaatatctgtctgctcagcttcagcagcgggtgcttcttcgtcagaagcgccttcagccacaaccaatcccgaccgcttcataacttcgaagataggcgcagtttcagcagcttcggcttcctctccgtcgcgagtaaccctagctgttgagcgtaccctggccatttgatgttgaatgttttgtgttttgacgaagttgaatttttttatctttgtcgaagctctcttttgtcacgaagct

SEQ ID NO: 37556 - DNA, 397 bp, Zea Mays
tcggcctctctccgtattcccacacgatggtcctctcgccttccgacacgtacacacaccagtgcacctcggcaacgcttctctaccacggatgtgcagaacgctcgctccatgctcgtccggtcggccccacgtgacagttacctggcctctggtctcagctccccacgcacgcatctcgcctccacgtccatcgtcgtctctcagatccccgacccgtgcctgctccaacgcggttgcactcctccgcctgcatcttcatcatcgtgggtgcgtcacagcaacgacccgcttcgtcctcaccgcaaccacctctgtcctccctgttcctccatcatagccatcgtcctttcgtcaggagtcgtcgaatgtaagtccgtttattgttcagagctcg

SEQ ID NO: 37557 - DNA, 441 bp, Zea Mays
cttgagtttagcaagtgaaacctctaaaacaaattcattcttgtgttggtgttttctaacccttgtgtgttttaccgtgaagttgcacctacacaacttgtagacacccatagcttgacccctaaatcgactaaaacttccttgtgcacttgttgcgtcaaaaaaattattgttggtgtctagttgcgcaaaccctatcgaggccatgtttctttccataaatccttgcccctaaaacttcatagcatttctgtcgatcatcctagctgatcctgtttgcctacctctcctttcgcctagatctaataatcctttttcttgtgaatcatgtttgctttatcatccgaatctctagatcccttaatgattctgcctcgttatctggttatctgctatgacccgttctcaagtatcggatgttgatcttgcctaaatctctca

SEQ ID NO: 37558 - DNA, 281 bp, Zea Mays
gtttcacagtttatacggatgcttcttgtattggccttggctgtgtgttgatgcaggaaggcagagtgattgcttatggctcgaggcagttgaagaagcatgaggggaattatcctactcatgaccttgaattggccgcgactgtctttgccctaaaatcgtggaggcattatcttcatggcgaatcttgcaacatttacagcgatcataagagcctcaagtatattttcactcagaaagagctgaatttaaggcagcgtcggtggcttgagttgataaag

SEQ ID NO: 37559 - DNA, 621 bp, Zea Mays
aaaagaattgccaatgccatcaaatggtttctgacaagctttaatattaagttaaagaatgtctatgttgtatttgatcctcaaatcaatttgaatagtagactcccagaaactagtcgatctctagttttccgaattaaagaggtggaatttggaacccaacttggtctatttaaactggacaactttttaactttccgtgaggcggtcattgaatttttgaagatggatgatgtcgacacactgcttcaaaatgatccaattagaggaatagctggcatttcagcaagtcatagtactactgcagtcttaaccggtcccattggtggattctcagggaaactcaatttaagcatcccatggaacaaggggtgcttgaactttgagaaaattgatgcagatgtatcaattgattcattagaattgcggttacaattctgcagcatccggtggatcatgcacgtatgggattctctccaaaaaaagacagtagacgaacagagttgtgttcataatattgcagatatctctattagctcttccagctctggcttgtgtccatctgcttcaagctctttgaaaccaggttcagattctgtaaaagccaccagtgaatacttg

SEQ ID NO: 37560 - DNA, 526 bp, Zea Mays
gctaacttggcgaggacgctttgggcgagtaccctcaggccttcgggtgttcattgttttgttaagctcttgttaagctcttgtccaaccgtaacagccatcggttcagcatgggccaagtcagaagattctccagccaacatattgagtacaacatctatttctgcatcattcggacttgtcggcatctcaaagtgaacttgcctctcatcattgggaagatcacgaagaggagcaactagaacctcaatgtcttcaggagagggtcgcactctaagacctagaccactatcacttgcaggagggttggacacgaaattgaaaatgaccgaggaggtggcagattccaagcagaataagcaacatgagcaccaacatttgatactttgccccttaggatcatgtctagtcagctcactagatcctcagtaggaattttcttgttggtgacccgagttgagtcagtaataccactgtacaagtaagctagatactctctgtctttcaaaggctgaatattcttgaa

SEQ ID NO: 37561 - DNA, 422 bp, Zea Mays
cacccgtgtcgtgctcgctcgttgtgacaactccgacccactctattctattcacttgccctccacttccttcgctggtgtatcctcccccatgctcttactgccaccaccaccctgccatttggcatcgtcgcctcgctcaccctgaacctaacgtgatgtcccagctctctagccgctccgatatatcttgcagtcgggattcatctggacatatctgtcatgcttgccagctcggtcgtcactctcgtcttccttttcctacttccatgttcagggctgctcaggcctttgatctagttcattgtgatctctggacctctcccgtccttagcctttttggttacaaatactacctggtcattctcgatgacttctctcactttctttggacctttcctttgcgcctaaaagtttgttac

SEQ ID NO: 37562 - DNA, 542 bp, Zea Mays
cttcatgattcagctgcacctcagaataaacgtggaacaccacgcatcaaatattttgataagaatattattcaagcattgacaagagctgacaagggcaagatacgcaaagaataagaacaatttggacattgttcagtattttttatgcgtttatcatattttttatcaatttaatttgccttatatatggtacatagatagaagcactgtcgtttatatttacaaatgaaactccactttatatgatgtgcagtgtcgtttaaattttatgctgtcaacaacctcgtgttatgcttattttctctcaagtttatgatataattatcaccgctatacagtcataagcttcactgtgtgaccagtttatgcagtaaacaacatcgtgttatgcattgttgcccatacatttatgatacaattatcaccgttttatgcccatacattatgcttttttgtctcaagtttatgatacaattatcaccgttctatactggaaatatctctttgtacagtcatgcttcacagtctcaccagtttat

SEQ ID NO: 37563 - DNA, 308 bp, Zea Mays
ggaggagaggctcccacatctcttatcagggtggaagtggaacttagaagctacaaggtggagtcctagctaagtcttggcttggtggggctccggcctcctggtcctcgtcgacgctcctcctcctgttcgtccttgtgggttcgtctccgtctgaaggggtccgattgtctctaagagctctccccttctgtccttctctccctcgatacccttgccctgaggcaagcctctcccttttataggctgggagaggggtcggccagcggtggcttcactgggaaggagccgtaaggcaggggtaaaac

SEQ ID NO: 37564 - DNA, 869 bp, Zea Mays
tgacccctgagattttctagttttttttaccatgagctttgataccacttgttagagtgcgcaatagattcaatccaatttgctatacccatgagcttgcacccctaggcctatgtccactaaagcccacaacgaacgaaggccttgtgcctaattcaacataccacttgttaggtgtcccacattagaaattagtggtggggtgcacaacatataaggcgggggcagccctcacctactagactagtcttttgagttgagttacgataagaccttagtatcatttgggttccagtatacctggcctcggggtgccaactcgtggatatagtgaattgcaccaaatttgctacaaactctaacaagtggtataagagtccatggttagaaaatctaaaaaatatcataggtgacatggtgatggggtagattgttaggtttaatcccacattcaaaattgatggtgggggaacaatataaggcggagacagctctcacctatcagtttaatcatttgggattagttaggtctaaggcattgttatgttgtgggcccttgtggacctggacctcatgaacgttggctcgtgggtatagtgagctgggccagatacgctgcagtggctgcacactaacagagaatcttagtacttttttttgtagtttcccaaatctgtgattttgaggcactatgtggtggttttaaataccccctcccttttgtggttgaaccagttaatattttttcgtgagctgactgagctctcaccaaatatgtagttgcattgtagttgtaggtattggactatggctgtatcgaattatttagtgacacatatttgctatacacagagatgatttagggggcg

SEQ ID NO: 37565 - DNA, 362 bp, Zea Mays
tgtcatcaatcccattgttagtaccttgttttctttccttctaaaatggaagttaaaattctagtttcgttgttgcaatacccttatgttaggtgctttaatatagtagagatatgttctggtgtttactgatcagcagatggcatgctacgagtactgtcgtgaataactctctcggagcaatggcttggttttgtggtgggggtttggacaaaatctttaggattaacaagactttgttgtgatattatgttttagttctgctagacagcttgaattagaccttgcaaaattatgactttgtcttagtggtgtcactaagaatttgctagtgaccagaagatatgcttgtcatgtacaac

SEQ ID NO: 37566 - DNA, 462 bp, Zea Mays
cgcaaagtggataaccgcgggggagtaaaagatctagcggggagatggattgggtcgcgggcagtagcttatcggaggggcttggtggctgtgcgacatggccgaacggtcgtggttgtcataggtcgccgacgagctcgactgcgccacaccgtggtcctttaccacatagtcgtaaccgtggcatgctcaaaattactctccctacgtttgtatgccgtcgagcgccacggcgtgctcgccagtgcaatgtcttgtcaccgccgccctccaaatcccttccaaattcggagtaaccgtggccaacctctataaattgagcacctccctttctttgccccctcataacgaacccagtgcaactctaacctcggccggtcatccaccatagcccaagcgattccgttttcccccaaatcggttctgcgcgccaccgtggacacccctccgtcgacccatcgt

SEQ ID NO: 37567 - DNA, 459 bp, Zea Mays
atgaagagggaaattgccaagtatatatcagagtgtgacacttgctagagaataaaagctagccacttgaaggcagcaggccctttgcaaccccttcccataccatcttggaaatgggaggacatttgcatggactttatggtgggattgcccaatacatccaggcaccatgattctatttgggttattgtggacagatagactaagactgctcatttcttaccagtacacaccacccaccggacagagaagtatgcagagatctacattgaccagatagttcgtctgcatgggataccaaggactatagtctcagaccgaggagcaccttttgtggcacgattttgggagcaattgcaggaatcacttgggacccaggtcatccgaagctcagcataccacccccaaacagatggccagacagaaagggtgaatcagattttggaagacatgttgcgg

SEQ ID NO: 37568 - DNA, 376 bp, Zea Mays
cccgcctccacccgatcaccatccgatggcactgattcactgggcgaaggtgcatctcctaatttaatgccaaccgtccataggtagatctatggtatgcgccccctgtctccgtcctggctaaagccccggtggcactgcactgtcgacggcggcgccatcgccggtgtgcgaggacacggctcaacgaggattagcacgatgccctaagagatgctacacgcaaagaacgaagatgcaaagccatgtgaataattctcaccaagagtcgcgcagtggagctggctgcccacggcggagggcggatccatgacggtagcgcgacgacagcgagaaattcaccaggacccgatgcaccaccacccttgcctaggcc

SEQ ID NO: 37569 - DNA, 386 bp, Zea Mays
atctcatccagtttcgagtgtcacttggctgaaccttctttgctcagcccccgttttcttttagacttatttagagtgtcatgaaactgtggcaaatgaacccccctttatctcagatcttctttagcatattacacaacagaactagtttatcttggttatcagaacacaagcagatggcacaccattatcttcagttatgggttctaaaaatggccaggacacacctcactactccaagccttttaacacaagtgagcagggtataagttacaggggcccaagagttatagtgcttcaaagtggggtaaaaatacaaaaattcatattcagctatctgaaccaaattcagttttagtaaactgcaccaagtctgaaatttttta

SEQ ID NO: 37570 - DNA, 550 bp, Zea Mays
ccacgacgtggcccaacctccgagttcgactctgagcaggtgaaacttggatcacagcagctgctctcgggggctcatcaggacgtcttcaatcctatcctaggtcaactccctcacgtcacctctccttatctgcatgttgtttttgtttctcctatctagaatacgtataagtctctggaaatgttctatcatcctgtgtctctcaagccatcgatgccaaggccctctccacgcttctagcacatgccagctcctagaagtctccctacgtcctcgcgtggtggcctcaggctgttgaacgccagcgtcgtttgcgtctagctcgcgctcacctctgcgtgctccactacacagcgccctgtgtccgtcaagtcccgcagtgtcctctctctgcctacattcacaagtttcatcgtctcgccgtggtatagctcgccggtttgtcatcgacttcttttcaattggaaaatgttagctgagtgactagtttatttagtgtcgtcttctcctgcagcttctcgtgtctagcaggccattgtgctaggcg

SEQ ID NO: 37571 - DNA, 411 bp, Zea Mays
tccacaacccaggccaaagtgaagacaagaacaaccataatcaaggacagcagagtaactcccaatcaatagggatgccccagaattccttcagaccaccagccctaagaggcggaggaggacaaagcttcggaggaagatacaactctcagcgaagaagactattttgcctgttctgtggagaggataagggatacacaacaaggacttgccaagtcacaatacaaaagcagaaggaaatagctgaggacaaagcttggcaaaatcagccaaagcaagttcttcatacttcttcgtactactctccatacatcctagagtatgtacacaaccaacaaccacttccatagcctacaacttcaattgcctcagcaagtcactctcttgctaggtgggccttacctcaaccac

SEQ ID NO: 37572 - DNA, 428 bp, Zea Mays
ctgtgggggccatgcggtatggtctctttgcgatgggcgcagtgccaggaatgagatctatatagaactccactcctctttctggtggcattccaggcaactcttccgaaaatacatccacgaactcttctattacggacatgttttctgctgccagattaaatatcattggatcgttggcgggcggttgggcttgacaggcaactgcttttccttggcggtcggtgagaaggacggtcttactcacgcaacttatgatacccttgtgcttagttagccaatccattcctaggatcacatcaatcccttgggatggcaagacggttaagtctgccaggaacactaccccacttaaaagaattctgacttgggagcacctgagttggcataggaggtctgaccccggggttcgggtgaccaaagggata

SEQ ID NO: 37573 - DNA, 307 bp, Zea Mays
gtgcgacatgctcacacatacaaaacttagggtgatttctataccttgttaacagagcaaccggtttaagtcagaaacgccttaagtcggtgcgacatgctcacgcatacataactctgggtgactactatgccccaccaacgtagcagtcggcctaagtcagaaatgccttaagtcggtgcaacatgatctattaagcagcaaaaacctcagggcgcctactataccctacttacacacaacaaaaaaggaagagtaactcaacgttcgagaaaccgcggaaaaataccatctcaatgaaaagtgt

SEQ ID NO: 37574 - DNA, 579 bp, Zea Mays
gttgcgtgtcatttcatttaagaagaaaaagatacaacacccgaggggtggaaagaagccccccccctccccgcaacacatcaccaaaaggtaacatacgcgccacgcactaaacctaaaagaacgaccacacagggctgctcaggcttccagccttggcttcctgctgagcagctcatggagggccgtgtttgtggccatacactagagctcactctcctctgctacttcctgacacaccaaggaaatactaggactaagaccctcaaaacgcacacattcctatgtctccaaattgtccaagcaacaagaatgattagagaaatccttttctcttctactttggcactttgttgactgcacatccccaccagcgagcaaaatttctcaatttgtggagcagcggcctgcagtccaacaaaacagaggattttggtccaagtctcccgggagaagacgcaagacactataatgtgttgagctgactcatcttcctggtcacaaaggaggcagacactaggatgtggcaacccatgtttcagcaagcgatccgtcgtccaaactctgttcttgattgcc

SEQ ID NO: 37575 - DNA, 1018 bp, Zea Mays
tattgcttgcggggtgtggccattggcgcatggctgggggtggacaaggtgaaaccacgctcgatgcctttaaattggaaggtgttgagtctagccttcaccattaatctgcgtggccggaatggtgcaaccttcgttagagagacagtggttgaggcagtaaaaattgttggtaaatattcagcgaagactgagacaccaaaaatttaggatatacatggttcaaatgttagactaaatcgtgtatttgagctgaacaacgtccggtacggaccgtatcttgaggaaggatcctcttatgttggggatgtagaggggtggaaaaagaaaggtggaatcagacatggtggggtgaatgaaggatgctccgagggtaaggctgagatgccgccggtgacaaagaggaggaaagtggaagcaagagcaaaggggccgtcgagggcacctaggatgacggaggtgtccgacgggtttgctaaggagctggacgagacacacgctgagctgggagaggtcatatcttcgcccgctttgcggaaagcatttgctcggatgctgaaagtgatggggtgagtggtgtagggatgatcgcattcttatggctttcggcgaggacgattctacgtcttttcaggcttggtatctctgagtttttccttatgggaggaatgttggcgttgttgtaacagttgtgatagacagggaccgtcgggagtcttaaaagaagcggaaggctccgctgcagctggagaaccgatgtccagagatgtgaggactgcggctgcctctgtggtgatgcctccgcccgtggctttggttactgtggctatggggatgcccctgcctggcagggctagacaggatacgatgccgatgggtactgaggtgggcgtagctggcggagtggtcccttatgtttctatcggggactacctgctcgagggcgtcaatgaattcgacgcccacaccggtttggcggccagtgataagtgcttgtgcatgtctgcgtgctcatttt

SEQ ID NO: 37576 - DNA, 1071 bp, Zea Mays
gaaggctggtatgatggagcgagcattgcctttgctgttcttctagttgtatttgttacaggtgtgccactatgacttttctctgattttctgtgttctttgtcatatactcccttcatcctaatatataaggcgtaatcactttttattcaagtcctacaacaacacaaggcatgctctctctaggcgcacgtatccatgctatagtactagtgttgagagagaattaaatatgttccttgttcttgaaacaaaggtggttatgccttgtatactaggacaaacggagtaacaaacagtgtgtttctattcacatcaagttatcaatgtaattgatgataaaaccaatggcaatattgtgaaaagttacatataatgatgcacaattagtagtggtctaaactctaaagcaataaagttgaagtccagtatgtattcctgaaacttcaaataaaacctctcttactcagtgccaacactgccttttacagtttgtgtacagttgctcaaaatctagtggctgttatttttccatgttaattttcagctatcagtgactacaagcaatcactgcaattccaaaatcttaatgaagaaaaacagaacattcgtttggaggtgaggattagagagacatatatcgctattggtttctttgttaatcccaaataacgttatgaatcattcaggttgttagaggcggaaggcgaatcacggtatcaatatatgatttggttgtcggtgatgttgtccctctcaaaattggtgaccaggtagagaaagccattgagcatgagcctcaattttcgattcatgtgtctattttcaattcctatggataccttataatttctttgccaggtccccacagatggtatccttatcagtggtcactccctttccatagatgaatcaagcatgactggagaaagtaaaattgtaagttactccattatgcagccttggaagtaacacacatacatgaacctaacttggccaaatggggactatttgaaggtacacaaagatcagaaatcaccatttctaatgtcaggttgcaaagttgccgat

SEQ ID NO: 37577 - DNA, 625 bp, Zea Mays
tcaatgcagacatgttgtgaaggcagaacagagatattgttcttgtctcgaatggcaacacacagggaaaccctgccagcacggcctaatggtcattatagcgcaacaaatgcgagacgttggaatggagcactttgtagacgactacttacaagttcactaccactcataaacttcaaattacatacccaggttcacagtagttcactaccaattcagttacataataaggttatacaaatactaagataaccttacaaaagctaactattacactgaatgcacatccagtgcccattcaacaccagcaggactggcctacttcatctgacgatccgaaagctcttcagaattgacatcatccagtgcccattccccaccgcccatatgttcatcttcagcaaattggttattgaaatactcagataatggtggcgacggaccagcttcaagatcttctaaacgatgtgcttcctcctcaagtgactgagcaagctcatacacgcgccacattgcaaagttcactgacacctctttggccgtatctggcgaatccataatctcgtttccggccaaatctttcaactccctcccaactacaagcatttttgcaatggcttgtgcg

SEQ ID NO: 37578 - DNA, 411 bp, Zea Mays
cttcaccaaaaatacaaaagcaactgtgtgaggcttgtgcaaaagagacctccaaagctattttatatgatattggggagaaaaatttctccattcttattgatgagtctcgggatgcctctataaaagagcaaatggctattattgtgaggttagcattttatttaagcaacaagtgtacatgttttgtgatttaattggcttctatgtgttgtgatataggtatgtgaacaacaaaggctatgtcatcgaaagatttttgggaattcagcatgttccggacacttcttcaatagctctaaaggaagctttggactctatgcttctcagtcatggtttatcgatacataaaatacgagggcaaggctatgatggggcatcaaatatgagaggtgaattccatgggctaca

SEQ ID NO: 37579 - DNA, 503 bp, Zea Mays
acatctccaccttacctaagataaagttggagcaaaacaccaaagttaatcatctaatatacatgtaaacaatgaaccgaccttactgaaaacactcgcactggaccctctctgtgaccaaaaaaatagctcgtagagttttcagggactagagcctcaactcatctttgtagaagtgttgtgctgatggaagtgatggggttgcatggatttcttaaacgggttattgctttctgacttaataatgataacttctcaggcttgtaactactttgttcatttcattggcatgcatgtaatacatgaatcttagcacaatttagtaacttcctctttcaggtgtggctcaatattatccaacatttacgtattcacaagttagacggtcttttatgttactaggtcagacaagtgcttaatatcctatcatataccaaaacagaaagtcgtcattggccaacaacattcgaactgactgttgtgcctcgagctctaattaaccc

SEQ ID NO: 37580 - DNA, 378 bp, Zea Mays
tgccgctttcagcaccatggagatgacccccccccttcctccgactgggtgatcgattctggtgcctcctaccacaccactcccactacaggcacgctctcccgctcccatccccctcattcctatcatccttcatcgatcgtcgttgggaacggttccactctgcccgtcacctctgttctccctggaccgttctacctcaacgacgttctcgtagccccccacatcactcataatcttctttatgttcgtcgttttaccactgacaactcttgttccatcgaatttgacccctctggtttctctgtgaaggatctggccaccaggactcccctcgcccgctgtgacagctcggggcccctctacacgctctggcca

SEQ ID NO: 37581 - DNA, 467 bp, Zea Mays
gacgtcttcggtgttcttagccaccgtagactccaactgctgccagcgcctgtcggtcgattcgagccggtcgcacagctgctgcagcaacttggattgcgtagccagcgtctttgattgggactcaatcgatttggactgggctgcaatcgccgctgcgacggctgggtcagaagcacctgccatctttgagcgcctggtgtagtgcagcgtcgtcgccaggaccaccaatctgataccaattgtcagcgttcttactagaggaagaacactgaacggagattacagacaagaagagacgaagaaggaggattgagcgtgagctttggtattctgttatttccaaaactgaatgtcttttccctcaactctcctatttattctattacaaccactatttaatacgggccttaacgaatccattcggcaccagaaattctggagctgggcttcctagtgcgtcggcc

SEQ ID NO: 37582 - DNA, 348 bp, Zea Mays
tgtgcaaggaataaaggaatggctcgctggattacatggaccacgaacggcggtgggtggaggaagttcagcgaggtgattcgacgtcttcggcgaagcagcgtttggtctaaaggtttgggaagcttctctagcctctggggaagctaatggtgaagctggactgggaagagaggggctggggtggtcgaaccgcggtgactgagggtcagcgagcttgcaggcggcgttccgctcggtttcctagcgatcaccagtgttcaggctttggctagggggtgaggcatgcgggagagcaaggccgagggctgggccatcttataggtgaaggcacatgcacgagcgcgt

SEQ ID NO: 37583 - DNA, 476 bp, Zea Mays
tgaatcttcaagcataagctccacgtggacgactcccttgcttgtcacaaagcgcgcttggttcgtggcttctcctagaagcacaacattgactgcgatgagaccttgagtctggtggccaagcagaccacgatttgcgtcattctcagcattgtggtctcgcgtgcccagtcaattcactagctggacgcgaataacacctttcttcacggtcgcctggacgagaacatgtactatcagtagcctcctggcttcgtccaccccatcgctcctgaccatgtttgtcctttagagaagtctctctggtctgaagcaggcacctcacgtgtggtactagcggttcgccacctacatttaatgcctaagctgtcagcgcccccgagtatgggtaccctatgcgctataggcaaactaggcctacatggggaagacaagctacgagtcccaccttcgaggtggaattaaggcgacaagac

SEQ ID NO: 37584 - DNA, 344 bp, Zea Mays
ctcgggactgggcctcaaatcctagaaagcgcaggggctctggcgcaagactccacagactcagtgaatagtgcccccaggacgggcgggtttatattgaaattcgccagggcttctttagcaaaagcacgaggcgaaggggtacggtgagatctcggccgctagatccagaaccgagggcccggattagatctagacatcaagtgaatcgttacgcgccctagccactggatcaagatcgtgcgatcgagattacgctcaaccgaaccggtacagggaagccaatcagagccgtccaataaagatctaacggccagaggacgtctcctacccctatctccccc

SEQ ID NO: 37585 - DNA, 417 bp, Zea Mays
tgctgcaacccctcccagtgcatgaatggaagtgggaagaaataggcatggatttcgtaaccgggctaccccgaacgcaaaaagggaatgattctatctgggtaataatcgaccgtctcaccaaggtggcccacttcatcctagtaaaaaccacttttggaggagccgcccttgcccggatatatcttaaggagatagtcaggctccatggcattccgcggaagatagtgtcagacagagggacgcagttcacctcaaaattttggaaaggccttcaacaagcgatgggcaccaagttagatttcagcaccgcctatcacccccagtcagatggtcaaacaaaaagagtcaacaagatcctcgaatatttactaagagcctgtgtgttaacgttcgacagggattgggagtccagtt

SEQ ID NO: 37586 - DNA, 372 bp, Zea Mays
gccgggtgtggcactggggttttactttcccttttcccttgagggacctgaacagcatgtgtgggtattgtgtgtgtatgtgtgcggtgtgcccggttgacgtgttctgagatctcttgggcagtctcacctgtatttgagtgtgtgcctgtgcggttggtatacgtgtccaatacgagtcttacatgatatgctagtgctcctggcagtgttaaaaaatgattattgggaaatttctggacaattcctgtgaaattcctaccctctaaaggaggcctaaatgcatgacccagctcacattggcttaatagattgctatgttttttggtatactgccactgtcatgttgttctttctcaaatactactggca

SEQ ID NO: 37587 - DNA, 349 bp, Zea Mays
catatatcaaggcttaagaatgccttgatttgcacattctactcctctgcaatatccttgaatttaaccaacctcaacgttccattcttaatatatctaacaaatgcatgtacacacttcactgaaatgaccacttctttaagtccatcttgtgcaataagatacacaatatgtgtatctcatctcataaggaggtactttcctacaagtatggtacatttggtactatttggttgtctcttcagatatgataaacactgtcgttagcactaacattatcaattatgactgtcataatttttataacccccattttccatcaatcatctatgtaagttcttcccggtgc

SEQ ID NO: 37588 - DNA, 436 bp, Zea Mays
gacgattggaggtgagggttagttcactaggtgcacaattatttagcggagcaggctggggcatcactttatagtttccaagggcggtggctcctaattttggcatggcgtgttggcggatggagaggaagaaggtcactggtggctcagtcatggcgttcaccggtgcagcggttctaagatggtaagcccaggcgtgccacggttactactccacactaaagagccacgacgtggcataattgaggtcaccggagtttccacgacgacaccggtggtacggccacgtcgcacggctaaaggcacggttgataagcttcaccccgcgaccaaatccgctccccctccgatcttttcacccgcctggtattatcctgttcgagtcctgcacgaatcgccacgatcagcgtgaatccttgcgcagaggtcactgacg

SEQ ID NO: 37589 - DNA, 370 bp, Zea Mays
gagacacgggtgggtgcgctggatgcttgactaaatagcggagctgatggcacgcccaatttatagggctcgagggcggtggctcgtggatttggaatcgcgcgctggcggccggagagaggggagagcactggtggcttaatcgtggcgttcactggtgcaacgactcaaagattgtaatcctgggtgtgccacggttactaccgcatagtaatgagccacagagtggcataaccgaggtcaccggagtttacacggcaacaccggcggtccggccatgtcgtacggctacaggcgcagtgataagcttcctccacgaccaaatccgctcccccgcgagatctttttacctccccgtggatatccactg

SEQ ID NO: 37590 - DNA, 620 bp, Zea Mays
caccctcgaaccttttccttacgcccatcatcacgacgtctgtaaatcgggtatgagtccttcccttgcaaggttgtgtcactgaaaggccgggggtaatgattcttgcatgatgcatggcccttagtgcatgggcagttagggtttagcgacccacacggaccatgcatcatatgtttgataaccatctttcgtagttcagggtacttgttgtgtgggatctcggctgagatcaaaaggtcatactgctcagggcacattagcttgtacttcctctgcatgatgagtagaaaatgggcatgtggcaaaccccgcttttgaaactccacgacgtagacgtaggcccggaccttaccgagaatatcatgtttagtcagcctatgctttaactcctgtagcttcgcatgaaagacacgcactacaagatcaggacgatcttgcggtgtttggccagggagaagctccctccttatctcatcccagttggggttacatgtcatggtaagaaagatgtccggtttaccaaacttccgcaccagagccatagcatccatataccgacgtttcatgtcacgaggaccgccaataaacgacgtagacagcacaattcgcttcccgac

SEQ ID NO: 37591 - DNA, 292 bp, Zea Mays
gttctctctcccatcctcacatcgtcgccgcctcgtactgcacccccatccccttctctctcgtagactcacgaggtcgtagtccaccccctgccgtggtgatgttcgacctactgtcatccctgttgtccatgtcctcgaccccgtcaacgacacccgtgaactccacggcatcctctggcgcttgagtgaactccaattcctgtaccccctgccctgctcggcacaaatcgtatatatcatttaatatctaaattaatatctaaacctttgggtggaactccaatacctg

SEQ ID NO: 37592 - DNA, 589 bp, Zea Mays
gaccgttgtgcctgccgatgataatttatctggttctggatctgagtgttttgagtctgatggtgagtctgggagttagttttcctgggcgaaggagtcctcgaatgaagtcttggattattttactgcatttgatgtggccgcagcggagtcgtcgccgcgtgtggaggttggcgaggcggctgatcttcctagtgcgaggactaagtacaggcggcgaagggtggtgtcgaagcatagcgtgggtgaggcttcacgaagtggtaggcgccatcgtatggggatggagcggggctgtcttcatgtagaccggattggtaaacgagaactgttgtcctcgccgattggggcgagtataggtgagggggatctgcgaaatctttttgagggtgaggagttgaggataatgttgttcaactatagggagttgggtatcatcccgaaggttgagctgatgtagtatatggtgccctcgctgtgtgtatgtaattgtgacttttattgtaatgtgtcctgttggccgttttcgaacgcctgttatgatccggttgcacccgtaggcgacttttgcgcggagtgtcgattgatg

SEQ ID NO: 37593 - DNA, 1033 bp, Zea Mays
tcagtttggtggaagttggcttccattatttaggtatttaatatactctacatgataacagtcatgttattgctacagcatagaaaatcactctttaatttcagttcggtcaaggcaagaaaatctgaagatgaaagccattgggtggtcggtttggatgcaaataatatattctgcattttatgcaaaacccctcaatcttatccacaggtatgtttttttttcttgttagctactttcatattagtggaacttctgaagtgtagatagcttcaatagatgttttttctctgttggaaacttgaacaaggattcctcactgcaaactggcctgcccttttgactgctgatcttaggtgatgcccaagcctgtgctaagcatacttgagctgtcatttccacttgcgtcatcagatcttggggctaatagtttggaaaatgagttcttgatgaggaagttacagctatcccaggttcatattattcctgtaccattctgcattatttattctgttatctgtttatttaaattgctatttatctcagattcaaaataaaatggaagaaatggctgcattgggccttgacaccacttcatatgatgatgaatcgttcaacatggaggcaggacttgaccggtgcattttgaggcttatctctagttgctgcagtggtaccagacttgaactagaagtatttataaattttggtgtgatatgaaatttagtcttctgttcttgttttcccaaaggtgataagctcgttcgagcttctgagcttgcaagattattgaaactagagaagtcaatgaagggagctctatcactagtgacacgcctgaaacttcccatgctgcaagagaagttcagctccataattgaggtaaaggccacaacctttaatttctacatggattgaacctatctaatttcaagacattattcttctacttttctatgcaagagaaagaactataaggaaatttttagccagggtccgtttcaacacaggcttgattcaactctttaatcac

SEQ ID NO: 37594 - DNA, 342 bp, Zea Mays
ccaaaacgtgggcacagggtaactcgcctcagatcgaggcacgaagctgtaacaaccaaaattgttgtgatactgttcttttctggtcgccttcgtctgataagacaactcatgaatattgcaaaagcatcttgcatctggatccagtccttggctcctcatggcctagataaaacccccactgtaataagagcttcgggggtaatctgatgaagatatatctcaatgttttcaaaacatcgaccatcattttatgaagcgggaaatgaagcccagccttcatgaagctcctaaagactaccacttcatcgctttctggcaggggaactgtgtcctctcccc

SEQ ID NO: 37595 - DNA, 784 bp, Zea Mays
ggcgtgcacatcctaccccttgtctttcgacaccgagcattgaactgaccacgtggggtgatggcgctatgtagagcaagagcgaatcttgagactatagagggccgtctgtatctccaccatacactcaaagccgtcagtcttttgcaacagcttatggagtggtaatccacactctccatggcacgaaatgaagcggctgagggaggctaggcaccccatgacccattgtacccccttaaggtctgttattggtcccatgatcgagatggcagtgagtttcttagggtttgccttgataccccattcggagactaattaacctagcagcatgccccctaaatcgtcaaatacgcactttccgagattaaacttgatgtcatttgccttcaacttgtcaaatgtagacctgaggttggatatgaggccttcaaaccacgggtattgaccacgatgtcatcgacataagcctccacgatccttctgatgagatctccaaagcacttaaccatgcatcactggtacgttgctcccacattttttagaccgaacgacattatcacataacagtacgaactgaaaggagtgataaaagatgtggttgattgatcggattccttcattgcgatatccttctctgtgtcgattgaccctcaaagagtgctcggtgatttccttcgggatacacctcatgttagagggtttccacgcaaagatacccttctccacgcggaggaagtcgacgagcgcattttcctattttggggagagtttggtctcgata

SEQ ID NO: 37596 - DNA, 558 bp, Zea Mays
caacatattgtatattgtgttccaaatacgtccatgcactagcacactctcagctccaatccaccgactcaataaaaaaggaaaggtgccatgaattccacctagagaaaggaatacatcaaggagacgtggtcgcaagcatagcagagaaaagacagggaagttggactgcaactggataatagggtaggcgggttgggtttggggagaggagcagaaaattaaagagtgaatccccttttgcattgctgcatctgaaagcgggaggggagcggcctttcgttgtcttctatggaggaacttgggggcatccatcaccagcaggggctgcaacctaagtatgaagaagcgtgagggtctgagggagggggcacaggagagggacgagaaacaacccccatggcggatgtcctcatcacacgttgcaactccaatccgcaactgaggcccccacggtcctcagcacatgctccaacttcaacctataaccgacagggaccgcaattgaggacgaaaaattgagagggaggcaggaggggtgcatgggggagagaggag

SEQ ID NO: 37597 - DNA, 498 bp, Zea Mays
ctcaaatctagagaaatccaggggtcctggcacaaaataaaccgagactcagaatcttgtttgcagtactgcgggttgattcccctattacctagggtctctttagtaaatgtgccgcggcgaagaggtatcttccgcccggagccatccgattagacatcaacggctcagattaaaaccgatccccaccttgaaacggtactgaatcacaaccaccggatcacgatccgaggcttcccgagatggccacgcctacaccagatcccaagcgtccatcaacggatctacgaacagattttaatgttgccaagaggtatcgcccgcctaatccacgccgcccaccgacagatctacggtccatagtctctctgacccagatcaaatcccagccgtttccccaccatccaacggccgatgcggggcgcgcgattttctcccccaaccctgaccggcggcgaccccaaacacggcggcgccataactggtgagaacaaaaac

SEQ ID NO: 37598 - DNA, 278 bp, Zea Mays
gccgcagcgccgacaggacgcttctggtagttttgcatcaggagctcattctgagcgtcagcaccaagcaacatgttgatgagctcacaatacttcgtgtacttgttgtttcggtactgctgctggagcaccatgttgggggtgaaaggtctggagagttttctcaatcattttaggtctgtaactatctggccatagaaacgtagctgagcgacaatgcggtgaatggcagtgttgtaagcctccacagtcttgaagtcgaggaagcggagtgtggc

SEQ ID NO: 37599 - DNA, 463 bp, Zea Mays
cgttaggcgttagaggagaaaacccaatgaaagtatgctttttttatcttacgtttttgtcttgcaaagtattttagatgtttttccaaagtgattgcttgagtttgactttatattctgattttttatgcaacacactccttatatggatacatcatacatatcattgtcttagaaatggatatgtatggaaacttgcactttttgtgtcatgttaataaaggtaagctcaccaactttggtaagcggtaatcatatttatgttagaattatccatacaaccctattaggccttgtaactgtagttgggctaggctcttttattgccgaccaagctacccagcgctgcatatacgtagatatgaattatatcgtatttgttagaacctcgttagggttttggcttagtcctcttgtaattacctatacacccctatgtaatgggcctggcccaactactact

SEQ ID NO: 37600 - DNA, 286 bp, Zea Mays
gccaaagatgatgcggccgaagagccaaaattggaaaaaacagtgataatgccagaaattctgagcccaccagcaaaggtagaattgccgaaagtgcaaaagtctcctgccgcaactcccaagagaaggaggatggccagcgtgctagacgctgtcatggagaccgcaaaggctttgagccctgctcctactaagaaaattgccgaggttgtcaaagtccaggccaaagctgaagctggccttcaatgcccattaagacgaaggatgccacgcctgaagataaagc

SEQ ID NO: 37601 - DNA, 429 bp, Zea Mays
attagagagctatggtggctaatcagaggcaggagcgggtgctctggcttcgtgattacctagcggagctcacggcatgctcaatttatagggcccaagggtggtggctcttgaatttggaatggcgcgctggcgaccgaagaggaagaaggtcactggtggctcaatcgtggcgttcaccggtgcagcggttcagagattgtaatcctaggtgtgccacggttactaccgcgcagtaacgagtcacatcgtggcataactgaggtcaccgaagtctccacaacgacaccggcggtccggccacgtcgcacggctacaggcgcggttgataagcttcaccccgcgacccaatccgctccccttttgatcttttcaccctcccggcactatcctgcccgagtctagcacgaatcgccgcgatcagcgcga

SEQ ID NO: 37602 - DNA, 916 bp, Zea Mays
aaaaatttcagacccatttgtttgctaaacgtttgctacaagatttttactatagtcctaaacaactgcttggtttcctgcatcactaagattattagtggttttcagacagggtttattaaaggcagatttattttggacatcgttgtttcgctgcatggaatcattcacgaggttaaaaaacacaatcaaagtggggttatgatcaaagttgactttgaaaaggcgtacaacaaagttaaatggaactttcttcaaatgttagaaaaaggtttcaacaataaatggtgtgaatgggagatgaagacagtaatgggggacaaggttgctattcgaactaataatctaattggtccttacttctctacctataaaggggtgagacaatggaaccccctctcccctctccttttcaacttagtagctgacgaccttgttgttttagtaaaaaagttcaagttgaggggttgctcactaggttaattcctcacatagtagagagagggtggtgtgacttcattatgctgacgatacgattttccttcttcaagatgatctagaaatgcctagaaatttgaaactcaaccttatcctgtttgagcagatgtctggtttgaagatcatttttcacaaaagtgaagttttgttttgttttcgggaggctagaaacttcaaaaacctttacgctgacatttttacttgtcccataaaaatgctccctatgaaatatttgggtgtgccgatcgataagaaattgagtaggacccaatgggtatgcattgaagagagaaacttgaaaaaagattgagacctagaaaggcaaatttttgagtctgggtggaagaatcactttgcttatcaacagtctttctaacgttcccctttacatgcttggcctttatttggtgctcaaaat

SEQ ID NO: 37603 - DNA, 340 bp, Zea Mays
ttcacccgcatccagtgtcgcttccactactcagggctgataagtcgttttgacgttttaggaggatagaaacctatgtgagcttagttaatgacagattttggactaggcttacgggtactttcccctaattgatgtaacccttgagaacttttgagatctgtgggatgtttgtaaccacgttatcctcgtttgaacgtaatattacgattatgacaatttccttccatatgagataatagcatgttgttcgaagttgtgaattgggataacaatggcgacaatctctattttcagatggcatctaggcagcgtcacgggcaaaacgagcaagttcccc

SEQ ID NO: 37604 - DNA, 611 bp, Zea Mays
tatggtgttcagggcaatccagtgcggtcaagctcaattgaatgggtctgtgagctaccggggacacgagggaggctagaacaccaattaaggaagcttgaactgacctgcagaaggctggccacgacgagctcactcacggcggcgcggagaactgaattggggggaaaaggaaattcgggcgctgtggtggctaatcggaggcaagggtgggtgctctggcttcgtgacaacctaacggagctcactggggcattgatttatagtgtccattagcagtggcgtccaatttgaaggaagtgtgctggcggccggagagaggggaaatgtactgacgcgggtgatcgtggttgtcaccgtggcaaggcctccgacgatggacgggcttgctacaagggttcactgcgacgtgttaaacctcccaggcacgtggtgcacgatcggtaagcggccaacgccggcgaagatcattccggtcggccgtagaccaagtgggtgcggtgaactcaacagtgaccgagtccgagccaattcgggcgctaagatcttttactcccctcagttatccactttgcgctgggcacgaatcgtggcggccggcacgaatccag

SEQ ID NO: 37605 - DNA, 338 bp, Zea Mays
gaatttggatacgaattgcgatccacgatccgacacaatggtcttcggaacaccatgcagactaagaatacgagcaatgtacaattgagcataggcagtaactgggtgatcggtcttgactggcagcaaatgagaaattttcataagctgatcaacaataacccagatagagtcatacccttttgtaatcctgggtaatcccacgataaagtccatacaatatcttcccctttccatgttgggataggtaaggattgtaatggaccaacggtcttcatgtatatggccttgatgcgtttacaagtgttacatctagccacaaagtatgcaatttcaat

SEQ ID NO: 37606 - DNA, 375 bp, Zea Mays
gagaattccaaatatgtagtatcacgcggtccttaaggaggagctcttcctccgtgctgttggaactgattgcccgccatttcacgcaagaagcgtgtattatcagtggtggcattgaccagggcagcgatagcctcggcgaaagtcgatggtactggtggcgggttaggagtatcctccctaccgcgggaagtctccgcaccatcatgtgcacgagtccatgatggcatctgaggcaaagaaacatttgtaaaaaatataacatgccaacatacaccatcatattacattaccaacatgtaataattatacagactccagtgtacaacttgacttcattacttattttacataagtacaatacttaaactatcc

SEQ ID NO: 37607 - DNA, 300 bp, Zea Mays
caaaatgcagaatttatttatgattgcattaaggaagttgttgttaaagatgttggagaaagttgtgttgttcaaattgtgactgataatggttccaattacaagaaagcatgcaagcaacttatagccgagtatccacatattacttggcagccatgtgccgctcacactattaatttaatgttgaaggacatagcacactgtgatgaggttgatggactattgtatagtgctaagcggatatgcagattcttgtacaagcataataggtaatatttatattgtgaaattcctgtacaa

SEQ ID NO: 37608 - DNA, 377 bp, Zea Mays
acgatcaaggtccagaattccaagacctcccttgtccttagggaggcaagttaaggtccagttgacgaggcagtgccccccgctgcaaacttctggattgctccctttccacaggaagtttctacgcattctatcaattgtttgcagcagccatttttgaggtggaaaaaccgttaaatggtagattggttgtgcggatagcaccgctttaacaagagtttctctaccggcctttgacagcattttgcctttccagcctgccaacctattgttgattttatcgattaaaggttgaaggtcattccttttaactttcttgaaatgaaggggtaacccaaggtacttcccggggaggctagagtatttgcccggaaaca

SEQ ID NO: 37609 - DNA, 295 bp, Zea Mays
agaatctcgtcccgagattaaaagtctagggcaagtaatggaaaaggaaacgcgacataattttattttcttatttttggtacaagacaggggtggtatggggttcattcctcttattacaaaaaatgtacacatcttacaatttacacgaagctaaaaagtctaggaaattcttatttaaaaagtcttgagtttcccaagtagcttcatcttctgtatgttggttccactgtatcttgtaaaacttgagagttttccttcgggtaattctgtccttttgatccaagactcgaat

SEQ ID NO: 37610 - DNA, 296 bp, Zea Mays
cacagttccagtaatgcacatcggtgcaacgctagtggattggccatcttgcacgtgacgacaaccaccgttggctcatgctccccacacgctctcctatttaagtcgttcggttctctcccaaaaaccctacccctctcaaccaccaccaagcttttcctccatcaatcgaacctccctccttgtcgctcctagttgctgtcggccactcgtcgagtttcccctcaatgtcttttgctggtccaagcaccctagcccccgtctcctccccactaattgagccttcaccactttcc

SEQ ID NO: 37611 - DNA, 422 bp, Zea Mays
ggtgacggtgaattcctcaccatcgatcatgcgccgccggggatcctcctgacaccgtggatgggtacattcgcgccatctctctggtgagaacccctcccctatgttcgtcgtgttattctttaagcatatcgtgccttggattagggtttatggctcggcagcgtagcaacaccgctctccggcgaggccgccaccacgtccagcaggcaacacagtcgtgggtgtcgtcgggggagggagatggaactcgggtcattgatatcacgacgtacaaccttgattagaagttgcaataccccttcccgtataaaatctcaatcattgatacagatattgacgcgtaggattagatcagggcgtgggagattttggaccgtggatctgagatccaagggccaagataggaaactggttcactt

SEQ ID NO: 37612 - DNA, 322 bp, Zea Mays
caaggaaacgcaaaacaccgctcggtgtgttctccccaaacagaacaaacctagcatgcctattgttgggatggcgccagatgggctagggttttactcttctcattttgccaaaccgttatccaacaaaccaaatcgcagttttattggtttggttaaaatcgttgagggtttgatctcggccgaggatcttgagaaggatttcggttttcatttcccctggggacgtacttggaaagctaccaagtgtcattctggtttcctcatgcaatttccctctcaagagaggttggatgagatgattaatttcccagaaatgaaa

SEQ ID NO: 37613 - DNA, 550 bp, Zea Mays
cacagggagccgagctccagcgagctagactggtcggagggagccaagaccggtgctcccgagtgactgacaccgaattgaacccctcccgagcatttcccccaacttaatttcaagaatggcgacctagtttgctctggccacggtgaccgcgcatcccgggaacaattcaaagtgttcccgatgatctacttcggtttagtacaattggttgggccgatgagttataggaacacacaaggatgctggaacaagatcaaagacaacatgatcggacctgtggagagctgcccacggcgagcttggttttgcggcgttcttcgaccgatttggaggtaatcccaaattagggagctgtgggaaacgatcggagctgagagttggtttactggatgcacaattacctagcggaacatgctgaggctccaatttataggatgctcaagcagtggtgatcaatttgaccgaatcgcgttggcggccggaggggaaaaggggctctggcgattgaaacaggtggctttcaccgtggcaagtactccagtgatca

SEQ ID NO: 37614 - DNA, 415 bp, Zea Mays
gtgaaactcttcttctctttcccaagttgcttcatcttcgccatggtgatcccattgaactttgcatatctttataaccttattcctcgtgacacgagtcaaagtatccaaaatcttgatggggtactctgcataagttagatcatcctgaacactaaggtcctccattggcaactgctcttcaggtaccctgaggcatttcttcagctgagatacatgaaaaacatcatgaacatccgcaagatgatccggtaactccaattgatatgccacctctcccactcgcttcaagattaagaaggttccaataaagcgaggggacaactttcctttgactttgaatcttctcataccccggagtggtgacaccttcaaatagacataatctccctccttaaactcaagcagtctcctc

SEQ ID NO: 37615 - DNA, 441 bp, Zea Mays
cgacagtggatcaaactcgccatcataagatggaaagttcaatttcggctgatgcccctcaccactgttgtgcctattgcgaaatagcagctcgcggtcatagccaatgtcgtggtagccgtcgtgtgtgcatccgaagacatcgttgtggcgatgggcgcctcggcctgcgtcacgttgattgcatcgtgtccgtctccccaggggcgcgctaaaagcgtcatagttgcagtcgccgtcgtccaagtcaacctcatcaatgtcccatgttgttggtctgcattgctgggatgcgcgcagtgggtcaacagtctacttttcggcctagttctctagccacgctagccacacatcatgggattccatgcggtgattgagtgtttccatctgaccgaagatcttgattccgaggttgttcagtgatgtcacttggttgacgaa

SEQ ID NO: 37616 - DNA, 304 bp, Zea Mays
atttaggggaaatgggaaattgggacgttacggtgaatgatcaggcacgagagctggtgcactgggtgtgtaataacctagcggagctcacgtgggcatcaatttatagagagcaacggcggtggcgtctaatttggagaaggcacgctgtcgaccagagagaggggaaatcaccgggaagcgctaacgtggctattactgaggcaaggctcctgaggatggacagactccctattacggttcactgcgatgtggtaatgctcctaggcacgtggcgcaggtacgaagatggcgaactccggcg

SEQ ID NO: 37617 - DNA, 718 bp, Zea Mays
gtgagctactgtaaacacggccaactatggtatcgtaaacggttcgttggtccgcattcaactgtgtaaccaaggaatcagcgtgcatcgacaacattaatggctcagggtcaatttcatcattaatcaatctgtcctcatccacaaaagcgcattggacatctatttttggcagaccgtagtcatttatgttcccgccactattagcaaaggcatctgagagtttgtgtatcaggagggacatgagttgttcctgcggtatgttgtagttaggatttcccaatgtatctctaagttgtcgaccaatgtcatctgtaaaagatagccagtatgtatcaaataatgcacgcacgttaccaacagggcagaacataacaacggtcacaaaaagctgtctaagctggtgcgacgacgcagatatgatcgcctcttcaaacaacagcttccactcattatcgctctcaagcaacccacgcgcctcgcacgcatcacgaaatgtgtcatacacttgaccgttgtacgtcctgatatcaacatagcttgtcgaacccttaactatcatcaacagcatgcgtaagtaatatagttcgccagcagtaggatgtacatagtacatgcggccaatttttgtgcagcgagacctcaacttccaacattggggctgaggcatcccatgtccatttctttgggaagtcgcaatacgttaagcatctagctt

SEQ ID NO: 37618 - DNA, 689 bp, Zea Mays
agagaaggaacagagctcaaggaaagcgggcggagtgagagagaaccacgtgggacctgaccttcgtcgccgccatgggatatggccacgacgtctccctgttcagagtatgggaggggtggtccgcgacgtcacggtggcatggttgcagaaactcaccggcggtgatgaaggtgcaccattgctcggccggcctatgtctcaatcaccggtaagggcacgttcctgtagttcgcttcgctaagcgcagtttctgctcacgtcggcggtagcagaggagaacaacaaaagctggggcgatggtccgccagcatcaccgggtggatggggctccgctggagcacacaccgtgagagatgggagagagaaaaggaggcaagggcgtctcgaggaagaagaagaaggcacgaccgtcgatctggaatcagacgacactgatatgggctggcgtaccgtttcggctaggtcagatcgtggtcgtcgatcatggattgaatggttgggagcttagttagatcagatcgactatggaccgttggattgggatctgatgatcccggttgcgtgccggttcattatgcgagccaatttaatcgtgggcgtagaatccggatcggacgtcccatatccaacaataccatgggttttcacagaattggacacgccatcctgtgcggggtgaatatgag

SEQ ID NO: 37619 - DNA, 462 bp, Zea Mays
aattatgtttaatcagttgccgtcgatgctaggatggatggacacaccgtggttgtcgtggcgcaagtaacatggggctgagcgcaccctgtgaggactgtctcgattcctttcgttgtggtggctcagtttgggcagtagggggcggcggcgccagtaacgtcggctggcttgtttcccgtatggtcgacgccggttaaaaaaagagatcgctacctatccagcccagctgtccgtgggcgtcaaactgcagccacgttccttggcttgcttaaccaggagctggcaccatcgtgcccagcagctcgtctcatcgcttgtctctttgtctgctgaccgtcgttgttacgtcgttcctgctcgacctccgactcggcgtaacaccaagaagtggtttttgaagagaagccctgctgcagtgcttattgtttagtggttgggttccatccaactcattatcgc

SEQ ID NO: 37620 - DNA, 566 bp, Zea Mays
cgcgaccccctcccccatctctcctaccgaacctcgttgagctgcgccgtccggctcatctcaatctgtgtgccgctttgatcacggatgcagacacgggtctcgccaggtgagttactgcctacttcaagggctagatttggtgctggttcggtccgctccggggatgtagatgtggtttactgggttgtcgattatgggcaagcgttttccacatgaattttgctgcagctagcgtgctagtatattggtgcaacctgtgtccaggtatcaatgtgcgggctgggatctgcagtaaaattcaccaaaaggcgacccgttgttggtgttgatgattaagtaacttagagctttccttaaattagggttttggatttctcgtgtttcactggcaaacagtagaatatgcccttcacaaattagtttacttggcgtgggattgaatgagtcaatttcatttttgcccctttgttcagtttactagggttttggattatgtttctcttgaaaggagttgattatatattccatggtgtacttttgctgagtgggattgcgaaaatcag

SEQ ID NO: 37621 - DNA, 392 bp, Zea Mays
ccgtaatcgagggtccgagtagtgcgtacaggggtccggtgctccctcgtggaggtccggtccaactaatacatcctgggatgtaccatcttttcttgccacgtggtgccccttgaaccgctcatgtggtggggttgggtgttgttcaccgttcggctagggaacgtcgtacgggcaccgtgtcttcatactatagtagggggtacccctgattcagggtaccgacagtggcccccgggcccgcctcaggggtggatacaagcctgcaggtggggccaaagtctaattggcgattggctcgctgcccctgcacgcccgttgatgcaattactgttggtccgcccatggtcacgccgactgccatgcctgtccccgcggctgattgacccgtg

SEQ ID NO: 37622 - DNA, 274 bp, Zea Mays
ccgcctcgtgccacgatcagggccgctgcgggggaaattggttgtgtggcgtttgcgtgccgtggatggcattgggagtcaagggctagcacttgatcgtctggaaggcatccgtagcatcacttagccggagggggcctcggcatcactagaatctctcgctggaataccaacatcatcgtggagcagtctggccgcggcgatgccacctcccatcgtcggtgtgtgcttctgcacacaattcaaggtaagatcgactacctcgtaatgccct

SEQ ID NO: 37623 - DNA, 450 bp, Zea Mays
gctctgatccgtccgatcgaaccccccaatggcccagatcaaatcgaccagggagaaggttggtttctaatccgaccgttcatgtcgcatcaaacggcccgcggcactcccacctccgagcagagccttcacggcggtgccgcccgaagcacggcagcgcatggccggaccgcccgctaatcctcatcgccgggccctaaagcttaatctgtgcctcccaacatgatgcccagtgaaaagcggagaggatggtgtaccgtttacctcgaatccgagcggtgacctcactgtccacacggctaggcggttctacggcggaggttgaagtgcggtgaggaattgaggccgtcccgaggatcaatcccgccgaacactaacagagacgtcctcctggtgactcggtgaagccccacgacctttccccaagaccccaacggcgacgacgtcgag

SEQ ID NO: 37624 - DNA, 506 bp, Zea Mays
cgggccgctgtagcacgctgaagatcaatcaatcgaggatcggcagccagtggtcgcacctcggtctcatctcgctcccgaaagcgggcaggtgggatgggtggagcggaaaagggagcgggaggaggagcagtggaagcaggagtggtggaggtggtaggtatggttgaggtggtggatggcgcaggagtgactggagcgggcgaagtggtaggtggagtggtagcagtggcgggagtagaaggtgcggaggagcaaggccgagaggcgagttgacgaactctgtatgcaatctcatcggatgaaatctgcagctgaccacctctctgtgtctgctcagctactgctagagctgctcgggctgctctatccaaacgctgcttcttacggccttcctgctgctccaaatagacggtcttccccttgacctgcctgaaggggcgaggagggtcctcgccgtctcctccccctggcgccgacacattcttcgtgcgcaccatcctgac

SEQ ID NO: 37625 - DNA, 391 bp, Zea Mays
aacttggttgaaaaaaaaattgacatatgcatagtagtaactctctcttcccctagcagatggcttcggataaaaccacgcctaccgcctccgagattggagcagggtttcccctaggagctgaaggagaagccggtggagaagggagtgagacccacctccccgcacctccggagctgccattagatttagcccaagttctagccaaccaaacccgactcattgaagtcctcactagaagtctggaaaatcagcgcccgaatggtggaagaccacaggacaggatgggagattttcttaggctcaagcctcccacattcgctggatccagcaatcccctcgatgctgatgactggctgcacacgataaaaaggaagttagaagccatcgg

SEQ ID NO: 37626 - DNA, 328 bp, Zea Mays
aacgcacgtgataattcaaaatggaataatgcgggtaaccaatcatatgtcatgtgcgcccgccgctacaccaccgatcccaattattagctagtagtagccgtttcgcacgtcggatactatttttgaaatggctatcgaggagtaggtaggatttaggggcggaaaggaaaggaaaggttgctgcgtgcctcaaaacgattgtcaagcggacggtttgtttgtttgtataccacatgcatgctggggctggccatttgcagcagcaccaagtaaactctgacgaccattcaactgcacaccaaaggatacgggaacagactagcag

SEQ ID NO: 37627 - DNA, 379 bp, Zea Mays
gtgaaaggtgtcaaacttgagctgtttaggaaaagtctagagaaaatgagagaagtcatccaggatgactagatagtgccgataaccgaagatgctggacatgggatgtcctaaggtcatagtggatgaagtcaaaggggtgagtaacttgggacatagaagaatagatgggtaagcaagtatgatgcccaatgtggcagtcatggcaaagcgagattgtgtcaccacgagggcaaggaatggccaaggtggctgaaagtcgagagaggacgtcatggtagggatggtcaagacaacggggccaagttgaggcaggggcagtggacgcacgagcgcagggttggacaaaatgggcggaggaaggtggggtggggaaaag

SEQ ID NO: 37628 - DNA, 392 bp, Zea Mays
ggctgaaggggatgagcctccaaagtcagccagactcggcaacgaggtacccgatgctcctcatacaactgcaccgtgtacaaagggggcgtagggtaaccggcggagttaagcacttcccacaagatggaaggaaagccatcgtgagaaaggaagtcagagctgaaacgagtgtctcctccactcgtgggggtgggtgaattcatctgcggaagggtatcaaaggtaaagattatggtggaaggaagaaaaataaaagagcctggatggttttaaaaggaagcaggttagctcaagttttaattccttttagcttttataatgcatgcatgctggaagtaacgtctcctctccgaatataagggtgcttcaaggcatcctttaaaattcta

SEQ ID NO: 37629 - DNA, 449 bp, Zea Mays
gcttcctttttctagtaaagattaaagccagaacgacagccttggggctgcgccatgtctagcctcgttgaccgccctctcccatgaagttcaatatcaaaggcaaaagctaagaatgcaataattcctatggtgtcatttgatagcttgctatggaacaagaagcaagaaaagtacaatgagcacaagaaagccaagaaagactcaggttacgttgtgattgtcaccataagattatgatatgtgggcttactgtaatgtgtgaacacttgtttgtatttgattcaccatcctaaaatgaggactaaactttagtcccagcaaattttatttaaaagacctactttagttacctgactacatgagatatgtattactgtaagaatctatgaacactacgtgagatatcagcatgtgccaactgccaacccttcatgtacgaatttgtg

SEQ ID NO: 37630 - DNA, 585 bp, Zea Mays
ccggggggcgtcgtgtttccagaagagaagtcttggcgtcctgtgggtgacatgaagatgcactcggttgttgacttgggcttgttgttttcccgctgagggccgagggtgaggctgaggggttagccatacgcccgagcccctaggggaggggatgccatatcgtagttgttgtaacggggcttcagtatgggtaaaagcctgcttacgggatgcgtcagtgtccctgtggtgggtgacgttgggattcctttgctcctttgggggcttttattttgtaccgtcgttggtgtgataggttcaatttgatctttggccgatctgttggaaccttcagcgtggtttgcgagggcagcccctgagcctttgcgtggagcaaaaggacggtcaagaggtgccttgacttttgatttgtacgccccttcgtcgcctctccgtgaggaggaacacgtcatgctaccctcgatgggcgacaagcatgatgtttccattgagcttttatcaggtaatccaagcgggggtccgagctcctttcaataagagtgggctagtagtccagagacatgccctaaaaagtacctgcgg

SEQ ID NO: 37631 - DNA, 544 bp, Zea Mays
actttgagtaccccgactacgagcgactagacaaggatgccgaagggcagaagagaaagagagtggccagtgttctgaataaagaagctactaaatcgatgaaagatgatgaagaaaaattggaaaagaaaaaggtgaagcctgagccgaagacagatgcttcgaagaagagaaaagctacagctccgaagcagaaggcaactgatatagaagaagaaactgctgcaacaccttctgccaccgacgtggaggaaatcttaaaggtaattactgaatatttgcctatcaatctaagtccactggggccgcatctgacgaagctttttcagaaggaaaaggagccctcgataacgaagaagacagctgggccgaaaaaacgaagaattgttactgtgatagaagttattgaagggacaccactgcaagcttcggctccgaaggcaccagttgttgagagtacaacagcgaccgaaactgcacctgccgaagctgcagctgccgaagctgccacggtcgaagatgtacatttagaaagcacaatttc

SEQ ID NO: 37632 - DNA, 281 bp, Zea Mays
tttgggagctcttgggctagtcctaagcttcattcaatacattgtttcattgctgatgttacaacctaccaatttcgagctattgtagttagggatgcaaagcaggtcgaccaaaacctactccactcatctatttacctaataatatatagatgtactcattttgtgtatagggtgggcagataaaatgaataaatgagtcgaaccaaacaaacaaattgcatccctgattgcagcactattttcattctgtttatcttagctgttcgattccaccagaa

SEQ ID NO: 37633 - DNA, 370 bp, Zea Mays
gcaattgttcatcggcgcagagatttcgccgccaggacaaagctctctgtggccagggtctcctactccacggttgcaggtaatgcccctccccgacggctcgaattaataatagcaccatgtaatagctactagagccgggattgggtcacgggggaggttggaatgtctcatcggagtaggctttcacataatcaccgcccaacaccactgtcggtgcaattttggtctcggtccgcggcattgatcccgcgatctcaatcgcctagtcgcgctcttcgtatttgatccctgcgcgtcgaagttcgggcttcggggagggatttttgtgaccgctggtcacggcgctgtcgtaggtgggcaggcgtcg

SEQ ID NO: 37634 - DNA, 327 bp, Zea Mays
gagggctcttttgtaactgtttcacggctgaaagggtgtccttaattcccagccgcccgatctaaaaccaacgacacagattagatccccaagactctgaatcggtatgcatccctatccacaggatctgaaagcaacggtcctgattctattacggctacacctcatcacgcccacccgatctcacatcaacgcacagatctgagcaccgcagagatgcaacaagttttaatctcagccctacgctagtcattcaatccagcgaacaagtatgctggatttgatctcatccaccggtcatgcatccgacgactattctacccatca

SEQ ID NO: 37635 - DNA, 362 bp, Zea Mays
ctgaattttgatggagtgccccctaggccttatatactcaaccatggggcgttacatgcgggtatgataactatgtgctcctaagtaatagtgaaccgactgaacttatctccctattatcctgccgacttatcctcgttcagttcgatgtctgagggcgctgcgcggaagagtcagatcaatgctgcggataacgtttaaatccattaagccgcctgggctcgagttgatccaatcttgcgtcgatccattctgccagtgattcctcccctggcccacgaaggggtggccttgcgaaataatgggcccagagtctttcgcgaggccttccagccttctagtggacccgggggataactgtc

SEQ ID NO: 37636 - DNA, 539 bp, Zea Mays
gtaccttcaaaccgcgatgaccagaaataggtacgcggaaaactaacacggtaaaggcagctggcccactggtcagatctgatccgaccttttaccaattattgtctaaatatgtaaaaaaagaaggccgacccaagtgaccggccagcaaagcgacctcgctcacccactcaagagcgacaacaggtaagaccgattggaccgcctcaccagtcgaaaagaatgataggtcattatgtccaattacgacccaatatacctgcatggacacctccacccccatatccacatgtgccatatcaatatacatacatgccactgccatatgtcccaaatcaaatgtggggtatgcaaccatactcatttgggatgccccagtaccccacttggggggcaccccaaacatctgtattcaacagggtgacacctccagtacaagaccgattaggcaccactccatccagtcatcaggcccaggcccaacgagattgtcggaccactcggccgcaaaaggccgaccaatccggcagggggcatat

SEQ ID NO: 37637 - DNA, 356 bp, Zea Mays
gtttcaattctgctaactctgtgggggccatgcggtatggtctctttgcgatgggcgcagtgccaggaatgagatctatatagaactccactcctctttctggtggcattccaggcaactcctcctgaaatacatccatgaactcttctattacggatatgttttcagctgccagattaaacatcattggatcattggtgggcggttgggcctggcaggaaactgcttttccttggcggtcggtgagaaggacggtcttacttgcgtagcttatgatacccttgtgcttagttagccaatccattcctaggatcacatcaatcccttgggatggcaagacggttaagtctgccagg

SEQ ID NO: 37638 - DNA, 387 bp, Zea Mays
aaaaattatgttctggcgcaaaagatgatcatatagggaaggcaacacgtaaatttagcagttcaatgagtttgacaattaaaactggcacaaagcagtgttttttgttttctgttggcaaagaaaaatacagcaccactgatagcaggtaaattgtaaatacaatatcatagtcactttcttaacaattccccttgagactatcgtaaggcctctaattttcctacatattgcattactctggtgttgtgagctgctgatttgtttgctgtaactgtaagaattatcactattgataaataactatgtgtgcatttgtcatgcatctatttcagctgaaattaagaaataagaagtttgattttttggtagtgccctgtatgaaac

SEQ ID NO: 37639 - DNA, 436 bp, Zea Mays
gttgtctgtctgttctttcatacctcttcccgttcgagtctcaggttatatatttcttattacaagcagcccatcaggcctacacgacccactccggcccaaatacttttacactacgacgctttactcgttgtggacgcggcgctgctccctcctcagactcgccatctgcatctctgtccactgctctgctgtcctggacgccggagctgacattcccccgctcttgaaacgccgcttgtccccaagccggcgcgtgtggaaatcggtcttgtaatgctttcaagacttcccaggttgctaaggattcatccatgccggaccatgtcaccttgacttgcgccactgtcgctccgcccttttggatcagccgactttgtaacactcgaagaggaatctgtagagcgtcagtatgagcgggaagtgaggcagccac

SEQ ID NO: 37640 - DNA, 386 bp, Zea Mays
cgacaacagtcagggataagatccttagtccctagagcccatcagtcagcaaggatgctaggaagaggtctcttgcaaccaaggaccatcgactatcaggaggagggaggaaatgtttacccttgaagcacccactccaaacgaaccctgaggcactgatccagggttcgggcatggcgaagctatacaaggggccaggcaaactaaagggaaaccactcgagtggatccctcactcggtccgagattcacccaccgtaagtgcctagtcgcattaactacgcctggcaccgagccacggtagaagcatcgggccaccacccacccatgacctacaagcccctcgagctacagagcactcatgaactacgaacccctcgaactgtg

SEQ ID NO: 37641 - DNA, 544 bp, Zea Mays
agacagagtcccccatagcttcaaagctagccaaatctaggatgctgcttgccaaaatatgtgcgccgaaagacaaggcctgactgctgaagtttttgttgctgactttgtcttcaagaacatccagcctctgaaagatagagtgtacccagcttatttgtacactagggtcaacgaccctacccgaattaccaatagacggattcctgatgaggacctgctgagccggattgacttgatgttaaggggcaaggtttcgaatgctggtgctccctatcttattctgtctggaatctacctccactgagtgccttttctgaattcatttccaatcctcctaatcaagatggcagtccgggtcatagagtgtgaccctcactggatgacatcgatgctttcatcgctccattccggaatcttcctgaagcagagaggcagactcatttccagatgtcgaccagtgctgatgaggctgaggtaaatgctgttctcaacatgctagctagagaatcgtttgactctgcccatactgagtagatagctg

SEQ ID NO: 37642 - DNA, 291 bp, Zea Mays
tgctgttgaattatgtctcttgtgccaatgaaagcacagacattgctaaaagccttctaacacgcttcggcatcacttccagtaaccactttcggccttcaaaggccgaagcgagaccagatggggcactggataatttccttaatatcctccctctcaatcagattattcttaacataaaaccattcctccatccaggccccgtgccatctttttcggtatgtcggaaccggatagcttgcattagagcgagcaatgaatccgtaacaaccgaagttgttgtgatactgc

SEQ ID NO: 37643 - DNA, 323 bp, Zea Mays
caacggcgtgtcggacacataactgtgaactgggtaactgggatggaggatcaagagaacaaatgataggtttataaacaatcctctgacgtcgactactgctacttgaggattcttcagcaaatttctttctcttagactcttgatgaaggcgaatcttatcatcacccagaatggcctgactgactacatcattataactttcagccacattgggtgccatcaagcgttggagcttcatattaaggccacgcatgaaaaagaacttcttcgtggcttcagtattgacataatctgcagcatactgagataactgattaaac

SEQ ID NO: 37644 - DNA, 302 bp, Zea Mays
tttttcccgaaaacggtaacaacacgtgataacggcgtcgatatatcgataatttcgaaagcgagactattcgatcgaaagcacatcgattacggtcgaaaattatcaaatcgatatttcaaaaatgaaaaacatatcaaactatataacttcgctaatagcataatattatgatagatatcatacataaagatagagatgactaccttcctggacacatacatcatagtggcatacactaatagacacatagtcactcacattataatattacatagacagtagaacccatcttagaatcc

SEQ ID NO: 37645 - DNA, 412 bp, Zea Mays
accggaccatccacccttgctgcacgatttgcagcccgatgacgttgtacatggcgacagggcaccgtggtcggacgggggtgaaggccttgtggtggaggagccctagcttgggcttcgagtcgggttcgagcgggtctagcagttgggctcaaaccatcctaattgtttatttgagtggtcaccttatgccctgtttgacacatcttatttcacatcttcacatacttaagtagaagttgtaccaaacaggacgcatctgaagtaacttatcaattcagttgcttctcaaaatgaactaaaagcagaaactgctttcactagtttcttagataagctgcgtttccaataatcagcagttgtgccaaacagcccccttgccattcagcccaagcttatccatccctctcca

SEQ ID NO: 37646 - DNA, 281 bp, Zea Mays
ggctgagccatgttgtttttgggaagtcaactgtcaaacaaggtcaaatcgaagcgatgaagggcaaataatttcatgatgtttctatagtgagagtcggagggtaaagcatcattccctttatcgaagctgacaaggtggtggtctttaagagcttcatgaaagttgggcttcgatttccactccacaagatgttggttgaggttttgaagacattcgagatataccttcatcaacttaccctcgaagctcttatcaaagtggggggttttatatgggct

SEQ ID NO: 37647 - DNA, 402 bp, Zea Mays
gttggctttgcaaaaagaaacacaggcaagtatgcaggtcgaatatattagtactgttacacattgtcatgtcgtgtctgattacggcaacttattctaagagaggtcaaaaggagtgtcgcttgcgaagttggtacactagagactgatgttgtttcattgtttgtcctttgatgatggggtcgaagaatgatgcagcctagctttgttatctctgtcacggaagccaaattgttaatgccccaaagcctagcatacgcccgctgaatgttcagcagatgaaagtggcgtttggttagaaaattgactagaggtgtacaattattgggtgcatataggtcaagatgcttgctatattcctcttgtatctaaggacagtatgtaaggaaaatgcaattttac

SEQ ID NO: 37648 - DNA, 451 bp, Zea Mays
cattgccccttctgtctgatccatgtctaacccctcccctgcgcagactgtagttgccgccgccatgattcctcgttgtccagccaaccagagctccccgcatgtcgtgctaagctgtcccgagcaccgcccctgggtaaggaacctcccctgcccttcttctgcactaattttgtcttagcgtggggaattttggctcgctggagctgcctctcatcggaccatcgtgtcttcaaggcattcggccagtacagcccttccccgtgcccaatcctaggcatagagtactcgtaccccctcactgaagctcatgttggcctcggtgcatcggattgtcccccattgcgacgggtattgctcaccggagtgttctctggtcgcccaaggtccccctccatcgtctgcccgcttcggtttcgtcttcgcgacccaggcttcgccatagtgttcg

SEQ ID NO: 37649 - DNA, 396 bp, Zea Mays
acaatatacaagatttacatttttctgttgctccattcggagtccaaaactctcaaggcagcatctagatgatggaaggtatacatgtccaacccggacccgaaaggcctagatttagcccgtcaagagcctggccgggcttatgctactatagtgtcacgtcgtgccggcacgggtctagcccgttctaatgtagaggcatggacacggcccattaacgaagttaagagctcccctcgttcttcccccatatgcgcgcctactcgtctcctcgcctgattcgttgattcctaaccctagcttcccttttcttcggttctccccatcctccaccaccgcatcacgccgactcattggccgttgcacatcgccatcgtcactactggtggatctccc

SEQ ID NO: 37650 - DNA, 716 bp, Zea Mays
gcggccaatatttacaataagtctagggtcttctacgtaaagatctgggctcattcgcaattactttgcacacgccaaggatggcgggttcattctggcaaagtctggggactcttttgtaagatagccgtagcgaaggggtatctctcgatattaaccgtccgattagaaatcaacgtcgaggatcacttaatatttttaaacgaaccggtacgctatatgaactattggatcagggatccacggttcagatgtttaaaacaccagatcaacgcggggtcgctcatcccacgatcaacggccgtgacgagtcctagccgaactggtatctacttctaatctggaccgttggattcggatcacgcggccacggtatcatcttctcccaccagtcaaactcgcagtcaggaacggtgctcagcggcggcgccatcaccggcaacacggtcggtcaaccctcgctgccccaactaacacatgatatcgcgaaaaacaacgaggaaggtaaggaggatctgatggtggtcaacttacgggggatcgagcagtgttgaactcagtccacggcacgacggcaaggggaaaggagctcgccaccgacgaccacgccaagtccaccggtcggccactggcctgctcctgcgtagtcctcccaaacccccgagccaccgcgcaagcgtagattgcaagaggcggcgccaaattctctctcctac

SEQ ID NO: 37651 - DNA, 920 bp, Zea Mays
cactgaaagccattcaagcttggagtcacgtaagctgactactgaagcagcggacaaaagatgtgtgggaatccggtggtgttagcgaggtgtgcattcaaggtgcttgtgaaggaaggacataagcagcagacaaagcaaatgcccatccgggggggactgccccactggtgccagagcaacagaatgctgctgagctcgaggagaagcagaacatgaagcggaaaattcttggatacaacgaaaggtaggaagaagaagaagaactgaacggagcgttcgccaggaagtgggaacggctggtgtcaaggaggaaggactgacgagcaccctgctggtcgcgttatctgggacggcccaaacagaggtggtggtgtacagtgcagcacagcggcactacttgggttgctggtgggttcttccgtggctatggaagggaggtgagctgatgccactgcgttcatggtttggtttggtaatggtttgccccaggaaagagccacctcagtatcgttccatgaacgtatttgcatcaggagttgtgcgacgtgagaacggtttgcatcaggagttggctcgtggtatgtggaactagtttgtttatgttgctatgcttgtacacaggaccgttttcactactacctcagatcaggtaatctcgtatccactagctcctcaaccgatgccttgcagtgcaaccctggacccggcgaccttgaacagttagttgactctcatgtttgctctgtcagatgtcaggatgcttatggcgcgcatgatctgagcacgagaattttcgtacaattttcttcttcagatgtaaagtctctccttcgctgccctgcttactcatattatttacgctgcacatgctcctggtgcctcctattaccatgtttatgctttcaacactccatgat

SEQ ID NO: 37652 - DNA, 339 bp, Zea Mays
ggatagggaaaccataggcaggctcctatattgtaactcctaccactaatcaatgcatttgattcttctcttccaaatcctctaatatggtatcaaagctagccttctcttctctccctagccgctggcctccttgggtagttgcccccatgtctgatgcccctcttcttgccggtgacccctctccttattccccctcctttcctctcctcggccggtcatgggccttgatcgttggtgcagcacctgtctttgtgcttccctagggatagccgcctctagaggctagggcccctggcatgccgttgttgggtatggaccctgctttgctggtgggtg

SEQ ID NO: 37653 - DNA, 332 bp, Zea Mays
ctttttatgacacgttgccttcttgccttcgaactttctgccagttcgagcgctctgctagttcgtctcttcgtgcacccatggtttcctttccccgccgctcgatctatcggagccgtgtcaagggtcgagagaggaaatgattcctccccctgagacaatgtcagggtggcggctggaggaggatggtgaggcacctacgccgtaggatggcgaggtggtcttgcttgcccccttatacaagcgtggctttgggctgtccctgcacctgttcgtgcgggggttgctcttctaatatgggctacagatctagaatctccatcccaaataga

SEQ ID NO: 37654 - DNA, 382 bp, Zea Mays
gagctcacagtcgacaacgacaaacagtttgacagccaggacttcagggacttctgcttctccatcggcaccaagcccgccttcgcctcggtgtaccacccgcaatccaacggcgtcgtcgagcgcgccaatggcaagattttcactgccatcaagaaaaggcttctcaacgacaagaagggtaaatgggccgactagctacctgaagtagtctgggccctaaacacgaccgaatgccgggcaaccggattcacaccttttcatctattatatggatcggaagccatgacgccgcaggagataaagcatgggtcgccctgaacaagcacatcagtagtccccgacgtaggtgaaccaacgtctaaagacctcatcgacggag

SEQ ID NO: 37655 - DNA, 368 bp, Zea Mays
gctggagatagcttaaaaagagtgaaaatgctattagtacgaagatgtaagaaagtggttttggaaagatgcaatggcattagtggtgtaagaagactggaatttcgaaaaaatgaatcaatatatgtgttatttttcaccctgtttcaattggtacggtcataatcatgctagtaataccatgaggcctcatctgggaacacggaaacaaccgatttacacgggacaagtagcccataggcaaaacatatctaggaggcttgtgtatgggtttcctgacccgtgttccaccagttttgacgtggtagggttccactcattcgaaggtcagttttgtgttccttgtttctctcttgtcctcaccttcg

SEQ ID NO: 37656 - DNA, 953 bp, Zea Mays
cgagcacagtgcagaggtcagaccgtcagagggagttgctggtgcagtggtgcgggggagatcatcagatcagaggggtgtctccatggccgacaatgaggggaccctggacgccgtcctcaaggaggccgtcgacttggtaactgctggccttcctcttgttggggttgggacggttcttggtgggacaacgctgccgttgggcatatttgctggttcttggatttcttggttattgcgttggtgtacaatccttctgttatactatgttctcggattcctgcgttagtacttcgttgcttactcatgggttgcatggaaatgtaagaggcttgggttgctagtccttgttctgctggtgcgctgggaggcagaatcgggatgatttctacctccgttcttttctatttaccgctcgctagtttatttttgaactaaactaccacaaataaataaggaggaagtatatgtgaatatcattatcagaattctaggtgacgaccctgtaataaggttctttattgctcttttccatgttcttgccacacattctgatcttgacatccttttgcttctatgaataagttagcatctttcttttctactctcttctgatcatgatatccctttgcttgatgattgttggcaatggcatctaccatcttgcttaattatttccgtcatcccatttttctatttggttaaataatctgcatgcaagttttgttctatcggcaatcgtaccttggacccttggtttggttggtagcaatagcgggttgcaaatgggcacttagcattatagtttctctcgtttattttgatgtgcgtcatggtgatcaaattgtctgcccttttccccagataacagaatttgttcgttttattacaattattttgtaggagaacatcccacttgaggaagtttttgagaatctgagatgcagtcgtgg

SEQ ID NO: 37657 - DNA, 446 bp, Zea Mays
tgggagggctgagaattcacaatctggaggtgttaggttggtctctaaatatgagatggttatggctacagaaaactcaaccgaattcacaataatatacaggttcatccctgtgcggcgaccatgtttgttgtgtcagttcggtcggtagttggtgatggagctgaaacgctattatggttggatcgatggctgcatggaaaatcttcagctgaatttgccccaaatctggtttcttcagtgcctaatcgtattcggaacatcagaactgttcaaggtgccttggctgataatcaatggctccacgatgttagaggtgttctgtccttgcaggccttctatgagttctttttgtgctgggacatgctgcaaggttttcatcttggccccggaattcatgaccagcatgtatgattcccttccgcatcaggtgcctactcttccaa

SEQ ID NO: 37658 - DNA, 381 bp, Zea Mays
caacgtttttggccaaaatcaaacatagcttcgtatccaaatagatcatatcatgggaaacctgagtacgagtgctcacactgtcatgctattttttggtatgctgaaagagtacgaaatcggcacggtgctacatctattgcatataacaattgctgtaaaggtggcaagatcagcatacctgcatatatgcctagacccgaacctctattttctcttgcaagatttgatggtgatacaacctcaaagagattcatcaaaagcataaggcaatacaattgtttatttgctttcacatcaatgggtgcacacatagataattccgtcaatgatggtcgtggtccaccactgtttaaaatatgtgggcaagtgcatcatcgg

SEQ ID NO: 37659 - DNA, 823 bp, Zea Mays
gtttctcaagagatcaccgagttggcgcctgctgtcagcgcacctagtgcttccggtgctgcaaggcgagccactgtgttgttgtctgtccgctccatgcacccctagaaaggcgcttgtagtggcgggcagtcagtcggtgcgtagccccgttgagatattcaatgatccggtcattggatcgcggaggtgtcgtgacactagcggggaaggtttattgagagtgctggcggtgggcgaccgcgtcgacgtcgctcttgtcgccggttatcgagctcaggtggccctcccccaccaccagctgactcccccaactccgacaatttcggcatagaggcaactcttaagtcaatgaatcctacacgtaaaagtggctcaattccctagttatcttaggagcttggaccatatggaagcatagaaatgattgtgtgttcaatatgaaagcactaagcttgccaacaattttagtcgtggttggagatgaattgtgccattggagcatggatggggcgaagggcttaaccatcctcacaaccgaggatgatgtaggtggatagtaggatgtgttttttggtcgccgtttagtcagaaattttcatggttgctcatgcttcttagactaccttagggcaaagattgtgggtgtggggtgtgtgttctcggttgtacacctttattttctccctcttttaatgaaatgatgcgaactctcctgcgtttttcgagaaaaaaatctctattagaagacccccgatgcatacttcatcgctcgacagacatcgatggtgctgaagacaacacatgtcacgttcttatcaag

SEQ ID NO: 37660 - DNA, 467 bp, Zea Mays
gtgtatttactctctcaccctcattgtaatgggcttggcccatctaactcaggctatatatcaatctcccaaccccttgagtgggttagggtttccattattctacatcggtcagccccatgcacacgatccttgctacgtcgacgcacctgacactgctccttagtgaaaagcaggcgcccaagctcatctgtcgtctccatgcagaagcggctctccgccacatggagccacccgacgagctcctccaacggcattgtcttgaggtcgcacaacatctcgatggatgccgcgacttgattgaacttcggtggaacgacgcgtacctcctccacctcctcgccgagctcgcgcatctccgagacgagggagcttagtctcatggcaaagtcgtccaccttctcaccatccttgaacttgatattctcaaagaccttgagcagcctttcggcgttggcctcccgaac

SEQ ID NO: 37661 - DNA, 489 bp, Zea Mays
atgttgagctcaagtcaaatgttgcttgactaacgcagtcatgactcctttctcctgaacccaatcttgtagagaaggcactggactgggagaagacaccttaatgccaaaatgtcggggcacataaccatagagcacctcaaactgggagaatcccaacaccgaatgccaactagagttgtaccaaaactacactaagtaaatccaatccacccatttactaggacaagcattcacaaagcatttcaataaagtatctattgattcacacgttctgtctgcccgtccaattgagggtgataagcggagctcatattgagagacacaccaacgagagaaaaaaaggatttccagagctggctagtaaagatttgatcccgataagaaattatagctctaagcattccatgcaacttataaacattctgcataaacatcttagccaccatagctgttgtgataagggtgctttaatggaataaaatagct

SEQ ID NO: 37662 - DNA, 288 bp, Zea Mays
ttatacgaaccgagtatttcaatatttatcctaagacaactaactccattacacacttgtatcacaaacctacttgacttacttgaagcgtctactcgaaattgtgagcacaatcatacactatacgcgacgcataatttaacgaacgcataatacgcatcgtcacgacccgacttataattatagagaaagcgacgactactttggcatgtcaccacctctctatataagccaaaacaatttctactatcgactaatagttctagtattaaacacattattacttcc

SEQ ID NO: 37663 - DNA, 420 bp, Zea Mays
ccaggacaagactcatcctggctcagtgaagatctatgagttgctgaatctaatagcaatagagatgaaaatgaaggatgatgctactattccagattacctcctgtgcacactgctagaatgatggttgcgcttgcacctgtagatcactcaacaaacaatttccatgaagctgttcgatcattttctcggagtgaatgtggacatagtattttccacacttagttctggccactgaagcactatccaaagcataatttaggctaatcaaattggaaactaaattaacaggtcaactcagttgtgagcagatacatcaggagatatatattttgcatattagaagcagcatttgctgcaaattctctgccgatagaagagatgtggaaatatttgatgcagatggcatttagattgctt

SEQ ID NO: 37664 - DNA, 366 bp, Zea Mays
agagtactgagccccgacatgtgggcccaggaacatagcggatgtagctactaatatcttctgctggagcaatcttcttgcgccctgacacccgagatctgcatagtctcggcgtgcagggggaagcttctcgcataagggatgagtacagtgcaccgcgcagcacgggtgtactgtttcgacaactgactggacaggtgcgccgtctacagggtggccctggcgccgccagccagcagaatggacaggatgcaataaatgtgatgtgggcacatcacctgtcagaagggtggacaggcggcgtgtcccctccgcaataaatgcggaggctgcgcggctcagagcccttacgtcatgctctgcccg

SEQ ID NO: 37665 - DNA, 457 bp, Zea Mays
ccgaagtagaattcagggtggtggctgggcatattggcactaaggatttagtacaggaatacttggcaaacagagctttcccaacctctagcggatggggaatgctaaagaagaaggaagaagggaaaaagtatgaacttgttcggctcccttaccacttcaaatttcagaagacatttaaagagccatgcactgaatggttagaattgatagaaacaatgtgcaacgagattcttgggaactatacgaagaaggaagaccagctgatgactgctgccttcggcactcggccggaacaaaggttgaaccatgttatggatgctcttaactttgagtatcctgactatgaaaggcttgacgaaggggtcggaggggtcaaaagaaaaagggttgttagtattctgagtaaggaagctacccgatctgtcaaggaggaccagaaagctttgaagaaata

SEQ ID NO: 37666 - DNA, 321 bp, Zea Mays
atctcgggaaggccgtcgtgggtgcaggtttgtttgcatagaaattttgttcatttcttcgatcaattttgcttgtcaaatcaatgttgcttttaagatttttttgcatgtgttggtaggagcagggtagttcagcaggaactatatggatcccttttccgattgttcagagcattttttggctcggtgtggttcatggcaagagcttcaagaggctataatttgtgaaaatgcgatttcgctcaatagtgaatcaatctggcaagcaattattagctattagttttaccagtcgtttgtcctacaaaatcttcatctgaa

SEQ ID NO: 37667 - DNA, 279 bp, Zea Mays
gaacagttgaccatgtgtgttatatgtgctttactcatgtgtctcctttttcactttatgtggaggccgacgcttctagccatgggcagacttgtcagtctaagtcagtcaaactgtttgctggagcaccggatcgtccgcgtgcaggtgctggaacgtttgcgatgctcgagttagggagctttgctcggttgctcgattgagtctgccccaacgtctccagacttgtaagtctttccgtcatgagctttctgagcaatccctcatgatatattcgac

SEQ ID NO: 37668 - DNA, 724 bp, Zea Mays
gcaagaatgttcttgttaagtaatctcgggtggaatggacatgccctttcaactctttgtatttatagacgcactggctgctatgaggatagtggcgatcgacgtggtgtgagttgctcacttcgctgtaacagcctggtcctgcgtaggcgtccatgtgcgctaactgcaatcccttctctgtgtaatcttctcttgacctactaagagcatgcataatgaacttaggcattgacatacgaacgcgttccaaaaaatggagctctttaaaaaattggtcctaacataaaagataaacatgaactaaacataaacggagctagctgatgaggtcagttaccgtgcgcgccatatatattcttttcagttttgccatatatttgtttttactacgactatttgtacgaacacaaggttgatatgtatcattttagtttagtttgttatgagtggttgtcgataagtgtagcgcctttggttaaatcgggtagactaataggggcatgatgttgttggtgcatcatatcacttgacttgtggtaataagcaggtatagagtccgatgacggtagccgatgatgaagatgaaggtcatgttcgttggtatcgatggatcgggagcggtgaaggacgagggctgagccttgatcgagggattggagtagatgggtgacttgccatgatggatgacatctagggacggatcatgtcgccgatgtggttg

SEQ ID NO: 37669 - DNA, 647 bp, Zea Mays
ggcgacgaccggcgcccccgagcggcggatatcacatcggacctaccccgagtgcttcccctaacctaattgcacaaatggtgagctatcaagctctgtccgcgtgaaccgatgggtggcggacagttgatcgcgttcccggtgtttggggagcccatagttcaaattggtggttcagcaagcatcgtaggcatgcgagaaagcttaaacgagagagagagcgatgagctaacctggaaagggctggccgcggtgaggtcgagtttcgggtggcggagaacgaaattgggggaatgagcaattctccggctatgggggctaatcggaggcgggagtgggggctatagcttcggtatgacctagcgcagctggccgagggctcaatttataggcggagcgagcggtggtcgcgaattttggacgagacacacggcggtcggaagtgaggaagaacggtggtgcagtgaacacgtgttcaccgccgtggcagtaactccgatggtcgacggggagtttagagggtgtcacggcgatgcgatggcgcggttaggacacgcggtggccaatggcgatggcacaacgacggtgagcactttacccgcaggcggtgagccaggggagatgaactacggctagccggagtggct

SEQ ID NO: 37670 - DNA, 325 bp, Zea Mays
accaattttaccgcggggatgtttgtcttcgaagtatcaatggttctttcattgttctgatcccgaagaaggataatgctagtttagtgggtgatttccgaccaatttcgcttctgaataatagtattaaaatcatcactaagctgctggccaatcgcttacaagcagtgatgacttcccttgttcacaaaaatcaatatggcttcatcaaaggaagaaccattcaggactgcttggcctgggcatatgaatatattcatctttgccatatctcaaaaaaagagattattgtgctcaaattggattttgaaaaggcctttgattc

SEQ ID NO: 37671 - DNA, 617 bp, Zea Mays
gggcgaaatcgctcgccggacttcggcttccgcggccgagccgccgcgcagcgaggacgaactccctcggagcctaatctcccggtatggcgccactactagtttcgcaattcactgctcttggcattgcgctagaaatcgggtagtagataacactggggaggcgagatttggtgtacgccggtgatcctccgtcgtgctccttgagcggcgccgccgtcgctagctgaggattgggggaaaacaccctggtcgtccgatcctcgttgaacggttctgattagaacgtgacttaccccttcgccgcgttgatctgtgtcgtcgatcccgtatcgtgtgcgtaggattagatcagggtgatttaaaatcgtgaccgtagatccaggcagctgcggctcagatcggatatcggtttaaaatgatatggatctaatctaggacatagatttccgatcggacggctctggcctgccgataccccttcggcttgcacgttttgcaaaagagcccttccagtattgataaatcaacccgccatccacaccagggattctctgagtcttaggaatatttgcaccgtagcccctgctattctctgttattgaggcccagtccat

SEQ ID NO: 37672 - DNA, 302 bp, Zea Mays
tcagcattgtagcagtatccaactattctcccatcttattccttagttcagtgcctgcctgtggacatgaagtcacatcttcatagccaccagctagatgtttgaaccttttaattcctcctagaattcttttgtcgcaaagcttacatgtcaacttatctcgctccttagggtctgcccaatatccataatcccatccaggatcatttgagttcaggaccttcatttttaatttttatcattcttgggatcatatgcagctggattctccacttgtgttgttgctgttggctgcagagcag

SEQ ID NO: 37673 - DNA, 366 bp, Zea Mays
agtcaaatagtttacggttggctcatttcttttcctccacatccaccaccactagaccatcgctcaataggggccgacgacgcactcgacgcctactctacactgtggtgcgttcacaatgtcgccttgtccaccactggcatcccccaagttttcagcgtcgaggaacacccatggcctaggccaagctacaccccatcgccacatctcgacgttggaaggccatcgattcgctagcgccgtcgtgccgaggtacgccccactgcccatgtgattggttgaccatctctattgctcctcctctctaattatacgttggaagtccgccgagtcgccagtgccgtcgcgccgaggtaccccctcgac

SEQ ID NO: 37674 - DNA, 295 bp, Zea Mays
aaacgatgttctttttcctgaaaaggcggtgaaagctttgcttcaccataatattgttagaagaaaattgacctactttataaggaaaccgggcctgaaaactatacaattagggtttaaacccgcacaacttgggtccacagactgcacaactaggggctacacaaccacatcctgaacatatttgatcagaagaccaaacattaatgtcgggtgccacaactcgctcaggaactcatcagtcatcactactcaagacgcaacccaagcaacaactcaaagccaaccgtttagg

SEQ ID NO: 37675 - DNA, 557 bp, Zea Mays
cgacaagtaaatttctatgtgcgcattctgagcttcggacggtgttctcggtgggtgcaaggtttatagtgattcgagcagaatgtccctacatctagccttcggtggctcgcactaccgatacctttgttgctcgatgctcatagtagggattataagtgggttacaagtagatgagagagggagggagggctcctaggtctcttatgtgtggatgggcctaaagacttcgggactagagtcctacactaagccttggcttcggcctctaggtcttcaagtctcattgggcgggtgcggttgcctttagtcaagtgtcttctattctgtgtgcctctcccattcatcgtgaccaccctcctccttttatgggccaaggtaggggtcggccttcggtggctcccttgaggagccacaatatcgtggtaaaaccgtgtgttttacctaggcagggccatgttgtccgtatgcgtcttgtcgcctggtcgtccctattcatgctcattatgatggacgacatgggcggtgtggggcctaggtgtcatcattactacctc

SEQ ID NO: 37676 - DNA, 325 bp, Zea Mays
gcagagaccgatggctgcgagtggagaccggaagctgatgttcggtgggtgggcggtggaggctagagctttgttggacttaggtctgcgtgatgcggtcgaggctgattggcggaagagggcggggatcgagaggacaacaggatgtggctgggattatcgaactggccagccatgggcgaatggcgaagctgaactgctgaaggtttattgtcacaacgacgggtgacgccatggcgacgtgtgagagactggctactgagggatgtcggctgcttggggtggactggtggagacgtggagttgtggtcttgtgagaattggg

SEQ ID NO: 37677 - DNA, 755 bp, Zea Mays
gtggaagagagcgactgttcaacacccatggaggacagtgtgattgtagtagagacgacgaggggaagcacaacatcatttgtaataaaaaaatcgaaagaacacaaggatggggtagaggaggatgcgaagggcagacctgttcgttgaagacgacatgacaggcgatgatgacaatgagtggcaaggttgaggtagtggtatcctttatgcgatgagggatagccgatgaagatacaagccatgtatcagggagcaagtttattaggggcagtggcagagaggttaggaaagcacatgcggacaagaactcaaagataggtgaagtgaggtcgtgccatggagaatcttgaagggcatgtaattgtgggccatgtgattgtggatggtgggtgcctattgatgaggtaggtgtctgttgctagggcctcgacccaataaggggacgatatggaggcatgaaggaggaaggggcagatggaatttttaaacgtatggaggatgcattcaactttcccattttgagtggaggtgtatgggcaggaatacaagataggcgtaatagggtgccatgagaagcatggatggagtcagtggcattgttaaaattctctgtcattattcgtctgaaaacacttgatgggcgagttgaactgggtacacatgaaatgaaagaaattagtgattagctaatgcattttagacttatgttgcatgtgaaacatccaacaaaaatgactaaaatcattcagaat

SEQ ID NO: 37678 - DNA, 272 bp, Zea Mays
cggggagttcgccgcatctgctcggattgcagtcgatcggattggttctcgtcggtgttagctgtttaccgaccatgcgccacgtgcccgagcatcttaccacgtcgcagatagtcatgttaagcgtatccggtgatcgccggagagcttgccacggtaatagacaccaatcacgcacgctagtgacctcctatttctccgaccgccgcgtgtcttcgtccaattccccggccaccactcatgtctactataaattgagcacgtcgtgagcg

SEQ ID NO: 37679 - DNA, 465 bp, Zea Mays
gcgaaaagagttgcactaaaaaagaaacctactcagtcagaagggggaaatgcttgttctatagatggaaaattgcctttaaactataatattacggcctaaacgctgttatggcccctcccagtgtaatgtggctgagtctttaatatggctggaacaacgaaaagagttgcactaaaaaagaaacctacttggcagactttgcagtttgtcgtttcagctctaggtgacccatcatatacaggtagcacggaatggaaataaacaagcagagaaaacaaaccattactttctttcctaacttggcataaactaacgtacatagctcgactaaacagatacgataagttgtaccttgagaaagtatggtcgacgacggctatgaggacggtgtagttggaagcatgttgccaccatccatttctgcgtttatagcattcacttggaaggaaacactgccataaa

SEQ ID NO: 37680 - DNA, 396 bp, Zea Mays
gaaagatgggagaaacactggccgaataccatgttagacgaaggaaaccctaaccctaatcaaagtggagtgggttgtaatgtactaatgtatatatatcaaaaaaaatgagtgcatgtgctaccaagggctataacacttacattgattacaatagcaaacacaagcatctaacacattgtacttcagagcagctaaaaactagattatcttaagtattcttttaggtgctctataaaaaggctagacttacctttgacctttaccctttttctagagcagaagcagagttcgtagaaccgtgttttttatttgggtggcgaagttgaaagtggagtgaatagtctcgaacagacccatgcgaatccatatagcttcacctgctcactttgaaac

SEQ ID NO: 37681 - DNA, 301 bp, Zea Mays
ataactccaccagaaggattccggagagcatgacatcaaggcgttatccatgtgagtgtatcacataggagccaacaagattccgaataatgtgccctacgtacgaacgaatagtggattgtttggcgccaagctcggaggggaacaaccaccgaaagagtcggcacacaatagtagacttagatagagttagatagacctcatggcttgtaaagggatatctctctggtcacctatataaggctagggggtacccctatagaactatctcatctcatcatccctctcatagtaacctcgc

SEQ ID NO: 37682 - DNA, 334 bp, Zea Mays
ggtgtggcaggcatcactccatttggacggtgtggcagcagaatggttctacgctctggagcaggacacgggcagcgtcctcacttggtcctgcttcgttgagttcacccatatgcggtttggaccacctctacggactaacggtatggctgatctcaaggaccttcggcgcaccagcactgttgaagactatcaacgtcagtttctgtccattctctgtcgctacgaggatatgacatagctccagcaagcttagatgtttactgcaggcttgggtgaaccgcttcggactgatgttgaactgctgactccaactacattgcagcgggccatg

SEQ ID NO: 37683 - DNA, 466 bp, Zea Mays
aattcggcatacggcaaactggactcccaattcctgtcgaacgtcaacacacaggctcttagtaaatcttcgaggaccttgttgaccctttccgtttgaccatctgactgggggtgataagcggtgctaaaatctaacttggtgcccatagcttgctgaaggctcttccaaaattttgaggtgaactgcgtccctctatctaacactatctcccgaggaataccatggagcctgactatctctttaagatatatccgggcaagggtggctcctccaaaagtagtttttactggaatgaagtgggccaccttggtgagacgatcaattattacctagatagagtcattcccttttcgcgtccggggcagtccggttacaaaatccatgcctatttcctcccacttccattcaggcaccgggaggggttgtagtaggcctgcaggtttctagtgttcggcctttgttc

SEQ ID NO: 37684 - DNA, 540 bp, Zea Mays
caatcggcttaagtcggcaacgactcaagacggtgcaacatgctcgcgcttacttaactcggggtgaccactatgccctgctaacagagcaatcggcttaaagtcggcaacgactcaagacggtgcaacatgctcgcgcttacttaactcggggtgaccactatgccctgctaacggagcaatcggcttaagtcggcaacgactcaagacggtgcaacatgctcgcgcttacttaactcggggtgaccactatgccctgctaacggagcaatcggcttaagtcagcaacgactcaagacgatgcaacatgctcgcgcttacttaactcggggtgaccactatgccctgctaacagagcaatcggcttaagtcggcaacgactcaagacggtgcaacatgctcgcgcttacttaactcggggtgaccactatgccctgctaacggagcaatcggcttaagtcggcaacgacttaagacggtgcgacatgctcgcgctcacttaactcgggattactactatgccctattaacaaaagcaat

SEQ ID NO: 37685 - DNA, 582 bp, Zea Mays
aatcatgttactgtcagatggtacaacaccaataggcaaatgtgcacgcctaggatactggagacatttcaagcatctatctatactgggggtgggggtagggtaaggttcaccgaaaataaataacaatactctgtaattttcccaaatatttcatgtcaagctacagccaaataccatgaattattcgacgtccaaattaattactctcaacacacgagttttttttaaaataaagcaccccctcaagcacaatgcacaaactcacaccgacttgttctccatcatgaatcagtgcaaactaaatttacctcacgtagcactatactatggcagaatgtcatgccatgcaaccaggaagaataaactattccctccttgcctttatgatcagcacataggagagggacactgagactgagagaaaccaaggctagctaatcactcatgtttatctgcagctagcgacgatgcaaaatattaatttcacgccagaaatcatttctttcccctgtacagcacagccctcttgcatggagaaccactggaacaatagaagaacactaacgtaaatcagtaagg

SEQ ID NO: 37686 - DNA, 323 bp, Zea Mays
gattttgattaaaaggtcggatcaccaacctagttctcttcttaggtccttgttttgacctttcacctccaaacccttttgactttccatgtcctgcagttttagcttccactgccaatgttgtactgacagccctactgtaggtaaggtctaagcatgttgccattttccgctgaagcctgtcattaagtcccatcataaaacaattctttttcttcagatctgtatttacttggtcaatggcatactgagacagatggttgaatttgttgagatactgcattacagtatctcacccttgctttaaccggatgaactcttct

SEQ ID NO: 37687 - DNA, 323 bp, Zea Mays
cccacgatgcctcccaagaagagcaccatgaccaactcctcactcgaggacgaggcgacgaaggtggtcctcgccgccaacgccaaaaggggcaaggtcgtcttgccaacgaaatcccaccaccattcaatgatcccaaaattataatcgaaccagagggcgaaggtcacgacatgaaacaaaagcggataccatcccctgagctaagtgtccaaacttccagctctgacaccccaactgacccaccaccgaatccacaaatgttatccctaccaagctagaatatggctagatctaacaaggaacatgtcgttgattcccca

SEQ ID NO: 37688 - DNA, 522 bp, Zea Mays
acttagaatcgttgagccgtgcttcagactgtcttcttcacgatgccagcgctttagtagtggtggccgagtgattattagcgatgtcggggccttttagaggtgatggccgagtggtaacgggccgcgtcggtgttttagaaataacgaccgagcggttactggcgacgtcggcgttttagaggtaacagccgaacgattactggcgacgtcggtgttttagaagtaacagccgagtgataacagaccgcgtcggccgctttgaaagtaatggccgagtgaagtcagataacgtcagtgtttttagaaacaacagctgagtcaatttgagccgcgtcggccattttggaaataacggccgagtgatgacatgacacgccagcgttttagaaataatggctgagtgatgacatggcacgccagcgttttagaaataacggctgggtgatgactgggcactttttagaaacggcatctggcccgggaaaaccccatatgtactgcactgtcgcctgcctccac

SEQ ID NO: 37689 - DNA, 375 bp, Zea Mays
cctgacctcagatctatcttggagaacacgctggctcctctcaactggtcgaacagatcttctattctgggcaaggggtacttattcttgatggtgacctcattcagagctcaataatcgatacacatccttctggtgccatctttcttctccacgaacaagacaggggcggcccaaggcgaggtgcttggccggatgtaacctttctctgacagctcatcaatttgctttttgagttcaaccaactctggtctggatactctataagctctcttaaagatgggggcggtgccaggaagaagctctatggcaaattcgactttccgctctggtggcatacctggtaagtcctttggaaacatatctggaaactcg

SEQ ID NO: 37690 - DNA, 284 bp, Zea Mays
aggatgacagaggagcaagaagccaggaaagtcacgaaccaaaatagcagctcgggagaagctagatgtgtgcgcgggaaaaaagattggggccttcccacctcccgcacaaatgagggtcgccaagggatgttttcgggctgtgctacttttccaaaatattttggggagctactgaaggaatgattttccatgtaaccctcaaaaaattggcttagggcttcttttggtcatctactggagttgctctaagatgtagagtccactatagatgaataaaattt

SEQ ID NO: 37691 - DNA, 654 bp, Zea Mays
aggaccgtgccttgacaactcgccaagaggattcgcgctccgccacaagtccaccagcgaccatcttccccgtcaccatccgaattctggtgcgttaacctccccgtaagtctcataaccgcgtaacccgcgcctagctactacagtagttattgcctgtccgtcgtgggcctagtcaccggggtactcatcgccgtggaggggtgggggcaaccggcgagcatacaaccatgaggagagagaaaaggggatagaaggatgcagagaggaagaagacagccggtggtccgttgagtggtagatggacggtggagagagtatacggtgtctgggccgttggattcacatggagcggtgatgatttggttggtgcgtaccacttccgggcgcccatccgagccgttgattgagtgacgggtggtagagattagatcccgggggtgacgacaccacatccgtagatctgggatcggccggtccgcaatgcataccagttcacagttgatgctgatctaattaggaacgctcatccatgatccatcggccgaaactaaaccatactgtttcgaccccccgctttgcagaaagacccccgaagaaatcactaaacaacccgcggtcctgggcaagctcggtctgattctactaaagttt

SEQ ID NO: 37692 - DNA, 380 bp, Zea Mays
tggactttggcatattttcctcttcattcagagactcatgtttcttcaggaaacaataactcgtgtttataatgtcgtgcaatacgaaacaggttccaggtcaagggaactcgagatccgctggtatagcaggatgctgagggtcaacaccgaggatgagggagcgtggaggatgtgggaaatcaacagagggagattcacgaatgccagggagggcgccaccgcggagatccagatgcggtcgccccttcttgtcgcaaggatgatcccgtccttccgtgactccgatccaaataccgtgccgtcaaccgaacgcacgcaaagccactgaagcgcgaccggatggcggattcaacgtagcgaacaggatttcagccacc

SEQ ID NO: 37693 - DNA, 546 bp, Zea Mays
cctaggggcccttcgcgtcttgaagcaccacttgctccgaacattagagtacctagcgcatcaaccttcgaggcacctctggccctgacccctaggacacctcaagcatctactcttagagcacattctgccccgactcctagggcatctcatgcattgacccctaaggcacctcctaccctgaccactagggcacctcttgccccgaccccagggcacctcggccatctgccctcaccccttccaatgacaccacgatgcataaacaacaaggaccaacgactcatgctcacgctcatcaacttaattatcaattacaatcgttcctaacaaaccatttactcttcttaagaagggatgctactaaagtcttgattcttgaaatgattatcttattattagaaatggtggagagaattcacttggttgtggaacaaaggtttaaaggatggaaacattagtttggagcacctaaacttggcccttttagccttatttcccaaagacctcttaggaggggtggattaggattttagttaccctggc

SEQ ID NO: 37694 - DNA, 313 bp, Zea Mays
ggttccgtcgcccgtcaagatggtggcacgcaccgttccctcacgacctatcaaataacagcaaggtcatgagttcatcacagtctcacagagaataacagatcaggcacacttacattaagtaatggcgtactagacacaataaccaaataacagcaaggtcatgagttcacctctgagcttgacgcggctcgttaatggcgtaagcagtagggtcggagcaccggttccgtcgcccgtcaagatggtggtgcgcaccgttccctcacgacctaccaaatagcagcaaggtccatcacagagaagaacagat

SEQ ID NO: 37695 - DNA, 481 bp, Zea Mays
aaaggatcagctgcagttactcaaattttgatcaaatgggagggaattccagttgagatggcttcctgggaggattatacagtgctgcaatccaggttcccgaattcatccatctggggaccagctggtgcttctggagggggcactgtcacatcggtgctgcatcaggatcaggcaaacaccgtcgcggatgactgagttggcggtaggagaggtatgcggacaaggtttggttttagtggatcctgttgggccggatttggccttgtaatctcaattgttagactttgttaatctctggtattgggccgtattgtggccgtgtattcgtgggcgggtcagccacacgtataagaggcaaatatctgcgctgaagaagggatggaagaacagaaaccaaatattcatacctctgtctgcttctcttgcctgtgttctttccctttcttctctcttctctccggtgatctctggcgataat

SEQ ID NO: 37696 - DNA, 328 bp, Zea Mays
gggtattatctcacattcagagctagaacatgtataaatctttgtgtctctcatgccttaacctttaactttcaatcttgtgtcataacatatatattcgctatcgaaccatcttcgatagttaatgcgccacatagaggagcgcaaagatcaatgaagagttgacaacatctgtgaagtttgcactagaagacaaatccatgtgtggttctttaggatttgtcaccaacatgctcggtgaaatctccatctatgacattgagctcatcccagaccctctagtacattcaacgccatatgattaagattattatgattcaacctccat

SEQ ID NO: 37697 - DNA, 405 bp, Zea Mays
cgttcacggcaaggtcgccgagacgattttggcaggaaggactgccacaaccgcttccacaacagggactatcgacacgaggtttttgatggtggactacctcaccacgaccgtcacgatcatggtgactaccatcgtcccaagcccaactttccgtcctatgacggcgagaccgacccccttccgtggctcaccaagtgcgcgccgtattttcgtggcatgagcacacttgaggaagattgggtctagatagcatctcttaacctggaaggcatcgcaacagaatggtattatgcgctggaacgggaccatggtcttatcctgggctcgtttcaccgactttgtcaacctgcgtttcggaccaccacttcgcaccaatggcctcgctgagttgaattgaaggac

SEQ ID NO: 37698 - DNA, 279 bp, Zea Mays
agtgctctatggtagtctacctaggagaaagccgaagctacccaaatcaccctcccttttagatcaccgctactggccacctcttcctagacacctgccagaatgctgcccaaaaagccctctgccaactatgccaaaactacagcagggaagtctctgagacacccctccgctactttccacccagcaacaaaaatacccctacctggaggaaaagactccaggatttgtcaggaagagatcataatgaagatgaccctaccataatctacatggtcg

SEQ ID NO: 37699 - DNA, 378 bp, Zea Mays
gccagacttcctctctcacattttttacaagccgatctcacatccttttcttttctcttgcattttcttgtatttgctgcagccgggtcctacctctcattaactgatgctctttcgtctttcctcaaccttgttctcgcacgcacgatggacggaagacgttgccgccaccgcttcttcggagttaggaaacgccgccgcaaccggctgtttcttcgacatctcgtctccacactccagtgcgccacgactacaagcattgcccatctctcttcgcctctctccatcacaccacgccattactcgcgaccgtttcttccccacacaattatatcgccattaatggtcttcatgcaccttcaatctggcgcccctccg

SEQ ID NO: 37700 - DNA, 484 bp, Zea Mays
gttttattgatatcatctttacctttgtcatctctacatatcaccttgttgcttattgtatacctgccctataaaattttcccttttccatctcaaattgagagttgtattttacccattttcccttagatgtatcctattctttgccacttgaactttcaactccatcatttaatgtgttttgtttgatatcgtctttacccttgtgatcctaccttgatgttgtcgtatgtgtgccacttaaaacctcccttcacccctctcaattcgagagtggtgttttacttaccctacgcttggtcataacctcatctttgccacgtgcaaatcttgccttaacgccattctttgttgtactcgtacccttggttcttctatacctttacctcttatcttacacccttttctgttatcaccttcaacccttgtaatacctgtattttttacaacaacgcttactttgaacctagcctttggagccttc

SEQ ID NO: 37701 - DNA, 346 bp, Zea Mays
cctcctgttgctggggttgtcacggttctcctggtcctccccgcggcggaggaggtataggttggaagggtcggccgtgcccgacggagtgcttgaagtctctacagttccgaagggtgtggcgcatgtctttgtggtacgggcactgtgcgtcgaggatgtcgtctagcgtgcgttcgcctcctcgaggtcctccccgggcgcgagaggcgggtggtccggcggcgtgaacttcttcgcgaggcctcttctcccagcgtttgtcgggctgttggttcgtatcgagtcgtggtgctgttggtgcaggcttcgttcctctgatgaggtcctgagctcgctcgtcgac

SEQ ID NO: 37702 - DNA, 622 bp, Zea Mays
tgaatttattcaacacaaatcaatccaaacttgattatttagcaaattgtccattcaatcatcttataacaagcaacatatgcatatatatccaattcaatcaactcatatgcattcaaatgaatttgatcaacaaatattatactttatatacctcatgatcatccaatagcaagtttgaacttaacttatttgcaatccattcataatttaaccaacttgaataaagcacttgtatttggtagaatttggacttcacttattattgacttggcattgggatagaattttattagtcttcaacacttaattcaacatatgatgattaaatgaatattatcgaatcaagcctccaacgcccaaggtacctgttcatgatcatccacgttttgatggtacccaaaactaagttgggtcctcttaagttaggagcaacatacttaggcattgcctttgtatgaatagcgggatgttttgcaattgcaacaaatgaggtgccattgccatcctttcttagcataatattcttatgaattaaaataggcttcgaattgttacctaagggacatgaatttgccatgtgtcccctttcccaacatgtgtagcaagttctctttgtttg

SEQ ID NO: 37703 - DNA, 337 bp, Zea Mays
gaagcaatcggggagttactgacccgaggagtgctggccacggaggagttcttcacgacagtgcgaagagtagggcggaagggttttgtggattgtgggagttcttctggtgaaattgagtcgattgctcaagtgcttgtgtgcgtgatgtggtgaagaagcaggatccaagctcaatttatagaccgatggccggaattggatgagaatcgcggagctgtaaccgcgctggcaagcttacccgcgcgggcagagccacggcgatggttcggtgaccgccgattaaccaggcggtgccaccgcagcgttttaatgccacgtcgtggatgatctttac

SEQ ID NO: 37704 - DNA, 330 bp, Zea Mays
cagatgcacagcagcacagggttaggctttggaactgagactgggagagggagagtttgtgcggaggttgaagcagtgataatttcaattttcaatataaatgattggtctttcgtgcatttagtttgcagcgctttcgaggagctggaacttcaaacgtcctcctggtacgacggtggccgccaatactcctccaattctttctcgggaaggtgcagcatgaggacgccgttgcaaacttccaatcatcggccggggaacaatccttgaacttccaagctccaacgacttctcctggaatgtaaattgggtcgtatgtccacggctcca

SEQ ID NO: 37705 - DNA, 413 bp, Zea Mays
gaataatcaacatataagtgaaaggggaaaaacagaggagaagagaatacctacaaatcaatgggacaataaaatggctagcgttgtctgctgtcatgctgtggactatcggccttagagagatggaatctttagtcttgtgctagggacagtaggacaaggagaggaagccaccaagccgattaagtctaccactctatcgtttagattatggaacagtgggtagctctatggctgaccggtggaagccgaagtaagaggttggaggagcggctgaccgccacggtggagccgagcccgtggcggaccgtcgagggcggtactgaggtagggcgcacgacaggccgataggatgacaaccgtcgagctcatcggagctagcactgacaaccgaccgtcgacctagattcctc

SEQ ID NO: 37706 - DNA, 296 bp, Zea Mays
gcctccaggttgtcaggaacttgttgctcggtccactctgatacgaagtcaactagtgcttgagtctttacagttgtgcgaggccgaaactctatgtcgtgagctcccagctcgcaggcccacttggctattattccaatggcttctttgttgtgaagaatatcccctattggaaactcggtgactactatgactttgtggtcgtcaaagtagtgatggagtttgcgagcggttagaagtaccgcgtacagtagtttttgaacttggggatacttctttttagagggtcccagaac

SEQ ID NO: 37707 - DNA, 321 bp, Zea Mays
tttttttctgttgctgatggtagcaatatcattctcagactcacatgttttcctttttctggattgttgtaggcatcgcttcattgtcggcacaaaaggtatcagtgtaccataatctgcagcaatcttatctcctgtcttgtgcataaagagtgttcctggactacttatattgctcgatactaaaaactaaacagcagcatatggtttggaactgtttttctattgtttggatggttttgaaagaaaaaaatcctgaaaagacttataaattttattgtcagaactgcattttgatgcatgggtttttagtgttagtag

SEQ ID NO: 37708 - DNA, 559 bp, Zea Mays
cataatgccgcggcgaagctcccgccggtgacacccgtcccggccagccgacgactgattccccaaacctgctaggattatgtgcaaaagggaacacgacatatgagatgggacacttactggagacaggaatgacgcccgaagagccacccacggcacgcagcggcccacgatggcattgtgcggtctggcgagaaattgccggtgactgccggttcccgcacccaatagaacactcgagcaccttccttggtccctggcgactcctcccaccctcttgcggagcccaaagcaagcccgtggcatgaggtcgagatcggcgaccaaatctcccactcacccacgcccttctctcatttccttctctctggtgaactcgtgggctctcttctcaacgacggtcatagatggggtgagcacgacctagaatttatagccctagccatgcggactgtggttacattggggaggggggttgtgtcagctggggttaggtcgccagcgcgccgcgcactatttttgtttacgcggggtagcattgtgtgggaatggcacgcgg

SEQ ID NO: 37709 - DNA, 337 bp, Zea Mays
atttctcttcctctcgtcgatccgttcccgatctcgtgctctttttcacgagatcatcgaactgcttcttctcgcgaacggcatgctgctcgcgtcgtcgacataatccttgtctatctctgtctaccccttcgccttccacccggtcatcttgggtccgcgagccagctctgatcattttcgtttaattttatctaaccctttctaccatccgtctggctcagtctccgtcgtacactgtatcgcgtaactcgtcgcgtgaccgtctttttttcgctcagccatgatgcggtatgcgacaaattttacaaccaccttccacatcctctcttttcta

SEQ ID NO: 37710 - DNA, 364 bp, Zea Mays
caaggcattgcgtccactttgggggcagcttcccaatctacaaccacatcatagagaatgggacagagcaaattcgaacaaagaattcattcgcttgaacaatattcaagagtaaacgcgcatcataagatgatttgagtaaaacctctccggctcgtttggtggagaagcgaacaatctgtgctagagccagcgccttcttggcagtcatctttaacccgtcatagatcttctcttatgaaggaaaggcgaaatggacaatctccttggcatccaatctcctcctcgcacgattggtggatagcccgggcacataggacttgccgacgagcatccagtcgcactccacagtgaagttgacaaa

SEQ ID NO: 37711 - DNA, 398 bp, Zea Mays
ggattcttaagaaggaattggtgacatggcccccaaggggtaatctcaaccgggacccgacctgcacatagtcttggctaggaatttttagtagcgcacccatagggtctgctagctggtatttcctatcctttgattcacgcaacaggaccggctgcagagtggtggggcgtgtaggcttacggtacttgaccatactaagcgacttcacggccccaaaccaccccagtgtctggttgtcgggcctggctactcaattcggatgtcgctataccagccagggagggagagtgcatggtcgggttagataataataatggttgtaaactcaagaataaaaccaacagaaaaacaaatatgtgggtcgaaccccttccttataactggatacacacgag

SEQ ID NO: 37712 - DNA, 1140 bp, Zea Mays
gttctaatgcccctcatgagtagcgtatttgatacactctctatgatctcgacatgtgtcaccaccaatccttgaccgcctaattatcacgtcctccattgcctttgcttgacttggtcaatcgtcttgacctgatcaacatagactactggtccatgtactcttgtgcttgttgattttctcaagtgttagacactacggtcaatcttttagcttctcttgtccctcactccaactccaagcctcggcgtctgttcttcactgctctaagtatattggcatgaacctgcttgaccttcactattgactatcttggaccttcaaacctacgcaccacaagccaagatatatgttgcacatatcatactcatgttatggttagtcaatgctaaaccaaagctaatcatttccttaacaatcatttatcacacttgaacaccatcgacatatctcgatcatgtgttcgcacatatgttggaaaacacctaaaaatagcgtgttactgtaagttaaatgttagtgttaatcaaatatatttcattacaaatgtcacacatttgaattctactattactattcatcacgtttgaatagtgccattttggttcttcacctctctaaaccatctcactttccaaagatagttttgtatagaccaaaatgctcccatgggcttgtttctatctaccttcataacttctttgttaccctcctctatgtatatcaagcttgagctcatctgctttcccaccctaaatgatgggtgttagacctccttgccctttcccgctagtggcccattgcgatcgccgccgatattggtctcactatgctatactcctcgtgcttcacttggcatattcgcaaaggtgttgaacccatagagcacaatgatctcacgtatggcgcgacgatgaaaagcgcacaccacttggtgagctcaagtgctttgtccctactaccactaagcgagatgcaagagagcaccacaacgaagagcatagagatcagggaggtttcaacaacgtagatgtcacctagcatgaggcaaagagagatgaggccaacaatgtcatagagcatgggcttggtcatcgtcatggatgttcatcgagcgttcctgcctttctcccattctca

SEQ ID NO: 37713 - DNA, 393 bp, Zea Mays
tacggctttgagcttagtcagaactctccacctgtgatgcagttgcagctccatcttccaaacatgcacatggtggcatttcacgagcgccaaatggtcgagcgagtcgtcaaccgtccaggtgctgataagtcaatgctcacagcatattttgaggcaaataggctacacgaggaggctcagggcatcctgtatcgtgacttccttgagtggtacacttggtagagtggtaagggcaaagtatggcaacggaggaaacgagatacgggtggacaagtcggtagaatagtctctgctcatccgtacgagggggagcgctactatcttcgtgttctcctaaaccacgtgactggcgccacctcatatgtggatctaaggacaatagatggtgtc

SEQ ID NO: 37714 - DNA, 397 bp, Zea Mays
atgaaacatgcatgatcatgcccataacctatgccacgctggttgacagacccagacatcctgggagtggcaccagtgcgccactatgggcacacgcatggacgatgtctgtcaggtccggtgatgacattcgaccacaacgcatagatgactgtgaccacccataacgtggcgacaaaaatacaacagggccaaagatggaagtttacaccttctctgtcagtagacggggagaagctatcagaccgaccccatataacttgtaaccatctttcccttggactaaaaggaagaggggcccttcacaaggggaggccaactcaagtcatccacacgcgtagacaaactcaacacacacaaatacatgcacacacttagccattttccactcccaatc

SEQ ID NO: 37715 - DNA, 368 bp, Zea Mays
cagtagcgggcgagcgatggagcatgtcacggtggtaggggcgggcacagtgcaacgcgcggcggtgatcagctcgacgagtgtgcaccgtgtggtagctgggaaccaaatgataatgagcgggcacatgggatggccatctagagggggaggagttgcggcgtgacgtcacgattccatggcatggaggcagggcaacacaacaagggctagagatgggatggcacgaccggggtgagggaggaggcgaggttgcagcattggtgactgggtggcaaggtggcagcgttagcaacatggggagtgaggctgggattggaggaagcgctagcagcattggaaagatgcgagtagtcacgaacaaaaaa

SEQ ID NO: 37716 - DNA, 431 bp, Zea Mays
ctgttgggcaagtgagactcaaagcctctatcatggggtcatttgccatatggcatacgaccagcaccccaccgagcacgaccaccctatgggctcacttcctgaaggcaagtagcaagaggcaaagcacctctagtccttgtaagacgtctctgagcaggagcattatgaacaccatgggagggcggtcatgttccttctgctcgactcagaaacctgccgcccatctctctacctcctaaagaaaagcctgatgctcatccctctcacaatagtcacaatggaacctcacctctatgttgggtgaaatctgtttgtgagttttgagctttttgggtggctgaggggctctaggaaggggatcactagaaatgtcgggaattgtatcaagtgtgttcttgaggtggttaggttctggaacccacacttgt

SEQ ID NO: 37717 - DNA, 497 bp, Zea Mays
ctgaggtacaggtgggtgcgctagatgcctgaatagatagcgaagccgatggcacactcaatttatagtctccaggggcggtggtgcgtgaatttgagttagcgcggtggcggccggagagtgaggagagtacttttgcaagagctcagtggcatctaccgtggcggcctcaccagcgacgaacctatgctatgaagcggtttatagtgactcatcgtgacatggtaaagcgtcgaggcacgtagccaagctggataacggcggacgccggtgatgccagcgggactaaccacggcgggacacgaagaccggagtgaatagggttggaggttatctatggcgcgatatttcttaccgagaaacattatcagtgctcgaccgagcatgaatcgtgacgccggcgagaatctgggcgcaaggtcaccggcggcgagctcctctacgctggcgatccaatcaggtcactgtaccatcgcgaagtccattcagttagcctg

SEQ ID NO: 37718 - DNA, 436 bp, Zea Mays
gaggaatgccatgttctgagtcaggcagaggcagatcccaaagactggagagagccaatcatcagatacataaaagacgagtaagaacctgataacaaggccgtgacagagcgcatcgcgagacagtcggcccactataccattatagggggcctgctgcatagaagaggggcaggaggagtcctcatgaagtgcattcattcggctaccgggaaaaagttgttagatgagattcatgccgggcaatgtggcgtacatcacggactctggttggaaaagctttcaggtatgggttttactggccgacagcgaagaacgatgcatccgagttagtctagaagtgtgaggcatgccaattcttatcaaagcagcagcatgtgcctgcacaacagttgcagactattcctatgacttggtcgtttacattttgggggct

SEQ ID NO: 37719 - DNA, 300 bp, Zea Mays
ggctgtgctcgagacatcctgtccctggtggccttcgtttccgggcaatctcttgttgggtgtgcgcaatcctcgccatgaaacatgtagtaaaatctgcatggttgctgcgtccgtccccggccccgccctctcgtgccattaccgtggccctgggggggatattcctgacggcgagcggcctcgccggcggggtgctggctggctttgttgtgcacctgctgctgactgcgactgtcctgtccggagtctggctgcgaagacctggtctaggttctgctggactgcggagggtcctta

SEQ ID NO: 37720 - DNA, 728 bp, Zea Mays
ggctggcacaccacgacccgtaattgaaattgtactttagtggactgtgccttagtggattgtgctttaataagcctggggtgtaccatattgggctgatccagatatacatgtacaccggggagtatttatctttgacacaaggagtatttacttattatgaaaccagctccaaaaagtggcttctgagcctatccacgtcgtccattaatctttcgaccgtaggatcggattccaacggctacacgagtgttctcacgcaccaggcgccaggcggcctcctcatgctggataaatcgtgacgcttccagatgatacatctccctcttggctgccgggcggcactctccatggtgaagagggtgtcgaccgcgatggctacaacgacgacgatggagcacttgacgcccccaacagatgcgagccattctcctcctccctacgtcctttccccctccacgacaccataaccgtgcctgctccgccgaatctaaaggtgtcaggatccccaatccttcccctcctctccccctctccacgacgctgcaactgtgctcgcatcgccatcccctcccctcccctgtctccaagccaggaatcccatccccaccccaatgtcgcagttctgctcgcgttggccggatctgtgaatgaagaacccacggttccacgacctcctcttcgtggaagcctaaaaggcatcacccccataagcgagagggaaaaga

SEQ ID NO: 37721 - DNA, 503 bp, Zea Mays
cggatatgctggagctgcaagaggagaggtcgtagagcagcgaggtcgtggagacagaaatagaggccaatgagcgcacggacgatggctcactgaccgtcattggagaagaagttgcaacacctgagggagaagacgagtggcggaagagaagatcgtcgaggagatccagcgagcagaggtgactgagaactcggaggcgaacgcaaactctgaggaaccagaccaacaaaactgacgtcgtctccgaagaacccaaggaatagtctatggtgatgagcacaggatctgggaggtgaatggagagcacgggatctgggaggtgaaggggatcgcgggggcaatggagttgattgcgagggcggtcgcggacgtgggaatgagcggagcggaggatgtcgcgggtgggagtgggaggcagaaccgtgcaccacactggtgtggacgcctacactatctgcttaagagtagtagagattgtgtaccccgtcatgttgtgtgcc

SEQ ID NO: 37722 - DNA, 433 bp, Zea Mays
ggagagcccgccacatcagccacatgaagacaccgacaattttatcgaccgctaccctagcttccagctcgatgacgagctgctcgtcgagggggaagagatgtcatgtggggccaccactatcagcgtaggccacacggccaacaacagataacgccgacacaggagtagcaggcagttaggcgtgactagaaaggaggagatttgtttagataagaggataagtagcaggagtttgttagggagataagtattagaggataaataggaggagtttgttagggggtctggctatataaggcgggcagctgattcaataaagcaagcaagaattatttgtctcattcccctcttttgcctctcaaatctcacctccttcaccatcgggctgtcgggcaaaaccccaacgccattacgtgtcaaggctacaaac

SEQ ID NO: 37723 - DNA, 392 bp, Zea Mays
ctgcattgcccacccgagccggatcattgttggcaacaccctcgagggctgggtaatcgctggcgccatccttggggaccgggttctctgcagcagccgcctctaaggctgaaggattctcagtcaccttcatgggaatggagcaacctagacgaacttcttgactctgaagaccgcactccaaggtcgacgaggcacgagacgctgctcgggataactctaaccccacatccggaatgtcagtgcaaacgtccatcataccaccatctgttggctcggacaacagatcttcaggaaccatatcctcgagagcctggtcaaaatttgctatggacaactcttgcagaccaacgagagcagacaaagctggagaaggaatatcactactcccc

SEQ ID NO: 37724 - DNA, 290 bp, Zea Mays
ccagccggcacgtcggcgtccggcgggtccacgaacctcgcggacgccgcgcctgcgacgacgacaacagcgagaacgatgaaggagacgccagcgagtgacctcatttttgtttctacacaagttttacttgctagcgagcggtttttgtgtgggtttgtgcctgatgaggtggtctgttttcctagagagatggaaatttatacagctccgaagagtgaaatgctggtaaggaaggtttgtgactttgtgtgcagtggtaaccttagtttctcaggaaaacagggggt

SEQ ID NO: 37725 - DNA, 554 bp, Zea Mays
ggaaaggaaaacttcatgaatggaggaggtgcgccaacaatctattgatgttcagctccttcaacccgatgaccaccgcgaacatcatgtcgatgatgaggaggaacatgatgatccgctggaggaacaactcgatcaagagaacctcgaggacctccgatcctagacaaacctctcggtgtagaggtgtaaccatgcttgaatgagccgaggaagatgcagcagcatccaccacaaactgctccatgcttgttgccatctactccaacgtgagtgaggccacccatttgctagtatcaacaatgtgacatgccatctcatcccgatccttcgccgcatgttctgctaccgatttggctagcgctattgtcccaccaattgatgttgagtctgcttaacggactcgatcctctacacgattgtgtccaaagtgctcaacacttgatcccatttcacgacctcggatttcttcacacccgccatagcttccagcacgaacatagtctcaaccgatggatgcggatgtggagtcgtgatgacttgcatcaaccacg

SEQ ID NO: 37726 - DNA, 350 bp, Zea Mays
gtggtgtctcttcaataacttctgtgacagtaataattcttcattttttcggcccagctgccttcttcgctatcgagggctccttctttttctaaaaaagcttcgtcagatgtggcgccagtggacttagcctgataggcaaggatttagtcattacctttagaatttctaccacgtcggtagcaaaaggtgttgcagcagtttcttcttctatatcagtcgccttctgcttcagtatcgtagcttttctcttcttcggagcaactgctgtcggctcagggctcaatttcctcttcttcaggttttcttcatcttcttttaccattctagcagcctgtctgcccacaaca

SEQ ID NO: 37727 - DNA, 484 bp, Zea Mays
ctacaaaatagatcctatctctaaaaccgaccctatccacaaaacagatcctatctctaaaaccgaccatatccacaaaacaaatcttatctctaaaaccgaccctatccgtaaaatagatcctatctctacaaccgaccatatctacaaaatagatcctatctctaaaaccgaccctatccacaaaaccgaacccccacccttccaacacctcgccagaaaccctgattcggagtccaaacttaaaacggccataactttcgcctcggaactcgaatcgggcccatttttttcaaaacacacagaattaaattttgcatccgattctttccggcttttctggattctctatttttaaaattcccaaattcggcttggaaataggacttttcattttccaaacatttattctaattttagggcaaacttgtagaaattccagaggacgcgtcattgcacaaaaaaatctgaaacttggtgtgtt

SEQ ID NO: 37728 - DNA, 321 bp, Zea Mays
cccatgccttgctcctccctcactgtgtctcttccctatgtggtaagcatgcgctaacaaagttatccatggcagtggatagctagccggaccgccgtggctataaatagcaccatgatccacgacggggtattcacatctccacctctgagtttaatcaaagcccaaaattcgcactgcctctgccacctcttcctgaattgagtgtgcccggtgaaactacagttccttacggccgtgtagccccaatctcacctcccaattccaccctgagccgtcgcggcgccattttcccctttctctgtaaccggcgaacacaag

SEQ ID NO: 37729 - DNA, 575 bp, Zea Mays
agcagtacagcggcatggcttatgttaggatacgaggttgcaaaccttgcttgcattggcaactaagagtgaactcgaaattatgagggggcgtctgcatcgactacaaatcgtaaaccgaaacaagggtacaaagtttgttgcagcaggtacctaaatgggaggatgaacaatgtaacaaggtgagagcttaaactacaagtgcggatctggtaaagtcgtaagggttggggaaaataaactaggattgttcaactaaaccattggtggtgtaaatcattgttcaatgatttattcatatgacggggtacaacatggtatacctcaacacgggcggatctcgcccggtacacggggaatcgaagaaaaaaacgagtgctgttcgaaatgattcgtaaaataagtatggatttgacgaggttcaacaaggtattaccttaagaaggggagatctcggccgcaccacgccgaatcgaagcgtctctgtgtggatctgatggagccgtccaaggtcggatacggaaggcaacgaatcgaaagcggcgtacctcgtgcgacgcggatttgaccccgct

SEQ ID NO: 37730 - DNA, 436 bp, Zea Mays
cgaaaaactgatttggggagagaaagaaattggagctctctggtggctaatcagaggcagtagcggatgcttttgcttcgtgatgacttaacggagctaggggtgtgctcaatttatagtatccctgagcggtggctcctaatttggtcatggcgtgctggcggccggagagagggaagagcactagcgcaagagctgcgtgtcattcaccgtggcaggcttaccgacgacgagccagcaatatagagcggcttactgcgacgtggtgaagcttcaagacatgtggcacccgatcggcaggcagccatcttcggtgagtttatctgaaccggccgtgagtcaagcggacacggcggccagggcggaacagtgtctcatgctcatccgcggtgcccgatttttcaccgaggagcgttatccgtgttcgaccgggcgt

SEQ ID NO: 37731 - DNA, 416 bp, Zea Mays
cgacgaggcacgagaagctacccgggttatctcttgcccggcagaatcatgcggcagaagaccatcttctgggacctctgaacagataatggggttgtcagctttaggaggctctgacaaaagctcttcagggatgatatcttccagcgcttggtcaaaatcagatattgacaacccttgaaggcttacaaggcttgcgcgtgaatgtcgctgtccctgtggcgacgactgttcttgcggatcagcagaatttcttctccttcctcctcttcttcctcattaggcacaccgccagcagcctgagcatcatcacaacccctagcattgtccttggggatggtgcccaccgggccatcgccaaggaataatgtggaggggccagcgtcttgttccaggcatgacaaccgccagagtcg

SEQ ID NO: 37732 - DNA, 403 bp, Zea Mays
gcataaatgaatcaaacctcttataccattgtctgggagattgtttcagaccatataaggaatttcttcaacctgcacacatagtcttcttttccaggaacaatgaacccctctggctggtccatataaatgtcctcctccaaatcaccatgtaagaaagcagttttcacatctaactgttcaagctcatagtcatgtacatcaacaagactaagaaaggtacgaattgaactatgcttgacaacaggagaatagacatcagagtaatcaattcctggaatctgactaaaaccttttgcaactagccttgctttaaagtgcggaggctcttttggagtcataccttcttttcttttgaagatccatttgcacttaattgcctttttaccagaaggcagccgag

SEQ ID NO: 37733 - DNA, 314 bp, Zea Mays
taaagggtcatagcgtgttgcgatcacggtggacgacgcatacctcgaagatggttgcttggccacgtcgctggcgcaagtggacgagcgacagattggccacagtgtcccgagttcatccacgacgagatctttttatcgtcgagcataatccattcatctgaggcacgaatcgcgatgaccggtgtgaatccgggcgagagatcgccggcggcgaggtttagtgcacctaggatatttttcagatactgtaccatcagacttctcatcagagcgcctggccgagcgttttgctaagcttagatctctaattt

SEQ ID NO: 37734 - DNA, 275 bp, Zea Mays
gggaaatccagatcgggcagtggcaagcagaccagcgcgatcgtctcgacaactttgctgcggacaagacgactcgggtggccgtattggagaatgtcaccaaggtgttcgaatcatggcgaccccgaatcgaaggatgtgtcgacatgatcaagacgtcggtcgatgcagttcgtgtggagcttgccagagtcgcccgtgtattggaccatggtgcttctgacgtttgcacggcgggacctgtccaagatggatcggcgtcggagcgtttcccg

SEQ ID NO: 37735 - DNA, 396 bp, Zea Mays
ccctcgggggctgggtcgctaccagcaccaccctcgggggctgggtcctccgcggcagccacctctagggatggagatccctcaaccacgtccataggagttgggtgactcagatcaacatcttcgcgaggaagaccgccctctaaggtcgacgaggcacgagaagctacccgagttatctcttgcccggcagaatcatgcgacagacgaccatcttctgggacctctgaacagataatgggattgtcagctttaggaggctctaacaaaagctcttcagggatgatatcttccagcgcttggtcaaaatcagatattaacaacccttgaaggctgacaaggcttgcgcgtgaatctcgttgtccctgtggcgatgactgttcttgcggatcaacg

SEQ ID NO: 37736 - DNA, 688 bp, Zea Mays
tgggtttagcctgaccactgtggcggaaaaataccgacgtgaattcctgtgttccggttgattgattgtgactaagcaaaaagggtcgggtcgataagcatcactagcgcatctagatattggaacatgaattaaacgagcaggagcagacctgggacgagctgtccacggggcgcggaggatcctggctcgcgggtaacagaaaaggggaaatcgaagccgcaacggtctcggttggaattgggaggcaagattaaggctacacgtccgtaaagaagtatagcttcaccatgcactgtcaattttgggaacggtggagggaatttcacgaatttgggacttctactgagctttactggtgtagacgaaaacacctcgccgtggacctgacggctatttatagccgcggaggtacgggattggtccgcggccacgaggtggattattaacgcatgtctaccacgtaagaatgaagcacagtaatagagatcgaagtatggcgacagcacggcgaactgcgctgagtcacggcggccgccggtgagtaactccggctgggctagggcggtggcgccacgtatggttgtcctgccccgacgttatccattcccgactgcgcacggacccgggcggcgatcaacgtcggcgagctgagctggcgttctgatctgctcagttactgttccat

SEQ ID NO: 37737 - DNA, 276 bp, Zea Mays
tagatgagatcgtcattcttgaccctagacaagaactcattgatgatatcagtctcggtgatatgatggagcttatccttgaattggtttaatctttcacatagttacattgcgatgtgccttcgcattggtaatcatctagttcccacgctaagttaggcttagtataatcccatttggagtgtccatagaaggagtgctctaggtctctctagcactagatgtcgccttcttcaagatggtgcaaccatgatttggtcaaatatgcgaggaaga

SEQ ID NO: 37738 - DNA, 607 bp, Zea Mays
gaattatcatcatgctctagccaacgaaaaatggcgccttgccatggatgctgagtatactgcactgatgcaaaatggtacatggtccctggttcccaagccatctggacacaacatcattagttgcaaatgggtttttcgcataaaggaacacgctgatggctccgtggataaatacaaagctcgtcttgttgctcggggattcactcaacagcacggcattgattactttgagacgtttagtccagtcgtaaaaatgtctactgtccggcttgtgctctctattgccatatctcgtcaatgggatatccgtcaacttgatattagcaatgcttttcttcatggtgttcttaatgaggatgtgtatatgcatcagcccccggggtttcaagatccttcaaaacctggttttgtctgcaagcttcataaagctatatatgggcttaaacagtctcctcgtgcatggtactctcgtcttagtgatcgtctctgccagcttggttttgttccttcggttgctgacacttctctcttcacctttcatcaaggcgcagttatcatgtatttattggtttatgttgatgatataattattgttagctcttca

SEQ ID NO: 37739 - DNA, 377 bp, Zea Mays
atatggtttggttggcaagccatgtcgtaaatttctacaagaatggtaggctaataggtgtcacatgactacccttccacctctcctcgcccctcagctcgccgctgccatttctgcccccgcccagtcccccgtctccgcagcccccaagccagctgccactactagaggtgagccactaccgaatctgtcgcgtagagttattgcgtcggatttgctcctcccgtccttcgttggaggtcgggatttccaaggtccctagtgctctagcctcgctgttaatgggatgggacatctgggcgtggtggcgaaggaggatgatttagacccgctgctcctggatttgctctcggcccatgccttgcccctacacagct

SEQ ID NO: 37740 - DNA, 366 bp, Zea Mays
attgggtctggctccgtttacagcacaggactgttgttggtgtcactgcagcttccccgtccaaattagggcccaagttctatggtctgtatcaagtgctgcggcgcattggcaatgtgtcttatcagctccaacttcctccacgtgccaagattcatgatgtgtttcatgtttcactgcttaagaagtttgaaggacccccgccaacggctgttgttcctttaccagatattcttcatggcagaattgtccctacacctaacaaggttactaaagccaggctgaaccgtggagtctgggaagtcctagtgcattgggttggtcggcctgctactgacgcctcatgggagcagctggatgacttca

SEQ ID NO: 37741 - DNA, 465 bp, Zea Mays
attcgcactgccactaatatgttgtgttgccaactcctccagcttttccctaattcgaggtcgtcttttccctccatgactcttccccacctcccgacctcgatccctaattgatgctgattttgtcaatgtaccttctcttcccctgccctcttacgtgccacgcatggccccgtcgcctgcgccatgaccacacgtgaccccgtcgtctttgcctgcaccatgcgcgaccccgttacctctgctcatgccgcatgcagcccaataacatcgtcatcttcacctgtgccacacgcgacctcgcttgtctgaacacctttggctcgcttcactgatcccgccctcgtctaacaacagcatgtgcggcccgatccacaagtcctctccaacgacaaccgaccccatgccctggcccgctcccgtgacgagccactggtgcaccaccctatcgccatccacaacgac

SEQ ID NO: 37742 - DNA, 467 bp, Zea Mays
gcctgcgaaccccggtatggagccttcatcatgttcccctacgtcttatctgcgcgtagcgtacctcagattagaattttgggcccgggagcggtgaatgggtggtcaggctatggcgtccgccgtagggggggggaaaggcgctaccacacctggtattcgcgtggagaagaagtattgtggctgttgatcttgaaatccgcggtcgcggttgatgtgcacgtacccctttcctgagattaatccgtgtcgtcgatcgacccacggatgaatcagatgagatcatggtgtggggtgctcctggccgtttgatcaaaatcagacggctggaactgcataccggttcggtagggtttgaatctaatcttatccgctcgatcgtaatccaacggcccactatcgtcgataaaccttcgacgcgatttttagctaaagaacccctgaaatattcacgaatcaacccgcag

SEQ ID NO: 37743 - DNA, 655 bp, Zea Mays
ctgtcacttcctggccacagccacaggcgccacgaggactgcgaagatttctagggttggcaggctactatcgcaagtttatcaagggttttggagtaatagctgcaccactaacaaaactcctaaaaaaagagggtttccagtggagtccggaggcagacgaagcatttgaggcactaaaaagagctctctctatagcccctgtcttgcaactcccaaattctgccaactcattcattgttaattgtgatgcgtccggctcaggttttggtgtcgtactgcatcaagatgagggaccaattgcctttttcagccgcccctttgcagcccgacatgtcaagctcgttgcatacgagagaactcattggactggtacaagcagtacgccattggcatccatacttgtggggcaggaagtttgtggtacgtacaaaccatttcagcctcaagtatatgctcgatcaacggctctcaactgtacctcagcatttgtggattagtaagctatttggtttcgacttcaaggtggaatatagggctggccagctaaatacagtagcagacgctctttcgcgcagagaaaccaccagtggatcggtctatacgatctcaacaccaacctttcaactctacaaagatctccagcaagactgtg

SEQ ID NO: 37744 - DNA, 381 bp, Zea Mays
catagggaggaagaagacaggatggagggatggcgccaacgtcggttgcgcggggaggaagagaccgaagtggggcggccacacggggagaaagacgatgtgggtggtggtgcatggaagacatgtggggaccttggcgcgcttcaggggctatgacgacgtgacatcgtcacctgctcctagacccatcgtggtgcaggcgatgccgctaccacccttatcctcctcccccgtcgtcgagcgcaggtagggttacacgaaagggatcgctaaggatggcaggttgattttctaaaaacaaaagggtccgaacaaaagtcacacaggctacacttcctcaaatagctaaagttacttttatgttaaagtttcttttatatt

SEQ ID NO: 37745 - DNA, 462 bp, Zea Mays
ggaatcgatccgggggaggatagcttcgaacgtggcaccatctcgtgagttcagccgggcgtggccagagttattcaccggtggccgtcgtggctcggtcaattccaccacagtgtcatccatgccttgctcctcccttactgtacctcttctatacatggtttccatgcgtgagcaaagccttctgcggtcactgatcgttagccggaccgtcgtagctataaatagcgccatggaccacggcgaggtattcacatctccaccagtgatctcagttgaagtccaaattcacggaatcctctccacctctcccaaaattggtagtgcacggtaaaactatagttccttacggccgtgtagccccaatctcacctcccaattccacccagaaccgtcgcagcgccattttcccccttttctgtcaccagcgagcacaacttctccgcgctccgtggccggact

SEQ ID NO: 37746 - DNA, 278 bp, Zea Mays
gcgcatgtatatcggagtcgcaccgtgatcttcggggaatcgttgggattcttggccataggggcataaatagcagcgctgcatacccttctcggcctccaagccaatacgcgggcctcatggcgtagtgaagaatggcgggccgccacggtcggtccctgtcctcgctgccagttcgccaccgaggcctccaaacttcctggggatgttcaccggtgccctctgaagctttgtgtggcatcggtgagccggttgcgtccggtgcactgctccaaatt

SEQ ID NO: 37747 - DNA, 542 bp, Zea Mays
cagtcacgcatgaccccacctcacctgagcctgccctcggacaaggtacgtactcgagaaaattctcgtcccggccgaggtcccctttacctagaactaccgtctccgcctcgcccaagcccgtctcaagctaggaagacaaccccgaggtaggtctcagccaaaggtcgcatgggacatgagcatttaatgcgcatacctatcccacgcagcaccgcaggagaacaggagcaacactataggactgtggtcctgtcagctttcaccaactacgatgtcgtatgcctaagtatagtggctactgttcccccacgccgcctgccaacttctgatgggacacgcatactacaaagcgtgggctggacctcaggaggaaactatgcctcgcccgaagccggccttagcatcagaacaaactccgcctcgcccgagcccggtctcggctacctactccctgtgaatctcgcaggaggtcactccttccactatgtcacgcacatctatgaatcccggagcaagctcgatcacgacctcgggcagac

SEQ ID NO: 37748 - DNA, 307 bp, Zea Mays
tggaggagcagttatgggaggagaggggaggagccgacgtgcaggccctgcatgcgcgtccgcgagcacgagtgtggctgatgggtcgggcgcgcaataaatggtcctgtgggcgaatggaggtgaggtattcgggcgcaaaggcgaggtacttacggctgcctctgagtgaaactagcacgcgagaaaaggacaacggtttgggaatatgaagctgacacacgagctcggaataacaacgagaggaataagcgagggaaaaatggttgcgcgcacagcacggcgtttgcgacgaaagacatttcaa

SEQ ID NO: 37749 - DNA, 394 bp, Zea Mays
aaatcattggttctatggggatgttatgtgcttctacccaagatgtagaaacaaaagaatgtgtggcaacagtgtcaaataatacatttgctggatgggattcgactagaaacatacctactgccacgtcctgagaatcttggattgcttcggcctccaggtggttcacctttccacggttgtaggcctgaccacggcctcctggtgcttgttgtggtgctccttgtcttgctggggtattgagtgctggcggctgctgatttgccttctttggacagtgcttcgcccaatggttttgttcccccacaatagaagcatgcgcggcctcctacttgcgctggagctacttggttgctctagttacttgctggggcaggaaggcgagttgcctggt

SEQ ID NO: 37750 - DNA, 461 bp, Zea Mays
agacaaagcgataaacaatggtactgtgccttatgtttttaagataaatggaatagtacatcatcgtatcggcaccttgcttccacgccgtggagcgatgcctaaatttgcccaattgtatattcatgatacagaccacgagacacagaacaggctgaacatgttcgaggtcgatgatggtgtcgctgaacaacctgaacgtgaaataactatggctttgttggccatgttaaatgacaataacaaacttgtcaaagcgtttcaatatgcaagggagcgattggaacaagcgggtaaccagagaataacactcaggttgttaggttgcgatgcaagacaagacgtccaatacaatcttccctccggcggtgaagtcgctgccatcgttgtgggcgactacaccgctgatgaatacacatatgatgtccttgtgcacgatagaaattgcgggctacgacgtg

SEQ ID NO: 37751 - DNA, 542 bp, Zea Mays
ccacagagttcgcctagcagcatcgctgaccgaagcagcgtatgttgatagcagcgtcagagactcatgtgctgacagagtcttgaaccctctatgacctgcatccattatcttgacatgaatgcgagtgatgtagtagcaagcccgaggaggctcgtacactcgcctggtctcgtacaagggtcagacataggttcccaacgcgtgcagaacatcctgcagcgggttagggaagtgctctgtctcgaacattgaggtgtaatgttcagtgacagaccataaccccactatgatacccaattttcttaaaagaagttaaatttatttttcccttttctttcgtgatctgtgtagctggggttttggatttctttgttttaggaagcattcaccagtaaaacagtagaattcttgtgagacatgcgttggggttgggagcagacgtgagagcaagttgggccatggatctcgatctggcccactagtcccttcccttaaccctagccgtccctcccccctaatcccctttttggttgcagccg

SEQ ID NO: 37752 - DNA, 441 bp, Zea Mays
ccaagggtggcacattgccgtccgattgcacgcctcgcatcactttcaccatgtctagcacgcgggaatgaatggctctcctcttttcctatggatttttggcagacacaaataatttggctgcgttgttttttcctgcttccttctcattcacaccggaatcgggaaaaaaacttgagtacaaattgttttccccctcatctttcggcaaagttcaatcatggctcatggctcatgtggctgcggcgtgctcgaaaggctaaaggtgaaccgtgatgggagatctttctgcttgcccatcatttcctttcggatgctgctctgctgcatcggtacaagtttgcgttcgccagctttcaaatacagccgagtgtaactgggcattgttgtgtagcgaatggtggccactctggagatctaggacacgttcggatggttgcc

SEQ ID NO: 37753 - DNA, 766 bp, Zea Mays
gacggaacgaaaagagccaagttacctgaagattagaaaagaatgagggcaatcccaagtcatgagaagccgtgttgaagctcgacgaaggaagatcaactggaacaatctgaatagcatcatcgggggtcgattcagctccactagcagatatcagaattctggcatccggctcgccgacctctaaggcgactccctcgctcgaagctaaagaagtaagcatcgctatcactctgtcagatcatggtggagacgactcgacgtggacgtccatggaggtgtgggaaggagagcttgctcggacaccttcaggggctgggttacagctcgcgctacccatcagagccggatcactaccggcaacaccctcgggggctgggttgcagcttgcgctacccactagagcaagatcattaccggcgacaccctcgggggctaggtaaccgccagcatcatccttgggggctaggttttctacaacgaccacctctgaggctgaaggatccttagccacctccatgggagtcgggcaatcctgaccaacctcttgacatcgaagactgccttccaaagtcgacgatgcacgatataccgccctggatacctctaatccaacgtctggagcatcagagcaaacattcatcatatcatcaacagtcggttccaacagcatatcttcaagaatgacatcctcaagggcctgatcaaaatctgttatggataaatcttgaaggctaacaagggcagacagagctggagaaggaat

SEQ ID NO: 37754 - DNA, 511 bp, Zea Mays
tgagtatcgtgacaaattcattcagttatcaagatatgctcctgatgaggtggctgatgatgaaagaaagcaagagcacttcgcagaaggactcaatgggccactacaatatgcattggtcgctcataccctcccatcatttcagaggctgcttgataaagctctagctattgaacacaagtgtgttcaactgggagacttgtagaggaaggccatcgcccaggggcagggtagcagcagtattcgtcctcgctacgtgttgccctagggtacaccagctcgtccaggaggaggaccacgtccatctcagtacgctccacaggggactccacagacaccccacactcgtaaggctgccacaactggcaccctggcgaggcctacaggacagaagacaggccctacatgcttcaagtgcaatcagattgggcactatgctaatgcttgtccggtggggaattccagtgcaccaactcagaacaagcaacggactcctggcaagggattcagc

SEQ ID NO: 37755 - DNA, 379 bp, Zea Mays
ccgccacgttcctatatgttgcgccccctttccttccctccactaccttcgtgcgtgagcgcaggaaccaaatcgtcgctgccattactatgagaagtgagtaaggggagaagcgggtcgccgtggagccatcagctcgttgccgatcccaattgggtccgaattaggatatcaggatcttcgcccaatcttaccgagggtgcgcaaaccgtaggcgggcggtgaaaccggtcgtagcgggcggaattctcgccgtggttgaagacctgccacggatccgcgctgcctcgtggacaggggggatcttcaccgtgaaccgaagtaagttgagtaccagtttgttctttttcctctcggcgtagcgtagcgtgattcaaac

SEQ ID NO: 37756 - DNA, 419 bp, Zea Mays
actgggaaaaggttaactctatttccctttcaaaaacccctcgggatgaatagcactcatgacctatgagacacctggactgcgacacatttatggcccacgcacccctcggcctacaacacactcatgacctatcagactaggcctgagtgcgcagacctttggtagggcgctacacgacggatagtgttgagccctatgctatggaggccaggggtcggtatagacaaaatgatggcacctagaaccctcacagccatacgccattcgccatggtaaatacaagagatccaatcaaccccaggccccacgagtatgcgtggattgaccccaggtagaacgctggttttaccctcaccttatgactctttcctaaggaagccatcgacagccaacccctctttcggcctataaaaggg

SEQ ID NO: 37757 - DNA, 388 bp, Zea Mays
cgtgacgccgtggtcgggcctctgagcttcatcccctcggtaagaaaactatcgctggtgatcgctttgtctcccgcaccgcttagctcggtctaatttagtgcttagtactcgggggtgatcgatcgactacctcaccggcgtgcgccgccgtgcgtgctcggtgttgccgcgcagcggatttggggaaggaagaagaaccgtgggccgtaggatctcaggttgacggctctgattagaagcaggcgataccccttcgcgacattaaatcagggtcgttgatctttgatcggaagacgtaggattgatctgcgggctctcgtcaaatgctggtctagaaagagatagatctaatcctgaccgttggaattgatctgacggtccaaat

SEQ ID NO: 37758 - DNA, 543 bp, Zea Mays
ccaatgcacgcatcctggccatccaaatgggacagtctctctgaaagggcggaaagaatctgagcggtgtgtcggccacttcttcttcataaatctgacacagggccctcaatgccttgcgagtgatgacttggcaagtgtctctgaatctgtgcccagcagcagtgacactccattccacatggtgcagactggatccaatgtatacagtcacgacacacttctctgtgccatgctcgacgaattcacgaccttcatactctggctggcttctgattccaaggcgaactgtgcatgctctcaataacttggggaaaccatcttcattctggcaaaagctggtttgacaatgaacctccatctgacttctgagagaaggaaacggggcaagcattttttaaatgaagggatgagagcaagaatttttttaagaaaatagttgtgactcaaaaacttttggatcaaggctaagggttacgtcctgcggccaacctaacagctctgataccacctgaagcgccccagatcctctgggactcaaat

SEQ ID NO: 37759 - DNA, 442 bp, Zea Mays
ggagactgccgggatctgtggagggacgaagagcagggtcgcgtcaaactcaaaccaaaactgaaactggggaggatttggcaaacgcagggagtcaagaacgcaccgcgtgctctccttgcaagctgttgcacatgccctcgatctgatgagcaacacaacaccttgcaagggggttggttcgggcattgactctcttgctctgtcctcccgtcgtcgacctgccactctctcctcggtccatggccgggctgtagtagaagctcgtccgtcagacagctagctaggagcttagaccatgcatgcatgcatatgtagcttgtaactgggattcttccattgtaacgtgcctgtacctctgcctctgtgcatgcacggagcgaggttgtacgtctatggagattgcagaagtctaaaaccggttaatttgatttttttttcc

SEQ ID NO: 37760 - DNA, 336 bp, Zea Mays
cccaggtgtattcacaattgggctggccccaaggaaagtttcgtcggaaactttagggcacttacgtgcacttgggcaaccccgtgggacctcaagaactattgacagaagtcggatgagatcctgagagactacatctaacgcttctcacgactgtgcaacaagctgactaacctcgctaacgtcgatgttatcagtgccttcatctcgagaaccataagcaagactctagtacacaagttaggacaaaagagcccacgaactatgaaggagctccttgatatcgtgaataaccacacgccaggggaaggcgcgatggaggcaatgtttgaccac

SEQ ID NO: 37761 - DNA, 293 bp, Zea Mays
aagctacaagtgatgaactgcttggagcttataccaagacataagataatgggttatctgcagccttcggaggtcggggaaaaaaatgaatgaacagagtttttgacgccataggcttcgtctaccccgattaccgctacccgctgcggggacaggggaagaagagaaaagctgctgctttggccgccctagctgaacctgttccgaaggctgtgggcaaaaagatgaaggttcttacccaccgaccacgttatattgaaccggccgtggtgcttgagtttagcggggaggcc

SEQ ID NO: 37762 - DNA, 290 bp, Zea Mays
caaacacacactgattcctaaacttccacagctgccaggcaatgaggatgatgatagtattcatcccttttttcttttccttggggaccaccttaattattctgccccaccaggatgcaaaacaactgtctgtggcttggggtgctaagactgcgaagccaaactgtcggaataaagtgacccataactgcctggcaaacacacaagataacaacaggtgatggattgtttcagcttcctgatcacacaagggacagactgaagggtgaggaagtccccttttagcaagc

SEQ ID NO: 37763 - DNA, 478 bp, Zea Mays
gctggccatgcaaccgcctcctcgcggctatttgtgtgtgatcgcctcggccacactcgcttcacccaaatttttccaccggtgagcattgtcgtacgaaaatccctaagtatcgtgaggagtgggagggagcctccatgccattcttcgattatgtgctagtttcgtgcctgggctggggttgagatccccatcgcgggtcacactttcggtggtagcagccaggaagaccgggggctgccgtggtgcccgtaatttctcatcgtcgctcggacttggccacatatccacgtggtgcgtgggcagctatcccccgttgcctaatctccggtgaggcatcccccacctgtttcgctttagtcttgtgatcatgtaggggcgctcagggtgagtatcggtgcggcgttgcgcctaggcaggtcaccggtgtgtgtccgccgctaaggctccatgcaccgccgtgggtcacggctggagg

SEQ ID NO: 37764 - DNA, 654 bp, Zea Mays
gctgtggcccatgctgttgctgagtgctgttggctgcggcagctccttcaggaccttcaggtctctcttgcctctgcgacggtcgtcttctgcgacaacgtgagcgctgtctacatggcagctaatcccgttcatcatcgccgcacgaagcacatcgagatcgacatccactttgttcgcgaaaaggtggcactggggcaagttcgggtgctccatgtcccctccactcatcaattcgcggacatcatgaccaaaggcttacctgtccagttgtttactgagtttaggtccagtctttgcgtccgtgactctcccgctgcgactgtgggcgggtattaggcatatatctatagccggctgtcttaccttgtataggtgacagccttcctagtttagccttaccttgtataggtgacagccttcctagtttaggagattgtatccttgtacaccaggccacttggctatatatatgagaagtcacccacctgattgggtgtgcggtgctttcccctaaaccaactctctacaccggggactggggcgaagctgacccagcaggaatcagcggcccagatgaccagaattccccttcatctagagcttcagcaggcaaactgtatatcttccttgagccgtacccatccatctcgg

SEQ ID NO: 37765 - DNA, 351 bp, Zea Mays
cacaagtccgcttccagcttcggcaggccaatgcttttggaaagggttctgacaattttggcctcggtgcggttccgaaggcaccttagttttccttcgttcaccccaccaaatagcatagcccctgatttatatccgcaagatatggcatattttttcaactcctctttctcagcgtctgtcaactcttctccaagtaaatcttgaaagttgaaatcttcttctgaaatttcatcaatttgctctttccccttctcagtagtcgtattcactgtagccacggtagcttcctcttcagccattttcaggagtatattgtcaataacctcaagtgtggtttccaggttcgac

SEQ ID NO: 37766 - DNA, 439 bp, Zea Mays
ggcggtggtcgtgcccctacggcggcgccatagatgcggactgcaattcccccagcccgtacacctaagccctgacccaaactatgctacgcagagagaagatgaaaccgaactcgcagacggggcactcaccagcacctgcagcataggcgggtctatccacggcgcccggttgccccatggtggagatctacctccagtgagcaattggtggaagataagccatcgatttcgcccgcaatcgccgtggtcgactccacacaggttctgcgcaggcttttggtccgaacataggcatagaacaccaacagaggtgaggatccgtggtggcgcaatgcgccgctcccagcgcactaacgacttcgcccttctcctcgcgattctggcgctggcctttggtgtatgtgtgagacaaaggggaggtgggacctgacgctcc

SEQ ID NO: 37767 - DNA, 790 bp, Zea Mays
gcaaatcacacctgggatttggtgcattgtcccatacacgacgatgtggtgattagcaagtgggtctagacacacaagtgaaaggcccatggctctcgggatcggtacaaggccaactaggttctctagaggtttacttagtgtcctggtgttaactaggatgaggcgttcaatccgtcgtgaagcctgctaccgtcctcactttggcactctcacgttcttggccagtcaatcaggtggatgtcaagaatgactttcttcatgggactcactgagaccgtctactgtagccagcctactgctttgttgatcttgttcaccccgatatggtttgcaagctcaagaagttcctctatggtctgaatcaagcccctaaagcttggtacaaccgcttcgccatgcgtctgctctctcttggttttgttgaggccaagtcggacacatctctattcttcgttcggcttggcagtgaaaccgtttacctgctcctctatgttgatgatttatcgtgctcactgcctcttcggcttgcttgcaccggatcatcaccgctcttcaacatgagttcgccatgaaggatgtgggcccccttcactttctagggattgttgtcgagcgtcgctccaagggcctcttcctccaacagcggcagtacatcctcgagtgggctggcatgcaagccctttgtgacgctggtggacaggcaagcaagctctttggtgatagcactcatgtcagtgacccgaccacttatcgcagcctcactagtgctcttcagtatctcacctcc

SEQ ID NO: 37768 - DNA, 657 bp, Zea Mays
ggaacactagcctctaaagcgactccctgacccaaagcttgggctaccaccatgcaaccagagtgtggaggagatcctgcgtgaacatccatggaagtacaagagggtgaccccgctcggacaccctcgggggctgggccatagtttgcgctacccacttgagccggatcatctccggcaataccctcgggggctgggccgtggcttgcacttcccacccgagccgaatcatccccggcaacatcctcgggggctgggtaagtgtcaacaccatccttgaggaccaagttctctgcagtagccgcctctaaggctgaaggtccctcagttacttccatgagaacaagacgatccaagtcagtttcctgaccctcaagaccgcgctccaaggtcgatgaggcgcgggacgctgcccgggatgaccccaacccggcgtcgagcacatcagcacaaacatccgtcgcaccaccatccgctagctctgataacaaatcctctggaaccatatcttcaagagtctgatcaaagtttgccagggacaattcttgtagaccaatgagggcggacagaccaggagaaggaactccactactttccccactggcgacatattgccgactgttcttctgagtcaaagggacctcatcttcttcctcc

SEQ ID NO: 37769 - DNA, 494 bp, Zea Mays
cttttcttatgcggtttgactccatctcaggtgatctctcgatcaattgctggatttcatcttcttcgaattcattttccgtttctgaataggcttctacgcctattcaattttatttgcacgcagaaatgcgaaaaaaatgtatatctaattcttatgtcttatccttataacgatcagcagatccatgtatgtactctaaccatttgtatatttaaattctgattattgttcgtctggcgctgctgtaatgttccttgtgcgttaggatttagaacgaagccgcatatattcaacttaatctctatcctctctctttttggctacatagcactatatttttggtggctagtgctaataaagtatgacagtagtggagaagttggcaccacacggactttctttatttatgtttacatgtgatagcttgattttgtttggtatgtcaatagcgatatgataaatacctataaaagcctgcttctccgtttggg

SEQ ID NO: 37770 - DNA, 366 bp, Zea Mays
gacaccgctcgtcgtcatgattacccttcgtagcaaggccacgatagtaacacaaccagaggcaggggtagaggccgatgctgcggcagcgaagattctattgtcttttccatggcgaggactcagcacacccaacctgggattgccctgaaaccaaggcaacaaaatatcgaatggctagaaaccaaccgactgacaaccaaagagatgtagcccgcacctaccatccccatcagtacaaccagcaacaattccacaatgagcatttccatcctcaccaacaaaaccacaatatataccaacaacaccaagaaatcccagctctacctcctccaccaccatagcatccaaatcaatcattaccac

SEQ ID NO: 37771 - DNA, 320 bp, Zea Mays
tgttggaaccatacctatcttaccctttattattctctccacttcgccactttgcaagtcttgccctaactctgtccatggactatgcttttcatcattatcatctttacccttgtcacctctatatcttaccttgatgcttatgttatacctgttctttaaaaccttctctcttccatctcaattttatagttgtattttacctattttcccttggttgtatcctcttccttgtcgcttgcgagtttttaaccccatcctttgttgtgctccggttgggtactacatttacctttctcatctctcgatcctaccttggt

SEQ ID NO: 37772 - DNA, 489 bp, Zea Mays
aaaaattcaattcctcaggctacagtggagggattgaggggaggagtggtccactaggcacgtaacaagaagccggagcaggggaagccttcaatttatagtgaccactcaagcgctttgcaaatttgggatgaaatgatctcgtggtcgaaaggaaggtgagtcatcggagtgcaaatgtcgtggagctcggtgaggtaaggaccctggcggtaaatgggatgtccactgtgacctattgcgacatggtaacgcccccaagcatgtggcatcctcgcggtgagcggtggacgccgacgatgtcattccagccagtcgtgaagcaagtgggtacggtggccagctcacaatctcatctgtggtcatgatcttttcacttgcccaataatatctgcgtcgagtcatgcatgaatcttcacggcgagctcgaatcaccgctcccgatcactggtggcgaggtgcactgcaccaaggatcttcttagttcac

SEQ ID NO: 37773 - DNA, 487 bp, Zea Mays
tggagatgcaacaccagtataccatggagtcgcagaagtcttcgggtgttgatcagcctcgtggccaggacgcgaggaggggcaacacgggaggtccagcccacaagaggggcaagtctcagcttcagcaccaccatccttatcgtgccagatcttccgacgcgggtacttcgggaggaagtactcagaggtttcgggctgttcctaagcccgggctggggctggtgtgtttccgctgtggtgatgcgcatcgccgtgcagagtgccagtggagtggcaggtgttctatctgcagtcaggaccacaaggatgtggtgtgtaggaggaatcctaatgggaagctcagatgggagccggtgacttcctcctcttctcagggcactatcaacatgatgtcaagtgctcagcaggagttttcagttcctcttccttcgcaacagctttttgtgcctgggacttctcagttcatgccaatgcagggttttcc

SEQ ID NO: 37774 - DNA, 795 bp, Zea Mays
ctaaatcttgcattcacttggggaattggataggtagggagtggataggctttgtcggtaggtcctttttccggggagaattcgcctgagttccttggaataaaagaagatttgcgatccttaagcctcacgttccttgatctgctggtgtggaagttgatcttgatcatgttcccgttcgtcgtcttcatgggtacgctccagggttccttctctgttttcttgtgttcaccttgatggctactggtgcgaattttgagtttcttaaatgtttcatggttcctttttttaaccactggggccatgtcgcaattggtgtatcatcacggcgtgtattgtgctgaattgggtgcgggtttgctatctaatatttgcgcatggttttgttgttgcgtgaaaagattggtctttgatgtgattgttgtggttagccatcagaatcaggaaatggataataatcttctgttatgtttgatgattgttagacaatttgatttggagatggggccggaaatgatagagcaggatggatggtaggaaaaggaaggggaaattcaggaattctctcaggcgtatggctatggagtgcctgtgctctggtgagcagttgaaggcgtcagatgagaccatgcggtcatctgattctacgatcacaaaggatttctcggccagtgggtactcttctcggaatggagagattgagcagtaccttgataatggcaacatagaggaagccgagttgtcgctccgggagggcatttgcctaaattatgaggtaagttgttttcttttgtg

SEQ ID NO: 37775 - DNA, 339 bp, Zea Mays
cttcgttagccgaagaggtctcaccgccaaaatcaggcactgtggccgtttcaatgtagcgtggtcggtgagtgaggaccttcactttcttcctcttcggcgtgggctcactagagacagccaaagcaacatctttcacaggagccgcacctttccttttctgaccccatagtgggtaccggtagtcagggtacagaaatcctatagcatcaaaaactctgtttagtctcttcttttttcgattcccgaaggccgcagataatgcgttgtcttctgctctggagtacggcccaagcaattcgtcacttgtagcttcgatacattttaaccagtcatcat

SEQ ID NO: 37776 - DNA, 357 bp, Zea Mays
attaattttcatgggactaaattgttcaagccagtccatgcccaacactgcatcataagtctgtaggggaaacacccggaaatcaataaataatgtatagccctaaactgaccatggaatggagctaaaaaattgggaacaagaaacattgcctccatcggccacttggactgtcacaggatgaggtagaggagatataccagagagcttcccagctaatgttgaactaacaaatgaatgtgagatgcctgaatctactaacagaacaataggatgcccttggcatttgcccgagaattgtatagtctggcgcgaaggaatccctaaaactgcagacagtgagagagacaatagccc

SEQ ID NO: 37777 - DNA, 421 bp, Zea Mays
actagataagtttgtttgcatgcctagaattaagggttgtttgcatgcctagaattagggagtagttagctccatgcggttaggcctaggggcctatatattcctgtaaccagacctgagttggaattaagaaagatcattatcctaatctctctctcaactaagccgacggcagaggggcataacctcgccggagaagacgacggaccgcggctacgatctccgtagccgagggccacccaccctagagacactaaggcccttgacaacctggtatcacggtcaccccgatcctactcatccacctccgccgacgccgagtctaccgccaccgctccactcagccctaccgtgccaccacaaagcccaccaccctccccaccttcatccgcatcctcctgttcacccatggccgaaccat

SEQ ID NO: 37778 - DNA, 278 bp, Zea Mays
tgtttgaaacaagctcctcaatttccgcaatgtccaaattactgaatttccagtcccccaacattgccaaattcctatgtcctttagaaaaaacaagtaatcatttcccaaggaaatgatcaatgcagataggagcaagttttatatcaaaagcacatgtaagcatgttgcaaacattttgtggcttctatgcatcgtattctcagtagccatgatgactaacatttacattgttgagttctttgttcctttcgtagttgattgatgctcatattctg

SEQ ID NO: 37779 - DNA, 381 bp, Zea Mays
ctagaaccaccgcagtaggacatcatttctgtgtcatataacgtagagagctctacgtaggacgcgaagaaagccgacagattgtcatacgaggggttgaacctcatatagatcacgatctgtcgtcttatttcattaactttagaaggcggggcgagcttgtgtccctcatgccgcccgcatggggtgaggctgaggggcaccgagggcttccaagatggtgtcggggtctccgacgaaggaggtcgggcaggtgtcactctgaccatattgccttcctggctgatgacgaaaccgaggtttccaatgtgaatggccgctccgggggtatcgtctatgtgcggccgcctgtaggatctaggacactagctagagggggtg

SEQ ID NO: 37780 - DNA, 561 bp, Zea Mays
ccttaatccatgattcccttagctctcggtattaaacaccatgccctgaatcaacttcacccacacacagcgctcaattcgcttccccgacctccaaccgcggtgaggaatgatttggcggcaatcccacactccggtgagcaattcccaatagactacaccacctaacccagctaaaacggacatgcatgatccatgagtcggggaaaacataaggagggaatcgtaccagcctgaatgcggttgtagatgtgcccacggtgaggtgtgcttccacagcacccgagagtcactaggggattggccttcatttctttggtcgatgtcccctcctggtgagagcgaccacttccttcacggcaacatagaatacagaggacgaccctcgattcaattagttcaacagcggggttgtcggcaatggcggcgatctcttccctagcaactcgcggtggtagccaaattagcgagggttacaacccaacgcgtcgcgggattaggtttatatggtcagcgcggtgaggccggcatgagcggaggttgttatgcccgatcgcccta

SEQ ID NO: 37781 - DNA, 561 bp, Zea Mays
cgcgcatctattactggccatcagatcgccatctaacggtgcgcacccacccggattcggaccatcgatcccaaaatctactgccagatctaaatgggcgaaaaggtatactgcaaccccatctcatccacccattaactgatctacggccaccacaatctctcctttctctctctttttccggccaccaggcagtagtgccagcagtgcagtagcggcggtgccatggccgagattcacatcaggtgcccaagacttttccgaaagcgtggtacaggtagattacgagggcagcacggcgaatgcaatgagatggttcttaccggaagtggtggcaggtacggggcgaccacgactgcgtgcccgccaatggtgttccgcgacccaccgaggagcagaggggtacggtggagcaggagcttgggaacgagggtgtggatttgctaccatggatgagcacgatgtccaagagccaaggcgcagggcaaggatggtcaggtaagcggagggagttccactggcgacgagggaggaacgtgccggggggtcgacggtgaggct

SEQ ID NO: 37782 - DNA, 496 bp, Zea Mays
tgaattcagggctgctcctctgctctagaaatactgcccactgaccttctgagattttatatttttttgtcgggtctaggcctttctttgcaaattttgtattcatctcagacctccagtttcgaaaattgattgcaagctgcttcatcgtgtattccttcacgagttcttctgaatcccgaggtagaacaaacctcattaatagcttattccatatttgattcttgacatcatctgacacatctttccaatgtcggattgtgatgtcaagattatccctaactaagaacccaagtgcattccggaacttagggagtgcctcttctggagctaggggctgaactttcgggctcacatctgagattttatatgttttgtcaggaaacttgttcagtcccctgtcacttcttttctagtcgatccgtgtccttttccttgacctctcggtggttctatcggtcggtaccggtgcgtcttcgtcctggttcagccccgg

SEQ ID NO: 37783 - DNA, 364 bp, Zea Mays
ggaagagggtctcacaatacccactaatgaagctcaagacgtggcctctatatggtcgattgaagagactaagaggatcaatctgtgatttgctgatgagcgcaagaccgccatcatctgttccagccttgatgacaaataggaaagcacgcttgtccgattcctgcatgataactgggacgtattcgcatggcaacatgcggatatgccgggggtcccgagagaactggtccagcacaaattgaaggtatatcctcaagcaaggccgattcgacaaaagttgcgtcgtttcatgcccgacaaaagagaagcaattcgcgccgagttagctcgcttagtgtttgcagggttcattagggaagta

SEQ ID NO: 37784 - DNA, 424 bp, Zea Mays
gtggaggtggatggcaagcaagagagatagaggtgggcaaagtgcaatttcaaagggtgtgagaccaagaatagcaagcatagagctgagggaaaatttggaacaactggtttttggacacatctgaataattaccaccatgtaaagaaaggacaacagcagctcacagccggtaaggatagtgagacaggaattgctatagttaaaccttacaagtatgatcaagaagctagcttgaaaaagttctatgaagctatgattgttcatgagtatcctttcaatatggttgagcatgaagtatttgtagaatgggtcaaatcgatgcgcccacattttcctttaaagtctcgtgtcacagttagaaaggatataatggactactctgagaaggataagttgtatgcatacttcaaaaccatccgaa

SEQ ID NO: 37785 - DNA, 398 bp, Zea Mays
ataaaatacttgtcatcgcaggagacgagacagctgacacagacttcattctctttgggcgcgtggctcaaagaattgtcaaaagaccttgcgatatgctcatagcgaacactccatcaggcttcattccagatgcaatcacgaagctgcttgaaaggacgttcgtttggaacgttagcttctctgggcacacaattaactctggaaacgtctgcttccaggtcaatgctaccataaaggaactaggcaatcagaatgttgacatttcaacgtcaaccgcagggacacaacagtcttcgtttatgttctcacagggtgcaagcagcagcatgaaagacactcctcacaagacagacaccttgtcttcacctctgacacctttgacgcctcagggtagc

SEQ ID NO: 37786 - DNA, 301 bp, Zea Mays
ccgcccgtaagggtgatgtaagctccctagataggtcgcgttatggaagtttcattcgtaacctctacttttgctgaccctcgtacctcgtagcccctttgtcatattttcctctatttctcgtacgagggttgtgggtgctatagttgttccagattctgaggagtatgtagcttagccagagaaaagggtgagtcctacctttgtcatgttgtgccaaatggggcaacaatggagacatgtatgggacgatagtacgatcactctgcatatcctccccaatgtcttgagacattgtctg

SEQ ID NO: 37787 - DNA, 280 bp, Zea Mays
caccgcccaatcctaagagagcgccagaaagagaacgatactgacggtggcgagcttcgcagggctgaatgtctcgttgtaatccacttcagggcattgagtgaagcccaaaggacccaacaagccttgtaacgatccagggtaccgtcagccttgagcttgtgccgaaagatacacttgtcggtgaccacgttggtgccaggggtgaggtaccaggtcccacgtgtggttcgccagcaaggcctcgtactcctccatagtgtgatgctagtgggggtca

SEQ ID NO: 37788 - DNA, 462 bp, Zea Mays
ggaacgaatttggcctttgtgcggggaatgtcgttcgggcgccgcccgtatcatggtcgggggtgttcggctgcgtggaggtcggcgaaatcattcccctgtgttctccttgagttccgtttagggctagactagtttgatttgggcaggcctcgtcggccatatggcgcggccgtgggcattccctgccagagggtgctcggctcaccgggagagcggaagaaaggagaaagcaccagatccgttgatctcaggatgaacggcccggggtcagatagggtttcgaccgtgggatggttgttgtgcggctcagatcaaacggtagtatacctccttcgcgcattaggtcatgaccgtcgatttcgtgatcaacgatcctcggcgcgtaccggttcattaaagactagattcaatccaggccaggaatcctgatcgtgcagcccacagtgcacgatacccctt

SEQ ID NO: 37789 - DNA, 355 bp, Zea Mays
aaagggttgagcaaagacgaattatagagagcagagaaaacccatctatctaaggtttttcctagctaacttatgtcattgtggacaaaagtcacacaaaaccacaacaatcattacaaagaagcaaatcaaacatagtcacaaatataactaacatgaactcaaacatatcagcacaacacaatccaattctactcattcaaccaaaacaaaaggtgagacaaggtttggaataagaaagatattataaagtcaaggagtcaggtaagaattatcaaggagttagacaagacatatatgtcggtggccaatagtgaaataaaataatcatgaactattaaagttaggataaatg

SEQ ID NO: 37790 - DNA, 330 bp, Zea Mays
gggcctcaataaccagaaaactcaggggctgctcgcataaaatttcccaggcacagcgctccactctctggacggcgggttgatatcctttaaccctagggtctctttagcaaaaggtgcaggccgaaggggtatcggagagctctggccgccagatcaacaacggacgactatgattagaacttatctattatgaaacgttatgcgatggcgtccctcggatcagagactgacgatctagattttaagtagccgaggccctgccggatctgcccgatcgtgatccaagggccaccacagatccgcgcgacgttacatccccgattaaat

SEQ ID NO: 37791 - DNA, 515 bp, Zea Mays
agctgtgacaacctgacgagggtgtggtgtctgaggcgtggcctatggtgactgctaaacagggtgttggtatgattgttgcactcctcctaaatgagctggggtacccagaggttgagtataacgaggacgactgatgtagcctccctgtccctgagtgatagtctttctcttcatctcgcttagctaaacaggtatgtgttcaagggctatggtcttgtctagcagtttctggaaagatgggaatgagtgagacatcatctcatattggagtggcccgatgagtccctacaagaacaattcttgcttcttttcatcttcatcgacctcctcaggagcatatctagataactggatgaatttgtctctgtactcacttactgacatccctccctgcctgagtgagagaaacttcttcttcttgatcttcattaaaccagcaggaatatggtagtttctgaaattggttgagaattctgcctaagtgatggtgtcaatggcagcatatgctgcgc

SEQ ID NO: 37792 - DNA, 1066 bp, Zea Mays
tgagacaatgctggtccgacatgtctttcctgaattcagcagtcgtgttggacacctgcgagcaaaggtggaatgctctggaaatttgttttcctgcttatgtacagtgaataagtatttctaatgctgtattcatattctttgatgatttttggtaaattatactagctcttcactggtcaataatgatatagaagattaagttggattgccatggggtacactaaatctacaattttctataatgggtactccatttcaaaatgcagtttgatttggtactatacttccccatttgatttatcttatatatcatgccgctcatgacaataaaatcaatattataaaactgttacctcttctaaatgtgagtgtcatggtacctagcaaaaaatgccagttagctattgggtaaaaaaattctgatgtttgaattctcaaatatgtgcatacaaaaaaaatttgcagggagtaccaaatattaaacacccatattttaattgacacaaaattacaactattcccttttccagtggatgcattagttgtaccagtgtcgttaatcaataaaaaaccattgggtactattgatcaaatgaacagaattgaccgacgtacattaattaatgaaatgaaatcatttgatgtatttttatatcagtagtaggtgctaggttggtgtttccttcttgggaccttcaaatatgatctaggtctcttcatggttaatttctaactcattaattctattttacaataatgatctgatatattgaatcttataggcagcatgggttgctgggcagtatgcccatatcaacttttcagacccgaacaattttcgtcaggctatgcactgtatagtttcaggaatgcatgatccagatcttcctgtgagggttgattcggtctttgcacttcgttcttttgttgaagcctgcaaaggttatattatctgatattttctagttctaaattgtggacaccagttaagataactgattataattttatctctgcatttctgcagatttaaatgagattcgacctatacttcctcagctcc

SEQ ID NO: 37793 - DNA, 417 bp, Zea Mays
ttcattgtgctcttttatgttgtagatgcaaaatagttggttaccagtcatcgctaatgtggtgttctttgctttccagtcccaccagcgtactacgcccaccttgccgcattccgcgcacgctactatgtggaaggagaaagctcagacggtggctcgacacctggcagcagcgggcagacagtagcccgtgaggggcctgtcgaggtgcgtcaacttcccaagatcaaggacaacgtgaaggacgttatgttctactgctgagctgctccaagtttagcattcaagctttcttattttcgtaacttatccttgatatggagctggttgctcttattttcgtctctcggtattcggagtagctaggctatgactggagcatggtcttgaaggcctaacactctgtttggatgaaat

SEQ ID NO: 37794 - DNA, 303 bp, Zea Mays
acctgggccagtgatcctacagatcgtcgctccatcactggttactgtattcttcttggatcatcccctgttgcttggaaatccaagaagcaagctgttgtatctagatctagtactgaagcagaacttcgagccctggctactactactgctaagattatctggattcgttggctcttggctgatctaggcgtttcttgtgactcgcctacgcctcttcactgtgacaacattggaactatacaaatttgtcatgatccagtgaagcgtgaactcacaaaacacattggtgttgatgtatcg

SEQ ID NO: 37795 - DNA, 627 bp, Zea Mays
tcttctgaacccaacatgatcaaccatagaaagtggatactcatgcacacagatcattagtgcaagttcttttctagcaactacttgatcaaaaacatacttctcaaccacaactcctcccttctcatttttgcccaacttcaatattgattgctttaggcctttttgacactgcttagattgacaagttttaaaatgactacgcaagtgagttgtgcctgggattgaccgattgaggccaggggatggccggacggggattgggtaattagggattagggtgggctggtggcttggtgctttgatgggctgaatgttactttggtgggctggcgcctaggctcaataatggactaatggttaatttcggatatccaacggattatccgcgggtgagatttagtatccaaatccatgcccacttatctcggatcggatacgggtctaacccgcgggtcaaaaaacatatccatatcctaatccgtcgggtcggatatccgtaggatatccaaatccacatattaaattgccatccctacttgaacctgtggcttattataaatatcacactattagttgctctcatactatccaaaaagagacaattctaaaacaacatatctttca

SEQ ID NO: 37796 - DNA, 1042 bp, Zea Mays
tcttctacagttgaaaattccctcgtgtgtggagccgaggtgagtggtggctcatatcgctttctatgggtcaggtaggggacagtcctggacttctgattttgggtttgtttcggtgcagatttcgtcacttggatacgaattttcacactacttcgctgaattaaatcttcaggcttttctctcctgtagcaaatcttcaggcttttcgattcgaaatttaaaaccccgtcagatctgtgcttgcgctgctcgccataaactgaacctgacagtagcaaaaggaagtgttggatattgtgatagcacagacaaaattattccatccattagtcccccttgcagtcaagataaggatgtatcagttgccagacctcgaaatcacttaactaatgcacatcatatcacctccaaaaggtggactaaacttaatgcaacgcgtaaaactttaaatttctgttttttagaggtgtatctgtttgggaatagcctcaagagagactgatcatcatttcctttcaaacccagctatatttacaccaattcatgttaacagagacaagcttcctgttgctccacctacctatacatcatgctactccacccccacgatagagttcaagttcacattcaaatagtaatgtactcaactaggtaatgctgtgattttatcatctgcatttacacatagctgccattcaaatagtacacatgttgctgcatctgtacctcgccactctagggaaatcctcttcacattatgcacatatagaagctcgccttttcacctttagttaaagctcaaaagacccgataacaatatgatcatcaagctcagtttcttcactttcacaaagtgctccacccacagatcagataaggtgcataatattcagtttgctgccccaaagcatttagtgtttttaaattcttcacacaaaaaaatgtaccatgtcggtttcaaagttcatgaaaaaaatggaagacaatactagtagtttgaatgtacaacacaatcacttgggttttctaccgtatccgc

SEQ ID NO: 37797 - DNA, 639 bp, Zea Mays
cgccggtgaactcatgacgtgatccatgccagcgttgtgattcgtgctccatggcgcgcggataactgctagaggtaaaagatcttggcgtagggattagcttgggtcctgtttagttcactgtacccccttgcacggaaatgtggccggacgatcatcgccgtggtggctgccgtccttcgcggttgcaccacgccgtgaccctttcaccatgtagctataaccatggcaagcctagagttactgcccctgaaccgttgtaccggtgggcgccacgacgaactcgtccaataaaacatcccaccgccgccgtgatcatcttcgactcaaattggtgaagcacgtagtcggttcctttaaattgagaactaccctcgctccgcctctctgttacgcgctcataccaccctcagttagcctctctcgtgcactgtagcccccagccaccggatttccccaaatcaggtcactcacgccgccgtgaggcaccctgccgtgatcagccattcccaggtccgttcatcccctctctgccatgttttagcatccttgaatgttaacgtagctcgtcggctcaaccgattgaaccctaccacgatagggcatcgagaacatcagctcgccgccacagaacacgtc

SEQ ID NO: 37798 - DNA, 749 bp, Zea Mays
tgggacctgtttgagggggaagagttgaggttgatgttgttcaattttcgggaggcaggtcttattcggaaggaggagcctatgtgacaatttgttgcccttgctgttctgttgcgatattgagtgaaaacactgccctccccctcttcgcaatagaactgcgatggccatgtttgtggggtaaatgttgtatagtgtatgctattgtgttgtgggatggtgcctttgagcccttcgcttgtttgttcatttgtgattgtgccatgtaatttgttgtgcctattgcgagtttgctgcaaatttaggcgactttggtgtggattggcgtgtacgtgctttagatgacttcacgtttgataggtgaccgtgcatctgttgtgcttgtccagctgacccttaggcaacttttgctcggatgatgacttatgtagagatcgggccctgtgagtgttgttacgtacttttgtttttctggctgcaccattgggcgactattgctcggaatgtcttcgtggaagacttcacaccctgtcggtggtgtcgcgcacttattgtgtctttttctgctgcacccttaggcgacttttgcttgggcggtgtcttcgtagaagacttcacaccctgtgggtggtgtcacacacttattgtgctttttccagctgcacccttgggcgacttttgctcagacggtgtctttgtagaagacttcgcaccctgtgggtggtgtcatgcacttattgtgctttctc

SEQ ID NO: 37799 - DNA, 274 bp, Zea Mays
ggaagaagcagtatcataacaacttcggttgttacagcttcgtgcctcgttctgatgtgaggtatctggtgccaacattccgaaagaagtggtcgggctcttggatgaagcaatggttttatgtgaaaatgatctgattcagagggaggatgtgagaggtgtaatccaacgtcctatatggtcacgcttcggcattagaaggccatcaatcgcacttgggaatgaagtgcaagcctgccaaatggctttcaacaccatatgcacctacattggc

SEQ ID NO: 37800 - DNA, 592 bp, Zea Mays
taaaccaagacaacatgcaacttgcggtgaatgagtttatccctcaatagtaatttatcaacgaatcagaataaatggcccccgaagatcctatagatttggaaggggattttcacaatcaaacaaatgatcagtcacatgatttaattttcttcgatcaatcgggatgaaccgcttgttaccttagagccattgggcaagatgtcacctttaccatagaagacctcatggctagaatttatgggcaatcttcaagctcctcaaaagattttaagattagctcaaccccataacttgctcagttattcgcatggtgggaaatgtgaagattaggctaacaagtgacaactacctttaaatttgctgtctaatatggtatggttgaacttctaaaagtgcttatctatcctcgctcctcggcttgatgatttaggcctagaaacggctggcttggcaattgtacctttcaaacctgcatgggctactcaacttctaaccctttaggcctctattttggtttcacctagatctgccccctcattctaacatggatgtctgtactcctgtacttattgagcaggagggacatcag

SEQ ID NO: 37801 - DNA, 440 bp, Zea Mays
gatggaagagggaggactggggggagacgagcgcggttggcccagaggaggcgaagggaacggcgtgcgtgagagataaagaagctggaactggaaggatggatccgttggttgccgagttgcagagctgtcgtcttcccccactcactctcccctccatcttttgcggaagcggttagtactctttaaccgccgtaaccatctttacacgcggcattatccgcagacaagctctgttttacatgtgtaaaaaatgatgcctttttttctctctctcaaccacagcaagaaaagaaaatcttagagctcagttcttttttctggagtggatcatgttagttgttggtcagcacaaacccactgccatctcgtctatttttatctaatctatttttagcagactggtaaaacggggaagaccggcatccaatccaagtcag

SEQ ID NO: 37802 - DNA, 674 bp, Zea Mays
cgtctgatggtgagtttgggagtccgttttcctggaccgaagagtcttcggatgaagacttggattattttgttgcgttagatgtggccgcggcggagtcctcgccgcgggtggaggttggcgaggtggctgatcttcctagtgcgaggaccaagtgccgacgacgaagggtggtgtcgaagcatagcgtgggcgaggtttcgcggagtggtaggtgccgtcggatggggatggagcgggaccgtcttcgagtagattgtattggtaaacgagaactattgtctttgccgattgggacgagcattggtgagggggatctgcggaacctttttgagggtgaggaattgaaaataatgttgttcaattatagggaggcaggcatcatcccgaaggttgagccgatgtagtatgtggtgccctcgctgagtctatgtaactgtaacttgtattgtaatgtggcctgttggccgttttcgcatacttgtgctaatctggctgcacccttaggcgacttttgcgtggagtgtcgattggcgtacttatcgcgcttatccggttgcatcctcgggcgacttttgcgcggagtgtctttttagtaaaagactttgattgacgcacttattgtgcttgtccggctgcacccttaggcgacttttgcatggagtgtcttttta

SEQ ID NO: 37803 - DNA, 366 bp, Zea Mays
ctgttgtcaacctctttcacaacttttttagtagcagcaagctccttaggaccttcctcatgctctgcattgatggccaaatcaaccaggggctttacctttttggttgctggtgcagcaacagtctggttttccttaaacactagaggaacactgtcactgtcaaattcagcttcaccgaatattatgatattgtccaaccctcgtggttcaccactgaaatcatcttcggtagaggtatcttcatcgacctcttccgttatcccagttccctgcaacctctgggctgcatcagcagtgcaattcccttcgttggactcatcaataccttcgtcgccctcgtcagtagagacgattcccccatcc

SEQ ID NO: 37804 - DNA, 333 bp, Zea Mays
accctcgggggctgggtaactaccgacaccaccctcgggggctgggtcttctgcaatagccacctctaaggctgagggctcctcaaccacctccatgggagtcgggtgactcggatcaacgtttcggcatgaaagactgccctctgaagtcgacgacgcgcgagacaccgctcgagttacctcttgtccaacgaaattaagcaaggaaagcccaccgcctgggacctctgaatagacagccgggatatcattggctatgggctctgacagcatatcttcagggacgacttcctccagtacttgatcaaagtctgatattgaaagtccctaaag

SEQ ID NO: 37805 - DNA, 1011 bp, Zea Mays
gcacttccaggcattggtcatacagtttcatctaaactgaaaagcaaagaaattgaatattgtagtcaacttcgcaatgtttcaaaggttcgtcggtgctatttgtgtagtgtaacatgaagcagtcccctttcctcattgaaagaattttttccagtccttcattttacaagtgttactgtgttccagtctcgactttaaatgccatttactaatgcagaataaaatccttctgtttagaagtcataagcacatcgtctaggttgtctactgtgtgatggtcacgtaatgccaactacattctttaggattatatacaatttcttgtctagatgaatattgatgtggtttctcacctatctccttccaaatatggttattacatcttagtgcttttgtaggatgccctccacaaggatttcggaaaaaagactggtgatcttttatggaattattgtagaggaattgatcattcaattgttggatctgttcaggtagaaaaaagagcatcccagccattgcttcagttgttttttttatcgaacgcgcaggagaactgcgcatgttatatattagagaggaatagaagccttacaaaaaaggagatgttgctgagcaaatctcccaaggaccctacatatacccgaaggtaattacaaattggtaccgtaacttgacccgacctcgcccagagctgcaactaagccaaggctctcaatctccttagctcctgctattgcccagctaacacactcatcagttgtgagtgcctgtgtctattttgttttactgaaaattgtgctcaactggtgtatgggatgtaaatacctggagcaggcagctctgctgatctgttcatgctccaaagaacatctaagaaatagattcagaaataacaatttgaacagtccagttttagtcaagcatttgggttgctttcaaggtgattggcaaaatcagaagacggttcctgtggagaggaaggaaataagttatgggagggcattgttt

SEQ ID NO: 37806 - DNA, 623 bp, Zea Mays
gacgcttcctcttctgcggcacaccaaggatagaatcgacgggctttgacatcctatcagcgaagcactaataaagcacatgaagaaaaaatcatctaaattgtgttgtcaaattggatccctcccggtctgagctcatctcaacagaccatgaagtttagatttgcacatataaccatatacatgacacaacttctagacaatgatttcacatacagaaaagagcatgcttacatccagtcagattttgactactgtgttgtacgttaatctctctgtttgagtaaagggcactgtttagataatctttgttaaaagaaaaggcgttcaccaagagcacatgaggattcataagtcgaacatgtttactcaatctttatttctttgtttcaatctcactaattcgtggatttatgcatgatcatattgcacatatatatatatctggtcccgtcctcgtgagccagcaaagactgatcgttcgctttcgacccggccgagtccactacgtgatgcttgacgccgcaccgggacaatcctcgtcgtggaccacggaacaccacgttttgtagcgttctggatctttccccaagcgagtcatgagttaacgggatcacggctag

SEQ ID NO: 37807 - DNA, 739 bp, Zea Mays
tgcgaagcctgccagaagttttctccatgctcgggaaacccttcgcaattcacaaagctaatcgcccacacgtggccccttcagcgctggggcctggacattgtcgggccactacccacggcgcaggggaacctcaagttcaccttcgtcgccgttgagtactttaccaagtggatctaggcgagggcagtatccacgataacatcgaagactgctcagaaattcttctggcaaaacattgtttgctgattcggagttccatccgagctcacagttgacaacgacaaacaatttgacagccaggacttcaaagacttttgcttctcaattggcaccaagcttgccttcacctcagtatatcacccacaatccaacggcgtcgtggagcgcgccaacggaaaaattttcacgaccatcaagaaaatgcttctcgacgacaagaagggcaaatgggccgacctgctacctgaagcagtctgggcgctgaacacgaccgagtgccgggcgactgggttcactcctttccgcctgctatatggatcgaaggccatgactccgcaggaaataaaacatgggtcaccacggacaagcacttcagccatccccgatgtagacgaaccaacttcgaaggacctcatcgacggagaccgtgtcctcgccctgcaggcactcaacaaataccaagctcaaacaaaagcatggcgcgaccacgcagtcgtcccgagagaattcaacgaag

SEQ ID NO: 37808 - DNA, 367 bp, Zea Mays
tgtcatgagtgaatggatggaatcgactgttggagcgtgtggagaaagggcttgcaaagatacagagccgatgaagccgcttccgttttacatgacaagatgggtagtacgatgctaggatgaacaacatcggcgaacacataaaaagggaatggatatccatttacggaacgtagggtggacgaaccaaacattctccttttctatgcgtgtgcatggacattagcaaatctataccactgtataatccaccaatttaaattttacaaaacgcatctaccaaatcaccccacactcataacctctcctagatccaccaaacaaattgcactcacacaaaacacaccttcaaaaccaacggttcaga

SEQ ID NO: 37809 - DNA, 577 bp, Zea Mays
cagccccttgttccgttccattgggactaacttaccggtggcatggtttctggcagcttcaccttggacttgcttttcctggtgcagatcggggtgtgatggaggacctggacgtggacaaggaatccggctatgccggtgcagtagaacttctagcttatctgaagtgatagattttagagttttagttgtctccaatgttataggatctgccgcaagttgatttgagtactctttatctttgccttagttgactcaatattttatttgattgttcccccaaaacttttgtgcgcgctataagcctatatcatggatgaaactcaccctaaatatgttgttgcatttatgcccattttgatggctgctttattgttgccctgatttttccactgcccatttcaggcttgccctgagtccctgactgctctgagatgctttcgaaggatataattgtcatattactatgcaacgtggatatttattcaaggtatttttcatacaatggacatgtgaattcaaggttcttggcctcaccaattgatgcataagaatgtaacttaacaattgatgttct

SEQ ID NO: 37810 - DNA, 327 bp, Zea Mays
acaatcacagaagtaaatgcagtatgaaatttcttcgcggggcatagaggtcgccctaaggtgagtaatcgcaaacgtgcttgtgttggatttaagtaggcgcaaacgtgcttgtgttggatttaagtaggcgcaaacgtgctgcgtcgatttaagtcattaccaacttaaaccgaccgctctgttagtagggtatagtggtcaccccaagttaagtaagcgtgagcatgtcgcaccgccttaaatcattgctgacttaagtcgattgctccgttagtagggtatagtggtcaccccgagttaagtaagcgtgagcatgtcgcaccg

SEQ ID NO: 37811 - DNA, 591 bp, Zea Mays
agcggattatgcacactgctctttgtggatttctccatggtgtcttgttgttatttgacatcggatgacagcgtcaaagttttgatctgcctcactcgaaactgcactactgaggttccttccttttatggttgagacacaatcctttctctttcttgtttgcttcaaatttactactagtttgtatttattggcttccaaataaatgcatatgtagaaagccaattgctcagcccctgttttccattttagatgttgtcatggtgatcctgagttcctgacaagccatgacgcaacacaaaaacttacttctaaaagccaatccaactttcttggagagtcaaagcatatcaagttcaaccaaatttatataataaaataatactccctctgtccatcaacgttggacattcttgcaattctaagacaagttaggacttcggagtagtggtaaaagacacatgtaccctggttatttgtttgattacaaggctgaagtaattccaattaatgctaatttcaatcaatagcagcggtatccaagcggcacaaccctgcagcaaacttctggcgagaggagcgatggtcgct

SEQ ID NO: 37812 - DNA, 534 bp, Zea Mays
tcctcagtttctcgcacctctccaacaaagccatgcaagtcgaaagggcaaaaaaagaagaaaaaggccatctcaagaggaaattccaagtcctccgaccagcagcaagatcagcaccagaaaactcgatccgttggatttccacccaagggaccaagctttagtagaccaactggacccacctcgtcacggttcagttagcagagtcagagctcctttcattccccctcagttgcaagcaaccagccaccggcaaatgcgtgttggcactgcggggatcccagtcacttcaagaacaactgtccccagctgaagccatcaggacctgcttactccaactcggtgaatggccccaagaatacctcagcatccgcccccaaggcgccctcctccatcagccagcagaacaagaccctgtatcaaggaagggctcgagtaaatcacatcgatgctcaggaggctcagcaagctccaggagtagtgctcggtgagttcctcgttgaatttactcccgctactgtactttttgattca

SEQ ID NO: 37813 - DNA, 305 bp, Zea Mays
actcgaaaggctgctagggttcttcgccctgtcgactgtgttgtcctttatgtgacatcctctccactggtattcctgtgtcgtcttccgttcatagcgccctcacagatcctcattggcgttgtgctatggaggaagagtatccggccctacttgccaaccacacctaggacttggtgccccgtccccccggcaacaatgtggcgactggcgatagtatctacaaagatagaacttcaagcacatgctactactgctgtagagattgtatggcttcaatggttgctggctgattttggtatttc

SEQ ID NO: 37814 - DNA, 627 bp, Zea Mays
atccagagccattcagattaggcccaatagccaggatttaaagcgtgaagtgatacacggggatctaatctacaccgttcgattctcaatacgcggccctgatctatcctgcgaagcaatcttcctacttcttatcacaaccgtctatcctaggatggacggcgaagaggcttcttctccatccagccacctgacgcgacggggtaagcacgggcgcggcggcgccatggtcagatccccccaagctaggccccaacgtcccaaactcaatgcaatcgggtgctaacctatacgggatcgatggctaacacgtgggaggaggacataccggcgatggcgcagcagagacccccggccacgcaacacgacggatacacagaggagttcacaccctggttgaccaaatcctgggctcccgatcaccaaaccttcacagcgagaacccaggtactgtcctcggggcgcggcggggcttataagctcgatcctcacgacgaattgacagattgacctctgcggcgagtcgagttccagtcgcacgatgacacaacagcatgctcagcgctccatggcggccaccgcacacggaccgtacgagtccggggaacgccgcaggtgcacgacgac

SEQ ID NO: 37815 - DNA, 489 bp, Zea Mays
gtctcgatgcacctctgtcgtcggcccttgcgcctgccagcgctatgcttaggtcgtgtcaaactctatgatgagctactcccctttccggctacctcattgagctcctctttggccttcgtgctgatctcttcttcgcctagttgcgtcgcctgcgtgcctccctaagacacaggtcgcatcgcccgactctgaccctgccctctacgtcggcggcacaagcctcgtagtcagcatgtcgaagtcgtaggcctaccatgtgggcaacaagaccgtcaagcggtggcataaggatcggtacggccggctctcgcacagtagtggcctcaacggcggaggcatcctctccctcatggtccacctcccctgcaacacctcgcctgtgctatctatgcacccgatgtcgcctacactgtatcgccgcctccatctcgcgaccgtggtgatctccctagatgcaggcctcctcccctcgtcggcacctccttg

SEQ ID NO: 37816 - DNA, 458 bp, Zea Mays
gtcagagcgcgctattgccttgcccttggaggagacactgctgccaccgcttcctccagccttgttgccggggtgaaaacgatgcttgtgcttctccagccaaacttcctcggccagcagcagccaccctgccttgtccacgatctgatcgatcttgtcatcaaaacgctcttccaccgccctcaaccgaccgaccagctcttcaactgtcagggtcttgaggtcgacgaacatctcgatggacaccacaatctgtgagaaccgtgatggcgccacgcgcagaaacttcttcacgacccagaaatcgtcgatcgtctcgcccaaaatcttgagatttccaaccagattggtaattctcatgccgaaatcgtcgacagactctccctccttgaactgaatgttctcaaaatctttcaggagtctttgggcattaacctccttgacgcgatccgcgccca

SEQ ID NO: 37817 - DNA, 696 bp, Zea Mays
gcgcgctagggctcgtcggaagaatccgtgccggtgctgccacccttggcgatctcgccgccggggagtttgtgttgttcacctcctacatttcttgtgggttggcgctgccgattttgcccttcttcctgctactactagaggagttcggtcttcagcttcaacacctcacgccccactccatcctccaggcagcaatcttcgtccacctctgcgagatgttcgtaggtgtggcaccctgcacctccctcttctgccatttcttcatgctggtcagatccgggaagactagggaccacatcggtgcctactactttcagacgaggccagatccggccatagtctacatccccacctttggtgatgcgaggtgggaaaactggcgcaacgactgggtgattgccatcaccgagaccaacaaccgcctcgtcctaccgagcaatggtccagcactcgaccgcaagcaatggaagaccaagccatccctctcgcctgagttcctgcctgtattggacaggatcaaggtcttggacacgggcggcttgacatcaatgcacgtgatcggcgatctcttgaagcgccgaattgcgccactgcagaagaggccacgcctgtcctactggttcaccggcccgaacgacatcgataggatccagcgtgggccaggtacagatctgtcctgggacgagctagaac

SEQ ID NO: 37818 - DNA, 324 bp, Zea Mays
atttaaatagcaagggatttcctccctatggataccctccaattctcttgttatcaaaccagcccttatggaattattaagccaagtggagagttttatcaatcaaaagtttaatagggtgggtctgagaaaataccccatcatttttacaaaggctgcatcgaacctaggaccattggctcactagaaaaactgtcaggcctgtacttagacctctccttcatcagatttatctaaatatttcagaagcctcatacgcacaaaaactttttagccaaatgaaaacacctcaatcacctaacaacgattaagcaggacaaattt

SEQ ID NO: 37819 - DNA, 341 bp, Zea Mays
aggagagatgaggctaggagcttgcaggaatcgcgttccagcgacagcaacgtacggcctcgcggttgtcacgcggaccgagagcaagaggcatgcgaggagaaagtggcagctgtgaacaacacgatggagcttgagttcatgatttatagcaacgagggagagcgaacggtaccgggagaggaagaatggtcggttcaaggcaccattgatgagagggagtgatgggagagagagtaacggctccattaaactccatgaactcagaggagcaatggtcgtggaatcttcggtcgtcgggttgggtgcgcggctcggggtcgggtcggcggcgtcgcgcg

SEQ ID NO: 37820 - DNA, 385 bp, Zea Mays
atatgggccaggctcccccgtttctgaactggtacgactagagcgatccgtggtccatgaaaattctgagcacccagttaagtggaggttgctgacaatctagaaaaaggagctttgttgtcgaagaacataaaacggttaccagatggcaggtgatggttgaagagagagctgctccagcgccaaccatcagtacatgttagctgaagaattgtactctaggtgccaaagaactgtgtgttggagacttggagtaatgcagttgcgatgtgctattgtaagactcccttgtgggcaattagccttcttattatcctcttatgtcatgcccggcagtattggataccacgactgactaaaagcccacctttctaactctgtctat

SEQ ID NO: 37821 - DNA, 391 bp, Zea Mays
gaaaagcttgcccagtcacttcattcaaaggtaccttttttcaacaatcgtttctatctctttttaaggaattggttcttgttgtacatttaccagagttactctggagctagtgcacactcctccttccttgcttattttgtctctagattttgcagaagtcatgtcccttatatttatagtatgttactccctctgttctaaattgtaatatgttttggcttttctaggtacataatttttgttataagttagatatgcactatgtctagatacatagtgtaacatatcgtattatatctagaaagccaaaaagtttctcaatttggagcggagtgactacctcatttcaacaaatataggtggtattgattgtttgaatgtttataac

SEQ ID NO: 37822 - DNA, 531 bp, Zea Mays
catcattccaatcatattggaatgtcatgatatccttcatctgtttcctttcacaggccctcaatgcctgtgacatttctgggtccccaatggcttcacaaccttcccagttgatataacgttgatgcaggataggttgatgcttctttgggagaatgacggaattatagaaatccacatgatgaagtgtccaaaagcgatttccatcgatcctggcatcgcgaatgcgcaatacaggattttggaaacgaagatcctggaggagagcagagcctccactggcagtgaaatcagtgactggctcattgccagcacgccgagcctctgctcggtggaggaccaagccacgaatcacaggagcgtgggctgggggaagatcaacttcatcatccttccccccttcatcatcacttgcaggctcccacgcctgtggattcgtcgcaggacgagaccgaccggaaggattccgggatgtccgaccgcgagcactttgagacccagaggcctcagcacccggcatgacattgccgc

SEQ ID NO: 37823 - DNA, 589 bp, Zea Mays
gaaatctatccgagtgaccgatgagcaaggggagggaggtacggcggctagccggaatagtttactgaccgggcttatccacggcggcgtgtcaccgagtgctatccgatcaacccgagcacgaatcgaaacggcggcgacacgaatcgcggtagaggtcgtcgacggtgaaatgcgctggcgttctgatccgatcggctactgtaccatggcgagttcttttcagatgaactgacagagagatttgaggcttgattttcccttaatttccaatgacaacacaagtcccactctgcagcaaacttgtagagcactataccaactacaactttgctatatggtgttgttacaaaaagtcattgaatcatgtctgaaattgggcttgaagttggtggtagttcactgatagtctgaaaattcagaccaaatcagcttgacagccaaagtttgagcatgattatctctaaatttctcacaagaacatggcttgccctcttcagcaaaattgttctcctatgattgggctacaattttgatgtggtgacctaatatgaattctcactattttgaaagctacacagctctaaag

SEQ ID NO: 37824 - DNA, 512 bp, Zea Mays
cacgctgtcacgctcacgcgcccctccccccgccgccaacgcccacgctgcgagcgcgaatccatcttctctacctcctcgtccattcctagggttcctcctctgccgaatcgcggggaactctgcgggcccaatttggtagggtaatctcctaccaggaggtcaaattccagtcaacgccgcttggttttgtagccgaccggtcgatttgaatccaggggcaccgattggctgggtgagagggcaggctcgatttgaacccgcctctgcccttttcgtggaagttttgggtcttattaggcgcggattactggggtctagggatgtggtagttactagctgcttgggttaggcggcgcgccgaggtgcttccgtgcttggctgactagtgtcaatggcgggatctgtcggcaaggccagggcggcgctgcggtcgtccccgaagcggtacagcggcacggacccaccgttgtctctggcggggccgacgttggcggatctgcagaggacgg

SEQ ID NO: 37825 - DNA, 379 bp, Zea Mays
gtgagtgaggatggcgtgtggcatactggcagggagccagggagtggtagacggattcattcggaggcgcggtttcctagcgacgtggccttcacgctgagcagaaatatttgtttgcctactacactattgtggaacacgtgacagtgaatagtgctggcgaaccacctggctatatatgtccgtatagaccggacaactcgtttagcacgaagctcgacactattttagttaggtacgaaaccggcacggcatgacggacatcaggctcgagccagcacggcacggcagtcgtgccgtgtttgggctccatggtcggcacactttgcttggcctggctcggcacagaataacgagtcgcacgaagctagcccgacgc

SEQ ID NO: 37826 - DNA, 489 bp, Zea Mays
ggggtattgacaaggccgttcatgagctaattaagatcttgaagagtaaatgtatccctgtgagtacaaaggaggacataaaaggtaatctttacattctggaaaataagtgttcgtgtgtgtaaaaatgcaaaaataaataagaaaagcaaggaaaaagaacaaccaatcacctactcctacaaacaagttctaaattggttatacacatctaaagctcaagtcatgtgccatatgatattttatacatttgtagagaaaggagctttagcttggttaggttagaaaagtaagactgcacccctgcatatgctcaaatgatggaaaaatatgagccatcttttttggttacttctaaaaaacattactttgaggtatgacatgtcatgtttgtgtatgcatgatctgcatcatcagattactcagtggtcgccatagtaattctgaatttcattttcagctgttgcgtcaatatcatctggcaatgat

SEQ ID NO: 37827 - DNA, 569 bp, Zea Mays
ttaaccttttctcaacttaaactggacaacacacaagtcacttaaaacaccatattctaggaagtctaacatagaggcattaacacctggcataaaaccccgtaagacttacattggctactgagggacctaaagcacttatgtgtatgtcttagcggattgttcttcaattttaacaaggaccgacttgtgaacgctacttgcctccaataattattggactgcgataacactcgtataagacctctaaccgatcaacaagacatttatttatccaaaggggcatggaatgtgatgattgacaaagcgaagcatcacattgccatacaacaaaagtcatgacaacaccgatagatactatccactaatcgtttgaaaaattaaacttacttctcgcttgccactacatcattccttaatcacacaaccatcacgaacatccttcacacgattatataatagcgacctaagcgtcgtgtcacaatacatacatctttccccgttgcgagtataaccatatcacggcatatacccgcacacctcaatcaaatatcttacgccaccatccc

SEQ ID NO: 37828 - DNA, 317 bp, Zea Mays
gagagatgttatgaccggcctggtctaccagaaggcgattagacccaccagaagtaggcgcaggagtagatcaggagataagtaatcagtttagttggataagtcttagcagtttatctcctaatattatggagtagtttagttggataagtctcctagtattgtggagtagtctattggggtgcagtttatctcctaatattatggagtagtttagttggataagtctcccattattgtggagtagtcggttggccttaggcctatataattaggactttgtaatcaagagaaggcaagcaatagcagatatcttc

SEQ ID NO: 37829 - DNA, 446 bp, Zea Mays
ggaagtcatcatgcaccccatttggtctcgcttctgccttcgaaggcggaagatagaaattgatgagacagttgaagcgtgtcagaaggccttcaacactgtttgctctttcattggcacaagagatttaattcaagaacatatagccttcagggtatggccgcttgtggagagctgggaaatgccgaaggggaccatcactgactctagcgaaggtggtttggttcggctgaaatataccttcaggtttggggataagtttgatgaaccaaatgatgattggctaaagtgcattgaagctactagcaacgagttacttggggcgtattccaagaccgaggacaatgccttgtccgcagccttcgggggttggaataagaaaaggttgaacatggtatttgatgctattggcttcgtataccctgactattgttacacgctgcgag

SEQ ID NO: 37830 - DNA, 406 bp, Zea Mays
ggcagatattgtgatgcagtatattgggaaatttaaccatctttctcagtatgctattgagcatgtgaacactgatatcaagaaaagaggttattttatgagaggcctcaactcaaaattgcaaaagaagatggccacttgctatgatcttaccttcaatcgggaaataagtgtggctatagctatggaagaaaaggcacgagtacatcaaaatgtgaagcgggcatggaaaggttctaggttaggattgtctcagtcgacggcgaaacgccagaaagtggtaatcaagactactagttctacaaatgttccttaccgttcaactacctatcctttcaagaaccccacttatattcgtccccccaactggccaaaccaacttccacctgcaaatacccaagttccc

SEQ ID NO: 37831 - DNA, 534 bp, Zea Mays
gcagctcggcacggtgatctggttcgggagtctcgagttcatgtcccttggcttcggctatgacatggtgctcctcccatctagacacccatctgacgtcgactaccttttctcccaaccagggatcacgaccatgcctgctcccctggctggaggagggacatccagacctccgttgtcgtccttctcgctagaggagacgtagatggaacaatcacaaccacgctttgggtcgaccagccgatgcttccaggaaagctgacgacacagactccctcatgagggagatgttgtacgttagcttcgcgcccagagcgtcgacatcaacatacattactctaacatcgactccactagctccccctcctatgggtcaggaggtgccaactccaccaatagattggtaggaaccatcggtattcaatcccatccccttccggtttagctttgatcctccagactacccccatacaacaagcacctacactagtgtgtattaggaactcctaggtcttcatatgcggtcgacattag

SEQ ID NO: 37832 - DNA, 405 bp, Zea Mays
caaaccatgagaacttcttcagatcccatatcatcgccgccataaacaaaaagatgccctcctttattagaatgtactgctgacccagcagaccaatgcaagacaataacaggcagcctactactccctgagactagttgtagcttaacaacattagatgaaacatcactttgcttctcttgtctggaggattttgtagtcatatcccatagaagtgtgtcacctgttatatagcccaccgcaacaattgagccatctcttgaagcccaacaaagaaagcaaatttctcttacttcttcactgtcatcaatagtagtatttagttgatctgcaccagaatccccctgagcaccattgatttgacccttcatgcgtaaatccccatagcctctgacagaaactgca

SEQ ID NO: 37833 - DNA, 410 bp, Zea Mays
ccccactaggatcttgcgggctgccacgagcccttcgaggtggcataactgcagccacaggagtaagtaaataaataaataaaattggcataacaccacttccaataatatcaaactagcactgacaattcataatataacaatagtaaagcaagcaacccatcctatatgtgcagtgtgtcaatttatcattatttcttcgctaggacctacagcctatccctctgataccaactgtaacaccccattgacccaaacacaatggatgtcatcaaaacactttccccaaatggttatgtataataaaagatgaagatagaaaggaaaaattcgacagcacctcccttgaaagttgcataacgaggaaaccacaatgtttatacatgatgcaaaagaaaagtaatccacag

SEQ ID NO: 37834 - DNA, 305 bp, Zea Mays
caagtataaactgatcggctgcacagctagataccaaaccacagacatgctatgttttcaccacgaagatgaaaattctgatccgttcatggctggcgagtttcaatttggttatgaacataacttttattatggtttagtatatttctgacaaaaaaattaagaggcaagtacacactcaattcaatcagcaacaccgttcacggggacggattgaaatgatggcgcgaacagatccactgaaccaaacattaacggaatgcatgaatacatacgctggtaaatccgaagccaacggccaattg

SEQ ID NO: 37835 - DNA, 390 bp, Zea Mays
cctgctccaccgtggtacggaagtccaccaatggaaaggcccccagtgcatgcctgatagaaggcttcagaccctgacggaactggctcgccttctccatctcattataagccacatgagggacaaagcggaccatcttgttgaagcccacctcatactctgtgacagacttcttctcctgcttgtaggactgcaagtcaatctttattttctccagaaaggtgactgtgtagaatctcctttcaaactgcctaatgaaaacatcccaagataggactcctggtgaggaggagtgcgctgcctgcacgcctctccaccaaatctgagcctctcccttcagcagctgagtgccaaagcgaacccgatctccataagcaatctcgaagacat

SEQ ID NO: 37836 - DNA, 276 bp, Zea Mays
aaaggaaggccaaacccttagaagtttttctaacgttctttaccttagtaccttttcctttcattttccacttcacttacactcacccttgcacagatggcattacccacacccactgacggaggagacacacctttcagcactgacggcgttgcacgagagggtttcccatcattttgtgggaggtactataggaggcaggctgccccatgcctccatagtatacagtgcagctgtttgaggagcacggatgtggcagaaccgcccgaattattc

SEQ ID NO: 37837 - DNA, 321 bp, Zea Mays
gtccgaacgagcaatctgtgccaccatctctgcagagtggagctccaccacaactgcgatgccgcttcctctccccactctcctctcttcgggtcataacgggcaacgttatggccaacgccataaatggcattttgattgccgccgcaagctctcccactccggcgttctctcccctcctttcgcgaccgttctgattcttgtgtccgactcttgcttcaaatctccatctattggagtagttatgacttctgtttctctgtgaatcaatatggcacaacaattggcatcgaggagcgttgattcctgctttaatcccac

SEQ ID NO: 37838 - DNA, 436 bp, Zea Mays
cgaggaagccgaagctttcgatgaaatactcagcgaccgtggggatttctgtgcttttgccgacgcacgaggggtcgtggcaattttagagaaagccggttgtgaacatgtcaagggcgcagccagccggaatccatcttctcagcagatgacaccaaggacccttcggccgaagcctctttactgggtgggaggttgtactccgatgtttggatgaagggtggtcatgagatggctaacaaagcaattagaaagaatgagaaagaatctcacgatgctcaagaagaggctaaacaagctaaagaagctgctgaacgcgccaggattataggtactttcattgaggtttagctttgttgtttgtttttaacttcgaaattaaccaacatattctttattgaagctaacctttcaccaccaccggagccgtttaatc

SEQ ID NO: 37839 - DNA, 542 bp, Zea Mays
ggggaagttcctgatagtgaacggcaggtccactttgaggtgcccttggatcctagtgatgcagagataagtgctatgcttgatttgctggttgaggactcttctgatgctgctcctgctgggacgttggtggtggcacctcccccagaaactgatataaccttggatattcagaagcctgtcagtactcgcccgaggcgcccttcccgagccaatcaacttgatccttctgctgacgagccgaaaaagaaacagagacgtctccggcgagtatctagtttggatcaggatgttggtccttcggttcctgctgctgaagaagtgcctattcctgaatttacttacgctgaactcgatgggggtgctctacctgctgctgaccccaatgggtgtgctccttcctctgctgaccccaatgggggtgcttcacctgctgctgaccccaatgggtgtgttgtctgtgttgctgatgaagacgactgtgaggaagaagatgaggtccctttgactcggaagaacagtcggcagtatgtcgctagtgg

SEQ ID NO: 37840 - DNA, 282 bp, Zea Mays
ttaagatgtcgccgtgtttgaacctcagttggacctggtcaggacaaatgtgactggttgggctatatacggattgacgtacctgttgcgagttgctgctgctggactgtgattgttttgtcacgtattgaggctcatggagtcacggatggatcagtacgaaatcatggagcagattggccgtggggctttcggtgccgccatactagtcaatcacaaatctgaaaagaagaagtaagatatagcgctcttccatcagtatgtaggctatatatggctttg

SEQ ID NO: 37841 - DNA, 616 bp, Zea Mays
cgagcggggacgccatgggcgccagagtgtgggtgtgccgtaagcaccgagcggtggagctggatggggagggaggaaggggcggagaggagcgtggaggagcttagcaggtgcgcgtgcgcgtcatgtaggttgctgattctggaagtttcacgttgcatctggtcaaggacatgtaggcgtctggtctccctgttcctgtagccggtatgtggaggatgcttcatgacggttcacataggatcggatgactgagaattaaaacggtgacgtggacacgctgggaggccagttttgcttccagctctattatatagtaattgatcaccttcttgtgggctatgtgtttgctagaaccttctggtatcacttacttgcacaaataaaccttcaggctcttgctccccaggttggtgaaggctgcaccatgcattggtggcaaagaagtagtgatcagctgcatggtattgctaagaaaggctttaattccttgattagccttgggttacagacactttggaaccataggaatgggtgtgtctttgacaaaaaccctcctaacttagcgcaacacttcggaaagttgaggaagagaaggatctttgggggcttgcta

SEQ ID NO: 37842 - DNA, 433 bp, Zea Mays
aactaaatcaatggcatggataatatttatatccttcctttgcaagacttgtgaaagatcatttgtgatagaaaacaagttacccataagctttaaaatgaagacaaacttaaaattctccattttttcaatcaaccctccagctgcagacgatatgcgtccatccctttcaacaatcccaagcacttctatgacagagtcccacattagctctatacgtagcaaagttttttgatgtgaaccccacctagtatcaccaggcctagtaaggttggtttcctgtagttgtccccttcctgtacttacctcaccactatcaagtagcaacagaagtctttcatgatgatgttctaccaaagcttctcttctcttacaagatgtacttgtagtggtcacaattaaagagacataatcaaagaaatctcgaatagaa

SEQ ID NO: 37843 - DNA, 395 bp, Zea Mays
gaaattaggaagagcaaagacttgagctgggttgagttaggggggagcagccatgaatttaagctggtggtagatctcatcctgacactgaggatatatacctagtgctgcgtggattacgtaaaaagagctaaggttgaaggttatgctccattgactgatccagtaacaaaagatgtctcagaggaggaaagagaagaaaaccttaccttccatagtgacaagctagcagtggcttatatagtatcctgaagattggtccagggacagcaataatgctttccaagaatttgcagatttgcagtgattgtcatgaatggattaagatagtctcaaaggtactttgtcgtgttattattttgagggatagaattcgatttcaccagtttgaaagc

SEQ ID NO: 37844 - DNA, 361 bp, Zea Mays
gacgaaaacattagaagttctaagcccttctgcaggagtggaggcgccgaagacacaaaaagatctagcagcaacccccaagagaaaaaggatggctagtgtattagatgtgctggagacaataaaaacttcaagctctactccaggaaaaattgccaaggcttcgaaaatacagattgaaaccgagacaaagctgaccgaagccgaagctatactgagccaggccgacgccaaagctgggccttcagtgcccgctaaggagaaatcctgggaaactggagaaaaggcagcggaagaagaaggtatagaacagattttggctgaaaaagctgccgctcctgctcccgaagcgtcttccgag

SEQ ID NO: 37845 - DNA, 276 bp, Zea Mays
gcacttcagcatggagaaagttgggataaaagtctaccttatgctgagttttcatatgacaatagctatcaggccagtctgaagatgtcaccttttgaggctttatatgggaggaagtgcaggactcctctatattgggatcaaactggagaaagacagttctttgggcctgaactgattcaagaagcggaaggacaagtccatataattcgagagagtttgagggtagctcaaaccaggcaaaagagctacgctgataatagaaggagaccactg

SEQ ID NO: 37846 - DNA, 386 bp, Zea Mays
tagctgttcagtttgtcaggggtgttccgtcattcttgctgatgaggtctttttggccaatcttgttgtgatttccttgggggcattctatgttatcttgggtatagattggttatctcagtatcgtgcagttatatcctgtttttggaagatagtgttattgcaggcgccgtcgggtagggaggtggtattcttgggaagttccccaaagttcacgttatccttgttggcgcaattgctttcggatcgccggtcaaggaagttgggaatctttttctccatggtggtggagggtgaggctgccttgcggatgcaagacatccgggtggtgtgtgactttgccgacgtgtttttggcagagcttccaagcattcctccagagcgcg

SEQ ID NO: 37847 - DNA, 278 bp, Zea Mays
ggcggattggctaacttacgtggagtataagatgaatgtctttgagattgtgtatggttatcgtgttcgctttggcacacagctgctgaagggagaggctcaaatttggtggagaggcgtgcaggcagcgcactcctcctcaccaagagtcctgtcttgggatgtcttcatcaggcagtttgaaaggagattctacccggtcaccttcctggagaaaatgaagattgatttgcagtcctacaagcaagagaagaagtctatcacagagtatgaagtgg

SEQ ID NO: 37848 - DNA, 478 bp, Zea Mays
ctcacggcggcgacttcgaccgatttggaggaaataccgaattcaggcgctacggtgggtaatcgaggcgaggagcggtgcttggggtttgtaacaagctaacgaagcaggctggggcatcaatttatagtgattaacagcggtggatccgaatttggggatgaaagctggcagccgaagcaaggtgagtcaccggagttcgcataacgtgacattcactgggcaaaaggttacgaccttcacatggttatcctccccaacctgcaaccacatggtagaatagcttaaggcatgtcgtgaccgagctaaatggcagcacgacgatggcggtcacgtggacacgtcaccggtgcaagtgggtacggtgaagccggctcaatccactcccccactgatcttttcacgtccgcggtaatatcctgcccgagttgaacacgaatcgcgacggacagcacagattgcagcgcggagatcgcgg

SEQ ID NO: 37849 - DNA, 306 bp, Zea Mays
tgcagtggctacgacacctacctcgacactgcatcgacgactagggcgacttcagtcggcgcttcatcgccaacttccaatccctctccgacaagccagcacagccatgggacctcaagaccatcaagcgccgaggggacgagactcttcgatcgtacctcaaaagatttcagaccatgaggaatcgaatccccgaggttgcggaagcagcagtaatcgaggacttctaccggggatctaatgactcggccttcatttgagccatattgcagaaagcaccgactacctccgagcagctgttctggg

SEQ ID NO: 37850 - DNA, 375 bp, Zea Mays
ctcaggctagcccccgtctcaaccgagcctctcacagcttatgcctcccatctccgcctcgctcgaagtcacctcgtcctaccatcactccatccgtctcgcccgagcaaggctcaagcaaagaggacaaggcacaaccgaaggccagcggaggacactcgcatttaatgcacacacctaccccacgaagaggcacaggagcatagtggcaacaagacagcagttgcgtccaggcgcaacgacatgattacgcttgtgccactgtgtacgtacgtcgcctaccatctccccgatgggatgcctaatacgacgaaaaaagcaaaccggccctcgggcgtagaactccgcgctcccccgacgctgggctcgccctcg

SEQ ID NO: 37851 - DNA, 279 bp, Zea Mays
cttcaccacatcctcacgcactcagccaccactaatcgcttacagtctttcgctagaagtcgcgaattctggattcgccccaaatccactctccgccaccgtagaactaagctcgccgcggcccgtcctttccaggttaattcatcgctttcttttcccttgtttgagcactctggatactcggtgatacttgtcgagccttcaattgagactaggagacccccagtcgccgggaacacatcaatctagccgccatgctctcggccaccgtggccagag

SEQ ID NO: 37852 - DNA, 318 bp, Zea Mays
gaattgtgcaagctgaacctggaagttatttcttcaggtgacttaaactatatctcggtggaacccacattacaagagcaaatagtcagggcacagattgaagataagggtgttcaggttatcaaggaaatgatcatgcagaaggtagagaaatacaagtgcttccgttaggacagcaagggaattttatggtttggagatcgattggttgttcccaaggaccctgagcttagtaagaagatactggatgaagctcatctttcaaaattctccatgcacccaggtagcaacaagatgtaccatgatctcagatcctta

SEQ ID NO: 37853 - DNA, 348 bp, Zea Mays
ggcctcttggagttgctctaacttagccacttgtgcattttaaccacaaatttattaagctgcaactatcattctgaatatgctgtgctgactgtacccctgtttatggaacgtccttctactaattctcagagtaaagggcacggctagtccttaatgttagatagatagcctattgggccgcagccacagggatatgtgccacacctggctcataactggtgcgcctcttatagattgatcaattgtattgaatggaaaggattatccagtggtggctgtacttctataaaccgaccttaggtcatccttgcctatgtgtttgtaccctacaactcatacataatc

SEQ ID NO: 37854 - DNA, 370 bp, Zea Mays
gggaggagttggagctgtcttacaacaagaaggacatccagtggcatatatcagtcaagcactgggtccaaagaatcttggtttatctacctatgaaaaagagtgtttagctattctctttgcgatagaacaatggcgtccctatttatagcatggtgaattcatcatcaagaccgatcatcagagcttaacccatctggatgatcagagattgtccaccacctggcaacagaaagcgttgactaagctgcttgggttacagtttaaaattcaatatcgacagggtagtgacaacaaggtagctaatgctctgtcacgacggccagacatgaaacaagattcggtaacaatgcaactgaatgggttatct

SEQ ID NO: 37855 - DNA, 321 bp, Zea Mays
gtttagcatttattaggggtgcacaatcactgctatgtaatacccaattattacattctataatatggtttggtattcttgttcgatactgttgttacactataattatttgcaacgctccaataattattattactacaattatattctcaacttttgtaataatatcaatccattgtgtaataatatctatccatttattctagcagaagttgaacatccaatgcatctcgtatgacgttcttgtctcgacttggataatgagtgaccggcagcgtgacaccgttgctaggaagggattccaaagtatttttgatttgc

SEQ ID NO: 37856 - DNA, 543 bp, Zea Mays
attttccagtcctactggtgctgttacctgttctcagatacagtaaagttctggttctcatctttataatacagcaatgctttgatgctcatacatggaaaatatactctagactgggtgtttatttcatttaatttacaccgttgtggacataactgtatctttagtatgttggcagccggcaagcttgcacaggtgagtagctgctcactcacacacactcaactcattttggggctggaggtagaagagaagggtgagaacagagcagattagcagaacacaagtgaacaaatcttgattagtcgtcctcttgacatagcgcagcaggtgcttcactgcagcccaaatatcctttcgaggatcatccttgaacctgctcagtgctcacatacctgacaatgaatgagatgttcggccatgtgtgagtcaagtagagcagcccacagacgatgcttcggtggcacgtcttgtccacctctgcagttctggtctttatcagcttgagcctctccatcgatgtcgtgcacaacttgcaatccg

SEQ ID NO: 37857 - DNA, 950 bp, Zea Mays
ggtggtggttgcccaatttaactactgggtaagtatcacggacatgagacaaccctataacgagcttcaatcgcgtggttatggctctggcgtagtctgaccacgatggcggggaatactgaacacaagttcatgtgttccaggtgattgagcgtggccaagcaagaagggcagagccgatgagcatcacgagtgtatatggttgctgaaacatgatttaaacaagtaggagcagacctgagacgagctgaccacggggcgcggagaatttgaactcgccgatgactgaaaaggggaaaaatggcgtcgcgatgggctcgagtgaaattgggaggtgagattggggctacacggtcacaaagtactaccgattcaccgtgcacactcaatttgggaagaggtggcagaggcagtgcgaattttgggcttcaatcaaactcactggtgaagttgtgagtgtctcgccggggttcatagcactatttataggcacgacggtccggctaactatccacggccacgtataaccttgttagggcatgtttaccatgtagggaagagacacagtgagggaggagaaaggcatgggtgacaccgcagcggaatcgaccgagccacggcggccaccggtgaataactccggccacgcccggctgaactcgcgagatggtgccacgttcgaagctatcctcccccagatcgatccccatcactggatcgctcgagcacatccgattcaacagtgtcatagatcttttacccgcgttctttagatatttgcaaggttttgatcttcagctttttactaaaccgactaccttccatcctctctatctctcgattcttgttaaggacatagcaaacttcattaataaagtttgttcacctaacaaccgtcttcaaacttactataggatacttgggtcaaaattgagtgaattcaaagatat

SEQ ID NO: 37858 - DNA, 433 bp, Zea Mays
ctggtgtgtgctttcaaaggtagaatatattcgtgtcgttgataattcccggacacccgtggaataaaatgggcgcgtatatggagcctttaatcgatgaattggtacgtgcctgggaggaaggggtatggacgtatgaccgagctatgaagacaaacttcagaatgcatgtttggtaccagtactccatgcatgacttaccggtgtatgggctattctgcgcctggtgtgttcacggtaagttcccatgcccagtttgcaaggaagctctcaggttcatttggttgaaaaaggttggcaaatattcgtccttcgataaacattgacaatttctccctcctaaccatccattccacctagacatcaagaactttatgaaaggtgtcgtagtgacagaccgcccacctgcaacgatgactggtgccgaaattcg

SEQ ID NO: 37859 - DNA, 413 bp, Zea Mays
caagacgtgggggggcccgtatgaggtacactactcactacgtttttggtggttgagcctcaataccacgagcgcaacggagggctggattcaccgagtttgggcctcaaaactcagcggtgcggttccgggggaatcgaaggcggcacatggtgtcatcgcgaagggtacgtcgaggcgaattaacttcgtgtgaagcgtgtggccgtcagatgcatatttcagtagttgatccatttaggccctggtacagtagatgagcactatgtatctagggtagtgatggcaatggggaattccccatcagagaatagctcccaatatcagtccccgcgacgaagaaattccccgtggggatccccacgaaaacttaggggggatatttctttcccatccctgttccctatggagat

SEQ ID NO: 37860 - DNA, 314 bp, Zea Mays
cagagctgcgtccggtgtccggcgtccctgtcacctgtgtcactgtgtggcagtggctgtgtgaactttaaattcagaaaagtgtatgtgtatcagtcgttgtatgcgtgaacttatgtgtccatgtcacctgtctgattgtctgaaaacctgtgtgtgagtatgtgcctgttgcgcttgttggctgttgtggcagtagaccagcagttgtgcaagactgcaagttgctagttgctactagctctccggttttcctttaatccttatgtttggagctgctgctgtgcgcctgtgctgcagcatttgtgcaagac

SEQ ID NO: 37861 - DNA, 371 bp, Zea Mays
cctcatgagggggtcagcttccacgtagggctcactggatccccaattatagggctccggagccgccacgtgcccacctacgtatgctacctggacttttgactttaagaggtccggtgctaccacgtgtccaggcttgtgacaaagggacccgggctcatcctagttctttccagaccccagctaggggtggtccggatctaccacacctacatacactcatggatggttgctccctgctcgggtgaagaccaatgctgccacgtgtcttatggtgcgtgacgtaagctattggggagaacttgatgtaagcctctggcagaagtgggccacctacgttaaaggctagtagagtgcgtggttgttcacac

SEQ ID NO: 37862 - DNA, 422 bp, Zea Mays
cgcatgtctggtgccggatgggcgggggaagaagatggttcactgcttgggtgaggatctgtcggtaaccttctgtgtctgaggtacgtggcaggccattggcgatttgagacagaactccaccaacttcactcggcgtgttcaggtctcgagcgaagtcaagcagcagattccaggaaggagtgggtttttgtgtcggagcctggcatcatgctccgctcgttcccgctcgccctcctacgcatggagacgatcgcggtgtcgagaattgcggcattcgtggagtgccctgtccttaggagtttctcctgctttagatgcctcatcccgggatacgggctgagcaggatcccgctcccccgcctcgtggtgacgccgaatgttacggcgcttgttccgacggttgtgtgcctcacgctgcg

SEQ ID NO: 37863 - DNA, 356 bp, Zea Mays
gtggaactgaaaattgctgctcaacgcttgacatcatgttgacagtgccctgagaagaggaggaagtcactggctcccatctaagcttcccattgggattcctcctacacaccacatccttatggtcttgactgcaaattgaacacctgccattccactggcactctgcacggcgatgcgcatcaccacaacggaaacacaccagccccagcccgggcttaggaacagcccgaaacctctgagtacttcctcccgaagtacccgagtcagaggatttgccatggtagggatggtggcgctgatgctgagacttgcccctcttgtgggctggacctccagtgttgcccctcctcgcg

SEQ ID NO: 37864 - DNA, 465 bp, Zea Mays
cattgaaccggccacagtgcccgaatttggcggtgagacctcttcggctactgaagccaaagaacatgcgcttacgcagaagattgaagagccggctgcaatgccgaaggcatcctcagccaaaatagctgagccgaaggccgataatattgaaggaacaaagatattagaagttataagcccttcggcagaagtgacagtgccgaaggcacaaaaaggtcttacagcgacccccaagaggaaaaggatggtcaatgtactagatgcgctggagacgataaagacttcaagctctactctagggaaaactgtcgaagcttcaaaagcgcagactgagacaaaactaaccgaagccgaagctgcaaagagccaggccaagaccaaagctgggccttcagagcccgccaaggagaaatccttggaaaccggagaagaggaaacggaaaaagaagctgcagaacaaat

SEQ ID NO: 37865 - DNA, 321 bp, Zea Mays
gacataaaagataaaagttagcttttccctctccatatttttatcaaattagtatagacatatatctaacttaggcccgggttttgggcgagaaacaatcggaacgaactggaacgatgtcaacaacactattttaagctgcgttcgattcgatatgaaatcaaataatttcatatgtgggctgaacacctgattccacagctctagacaatttagtggagaaacatatctcatttataaatcctcggacgtgacgtttcgattaacgagaggggactaaattattttacacctaaaaatttgagtcatcgagttctattt

SEQ ID NO: 37866 - DNA, 784 bp, Zea Mays
aagtcattcaattttggatgtagaagtttccaccgaacttagatacaatcctcaccattgggagagcaatcaatgtatgctgccactgggaaagggattgcataaaactgacacttaaataataaaatccgaaatcttgtatggtgaacaagggaccaaatggatgccaaaagaaacatatgattgacataaaagaaagtatagcataacattttgatgtagatcttagctagtacagtgcttgccgatcaaaagaggagagcacctggtttgctcagaatctcattcagattggatgtaataaaaaaaaagatgcaccattttaagattacggcaaagggagaacaagcatgacccaaaagagaagaagaaaaaattgtgctaggaaataggcaaggcaattccgattctataataatgctgccactaagaaagcgatgaatataattacatcaatttggttaatcaaaatggagtaaatcattggttgggttcttcgacagtatggctggatttgatcagaaaccatattcggtttttggtataatcagatgggatgcaatcccttcagtaaccctataccctaataggagtcatcataacaatcatccataaataagcattacatgtacaataaatcaaaatattgctaaaatctacgatatcttaaagacaaggaatggttgtgcagacaaaatagttttactgagaagtcattcaattttggatataaaagttaggaaaacaattccactgaacttagatacaatcctcaccactggga

SEQ ID NO: 37867 - DNA, 351 bp, Zea Mays
tgcctccatgtcagctagtcgttggctcttgatagattcattgtgctacattaacggcccgatgtgccacccgcacggttcgatgcctaccccgtcatatagtcgttggttgactagtcgttgctgaccgttgaaatggatccggtgcacaaccacacggtccaatgcgtcagctcgctagaaacccgagaagagctctttggcaaactggtccggtgcctcggtctgatgcacccaattttagcatatcttcttattcttcaatcttctttgcttgggcacttttgatcttatatcttagacttgtgtagagtatttataagtcttttaagtcttctttagtggtgttgc

SEQ ID NO: 37868 - DNA, 290 bp, Zea Mays
aaatttcaacggactgaatttggcacaggttttcttgcactccgtcagcctcattgctggctcgacgtagagtcacgagacgccatctcgcgacctagctagcaacttacttaggcatcttgcattcttgcttatcagatgagtctcccatgctactaatcagtaaccaatactggaatgtggccgtcaaagccatacatacacacgaagatgctttgatatacgaatgctgcagtcagccatactgcccccgccaaagtctgaaagcgtaggagccatgtgcgtgcgcg

SEQ ID NO: 37869 - DNA, 297 bp, Zea Mays
caggggtcaaggcctttgtagtctctataacaacgtctagcacgctggccatcctcctcttgggagttgcaatagtagcttttggcatcttcggcaaatttgcctcggccagtgggctcaggatttctggcatttttgttgtttcttccacctttggctcttcgatcgtatcatccttagctttagctggcccgactgtaggcaccttcggcactacaatatactcttcagcgctctgcacgatggaagcagcttgttttgctttggcagttgaagaggtcccttcgccaaattcag

SEQ ID NO: 37870 - DNA, 557 bp, Zea Mays
gtggaagttgtctttgcttaaatagagaggtggtgacatgccgaagtagtcatcgcttcctctatgtttataagtcgagtcaaaatgcggggtactagtggtacgctaggcaggcggtgtccaaataaataaatcggttgatgtggtagttgtcgtgcgtgatttattattagtgagtagttgaattacgagttatgtgaaaatcatgttagaaactagtgtgtggcgtgtaactgtgttcgtgtagtgaataataggtcagtaggtattgttggtgtcattggcaaatggggatgattcctattgtgtgataaattctaaaaggcaaagaacatgggtagtgtgtcgatcaagttaaccgataggttccgtaaacacgcttgtgatgcttttatgtgcatgataagatcgatgccttgtcgtcgtagtctcaggaaattttctgaaatgtgctagtgctctactgatggggttgaatgaacttgagatgtattacaatagctgtgtgtcgcgcaggttatccaaaaatggcgaaaggtggtgtatgttggtaattg

SEQ ID NO: 37871 - DNA, 303 bp, Zea Mays
tcgtcggccctcctacaacgcattatgactcggttgagctctgagtttgccatgacggatcttggcgccctccaccacttcctcggcatcgctgtcacgcgctcctccgatggtctcttcctctcccagcgacagtacgcggtcgagcttcttcagcgtgcaggcatggctgagtgtcatccgacatcgacacctgttgacactcacgccaagctatccgcgaccgacggggatctactgtcagagaaggatgcatcagagtacaggagcttggcgagggctctccagtacctgacgctgact

SEQ ID NO: 37872 - DNA, 429 bp, Zea Mays
gcgagctaggcgacgtcctagacgatgggcgtccatgcgtcgaggaggtgtatggtcaccgccatcgtcgtcctgcagtggaggaggcaggcagcgtgggcacaccagagttcgtcgacgtcatggttagtggctcttccagtcgctaggtgcgttgaggaggatcggttcacaagtattgtggtagctagggataccatgagtgacagggacatatggttcggccaatgagcggtaggtcccctgacgcccgtccgacgagtgacaaggactaatttgtaaaaaagcttacatatatgtccttggtgttttggtaataggcgacaactatcaagttaatggatagattgaaattccatttattttttagtataaaaaaggttacgatgttaggacagcggttagtgggccactccaacgcgcggcgcc

SEQ ID NO: 37873 - DNA, 409 bp, Zea Mays
cgagaagagccaggacgacgccgcacattcacatggtcatgatctacagtaaccgaaggcgaagaaggtatacggatggacggacaggggttgcggtgggaggaggaagggagagagagaggtggagtcatgggagggcggcacttgcaaccacgggagagcgacatcagcaacaatcaaagcgcacgctgcagccatgacgaaatcgatgggagacaaatcgattttggctagggaagaggcggagagagcgaggaggatgagaaacgtcacagcacgggtgaagagagacgaggagggagaaagcgtcggtcagagagctgaaaaggagagaaggaggcgaggagacacgaacgtgagccgttggttggagatcgagcgaggaggagtatttggctgacgtggacat

SEQ ID NO: 37874 - DNA, 317 bp, Zea Mays
aaagaaatctagcgaagctagcatggtgcaggctactgttgaagctggaccgtcagtccctgctgaagcaagatcttcgggggctgctgaagaaggtaccaaaacaagaccttcggaggctaccgaagcaccattaatgttggaaaaagaaggtgctgctgaagaatctgaatctcttgcccccggagcgcctaccgaggaattggaattcatagtacaacatgcttcggggaaaaattatcgaaggagcaaattgccgaagcgcaacattatgccagggatttgaagtaccctcgagggtccttggtgtatagtgg

SEQ ID NO: 37875 - DNA, 329 bp, Zea Mays
gtgccattagctaggtgaacacccctgatctctagattagggttgattttggacttagaaggaatgggggtgattccatagtgttctccacttgggggctgatttaggggtcttataggggtctttttgtaaagttcctttactgtcttttgtaaacattttggtactcttaaactttggttaagggtttgaattatgaaatgtgcatttgcctaatctttctctcaactaaaggcttcaagagagggggcccaaggttcaatccttccttgcccaaggtgattattgcctaaaagcttgggtaatgctttggtccttggcatttctta

SEQ ID NO: 37876 - DNA, 320 bp, Zea Mays
ttcaggttttgcttcgttcagttcagccttgcatcggattagtccctgcgcgcatgtattgtgtttggcgattggatcccaagcgttgttattcgcagttgatgatcgtagtctagttgttgctgcgagctcgttagtacacaaaggtcggtcggctgatcccaaggtgcaggctcagatatttgatgattcatttcaatggtgaataaaactacaggaatagcattgcatttacagatgtttgcgcatttccaggacattttatccagatactccttttacttgatctgatttagtgctcgttttggctccatgatgtt

SEQ ID NO: 37877 - DNA, 486 bp, Zea Mays
cgagtgtggcgagcgcactgaagcgtggccccaactgttattggattctaggcgagccactgtcgtccttacgactgggtgagatcaaatacgtatgtgtgcatgagatttgcttgatgacgtagtatgtggagttcaggtgatgtcacttgcggctagagaataaacgaaagagaagaaaactatgggtcgtgcgtttgcttttttttaaaagtaaggtaggcataatttatacttatttgcatttttccttcttttattaaatctccaaattgtatgtcatgtataaattccattttttgtcactaatgattttctattaacattattattattttcaaatgcacaaacaagtaaactttggcatgatacataatttattcatgtgtcatttgtttattattcacttttaggtgtgagtgttcacatatgctaattatagtatgagtcgcacaaatatggagaccaactctattcttatcattt

SEQ ID NO: 37878 - DNA, 402 bp, Zea Mays
atcgtgggcatatatttacaagttgaataaaagaaagggacacaaactaattaccattgttgtgactcttgtcatcccagttgtctgccctatgctctaccatttctatttgctacaaagtcagcgactttctaaatccattaggtggtcataatctttgtggccttcatgacctcttcctttgcctaaggagcttctcattcagtacatggtagatgggctccacaaagaggtctgagttcaagctcttcaccatcactagcacgccggtagccacataaagggctaattcctggccctctctagctagttgatgttcaccttgccctaaaacttatctagctttgtggcaatctagataaaccgaaagcaggtgcccccatgctatctcgagtgtgggtc

SEQ ID NO: 37879 - DNA, 468 bp, Zea Mays
gcacggttacacggaggggttggtttacgtatgcgttcgcttccatcagaaggcaacgcaatagccaggaaaaattttgacgggcgcttggtttcatcaaaactcggcgcggaggcagttattatgtcggtacatgctcgggccgcgaaatgtctgtagctagagcctgtgtgggtgtggccctatatctggaatcgcgggccgtgtcgaacctgaatctttctttggtcggagcgagcaagcgcacacaacacaacctgaatctttgttccacgtacgcaagttgcgtcgcggagcacacctcggaaggttgtcacaactctttcatggtgcgttcgccttttcccctccttttcgcgattggcaggcaaaggctccacgttgcctcgcacgccaaagatacgcgccactactatcgattagctggttttatacattaatacatacgtacgggtaccggggtacggc

SEQ ID NO: 37880 - DNA, 344 bp, Zea Mays
gtctctatgtctctctgcgcttcttcccttctttggcgaaaatcattgtccaccctgatgtactcatccatcttttgtagtaagttctctagggaatgaggggttttcctagcaaagtacttggttgcaggtcctggacgaagcccctttatcattgcttcgatgacaatgtcatcttgtaccattggcgcttgggcccagagtcgaagaaacctttggacataagcctgaaggtattcgtcctactcttgtgtgcattggaagaaagcttgtgtgctgtagtgggctttatttgaaaatcttagaagctggtgatgagcatgtccttaaggttctaccatgat

SEQ ID NO: 37881 - DNA, 543 bp, Zea Mays
cggctgcacactgcggtccacagttccctgacacatagacttgcatcgatattgcgcgttgaacaacacacgacatgtggggcggcaaggcctttagcagagttggccaatcctccactctagttcattgtcctattccatagccatgtggacaacaaggacatgtctggttgggtggcgatgtctccgctggaacatacggtagctctggcagtaggactagtgagctgccacgtcttggcctttgcagcctggacgaggttgttcccatgggatctagggggatcaaccttggcatatgttaggttgtttattttatttgcaaataaattaaagccgagatgtaaaaggcttctagttagtgttgcactttcacgtgcagatcaagttagacagcaaggctattgccatgcaccccattaaagctggaggactagttgtcttcgaagggtgggggaatgtcatggggcggcagcccagagcatggaggccatatggataggctcagggttaggattggtggataaagcttagactagataa

SEQ ID NO: 37882 - DNA, 827 bp, Zea Mays
gtactagacaaagcggtatgggaaatttctagccgtcggatcatcagccagaggtcaggattaaacttgccctctcccgaatcggtacgcaatataggccctacgatcacagatcgacatccatgattcgtaataccggaatttaatcttacacgtacactcgtcgatcaatgaccgaaatagccccggactgaaccggtaccctcttctaatccgagccatttaatcaatatcggacgataactgtacgtcttcctcgcttggtcacccaaagcggcgacgcccaatggccccctagcggcgatcacgccggcggcaaccgacctgggcatcaaagttgcactagagggactatcggctctatgccctgccctcacatgtccaacttcattcatgaccacacacgacaccgaatagcgtacccacacccgaccacgacaagtaattgcgccgctgcacaacccaactccggtgagaaatcttgagtgccctacgccccaacccgagccaaaactcgacaataatggtggtgggaacgagatgctcgcgatgcgggaattcttaccgacactgaagtggtgaggccgctggtccacggcacgacgcggtcggtcgagctcgccttactccgatgaaggattcttggtctcctcggtactcccctcaagccccaacgaccgtgatcaacttcgagtacccctgagatgctccctagctatgcgctcaatgtcgcgcaacgacaagtcgtcggtcggtttacgacgacgagcaccggttctctgcctccactctcgctcatgatgataacagggtttatgtgacgctta

SEQ ID NO: 37883 - DNA, 279 bp, Zea Mays
ggcccttgtagttgcatgatacagattgatgatctaattaaatagggtggctatctcagtaacatgagaattcccgagatacaaatgtattttacaatgatggcccattaagattttttctatattatcaaaacagatttactgttcctcctctgctagcacttaattagtgcaacatgatatgtaggtacctgtttggaactatctgtatgagtgcatgtgcctgtagtagtatagtcctatactttttcgaaaatttattgtttattagtacatttg

SEQ ID NO: 37884 - DNA, 290 bp, Zea Mays
gtcaactcaaaacgtctagtatatggttagtacatttgctaattgcgggacggtgttctccaattcattaataacagtgtgcctttaggaagagacagacaactgaaattgttgcctacagtgttcaaggtctgacccattagtagcaaccacacgtcagtgattaacacaaaaacagctgaaactgttaatattgcctacgaagtaactacttgatgtgtagttcttgtgagctcatcctttttaaattgctgtgactcgaatgatcagtggacgcatcttgactggtc

SEQ ID NO: 37885 - DNA, 528 bp, Zea Mays
tcagtccaaatcagtggttcggcaagcatcacggggttatgagaatgttcaaacgagggagcagaaggcgtaggctgacctggttcacgctggccgcggcgaggtacactttgcggtggcggagacttgatttgggggaagtttgaaattcaagagctctggggaacgatcgaggctaattcgtggtggctgggtgtgtaatgaccttgcggggttggcaggggcttcaatttatagggatcaatggcggtggccgagaattttagtggggacgtgcggcggtcggaggaggaagaagagtactggcgcggtggcttggtgtccagcgccgtggcaattgctccgacgatcaacggggagccactaaggcttacgacgatgcggtggaaagttagagccacgcggcggacgccggtgatggcttaacggcggtgagaatccttatccacgggttcggtgagcaagggggaggcacggcggcgagtcaccggagttatccttaggcgcatggcttttacctggcggcct

SEQ ID NO: 37886 - DNA, 471 bp, Zea Mays
ctgaaatgacagaagaggtgagcatgtattagtcacatagtcataagcatatgaaatgtgaataaatacatacacagagacacgagacgagacgatcaagaagtcaaatgccgtgaaaacgacgtttgacggataaatagtgacataggaggtttggaattcgaaatgaggcacgaaatgatatggaattgagccgagacttcacgaataggtttatataggtgaatatgagtgaagtgtatgcttggtttgaatttaggcgaagaaatagggatttgggcactcggctcggaaacgatcgctcaaaacgggaattttggtgaaatttaagcctgggatctcggattggcgtgaaatttggcaagtaggttactggaagtgttgtgaaggtgcctgaaaaatttgggttcaattggagcatttttggctggtttgggcatttcaccgagcacgtggtgtgcggggagttag

SEQ ID NO: 37887 - DNA, 364 bp, Zea Mays
gggatgggatcgcctgtgcgggcttgggatataaatctccccttccgtgtccttggtaacttgattcaagccatacccgaacgccattacccttgccaccgccgttgcgtgagggagcagtgtagggagtttccgccaccggggatttcatcctcgccgtggctcgaagctcaaacccgtgggcttaagtgttgcaccgggccacggggaagacgttggtgacctcattgggcgagatttgcgaccagggacccctagatttgtcaccggagccattgactcgcggtggagccgcccctcgtcgtggatagtgtgactccacgctcgattctcggtaatagttgcttgcccgaactcgtgttca

SEQ ID NO: 37888 - DNA, 461 bp, Zea Mays
ggccagtttagtaaagcgctgaagatcagaacgctgaaatacctgaaaagcgaggacaaagatcaagggcactgtagaatcggatgtgtccgagtgatttggggtaaggatcgactgcagggaggtagcttcggacgtgtcgcgattccgcggacctagctagagcctagccggagataattcaccggcggtcaccgtgactcggtcatttcgaccgtcgtgtcacccattcctcgctcctccctcattgtgtctcttcacgtggtaaccatgcacgaacgatgtaatccacgaccgtggatcgctagccggaccaccgcgcctataaatagccccgccacccacggcgaggtattcacctcttcaccagtgagctcggttgaagcacaaattcacagcatcctctccagctctcccaaaattggtggtgcacggtgaatccgtagttcttcgcgaccgtg

SEQ ID NO: 37889 - DNA, 317 bp, Zea Mays
ggagaggcggctggagaatgagagccaggtcagcagggtgtgcaaaccgccggcggtaccaacgaatcttcctctttttcttcttttgcttgaatttatgccttgtgacgtgcatctggaggcacgactgattacaaaagaatacgagtttttttaaagtaacgcagcgcgaaagggaagattcttcctgctgccgactgcacgctgtattatgtatgagtcgtggctccgtcgtgcctccagctaacgaggccctgacatgcatctgctgcattgctacacgttcgttcgtgttcacaactacgctttgttctttc

SEQ ID NO: 37890 - DNA, 456 bp, Zea Mays
caagaatgttggtacaatcggcttgatcagctcttccgcaatctagttcgagctctacaaagttggtcggccaagaatgttggtactgttagagatcagctgctaatggcccgggaggtgatattgagactcgaacgggcacaagactcgcggctgctctctccggcagaagcgcgtctccgtgctgacatcaagctaaaatgcttgggcctgtcctcgctcgagcgcaccatcgcgcggctgcgatcaagggtacgccagctctctgacggcgacgcgaacaccaagttctttcacacggtagcgagagggaagaagaagagcctcgccctccatgaactgtgttccgagggtcaaaccgccgtgtcccatgacgacatgtcctccatgttgtaccagttcttcaaccagatctttggcactgcagcggttcgggagcgggcgatcgacttggag

SEQ ID NO: 37891 - DNA, 575 bp, Zea Mays
ccttgtccctccactgaggttgtatgttaagagatggactaggcagccttttgcttcgggaggcagtgtcttgtcttccctcattgacgtcgagctccgtggtatccctgctcacctttggggactggagacagcggaggttttgcttggtccatactgcctgatttagggcctgcacccggattctatcggcggggaggacttgtcagtcatcaggttgagagcatggtgccgctctcccgtggggttgccggaggtgttggacctgcatgctgtggagccggcggtcctcgatgaagatagggtttggattccacgttcgttggtgttccctgtgatagtgaagattattggatcggagggtgtccttgaggagcagctaccgccacctccaccggatccctctgatgatgagccggagcagggtcgtcgggctcggcgggtgcggaggctgggtgatcaggcctcattgcctcggacttcggtacactcgcggctgggccctcgttttcattcctcgtcgacgcgtgatggaccctctgatgatgttgcgttgatggcttctggtgattcgg

SEQ ID NO: 37892 - DNA, 292 bp, Zea Mays
cttagcccatcaatacatgcacagttacataagttgacaacacatgattgattttattagattttttgtagaccaaggcatttagccctgcttattttgaaagcatcacataagttttgctggggataccagtttacaagaactgcggagcccagttaaaactcacctccactaaaagccaacaccaggccctacccaaccagagaaacactaacaaaacaggtaggttgctacaacgaaaaacaaaaaggaggaaaccacagcaagagagaaattctgaatagcaaaatga

SEQ ID NO: 37893 - DNA, 278 bp, Zea Mays
gctatgacccagcccccgagggtgtccgagcgggttccccttctcatacttccatggatgtccatgtcgggtcttctcctccacactctggttgcatggctgcagcacgtgcttcgggtcaggaagtcgccttagaggccggcgcacctgacgctagagttttggtttctgctggtgatgctaaattggtccccaatgatgctctgcagattgcttcagttggtaatccttcgtcaagtcaccaactgacttcccatgatttggggcttccttcattc

SEQ ID NO: 37894 - DNA, 403 bp, Zea Mays
cgtttttatgctttgctgcaaaagttcctttgatttggaaagacagctcagtcggaagctagattagccaaaaaatcgaatgacggaagtaagataaggaatcaagtaagaattgcatgcaggaagtaagaacgagataaatctttgattctggcgatgacaatgatcacttgatcagggctatgggaacagtccagttagggttagagtttaggacttgggttaggggtttggtatggggatagggatttgtggatgctccaggtgttggtgacactccagttagggttagggattcaggtgatggttcaggaggaggatggggattagggttttgttgttactgggcctagagtgaaggttggggatggggaggttgccagtttggcgatagctggcagca

SEQ ID NO: 37895 - DNA, 392 bp, Zea Mays
tacaaatcctaccccccttaacaagaatctcgtcctcgagatttaagaagatctagggaaaagatggggaaaatctatgcggagctcttcttctctttcccaatttgcttcatcttcaccgtggtgaccccattgcactttgcacatctttatcaccttatttctcgtgactcgagtcaaagtgtccaaaatcttgatcgggtactccgtgtaagtcaaatcaccctgaacactaagctcttccattggtaactgttcctcagggacacggagacacttctttagttgagatacgtggaacacgttatgcacatctgatagactatccggtaactcaagttggtatgccatctccccaactcttctaaggatcaggaatggtccaatatagc

SEQ ID NO: 37896 - DNA, 634 bp, Zea Mays
ttgcgccgccgttctaggtatgagtaacccccattgcatcttgttcattcccgcaccgtagatcgtcatcagatggggggattggggtcgggatctcgtgtctccggtgatggtccgccgtctgtgcgggcgccgccgtgcccaggcatgcgggggaggtgatggagcatggggccatggatctccaatccgacggccgtaatagcgtaccaattcgtcagtagatctggccgttggatctcgatcgtacgggtggattcagggtgcgtgtgtcgattcagcagagctcgatctggatcgttggatttgtgctggtgggctcagatttgagaatggcgcagagctacctccgaccgtagatttcggatccaaggggggtccaattgcgtaccagttcaggctttgcgcggtctaatccggaccaccgattactgatcgtgcggtcgtgatcccgcgataccccttcgcccagacctttttgcatatgagtccctagattatttcagaatgaacccgccatcctcgtctgtgatgccttgtgtcttggaaacttttgctccgtggcccctgtgcttctctgaaattagtgcacaggccagtcggtgaataacacttataaaaccatttagaaaat

SEQ ID NO: 37897 - DNA, 634 bp, Zea Mays
cagtgagggagcgacaagaggcggaggaagaggaggtggtgccggtggtcgtgctgctgctgctgctcgtggtggtggctgtgcaggtgcggagatcgtcgatcgatcgctgcggttcgtcggcggcggtgtcgagatgtcgatggacttcggtgccccggcggatgaccccaaggctttccgcaacatctgccgcgaccgtacgtctgcaccacgcgcgcgactttgattgatctccgctcttcctcacgtcgtctgctttacgaattgacgacccgactgctcggttccgctgttgctcgtttgtgctctcctcagggatactgaaggacctgcttaagcctgacaaggataaggagaccaaaagctcatggaaggtacataggcgtaatatttttgtcgtccgtgcgcatgcagcttgatctatgcacattctgttgttactgcttcatgtgctcagtttcctactatctttcattttttgaggaaacgctgcagattctgagattcatacttttgatgggagaccgtattgtgtacattaggacatgaattgggcgagaatagaatttatgccatattcatttcacatggctatggggattttttctgtgtaatgtttatcaattatgta

SEQ ID NO: 37898 - DNA, 634 bp, Zea Mays
catgtgtaagcctgtgatttctgacttctgttgagatgggctatatttttcttagtattttgttttctgttttgttagggcctgtttgtataccgctaaagctcagttctaggccatccaaactgatggactaacagttagactaaactttagtccatatctctactaacagctagctagctagttggtaagcgatacctaaagtggactagtagctactagtccatgtatccaaacaccctgagctaaactttagtcacctaacaaatagttctactaactagcggactaataactagtcctaggcagcgtgtggatccagggaaaatggtggtgggggttgaacaaattgaagcctcctataccgacataaatatattatgtcccttacaaagtcaaatgtagtagtttacaatgattacattgaaacatacatgaaccatccaaaatacaacatgataactaaaagatgtgattttgcatagaaaactacagggttctcaccaaaattcggggtcctgtgccaaagtctaaccattactgatagcatataggtgctacaaacgtattgcatagcaatgagatatgtcaaggaatgtccttcaacttttgggtgcgtaacctttattttaac

SEQ ID NO: 37899 - DNA, 333 bp, Zea Mays
gctccaaaaccctgactgctgagatttggaaacatagaattggctgtatttttaggggttttctcctaatattgctgacgccttgcggtacattaaagatgaggcaacattgtggtgtatggcgggacgcgtcaagagccaaaggactctaaagcatatgaacataatcgttttgctcatggtcatggttgtggttaggttttgttggtgaattgtaagggaaatggacctcggaccatttctatatttgttttggcgttggatgacaatccaactaattaggactagaatctttgctaagtgattgattatagaatatagagttcaaaggtt

SEQ ID NO: 37900 - DNA, 655 bp, Zea Mays
cataaatcagatccaaatttcgacaagtcacaaaatttcgagagctggcgacatagatgataacatttggcaataataaaatcattcacagctccatttgatttattagcacaaacttaaaccacaaaaactgaggtcaaatcacattgcatttaggacaatacaacaaaacacagtgaaagacaagcttctaggcagagatcactcaaaataaatggaaatattttatcaggggcattctcctactgccaagccttcataagccttatgtccacataaggattccccagagctcacttagccagcttggttgtggccaacgagacaagacagacagacagacagatgagccccaagaaagcagtagtactggtactagcagtagcagcaggccatcaaccagagcggccaagcagacttcaatgggagaaatacactcggatttccattcttgatgcaaaaaacatcataatcatcaggctggtataccagaattcatgcccccataacaaaaccaaaagactactagtactagcctcaagaaatcagaacttttttcaaggacttctgcatttctggaaacgtaataatgaaagacttttttttctgaaagcacaatgcaacataattatatttgtcattgaagtatatgatc

SEQ ID NO: 37901 - DNA, 362 bp, Zea Mays
gagaccccctgatcgaggaaccaagctctgctcagcttagcaacagaattttctcaatttttgttagttttagaaaaccctgtggtcagctcaaactttttcttttgcgattccaaggtgctcagcttatatggatttctgcaccttcactggggatagttacatttattcgagcaacttcaatatactgtaataagataaaggttcccttggttgaatttggttaacaattgcatgttctgttttgctgaagctagtacctaaatgacaaagccttttatcttttataaagttgtttgagacatgtacttcggttgctagttgctattttacaaactcgtattcagtcagagtaatataac

SEQ ID NO: 37902 - DNA, 419 bp, Zea Mays
atagacttgaaaaagatgcaattacaagagagtctttactgcttacaacaaagcaaagctatggtgacaccgcaaaattgctgcttgaatctcaagagaaaaaccaagagttagtgcacaaagtagaggactcagatagcaaaattgttctgcttgaagattcagtaaaaaggtttaaccacttttcttacaggtactgttaaattcaaaccaactttacactaagtttaatacctgttgtttacacatagactcgaagaaagtactgcagataaagattctttattggctatagaaagacatgaaaacagtgaaaccaagaaagaattagttggttctcagaaaaagattgcggaattgctaactgaagtgcaagatactcgtgcaaatgttgcagaacttgaggacttgattaggag

SEQ ID NO: 37903 - DNA, 418 bp, Zea Mays
ttgttcttaggggttccacgacttaatacaccaccaccggtatcaagcaaactgctaactgaaagtcaagaaaagaaaattgctgcacctaaacctattcgtgtttctgctgaaaacattacaaatcttgatgacttgatgcaaccgtggacgagatccccgcccaagaagttggaacaagaacacgtattggcaaaatggcagtttatctcaggttgttaactttaactttgtatttgtttcgtggacctgtttccttggaaagaaaaatagaatacccaaggacgacagagttcaatgtatattatgatgattatctactacacatttttcagattcttcttcaagaagtaacatccagctggctcctctgccagattcttatgacctggataggggccttctcctatcagttcaa

SEQ ID NO: 37904 - DNA, 915 bp, Zea Mays
tttgcaaaagagccacacttgaactctatgggctaagtctgaattgcagtgtaattggctcaactttggggccttgtaacttccaaaccataatggttttgccctagatcaccacatcaagtttgtagagctatcataggagaacaagtttacttaagcaactaaccactggtgctgaatgaaaactaaagataaatgggtctgaagttggactgtcagactgcttggagtctaaaattcagactgacagtggaatggcatgaagttagggctcgaattcaatcatgatccagtgggaatttgactaggaatgctataacaaatatgaagatggtttgtagggctacaagtttgttgcagagcattggttgtgttaccaaggaaaattgggaggaaattggacttaaagttgatctgtcaggagctctgaatcacagttctgatggtacagtgtcccgatcaggtcgctagctctgtctctcgccgccgatgagccgcgcgcggattcgtgcctacgccgccgtgattcgtgctcggatcggttggatagcgcttggggttgagtaaatatcatcgccgtggatatactccggccactaaactactccgaccaccgtaccgagctagtcacggatgcttcagatgtgttcgtcggagatagccgcttcacggccttgctccacgtgcctaggcacatttaccgcatcgccgtgactcgcttaagtcatccgatcatcgccggggagcccgccacggtattcttcacgaatccactgcaccagtgacctcccattcctccgaccgccgcacgtctcaatccaaattcaccgaccaccgctcttgcctactataaattgagcccgtcgtgagctctgcagggtaatcacgcatctaagccgccatgtcttgtcttca

SEQ ID NO: 37905 - DNA, 479 bp, Zea Mays
atactagagaatctagggttaaggcgcaattaatctggactcgattgtagttcattataaatagataaggacggtaggttggttttgattaacccgagggtttcttatgcaaagtttcatgctgaagaggtactggaaacccagattcgcgctattagaaacctacggttctgattataattacaatgcaccacgcgaaccggtattgaatcccacccctcggatctaaaaccaatggccggattttgatgactctaagtttaacctggcccgcccaaattgcatcggacggttacgatcaatcccgcgctgaacgacatcccgatcaaatgtacatcgtctgctgaagatcctgcggtccccgagcatcatccaagccccccaatcggagccatcgatttctggattgacacctcgggccttatccctaccaacgccacaccggcagctgcgcacaccaacatgaacactgcgtcgcc

SEQ ID NO: 37906 - DNA, 401 bp, Zea Mays
agcaaaaattcgcgctgcctctgtcccctcctcccaaattggttgtgcgcagtaaaactagaaccccttatggctgtatagccccaagccccgccctcaattccactcgtgaacgtcgcggcgccattttcccccaaatcggtccgccacaccgtggagaacaacccgcccgtggccagcttgttctggtaagtcgttgtccaatccacatgttgttttcatgcctttgcatgcttgcgaagcctacggtggtgcccgtttgcttgattccgctatggtcgtgtgggaacacaagctcgtagacacggtgtccgccatgcacgtgagcagatcattcttcaagtattcaagctaaattcgcacacgttcctaggccgccttaggtcagtgatgcctccccg

SEQ ID NO: 37907 - DNA, 318 bp, Zea Mays
cttcggatgaggacttagactattttgtagcattggatgtggttgcagcgaagacttctctgcgtgtgacgggtgaggatattccttgtgcgaatgctgggcgtaggcatcgaagggcggtggcgaagcggagggtgagcgggttgtcacgaagtgataggcgtcatggtgaggtggagggtggttgtcttcgagtggacgggactgccaaacgagaattgttgtcttcgccggctggggcaagtgtaggtgagggggagctgcgaaatctttttgagggtgaggaattgaagataatgttgttcaactatagggaga

SEQ ID NO: 37908 - DNA, 1774 bp, Zea Mays
cgcgcccgtggccagcggtgatcgcagcaggtaagcacccgccgatgccactcgaaccgccgggttctccttcccttcttcctttcccgcgcctttatattatctggcaggcagttcccagtgctagcgccagtgtcacgcgtttctcaccggtgatcgctgggtttcggagcctgataaggtgggtggcggcggcgactgtgctcgcggctggaatcggaagcgcactcgactcgacacttccctaaaccagtgcttccattctgttctgctctttgcttctgtgccttggtggtgattcgttgagtccatgaaacctatttccccccacttttgctggagatttaggtgacggttctgcatttcgtccagattagttctcgttcccccagagctgcattttttatgagtatgctatggtatttttcttcctcctgagagactgagggtttgaggcgttgtcacctcgctagggagtgggggataatgccagaagttgttcgcggccgccgcatgtgtcgtctgccacagggggacctcgcatcgctagcacttgagtcctcgcgccacccgccatcaattcgcttacctaatgggttttttttttggtactgcgccgggttaaacagttaccggtatgcctttcgggccttgatgcctctctcgcccttgcttttgtagccgttggattttgctgtcagcagaacccccgtcctgtcattcggcgttactgaatcactaatctgtttgacttcacctcacctgttgttttcacgtgggttgttcagacttgtcacctgtgctctacaatactgctgaatatcttgaaatgtattcatacacgcttatccgtaggtaacattcaatatttggtatagcacgtccgatagtccgatgtgaaatcggggcattggatttggaatttattgcatgttctgttgggcctgtatgtatggtgtatctaccttgtactggtcctgcgatctgaggcattcactccagtttctgttttgtaagatgcaattcgggtcatgaacaggaagagccaactgcacggcttcattgcagattttgttctttctgtgtaatatattccccagtttcagttaatatgtggagtattaagatggtcttcaaaagtcatctatgattccccccccccccccccctactttcttgtatctatacatttgcagcaccattcaatattcgtaatcgttcttccatcgtgcagattgtcctttggatttgagttggcccaactacggactgatagcttccgtgtgctcggaccaaaatggacactcaaagtgttgccgctacatcaatgctgttcttgcggtctcgtctgccatgtatgcaaacacaacaggcactcttggggttccggctcaattttctgattcctgcattgccaatatctctgatacattggtgtcaaaggggatactgcctactgccgcttcgttttgtggtcttgggatcaaaattcaagtgtcctatcagtgtgatgggatgaccaccatccttgagatgttgcagtctccgaatttcattgatatcacaagaagctgtgcaactacactttcagatgatatcacctgcaagaggtgcttaaactctggtctgtcgtacctccgccatcttgtcggggaacaagataatgtcaccttgaatacctgccgtgatgctgcttttgttgcacttgtgagtcaagggaatatatctaccgttgatacagctggttgcttttttagtgttcaggggcttagtg

SEQ ID NO: 37909 - DNA, 495 bp, Zea Mays
gcgccggcgacttctccggtagcaatggcgtgccggcgagcaagcctaataagaaggggattaaggggtggagcatctggggcctcataagcaagaagagcagcagcagcaggaagcactctgcagctgggggaggagcagtagcaggaggaggaggaggaggaggagagtacgagtacccatggccggagctccgggcaagggggtacaacgggcagatgctccggtgcaacagcagcataagcgcgagaagctccttcagcggcacaggcactgggagcgggaggaggagcgtctctggtgtggacatgcgcgataagtataacagtaacaatggcggcttgaggacgaggagggacgaggtccttctggagaggcacctcagcacgaggtcgtcttcttactcgagatcaggacatcatgacctggatccagcagctatggcaccgccgcagatgggaatgcagttgagcagccggccgcccaacatcccga

SEQ ID NO: 37910 - DNA, 746 bp, Zea Mays
cgctgctcgaaaatgcaaatgtgttgctgccctcgcctgggagggcgactcaccgaggtggatgccttcgcccgacagctagccaatgctaaacgtcacctgctcggcccccatatattgagcccctgccagcgcccccgatggtcgctcctccctcagagtatgaggccatagttataactaacttccatgcccaggcggcgggtgtctacaacatccactctccggttcccatcctcgacccagctttctccacttgcgcccattagtgtcacttcatcctccattcctcctcactgtccagcgctacgccctatagatgaccatgtcctcaccaacgctgcatccctcactatcccatcctggtggcagatgaatagtgtggtcctctcgtagatccttggggaccgtcactgttgagttgtaggatgttggcatggtggcactgcccgttaggcttgggttgccatcgaggagcagttcctcgacaaccgtgaggctcgtgctctccaccttgatgttgcttttcgaactttctgcaagggaacctctctgtcaccgaatactgtcgtcaaatgaagcgcatggcagcctccctctctgacctcgaggagcccgtcttctgtcttcaatcacatgctcgtcctcaacctcctctgcggcctcaacaagcgctatgatcacttccttacttggatcactcgctcagtcccattctggtgcctgctaccacatcacgtataggc

SEQ ID NO: 37911 - DNA, 685 bp, Zea Mays
gcgaatactgagaagtgcggggactattctacaagaattccccagactcaggctaaaccagggaaggactgcgggttgattccctaaatttataaggtcttttctgcaaaaaggcatggcgaaggggtatcgggaagtcctggccgcccgatctaaaacggacgcaccagattagatctcaactaccctgaatcggtacgctatgcagatccttggatctagatccaacggcctgggttttaaatagcgcggaacgttcaaccaccacccgatctccgatcaacgctcccgatcggtttaacgcgaaatgctactcggacctaatcttgaccgttggtccacaaatcaaccatccagaacgtctctaactagcccgagccacgatcaaatccgaacgttcattctgtcatctacggccatgagctcgtcctcatcctctgaccacacgccacggcggcgcgccatcacccgcgatggacacacgccggtgcgcaccaaaatctcatccccgaccctccaaagttcaattaactccctctacatgatgtcaggtgaaaggcgaagcaaggggagggagtagtaccggcaggcacgacgcgaagttccctggccgcggcagagggtgttctacgacggaggaggagattccgatgagcgattaatggcaccggaggcagcgatttcc

SEQ ID NO: 37912 - DNA, 284 bp, Zea Mays
atttgagcacgaggatgttaccattcatgccagtcagattcgtcagttgtttggattcaacgagtcatcgactcgtcttcacagcttgtgctatggcacctctgaccctcctcgtcgccctcacggcggagttgctcctggtacagctcacttcgtggctttgttccgaccgcccttctcagatgggtcgtgacgttctctagcagatttcaccccacgcttctgccacggatgggttaccgagaggctgccactcatattcagctttggctccttggtgccct

SEQ ID NO: 37913 - DNA, 390 bp, Zea Mays
cccggattcgcgccggccgtcgcgattcgtgccttgggcgagtggattttgctcaccgtgaaaagatctcgtcgcggatgggttcgagttattgtggcctcgctgtccccgaccccttgcaccgacgacgtggctttacggccgtcactagagttggcgtccttcaccacgatcgtgccacgccccaagcctttaaccatgtcgctactagccgcaccagctcaccgataaccgtcgtagctcctcaaccagtgagtgccacggtaaaacgcgctggtgactcaccccttctttccggccaccgcgtgtcttcaccaaattcactggccaccgcttagcgccactataaattgacggcacggtctgctgcgttgggtcatcaccaagcct

SEQ ID NO: 37914 - DNA, 669 bp, Zea Mays
aatcaattgaagggatgtagaaggggcggggcgaacctgatggacattagcgactgaactatgtaaaagaatgtggggaactcgaaagaatgagaggggaaacgaaccaggggaggagaacgacggcggtgaatcgatgaagcgcggagattacggtgggtggaagcggtgggggcggtcgtcgatggcgatcgcaggagcgaatgacgacgatggggaggagctgatttttttagggtttgggtggacccgagctgaattaattgaaaggggtttgatgggtctggctcgttgaccatattggctcggtcggcccgcgggggagcggcgagggactgtgggtccactagtcagcgcacagtcagttggaaggtttggttactgcgtgttcataataagaataaatagctgtgcaaagtatcgtaaacagtttacaaaaaagaattaatcaagacccacgccaaagtacgtaatataataaatcccaattgatacgcagttgttaacatcgaattatacaaacataaatcccaaatactacaccacaccaaccaggccgcatcgctgtgtcaatttatgtaaccgttggagtcataatatgcatgtataaacgcggtcaattcccacgcgggacgacaccacgactccggagaacccacgcggaacgag

SEQ ID NO: 37915 - DNA, 471 bp, Zea Mays
ggaagcgtgggtccagcggactgctcttggggtcggcggtggaggagcgccagccgctgcacacggcgcggaggtccatgtagtagtcgatgtcgtcggtggacaggatacgatcggcgatgcggttgacgaggtccgccgggagcgacgaccagtccgccattttgcagctcggttggaggattgaagcacaactgcacagggttcatgcatgtgcgacgaattggatgggttcaagatataacccatcgtttgcagcgcattcgaggagctggaactccaaacgtccacccggtacaacggcggtggcggtcaatactccaattcttgggaagatgcggcatgcatgagcacgccgttccaatcatcggtattattacgaggggcgatcattgaacttccaagccccgatgacccacacgtcagttctcctggcttgcaattgggttccatgcccactctgcttgtttt

SEQ ID NO: 37916 - DNA, 505 bp, Zea Mays
caataatcagaatcagtcaaaaactaagcaaaactagaaacagaaacgacgatgcaattgcaatatgcaacgcgtacacacagcttgcaaccgtacgtacgtacgtacgtatttcagcaagctcagctggcccggtcgtcgtcgtctctgtcgttgctgctactcgacagacagcgatggattataaatttcagcaaacagactaaaccacacacctgacagtctgacagcaacaaaactctgtctgtttttggctcgcgtacgtgacctctgatctgtatttgctcctcccggccgctcgtcgtcctctcgcctagcttctttcttcttcctgtgtcgttgccctcgtcggcgcctctgcttcttttaatctttgacgtggtcctgcattaattgctactgctttgcaggcgggatcttgattattaacttcgtcctgatgctggaatctttcctaatgcatcggatgcgtcccccattcctgctttaagctagctagcctccg

SEQ ID NO: 37917 - DNA, 537 bp, Zea Mays
tgcaactttctcttccgcctctttgacaaaggcaggtccttctagtgcttttcccccacgttggaccacatgagaggggtctggcattttcgtccatactgagcttcgaatggcgacatcttgatgctggcctggtagctattgttgtatgagaactctgcgtagggtagactggattcccaacttctatcaaaagctaacacacatgctcttaacagatcttcaaggactttgttgactctctctgtctgcccatctgtctgagggtggtaagcggtactgaaatctagcttggtgcccatggctttctgaaggcttgtccagaatttggatgtgaactgggttcctctgtctgacactatcttccttgggatgccgtggagtctcactatctccttgaggtaaatccgggcaagggtggctcctccaaaggtagttttcactggaatgaaatgggctaccttggtgaggcggtctattattacccagatggagtcattccctttctgtgtccggggcagtccggttacgaagtcc

SEQ ID NO: 37918 - DNA, 498 bp, Zea Mays
gggagactccaccctaggcatttcaggatgatccataatcctagctcaagtgacgacatgggaaatcatactcaagggcatcagcacagctcccaagcatcaggggcacaacaaagctccttcagccaactctaagaggcagaggaggtagaagcttctgtggaagattcaactaccaaccaagaaggttgttttgcctattctatggggaacataaggggcatacaacaagtacatgccaagtcacgattcagaagcaaaaggaaatagctgaagccgaagcacggtagaattagccgaaccaggtcctgcataatgcttcgtgctattccccatacatccacaagtatgtgggcaaccaacaacccacaacattagttgcttcagcaagccactcacaagctgcatgggccccgctaccaccaccaccacccatggctccaacctcgtctcacaatcaacagccagaagggcaccgccaggtacaacaacaacgtg

SEQ ID NO: 37919 - DNA, 380 bp, Zea Mays
gcgaggtgcatagcagcggacctggccgccaggagcagtagtgagggtgccagggatggaggtggccatcaccgccgtcgacatggcaagctcgtctggtggcgcggtatgcaacttgtattcccaccactctgctgaggatgaggcgatggcgttggacgaggcgcagcggggcacggagctgcgcgagtactgtcgttgtatagtggcacgctacagattccattctaggtgagtacaccaaggtatcgaggtcttgtcttgtctcggaccacgccctttccattcccttccttctctacacacgcacacgcggctgattttcttcatttggttttctacctctcggtccacgttgatctggtgatgcgctttccacg

SEQ ID NO: 37920 - DNA, 498 bp, Zea Mays
gtcgggtggggaagagggtccccaaccattgatcaggtgacagtcgacttagattagatgaagggaagcgttttgcagagatggatctgagtcgttggattttgggcatatggatcggatctggtgatggcgtggcgctaagtgggcagcggaatcatgatccaagcgttgaaatcgcataccggttcatagtgatgcagatctaatcctggccatccgatcttgatcgggcggctcttgtgcggctatccccgtccatcgtgcacaacttgcatatgtgtccctggctttatttgaaaacaacatgtcgtccacacagaagcaaataatagtgcatataggtcctggaacttacacaaagcaccctagattttttcaaaatgttaccagcagcccaaacatgcttctagtttaatgaaatcaattagaaaatgatgttcccttgaccacttttctttacccaataatattctctatgatcactttggcatgttcagg

SEQ ID NO: 37921 - DNA, 582 bp, Zea Mays
cgcgtctgtccaactccagtttcctgtacaggtacttgatcggcgctccatcactcggggaggtgcttccatcgatcaagtcctcatccgctggtccggcttcgatgatgttttgtctacctgggaagactacgatgctctttgtcaacagtttcctcgtgcagccgcttgggggcaagcggcatcccaaggagaggggaatgttagcttgtccaatgctacatatgctcatgggccggagcaagtacgcaggggcgcggaaccgaagacaagccgtagagttcggaggcccaactccttatacacaggctcagagtgggttgtgtgacggcagtgggccggtgtaagctgtgtcgttgtgtcgccatatggttggtcgatgtatatgagacagggggaaaacattgcagcaactaagaacacgcaggtttcctccgtatctcctccgcatctcccttcttctctaccaactcttccaatcagcatagctgtggtgctgacaattggtatcagactaccgatcttgggtctggcggagtccgggtacttcacacggcgggcaaaaatggcggacgcagcaga

SEQ ID NO: 37922 - DNA, 320 bp, Zea Mays
agatgtctgaacataaggttgcaatttgaggtaaactgaatcccccacgttgaactctctgtcagttctgttcttgtcggcttgtgccttgatgcgttgctgagcccggagaagatgttggcgaacaacacggaccatcaattctctatcattcagccagtcctgaagatctccagagacaggcgtgtcattcagagtaattccaaaatgcctaggaagatggccataaaggacttcaaagggcgttcgtcccaacgaagaatgataactggaattgtaccaatattcggctatagataaccatgacaaccatttggatg

SEQ ID NO: 37923 - DNA, 472 bp, Zea Mays
cttgaattaaaaatcatgtttaagtcagcaaaaggttttaggagaaaagctgatgtggcgttggtgtggtcatagactgacgatatagattgtgcacagaaaagttctaatagaaaaaggccgacgatggtagatacagtctagtcgatggtgatgtggcggtagatacaaacccaatgcattggatctagccttacacatgagctgcattggatagtgttggtcttgtgccgctgacatcgagtcttgcatctttgcccataatatacaacaggtcatcagttgttccttttctaagcctaggtgaacgacagtcggtacacaggcgagcatatccccatcgacggttgattcctctggtcgagtaaatctctagtggatccccaaatccaaaacatcatacctcaaacacctaaccccaaaacccaaaccctaaaaccccttattccaaacccaaatccctaaccccaaa

SEQ ID NO: 37924 - DNA, 428 bp, Zea Mays
atctttttaaaccatttaagcctaatctcacatcatgcaaacaggaatctgtttaagcatgttaggcctgcccacatattcatccaagcacattctatacattatatcatcccatataggaactctcttttttttaattatactatacatatatctatcgaataactcagacaaattgcatctcaacctagacttcacatgacgtaactatttcatacttacgcaatcacgccaatacaagaaaacgtggcttcacaacaatacgtactggcgtattcaaacgttccttgctatttctgtgttccagcccacgctccacatatacataaacaagataaccatcccaaccactacgtctattccctcccaccatacaacttaattaacatggattgcgaaagagctcaccacaactaaaccaaactccc

SEQ ID NO: 37925 - DNA, 517 bp, Zea Mays
cctacatcgatgatgtggttaccaaaacaaaaaacttcatcgaagatttgcagttggtcttcaacagcctgaggcgctaccggtggaagctgaacccagaaaagtgtcttcggagtaccggctgggaagctactcggattcattgttagccacctaggaattgaagcaaatccataaaagatcaaggccatcatgagaatggaagtgcagcagtcgcagaaaaaggtgcaaaggcttactggatgcatggcagccctgagcaggttcatatcgaggctaggagagaaagggatgccattttacaaactactcaagaaggtggacaagtttcaatggaccatagaggcataggaagctttagaggcactgaagaagttcttgaccacaccaccagtactcaagccgccgtgccgggctacgcctgttcagccggcagaagatctgctcctatatatctcctgcacgactcacgtagtaagcattgcattagtagtcgagcgggcagaggaaggacatg

SEQ ID NO: 37926 - DNA, 327 bp, Zea Mays
gccgaagctactgaaatgaaaactgctgaagctgaatccggcgaagccgaagctacggggccgaagccggggccaccgaagagtcgaacctggaaaccactcttgaagttattgacaacatactgctgaaaatggctgaagaggaagctaccgtggctacagtgaatacggcaactgagaaggggaaagaacaaattgatgaaatttcagaagaagaagattttaactttcaagatttgctcgaacaagaattaacggacgccgaaaaggaggaattgaaaaaatatgccatatcttgcggatacaaatcaggggctatgctttttg

SEQ ID NO: 37927 - DNA, 593 bp, Zea Mays
gaagatttggagggcaacagagaagacccacgacgcctaaactggtagacttcgctccaagaggcgtctatgtaacagagattaccatcggcagggcccacctataagtggcttgggagggtatcaactgtagtgtaaccgagaaatatatggtcctgtaattaccctgttatactatgtatggcgggaatatagttggtagctaggggcattacggtacttagtttaccaacccatggctaccccgatcctgtaactgtctggacacgcttagtaatacaatctcgccagcagtttgtcacttgattgtgctactcactccccttgttcccgagtgttgggttacgaattcccgtgctaatagctggttttatcatgtggggagatagatggtggatcagaataaccaagaacatgctgtgatgcgaggagggcgacaaacctgttgtagctgcgaggagcgaggcgaaccgactgcggcgacaacgaggaagatgaaccactcttgaggtgtcggaggcactcactctaccgattggcggctgcaatgtccgtgatggaaactcctcgttcggctgcaagggaaagacgag

SEQ ID NO: 37928 - DNA, 436 bp, Zea Mays
cggcggtagagctttggcgaagggtcgggtgaggtcgaagggggtctctagcgatcacgtcgatgtgcggatcggcgtcggaggtgaccggagttgtcctggccatgagctcaagcggcggtgttcgtcggtggcgcctactctagccaaacaacggtgatagaggtcaatcaaaccacacagggagcttcaccgggtgatagggtgtgtgtgcacgaaatcaaagaatggctcactggattacctggaccacgtgcgctgacgtgcgagtgaattctggagagagtgatcgggcttctctggcgaggtggcattcggtctgggggttcaggaagcttcactggcctatgaggaagccaatggtggagctcgattgagtggagaggggctagggtggtcggaccatggtggttgtgatatcctggcccgggtggtt

SEQ ID NO: 37929 - DNA, 273 bp, Zea Mays
tacgccaagctcatgaccgagttcgactccaagaagaaggccggcatcagcgtcgagatcaccatagccaacggcgaggccaagctggcgcacgaggagatggagaagcacatgaacacgcgcctgctggacacccgcaagagcgtggaggctcgcgcctacgacttcttcctcatcttccgccgcctcttcgtcaacgtcatcctcagcttcaaggagaggcggctcagccaggccttcttcgtcagagacacagacacagaggagacgaca

SEQ ID NO: 37930 - DNA, 315 bp, Zea Mays
cgaagttgtattaagccttcacttttaaaacactaaagctaattggatgaaggaggagcaatggaaaatcgtaccttaaaatttgaataaaacaagttgccggtaatatgttgtcttctatagttactaatgtccctttcaagattcgggaatccgatactcttggccagggtattcacaatttttgctctggcgcggtcaggaatgcatcccaagatttcttcgtctatgccgccgaagagaacagatctaggctggtaaccaccagacacaacaaattctttcaattttgatatatcctcttcagaaagttgt

SEQ ID NO: 37931 - DNA, 294 bp, Zea Mays
ctatcttctatagtgttgtaattgtagaaaatgttgtacgtatggcttgtttttgcaggatgtgatgtgaatggtatgaccttgacgtcatgtgatgatatgtatgtaacattcatgcatgcatgtgtcctgcaaagtaacataatggggttgagtgttccattattttatgacgatctgcttgtcgacatgtgatgctttgaatgaatcttcatgtaattcgttactagctattagatgtagtagctttgtatttttcgtggaagcacttttaagcatgatggtgatggcgat

SEQ ID NO: 37932 - DNA, 615 bp, Zea Mays
gttcagctcaaggaagatgaattttgggaactaactcaaggttgaagatctgtcaatgagtatgtgcacaaattcacagaattggctcgttatgcacctgacgatgtcagcacagaagccaagaagatggtccatttcttgaaagggctaagaccagaactcaagactatccttgccagccaagatttcctcagcttctcgcacatctcaaacaaggccatacaagtggaaaggaaaagggaaatggaaaagggtcacctcaagaggaaattccaagtcctccaagctcagcagcaggacaggcaccaaacaattcgatcctttgggtttccacccaagggaccaagtgtaacatcccaaaatctcaacccaaggtttggaaccctaatctcctaacccccccccttatttctatttttctccctaaactccacccttaggtcatctcatcatatgcatacacttggattgttaggaacacctcacatagattattttcaacccttaagattattcagcaaattgttgattcaaaagaaaaggaaataaaaagaaacaaaaatagaaaatggaaaaatgaaatagaaaacagaaaaagaaaaaaaagaaaaatcc

SEQ ID NO: 37933 - DNA, 600 bp, Zea Mays
tgcaaattcaattccttgcacagctggactcccaggcggtgttgcatggtttgatgctccatctgagccagcgtcgatagcccaatcagcttgaagaggcgattgttgatctggagttgcagaatcggctgactgtgctgctgcattttctgaattttctggagttgcaggatcggctggtactgtttctcttccagcaactgagtaaaactcaatatcaaacactggtgttgcagatcctgctcgagtttcttgtttccagtcccaagatttactctcttgaaaaatcacatcacgcgatatgtgaagtttcttggccacaggatcatagactcggtacccctttgtgcctgcctcatacccaataaacaccattggtgttgatctgtctgacagcttcgaaacaccagggcctattttcttgacatgagctacacacccaaatgtacgtagatgatgtactttgggttttctgttatgccatgcttcataaggtgtcctcccttgtagacttttcgttggagctcgattcagcagatacacagcagttgtgactgcttcgccccaaaactcccctggaacattcttgcttttcagtaa

SEQ ID NO: 37934 - DNA, 405 bp, Zea Mays
atcacagagtgagaaggttgtttcggtggaaaggcatgaaggctgatgtagtgtgctttattaagcaatgtgcagtgtgtcagcaggctaaggtagagaggattcacaccccagctcttcttcatcccttgccaatccctcaaggtgcatgtcaagatctaacaatggattttattgaaggattacccaaataagaagggtataactctattctagttgtggtggacagaatttctaagtatgcacattttttccactcaaacatccctttactgcaaccaaagtggctcaagtgtttttggacaatattgtgaagttgcatggtacacccaggtctctggtagataagatgttcactagcaatttttggaaggctctcttttcctcactcaacaccaaattagc

SEQ ID NO: 37935 - DNA, 385 bp, Zea Mays
cttttccgtccgttcatatatacgatacgaacgcatccacccgccggcacggatgccaaggccaagagttgtgaatcactggatctcgtgcagctgaaatgggaactgcaaaattgccccagcaagcagcgcgcaggcaacagttgcactcatcagttcagttggtcgtgattattaatttttaatcggggaaaaggacgatgcatgcactcatcagttggccttgattattgatcacactctatgcacccgtcttctagagcgcttccctaccactctgacctcctcacaataatctgtgtagtaccggagtaacagcatgcctgctcccctccgtccctgccctgtctcgtcgacgcagtgatggcgcatggcggcacggcag

SEQ ID NO: 37936 - DNA, 446 bp, Zea Mays
gcgaaggctaggatgcgagagcttttgcttgctcatgatggtggcgttgctgtaacggccgaggcgtcaattgcgccctccaagcggagcgtagagctttaggagtttcacctggttgtcagtatggtgtgcgccccctctcgcccctgcctctgatcaaggtgcctctagttgatcggctgtgggcgttacctggacacgtggagcgcgttgttgctgaaggcacgttccactagagcaacgtagctctagggcagatggtctcccattttgatgagatcgacgttgtcgtgattgcagaaggttttgccatcaattggagcgacaaggaactagatgccattgaagatcaagaccacccccaagcttgattgctcaccgaacgggttgatgtgaagaccctactgacgacacttggagcctaacttcgcccaccggtgatccgc

SEQ ID NO: 37937 - DNA, 502 bp, Zea Mays
cagggtgtctcgcatcagagtggtacacaaaggagtagcaaccaaaattgttatgatattgttccttccccactgtcttcgtctgataagataattcatgttcattacagaagcagtcgacgtctggttccaacccctggctgttcattgcccagatgaaaaccccgattttgatcaaagcttcaggggtgagttgataaatatatatctcaaatcttttaagtacttcaaccagtattttattcaaaggaaactgaaggctagccttcataaaacctttgtaaacaaccacttcatcaacttcaggaagaggaacaatattctctcctccggccctcactatagttgtatcacataaatatttacccttcattgcttcaatctgtcctctcttaacagtggattttccaaatacaacatgacttggcctccacgaccgatcttcggcatcatcgttgtcactctccatatcaaaatcctcgctgtcactagaatctccaga

SEQ ID NO: 37938 - DNA, 302 bp, Zea Mays
tcgcaagtacaaaccggccttttcacatagctgagcaatacgagggcggtcgtaatgactgaacataccattagcaagaatggcatcagcaacatttgggtaagtcactaagtttatctccaaaacctacaattcatacagaaatgctcctgagaaacaaataatgtacacatccaagcacaaccaattcatgttcaaagaggaaagatgataaccttggtttgaagaaaagcatgctctggcaagtttggcttcagaacatccaacagaaaggctgttgcctcccgtatcatatttctctg

SEQ ID NO: 37939 - DNA, 303 bp, Zea Mays
tccatgaaacaagcgcttcactccccataaattatttagatgtaccagtaaagaacttctcaaccagtctggtccatgctgattttttggtatggagaatttcaactgaggtttcttcacctcatgaacaaatatcctacagattagatccagacactgaagggctgatagcaatgcttcacttgactgaacatcaagagctgactttgcacagagctctgaagctgaaacctctacagaattagtgaggatttggacaaggttctgaagcttcgttaataaattggacattgaaaatgcccc

SEQ ID NO: 37940 - DNA, 730 bp, Zea Mays
cgggcaatagaaggccctacttctagcgaagggggcatgagacatattatcttgcacctaagtgcttgtagtaggaggtacaagctagttgagagagggaaaggatccaagtctttgcggatgtttgaggcaagtgccaatatcggatgtggagggcaaacaatgaagtattgacctctctcccttggaggcactggactcctttaatagccttaagaaggaaacccaggaatactagggttgtcgtattgtgcagaggaggcgagcctgagcccctatagcagtatggccaccgatatggctcttgtcctggctgctgtctttgctcataaggaggacgcgtacccgagcccatcttatggatgagtcgtttgagtcgtagttgttgaaatagtgataagtatgatgaaaagtgcatggtaattggtcctatatggcgtaaagcagacttgacattagccatgtggtttctgtagccaccctgttgtcagcaaattttgtggaagaattggtggcgttgggcatccttatgttgctgtggtttggtcgaggccatgctcaggcgaggtgtagatttctcctgaggccatgatcgggcctgcgcctgacgcagtcgtgcaacagagtggtcagaacagtagttagagtggtctcctgcgggattcgtggggagttggtggcttctgccagggaagttggccgaaactgagctcaggcgaggcggagttcc

SEQ ID NO: 37941 - DNA, 466 bp, Zea Mays
aattggcttctgcttcatctgcaacttgggataatagctcatcctcagcctcatcagacttcttcttgtaataagccgcctctacctcttcagcggcctgagacataaactcgtcctcttcctcttgagcacgtaatcctgcctcagctagtgcgatgagctcactcaaccttgatgtgtcgtcctcctcttctccatgtaatcctgcctctgcgagagcgataagctcactcaatctagatgtgtcctcctcctcctccatcagctcaaccgtcgccattttatcctgaacatatcttgcatgcgcctcatcggccaaatagtttacgccacatccaatctctgcaaatataatgagcaaataaagttagcaaagtcaagataaataaattgtactaacataattatagtatcatttttctcactcacttcccttgaggcgatcagcaagattatccaacatctg

SEQ ID NO: 37942 - DNA, 359 bp, Zea Mays
cttgtgttggccgattcaccaatcatcggtccttcgacatctatcgttcctattttgatgacgtctccttttatcgtcctattctaggctatagctgtatgcccccctgccggattaatcggtctttgcgtctgagtggcccgacaatcttgttgggcccgtgctcgtggaccagattgaggggctttcaatcggtcttgtactggaggcatcaacctgtcaaaaacagatgattgaggttccctccatgcagggtattgtggtatcccgaatggatatggtggcgcgccccacatctaattcgggatatatggtggcggtggtatgtatgtataatgacatgacatgggtgtatgtgg

SEQ ID NO: 37943 - DNA, 343 bp, Zea Mays
ctgtacatttcagtatcttcccctttcacaaggaagttgttcccttccttgcttgatttgtctttctggctcttgtcacaagttgttgtcgctctctcaaaaattccttttcatttgattgttgaattatcgagaacgcaaaattgggtataataagccaaagagtccagatttacatttgattgattgcttgtttccttcgattttacttgtgactctcgagctaatgagttaaattgagcttaattacatttttattccaattcgatctcttttagccttttatgatctgtcatcggttgaatcagaaagccagtagctcaccatatgtgatcagtcagtt

SEQ ID NO: 37944 - DNA, 290 bp, Zea Mays
gttgcatgcagagtcacatcctctcactcaaacctaaacctcatccgatgatgatctgggtcaatccaaactgtgggatagaaaactctgacccactcctcaacatatctgccaccaaaagtcagaggagagtgtaaacctggcagatatgtgatgtgaccttctgactttgcaccgactgctgaaaggaaggcaggaagatcaaaacactagtgcactctcaaggcaatctaagcaaacagctgtgccctgaagaaggacttctgggtcctgatactgaggagtggcac

SEQ ID NO: 37945 - DNA, 558 bp, Zea Mays
ctttgggcgagtaccctcaggctttcgggtgtccactgttttgttaagctcttgtccaaccgtaacagccatcggttcagcatgggccgagtcagaagattctccagccaacatattgagtacaacatctatttctgcatcatccggacttgccggcatcgaaaagtgaacttgcctctcatcattgggaagatcacgaagaggagcaaccagagcttcaatgtctttaggagagggtcgcactctaagacctagaccactatcaatagcaggagggttggacacgaaattgaaaaatgacctaggagatggcagattccaagcagaataagcaacaggagcacccacatttgataccttgcccctcaggatcatgtctagtcggctcaccaggacctcagtaggaattttcctgttggtaacccgagttgagtcagtaataccactgtacaagtaagctggatacgccctgtctttcaaaggctaaatattcttgaaaatgaagtcagcaaccatagcttcgatagttagacctctctccttcagcagacagatctc

SEQ ID NO: 37946 - DNA, 292 bp, Zea Mays
ggtagggggatttgacacaaaactgacgaacgtcttgggaggaggcagattccaggctgaatacgcaacaggagcaccaacattcgacaccttgcctctgagtatcatctcaagccggcttaccaaatccacaacaggaatccttctgttggtaacccgggttgaatcagtgaggcctcgatacagataagctgggtacactctgtctttcagtggctgaatgttcttaaaaacaaaatcggcgaccacagcctcggcagtcagacccttctccttcaacaatccaacctcg

SEQ ID NO: 37947 - DNA, 286 bp, Zea Mays
cggtaaacactaatatcagactctagcttcgggaaaccaacactctttgacagagtgccgattatttttgccccagcacggtcgcggatacatcacaggatttcctcatcaactccgccaaagagcatggatcccggctggtagccacaagattttccatattcttctagctcctctttctctgcctcagacaattcctgacctctgtgccaaaggtcaaattctttttcttttgacgaagtatcaacaacttctttccccttgccaggcaccacagccacgtttt

SEQ ID NO: 37948 - DNA, 526 bp, Zea Mays
tgggtcagcggtatgctgacggcgtggggcacgctggccactggatcactgatcagcggcgctggttccacgaatcgcgcaaaccattatccgcgaatccgggctgtcagatcagaatcgggcggttaggatgggcgccaaggggttttacctactccggctgactagggttggcaccatacgcagtcgcggtgtcgcaggtgccgaagatgaggtagactggggctcctagggtgttaggggtcggtctgggttgctagagaggttggggaggactcggcgaacactaaggcgaggtcaggatggcctgaacggggctgaggcgggcaaacggcggagggggaccctcggctgaactcagggctgctccggcgagcaatacccaccgcggtgggggttaatctggcgctctacggccgacgctctacggctgacttaggttccggggagagggtagggatgttgtttgcctgaattcgggctcggggaggggttgtagtggctggacaccgtgaagaggcagcgg

SEQ ID NO: 37949 - DNA, 415 bp, Zea Mays
ggactagttcattcgacatggcctcctgtcttgtcgcttctgccttactggccactgtagaggctccggcgctgaggtcgtccctgacaggagagtgtgtatgtgtcttattactggggctcctggcatcacgcactgtcgtggtcaacgtatgcttgcggctctggctcaatgctttagacttgatcggcgggggcttggtcgtctgctccacctcgtaggcttgctcagcggtcgtagacttgctcggcaggggacttggttgtccgctccacctcgtagacttgctcggcgggggactcgattgtctggtccgcctcacagacttgctcgcacaggggacatggtcgcctactcctcctcgcggacttgttcgatgggggacttggtcgtccgctctgcctctctgacttgc

SEQ ID NO: 37950 - DNA, 692 bp, Zea Mays
caggatttcgttcgggagtgcagcgtttgccagcgttacaagtcggaacacatgaatccggcgggacttctcatacctctgcctgtgccgaacagtgtctggaccgacatagcgctggatttcatcgaggcgctgcccaaagtgcgcggcaagtccgtcattttgacagtggtggaccgtttcagcaagtactgtcactttataccactggcgcacccgtactcagcagagtctgtcgcagaagctttcttcatcaacattgttcgtctgcatggcgtaccacagtcgatggtgtcggatcgcgatccggtcttcacatcaatattctggcgcgagctcatgcgcctgacagggaccaagctccacatgactacaacatttcaccctcagtcggatggacagtccgaggcggctaaccgggtcatcattatgtatctccgctgccttacagaggacaggccgcgacaatggctgcgttggattccgtgggcggagttcatcttcaatacggcgtaccaaacatccctgcacgacacgccattccgtgtcgtctacggtcgcgatccaccgtcactccgatcgtacgagccaggcgacacgagggtcgctgccgtcgcccggagcatagcagagcgcgacgagttcctcgccgacattcgctctcggctagagcaggcgcagcaggttcagaa

SEQ ID NO: 37951 - DNA, 293 bp, Zea Mays
aattttgaggcaaggtcaaatccgttggaaagaagataagataagctttctagattgtatttaaacttccaaatccgacatgagatgtatccgtggtggcaaaaatgagccaaagatgtttatggtgatggtggatatcgtggtgaccaaaacgtggtagaactcaaaactctaaaggaataaactaagacgagcaactcgacacaaccgatgcaaccgaaaactcaacaagccctagctaagtagtactagtaatggctcaatggtttataggattgtggtaaaactaatct

SEQ ID NO: 37952 - DNA, 316 bp, Zea Mays
attagatcgatagtcaactccatcttcatcctctagcaatcatctgtgacccccgaactcgaaacaatctaatactcagcatcacacatgacgtaggatgttacgcacttgtgcggtccgaacctgtctaaattccccgtgttccgacgtgcccccgcacgtaccatcgagcagcgatcgacgtcgctgtcctcctaaaagcactgcgtggtttaccccgtagtgcacagtcggtaccaaacatcgataaccagcgccagctccatggccatcacctttaacaccgcgattgtcttcaacgtcaaggaggttttcc

SEQ ID NO: 37953 - DNA, 411 bp, Zea Mays
gatgtggttattttccttcatcctgctgcttcggatttgaacctagccctggatattctaaatctctttggtgaagcctctggtttgaagaccaacttgcaaaagagtaatgtttttccgatacaatgtgcagaggcagatgcggctgtggttcagaacagtttgccatgtgagctgaaggatttcccctgtaaatatcttggtgtgcctctttctccgtgcaagcttacaagggatcaaattcagccatttgttgatcggattgcagaccgtctccctggttggaaagctgacttgttatctcgggaaggtagaagaatcctagtgcaatctgttttgacctctatgttggtgtatttgctaatggctgttgagtttccaccgtgggcaatcgaagaggttgacaagatc

SEQ ID NO: 37954 - DNA, 426 bp, Zea Mays
cgacagcaagagcaaggcgacgctggagcaccccatccgggggctcaaaaggtggaagggcgcaatgcataaggggaggacaaaggcatggccactgccccagggatcgatcccccttttataggcagacctcctcgcttgcaccccttagcgtcacgggcaaaatcccactgacatcctccagggttctccccccacgacatgggggctgggacccgcacgtcatacgagctgatccgaagcacgaagaaggcgaaccgtcgcacgcgaggcatgtaaccgtcccgcggttacaagcgctctcccatcttcgcagaaaccggtggtcgaaagggtggaccgccacgcgacaggcatccaactgcaccacaactgtgtgccccttgggctccgttccacatccggtggactagcgcaaaggaagcg

SEQ ID NO: 37955 - DNA, 909 bp, Zea Mays
taaaacaccactctcgaactgagacgtgaaattagagattttagataatagacataatgtaatcacaaggtaggatagagtgatgagaagagtaagggagatgacaaacaaaacacaacaaaggatagagttaaaaaaacttgcaggtaacaaagaagagggtacgaccaagggaagagtaggtacagtacaatgatcagattgagatggaaaagagaatattctaaagaccggtataagataaacatcaaggtaagatatagaggtgaaaaggataaaggtgataatgatgaaaagcataaccatggacagagttaaggcaagactgacgaagtgaagaaaacaagcaatggtaatataggtaagattccaacaaaatggttgaagtaaccgaaattattaccgagggaagttataaagaaatgatgagatcatcaacgatgtgcgaaatagaatggacgttcatggatcaccaagaaataagggtggtcaaaagcatgttaaccggaatgtcttaaacaagcattgagatataaaggtaagcatgtataaaaataatagtatgcaagattcaaacggtacgagcgtaccaagaccaagagaatggaaaaagccaacaggtgacggcttcacaacggaataggaaggggtctcaaaagacgggaaggtcatgaaaatataaactggaatgtttaaataggcaacagagtttttcagagttaagtatttgaattaagggatatggaagaatctaaaagatgtagcatgtcaataccaatgtaataaatattgtcaaaggttgggaatttaacgatagaaaaggaaagaatcccaaaagacaagaaagttatggtcaggggcacctacaaatatgtcacaagcacaagagtgaggtcagatctaatagat

SEQ ID NO: 37956 - DNA, 431 bp, Zea Mays
ggacgtcacagcttttggcgcggtggaagaggaacatcgactggggtcgggtcatcggggatagagctgctcaggttcaaatcagagatggagggagccacggaaggtctgtatcgggaggggtggtgtcaaaccgcgctgctggtaagcgtcaagggcctttggtaagttctccggtagtacctgatgtctccaaggctgtcgatttgcttcatcaagcttttgcagcggcaaatggtagcgggagtgcagctaatcatgtcccggacagtacgtgtgatcaatttgtatcgctactacaactccctgataggagcagtaatgcctctgccagtaccagatgggatgcagtgggctcgaatctagggccccaccgtagttcacgacttgagacgatcaatgagatttctaagccatcccatttagatgac

SEQ ID NO: 37957 - DNA, 377 bp, Zea Mays
agacggcttcggcgagtgtcgtgtttggaccaggatgttggcccttctgctcctgctgctaaaggagtaccagtggaactctttactggagctgaacccaatgggtgtgaccctgctgatgttgatcctaatgggtgtgaccctgctgatgctgatcccaatgggtgtgaccctgctagagctgatcccaatgggtgtgaccctgtgccgtttattgtccgtattgttgacgaggacgacgaagaagaagaggaagtcccattaattcggaagaacagtcggcgttacagagttagtggggggagtagcgatattccttctctagctctgtctgctcttgttggtctgcaaggattatccatagcaaattttgatca

SEQ ID NO: 37958 - DNA, 398 bp, Zea Mays
tggaaaagggagaggcagagagggaggcgatgtcgctgatgacaggtgtttcgagtttgaggtcaccatagtcggtagagaagccagagagcggagaggtagtcaggggagcttgaaggcgctgaggcggaggcggaactccgagaccggctcgctgctcgccgaagaggcagtcagtcaaaggctagaggcacgaaggcagagttatcgaggcagagggaagagcagaggtgtcgatttagggttagggcgacggggtcgagggtgtggaactagggtgggggaacatagccgcacaggctacgtcatataaacgcgaccacacatgggcagacggggggagcttggccattgctcggccacagcctaacaattatgccgggtcatgcctgcccgtg

SEQ ID NO: 37959 - DNA, 393 bp, Zea Mays
gatgaaacggataagcattcaatcttgattcctgatgaagtgtgcacagaatggcccaagccttgatggtagctttgttagactacattgcaatttttacttgaatgacatgtatgtttaaaggacaatggtgaagatcattctaaatgcatgcatatagaagctttctcttcatttggtcatatattcttcaaggcctgaaatattagagagttacatagctaaatgtactacatgccacgtgaaatggtacatttaactagagtgcaccccaataggctttacattgcacttgcgcaagttttctccttttcaccagcacctaatttaccacaggtggaacaaataggtaatcttcaagatgaaagacaagatcgctacacaatggacaat

SEQ ID NO: 37960 - DNA, 290 bp, Zea Mays
ccggcgatagccgtgccggtgcgcagatgccccaatccccgctcctaagggtgctacgtgaagcgcagaacatagggaatagggaggggtggttctcaccgacaacagaggtccggtcgatgctgtccacggaggatggcggcaacacgacggggatggttctccggcgagcgattcactggactctgaaggccaccgcggctaagcacatgcccgatcaccatccacgtgcaccggcgattctcccagaccccaccatggacaccgaatggaggcagagatgccggacc

SEQ ID NO: 37961 - DNA, 414 bp, Zea Mays
ctgaggagaagaagataactgaggagaagaagttgtatgaagagaagaaagttgcggatccttttattgctgggttttatgagtctatggcaaaaatgaatacagagaaaatcactaaggaaataatggagggcttgtctgaagattctgatgacagtgatgattatgatgtggaaagtggagatgaagattctgaggaccggccctggcggccaagccatactatcttcggaaaatcgacaattaaacaaagtcaaattgacaccatgagagaaagatactttcgcgatatatctattgtgagggttggaggagacaacactgtccctactcctgaggaaaatgaagttgttgtttaccgaagctttttgaaggcaggccttcggttcccgttgagcaaatttgtggttgaag

SEQ ID NO: 37962 - DNA, 377 bp, Zea Mays
agcgggtagcgcacctcgccgtctgcgatcgggcacagtgattcgagctcgccgtgaagattcgtgcacgacttagagtagatataaccggaggggtgaaaatatcatgcaagggatgagtccatgcgctggcttcgctgtatcaattgtcctacgacccgccatgctatcgacgctgaggatcaccatccatctctgcggtgccacataattgtgtgtttcaccacgtcgctgtaagtcgtggcatgtagccaattaacgcattgggccattactccatcgtatgccacggtgaacacgccctagtgaaagatcccaccgccgtcgtgaacaccttcgccccaaatttgcaaagcacacgatcggtttctttaaat

SEQ ID NO: 37963 - DNA, 490 bp, Zea Mays
cgaagaaaatgaaatttgggcactcggctcggaaacgatcgctcgaaacagggaatttggtgaaattaaagcttagactatcggattggcgtgaaatttggcgaatatgttactggagctgttgtgaaggtgcctaaaaaatttgggttcaatcggagcatttttggctggtttgggcatttcaccgaacacgtggtgtgcggagttttagggtttcggtgaaaagactatgtggggtgggaaaaccctcccgaaggagctagtaacctgcaaggatactcaagaagcacatagggacacttcctaccagaaggattcacaggaattcacaagaattggaaaatggcacttaaggggaggaagagtgttcactgcccagagaaatggagagagagagagggaagacagaggagggaggtgctcaccagagtagagtgaggagcacagccgaggggaacaacagacgccggaggatcgccggagaggggtg

SEQ ID NO: 37964 - DNA, 410 bp, Zea Mays
agggtaaaggcactaagaaacaaaagcacaacaaaggatgaggttacaaactcgcgagccaaataagaggatacgaccaagagaaagatggtatgagatggaagaggggcgattttaaagggcatgtatgagatgaacatcaatgcaatatatagaagtgtcaagggtaaaggtgataataacaaagagcatagtaaaggatggagctaaggcaagactcacgaaatggcgagatggagaaaacaatcacaggtaaggtaggtaaggttccaacagaatggtttggtaaaagaaattattaccgagggaagttataaggaattaatgagatcaccaaggatgtgcaaaataaaatgaccgctcatggatcattaagaaacaagggtgatcaagggcatgttaactgaaat

SEQ ID NO: 37965 - DNA, 435 bp, Zea Mays
gcggggcatagaggtcgccctaagataagcaatcgcaaacgtgcttgtgctgggttaagtagacgagagtgtaccgtgccgatttaagtcattaccgacttaaaccgactgctctgttagtagggtatagtggtcaccccaagttaagtaagcgtgaacatgttgcaccgccttaagtcattgctgacttaagccgattgctccgttagtagggtatagtggtcaccccgagttaagtaagcgtgagcatgtcgcaccgccttaagtcattgctgacttaagccgattgctccgttagtagggtatagtggtcaccccgagttaagtaagcgtgagcatgtcgcacggccttaagtcattgctgacttaagccgattgctccgttagtagggtatagtggtcaccccgagttaagtaagcgtgagcatgtcgcac

SEQ ID NO: 37966 - DNA, 407 bp, Zea Mays
tgtagggaagagagaggcaacgtcctttttcatggccgcgttcgtgatccgttcgtgatccgctagatggatctacagtgcttcgcaaccctctaaaacgcgtatctgcgacgctttacgcgagcagggcgagctgttggactcagccttatctagtcaacgcatccactcacttcctttcgtcctcctgctctctgtgtgtgccacgcaagcgccctatccaccattagagtcgctcgttctacaacgacgtgctagctagccgatggctacgaccacgaaaccactcagatcgtccgctgctctgccgcacgggtaagcccccccccgtctactggtaaatcgctctgttctcccaatcatctggtatccctagctagccattagttgtcacagttggttcccgc

SEQ ID NO: 37967 - DNA, 462 bp, Zea Mays
acgcagtgaaggtggatggcgggttgatttaaataaagaacaggggctcttttgcgaaacagacaggccgaatggggtgcgggtaaactccgaccgtctgatctgagatgagcgcttctgattagatccactcttatcccgaaccggtacgctatgccggccgttggatttgagatcaacggctccacgatcccacacgctcagctcccttccgattagatcggacggcccgaatccattcccacgattagacctgagccctataatcacaaccgtcccctcttcaatctatggtcagaagactgtcaccctcctccgacgttggttcacggcgcgcaggtcacctcacggcggtgggttcgccggagatagtgaacccgcccccccccccaagcgccataacccaattcgttcggtccacgcaaagttaatgactcactgaactctttactccaaccaatt

SEQ ID NO: 37968 - DNA, 504 bp, Zea Mays
tgggtcggaggcagtgctacccgctgatctcaagtttggggcgccaaggttgatcttcgaaagcatagcagaagctgaggccaccaggctggaggacattgatgtacttgaagaagaacgactaaacgcggtaatccaatcagcacggtaccagcagactctaaggcgctatcacgacaaggctgtgcgacaacgattcttctcagtaggagatctcgtcctccgccgaattctaacgggggagggatggcacaagttatcacccttatgggaaggacccttcatggtagcaaaagtcactcggcccggatcgtatcgtctcactcagatggatggcacagaagttgggaactcctggaacatagaacacctcagaaagttttatccctagctgtatttcaaaactgctgggacgacgatgtactctgtaaagtggaaatatatcatcaataagaaagaggtttcaaagatacttagttcatctacgattgacttgcattctta

SEQ ID NO: 37969 - DNA, 413 bp, Zea Mays
gagcactgaagaacattgccatggtacggtgcctgggaggataagcttcagaccctcgccgccgacgaccaatccgcgtcgtgatttgcgccagggtcgggatgggcgtgcggagtgcatctcctcgcaaacatctttttgatccgggtaagatcgccgcggtggagcgtgatgattccagccgccacgcgaccactaatcactctggccatatccggtcatcgacgccgctcctcttcgttcatccacgccctcactgatttgaccgtgttactgtcgcggcagaatgtggcaagctcgtaggaaaggatagcgctcgatgccgttgttgatcgccagctaaggccggcgatggttatcaccatggccatggcagtggctcactgcgcctataaattcaccgcatcctcacc

SEQ ID NO: 37970 - DNA, 432 bp, Zea Mays
acatacattcatggtcttcaaagttctctgaatgctttctctatgtaccctgtacctgtcatatccgttcgcagtttgtctagtgcagtagtgttctaatttctttgactacatctgaatattggtactagttgtggttgagtctgaactgtagtgtttattcactgagaagcaacatgaagaagccttgtaatctgaagatatctgatgttgatacgtacattcatggtcttcaaaatacctatgtctccttatctaaatgattctaggttatgttctgtttcttttctgcctgaagctatagatttagattagttttgtatgtcaagaagcaaaatgaggtcatatgatctgaattgtccgatattcatgcatcatccatgatctaatccactacaagtgtagtatacatgtatcatgcctacagacctt

SEQ ID NO: 37971 - DNA, 421 bp, Zea Mays
ttgtgacacattatataactatgatggttaaaccatggtggtgtacctggaagcagcagttttggatggtcaaattactaattttctggatgataacactgaccggtctttctcactagcctaggggttcgggtgtaaatcttaccagttttcatcataggtgcatgttttcatattctttgcggactatgggatctaggataacatcgttgtgtttattcttatattgtgcatattggttcagtttgggctcttgcaaccggtcatgtatacaaaggtgtaagggaccaatctgtgagtttaattttttgttgcattattgaatagtcattttacatctttctaaacttactatgtattccctgtattgcaagtatacataacagacttatccacaagagagtgtgctttacttttcaca

SEQ ID NO: 37972 - DNA, 443 bp, Zea Mays
tgaacatccttgaagccaagcaccggtggaagagcgccgctcccacaaggccgcgcacctccagcagaggaaagacaagaccgtcaaaaccaacccgctggggaggacaaagagcacgaactctctggcggcaagttcaccggggaggatggtgccgacgcaaatccttccgccgaacgccggcgcatcccatccaagtaggcggcacaccatgtcgagcacccactcagtctgggcttgcttgagatgaacttacaaggccatggtaaactatggcgacacaaagcagaaatcttggaggcaaaggggcgcagagagctcgaaggcgaaagggcaccgcgagtgggagagaagcaaggcatggctgctactcgacggatgaacccctttttggcaaagaagatttccccactcgcgccccgaagcgtcacgggcaaagtctc

SEQ ID NO: 37973 - DNA, 380 bp, Zea Mays
cagtggcactaagatgaacattgagctctatgggagtctcaaaggtacgatgatcagtaacagaagcacgatcaagaaaaccttgaatgtatttttcttgagatagatagaagccctcaaacgtggagacctcaatcccaagaaaataacaaagaggaccaagactatagaggcatagataagaaattgttcactcagacgtgccttcacaaaggttgatgatcatcactgatgataatcatatcatcaacataagaagagggagccaatgagatgatgtgtgaacaaaaaagagcaggatcatgaacatcagtagaaaaaccaccaacggtgatcacagaagaaaaacgctgaaaccaagagtggcaaagacgtcaaac

SEQ ID NO: 37974 - DNA, 274 bp, Zea Mays
agatgctcctggtgacttcatcaatctctcgacgaagctccaccagctcggcctcctgccctgcttagaagcaaaaaggggatggaggcctgagcaccccctagaaaatggagaaggatgaagagaagagcgagaagcttactagacacgcgcacctccaagacggcaagccacgcttaaagaccctcgatgcgcacatcagatgtcctcacggctgagcgagatgcctccagtagccccacacctcgaccatcaccaacaatggaagggccaa

SEQ ID NO: 37975 - DNA, 435 bp, Zea Mays
gtcgattagagccgagaatcgcttactggcgcggtttgggggagggctcgccggcgtattccgccgtggggtgtactggcgcaccgtgctacaccgttggggaagaggaagtgccctgaccgtagatctagtaaggtgcggtcgggatcaggttatctctttccccttcgcgcgaccaattctaaaccattgatcctcagatgtatggttggggttcgatctggcgtagatgttcatgcgatgtagtgtggtccgttggatcggttgcagagggataggattagatcgcggtttcattaaatcatggccgtcaatctgtgatcccacggtcactgtcccgtaccccttcggctggacgatttagctattaggcccctctgttttatagtaatcaacccgcggtccatagagttgttttctgtgtctcgggaaaac

SEQ ID NO: 37976 - DNA, 505 bp, Zea Mays
gaaccactcaaatggatcatgcgttcggccttggactgattcgtcataaatgaccggttgcattaaccacgcctcacaccgagccacagcgtgggcgccggtccgtttcctacccatcacctatggacccctcgggcaacattgcgctcatgacctacgagcccccggactgcgacgcattaatggcatgtcgtccctcggcctgcggcacacttatgtcctattgaactaggcctgtgtgtgcagacctctcgtatggcactaaacaacgggctacggcgagcccaagcgaagcctggggttggcgtagccggaatgatggcacctgggaccatcatcgcccccacgtcatccaccacgataaatacacgacagctaggcaaccccgggtccacaagtacgcatggcctcactcttagtaaaacattggttttaccctttccttatgggcatggcctcactcttagtaaaacattggttttaccctttcgttatggctccttcc

SEQ ID NO: 37977 - DNA, 437 bp, Zea Mays
cgagcaagtctatgaggcaacgaccaagctcccgccgagcaagtctacaaggcgaggcaaatggtcgagtcctcgctaagcaaatctgtgaggtggggagaacgaccaagtccccgccaagcaagtctgcgaggcagggcgaacgaccaagtcctcgcgcgagcaagtctgcgacgtggggcgaacgaccaagtagatctcctgtttaaagcccaacccttgagctataaaagggcatgccctctttcctgtagggacacaagaacacttgctgtaacacattccaaagcaatataacgatcaacactgcactggactaggacctcggactaaagcagtataacccatgtgtcatatttcctcgctcggatctatgagatccaccattcggagtgagtccgcagttacatcccccaccgaacacaaatttattgtcc

SEQ ID NO: 37978 - DNA, 355 bp, Zea Mays
actccatacctgcatcagttttatttgattctggagcatctcattccttcgtaacaaagtcattcgtagaaaaacataatataccaaactatcccttgaagaagaaactattaattcgatcaacacgaggtgaatttagagccactcactcatatccttagactaagattgaaattagaggcctaagctttctagtagagctgataattttggaatcaagtggaatcgatgtgatacttggaatatactacttgaccaagtatgatggagtgatatcttgtgccaagaggatggttacattaaccagtccacaaggagaaagaattgaagtcaatgttagtatgccagcaacagc

SEQ ID NO: 37979 - DNA, 454 bp, Zea Mays
attgtcgtcagtcaaggtagcaattgaatttttcctgtgcttaatggtggcatgggcgtggaagaagcgagagcaaatgtctccatcagtaacccacttaatagccgcacactgcttccaatagattttctaaatgttaagcaattcggccaccttttgttgcagaatttctctgaaattccattcctcaatagatagatcccgatgctcttccatgttgtcaataagctcaattagcagcttgatgtttttcaccgttttatcaatttttggcagcgatctctgccaatcttttcagaacttttcggacatacttgaacttggcagtcaggtttttagctttgtcggggatgctagggagcccattccatgtagtttgaaaaagattcatgaaaccatccaattcaagccagaagttctcaaaccgaaataacttaggtttagggattctaga

SEQ ID NO: 37980 - DNA, 402 bp, Zea Mays
tcagggtcaatcaggccaacaacaaacaagctcccagcagtagccttctcacagtatgtttcgtccatcggctccaagagggggagagggaggctaaagctttggcgacaggttcaatgcacctccaaggaagtcgttctgcttattttgtggtgaagataagggccacataacaagaacttgccaccacgccattaacaagcagaaagagattgcttcgccagcatctcaaccctcttagtcgaaggaggtgttcagtacatcttcatacttctcaccatacattccacggtacgtccatcctcaatcacaagagcctaggctgcttcaacctttagccttaaacgcttcgagtaaccctgtgatgatcgtgtggtagccgtctactatcttcatcccaag

SEQ ID NO: 37981 - DNA, 285 bp, Zea Mays
ctttgtaccatccttcttctccacaaataacactagggctacccaaggtgaggtacttggtttgatgtaacccttctccaataactcatcaatctgcttcttgagttccatcaattctggttcggacactcgataggctctcttggaaattggggtggtgcctgggataagctctatggcaaattcaactttcttttcaggtggcatgcctggtaactcctcagggaacacatcaggaaactctgacacaattctaatatcctcaatcaggttggcctccttgtc

SEQ ID NO: 37982 - DNA, 569 bp, Zea Mays
cacatatcaagaggtgactacatcatcactctactgcttctcggcatagccctcatagtggagctagtgcatacggcattttatctggcatcggactgggcccaggtagcactagccaccatgtatgtcaagaaacaatggtacgaaatcagtacatccatctttggagcagtcaccactttccttagcagtcaccactacatccatcgttttcgccgttgtcggacgtctcgttcatctttccggtctttgtcctattcttcctccctaacctgcagcccccgaccacgatcgcagccatgagccgacggacgtacgaccgcctactaaatctcttggaggtgcttttcgagcacaaagcaattaataaactaccgtacgtccggccggttaacgagaagcagggaacgcccatgcatcgtgatatatagagactgatgatcataagccactcgatctgtagccatagccgcggaggtacgcaaggtatcttgcagaactgaatgaaggaagaagatgcttacttatgccgccggtttgccatcaattgcttatacgatcaccttcac

SEQ ID NO: 37983 - DNA, 356 bp, Zea Mays
ctaggatcctataataccgggattcattcacatacctcggattataaacttacgaccgagatcttgttgaatgaagaggtacgcagaatctaatccactctttccgccgagagatctacggtccacgccccaactcttcggatcaaatctcaaccattgccatcaagaccaacggtcgagtgcctgtcttctacctaccgacggctaaacacagcggcgtggccccgcccggtggtgcccctcgctggtgagccataccaggcgccccgatgctccaaagtccaacccgtacgaacaacacatgaatatgaatagcgcgaatgcaagagaggcttcattacctcgattaacacgac

SEQ ID NO: 37984 - DNA, 381 bp, Zea Mays
cgcaaactgagacgtcgttgggacatgaagaacacgaacataccaatggcaacgcgctcacggatgaagtggagatcaatcttgatatgcttcgtgtgctgatgctgaaccgggttagtggacaagtagacaacactgacattgtcacaataaactaaggagctcttggtcaagggactatgaagctcctgtagtaactgacgcagccaggaatcttcggcgacaccgttagcaactgtcctgtatttgacctctgcactggagcgagacaccgtaggctgctgcttggaggaccaggagatgaggttgtctccaaggaaaacagtgtaccctgaagtagacctgcgaggatccaggcatccggcccaatcaacatctgtg

SEQ ID NO: 37985 - DNA, 301 bp, Zea Mays
gtggggaggtggtagaggttggaagggtcggtcgttcccaacggagtgcttgaagtccctgcagttccggagggtgtggcgcatgtccttgtggtatgggcattgggcgtcgaggatgtcgtccaatgtacgttcgcctctgcgggatgctcctcgggcgcgagaggtgggtggtccggcggcgtggacttcttcacgagaccttttctcccaacgtttgtcgggttgttggttcgtgtcgtgtcgcggtgccgctggtgcaggctgtgctcctccgatgaggtcctgagctcgttcgtcg

SEQ ID NO: 37986 - DNA, 679 bp, Zea Mays
gaaagtatctgggattccacctgataggttatttattgctagatttaccatttgtatgttcggtatttgccaaacttcattaggaatgcttccatttagttgattgtttgaaagatcaactaacaatagtgtggagaggtttcttaaggttggagggatgaccccactgagataattaccataaaggttgataccttctagctttttaagaaaggctatgttcggaggaatatgacccgtgagatggtttttagagagatctaggtagactaagttggaacagtttgtaagccaatctagaataacatcctccaaatggttgcttcccagaaagagtaagtccaggtttcggagcttgttaagaagaggtagggggccaatgaagctattgttgctaagatcaagggtatgaaggaaggtcaggtttccaacagaggagctgatttggccagccaagttttggccggtgaggttgagctccgtgactcgatatggtcgcgtggaactgcagttcacaccatgccaatggcagaagtggatgctggggttccaattgctcaaggctccgtgcggatcactggtgatgcccttcttgaactctagcagagaatgaaaatcttggctgttgttatggtgcgtcgagcaatggactttgtccactgcatgacatagcagcagc

SEQ ID NO: 37987 - DNA, 572 bp, Zea Mays
gtgggttggtctgattgaagtataccttcagattcagagaccggtttgatgagccaaatgatgattggctaaaaagtattgaggctatcagcgccgagctacttggagcatatagcagagtcgaagatgatgccttgtccgcagctttcggggggccgggggaagaaaagattaaacaaagtatttgatgccatcggcttcgtataccctgattatcactacccactgcgaaggcaagagaagaaaagaaaagttatcgctttagccgccactgctgtgccgaagggcaagaagatgaaagtcctgacccaccggccgcgatacattgaaccgaccgtggtgcctgaatttggcgaaggaacctcttcaactgccgaagtaaaacaagctgctccgactgcgcagagcgccgaagagccaattgtagtgccgaaggtgcctacagtcgggcctaccgaagcaaaagatggtgcggacgaagagccgatagtggaaaaggtattgaaactgccagaaattctgagcccatcagcaggggcagaattgccaaaggtacagaaaattgctgccgc

SEQ ID NO: 37988 - DNA, 277 bp, Zea Mays
aaaaaactatcagatttcaaattcacccgatgtgtggtgtggtatgcagcaatcctactatacattgaccaaaaacaagctcaaaaccaaggtacactgaagaatagccttcagtttgcccttatcgaagatatcctgggctcaaggcagaattaccagaaccataaattcatgaactcagaaaaaacatgactctggaatctcaatatctgttaggtcattagtgtactgtaagaagagaatttattttgacatgttgcataattcaagaaaacaa

SEQ ID NO: 37989 - DNA, 382 bp, Zea Mays
caccacctagatacgaccttggatccaggcttgagtcctatagggctgcactggtacctgctattacccctgtatggccacgctgtaatacgttatggcacactgccattattattatttttgggttgccaatgcggggcctttatttttcgttcactagggttcggagtttgaactgtgtctgatagtgacagctccctaacttggcgtctgaggagctaactgttacggtatgaaaacattgggcatgacctaagttttataaagtaggaagtgagtctagctcaactggttgtgtgggagatgtggtaatgcacccaacaacataggttgatatttctttctcagcttaaatttatgtgcatatttccttagttaaatc

SEQ ID NO: 37990 - DNA, 438 bp, Zea Mays
ggagctctgacaatggcgtccgctgcaagggaaactacgcgctatggccggaatttggccaggggtggaagacgcatggttgccattgaaaaccgaatgggtggttgggattaaaagataggataccccttcgccccataaaatctggaccgtgcgatggaatctgggcaggtcagagtaggtgtgtggcgtggcgaatcctcgatcttcggtcgcaaatccaacgggcacaattgcgtactggttcggagttatgcggatcaaattatggccatccaaatctaatccaatggctcatgatggaccataccctttcggtcgaacacttttgcgtatgagtccctggtgtatcgtggaattaactcgtcgtccacagctagtgtaaaatatttacaactacagatttttatgtagtgaacccaagacttcctggtattt

SEQ ID NO: 37991 - DNA, 493 bp, Zea Mays
tcacaccgaggactgggaagacttcggctgaggttgtggagatagtcccctgcgctaggaacaaatggggtaactagtgggatttttggttctatgtggctcccggtgacgtcgaaggcctgccgagcttgcctccggccattctgtgctcacactgctatgtggcgtttcctcgattcgaggtggcagaggaagacgaagacgaaggggcccttcgacatgctgcccacctaagtagcgggcgtgacttggttgaggaatttattgcctatggagtgtggcccttggcgcacggctgggtattgggccaagtgacccccgttggatgccaaccctgggcgaccagctggtgcgaagtccagctttcgtggtggatttatgcggtcgcaacgcggccacgtttgtgtgtgaaatggaggccgaggccgcgaagattgttgggaaatatgtgccgaagacgaaaactctgaggagttgggatatctgcggttca

SEQ ID NO: 37992 - DNA, 550 bp, Zea Mays
caagagtgttactgtccccatgcatatgagcgacaatcacatccaacaaatcacctcctatgttggctgccgactgggagatttcccacaaacaacctaccttggcctctttctctcccctaccaaacttcgcatccaacttttctcccccaccatcgcaaaaatagatcaataccttgcagggtggcaatcgtcccttcaaaacccaatgggccacctaatactcatcaactcagtccttgacagtcacctaaactacatcatgagcgttgtccaactccccaaaggtgcaggccataaactcaatcaacgtcgtcgcggcttcctctggttcagcaaagatgttgcccctggagctcgatgtctcgtcccctgggacacggtgcttggaagcaagtctgttggtggcttgagcatccaagatctcatgttgttcaacacttgcctccaactcaaactcatccaccgcctctacacttcatattgttcttcctatggtgtccgggtccgctgccacgcctgtctggcgagccttactagtgacctcccc

SEQ ID NO: 37993 - DNA, 371 bp, Zea Mays
gccggtgtcaccgtggaaactttggtgacctcggttatgccacgtcgtggctcgttactatgcggtagtaaccgtggcacatttaggattaaaatctttgagccgttgcaccggtgaacgccacgactaagccaccagtgttctcacctctctccgaccgccagcgtgccatctcaaattaacgggccaccgcctcgggtcctataaattgagcgtgccatcggctccgctaggtagtcacgcacccaatacaccaacccgtgcctcagatcgtccaccagagctccccaatttgagatttcccccaaatcggtcaagaacaccgcgcgtgtgagctcgtcgtggccagctctcaacaggtccgatcatgc

SEQ ID NO: 37994 - DNA, 575 bp, Zea Mays
gagaaatttgcgagctctaggggacgattcgaggtacgagttgcttcactggttgcgtaattacctaacggagcggacggtggcggcaatttatagcctctaacggcggtggcgcccaattttaccaggatgtgctggcggccggagagaaaaaggcactggtacgtggaacagatggctttcaccgtggcggctcctccggcgatcaccggacatgcataacacggttagccgcgacgtggtaaagcatttggacacgcggcggacggcagggatgactcaacggcagtgagatcttatctgatcgacgatgagcaaaggggaaaagtgcggcggctagccggattggtgtccagctcaacggcggcgatgatttttctaccccgcgacgttatccatttaccctaggcacgaatcgagacgccagcggcacgaatcgcggcggagagatcatcggcggcgaggttctgaaccttatcctccaggggcactgtaccatggcgaggatcattcagtgcacctgacagccaaagtttagggcgaattttctctcaattttatgtagtaacatgatc

SEQ ID NO: 37995 - DNA, 431 bp, Zea Mays
cgaagttcctctatgagctgatgaggcgcaccttcctaccacatatgggctacagagaggccaccactcacattcagctctggctcttaggtgcttttgtgtctcactcagtgttcgatgtggttgactttctgatctgtgagatagaggatacagttttggatggtctccgtgctcgttgtcagctaccctacactcactatctctaccatatcttcgcgcagctgatctgacctcctcacttccaggctacactcgactctaccagacttgtgttggtttccaccgcctggaacctaaggatgcagctcaccccagtgctctagtctccagttctacacctatggatcctttgggccccgagtgttaggttgacaatgagtcgatccgtcagcttgaggatcagggtatggttgatgacacttctttag

SEQ ID NO: 37996 - DNA, 302 bp, Zea Mays
acggtagaggccacgaatccactgtgccagtgctcttcctttcctccgaccgccgcgcgtcgtcatccaaattcccggccgccgctcttgcttcctataaattgagccctccgtcagctccgcaacatcaccacgcacttagccacccagcattgcccccaaccgatcaccaacgtgctcaaattttgggtttccccaattcggtttccgccaccacgaagaacacctcgccgcggccagcgcaaatcaggtctgatcctgtcgtccttagttttgttctagcatcctcatgtgtctgtgat

SEQ ID NO: 37997 - DNA, 415 bp, Zea Mays
gtgcaagataaccgagacgtattcgcatggtagcctgcggatatgccgggagtcccaagagtactggccgagcacaaattgaaggtctatccccaagcaaggccgattcgacaaaaactgtgtcgtttcacgcctgacaaaagagaagctattcgcaccaagttagctcgtttagtggcagcagggttcattagagaagtactgcatcctgagtggctagcaaatcatgttcttgtactaaaaaagaataaagtggattggcgcatgtgcgtcgactatacatatctcaacaaacactgtctgaaggatcccttcggactccctagaatagatcaggtggttgattcgaccgctggatgttctatgttgtccttcctagactgctattcgggataccatcaaatcagcttagcaa

SEQ ID NO: 37998 - DNA, 338 bp, Zea Mays
gccatacccaacaagctgacctacataatatgttacataacctatccaaaccatttagatgcataaaaaacagccaaaccagattctagctaatctcatttaactcatagccatctactaatctaatctaatgtggtctacttaaatagattagtgatactagtagaagagattagaccctactagccagatacattagactaactcaaccgtgagcagaagagctaacccaaccaattgagtcattatggattgcataatctgtctatcctcacttaacatcaaacaaacttttgacctacaccatgaagtctatctcatccatatctatcttaacc

SEQ ID NO: 37999 - DNA, 350 bp, Zea Mays
ccacactcaaggcaaactacaaatctcttaatcttcaggaatgcaacaaacctcttacaggccaccagctctaagaggcagaggaggaagaagcttcggaggaagtttcagcacccaacccaggagattgttctgctaattctgtggggaggataagggacatacaacaaggacatgccaagtcacgatccaaaaacaaaaggagatagctgaagccgaagcaccacagaatcaggcgaaacaggtcttgcacactacttcatgtatcagttgcttcgacaagtcattctcaagctgcatgggctcagttaccaccaccaccaccaccattggcaccaaccttggttcac

SEQ ID NO: 38000 - DNA, 354 bp, Zea Mays
gagagagagagagagaatccaggcaggacaggagacgggctcacgggcaggcgagatcactgaaatgacagaagaggtgagcacatattagtcacatagtcataagtatatgaaatgtgaataaatacatacacagagaactatgacatagaaaacgagtgatttggcgatagagaggtcaaacgacgcgaaaacggcgtttgagcgaggaatagtgccataggaggtttgaaatttgaattgaggcatgagatgacttgggattgagtccatacttcacgagtaggtttatatgggtaaatatgagtgaagtgtgtgcttggtttgattttaggcgaagaaggtggaattgtg

SEQ ID NO: 38001 - DNA, 283 bp, Zea Mays
ctccggacgagcgagtacaccgagaaaggcaaaattctcgtcgccgtgattgtcgacaggctcaggaccgagagagggagcaatccgagcaaggcacaaggttgcaccgagagaaccctctcttcgctcggaacatgtacaccgacttcgctcgtgcaatgaacacactgagtgaagttggaggggtgctggcctagataggtgatgacctcccgcgaactccggacgtggaaggctactggcggctgcttacacgagcagcaaatcaccttctgcccatcgc

SEQ ID NO: 38002 - DNA, 577 bp, Zea Mays
tgactttgtggtcgtcaaagtagtgacggagcttgcgagcggttagaagtaccgcgtatagcagtttttgaacttgaggatacttcatttttgagggaccgagaacttcgctgatgaagtagaccggatgttgcatcggatatgtctgtccttcttctgccctctcgactactaacgtggtgctcaccatgtgagtcgtgcaggagatgtataacaacatgtcttctgttggctgattcagcatggtggcttgagtacttgtggtgtagtcaggaactttttcagtgcctctagagcttcctgtgcctcagtggtccactgaaacttgtccacctttttgagcagtttgtagaatggcatgcctttctcgcctagccttgatatgaacctgctcagggctaccatgcatccagtaagcctctgtaccttttttctgatcgtggcgctcccattctcattatggcctcgattttttctaggttgtcttcaattcctcggtggctgacaatgaatctgagtaacttccctgcttgtaatccgaagacacatttctctggattgagcttccaccggtatc

SEQ ID NO: 38003 - DNA, 274 bp, Zea Mays
atgtgggggatcaactgtaggcctccccatttgtagtcgtaggtgggcagaggttgctgaggtcgatgcaggaatggaaggggatggaggagcgctgatggaggagatttggcgtggggaggagctgagcgtgccatggaaggttttgcctgcgcgcgcaatcgacggcgtggggaggatggcgcggatatcgcgtaggggtcggcgcggatccgcgagcaccttctgctatcggagacggggacagtggggaggagggcccacgccgtcgatg

SEQ ID NO: 38004 - DNA, 567 bp, Zea Mays
cgcgagaggacccgtctgagcagaatcttgagaatttgctcagaattatctatgggtacaactctttccgcgaggggcagcttgaggcaattcagaaggttgttgcaggagagtcaactatgcttgtgctccctactggtgcgggcaagtcactatgctatcaggtgtggacgtgtggtgagaactttgagatcttcattttggtaatggcagttctgaaaatgacggtgatgctatattttaggtacctgctatgattttgcctggactaacactggtggtaagcccgctactctccttaatggtggatcaactgatgaagctacctgcatttttgccaggtggctttcttgcaagcaatcaggtaaatattatgcatacatattcttttatgggaaccctagccatccttattctgatcgttattttacactgtcaaattctctcagacaagcgatgagtttcatgagacattacaaaggttgcgtggaggggaaataaaggtaaattggtctgactcctacttttatgactactaatgtagcaccctctgccaattttagttac

SEQ ID NO: 38005 - DNA, 414 bp, Zea Mays
taggctttcatccgagccatcctcctgaaagctccagccaccttagaacaacttttctgagaggcagacatttacatcaccgctgaggagcgagtccatgacctcatcggtcacatgaagcctgaaccccaggcgccgaaggaggggaaccagcagtcagacaagcattgggacaagagaccgagagatgaagtgcatgctactaggcccccgatgactcagtcccgcgacatgccacgaggcaacatacagacgctggacaagatcctcgatgcctagtgcccgtaccacaaggagatatgccacacccagcgtaatagcaaggacatcaagaaatcagtcgacaacaaccaaccattccaaccaccaccgccgcccccaccacgaagagaataaaccgtacaagaacaatcg

SEQ ID NO: 38006 - DNA, 486 bp, Zea Mays
cgccgagctcgccgctgttgctcggctcggtcccggggaagtaggacaggtctcggccgttggatagcctgggtgcggccgtgatctgtgctgtaaataaccctacgaccgagggaaccctagccgtagatcactgatcggtcggatgcgatcgaatcctgtcgcattaaaatctgggtcgtagatctttcatccgagggcgcgcgctgcgtaccgcttcattttaacctagaactaatctggcgcgtccctcgctgatcggacggccagattctcgtgataccgcttcggccgcgtatcttacaaatgagtccctggacttcttagtaataaacccgcggtccactgtggctgtgcgctgagtctagtaattcttgcgtagagacccctatatttatctgtttttgtgcgcgcagtccaaacagagattaaatcaggaaattaatttaagaaatgaatttttaatatgaaaacaattccagaact

SEQ ID NO: 38007 - DNA, 295 bp, Zea Mays
ctgcatttgcccagtgaagttgaatccactgaagcagatatttattaagtgaacaacttgtatttgtggcgtttatgtccaatgttaccatatcatagcattgtagtcttgaccaataaatgtcattggactgacaacccgattagttcacgaatacacgtattttcatgaattgttcagtacaattcatgacatgttcatttacctttgactatgattagctgcctcatcatgtgtgtgcctgaacatgtgtttgacccacaaacatatgtaatgttgaagacttcatcttgtg

SEQ ID NO: 38008 - DNA, 277 bp, Zea Mays
tgcagaccaacaggccgggcttatgagggcggacctcactgggttggtgtacacgtatgcgttacctagttacaaaagggagaaaaattcgacccatcagacttgctcctatggatagaacttacagagatgctccagtggttaggaagaggtactccttcagtcgtagcaagatagtcagccccgggtcggcgtattcccatcaccttgaagggtccctcctagctggaggagagttccggagcccttcttggtttggtacttgccataggactag

SEQ ID NO: 38009 - DNA, 361 bp, Zea Mays
tggaattgagtgcgacaaaagaaggcatggggagttagggtttgacgctgcgttttatagtcaccaggaaggttggttgagttgccagctgcggtccatcgagcggcgaacttggcgaaagtttgttacaggggaggaggaagatctacatcgctcgcctaacatgtgggtttcgtgtgacagcgttcgacgacatgaacacgcccatcgcagctagtgagactgacaagcaggcccatgcgtaagtgcaagggtggcatggcacttgcgcggtgtgtggctgcgcaggtggtcccacttgtcgtcgtgcaacgcagtgaaggcgcatggctgaccagcggacccagtggtcggcgtagac

SEQ ID NO: 38010 - DNA, 736 bp, Zea Mays
gctgctgcaggacggcgcagtggatcaccaccgattcagactgtgagttgtgtcgtctgcattgtttattttgtctgtatatatagctgaacatgtaaactaatgattctcggttggctcgcagttgtggtgttggaactgtaaactaatggtcatcaagacatcaattacactagtgtatctatggtaaggtctgtgtctgtatcagatcagataccccgacggacttcgctgcattacacttacagttgccccggcattgcttcctatgtactcgtatatgtattatatgtgtcttgaatacaatcctaaggataggaaaggtattcatataaattctagtacatcaaatgtgacaccagggtacctaaggttccggtgattgattgatcaggagagcagtgccgtagagtttgtctaccaaggcatgacacactaactcaatagataactctagagaggttcggactgcgtaaaagcagtgtacgggtttacaagcctaggagagaagagatcctcctaaccaccttctctacagccttggatgattttcttgtattgtggttggttgtgtggatctatcttgagtgctgctctaccgtctccttttttttagttcaaggaggtgatagtgttacatgtataccatttttgcgggcttggcttgttatatcacatccgtcgatctatgtggtgtatcttgctgaggcgtgcttccaagtaatcataccatttt

SEQ ID NO: 38011 - DNA, 311 bp, Zea Mays
ttatcctttatcgtttttaaatctgggccatagatcagggattgagcggtcaggagggaatcgatgtcacaggcgcctctcggtcgtcgatcatggatcctacggcggtgagtgaaagctaggtttatccagggccgatttaatctcgcgcgtccgcgcctaatcggacggccagaacggcccgataccccttcgcgggtctaaattgcatttaggcccctcggtttaggtaaaaataacccgccgtcctcttgcactgttcgcagagtctctggtttcttgcgccagagcccctgcgcttcttaggaaat

SEQ ID NO: 38012 - DNA, 320 bp, Zea Mays
cacagggtgagcaaatggcacatcattggggtttggacactgaggataataccagttctgcggtatctggccataaaaggtggtaggaaaaacatcagtcatccctagtcttaaaggggggaaatgatcaccacaagaaagaaattgtggtccgccaaggaagtaagaatcaaagccactttcacggggtccttggccatatggcacatgaccaacaccccaccgggcatgaccaccatgtggtatctctgcctgaggcctagcaacaagaggcaaagcacctctaggcatcgaaggacatcttcgaacaggaagatcat

SEQ ID NO: 38013 - DNA, 320 bp, Zea Mays
cttcacagagcaagccagattgccagaatatcagaggtctgctgcaaatgttccttttgcttgaccaccagaatatcaaagctttgtagatggtgagatggaaaactttgtagatgatcaccaagagggggaggggaacatgggctgcctggtgggctgggccagcccacttcttactctgttccttttctttttctcttcatcatctgctgctctaagctgctgttttaaattttccttaaattcttaaggtgtcacctcacctcacactttagtcgcttaagtgtaaggtatagtcagtcaccacatcaccataccgc

SEQ ID NO: 38014 - DNA, 351 bp, Zea Mays
gtccaagcaccaagcccaaatgtcaaaggacctagtgcgctccctgcgcctcgagcgctcctcgacatagtgaatagaacagctcctgcccaaagccctaacagccacatcctcaccccagcagtgaaccggaatcccctccaccctaaccttcactatgaactcaaagctagtcttcctggtgtaacagtcctctgaccagtccccaaagtgaaaaacccgaccacgataggagaccgacctcctatccagtgcccattgctcggttcttgaatcagagaaaatgatgaagaactactctagaaagtgtttgactagttggtactgaccgtgatgaagatcaaatgtctc

SEQ ID NO: 38015 - DNA, 496 bp, Zea Mays
ggatgaggtggctgggcttcaggtcacagcccacgtcgtcgtgtctggccttctaacccatgtttcagtagcaaattcgctcatcaccatgtttgggaacctcaggagggtgcaggatgcagagaggctctttgatcggatggaggagcgcgaccgtatctcgtggaacgccatgatatccatgtactcgcatgaagaagtctacagcaaatgctttatagtactttcagatatgcgtcatggtgaggtgaagcctgatgtgacgactctgtgcagcttggtatctgtctgtgcctcatcggatcttgttgccctgggaagtgggattcactccctgtgtgtcagcagtgggctgcattgttctgttccacttattaatgcgctagttaatatgtattctacagctgggaaattggatgaggcagagtctctattccgaaatatgagcagacgggatgtaatatcatggaacactatgatttcgtcatatgtgcag

SEQ ID NO: 38016 - DNA, 786 bp, Zea Mays
gaaagcttggtgcccaatgcactgtgaagactctcccagaatttggatacaaatttggagtctcgatcagaaacaatggacttaggtaccccgtggagcctgattacttccttcatatacaaggggaccaattttgaagctgaattggtggtcttcatggtaataaagtgcgcagacttagtcaagcgatccactaccacccaaatagcatccctgccccgaggagaacgaggtaagcccaccacaaaatccatggtgatatgctcccacttccactccagaatttccaatggcttcagcaaacctgcaggcctcttatgctcggccttcacgcactgacatacttcacaggcggccacgtacttagaaacgtcaaccttcatccgcttccaccagaagttttgcttcagatctcgatacattttggtttcgccagggtgaaccgtgtaaggcgttttatgagcttctctcaagatatccatcttcacctctgatttctgaggcacacaaaggcgacccctgaaacgaaccaaatcaatctcatcaatggagaactcccagggtctaccatcgccaaccctttttcgagcttcctgcaataaatgatcctgctgttgagccgcacgcactctctccatgagggaagattgaataagcatacgagtctcctcactagcagtgccgacatagcacaaagcaatccccaaatggtccagatcagcaatcaactgtaaggccacttttggaaccccggacctgctaagggcatcagccaccacatttgcc

SEQ ID NO: 38017 - DNA, 356 bp, Zea Mays
cgaccggtaaatggttctgtacgctaaatttagcggacaactacctcctctatgggtccagcaatgcacgctaaaacgttcggtaaatttagagcacgtccccgtacacgctaaagctagcagatctcgggcatccgctaaacgacctttttctactccgcgcgctggggctgaagcttcctgctggtgcttgcaaagctctcatccatggtgccggggctgaagctctcgagcaagcaggagggaccgtggaagctggccaaggtcgcagggacgggaaacgacagcgaaaagtggatgcagaggattggggatgtggcggcacggagggcctcggccacgccatggatctcatc

SEQ ID NO: 38018 - DNA, 667 bp, Zea Mays
cctttaccaggaagaccagtagccaacccgggttgcgatgttgtattagtagatagaaacgtatatgtggtgggcttaagcccattaaaatggtaacacacacatgtctaaaacccctaggtattacagatgttgagactagaacgaaactctaagaacaccgtgcatggaagtccgttgctgaagatgtcggcgaattgcaaagtggtcggtggtatgcggaaaacgcgaacatcgccgacggtgcacgctcacggacgaagtgaaggttgatctctacgtgcttcgtgtgttgatgctgtacagagttggtggacagatagaccgcgctgacatcgtctaatagacgtgtgtggcgcaagcgagggggctatcgagctcctggagcaactaacggagccaggatgcctcggccatgccgttcgccacaacgtgatactcagcctcatcgttggagcgggagacaacaacgctagaccggcacatgtcggggcaaccggcacaatcagcgtcggtgtaaacgaccaactctaaagttagatatacgaagaaggttgtagtcgagtgcacaccggaggtagcaaagaatccatttgccagcggtgaggtggggctcccgcagggtgtgcatgtgaaggcacacatgctggacgcataggcgatgtcg

SEQ ID NO: 38019 - DNA, 329 bp, Zea Mays
taggcaatagtgtgatgaaggccgtgtttaacaaccgaaatttgaagacatgccccctgtgaattgcatttaaagccgagagaacatcttcttttataatatcccaacaagatctataaaacctcccagtaaagccatctggcccgggtgccttgtcaagaggcatgtccttgatagttgcccaagcttcttctagagagaaaggttcttcaagatgacatagatccagatgtgaagaatggaaggctgataggtcaaaagtataatctcttacatcagcagtacccaggacacaatcaaaatattcagatactgcctccatctttttt

SEQ ID NO: 38020 - DNA, 830 bp, Zea Mays
tcactgtcttgatctcatataagttgtttatgtgaccgcctaagtaacaaggtacatgttcagttacaatatacgttaattcatttgttagatttttatgctaagttattttattaccctttttacaatataaattactcctttaatcatggtaaattactgccagccgatttgcaatgtagactaggctgaaggctggtggagagctgagttctgttcccgaactgtgctcctattcaagagcttaagagttgtccagttatgcgatggaacggggcatgaccgcatgtaccattgaattagactcgtttttagaaatgaacagataattcaaaagattactatcaaattgcagagtaggtactaagaagatcgaaatccaatagagctagacgggtagagcggctgcagatgcgatcagagcctgtcgggatgtatgagaagtcatcactttatgacatcaggggattgacagactttcatacatgcatcatcacctcgcatcgaagatcaactaacaagaacaaatatccgacaagagaacggctacgaaaaccaactcacaaaagagactatgccaacgataaaaccgggtcagttggaagaacacgaggaatgaatctaagagaagaaaagaaataacaagtggctcagaacttcttagagggtttgtgcaaccaacaccggcgtccgagggatgcctccggcacacggatttctttcctcatcgccatcaaactgctcaaaacgatatagtaatcgacaaacagaaacaaagaaaaaatggagaaaacatgaaggcgaaagaaccatcggacacagagagctag

SEQ ID NO: 38021 - DNA, 674 bp, Zea Mays
gatcaacacaggcgcgcgaatacggccaacaggccacatcatacaaattacagttacgtacactcggcgagggcatcatatattacatcgactcaaccttcgggatgatacccatctccctgtaattgaacagcattatcctcaattcctcaccctcaaaaagatttcgcagatccccttcacctatgctcgccccaatcgacgaggacaacaattctcgtttgccaacctggtctactcgaagacggccacgctccatccccatatgatggtgcctaagactttgcgaaaatgcacccacactgtgcttcgacaccacccttcgctgcctatacccagtactcgcactaggaagatccccggcaccctccacacgcgacgaagactccgcaacagccacatctagcgcagcaaaataatccaagccttcatctgaggactcctccgtccaagaaaacgaactcccagattcaccatcagaatcaaaacacttagacacagagccaaacaaattatcatcggcaggcactacggttgaggccgccacaaaatcagtattgccagcagaggttgcttgcgcaggcccaaacgtcggaacctgtgcagcaaccgaggttcagtatcacagaaacaaaagtttacacttaaatccctaacccctattctgccacctg

SEQ ID NO: 38022 - DNA, 372 bp, Zea Mays
gaaaaatcaccagaggaggtttctcaccttgatacatggccgggacgccgatggtttggacatgagcgatggtgagcgcggcacggctcctctgcccgacggtgagcaagacgtggggtggctattgtgcggtcgggagatggctgcgctctatgagaccaagggaggggagagcggataccagcgatacaaatatgggcgactgggtgaacggttggtaggaacgtgcgtcgtggccgattcaagcagaagagacggtttccatggaagggattatgagtggggatcgcacagctgaacgaggatgccgcggtgcagctcatagctggtcttgtggcacagaaagtcaggcacggcgtgtaggggcatggg

SEQ ID NO: 38023 - DNA, 639 bp, Zea Mays
gcgagttggtccacaggccttggggtctcattcaaagcgacatctagtgacccaaagaatgttacatctgaccgttgttcttctagacaagttttcttatatttgaccaactttatataaaaacatatcaatatgtgtgtgtgtcatagatttactgtaaaagtatatccctaattaatataatatatcctcagttatgaccaacttgagtagcctccctatcacgctctctatccctttttctgtagcccgatgaactgttcatagctccagcaggccccctatcctgaagtgcaaaatagaagccacccctagcactcaatatgcctatgagtactctctcatctccgcacctcaaccttcactttcgtccactccaaccaaatctactaccaccctaaggccggaccttcttcctccccccacctattgtcgaatccacatgacgctccacatctaagcccacctgctgctcaaggaggactagaggagtacgtaaatgtctgctcccgcatcaactgcctctgtcgaccgttgccatcgtgtactctgcttcgtgctcacacatcacactagcatcgcgcgtagctcagggaagctctaccggcttgccgactgtgatgctgcgcttgataccag

SEQ ID NO: 38024 - DNA, 464 bp, Zea Mays
tcatgccttgttgctgcatagatgcctattaaacaaatgtgttagtattgaagaggttgttttcaatatacaaatttagagtttgcattagttatacttactcgaaacattgtttgttgttgttgcatgaatgccaagaaatattccctttgttgtctcatctcctcgcgcaccctcgctagcttcaaatcctgctccgtcggtgaacgagagactaagctatgggacaatgaacccatcctcttagatctcaccttagccaagtaaaacactccatcaaagagtgtgtacctacaaatgttttgaaaagcgtgcttagtgcaagaacatgttcgtagcaattgtgtaattctataagttagagctaaccatccatgcactttgccccaccactagaatgcaagactaagggatccaatggtgcatctcggcaatgaaagacgggaccatgacgccgaaccatc

SEQ ID NO: 38025 - DNA, 813 bp, Zea Mays
cggacgagtttcttatcctggtaggaggtagggctggaggggcttcttccttctgctcagtctgacatccttgacttttggtcttcttgcggatttttcttgtaggggcgagcttcttcagcttcttgtcgtaatccatcttcagtgtgcggtaggcctcacgggtgttggtttcctcgccttctgctatctcgaggctctcttgaagggacgccttttccctcgtaagttccctgactttttgctccaggctttccacccgggagtttaggtgagtgcagtgggaggcaaggtcatcatattggttatcgagggtgtggaggtatccagccatgtagacgatggtggggtcatcttcgatagggtctcctcctgacagggcctgaagtcttttcctccaggtgggtgtatttttgttgctaggtggaaagtagcgaaggggagtttcaaagatcactttgttgtagctctggcatagttgtcggagggctttccgggcaacattttggcaagtatctgggaagcggtatccggtgaaagtgacttggaaagaaggatggttcggatagtttcggctttctcccaggtagactgccatagagcacttctccattccattctcgagatactccttccagacatattctggcttcttgcggattcccatgcgaagcgcacaacttcgcaacaggtgtgggaacccctccacctctgagcagtaggatgtcctaatgaccagagagtcttccatctagaataggaaaagaagggtctgttaatatcgggggagaggagagaagacttttagtgggg

SEQ ID NO: 38026 - DNA, 506 bp, Zea Mays
tgccagggaaggagggaacaggcgcctgcaactcatcaaccgaggaatttgggagaggagcggcatcaactgttccacctcccccaccaggagtgatacgtggtcccaaccgtgcatgaacagaggtccggaccgaagagaactgatgatccggaatatgctgcctctgccgctgatgcttgctatcccggtcttcatcatcatcaggggaggaaaacagaggctgctcctcaaccagcaaagcaaccggagtagtcactttcaccgaaatggagtaaatcaatgtgcgagggaagcaggatccatcttctccaatagacgtcggctcttcaacatggagatcacagcgagaaggcaagcaatccatagagaaaccccaagccttcagtttcagaactgacaaatccgtcccatcaacagtatccggatgtaatccctgaacaatgcagtgtccaccaagcagatgctctgccgtatcaatcccccagaggtgtgccggaatcccg

SEQ ID NO: 38027 - DNA, 373 bp, Zea Mays
gatgcaggatgcatatgtatgaatatgatgaaatatatcacaagataatcccaaactggacggtagtgaactaaacattaaattataagacaccgcgacaactgtacgcaagcgctagttatctatacgtcatcgggcatacgtagtcaatcatcactggaaaacaacaaacactttctataattatctattgcaaacacgacatcataagtacaagcattagccacgttcacttttatcattcattagttacttattattaaactagttaagtacgcataactttacgatgacttacacatagacagacttagttaagaaggaatagttgcttaatcgggttttacaattattcacaaccttctactgcaag

SEQ ID NO: 38028 - DNA, 893 bp, Zea Mays
ctttagcaagattaccaggccgaagaggtattagtgaattctgaccgttggatgcaactctaagggccacgattagacccacttgagtccgaaccggtattcgttaacggccgcaagatcggagatcgacggctacaacttaatggaacacgatctgcttcgatctgtaggataccgatccgacggcacagatctgatcgcctaaagcggcacgcttagctaatctgggtcgtccattcgcggaatcaacgccccaaggtgcttcttctacctcacaggatgccgccgggtggtactcgcagctccgccgcggcagacccgatgaccagctctcgccaccgctatccactaccctattcgctcccgaggtcggtgcaacgcaaggagggaatccgagtggtctggatcgaggtggcttaccagtggttgaagttggggtggccctcgactacggcgcggagtgatccacagcggcgccaattgctccgtcgagccattggcctagctccggccacccactcgatgattcagtggtaggaatcgcttccccgcgacactgcgaagctacacggtcacaatcgaagccctggcactggcgtggacgaaaatcagtccacggcggacctcgtcacatccttcctccattctccgcgcatctcccactgtcacagccgcccgtagacgaggccctccactcaccatattgctcgtggccttttcaagttcgtgatctgatggagaggtgcttttatagaggcatggagtgagtccgcgccgagaggaacggcagctgggcggcgcggatttaggggattctgtttgggcggtcagcaaagaagaaggagctgacacaccggtcccaggtgacagcgggtggagggggaatccggccg

SEQ ID NO: 38029 - DNA, 286 bp, Zea Mays
cgcacaggaatgaagttcctaccgcgtggcacatccattcttctgcgcaggaaggaattgtgtgttgggataaggggggttgcaaaatggcaggacaaggatgtctctagccgtattctctgtatctgttctttacagtctcctctatatctcgttcctcttcaatagtgccctttatacgtcaaagacccatattagcgactagtttatggccattaagcgatgagagatctaagtttctatcttactacttgttgtgtactagtagtcttttaacacaacttat

SEQ ID NO: 38030 - DNA, 286 bp, Zea Mays
ttcacgggccaccgctcaagggccctataaattgagcacaccctcggctccgttaggtattcaagcatccaatccacccgctcgtgcctccaattactcaccagaaagccccaatttgggatttcccccaaatcggtccgaaacaccgcacatagtgacctcgtcgtggctagctcgttccaggtccgttcatgctctctgctcttctgtttcagtgtccttagattctcctgatgctcctcgacccattcaattaagctaaaccacgctagatcgtcgggaacac

SEQ ID NO: 38031 - DNA, 326 bp, Zea Mays
ggatggtgtcgtgtaccgtcagatctgaatggatggctaggattatatctccggcataccactttgggtgcaatatctgcaccatggaaatcggatccaagggcatgtgttgcatactggatcggattagggcaagatctaattcggaccgcaggattgagatcgagtggccaaatcacgtgcatgattatggcaacgtgaacttttaataaagagcccttgggaaattgtctaattcacccgcagtccaccggaagacaagaataatagtggttcagtcctgattcttgtggaattgaccccaaagtctttaaaaatgatacccg

SEQ ID NO: 38032 - DNA, 422 bp, Zea Mays
ctaggttatgcactgttgaagcgtatcttgcatcttgaaatttttgcacaaattcttccacccccacccttttgtcagagattcaacagtcttcacatggctctagtatactcatcaacctcaaacttcggcatcaccaacatagaaaaatcgctccctcctccttgattgtaacatctagttctcattcctatacactcttcctatgactccgattagggtctccatatctctcgccattgcctccaacctcaagcgagataactcctacccatctcttcaaccttctgcaccaaggcagttctctcctccgcaacctgttttgccccaatcatagctaagtttgcctgtttgagcaactattgctagacttcctccatctcttccatcttcctagtcaacttctcgaacactgacatcac

SEQ ID NO: 38033 - DNA, 339 bp, Zea Mays
gagcagtaggctccgataaaattcaaatttgacagatgttttgccgtctcaatacgctgtttcaatttgatgggcaaaatccaccagagtttcaagcacacttgggaccgaatcagtgaacaggtcacctatcccagtcagagtcagggtacatggataaaaatgttcaaactttccagtttggcaatagatgaacaaagtattgtatatgtctactgacccgaccgcaaccttatcatttgcatttcaaccctatcagactggcaatacatggtgttttgttttttttaaggtgaaggtacagaaacaatgcatagcaagtacacaagcaggcctagc

SEQ ID NO: 38034 - DNA, 708 bp, Zea Mays
ctccctgggttgctcgatagacatttgttcagtgggctgatcggcttggtgggctgtccccgggtggccttttgggccttcccatcgaactgctttgtaggcgaactgttttttggaggtctgccttctttgggtaccctgttttgtctcttaactaaggctgatgaagatgtggtgaatgtcgaagaattggcattctgcatcattgaagagagactactcatgcaccatgtttttagggcactcctaggccatcaaggatgcttgttagcaagtgtgtggaagttaatcactaggagacgaagttgttagcaaggagggactctatgaggttcgatagtatcacatatgaagttgagggttaggcatgtcaatcaaagtagatgatgttgccatccatggatcatccttaggtggttatacttttgtatggagtaagtgatgaaatgtagctctaacacctcttgcaccacttgtctgtcaatatgagtggtgaggtgtagttgatgttgaaggcattgagtcatcaccatactgatgagctttgttgcgtttagagttgttatagtgttggtgcacctgtcacacacatgaaaactggttcgaaggcataggaaaaaaagacatggatggttgaagcatgtcacgtccctatgtgcacacatgtcagcagggatttgaagtttagcttcaagtaagagagtggat

SEQ ID NO: 38035 - DNA, 879 bp, Zea Mays
ggacaatagtatatgggccaaaatatctgaaggcgagcttttgattgccgcgccgtgtcactgacgactgaacataaggttgcagtttgagataaactcgatcacccacagcgaaaaccctttcagatctgtttttgtcggcatacttcttcatgcgactttgagctcgtagtagatgttgctgtataagtttggaaaccacttccctttcttgcatccactgttccagatcggtgaccagaattgccgaattgtgatgcagcccaaaatgtttaggatggtgcccatataacacctcaaatggggagcgatctagagaggaatgagaatttgtgttgtaccagaattcagctacaggaagccattggctccatttgcttgggcatgcatgaacgaaacaccgaaggtatggctcaatgcattgattcacccgttccgtctgtccatccgattgtggatgatacgaagaactcatgcaaagttgtgtgccagacagtgcaaacaattgttgccagaaggcgctggtgaagacacgatcacggtctgaaacaatattgtcgggcataccatgtagtcgatacacctgatccaagaatagtttggctaccttaggtgctgtaaaggggtgagataaggccagaaaatgtccatacttggaaaaacgatccaccaccaccagaatacaatccacgacaccagacttcggaaggccctcaataaagtccatggagatggagtgccaagcatggggaggcactgggagaggtgcgagcagacctggataacgagatcgatccggtttggcctgttgacaagtgctgcacgactgaacatacacacgcactgcctgtttcattcccttccaatagaacagttgct

SEQ ID NO: 38036 - DNA, 402 bp, Zea Mays
gtcgcggtgtactcgggtcaaattgagggcggggattgaggctatacgacgacaagagactctagttttactgtgctcaaccaatttggaaagagggggcagaggctgcacgaatttctgcttcggttcaacctacggtgtgcgcgatgctcatacctcgccgcggagcatggctatttatagctgcgtcggcccagtggtcaccttgcggccgagaagagcatcactaaggcatgtcgaccacgtcggtaaaaggtacagggagggagaactacggcatgtgcgccaccgcggcggaatttcactgagtcacggcggtcgccggtgagtaacctcggccgagctcagggaatggtgccacgtacgagctattcttccccgacgttatccactccctactgc

SEQ ID NO: 38037 - DNA, 499 bp, Zea Mays
gattagggcgagggaggggagaattgtatgtcgccggtcagagctcaccgggtggcgatggcggcgccaccgtcgggccggataggagggagaagatgtggtgactgtcgatccatagatggacggacgagattagtgcacgtgttaccgatttagcccattaaatcttggtcgtgggtcggccaatgtgcgatcaagattagatcaggcgtacccccttcggaaaacgaatcggagccataggatttaatcgagcggctcaggtgtcttggtgggatctgatctaatccagattgtaggttggcgatctaacggtcagggaacgggaataccccttcggcgtgcctagtttgcaaaagagcccctggtgtttatgaaatcaacccaccatcccgagtactattgtctgagtctcgggattgttacgtagtcacccctgtattttccagaaattgatgtgaagtcaagaaaccagtaaaagtgaataaatgaagaagta

SEQ ID NO: 38038 - DNA, 278 bp, Zea Mays
cgacaactgtactcaagcgctagctatctatacgtcatcgggcatacgtagtcaatcatcactggaaaacaacaaacacttcctataattatctattgcaaacacgacatcataagtacaagcattcgtcacgttcacttttatcattcattggttacttagtattaaactagttaagtacgcataaatttacgatgacttacacatagacagacttagttaaaaaggaatagttgcttaatcgggttttacaatcattcacaaccttctactgcaag

SEQ ID NO: 38039 - DNA, 436 bp, Zea Mays
cggcactgaaggcgaacggaagacaaaggcaaccggaggacaaagagggcctagtcgccaggtccacatgttaggctccctagatggtagtgttcccagtgcaattaggcattgtccggtactatactataattgcctcgttacataacatattccaggagtgtagtaggtgatcgggggcataaatgtatttagatccacgccctcacagtttccctataaataccctcgtcctatagctagatgggacacccttgacgagatgttttcacactatgtgacatccgttttgttgtgccacctaactcacctgctctcgagtgcttgcatccatgtgtcgagacccctaggcccacatgatagacctaacaacaggtacttaacgcattcctccacactagctctactgaccacaccccactacggtgcccctcca

SEQ ID NO: 38040 - DNA, 670 bp, Zea Mays
ttccagtggagggtcgccagtggttgaagccttctctgaaagcctccgcatacatgtgggtgctaggaagtggacgcgacaccaaattctggaatgggagatggcttgagagccgacctaccaaaggcctggcgcaagtctctcccacgacatatacaatctagatactatgttgcgattcttcaagcactagatatacctagaaaactcgttcatacaagtcaatgtataaatggcgggatgaacaaggaaaagttgcagcagtttttcagcagcaccaaacattattctttgccttttgagtttctgagttacggaggcagagagagaggggaagaatacgagtgctacaacgctagccaacgattagcataggagtcggttagcaagaggatagccgatcgccacggaagtgcgctaccgaacaatcgccgtcaatcgttgtcaccaccactgcgacgtgaacgtgggcgaggaggcggttttgagagagagcaatgggagatgccgatcacggttcatcgtactgtcaaggagagtacgtaggagatatcagcgtctgtatagtacccaatcctgacaaagaccaattacctcgagtgggcgattatgatacgcatcaacctgcaagcacgaggtatatgtagcgcaatcgaacccagtggggttg

SEQ ID NO: 38041 - DNA, 433 bp, Zea Mays
gatcaacactgtctaccatgtgtccaatcacatctttattcatgtttttttgaacaatacttcttatgagttgcgatttagacattcacctaatgttagccattttagggtgtttggctgcagatgctttatgttgaaacagggaaatttggacaagtttaagtcacgatcttctgatggtgtttttcttggttatgcattacactcccgtgcttatcatgttcttagctttgagactaaccaaatcatggagacttgtgaggtgacctctgatgaggcttcgcctagtccaccccctttctttgagcctgcaggtctagatcagatggctgaaaccatctttgtggaggatgagaaagacgacgctgactggggtgatcctgagttgactccaccgactgccccggttgagcatgtgtcgactacctcggac

SEQ ID NO: 38042 - DNA, 339 bp, Zea Mays
gggccagccagtgacgctggtcacccactcaccctgcggcggcgcattgccgtgacccacgaaatcccacatccaaacaacaaaacaccaaaccgacagctgccacgcaaagggaatggcagggaatacctcgtcgagggtttctcaccgcgagtcgtgcaccccgaagctccgtccatgaggtagtgcggcattgcagcggggacgaattccggcgagtaattcacaccaacaccgctacagtctgagcctgccatcgcgatgaatatgttcggtttgatctcgtgacggtcctaggccctacgccctcgcaggagtgatggttctaccagatttggc

SEQ ID NO: 38043 - DNA, 504 bp, Zea Mays
acaaccaagccgccggcggcgcctgtgacgacgtcgcacatgcagagcagcgagaggtccttgcgtacgaagcggccggtggaaacgttgacgaagagacgcgtgtcgctctggtagacgtcgtcgagcatagcccactggcgcggccggaagcgtgggtccagcggactgctcttggggtccgcggtgggggagcgccagccgctgcacacggcgcggaggtccatgtagtagtcgatgtcgtcggtggacaggatgcggtcggcgatgcggttgacgaggtccgccgggagcgacgaccagtccgccattttgcagctcggttggaggattgaagcacaactgcacagggttcatgcatgtgcgacgaattggatgggttcaagatataacccatcgtttgcagcgcattcgaggagctggaactccaaacgtccacccggtacaacggcggtggcggtcaatactcctccaattcttgggaagatgcggcatgcatgagca

SEQ ID NO: 38044 - DNA, 301 bp, Zea Mays
cgaccgaagaggtatccatggatttcgaccgcaggatcaccatccgacggtaaccagatgatcaattcacttaatgaaccagtacctaccctggccatccgatctaggatcaacgacccgaaaccttccacgccaaattctcttccctggccctcgatctctcgatcaacgcttcagattctaagtgctgaaagggtatcctcacgttctaatctgagccgtttgctatggaatcaacggccctcggcccgtcatctacctcatgcctacaaccgagctccccacgtcggcgctccatcca

SEQ ID NO: 38045 - DNA, 386 bp, Zea Mays
aaaggaagctcgattatgccatagaacactcattctatgtcaacactcacctacaagctaaaaccgaatgtacccttgttttctatccccacctaacatcaaacaaacttttgacctgcatcatgtagtctatctcatctatatctatcttaaccatatttcccaaccccgataatatacactaacctcgaatcaatgagatcaagaccagagatgaaaagatcaacatcaacaaggaaggatataacagtcaaagcgaatctcgagatgaatcaagacttaaacatattggataagttactttccttgccataatctttcttgcctcaacctgttcagctgatatcctacataataagtagctgggtacctatattctcctaatc

SEQ ID NO: 38046 - DNA, 634 bp, Zea Mays
ccggtacagaacacacacacacaccacttataaactaactaaggatcaccgactatcatggaggaaacacgacccacaacactgatctaagctagcaactcatcaacttggaggaaggacagagccttggctccagtcaaggaccatagcaccgcctcttccctggccactctaagggcagtgaccaggctgggattacaaccatcaaaaacgcatctattcctatgtttccaaatggtccaagcacctaggatcactagagaattaaaaccttttctcaaaaaatcagatgcccgagagctgctagacttccaccacgactcaaaggaatcctcatgagttggacatagaacctgcagccccactaaactaaggaactgaaaccagaactgcttggcaaaaacacatttgaccagcaaatgattcatggtttcagcctcttggtcgcacagggggcactgctcaggtcggtctagtcctctttttataagcctgtcagcagtccagcacctattatgttccacaagccatataaagaacttgcacttgccaggagcccaagatttccacacacgttctgctggttcgaactgaaccgaaccaaggaagagagctttataagcagaactagttg

SEQ ID NO: 38047 - DNA, 314 bp, Zea Mays
aaagtcatttcctatattctatgtgtgtgttgaatctacttattatcgcacgtgaacaccctattcaacaacaaataaataatacaaagatataccattaaatcatcatcatactggtgtttattggtttgtgcatgtgtctaccgtggtaatgataataagaatacataaaagaagagaattagtgctaacccaatttgcactctagaatctagaaaaggggaaggaaatgaatactatacaatacaaataaaaccataattaaataacctcaacagagttggtatgatcaaaataaataattagtcagtgta

SEQ ID NO: 38048 - DNA, 474 bp, Zea Mays
aaagaaaccattgtaaaggaacatatgacaagggcaataggtcccttggcatcttgttcttctgttatttataactgtctacttctacattgaacatcaaaatttattttaacttgatcatagaaataaagagtcccaacaaatactcaacattttaaaatttgaaaatgtgaaaagttgaagtaaaaattatgaggcaacctgttttctcccagcatgggtgagcacaccaccatatttcagaatcatcagggcttcaatcggtcgttcctcttcaccatcaccattacgctttggaacttttatccatttcaatggctttagctgcactttcctataaatgccagagaaatgtccaccctaatatgagaagagtagcatatgtcattaaatgcaagaagatgggtataagtttttcaatgctcataagccagtattcaagacataagggtataaacacaagcagttgtattt

SEQ ID NO: 38049 - DNA, 591 bp, Zea Mays
taaatgccatagaagcgactagtgacgagctgcttggagcatattcaaaggccgaagatgaagccatgacaaatgccttcggggctcgtggcaaaaagagattaaatagagtgttcaatgttatcgggtttgtgtacccagactactgttatccgtcgcggaaacaagggaaaatgaggaaagctgctacctcggtgacttctagtgcgtcgagataaaaaaggttaaagttttgagacgttggcccaggcgcattgaaacgaccgacgtgacgaagctaattgagggggccactcctattgcagagccaagtcgctctgtgtcagtcgaagctaggacaaaaccggctgaagagccaaaactggagaaggcgacagagcagttaaaagcattgagtccaccatgcacaatggaactgcagaagccatcaagcatccccgcaacaactccaaggaaaagaagaatggccaacatgctagatgctgttatggaatctgtgaagacatcaactcctgcttctgttgaagcgcctagcacggagggtaaagtttcatagaaatctgacgaggccgacatggtgcaaactaccgc

SEQ ID NO: 38050 - DNA, 281 bp, Zea Mays
ttcccttagctagcaatcttatatggcaagaaataacctggacagttttccatgcttcttcgacctttgagggcggcctgatccatggggacacctcggttcctgctatcacatgcgagggttatcctgctccggagggtacgattgaggacaattcagcccccgagggcgctgctgagggtgattcagcccccaagggtgttgctgagggtgacccagcccccgagggtgctgctgaaggtgatctagtccctgagggtcctgagctcggctcttcttcg

SEQ ID NO: 38051 - DNA, 333 bp, Zea Mays
gaagaggttgaccaggtttaggatagatggtcatactattaagtggagcaaatttattcagatgtgtctagtgactacatcatacatgtttggtgacaacaccggacatctaacacatgttaatggctagtttatagtcattgaagaactggacgttggaagggcaccaacatgtctggtgcagcaattggctaagtaatagacatgtttgatgcctctgattttagtgtttcaagtgtaatggattagattactttgttgggttataaatagaccacttgactataacctctaacaccatatttaaagctttagaaacacactgcactcatt

SEQ ID NO: 38052 - DNA, 385 bp, Zea Mays
caaggcggcagcaacgaggtgccccgcacgtggcccgacgaaaccgccagacgtgggggtcgtgggtcagtcagccacggggacagatatggcagttgacatgactgaaggcggattgacagcgggtgcgtcgacaaatgcgctgaattagtgcggcgtgtcagcaggcgtgctaagatagcaccccagtcaccgctcaggccatattgaggcaaggtacaagctttggccccacctgcaggctcgcatcctcccctgaggtgggcccgggggccactgtcggtaccctagaacagggataccccttactgtcgtataaaggcacagtacccacgcaactatccttggttgtgtggtaaaagaactgtgtgtgggaccagaccac

SEQ ID NO: 38053 - DNA, 504 bp, Zea Mays
gttgatttcatgtgctgaggaggcctcaaccccgcctcccgattacatgatctcgtttgtttgtttccatgagcggggtctcgccttccaccttcatccttttgttgtgactctcttcaagtatctataggtgcagctctagtttttgaacctgaacgggatccagcatatggttgtcttcatcgccctatgtgaggggtacctaggcgtcgagcccaacttcaccttatggaagtacttcttctacgtcgagctattgtggaagagggaggagcaaagggtaatagatgcatggccagtcggatgcgccagcatccaccttcacggcagaaggtcatgcgagtacatcttaattcccctttgcctttctaacaagggctagcacagatgatggttttatttgtgggatgccggtcgggggccttttccgaggcagcatctccatggcttggcatggagcggagcactacgtttgaggtccccctaaattggagctgcgatgtt

SEQ ID NO: 38054 - DNA, 811 bp, Zea Mays
caagctttgccgagaagcttcgccatggcacagggaacgtttctgtggccccttctggcggattgggctgttcgtggctctggaatcgctcaccggagcaaccccaacaccgcagatccgccatgaccgtggatgggtccctgcgcctcgacgttcaccggtaagttgccctcccatgggtttgccatccactgctatacgtgtagagcccattttccggaagtattgtgcgtaggaatcaggttctggcgtggtccggccatggcgccgccgtggatccctggccgctgttctttttggtcgggggcaagaagaagcctggtggaccgttgagagtgagatgggtgatccagattcggttaggcatgagagatgaggggagttgagcagccgccgttggatcttatgctagcgcgccagattagaaactgaggatacctcttcgtgcggattgatctggaccgttgatcgcggagcgtgcggccacggatgcgtaccggttcatttatggggggggattgaatccggaccactggattgtaatcggatggctcagggcctttgttaccccttcggcagtcctaatttataaaagagaccctatgttttggtttaatcaacccgccgtcccaatttgcatgattgggtactcggctgggcacttaaaaattacaaattgatcccagaaattttacagaaacacccctggatgctaattctggtataaattacctagaaacttagataattcataacttttgcatttcacctccgatttgatccgttccagttgcattaattttgttttaat

SEQ ID NO: 38055 - DNA, 643 bp, Zea Mays
cgcccgtggcgatatcacggggaaggggatacacatgtcagttagcggatttcggtcatgggaaacgtgagtggatatttttggctagagcagcgtggttagttaggcctccctatgtcccttcacgacaacagggcacattcatagcctttgatagggtcatgaacactgttctctatgactgcgccgagctccaaccaccctatggcctccatccacctttgagaggaccaacacactactgagctgtttgtgttccgtagtgccgagattgtctccataacaattaagacattgtcgtctcgactacccatactcgtcgtcagcttggtcgccactgtcaacccaacacctctcctggtggctccgtggggtacctcccccgttctctcctcgtttactgtgtcatcgcaacccacttccaccgactatgttgctaactcttcctcataccccaccacttctgaccacagtactgtttctttaccccatccttgcagccccaccttcccttcttccatcattgtcgataatgaatccactctgcctatcacctcagtaggtgacataatccatcctagtcctttgtttttcatatataaccagataaaaatgaagagtacaagtctagtacatataaaag

SEQ ID NO: 38056 - DNA, 430 bp, Zea Mays
gtcttgcagagtcactcggtggagcttaattactttgggtaccccattctttggtacctgtcaccaaggaatgggtccagacatctcctatatatatacataaaaggggtacgaccgattggagtataacacaaacgatccaaatcaatacaatctactttatttgctttgttcttcatcgcactaggagtagaagtagttcagacctagtttagcttttatccaaccctaaatctttatcccactttgactttatgtcgtatagggacgtctcgggtggtttgtcaacctcgggtaccctcggaactccattttccgacagggtccctcacatatatagaaggtaaggtctagggttttcgaaaaggaatatgaccttgagttgtcgtggaccgttcacactcccacaaagagcaccgccatgtggctc

SEQ ID NO: 38057 - DNA, 466 bp, Zea Mays
ggctgtgcgacctggggtggtgtactggtgtcgttcctgatggtaatcgaattgccacgtcatgcaaacgcatatgaccggtcctcgcgttccgtgcaaatggatggatgctggcatgctgctatggaagatggtgtactactacatgctggtcgcataaaaaatcgtgcacacggccagcggccacatgaaccgaagcgtcgacacgttttcgctcgtgtggccccacaggatgatgcacgtccggagcagtccaacgcacgctaggatcgaaggccgaggccgacaccgacgccgggatcctccagccctagagcgcgatggctggcgctcgattgctcgtcctgttgggctcaggtgaccggtgatcctgtaagtacacgcgatgtctgcatgtccatcgctgacttgcttgtgcaaaaaccagaaagcaacgcctctttgtcgtgtcggtgcaaggctgcag

SEQ ID NO: 38058 - DNA, 352 bp, Zea Mays
gagaaccactaaattcagagttaaaatatagaatatatggattatctaagattatggaattctttttgtatttaaaatcatttttagaatttagttttataaatactagtgtttgttggacggtaggagcaatttggtagaagcttagggtcttggttgtaaataaaaggacctattggaaatattctttaaactaacctggattgcggattggttttaagaaacttgagggtcttttttgcattaatccctggccaaaggggtatcggcccacatcaaccgtccgattgggaatgtctggtctagattagatctcgaaacataaccgaaccggtacacaaggcctagttaa

SEQ ID NO: 38059 - DNA, 292 bp, Zea Mays
gctggcttcatcgaagaggttcatcacccagtgtggctggccaacccagtcaccgtccctaaggcgaatgggaagcttcgaatgtgcatcgactacacgagcctgaataaggcctgtcccaaggacccgtatccacttccacgtatagatcaaatcgtggattctacctctgggtgcgacctattgtcattcttagatgcttactctggtttccatcaaatccagatgtctagggaagataggaagcataccgcttttgtaacagtggacaggctttactgctatgttgtta

SEQ ID NO: 38060 - DNA, 376 bp, Zea Mays
gctgtacaagggcatattactatcgtgggttcggaaaataaaaaggccctattactatcgcactgagtagagtagacataaggcggccgcgtgtacatctatctgattaacgccggaaatcgttcagtcgatcgaagtgcctccatttgtcgctggattaggaaatcgacaccactaatctgcattaaattatctctcccgcttggccttctccttctcctttgcctttgacagggacgcattggttgcatataatacgtgggtcatgagttgtcacgtctgagtggaacccatatcggtaagatggaagcaacgctaaccaccttcacgataacacgacaagcgcctgtgatattctggagccgtgatgctggcc

SEQ ID NO: 38061 - DNA, 367 bp, Zea Mays
caccaacagagttctgcatgttcaaacataaggcaagaaggttcagagaaaaaaagaaatacaaaatataagtattcaattatgatagaagttacgaaatatctgttaaaaaaactttactgaaacttacagcccatgtaaaaagcaaagtcacatcagcagctgtatgtcctgagtttgttacctgaaatttttttacgtgattgctaaaggtgtggagctatatcataaagttaagaacaggtaaaatagaagattgaaggaatttcatgtatgtagtattacggtaaaagtgaacactgcaactggatagctgctctgttgataattgtgtggaataattggagatatctgacggcacactata

SEQ ID NO: 38062 - DNA, 343 bp, Zea Mays
ccgactgttcgccaaggaactccagacatggagcacgcaaatcagccaaagaaatccttgtatatcccaaaactatcatgtttcacgacgcaaaacaaatccaaacacgcagagaagcggaccagaatatgaacctccttctattgaaccaaaaccggagcaatttgaacgaaaatagcactaaattgagccaaaaacaggaccaaacgcgtcgagccccactcagaatcatccaaatatgcatccagctctagaaagcacaacccgggcacataaatcttaccagaaacaagggaggacaaccattccacgatatcccacctagaccgccacaacctcgaaa

SEQ ID NO: 38063 - DNA, 302 bp, Zea Mays
gggagacgaggaggtccccaaccaagaggagtaccaacgccagcactaggcacgcatcctcgcccgcgaggctgcccctccaccagcaacaggaaaagctcaacgcccttgtgcacaagttcgaccacgtctatggagacgtcaaacacaggcgtctcgaggctgagaggaaccaaccgaggaaggtatgcgaccagctcattgaaagcattgacaatgcacaatactttatcagtccagggcaaaacatggtcgcggtagccatgatactctgatccatctcggagcccaatgaaccggag

SEQ ID NO: 38064 - DNA, 332 bp, Zea Mays
gtcttcctttcgttcctagacacgctagacttggctttggccataccttggactccccttccctctcctctccccgtctcccggcgtgcgtgcgtactacttactgcttgtccaatcgccgcgaccagagctcccgcgcacgctactggagaggattccagcgcccgtcgagcaacaggactctagcgcccgacccgacaaacgacagatagtagctactgcctccctacaccgtctcggcatctccgggggcacggcacgggaacggaggagcggagaaatccatccgccgaaccgcttgctttgcttggcaggcaccccgtacaattggg

SEQ ID NO: 38065 - DNA, 483 bp, Zea Mays
gcttgagctgctgccatgcaaccagaatgcggaggagaagaccctacatgaacgtccatggaagtgtgagagggagaaccgactcggacaccctcgggggctgggtcatagctcacgctacccatccgagccgggtcatcgccggcaacaccctcgggggctgggtaagcgctagcgccatctttgagggccaagctctccgtaacagccacctctaaggctgaaggaccttcacccacttccatgggagcagaaaaatccaggccagcctcctgacccttaagaccgcgctctaaggtcgatgaggcacgggacgctgctcgagataactccagcccggcatcaggcacatcatcacaaatatccatcattccaccatctaccggctccgacaacagatcttctgggaccatgtcttcaagagtctgatcaaagtttgctagagacaattcttgcagaccaatgagggcagacaaagctgga

SEQ ID NO: 38066 - DNA, 684 bp, Zea Mays
aaacgagggagagaggaggatgaactgactggaatggggctggccgcggtgaggtggatttcggggtggcagagaactgatttggggcgaattcaaaattcgcgagctctggcgaacaattgagggtgggattggggctctggtttcgtgatgatgtagcacagctaaccgcgggctcaatttatagggagcaagagcggcgaccgggaattttaacggtgacgcgcggtggtcggagatagagaagaaccttggcgcagtggattcgtgtctaccgtcgtggcgacctcaccggcgacgattagacggccatagagagtcacgtcgatgcggtggaaaggtagagccacgtggcccaaggccgagaggcggcggtcaccggcgaagttatcagattccgctgcggtgaacatggtacggtggctggagttgtttaatggccggagtctatccacggcgaggatatttacgcaaccccgagtgctatccggttcccagtgagtgcgaatcttaacggcggcgacgatcccggcgcaaagtcatcggcgacgaggggagcggttgatctgatctgtccaggcactataccatggcgaacctgattcagttggactgacagagcgatatggggccagatttcctctaatttttacttgacaactcatctgaggctctgtagcaaag

SEQ ID NO: 38067 - DNA, 396 bp, Zea Mays
ggagcgcagcgagacaagcaacaagggtttggtagagtgggagcggtgatggtggttgggaggggagtgcatagaaggagagaacgcaggatggtgtcagcaccacgcagatagcgtggagcacgaccactaggtccttgggtgggtgtgaatgaggtgagaaaggggaagaggagtggagccggacatagagggagtcgatgaggcgaacacactagaggtagaggatgacacgattagtggtggacaccgcgagcaggggcacatagtgccggtggagagtcgtaacatgggggcaaagaaggtgttgatagctaatatggggtgaagaaggtgtttatagctagaccccattaacaatgacaagcagaaaaacacatacaaggtaaaattgag

SEQ ID NO: 38068 - DNA, 341 bp, Zea Mays
cagatatacaccaggatttcgtcatcttctatgatgcttcaaggcaagtcttagggtgtgtcttgatgcaaaatgagaaagttattgcctatgcatcctgcttactcaagccacacgagctgaactaccccacccacgacttggagttggtagccatagtacacgccctgaaaatatggagacactatctgattgggaacaaatgccacatcttcatcgatcacaatagtctgaagtacatcttcactcagccggacctcaacctccgtcaaagaagatggcttgaattgatcaaggattatgacctcgaaatccactaccaccccgggaaggccaacgtg

SEQ ID NO: 38069 - DNA, 289 bp, Zea Mays
ggagacggcatcttgaggaccaaatacccgtaatgggcaatggccatgaaccggtacagggccgacctgccaatgatggcattgaacgggaggttaacctccgcaacgtcgaactagacgttctttgtgcgaaagtttttcctctatcctgaatgtaaccgggagcgtgatgctcccaaggggatacaccagttgagcgcccactctcagaatggacgagagggtcacagtcgggaccctaggatctgcagctgcgtgaacgcagcgtggctgatcacgttgagcccat

SEQ ID NO: 38070 - DNA, 557 bp, Zea Mays
ttttgctacttctagagaaatcaccacttctttaccatgcttatgtattgtgcacaatattcctttggacaagaattgtacaaaaaattgattttttgaagtccgtatggagagaactagctaatatgcccttcaagtatatttttaatctcctgaccagttcagttgttgcactgcttgtattggagtttctggtatgtacccacatattgacacagctatcattttaagacttcatggaatttgatgtgaaatttgatacttgtgggcaggttatgagcttctttgataggaaaatttatacgtggtgcttcttggtccttgggatactcggttcaacatatgtagcattgtttattcaagctagtgctgcacttgcgatatacatatggcttgcttgctggttcctgtctgtatttactttgatgccagctgaaattccagaaaacaacaacttggtgtatgcttctttcactgacaggattcatgcattttttcccttacattttatcctgtgctagtagagaacaagctgttacatatatattgtaataccg

SEQ ID NO: 38071 - DNA, 373 bp, Zea Mays
atggatttcagtcatctgatcatgagtggatggctcagattagatccctgtttaaatgaaccggtacgtgacaagaaccgatggatcagagatctatggctcaaatcaactcacgactggcatgtgcacctacccaccggattccgatctgacggcacggatccgacgagcgaaaaggtcacgcggtgttatgatcctggccatcgatccgtggatccacgacatcgaatacaccggcggtggggatttcgcagtttaatcacaaccattcaactgggatcaacgatccacgtagcttcttccctaacacccaaacagtgtcgccgccgccatggccacgcagtggagaacaagaccgtggcaccaatcggcc

SEQ ID NO: 38072 - DNA, 344 bp, Zea Mays
gtcagcactgtctctccacgcgagtcgacttcggaagacctccaggtgcagcaggcggaagcagccgtgtccgaggagctacagcagcaacagagcaatgtggagactggtgggcctcaagaggagactactacagctgggctgagaaggggaacacgccagcgtaaggccaatgtgagattccagggcccagaatggagaacctgaagatatacgctcgctgagacctacggaggaggcaggatgtaacagaactacgtttatcttcttcctcaagtttcttcttctcctctcgctactgtcttccctgctactgctactctgtaattctgtttccaccaagc

SEQ ID NO: 38073 - DNA, 427 bp, Zea Mays
cagcagtctccttcggcatctcccaattatccacaagtggtcataccctataggctatgtgctcttgaactaggtctcatgtgccaatgaaggcacaaacattattgaaagccttctgacatgttgcggtatcattttcaagcacagtagccagcctttgaaggccgaagcgggactagatggggcattggataatcccctttatgtcttccctttcaatcagattattcttgacataaaaccattcctccatctaggctctgggccacctttttcgaaaagttgtaacgggataactcacatcggagcgaggaacgaagccataacaaccgaagttgttgtgatattgctctttaccagtggccttcgtcttgtacagtagttcatgcatgttgcagaagcacttcgcgctcgactccagcccttg

SEQ ID NO: 38074 - DNA, 531 bp, Zea Mays
ggaggctagatggacggggtctagaagtggacattgtttttttgtcatcctgtattcatgtgggctatcgatctgatgtctgcaaaacagtgccataaacatgtgcggtttcaacaacggtagcctgaagaagtgcggggctcattatccatttgggcagccgagagaggtccacacatcgtggcggcgtggctttattgttgtgggctacatcgtggcctgctgttgaaattgccacgtacctatgtgccgtgcgatgtgcaaatattccaaaaacaaaaccaccgggtgtgagccgttattctggttccaatcgcagatactcccccccccccccccccccccccccccgaacttgtcagaggaacgaaggtggccggggaccagctcaagccaatgcaagctccatcgcgattgtgataatcgaaatgacatgcgcgctgacgcgccactgccacatttttcaccgactagacgggtgtcgctatcgctatagtgtaggggcgcagacatttgctagtactattgctc

SEQ ID NO: 38075 - DNA, 681 bp, Zea Mays
gggggagcctgcctcgagggagatctaagccttggtgcttctacggtcgttcttctgctgtttcctaatggatccttcaaagattttttgctggaatgttcgaggccttaatagttcggcccagcaggatgtggttcgatgtttagttgacagtgtcaaagcagacgtgatctgtattcaagaaaccaaaatgccggatgttaccaggtggatggttcttcgtgttttgggctcagattttggtaacttcgttttctctccatcaaatggcgcgagtggtggtattctggttgcttggaggagtcatattacatctattgggtcgaggattgatgatcattgtgtttcggtgaattttcgtttggaggatggcgcgtcttggtggctgtcttgcgtgtatgctccccaaggtaatgctgaaaagaccctctttttacaggaactcacatctactagggctcactgcccggggccgtggttggtggttggggatttcaacatgatcctaaacagtgatgataaaaacaactccaatcttgatcgggctatgatgggtagattcagaagatggaaagatgatcttgctctaattgaaattcctttggttggtcgcaaatatacttggtcgaacggacaagataaccccaccttggtacatctggataggatgttctgctctgc

SEQ ID NO: 38076 - DNA, 488 bp, Zea Mays
ttttcaagtcgtccggctaatcgcgattagtcgggcaggtcgcctggtagtggccaatcagccggacgactcgactagagtatcaagtcgtccgactagtcgtcgattaggggcgattagtcgtccgactagatggtaaatcgaccaggatttgtccaggcggctagggttttctagtgggctactgggcttctatttttttggcccatctacagtagtataaaggcaatgcgccaccaccccttgaaacttttcctctcctctgccgagtccagaacacaggctgcggctctagaacaccagcagcagctccaaaacaccggcagctgctccaaaacactagcgacgagatgagctcctcatgtcaagatttcccccttctccccctttcctattgtctgaattctgatgaatctgaatctgttggagaagctgctgctgctttttgcttggatgatgatatgctctaggcagtaggtactgcatta

SEQ ID NO: 38077 - DNA, 353 bp, Zea Mays
gcggtattaaggcacccaaaattggtaaatttcctaccccaaacaacagagatggcatccataatatcaggcttaataattgtcctgcaaaccttgtagaacgttcctgtgaatccatcagggtctggagccttatctgaaggaaggcatttgatggcatcccatacttcttgttttgaaaagggggcttccagatcggccagatcataactaggtattccaagagcctccaactcaatcgcctgttccctatccatactgttccccaacagatcggtgtagaattggtccacacaggcaggtttgtcctcatgactagttaggatttgttcttcatcaaccagccttgccac

SEQ ID NO: 38078 - DNA, 342 bp, Zea Mays
gccgcggtggccctggtcgcggccattctcatggtggcgtcaaacccacctgccaggtgtgcggcaaatatggtcacgatgcgctgcgttgctatcagcgtttcaatcatgcttttcagcctgaagattctcgcagccgctctgccaattctgcaaacactggtgcatacaacattgacacagactggcttctagatagcggggccaatgatcatttgacaagtgatcttgatcgcctaaccacacacgagcgtttttctgggaaagacactgttcaggttgccaacggttcaggtttgtcaatttctcattttggtcaatccttgctacccggctcctctc

SEQ ID NO: 38079 - DNA, 293 bp, Zea Mays
ccgaagatagaagagaaatctgaagcgcctttagcagagaaggcggaaaaatcgagaattgaaggacaaaaaaatattggaaaccttaagtccttcagcgaatgctgaaacaagaaaaatccaaaagggcccattggtgaccccaaaaagaaaaagaatggtgaacgtactagatgtcttggagacgattatgtcttcaagtacaactccaaagaagactgttgaacttgctgaagcgtctactgaaacttcgaagcaacaagctgaagctgaagctaaagctgggccttcag

SEQ ID NO: 38080 - DNA, 586 bp, Zea Mays
tctccccaatatcttggagggacacctttactctttaacaaacatcttgccatttcaactactgactggtttcttctctctacaacaccattctgttgaggggaatagggagcagttgtgtagtgttttatcccttgatcactgcagaaaatagaaaactggcttgagttgaattaacctcctctgtcagttcccaatgcttgtaatctaccttcctgatcaacctcagccctttccttgatcctttttagacaaaccagtgcttcatctttggttctcaacagttctacccacatatttcggctgaagtcatcaactaccaacagaaaatagttctttcctccagctgttgatggtttgacttggccacagagatctgcatggaacaaatccagtccctttttagctctaaaagctgactgttttagaaaaggagtacggtgttgttttcccaaggtgcaaccatcacatacttgctcaactcgatctactacaggcataccttcaaccaactgtttcttgcccatttctcgaagagctctaaagttgagatgcccatatctggcatgccacttcaatgctatat

SEQ ID NO: 38081 - DNA, 378 bp, Zea Mays
ttcggaacatgatacggccattgattgggccatcaactcgagctccttcgcttgggactatgatgccacagctctagctcatgtagcagaacttagtgtatccctcgaaaacctgcaggcgtactgcaacaccttgcatgaagaagtgcatgtattgtatgaccggttgcacccgaatgtgccacctgatgtggcagcaatgggagctagaccatctggaacagcaaatggaggatctgatgggggaattgacctttttggagcccctccttccatgaatctggcagatgaacggtctcctgaagcaggcagcggaacaactaaggatgaagaagactagagtagtatagttaaagtaatgtacttatgtaaaataag

SEQ ID NO: 38082 - DNA, 297 bp, Zea Mays
tagagcaggagagcgcgaatgcaaaggggcgcagagagctcgaaggcgaaagggcgcagcgattgggagagaatgcgaaagcgtaactgctgcacgtgaggtgaatcccttttcaaggtagactctcccgctcgtgcctcgagacgctataggaaatctcgtccgacgcacacctgacactcaggcggcccagtctttgacacgggggcctgggcccacaagtcatacagctggagtgctggtctccgagtgcggaaaaagcgaaccaccgcacgcgctcgaagagcgaaccgccgc

SEQ ID NO: 38083 - DNA, 427 bp, Zea Mays
gtcgagtgatctgggtccacacccgagtgggtgatgtggacaaaggggtccgccgtgatagaggtgatgccttagtcgatcaagccataggtgccgcaatggccctgtgcccacccaacataggcgtgatcctgcgtggggcggaagctagttgagattttcacgccttggaattcgttgtcgtagttcttgtgggagtcaggtgagatgagcccacccccgcatttggtgccatcgaagaagatctcctctcggatggatctgcaatgcggtgtaggatgcctttttgatctgctatgcaggagagggatccaaagcgaaagatctccccatcattgaaggtgactaggatgttgaagatgatagccatggagtcatcgtggatcaacgtcgcacccctacctggcgtgccagctgtcgatgttta

SEQ ID NO: 38084 - DNA, 520 bp, Zea Mays
aggggggccaggtatcaggaaaggagttgatagaaccacacacaacaagaacaagcatcatacagataagagctatttaattgatagttcccaaaagtatcttacaaaaacaaagttattacatccgccttcaagcggggccctagccttatgtctacaggtatgacctactcgacatcagtagggtcacgctggaagcgtgcgaccaccatcttcgcgacatcttgtacgacctcctgggtggcgtcttcagtatcagcagccgggccagcggtcaccgttggaggcggcaccgaagccatcaaagccaaagagatggagccgcagctcggctcgcttcccaccccatggagttggagctagaccagttcatggctgtgtaacatgaggcactggtgaagctcatgcgaaagatggagccgcagctcagctcgctttccacctccgcaaggctgatgaacatccttgaaactgagaactggtggaagagcgccaccccccacgaggccgtgctcctccg

SEQ ID NO: 38085 - DNA, 727 bp, Zea Mays
attggttgttccaaagaaccctgaactcagaaagaagatattggatgaggctcacctttcaaaattctccatgcacctcggcagtaataagatgtatcatgaccttagatctttttactggtggaccagaatgaagagggaaattgctaagtatatatctaaatgtgacacctgctagagagtccaggacaatcacttgaaggtagcaggccctttgcaaccccttcccataccatcttggaaatgggaggacatttgcatggattttatcgtgggattgcccaatacctcccggcaccatgattccatttgggtcattgtggacagattgaccaagacaactcatttcttgctggtacacaccacccacaagacagagaagtatgcagaaatctatgttgatcaaatagtgtgtttgcatggaattccgaagaccattgtatctgacagaggagcactgtttgtggcacgcttttgggagcagctacaagaatcacttgggacccatgcaataagaagctccgcatatcgtccgcagacagatggccagatagaaagagtaaatcaaatcctcgaagacatgttgcgagcctgtgtgctacactatggtaaaaattgggacaagtgtctttctttggcagagttctcctataataacaactaccagtccagtctaaagatggcaccttttgaagccttgtatgggagaaggtgcaggacaccgctc

SEQ ID NO: 38086 - DNA, 330 bp, Zea Mays
atttggaaccttaatatactcgcttacccctggtgccaaaactcacccacatcccaatctgaccggaagcaattggaacatagcagtagtggataagctccgtactggtctcttcttagatccctgaaccaagctctgaacctaatgagtttgaactcacactgaccacctgcacctttccggttcactcccctttatcttactattttcaaaggcaacaggtcgaccaaggctaacaaagtatgctcacaaaacaaaactctaccaactcactatagaaattcagggttaaaagcacacagatcaaaagttgcaatgccccaaaatccc

SEQ ID NO: 38087 - DNA, 372 bp, Zea Mays
gtcaggaccacaaggatgtggtgtgtagcaggaatcctaatgggaagctcagataggagccggtgacttcctcatcttctcagggcactatcaacatgatgtcaagtgctgagcagcagttttcagttcctcttcctccgcagcagctttttgtgccttggacttccagttcgtgtcgatgcagggttttcctcagtatcaggccacgcctactcctacaccgtctactcctatgtcgtctcagtttggagctccgcgtctgcctcacccggcggctcagtggggttcttctgttaatttcactccgggagcttcctcttctgcgggtatttctggagcttatgtgctacccgcggcggatggcaggaagca

SEQ ID NO: 38088 - DNA, 390 bp, Zea Mays
ttgatttggggaaaatcccgaattggagctctctggtggaggatctgaggtacgggtgggtgcgctagatgcctgaatacatagcgaagccgatggcgcactcaatttataggctccgggggcggtggcatccaatttcacgaagaggtgctggcggccggaggggaagaaggttactggcgcgcaagcttagtggctttcaccatggcaagctccccggcgatgaacagacggctaatgcgagtcacggtgatgcgatggatgtgccaaggcacgtggcgcaaggccgtgaagcgactgtttggtacggtggccggagtaaaataatggccggagtgtttccacggcacgatatttactgacccccggcgctatccaactgatctgagc

SEQ ID NO: 38089 - DNA, 379 bp, Zea Mays
cgttggtatcctttttgcagagcttctgacctggctttttataatgagcgtcgtcataatgccatatcctgagaactacgagatagaatcatagaagggcgagcagttcagcatccagcacaacatgccaatgttcattcttccctcctcaaccccaaattctccttttctgagccttaacctcaagcaacctgaaataaaaggaaattcgagatgaaagtttaaggttttaaatcctgacaaaagtatttgatactatatataaaccctctcttttagtatatttgataactttaagaagacctgtttcagtaacttagttccactaatgaggataatagctcattgaggtaacagaaaaatttgaagtgtgaacaag

SEQ ID NO: 38090 - DNA, 605 bp, Zea Mays
taggggaaccggtgagtcagccagtagtggtggggatggaggtagcgtgataaggggttatatttttggatcaataagaaaccactactcaagatggtcctagaatactgacgacagtgcgtacgatacatatttgaatgatacaaattgaagtgcatttgatcagtattaaactgctcatctttaaactaactctcatagagaaaaaactactggcttatatgatgaggatggttggctgggttaaattgggtgactccaatgtctcgagatgaaccactaaacttgaccacgatagatagcttcataattatcatcgatgcagagtacttgtgctgcaaacatcttctatgcaaatgcatgcgttatatattacgttggtactctgcgatttcaatccaacatgtagtagttgtgacaatcatcatgctattgctatgagatgctagtcagcactgtcatgcatctcatcccagcagcatgactggttacacaatacttgtctttatccttaatactatcatgcagacatctctggttttcatcaggtatctttcccaaagactaagaaggccatagagggctaaatagccatctaaactcac

SEQ ID NO: 38091 - DNA, 444 bp, Zea Mays
gtggatgccaaggatgacttggagttatttcaaattatattacaagcgatggagggagttgactgtaatgatagtgttgtggttagagagaagctgaataatattcaagaacgacacaaagcattggatgccaaagtgatttcagtgaaatatgtgttgggaaaagtgcaggaggattatgattctttgttgatcggaactgatatttccattaacaaagctcaggcagccttcacaatgtccaaaggtgcagagaaagaagtagaggagctcaccatagagctccaaagactaaaggaagtgtttgatttggctaacgccaaattccaggacgtggaagaacgcaagaacacgttgatggcacgtgatgaggatcgtcttgcatgggaagaggatctcaggcaatcagacaaagagctgaatcagatcagcatggacctttgt

SEQ ID NO: 38092 - DNA, 311 bp, Zea Mays
tagccgtatccttttcggttgtgttggccgattcgtcgaaaatcatcggccctttattgtctccctgtatgacaacatctacagtgcctattttgatgatatccttttttgttgttctttgagttgctataggcatatgcccccctaccggattggtcggcctaggaggtcgagtagtccggcaatcttgttgggcttgtgcctggtgaccggattcagcagcgctcaatcggtcttgcactggcggtgccagcctatcaaaaacggatgtttggggtgccccccagacggggtattgtggcatcccaaat

SEQ ID NO: 38093 - DNA, 1832 bp, Zea Mays
tcaaaggctcattgagaatggctttaagagaactaaaaaggtatgctaagatctatatgttagctttacaaacaacagtgagaatcatgatgtaggcatatttgtgaagagtgacagggagaagagatgttgtggggcactttcattttgtttcctaacttagttgctgggctgcggaacttcaggatgcgccagcaacttgtatggcgaaaagttgttggggtttattcaagaaagctttcatagttcatggttgagtcagagttttttatagtcatgaaatcagattgatcaggaggttccaaattaagttagatgacatttatcgctcaaatttataatgtgcacttctcttgttactatgttccaatgtccattttactctgtccggtagaaataagtgtcgttttggacactgatttagtccccaaaatagaactttgactatttctttaatacatttattacgaaggatagcaaaaggccaaaagtatagtgttattgaactattttgtgtgaccctacttataatatttttcaaatacccaaacttagtacataaaaagtattttgttatcagaggttggaatggttgaatgcacacaacccaaaacgacacttatttaacttgagggagaatttttttaaaacatattcagggtttttcatgtttcacttttcttttgaatgagcctattttaaaggccttaggtatggaagcacaatccattgttagtgacgggtggcgtgctagaaaaaatgatgataacaattatggtaacaaagatgacagtggtgatgattgtgatggtgatggtagcagtgatgatggtgatggcagcagtgatgatgatgttaccgatcaaatatgtgcgctatgtgatgatggaggacatttgcttaggtaggtgcacaaaattgactatctgtcttttattccatttcttgtacatgtgctccatatctttatccatgccatgatcaatattattaagcaccttccacttggatcaacacctttaacgcttgcatgaaatatggtcactaacagtatgcgaagattaaggcaataggcaaggggaaataaggttaacgttaaagagataacagaagcaaaaggtagcagagaaaagagaaaggggaagatagataacaatggccaccaattcagcctaattgcagctagatccaccttgcttaatccttctaagtcccatttcctaatcgtagcagtctcccttaaattgtctcccaatttgaacacagttggtatatgtgagctatagacaaagatgcaataaagagtggatccaaaagctgtgaaccgcatatgaggcggactaggatgccacgcctaagtttgggtgtttcaactatcaactttcaagatcacttgtgcctcttatttacactgtcagttcataggctatgagttgtctccttgaatttgtacaaggtgaatttactttatgcagtttcacattaagggtttgcttctggagtaaatgtggaaatctactgaattacttgtaagatcagcgagttgaagttttgatgaaccataacaaggaaaaacacttattactttctgcatgcaagtgacagatgaggatgtcttccacgatatccatggagtgttcattgtgttttgtagcatataatgtttctgtctgtaagctcttgttgggttattaaatcagttcgattatatactttaattcttacaatgatttaattcagctgtgacggtccatgcaagaggtctttccaccccacaaagaaagatggcagagaatctaaatgtgaaagtcttcattacacttcagcagaag

SEQ ID NO: 38094 - DNA, 493 bp, Zea Mays
tggagttgcattttgcattattaccacagtccacagccacaggcagtagtgatttccttatgcatgaattctgactacattatgttggcaggttgctatgatgcacgaattgattggcaatggtgctgaagctgaagttctcttacagacaggaaaagagatatcaaatttccatggtttatcagttttctgtattgtatttacatcatttctaggtatatataattctaattcaatggtttatcagtttttttgcattgtttttcatcattactaggtatacataattcttcaattgtgtttttgttcacctgtcatttctgtctcacattccttggtttttgttcaggtcaactatattgtaagcggcagctatgggatgaagcggagagtgagcttaattatgcccgagatcttgtgaaaaatgatgcaacaatttcatgtaagctctgcagtctgactttggggatatctgttgacatgcaagttggtg

SEQ ID NO: 38095 - DNA, 462 bp, Zea Mays
gcaaaggactaccgattcaccgtgcacaactaatttggggagatgaggaggaggcagtgcgaattttggctttaaccaagctcactgaagaactgtgagcacctcgtcgtggttccctgcgctatttaaaggcacgacgacccggctagcgatcctcggccacgaaacacattgttaacgcatggccaacacgtaaggaaggaccacagtgaggtagaagtgaggcgcgagtgacacggcgacgaaaagaccgagccacggcgaccgtcggtgaaatatctctggccggacctcggccaagttcgtggaaccgtgacacggcacaaagttatcacgtcgccgttgttcctatctccaattcatctgataccatcaaaatccacagtatcactgatctttttgttcttcagatatttcctgtgccactgatcttcatcgtttcactgaaccaacctcctttca

SEQ ID NO: 38096 - DNA, 377 bp, Zea Mays
attttttggcaatctatctgattcagtaagctaatccaaacatactttagcggttgcatagtcaaatgaccatgaggcagtgagtgtcgtgaggatcgaggaacagggaggctagcttgtttcacgtacgaaagccccagagatccctgttctatgggcgaaattttcaacaaatgtccgctaaaaaccaaaatcgagtggccatgggcatccacaaataaaacgtgtaaagaccatacgccatagatttgcggaaaaggtgatttgcatgggcatttgtgccgccttgattggataattacaatgagaatgtaaccaccgctgccgttgcccacaaaaagaagcgcttcacaccatgcaccgttgctttcttactc

SEQ ID NO: 38097 - DNA, 363 bp, Zea Mays
aaaactacttaactcggtatgaaacttttacctgtcttttttaccttggttttcctttattatacttcctgatttcttcataccttcttctctctacaggatggtggcgccaaaggtcgttaagccgaagcttgttccgaagggctgaagattcttagaacttccttttgtaactatctatagaaagcttaggatctctctgcatcatttggcaaaagattgtaactgacagtttgaacaaaatattgtacttatttgtgaataccttgtaatataatttcaccttttcgctcctgtatgaactgctttattgtggacgaaaccatcgcttgcaatcttttgagccgaaggcgaaaaacacct

SEQ ID NO: 38098 - DNA, 333 bp, Zea Mays
aatttacctgaatgttggagaaaaacgaaggaacacccaaatcatgggaaatcagttgatagctcgatgaaggatcaccaaccggagcaatccgcaatgcatcagtggggaccaattcagcgtcatcagcagaaatcaaaactctgtcatcaggagcgccggcctctaaggcgacttcctgacccgaagcccgtgctgctgccatacaaccagaatgcggaggagaagaccctacatgaacatccatggaggtatgagagggagaacccactcggacaccctcaggggctgggtcatagctcgcgctacccatccgagccggatcatctccgg

SEQ ID NO: 38099 - DNA, 386 bp, Zea Mays
gttggtttctataaaacacagggtctttttaacaaatgcgacacggcgaaggggtatccacggatcctagctgcccgatccacttcctacggttcagattagatttaggtttaaacgaagcggtatgcagtcctgatccttggatcagagatcgacggtctctactccatctaactgagatcatcccgcatgcatcggattctcgatctacggtcacggttggatgcagtcgaaacagtatgaggatctaatccaatccgtccaaaacgcatccaacggcctgacgtctttcttccctactcggcgtcacaccgcgcggtcacgcccacgaccgatctacggcggctactccggcgagcccccgttggccgtccgctgctccaaac

SEQ ID NO: 38100 - DNA, 562 bp, Zea Mays
accataaggttaaggtaggcatctttagggtaacaatcactagctgaccctttggttgttaagttttggtcaatttaggctcaattaaaccacatgtgataataggtcaagggtgtgggtgtaaagtagaagagagaataggtcaaggctcaattaaaccacatgtgataataggtcaaggctcaattaaacaatcactctgagtaacacctagggtgttaactctctgcccgaaagatggaggctagaagttcggtgactatggatgtacttggaggttcaaagggtcgatgaccctagagactacaacttgggtccttatatgtggaggcgcagacgaccacctggcgctaggctggcgtaataaagtctggcggcaacagccggtgcttgcatgacgactttggttttgtttgtaaccaaaggtggatgacaaccctgaccagtgggttcaaggggtagtggggagcagaagtggattcggtctatcggcgcaaccatccaacaggggcatggttgtgggctaggacgtggagagctaggccgactagtgagggttttg

SEQ ID NO: 38101 - DNA, 422 bp, Zea Mays
cggcagtgaaaagatcttcaccgtggatgaggccgtgagctggcccccgtacccacttgccctgcggccggtccaggtgacctcgccagagtctatcacctaccgcccggatgcgatatgcttcaaagccttaccacgtcacgataacctgtcataggaagcctgtccatcgcctaaagcattgcctcggtgaaagccacaatagcgttcgctagtgactcacccctctccgcccgctagctctcttctccaaatttcagagccatcacgctcggagtctataaattgagtgcaccattagctccgctaggttgttacgaagccagagccccatccctcgcctccgatcatccaccacagcgccctaatttaggatttctcccaaatcagttctccatgccaccgtgtgacgctgtgccgag

SEQ ID NO: 38102 - DNA, 300 bp, Zea Mays
catacatacatgcacacggacgacaagaccagtagacccagaggccgaagccaagggagcctaggcctgagagcactagtcgcctacaggaccctcaacacgatgggccgcaccgagacctaggctacgacggccaggggtcggcatgacatagagacgtcaatgatggcgctgatgctcttcggcacccacgccgcccgccataaagagcgaacagggaagcctagacgcccaaggcacatacgaacaaacacaactttaccaaggtcgaacaccccagtgtaccacaacagagtagct

SEQ ID NO: 38103 - DNA, 290 bp, Zea Mays
cttcgatggcgcttaatgcaggagcaggcttgcctcgcccaactcctgaaggagatcctcgatgccccgtgcccgtaccacaaggagatgcgccataccttgcgtaactacagggaattcaagaactcagtcggtcatggccgaccattcaaacagttgttgccccccaccacgagaagaacctgctgaataagaacaaccacaacagtagggtgggtggtggtggttccttcccacgcatcgacgggaaggtcaatgtcatcttcgggggccatgggtcccagagagaa

SEQ ID NO: 38104 - DNA, 497 bp, Zea Mays
caaatcgctcggcattacctctaaaacgctgacgtcgccctcaagtcgctcggtagttgactctaaaactccgacatcgtattcggtcactcggcgtcacctataaaacgctgatgtcgtcttcaagtcgctcggcgttacctctaaaacgctgacgtcgctctcaagtcgctcggcgttacctctaaaatgctgacgtcgccctcaagtcgctcggcagttgactccaaaactccgacatagtgttaagtcgctcggcgttacctctaaaatgctgacgtcgctctcaagtcgctcggcgttacctcaacgctgacgtcaccctcaagtcgctcggcagttgactccaaaactccgacatagtgttaagtcgctcggcgctacctctaaaacgctgatgttgtcttcagtcgctcggcagttacctctaaaactccgacgtcgtctacaagttactcggcagctacctctaaaaacgtcgaaatgatgccagagtt

SEQ ID NO: 38105 - DNA, 365 bp, Zea Mays
gaggtccgggctatgtgtacagggatccgacactttcttgaggaggtccggacctactgatggtatcctggagtatatcacctcttctgtccacatggcgcccttgggactgcccacgtgttggggtcgggtgctgttcaccgtgtggctaaagatagccgcacgggcaccgtgtcttcatactgcagtaaggggtacccctgatttagggtaccgacagtggcccccgagcccgcctcaggggagggaacgagcctgcaggtggggccaaagtttgattggcgattggctcgctgcttctgcgcgcttgctgtcgcaattactgctgtttcaccctcggacgcgccaactgtcacgcatgtccc

SEQ ID NO: 38106 - DNA, 458 bp, Zea Mays
ggcaaaaatccccaaggcacagagacaagccgtgcaggacggcgggttgttttctgtatagttcaggggttctttagcaaagtgcacccgcgaaggggtatcacggatctagggccgttggatctaatctgaaggccgagattagatcgcgttttaaatgaaagggtacgtaaccgtgatccacggatcttagatcaacggccagcataccccacagcacctaaccctcggtttcgagatctgcggctacgattcactagaacgaaagggtatgagtggttctaatctccaccgctcgctcgcaatccgacggcgcgcgaacacccttccacctccgacgaccagggaaggtggagaagaggcccgcggtggcactccaccagcgcactgcgatttcggccaacctgacctccatctccaaattccttcgctcctcgcccaattgacgatgttatgaa

SEQ ID NO: 38107 - DNA, 603 bp, Zea Mays
gtggacacagatcacttgaaagaaggaagtaaacatcccaagtcggggaaggagaacacaccaagccacctttccgatacctccgccctcaaaggaggatgggaagaagaacttcgtcacaccggctccattctaccctgacgtcttcttcatccaagggatattgctgtcagcgcccatcttcagcgatgagcctaccatgcaaggggaggaacctccccagcatgatgcccagcgacaaagaaacagatgctgaaatgcgtggcgacaacatgaggccgaggaatgagactcggtgcagcccgtgtctcgggacgaagccttggaagtaggggaaactcccgacgaacgagtacatcgagaaatacgtaactcccgcctcttcggtcgtcgacaggctcaggatcgggagcgagagctagctgaacaagacattaggctccagcgagagaaccctctcctcgctcgaaacctgtaccccgatttcgctcgagaactaaacaccccgagtgaagttggagtactggcgcagatagccgacggccttccgtgaaccccagacacgaaaggttaccgacgacttcttacacaggtggccaatca

SEQ ID NO: 38108 - DNA, 541 bp, Zea Mays
cagtgatgcagagataagtgccatgcttgatatgttagctgaggattcttctgatgccgctcctgctgaaacattggtggcggtacccatccctgaggctgacaaagctttggacgctcagaagtctgtcaatgttcgtccaaaacgttctcgccgagccaatcaagcctcttttcctgcttaggggggagaaaaagaagaagagacgtcttcgtcgggtgtctagcttagatcagggtgcccgtccttctgctcctgttgctgaggaagtgttgtgacttaatttactgaagctgatcccaatgggtgtgactcgtctgacgctgaccccaatgggtgtgctgtccgtgttgttgatgaggatgatgaagaagaggacaaaatccctctgattcggaagaacaaccggcgttacatagctagtggggaaagtagtggtgttccttctcctaccttgtctgccctcgttggtctgcaagaattatctctggcgaactttgatcaaactcttgaagatatggttccagaagatctgttatca

SEQ ID NO: 38109 - DNA, 345 bp, Zea Mays
tagaggaaggacctcgagcaagaaccattggaggaaaggagcgcacgacaatgctaagagaagaggagagaggagggtagtagatttctaatgattgaaaaggtaagtccttaaataaaggggatggtttctataatctggaactccattttctcaaatccttatggcaaattttatttttgtgtgtgattcgattgcggtcaaatctgcatacttttgtgtaatatcagggactttttctgttttactgagttttatcttgttgaagtctgactgtatctatactcaaaatgatctttcatgtagtgctatcatacaacatagctctggtgtagttgaataatc

SEQ ID NO: 38110 - DNA, 489 bp, Zea Mays
cgcctcgggcggtccaccgctcagccagtgtaagcggtttggcggttcgccttcttcccctacagcactatataaacaaccgggttggtgaagagttaccacaacattcattatcatcgcactgttgtgctgtttaaaaatttttaaccatagccgaagctttctgcattgcattttcaaacaagcgcttcatcacttgagattagcttcgtcttaaagagcttgaacactaaaatggccagggtaagatctaatgctagggtgtctcgtgagggagacgagagtgaagcgaccgaaacaacaccaatatcagaagtgatgagacgatcaggtcttgttgcgtcagaggaggctattgccgaaggtgcctccaatgctgaagctgaacagattgtggctgaaggcgaaagtgataacgaaagtgaagaagacaacagtattctgagcccaatgaaacctagccacattgaatttgggaaatctactgtg

SEQ ID NO: 38111 - DNA, 429 bp, Zea Mays
tgggagaccactggctctctggtccaacatgggtgaggttgtttggatattagtttgttgtccccccattggtttgtgttttgtggcgcattactacttgccctatgcggctcataggactggccattccttttcggccttctaggcagggccagaaagtactcgccccatgagtttggaatgctatactatgttgctggtgcattgtatagtgtgatgggaagtttagctgaggtggatgcggatttggataacaatccacctcgaaaaactctatgtaggaccatccggttagatacacggagcatccggctgtgtgcgcggtctatccggccatatggccacaccgtctgttgttgtatgcagactgtccgtcgcagtatgcggacggtccgactgggtagtttagggtttgcgcagtatgtggcg

SEQ ID NO: 38112 - DNA, 326 bp, Zea Mays
gcgaaatacctatccaatttcaaggtggacaagcattagaaagtcatccagcaatgggagactgacatggcatcgtttcgacctactacgactacccctaatgtaagtaacacgaacgacatccaagctctttgatcttgcatagacgaacaacgcgaacaaatgcagcaagtattaggggtatgcaagaggattacaagaggctagcacatgtgttcgataaatatgatgttgctaatttttcatcgcacgatgttgggactaaagaaaacacacaagatgtatcagctgcaaatgggcatgccgaatcccagacactttatggg

SEQ ID NO: 38113 - DNA, 349 bp, Zea Mays
ccagctatatatccatgtgtgttagggtttacatgatgttgccatggacggacgatgatgaagcttggaccttggtccctgcgtctggggaagaagcctgcgcatgtggctgctgccatgtcctatcccccatgcatgcaatcacttgctaccagtgtggaggcagcttaataacttctctctcgaacctctctcaagtgtcggactgatgaagcatgcaggaaagatatatgatacaaaagatcagcttcaattctccctatctgatgcgctgctgttcttctctaatcccccctcagctgcttttgctatggcttcttcttcctggatggctatggcttcttccgac

SEQ ID NO: 38114 - DNA, 561 bp, Zea Mays
atcccaagtggtagggatttcagtgggatgtgtgttgcaatgttcgcgccaccaaatagaagcaaaatgggtaaactcactagtagcagctctaacttgatggtttgcaggaaaagcatgacatgcaaatttttgttcaacaacaagttcccactcaagatacgcgtcaggattatatgtaccattgaattcaggtatagtgagtttaatcttagaggaaaaatcattctggttacgtaccacacgacgaggtccgtgccagcgacgacgcgactgatcgtcgtactcggtgtcgccaccataatcagtgtcaccctgtagctaaccaagctgtcgggacaactcctccagccatgtcatgatggtgtcgagggtggtgttggtggtggcttgggctgttcgtaattcctggagcaccgtaccatctttgatttgtgttgtttcgagcgggccaaggcgctcattggtgatgtgaatgtcttcggcgaggccatcaagttgcaggcgcatttgtcgctcaaaatgttgtatgatgcccttggtacgaggggactttggaat

SEQ ID NO: 38115 - DNA, 352 bp, Zea Mays
acgactgaaggtggtggacatggtacagtactaaaaaatcttcagattcatccccctcgtcgtcggtgaccaccgcgcaaggattcgcggtgattcgtgcaggactcaggcaggatagtaccggggggaagatcggaagagaagtggatttggtcgcgtggtgaagcttatcacttgcgcctgtagccgagcgacgtggccggaccgccggtatcaccatggtactccgacgaccacaattatgccacgttgtggctctttactgcgtagtagtaactgtggcacgcctaggcctaccattttagaaccgctacaccgatgaacaccacgactgagccaccattaactttcc

SEQ ID NO: 38116 - DNA, 424 bp, Zea Mays
cccgtatatggcccagtgcaactgggccgacggaaccaggccaccaatatcagtaggcctccaattatgaattctccatatacacgtggtccatgtatgctggtccaggatatacttggcctccaaatttgtgcattacgattggaattctaggctttgtttcttccttccgtagttccgccaatctcgctagctgaaatgacgccgatctgggagtgcgccgccaccacaaacgctccatcgccagtcatcacgccatcgatgccgagctactatggggccgtgatctcgccgttgccgacgctttgaccgtttgccgcacctggacgttgcaaggtcgacgcaacaagccaatcgagactgcaggtatgtgatcaggaaacactccattgtttttttcctttgcttgcaaattgcaatcgat

SEQ ID NO: 38117 - DNA, 418 bp, Zea Mays
gcgagatcaacgaccaccacttcctcggccgaaacggtacactaggatttaatcccaaccgcacactaccggatcaatggcccacgtcccggctacaaccccgcgcccaccaacgtcgatcatgaggcggtgccgccctttcctcacggcggcaagctcgccggaataccgcccccgaagttctaagggtagaattcctactccgcctagttcaacaggaaggggacaacacggtgaaccaaatggttagtgacataccgaagttgggcgcacgtgtacatgatgcccaggtcgaggcggatccacggcggtgtcgtccctccggtgagcaattaaaccgccgctgatgacgctccgaacacaccccagctaccgcgagattccttgaacccgaccaagccccctcgcaccacgaaac

SEQ ID NO: 38118 - DNA, 407 bp, Zea Mays
gtgcctcagaagtggtggccgagtcattcgggatcatcttgtcgctttttggggtaacggccgagttattgttgacaacgtcggcgcttctgaagtagtgcccgagtgatagcggggccacttcggtgtttttaaaattaacaaccgagtggttactggtgacatcagcgttatagaggtaaccaccgagtgactgatggcaacgtcagcattttagaggtaacggccgagtgactgatggcggcgccagcgttttagaggtaacaaccgagtgactgacggcggcatcggcgttttagaggtaacagccgagttagaacgggccgcgtcgaccgttttggaaataacggccgagtgatgacatgacacgccagcgtttttaaaaataaccgccaggtgatgaccgg

SEQ ID NO: 38119 - DNA, 614 bp, Zea Mays
gggctcattcggccaattcggctgccgcggcgacggagcgcgcgatgggacggacggtggtgggcccatccgtgatccggcgaagcagtggttgcgcgactgagaacggagctgaggatggggttagggttcggcgggagggagagctggaaatgggtcacgaggactgctgtcgatttttgacgtgcgtagtcggtgaattggcgctaattctgcatcgtttcgtacttcacttggtataactgcgctgaatgcttttttctgtgtttagcttggcgtgtggttcacctgatagaaatgaaatctaacttgtggacttagggaatcatacagtagcttgcctctgtagtaacatgtacttgattctgaatgacaaataatttccgctgatgggactgaaacttagtatccatctacgtgcttgattaggacatggcttagaaaatgtcatctttcacctgagtagtcaatttgacttaccgtcgatgacaatttatgcaagacttggttcgctgagtaaagtaacccatgggattgtgaagaacataccgaggttcttcttggatacggggggattttaactatgattttagcattgtcaaacatggtccagg

SEQ ID NO: 38120 - DNA, 554 bp, Zea Mays
tcgcacagcatggatcataagtatctttagtatgtacttagaaaaggaaacacatggcaagttagatgacagtagaagggggaaaataatgaaaagaacatgttagctattagctgcaagaagtggagaacaattagggcatgtttggaccacagctaaaaattgagccattttgcaagacgatactgtagactgcccccgccaaatacataggaggtgagcaaatgttgtatgttctcctcttcttgatcatacaatggacaactctcatgatgctcaagtccccagtgagctaacctgactgcagtccaacactgatttagagcagctaaccaaatgaaaaacttgcattggaggtgcagtccaaaacttctagatttctttccatgggtcaaaatcaacagccccgagcccccgacaaagaaactacaataagcagatttggttgagaattctcctataatggatggtgatcaaatgtgccagtaggtcgtgtattcccgggtgaagatcaatttctgctataatatcccttagatcgatggaggtattcc

SEQ ID NO: 38121 - DNA, 360 bp, Zea Mays
gtcttcggcagggtgatcctctctccccaatgcttttcatcctggttatggatgttttgtgctacctaacaaaaaaggcagccgctgtgggattgttggagccgttatcaggaaattcagaccactcccgtatatctctttatgctgatgatgtggtaatcttccttcacccggtggcatctgatgttatgaccaccatggatatccttaggatttttggagaggcttctgggcttaaaacaaatatggcaaagagcagcgtcttccccatccggtgtgctgctgaaaatctggatatcattcacagcttgctgccttgcaccgttgccagcttcccctgcaagtatttaggggtacctc

SEQ ID NO: 38122 - DNA, 682 bp, Zea Mays
ggggtaccgtcggtgcgcttagaatcgctcgcctgtgttcttcttccgccgcgtcgcgtggacaactgcctctgcaccatcaatcgccgtcgggtaactactctacttgccaagctttgtcttcgctacgtgtattccggtttagatcgaagctttaggcgcgggatcaggtaatgggggattccggcgatggcgctccgccgtgggggccctggtcttccctccggccgtggtctgggggtaggagacgttgtagccaccgttacctgttagatgtgcggctcagattggaaaccagttatcgattcggacgcgttcgcctgagacattcgattagtgatccgagggtagggatcagatctgggcattgtaaaaccctagccgttgatctatcaacatatgcccaggatcagagggggaaatacatcgtttcatttaattaaatcagcatcgttgattcccaatccaacgcatagcatcgcataccgattcgggtgtgggcttgatataatcagaaccctcggttgtcgatcggacggctctgaacgaaggataccccttcaaccctgtaaaactgcaaaagagaccctatgctattttagattcaacccgacgtccatttgtggggcgctctgtgtcttagagatttttaccttgagaccccagagttcctctagttttc

SEQ ID NO: 38123 - DNA, 357 bp, Zea Mays
ggcgttgcagagcccgaacgccatcacgaggaactcgtacaagccatcgtgtgtgcggaacgcggtcttgtgcacgtcttctggccgcatccggacctggtgatagcccgaccgtagatccagtttggtgaagaatttggcgccgtggagctcgtcgagaagctcctccacgaccgggatggggaacgcgtctttgatggtgagggcgttcagggcccggtagtcgacgcagaagcgccacgagccatcgggcttcttgaccaggagcacgggcgatgagaatggggagtcgctgcgtcgcacgatcccctggtcaatcatggcgttgcactgccgctccagctcgtccttgtgggc

SEQ ID NO: 38124 - DNA, 643 bp, Zea Mays
cggccgattgaggcgatgaccggcgtcgagactaagactaacccaaattcatgaccaggggagtattttccccaaactaattgcatctaagactaactatggagctctagccacggtgaccgaaagcatggcggttagcttgacgtgttcccagcgattaatggactcctagttcaattcagtggctcggcaagcatcgtaggcttaagggaaaacttgaacgaggaagaggaagaggtgaactgaccgggagaggggctagccgcggtgaggcgagttcacggtggcggaaacagttttggggagaaatccaaattcgagctctcggaggcacgactgctaacaattgctgggggctgggtgggtgatgatgctatgcagctaggggagggctcaatttataggcagcttcgacggtggccgggaattttaacagcgacgtgtggcggtcggagataagtaaaaaccggggcacggtgatttcgtgtccattgccgtggcaggctccccggcgacgatgggacagccttgaggtgtcacggcggtgctgcagagaggctaggccacgcggcgcacggccgggaggcggcgttcaccggcgttcttatcgatctccgccacggtgacgcatgtacggtggccg

SEQ ID NO: 38125 - DNA, 501 bp, Zea Mays
ttcaacgtcaccatcagagatgctacctgggcggaatttgaagcggctttccgggagcaccatgtgccccaaggacttgtacagcttaaggaggacgagttccgagaattgactcaagacggaagatctgtcagcgaatatgtgcacaagttcacagagttagcccgctacgcgccagatgatgtcagtaccgagggcaagaagatggcccgtttcttgaagggactcaggccagaactcaagacaattttggctagccaagacttcctcaatttctctcacctttccaacaaggccatgcaagttgaaagggcaaaggaggaagaaaaagggcatctcaaaagaaagttccaggttctccgggtacagcagcaggaccggcaccagaagacttgatcatttgggtttccacccaaggggccaaacttcagtagaccagctggacccaccccgtcatgattcagccagcagagtcagagctctttccattccccctcagtg

SEQ ID NO: 38126 - DNA, 309 bp, Zea Mays
ggcggcagccgcctcacggcttggcgccacgtgccctggcacctccaccgcgtcaccgtgacccgctgtaatcctctgtccatccccggggagatggccacggtaacccgacactaatcgcgcgccagtaactccttgtccctccggccgccgcgcgtcgtcgctcaaattcccggccaccgctcatgcttactataaattgaagccaccatgagctccgtaggatcatcacgcacccagcaaccgagtattgctctcaatcgatcaccagtgagctccaattttgaacttcccccaattcggtttttg

SEQ ID NO: 38127 - DNA, 819 bp, Zea Mays
gattctgtctccatccagtatacagttttattgctagccacctgctcacaccatcatcagtcaacagtaagagctctgagcaaaccaaacaacgaataatgtatagataatgcgtccagattgccaactgctcagatgatttttttttagcataacctatacccgggttaaagttctcgtgattcaggaaaaataaaacaaaaactggcgaccggattatattaagtccaattgtatgtttcattcaaggcttttcacgagaggccactatacctggtcagattctgtctcacagagtcacagtatacaccattagccatcacttgtcagtaagagctctgagcaaccatggcggagatagtcaccggggcgatgggcactctcctgcccaagctggccaacctcatcaaggaggagtataacctacagaagaaagtgaggggtgagatcatgttcctggagactgagctcaagagcatggaggctgctctcatcaaggtctccgaggcacccatcgaccacccacctgacgtccaagtcaagctctggacaagggaggtgagagagctgtcctacgacctcgaggacagcatcgacagattcatggtgcgagttggcgatggcaagccacatagtttcaagggattcattgatagaagcctccacctgctgacaaggggcaggattcaacacagcatcggcatagacatcaaggagatcaggagccgcataaaggatgtgagtgaacggcgtgacaggtacaaggttgatctggttccttccaagcctgttggcagaagcattgacaacctgcggctg

SEQ ID NO: 38128 - DNA, 300 bp, Zea Mays
gtgaaggcatacgaacgggcagggatggtggccgaggttgaagggatgttgcggtcgatggtcaccgagggcgcagtggcacccaatggggtgactctggcggttgtgctcacagcttgcagggacgctggcaatttggtgcttgggaggtgggtggaggagtgggtgaggtctgcggggatggaggtggactcgctcattgggtcagcacttgtggggatgtatgagaagtgtggagagatggcagaggcacggcgtgtgtttgatggcatcagacacaaggatgtcgtggcatggaat

SEQ ID NO: 38129 - DNA, 276 bp, Zea Mays
gcctgatcgatgctatgatccaggaacaccaccgtatcatctgcatattgaaggatagacaaacctccttcaatcaagtgtggtacgatcccaacgaattggttctcctctttcgctctagcaaagagcactgccaacatatcagcaacaatgttgaacagtatcggtgagagaggatccccttgtcgaaggcccttgtgagtcgaaaaaagggtcctatgtcatcattaactcgaacccccacatgacctcccgagatgatattttggatccatg

SEQ ID NO: 38130 - DNA, 499 bp, Zea Mays
ctgcactgaaacttgacccctgtaatcccccctgtgacacttgtggtgttacggttatttgtggtgtcactggtgtgtgaggtgagggtggagaattttgtgcaccccctgaatcttcaacacttccacctgaaacacctggcggctgcaacacctgaccaggcacaatgtactgaaactggaattcacaaggaccagattctgtctcagcttgctgaacattttcatcactgtcccaattccaccccacttcttcttcaaacacaacatctctgctgatatacagtctcccagctgaaggatcatacatcttctgtagtgatgccaatgcctgatcctttgtgttgaacagatctacccacatatacatgctgtaatcatctactacaagcaggaaataggattttgcaccaactgtctttggtctgatctgcccacacaaatctgcatgaaacaaatctagtcccttttgagctgtccccttagtacttgcagaaac

SEQ ID NO: 38131 - DNA, 303 bp, Zea Mays
cttcttctgcgaaagaaactgcctcagccgctcctagtgagccggcgccgaagaggaaaagggtaaaggttcttacacaccggccacgttacatcgaactagccacagtgcctgatttcgccggtgaaacctcttcggcccccgaagctaaggaatcaactctgctgccatgagccgaagagctggccgaagtgccagtaacagaaaaaatggaagaaccaaggaccgaaaaagcaaaaacatcagaagttttggtgccgaaaggtccaatcgtaaccccaaaaagaaaaagaatggttaatg

SEQ ID NO: 38132 - DNA, 444 bp, Zea Mays
gtcaattcggtgggtggcgcgaggacttggatcccaccggcagatgggatcttggagagtggagaggacccgtgcagttgaatttcatggccaaatgatcgatttttttcttcctccacgagtcacgtggtttcgtatgatgaagctccgtacctgttgtttgggtggtttggttccttttctagctggtctttgttagattcggatttggaattgggtttcctggacggaatgagacaccggagtggcgtcctggccgcattgggttttgtcgatttctatgggttgctgcttaaagttaatgctggtcctgtggcttaattagtgcttaatgctggtcctgtggggagggatttgcaattttacctctcggagagcgttgggcttcgttaatttgccattgggaccctaaatcataggtactagttgcaattatctatctct

SEQ ID NO: 38133 - DNA, 391 bp, Zea Mays
gcgagctcacctgcaccgtttaaaaaccgcgatcctcatccgtcgccggccagccgcattccggccttgtgccacgtatctccaccgcatcgccgtaagccttagagactctccgttgatcgccggaatgaccgccacggtaggagccacgaatccattgcgccagtactcttcttcctcctccggccgccagcacaacctgctcgaattgaccgccgccgctgtcgctccctataaattgagccccccactagttccgtaaagtcctaagctaaccagccacctcgaattagccccgatcgttcgctgaggtccgcgaattcggagtttcccccaaatcattttccgccgccgtgaaacccaccccaccgtggccagaccactctggtaa

SEQ ID NO: 38134 - DNA, 396 bp, Zea Mays
ccgccggcgactcctccgcgtcaagattcacaccgctgccgttgcgattcacgtcgccggtgaccagataagaccgctcggtaaagccatgcgctggacggcactccggtgaacccccctagtacttcccctctgtcgtgcggcttgagcagataagcccgccggggatcaccgtcgctcggccttacgccacatatccgagcacctctgtcgcgtcactgtgactctttacagctgttaaatcatcgccggtgagctcaccacgactgaggacacgaacccacgacgccagggtcctttcttgtcttcggctgcccgcgttgttcgatcaaattgagcgccaccgtcgaagcctcctataaattgagcccccggttagctgcgctacctcatcgc

SEQ ID NO: 38135 - DNA, 324 bp, Zea Mays
tgggatgtttcgcatcgaagcattgccactaggtagcattggctgggtgtccaatcttaccattaccaaccttgtgttcatcttcccaccatgtcataagtgcaacatccttagggtttaggaacatacgcctcaagcgatcgatgactagtaggtaccacattactaagtcaggaattcttctatgctttgcatcattgcctaatggagtgtcctcttggggttaagaatcttgtaccacctttttacacccttctttctcttgttccatgtggaggctccatcctagttgtaaaggtcattgttcttgtaccgactagtgcc

SEQ ID NO: 38136 - DNA, 487 bp, Zea Mays
gcagtctcttggattacagcagccacgggttggatgacactactgggtggtccctgccgccgcgcgggtccacgtgcagccgctgtagggagaggagcggatgggcgcgtagccgtcgtccacacgctgtcattcgtctccatcgttcctatgcgtcagcagttccaggcatggccgaaacagcgccacgctctgtgcggtacgacggtgagtactttcatcactttaatatttcctctccctggctcctggccatcttatttagccctgcactgagagtttgtcgacttcgtcttcctcgctgctcatcacttcggttttgccacccaccgtcgccatgggagcatttggtgtgctgctgttgcccgccacgacctacgcattgtgagcggcttcgtaaacccaggtctgcagtaccatcacttgcctttgcagactccccgttgttctcgccttttcccccttctatgcatgtggctgtgtttac

SEQ ID NO: 38137 - DNA, 312 bp, Zea Mays
agcgagttgtttgtatggttaagctcctagggcgctcgctagaagcctagaagcgagttgtttgtatggcaaaactcgatgttggaggagttcacaacctcacatgttgtcagctggactgtgagttgcccttcacctctaatgaccgcttctctggatgatggcccctcttggaggccatttgcacgtgcacctacgctcctccaaccccgttgtttgactcaacgggcaatgggttcaccaccatcatcgcccgagcaggggcatgcacatgtaatgccaccgtgggtggagttggccaccctcttgggc

SEQ ID NO: 38138 - DNA, 540 bp, Zea Mays
gcgcaagatcagcaaccatgatacggcgttgccaccatggtgtgtgtaagagggttgaaacccaaacctaaacaggttgactcactaactaattgggataaacccattgctaactaaccaggggtaaggatgactccttgttattctcatctactaactgaaacaaactagcaacagctaacctcttgtccccctctctagtcatggttgtgtcgctggaactggagtctaaagaaagagtctacaacatttcacccccttgtcgacaaagagctcacccatgagctctactgctggaactggaaaatgcctcttaaagtccacggcctgctcccatgttgtgtcagtaccatagacagcaccggcagtggctgcagcaagccagcagggtggaggtgccctgacctgtgttgctggcaggttgtacagccgcatacaaactcgtggactaaacgaagagtatgtgggctatagaaggacgccctccaacggttcaccatcttttcaatagtcaataccctcatgattggtgtcatgggc

SEQ ID NO: 38139 - DNA, 685 bp, Zea Mays
gcccgtcagtagcccccgagcctttgtgcaacttcttggagttgctcgaaggctttcttcttaggaactagagtttcgggtgcgcgcgagcacatctgttagatgtagcccctgaacccccgagtaatccatgaggattacttgggggtttatctagtttgattgtagttttgggacgggcccttttgcgatggttggcgtagtgccttgtttgcgccaagtgtatgcccagtttgtgctggagctgggggtagtccttggaccggactcctaataaacttcaaatgttgcactttgaacaatgcttcgtgatttcataatgttgaactttttgtgttttgatcgaagactgtgtcctcatctcttttcttacagccctgctagaaagtcctcatgatcgatcgtctcaattcatcgtatccacaaccgctggggcgtagatgtatctcgatacgaatctggacaccggggcactttaaggaaagaacatggtcatgggatagagggtgagcctgagagtgtaacgtggtgcccattccctgccccaaccaaaacttggtgacttggtcttggtcgacaggttttgcttgtgcatgaaaagaaaggagcaaaaaaagtagcaagggtagaatttccttagttgttcaatgttctaggtgttgaataggaggttgctgctattgtc

SEQ ID NO: 38140 - DNA, 396 bp, Zea Mays
gtcggtggggccgaacagccatcgccggcatgcccgccgccgtgagggccaacggcgccgttctgctcgccgtcgtgcgaggacatggcatggtggccgttggatactaatctacggtagagattagatgtgggcttactcgttgggagattaggtctgtgccgtcgattctcagatgggtggccacgatctgatcaggcgttcctttcacctaattgaatcgtggccgtgtgtcgtggatcggatggatccagggtgatctcggcttctttaaatccgtgcccttgatcttagatccaagggttgctgctgcgtactgtttcaatattagggcatatctaatcagggccgttgagttccgatctgatgatcgagatctgtgcataacccttcgcc

SEQ ID NO: 38141 - DNA, 273 bp, Zea Mays
taagcacttggtccttgttgtcgatgacgaatgtcggcttgcaccactgctcgccaccgtgcaacctaccgatcacctcctcgacgaagatgttattgatatcgagtagggtctggacggaaatcgccacctgagcaaaatgctctggcacgacctgcagagccttccgcactacctcatgttctcaacatcaatgacgttattttcaggtagatgcagatcatcagcaagcccgatgatatagttcacaaaatctttcaccttctccacctc

SEQ ID NO: 38142 - DNA, 333 bp, Zea Mays
ggtcctcctgctgtctcgactacgcggggtcgtaggcatgggtgccgctgctggctcaactgcacggacgttgctcggagacgaggacacccatgcgcgccgatggatagcgggtgaacagcaaaacactatatttagcggtggccggacagacgctatattttagcggatcgtttaccgtttcttgttggagccgtagcgagcgacgaaaaatgctatatatagggtagcggacgctttagcgtctcttgctggagacaacctaagttctggacaatggtacttcatatcgtgtcaccttcctagattaaaaaaaagaacagtgaagtccac

SEQ ID NO: 38143 - DNA, 371 bp, Zea Mays
caaaggttgagattgacgaagccgccgaagcatgccaaaaggctttcggtactgtctgcttttttattggtacaaaagatttgatccaggagcatatagcctttagagtttggccacttgtagagaactgggaaatgccgaaggagactgttaccaagtctggcgaaggtgagctggttcgactgaaatacaccttcagatacggagctaaatttgatgaaccgaattatgactggctgaaatgtatcgaagctacaagtgatgaactacttgggtcgtattccaaagcggaagataatgccttatccacatccttcgggggccagggaaaaaagagattaaatagagtttttgatgtcattggttttgtt

SEQ ID NO: 38144 - DNA, 360 bp, Zea Mays
cgattgtcaagttcgcatgggtgttgtactagatcaagagaaggagaaatataaagttgctgatctagttttggaacacaatcacatccttcagttgctagaaacgtcgcatttgatggtgtctcaaaggaaaatttcagagttacaaggttttgaaattgagacagccgatgatgcgggaattgggcccaaagcggcacatgagttggctagtatccaagttggtggttcaattaatcttagttacacccttcgtgaccacaagaattatttacggggcaaacgccaacgagagatggcatatggtcaagcaggaagcatgctcatgtattttcaaaacaaaattgctgataacccatc

SEQ ID NO: 38145 - DNA, 363 bp, Zea Mays
ctgcatcgggggggaagataaggatcagcccctcgccggcgataaggatgccaccgtggctcgggataggtcgtcggcggccgcggtaaaggtcctcgtcgacgtggcagagagttactgaggtggcaagccctggttaatcgacggccaccgtgccatcaccagaatctgctgcgcggtaagcttgctagcgcaatctgaaatccgcgatcctcatccaattccggtcgacggcttataaattgcgcccgagttctgcttcttcaccacatcccgcacctcagtgactgagcaatcgactcaatttcattggagcactcccgcagcccccaaatcccctttctccctgttcttaactccgcc

SEQ ID NO: 38146 - DNA, 439 bp, Zea Mays
ctggagaagagcagaccctccgctggcagtaaaatctgtgataggctcattggcagatcgacgagcctccgcccggtggagaaccaaccctcggataatgggagcgttggcagaggggaggtcaatctcatcatccttgcctccatcatcatcacatgttggctcccatgcctgtggattttccgtgggtcgagaccgatcggggggattccgggccgtccgaccgcgagctccatgagaccctgaggcctcaccaccttgcattacgtttccggatcctcgcccgcgcttggatctggaccgcatgggagtttcttcatgaatttcttgatcatcatcggagtcggattcaacaactcatgcgagcggttcaactacaacgaacaataccaaactactaaactcaaacaatgttcgagacaaaagaagatagtctaag

SEQ ID NO: 38147 - DNA, 472 bp, Zea Mays
ggaaaagactccaagctttgtcagggagagaacataatgaagatgatcctaccgtaatctacatggccggatatctccacacccttgacacccactttgatgaccttttctcccattgcacccacctaaactcccgggtggaaagcctagagcagcggatcaaagaattgaaggaacaaaatgcaactcttcaaaacagtctcgagatggtagaaggcgaggaagccaacactcgtgaggcatactggaccctgaagatggactatgccaggagaatgaagaggttcgccctagtcaagaagattcggaagcgtttcaaaagccaaggatgccagactgacccgaaggaagaatccctgcccgcactaccttccctagggatagaaaacctttctaacgtcgaggaagtgtccctggctagccttgatgatcttctcagggagtttggggacactttagtaggaaacgcttg

SEQ ID NO: 38148 - DNA, 370 bp, Zea Mays
gaaaatgcagaactccactgtattgggatcaaactggtgaaaggcagttctttgggcctgaaattatacaagaggcagaagaacaagtgcgaatgataagggagaatttgagaactgcacaatcaaggcagaaaagctatgctgatacccggaggagactactagagtttaaggagggtgatcacatgtatcttaaggtgtcaccgatccagagtatgaggagatttaaagtcaaagggaagttgtcccctcgctttattggacctttcttgatcttaaagcgagtgggagaggttgcctatcaactggaactacccgatcatcttgcggatgtacatgatgtcttccatatatcataattgaagaagtg

SEQ ID NO: 38149 - DNA, 409 bp, Zea Mays
taattctaagacatagagaacagccagcctggaccgcgggttgataaatagtttactagggtttcttttgcaattatagctcggcgaaggggtacgggctaacgtgagccaccagatcaaatacgaacgaccaagattatattgtggaagcaatggcctagaacgcaatccatgctgtcggatctagaacctatggctaagatcttatgaagccttgatctcatccaggccgaacgattattgatcaacgccttagaacaccccgctggaacgctgcgccaggactcacatctcagccctccgccactaatccaacggcacagagcccatcttcctccctgcctccgcggcgaatgacggggaaccgcgccgcggtgccaaactgtactccggcgagaacaactccgac

SEQ ID NO: 38150 - DNA, 347 bp, Zea Mays
atcgtgaaaccatcatgacatcaagctagcaagcaacaatagccatcattttgttcactccgtgaagacaacggctgatgggccccacctcatcagactctcctgttcaccttctccgatcgcaacagcgcgttatctcccacacgagctccgtaactaaatcaacgaattcaccgcgaggctgcagatccaattccttgatccgcgctcggactctatccgttcctggggtataaaaacacttccgtcggccctaccttgccccatcatccatggagcgcagaggacatcagagcgagagagaaaaggaaaatttgtcgtcgtcgtactcacgacggggtgtcgct

SEQ ID NO: 38151 - DNA, 416 bp, Zea Mays
gtttgtacgatgaagttgtgtgccctcgcgtgcatgtgcctgcgaggacgttgtgtatctttgtctggtatggttggttatgctgtgctgttgtgattatagtcgttcttagcacggatggtttgatgctatcgtttctgcttttgttgtactggttcggctgcgcccttaggcggcttctgcgcggagtctttgcgatagacttcgggttttttcgcacttgttgtgctagtccggctgcacctttaggcgacttctgcgcggagtctttgcgatagacttcgggttttttttcgcacttgttgtgcttagtccggctacacccttaggcgacttctgcgcggatagtcttcgcgatagacattggattttttcgcacttgttgtgcttagtccggctgcacccttaggcgactt

SEQ ID NO: 38152 - DNA, 329 bp, Zea Mays
caggagtgaaagttacagaagtcggatacatgattcagaacactaagcgctagggatacaaatggtcaaaatacagggcaccagcttctgccatcaagcccacaaagtttcatcctggggctctataggcgtgcttcttctttgcatcgttggcggagaatgtgcagggaggagggtgcacccctgaagacgatgttgtttctagtcatcgccacgattctttgccaaaacaagcctaaggtgtaacaatttgctcaccacacacatggcaagttttgccaaatatgtctatggactatggaggggtaagaaatattgtaccaaatcac

SEQ ID NO: 38153 - DNA, 543 bp, Zea Mays
ggcgagcaatagcagtcacaccggtcggccgtgcgctcagcggcacccaggacacgattagtgccctcggataagcgtccctgaaggctcaaggggcgcccggcgagcgtaggggaggagaactagaacggcgacccgcgaccttgccagctgtgccccgcactccccggtagaattgtgttgaggtttctctgagttggcgcaatgaacgagggccagcggggatcccgtttttatggtctgggcgagggtaagttgtccagttcggcctccgattccggcgcgatgccgttggagatcgccgcgggttctgtttcagtgcggaagaaaggtgcggacatggtggacccacgtggcagtgacaagcttgcactcgagatcggccgttccacgcgtgaggggaagtgactagaaggtgggcccacacgtcctcgtcccccggctgaccctatggtcccacatgtcggcgccaatgcaacagatgggctgcggactaggataggtagtggcccggtttcttagtttgggcccatgcggcgtgtt

SEQ ID NO: 38154 - DNA, 317 bp, Zea Mays
ccgggatatagggttaactgtaagaagggtttctgaaagatcaaggaaatcagcaagcacccctacagttattgcgccctgatatcagccatccatttgttgtcctcaatagcatcatgaacagtcctacatttcctgatctgcttggggatagcaacaagcagtctaggagcgaagtctgatatcctttttccatgaatccattggtcttgccaaaacagagttgaagatccattcccaatatcagagaaggcggccctagctttttctgctagctgtataggcaggaaggcccatggcttattaggatctgtttt

SEQ ID NO: 38155 - DNA, 774 bp, Zea Mays
gtcgatcagccaaaatgactgacaactcgtccgacttgaaaacaatgatagtaattaccattgttgttgatctttgcagtcatatggggttgtgtccgatcatccccttccccagcgtcacccatagtatcctcagtagcagtagccttgttccttgaaatggatgcttcaaattgccggtttcgacgggctaagatagcttgtctttcaccacgtggcacatgttgtttatgtcttagtggtctagtagacatatgaagtgaatcagcatcctcagtatgtgttgaagctggcaggaacgggttactggcgatttcagggataacccagtcgcagggggtaactgtggatccatcaggttcaattgcatttgttgcagggtgtacaacctcaggggtatatgttggggactccatggcgatggactcctgactcaatgtgtcagccaacaatgctctacgttttcttatgtactctatctttgaccctttccgctttggtgtattattatacaacctaacgcgttcacgcctaaactccctctcggtgggagttaagtttttgtaccgctctctaaagtaggcggccctttccaaattatggttaggcgtgttaccaacagtttcttgcacaccacctagaataaggcatgtatacgttaaaccacctgaaatcagctattttgcaaaattagttgagtgaatagtcatgtacctggtgttagtaggtctctagttgtgaaaacatcgtctgccttgaatgtctcgttcctat

SEQ ID NO: 38156 - DNA, 315 bp, Zea Mays
tatggttgagatattgccggctaagatctataggcagttaatagaaatagatcaattgtaaccatgtaaaacttatcctttcctagaatagatctaaagctggccatactcatctatatatatgtaactcgcgccttgtttttgtgccaccagaaatatcaaacacgaagccgtcgtgatctctggagcggagaccgacgttccacctatttccatcgcgcctctgatttctacatggtaccagagcctagggttaatcatcctagcaatggcgtcctcaaactcgtcatcgaatcctctccttggtgttcaagt

SEQ ID NO: 38157 - DNA, 799 bp, Zea Mays
tccgtctagcctgagccaggctcaggcagataagacaagggcgaggtcgccgccgctcgctccacctcgtctgagatcgctgccactcagtccgtttagcctgagccaggctcaggcagataagacatgagtgcccaaaaacaggcaagggacagacgcatttaatgcgtgtgccaacccacacagcgacagtggagcacagtgactgacaaaacagcgatcacgtctggtgcaacagcatgattacgtctatgccacagtgtgcgcatgccgcctaccaccctctgatgggacgctaaatacgacaagacgagcggactggcctttgggtgcaatctctccgcctcgcctgaccccgggtccagccttcgagcgatttttctgcttcacccgacgtcaagaccaaacctcgagtgaattctccgcctcgcccgagcttggcctcggccaccaactacaccgcgaatcctgcgaatcccgcccggctgtagcgcacgtcaagggacggcttggctaacacctcggtaagacttccgcctcaaccaagcagaggctctgatctcgataagcgtagcagagaatctcgacgtcatcacgagccaggacactgacgcaccccgtaagcagcttttggcccataccccggcgctgttacaacaactacggcatgggcgacctctctcttggggacacgggcgcacgaacaaccccttggtctctgcattggctctctacgagaaatcagtaggcacgaatcaacaacacagttcgccgtcacatcggcctgcagacgacaggg

SEQ ID NO: 38158 - DNA, 302 bp, Zea Mays
gtctttcttagatgcttattctggtttccatcaaatccagatgtttagggaggataggaagcataccgcttttgtaacagtggatgggctttattgctatgtcgtaatgccttacggtctgaaaaacgccttgcctacatttgtgcgggcgatgagtaagactttcggggacctgatcagggacaaggtggaagtatatgtcgatgacatcgtagtcaagaccaagagagggtcgaccctagtggaagacttggccctggtcttcgacaggctgcgggcaacccgcacaaagctgaacccgg

SEQ ID NO: 38159 - DNA, 539 bp, Zea Mays
gggaaatgggaattggctttggagttggacggggagtctgtgagtctagtgtaccctgggtgacctgaaattcggctcgtcttttgctttttgactccttgagatggggtggagtccaatgtaatgtaaacaaactaagctgaagtggcacaatgatgttcaattcattctttgtcaatgcaaattaattttctgaagagcttctcccgcatatgcaacgaacgcctggtaccagcaattgcagcttgctgaaaggagaaaactatacaagtcatcaactagagtcattgctttccctggttctgtctctcacagtagtaaaatatgcttgacagagttgccgtatgcagataatttggaatatcgaggatctttcacatacagttagtgtggcgttaggagtcatccccttccctcaggaaaaaaagactgccctaactatttatggtcctagaagaggaaagccctagatacctgtgggtagcatacaaggttttatggtcctagtgattcctgaatctcacctaaaggaaagccca

SEQ ID NO: 38160 - DNA, 401 bp, Zea Mays
gtgttttcgatgcttaatttagcagtggaatgggtcataatctctggtctggtgtacaagctgagaacctgacgagtcgtaacgcacagtagttgtaaatgagttgtgccgctgctcgctgtgtttcttttgcagaggacggcggttgtgatttgttcgtcgtggtatgtgatgggtaactttacggggttgagtgttttcttggtgaggttatggttttagcgttgtgctttaggacgccgagtggatatttgcgttactattcctgctgctgagctatgttgctttagtttctggacatgaacctatatgtttcttgcagacgtgagtctctgatattggttcctggaggcttattgcttccctttgattggaagaactggatcctgtgaactcttaac

SEQ ID NO: 38161 - DNA, 1010 bp, Zea Mays
gttgccagcctcgtgtgctggcccgagtcaccgagctccagcggcctggtccttggcaccttggacctaggcctactagggctttgcttcatcggctggccctaggttttggtactgctgtagccttcggacctcaaccgaccgttgatcgtccctccctcgacgttgtcgctactcattccaccctctctacaatgcttgcggctgccaaggctgcgattattgttgcccacgactgtgagcacgctgtggcccttgcctaggagcaggagcgtgctactgcggatgcgctcgctctatagctcgtggacgtcgagcaccaccttgacccactcttggagtactaggtggttgacccccctttggcgtatgaggctgccgtcatcaccaacctcatatgcagacgatggtgttcagaacatccgatctctggttcccgttctcttcgacccatcttcctcctatgcctgttggcgcgacctcatccttttcaccctgcaacgctacgccctcaacgaccttgttctctctgacatggtatcccccactatcccctcctagtaccgcatggatagcgtggtcctctcctgaatcctcaggactatcaccatcgagctacggtggcactgcccaccagggccgggttgccattgagtagttgttccttggcaaccatgaggcttatgccctccacctcgatgtcgccttccggaccttcgtgcaggatgatctcaacatcatcgaatattatcgccagatgaagggcatggcagacttcatccttgatcttggagagcctgtctccaatcgcacactcgccctcaaccttctctggggcctcaacaagcgctacaatcacctacggaccttgatcactcgatcgaccctgttcctgtccttccacacgaactgcaatgacgtcatcctcgagaaggtcactaaggggactcagcttcgctccgacacgaccactgcactcttaagctccaactcgtggggtagcccacgcg

SEQ ID NO: 38162 - DNA, 291 bp, Zea Mays
aaaatcatgaaccgagaacagatacgcaacacgaagattgaatttttgcttcttgaagcagtcataggcttccactccttgccatagcttctttaactcttcaatcagtggttgaagcatcacattgaggcatacgccaggatgctcaggcctaggcataacaagacatagaaacataaactcatatttcatgcaaagagcaggtggaaggttgtacggtatggcaatgataggccaacatgaatacgacgcaacggtcatattgaatggtgtgaaaccatcagttgccaa

SEQ ID NO: 38163 - DNA, 378 bp, Zea Mays
cacaattcaaggcatatgtgaagctacatacctgtatacaaagaatggcagctaatctagccttcgaactccggaagcggtctccactttttgcataaccatcactatcactcaggtctgagtctgatgagctcatatcataccaagaatactcactatctgaattttgaccttccagtgaatcattctctcttctctccttgttcctcaaatgaggtggtctatatcgtccacgtgaagctctgggttttgaatctgttctagtttcttttggagctagtgtaggaggtgaagatgacctcagcccatatacgaaaaatatctgcagatttgctacaaaccctgcaaccttgaagttttatggacattgttacaatc

SEQ ID NO: 38164 - DNA, 296 bp, Zea Mays
cggcgaagaccgatgcccgggttaagcaccacggggggcacagatatatcaggtggtgcagttgggcacacctgacgtgctaaaccctcaacggtaactcagacggataggcgaagagaactccggatatgtagggatatagtatgtgataaagaagaagataagcagtaggaactcacaccatgtaatgggataactatctctggtcctatatataagaccgagagggacccctaccatttcatttcaccttatcccaccttacccacaactctcagcttgtaaccctcatatca

SEQ ID NO: 38165 - DNA, 418 bp, Zea Mays
gtagttgaggtcatgatacttccgagagctcttggtccgcataaatcaacggtactatgctacaagtaataaggactagccaactatagacccgggtcacacttataacattagcaaaatcagtcagcgcaggagaaggaggaggttggccttgcctcccaccaaccaactgcatggacagccagtctgacaacggaacatccagctgcagcaatagcacggagttgtagtacgaaacatggtaaggtaggatctatgcggcaccacggtttttcgattgaatgaagtgatcccactgcagtaagcaatactgcataaatagattcgcagtggagcgcccacccaacaaccagtatgcagcagaagcagaagtaaagggtttgtggggggagcattagctgcgccctgctccaagtag

SEQ ID NO: 38166 - DNA, 367 bp, Zea Mays
ggctgaatgaacagacctttaaaggccggggagcaagtgagcgatttcgctcgccagatggacggtttctctagaaataacttaattgtactgtaggtagcgatacggcactagcaaattctgaagatttccatggcctgccgtctgaagaaagcgtgtgccacaacacgtattgctcatgccgcccacccgcctgtcgagaaagaaacgcgcgaccaccaccagacgcattttgtttctgaacgagttcagttcacttgacaagacgtgacgcctcacaatgggcctctgcaacaactgcaggctcgctgtgaaaacagcattagggcatcagaggatcgtcccatggtacaagccaatagtcaag

SEQ ID NO: 38167 - DNA, 366 bp, Zea Mays
aaagaataaagccaatcacttacaatcacaatagtctgcctaagaggagacatttcctatgttcaataaaggtgggtaccgactgaatggaatgcaccattgttttgttttcctttttttaaacaagcactctttctttctttcttggtggcggaaaccgaagttttctatcattctgatagtgcctaccatataggatacaacatcctttcaaatgtggcattggatccaacgccactgtttatgtctacgtacacatcagtctaacattcagtgatacatacaaggccacagcatattgacgatttggcatatagtactgaaatactcctgcaacactacaaatagagcaagtgttcagaatcc

SEQ ID NO: 38168 - DNA, 298 bp, Zea Mays
cggttgctcactgaactatatagtcttgattgattggagaattcggttgaatcgctttggtattagtttgttacaaatttgcagtgtgacggtaattgcaacggcttcagttggtaaagtgctctgatctggtcccaccgtcagtacaaggtactgaggaattaggccggatggactaaacataacataacttgggttcggtttcgatgtgatctttgtgaacatgagtggtttgcacattcacaagtgtctcgtttccctcagcggattatcccggttcatctgactagaactctgc

SEQ ID NO: 38169 - DNA, 552 bp, Zea Mays
tccacctcttaccggtctatataagttgaccggccccgtgaatacatcacaacatttactgctcgcaccaacttgctgccaccaatttctttgcctctgaagctcttttttacagctacaacccttccacaaggctttagaatccactgatggccagagtctgctttactgctaggttggccactccaactttgactgaggtgctacaagtggaaggggaggcaccgaacactattaccatggttccgatatttgaggcaataaaggtgacaactaaatcgaaggcatccgagaaagaggacaacgctctagagtgaagtgattctgacatcgaggtcagtgatgacaaagaagatgatagtgtgcttcgacctagcaagccaagccacattgaattttgacaatctactgtgaagtctgaagaccttgatgtcctgaaaagacttggttatattggtgaaaaggaagatgacatgatcagatttgttggtgatgaaaccatcccggagccaaagaacgatgagatagtcatactcaaaagcttattccaag

SEQ ID NO: 38170 - DNA, 292 bp, Zea Mays
aaagaatgaaaaacaaaaaaagagaaagaaaggggaactgtaaccgcgtcgtgggcctaaaccatgtgctggcctaacccccctccagctctcaatccacgtcgacataggttccccaccctgtgcggcccacacccatgtccaaaccgtgccaacatatggggccgtattgacagtcgcgacattcacatcagttagatcctgagttactgcctgacggggcccgcttgtctgcctctcctacccgaaccaacttttgcctgcatgtcactatgagtggacccctagggtc

SEQ ID NO: 38171 - DNA, 416 bp, Zea Mays
cgccaatcacactaatcggtgggcatcggatcactgtggatcttctccaatccacgatgggcacaccgacctacgtaacaaaccctgcgatcgtcgcggactccagctggcaaccccaaccgacctcggcgactacaaatagagggcctcctcggtcacactcgcgtgcacctactcccaaacacctgtcatctgccctaacaaccgcgtagtgatccgcaaggcagagacgttctgtcaccgtcaggtttgcagcatggtgcggagttgggactagtctgaggatcctcacgatgccgcaaggagggaagctcgcacctcacctgggaaagcctgtgggtggggaacctgggattgctcgttggagctcgagcacacccacgcagccgcacttcaccgagactcggctaccgcac

SEQ ID NO: 38172 - DNA, 485 bp, Zea Mays
caagattctaagaggacctcgtttcagcctgatattcaagcggtggacgagatgctctcacgcctcatcttcgataatgtcagggctggtagacttggaaatcagagggatcccggtgcatgcttgggcactttctacggcaaaaagtattctgattgactcctgcttgatagctgaagtgcaccctgacactttgctcaagcaagatctatcttcgtttgttgtcaaagtttggtgttttaacccggagaaactccaacgtgattcagttcttcacattattgagcctgggttgcagatgtttgagaaaagatgcctcacatacaagattcaagttagcgtgctgagggcgagttcaagcatcacaccagcggaccccacttcatctgtggctggcggaaaatccccaggggatgaagacggaaatggaactcaagatccccaccctcgacgtccaggtggctctcaggtccagcggaggccgt

SEQ ID NO: 38173 - DNA, 272 bp, Zea Mays
agcttcttcaaagcagggctgagatttcctctgcacgagatgattggagatgtcttggaaaattttgagatttaccttcattagctgacccctaacgccattgttaggctcagcgtttacatctgggccctccaaagtcaaggggtggagccactcgccgaagccttctgccgagtacatgaacttcattatcaaacgaaggctagggaagacggactgcatgagaactttggctgctacaactttgcttatcgcaaagacatgaagacaca

SEQ ID NO: 38174 - DNA, 404 bp, Zea Mays
gcagaactcttttctgccttcaacgttgttgcttctgttgaaggacttaaaatccctggcatctttgttacttcttcagtttttggcctttcagccttatctttgtcaaccttcgtctcaactagctcaaccgaaggtgcctttggcattacaaccggctcttcagccttctgcgtgggaggaacaggttcttttggttcagtagctgaagaagcctccccgccaaattcaggcaccacggccggttcaatataacgcggccggtgggtaagaacctttaattttttgccctttggcataggctcgtctggagttgccgatgtagcagcttttctcttctttccatgacctcgcagcggatagcggtagtcgaggtaaacaaagccaatggcatcaaaaactct

SEQ ID NO: 38175 - DNA, 348 bp, Zea Mays
ataggggcggtgccaggtataagctctatggcaaattcagttttcctttcaggtggcatgcctggtaactccttggggaaaacatctgggatttatgatactatattgatagcttctgatggctcaatttcctcaatttgggtggtgatctagtgacagcttccataccttggtccagacaagaccaacttcactaacacttcctctcctgataaggacactaacttcaccatcctcttgtcacagctaagacttgcttgatatttggttagccaattcatccctaggatgacatctatagtcgcatctcggttacctattactattagattagtgaggaactctatc

SEQ ID NO: 38176 - DNA, 613 bp, Zea Mays
tggctttagtggtacccgtggtggcattcttattctgtggaacagtgactttatggagcttgttaactgtacccagggtgagtatcacatctcagctcatgtccacatgaaggaatcgaacgtcgcattcctcctgaccacggtgtatgggcctgcgagaaatggtaacaaggctgcgttcctacgcgaactgcaagacctcaagcctcagttgggaacatcatggctcattctaggagacttcaactgcatatacaaagccagggacaaaaataacaattgtcttaacctgtggctcatgaatcaatttagacaggcaatagatgagtgtgaacttaaagaattacacttacagaataggaaattcacttggagcaatgaaaggcgacgcccaacattggtcaggctggatagaatattttgcaacggtgaatgggaggatctctttggcagtcatgggctgcaagccttgtcttcttcactatcagatcactgcccgctcctcctctcaaatcaaaccagcccaagacgacctcgttccttccggtttgagaacttttgggccaagctgccggggttcaagcaagtggtccaggcagcatggatggcgccg

SEQ ID NO: 38177 - DNA, 293 bp, Zea Mays
ctgggaagtggttggcggcatctttttatgtgggttgttggcttttcttgtcgctgcccaccgtcacccctgtccatttcctttcctttattattgctgcccgatgctctgtttcctagttctgcaagcaacatccaatcttttcatgcttttttagtccagcggtgatttccgagcgaattggtgaaggaccttgatttcctcaacttttggagtagccactagtccacttacagcatcgttttggtttgcttctcttgcactgttcgaatacattcctttttttttgcatc

SEQ ID NO: 38178 - DNA, 324 bp, Zea Mays
gccaggtataagctctatggcaaattcaactttccttttaggggcatgccttgtaactcctcgggaaacatatctgggaattctgatactacgttgatagcttctgatggttcgatttcctcaatatgggcgatgacttggtgacagcttcctttccttggtccatacaagaccaactccactaacacttcctctcctgataaggacactaacttcaccattctcttgtcacagctaagactggcttgatatttggttatccaattcatccctaggatgacatctatagtagcatcatggttacccataactattagatcagca

SEQ ID NO: 38179 - DNA, 335 bp, Zea Mays
ggctagtggtgggttggatgcgtacaaagaggcggagaagagggcatcgtcaatttataggtcccgattgaactgggcacgaattttgggattaagatcatggttatccggctaggatatttcaccgtgacatgctctccgtggagcgcaagggggaaatgggctatggacgatgactggcggcttgccacgactcttaccacgtggaagagtggttattacgtgtcatggccggaaaaacgatgagctccggtgatgccagcgcgattgacaacggagggacacgacggctggtccggccagcgacccgattcaccctgcagtggatattttca

SEQ ID NO: 38180 - DNA, 553 bp, Zea Mays
acggcttggtagggctattaacttcctggacgctgtgttctgcttcggattctaaggttatagggtcagtctggttgggaacattggtggacaccggtggacatggaatgggtggtaccaattgtggttgaccgaaacatgtttgtgtaggaggacccccaggagttgtcataccaaaatatgggttccatggagtacgaaaggtatatgcagatgggtcattaggtccctgggaccaggtaggattggtcatatgggaatttgaaggagttgtaaatgttgaagcctgtgttgggtccaacccttggggctgccacatctgaggatcccacatgggtggggggaaaatttggttacctgtattggggctggcagcaggtggtcgaaaaggtgtgtttgtgttgttgtcagccattctggaatgaaatacataaatacattaagttggacaacacataacaaacttgaactgtatacgtcagacttgaaagcattgcaaatcagcttcatagaatatgaacaaaaggatgaagcattgcaaataagtttaata

SEQ ID NO: 38181 - DNA, 394 bp, Zea Mays
ggtaaagatacattgaacttggaaactttctggtgcgagtccctgtgttgctttagtaaatatgtctcgattcgggcacaatgttgttgactgtgcgagcttcggacttctctcgagtgtcacgttgttgttgcgcttgacgatgcccttctggctgctgattatgagccaaggtaggtgccaatggtggtggtggtaactgagcccatgcagcttgagaatgacttgtcgaagcaactaatgtcgtgggttgctggttgcccacatactcagggatatatggcgaatagcatgaggcagtatgcaagacctgcttcggccgattctgccgtgcttcggcttcaactatctccttctgcttttggatcgtgacttggcacgtccttgttgtgtg

SEQ ID NO: 38182 - DNA, 487 bp, Zea Mays
atccgggcggggctggcgcgtagaatgggaagaatgagatggcggggtggtcctacacttgcgatgggatgcgggccgatggtggtcctgtgcgctggatggcgacaaggggattgggttgcgattcattacatggcggcgaggcgtggattgcgtttggggtgcagaggatatgagcggggcatccgcagtgtatgggaagaacgattgggcggggtggtcctgcgcgtgcaggtcatcgacgataggattcctgcgtgctggattgctacgaggtgtggatagcagcgaggggatgtgtttccttctgtggtagtggccggatttttccttccatggctaaggcattgatcggtaaggggattgcggtgagaaccatgcggatgcaggggtagaggggagagggcatgcacggggaagaaggaagacactaacatgtgggtcgtatgcgccgtgaggaggcagaaccgtgcaccatggtatacat

SEQ ID NO: 38183 - DNA, 405 bp, Zea Mays
cggggctccaggtggtagtactgggtataggcggcgaagggcggtggtgaaacggagagtgagtgaattgttgcgaagtggtaggcgtcattgtagtgagatggagagtggtcgtcttcgcgtggacgggaccggtaaacgagaattgttgtcgtcgccgactggggcgagtgtaggtgaaggggagctgcgaaatctttttgagggtgaggaattgaggataatgttgttcaactacagggagatgggtatcattccgaaggttgagccaatgtaatatatgatgcccttgctgtgtgtatgcaaccgtaatttgtatgataaggttgcgcgccttctttgatccggctgtccccgtaggcgatttctgcgctgagtcttatgtgaaagacttcgatcttttac

SEQ ID NO: 38184 - DNA, 518 bp, Zea Mays
ggagtgggagcagtggaagctagagtagtggaggtggtggacacaatgggtgtgtggatgactcgtgagcaacatgagttggtgaagtgtgaggtggagtggaaactaggccggaaggagtggggcgagcagtgaggagcgaggctgggacacgaggcgatgaacatggtaggaaatctgatcaaaagaaatccgtagctgacctccctgttcagcctgatctattgctgctgctgctgcaagtgctgcatgggcggctctgtccagatgcctcttctttctgccctcttgctgctcaagatagacagtcttgcccttgacctatctgaaggggcaaggagggtcctcgtcatctcctccccctaacaatgtgacattcttcatccgcaccatcctgaactgactactgcaagatagagagaaaagataagcgagagtatatagcagtagataaggcctcaaatagagtgatagctacctgggaacttctcgagagagaaaagaatcgggaaggccag

SEQ ID NO: 38185 - DNA, 444 bp, Zea Mays
tgaggaggtggcggttgtggactacggggaggaaggcgacgtggaagtggacgaccgcgccgagcgcttcatcgagcggttctaccaggagatgaggctgcagaggcagcgctctctggtccagcgcctgctctagagacattcgtccgttgctgctgcttcaattccttggtcgatcgggcagaaccagtcgtggttgtcgctgctatcttagctgcacttcggttaaatctctccgtatcttgcatttgcgtcgttccatgtttttttgcttctcatgtggcaattctcttgtctgtggaaggagacattcgtctcccctgctgttgtactgttacttctagtccttacctatataatccatccttgtgttgcaatgttcatttttttttggggggtagtgttttgagtttgtacaattattacaaagcatgcgtgctacac

SEQ ID NO: 38186 - DNA, 273 bp, Zea Mays
ctccgacgaagggtcgggtgagatttgggagatcctggcagtcacgtcgatgtgcggatcagcgtcggaggtgaccagagttggtctggccacgagttcaggcggtggtgctcgtcggtggcgcctgtactggccaaaatacggtggtagagttcaattaaaccgcacgagaagcttcactaggtggtaggggtgtgtgtgcaaggaatcgaagaatggcttgctagattacctagaccaggaacgtcggtgggtggaggaagtccggtgagg

SEQ ID NO: 38187 - DNA, 303 bp, Zea Mays
ggtcagcgaagccaaacttactgcacagtccgcagctcatacagccgaagtcgaagatcttcggaaaaagcttgccgaagctaatgaaaactttgaacttgcaaaggcaaagcaagagataagtgaatggacaagtgagaggttggaaaagaatgtgaaagagctttatgaatccaaggaaagatgctatgagaaatccttggattgcgccaagaaactgaaagatagctttgccaaggtgggtgcatactcatcagagcaaaagtttattcgaggcgatcctgaaggagtcattgaatggat

SEQ ID NO: 38188 - DNA, 623 bp, Zea Mays
gtccgcttttatgtaaaaccattcgcgtgtccaactggttggccacttggtgcgataaccaattacaggggccttcgtatctttctgatatgcaaagttgtaatagccaaagttcttatgaagaccatccgctctagccttcatctggtaatgcagctcgtgcacccggcagaaagcttcggcattagcactcataccttggcttcgaagagcccatatgtagacactaagtctaacgattgcattggatattagctgatgaaagtatatctcaaaattctttaaaacttctccaatcatatcatgtagagggaaccgaagccctgccctgaagaagctcttaaaaacaacggcttcatccccccttggatgcggaaccaccacctccccagcaaaccggacaagcttgctctcgacttcccccaaagtagcccagctttttgatcataaccatatcgtatgccgtcacagtagatttcccaaattcaatgtggctaggtttcattgggcttagaatagtgttgtcctcctcacttgcattctcacttcctccttcagccacaatatgtctagcttcggtagtggaggtaccttcgacaatagcctcctctggcacaacaaga

SEQ ID NO: 38189 - DNA, 485 bp, Zea Mays
gccagaaattgaggaacacacatatatggaggttgaatcagttgcacttggtactgaaacatcacatattcagattgtcgttgccccagcatctcagtcacatgatgtaacagctagacaagaggaatctgagttgactaaggatggtggtaggaaggaaatagcaccgaggtcagatgtatggcaacatttcgttaagataaaagatgataaagacattgttaggcatgctaagtgcaaatattgccatagaaacatgaaggcagaggctggacgccatggcacatcttcattgaagaggcatttggttgcttgcaaacgcaatccaaataaatttaacaaagatccatctcaaggtactctacaagcaactcaacatgaaggtgttagcacgtggaggtttgatcaagacacactaagggttgcttttgccgagatggtaatagaggatgagttgccattttgctttggtgagaaacctagat

SEQ ID NO: 38190 - DNA, 574 bp, Zea Mays
gtgatcatgtgaatgaccctgcggtaaggttgctcaacaaagtcctctttcttgggtgttggcggcaggggttttgatgtggaggatttggatgatgtggtggtggggggaggacttggacctcttgatgatgacggtacaagtggttgggttggtgatggatttgctcgttgtggtatggttgctggtggtattgctgggggtgataagtatgtgcgacaactcgttggttgtcggctggctgagttctggccattatgtatttggtggatttggtttctaggcagtccctggtggggtgtgcgcagtcttcaccgtggaacaggcagtaaaatcttcgtgactgctgtgcctggcctctgcctcttcctcttgtgttgttgccgcagttttgctatgaggggtactcctgacgacgaactgtgtctcaggcggggtgttggttggtgatggtgtttacttgttgctggttgaggttttccctaccggagtcggactgtgccggcctgacccatgttctgctggattgcggagtgtccttgggtttccgctgagattctatcttgcgttggtg

SEQ ID NO: 38191 - DNA, 432 bp, Zea Mays
ccacgacgcgacacgaaccagcaaaccgacaagcgctgggagaagaggccccgcgaagaagtccatgccgctggaccacccgtctctcgtgcccgaggggcaccccgcggaggcaaacaaacattggacgacatccgcgacgcccagtgcccgtaccacaaggatatgtgtcatactcttcggaactgtagagatttcaagcactccgttgggaatggccgacccttccaacctctgccacctcccctaccacgaggaggactcggagaacctcgacaacctcagcagcaggaaggggggaggaggcggagcgttctcacgtgtcgatggagaagtcaacgtcatcttcagcggacacgggttccaagagaacaagaggcagcagaagctcaacgatcgtcagatactggtggcgaccaccagtgctcccgc

SEQ ID NO: 38192 - DNA, 290 bp, Zea Mays
atgggaatgagaactcataacatgtttagggagctgagtgcacaacttaaaggtaatggtatcgggatgagaattcggaacaagggagttaagtttaatttgcatgtaatcggactagaatgagaactcgggacaaatttaagaacgttaggtgaaatttactctttctatagcctgatagagagagaaaaatagagcattgtattgagggtaagaggattacatatataggaaaggctacatgggatttgctctaggcccataacacatacatagaagtttaacacccc

SEQ ID NO: 38193 - DNA, 308 bp, Zea Mays
gaaacgaggggccaggattgaatatgagatctattcgggcgtgatgtaacctggacggttggattgagatcgtaaggctcatgttagatcgtagctatctgaatccgtgccgtagatacctaatccagcgctcgatatcgcgtaccggttcaatggaatgtggatctaatctaggtcgtaggaatcagatcggacggctagccttgcgcgataacgattcgccgtggcgactttgctaaagaaaccccgagaaaagcaggaataaacccacagcccccatgactgtttactgagtcttgggaattttt

SEQ ID NO: 38194 - DNA, 343 bp, Zea Mays
ataagagccttaaggatgggggagtagatgttaaaaggctaggagatagaatcatcctagtcaaactggtcattgggacttggttctcaatgttatcagcgcgtatgctcctcaagtaggccttaatgagaactcaaagagggagttcttggaaggcctagaggacatggttagtagtgtgccagttggtgagaagctcttcataggaggagatctcaatggccatgtgggtacatctagcaccagtttcgagggtgtgcatggaggcttcgactttgggactaggaatcaaggagaggaaattctgaactttgccctagcctatgacatgtttatagcaaac

SEQ ID NO: 38195 - DNA, 430 bp, Zea Mays
tacatagctgttagagactctctatggtcgtgcagttgttctccaacaatgttggtgttatgtttctcattcacactgccacttcataggcacatgctcttacatcgtccaccaggacttgctgctactacatatttcgttacatcagcagctgctaatactactttagtttagtattgaccgcacttgcaacaacatcatacgtcggggcatcatgttgggttgtctcatcatctgaatcaaggtggtaccctttggaaaagatcttcccttgcatgacatcaacatttgaaccatgattcagcatgaggacgcacatagtggagatgggggagagatgctaggagcctaaatatggggcctcgagacatgctaagtgatgcccaatgtaaggctttggtttggtcctcaatgtcgtctagggtctgga

SEQ ID NO: 38196 - DNA, 284 bp, Zea Mays
ggcaaatttgatggcaaataactacggattggttgaaaagaagtaaacaactttgcatttgggaattatgatgggtggtttgtgcttaaagccctggaacgagggaaattatttgagctaaacttttggagaatatgttggtttaactaaggtgagagctaactgtggtggttgtcgtttccttttctcttcttttccgtgcctgtttcttttatgtattctcatcttttggttgaactagtataattattgtttatttgtgcttgaaatcagaagagtttgat

SEQ ID NO: 38197 - DNA, 502 bp, Zea Mays
gacgacatgtactatttatttaaaggtcaggattatgcatgtaaataacatgacctaatcgtgatgattcttaagggagggtggatggtgggttgaattgtatacgtacaacgaccagagcaaacaaatcggtcataaagattcactcgactagttggaagaggctcgaaacatagcgttgttgcattccatcaggtatcagaagtcactgcggctctaccatgcacgacaaatccgatcacgaggcttccaagttggtgacatggtgcttcggctatgacaagacaatcgagggcttcacaagctcagccctccatgggaaggaccattcatcatcactgaggtgttgaagccaggaacttacaagttgtccaacagccaaggcgaaatctacctttaccgcccacgacgatgatcagggcacgaatacggggcactgttccccactccgaccaccgtttcaaccacccagagcgtggctagatgtaacgtctaatcccgg

SEQ ID NO: 38198 - DNA, 395 bp, Zea Mays
gtactggcaagaaatgagctgtcttggtcaacctatccacaatgacccaaatagaatcgtggtgctgggaggtattgggcaatcctacgataaagtccatgtaaatatcctcccatttccaagatggtatgggaaggggctgtaaggtgcctgccaccttcaaatgactggccttgactcttcattctggtccaccagtacaaggatctgagatcatgatacatcttgttactgccagggtgcatggaaaatttggaaaggtgagcttcatccaatattttctttctgagctcagggttcttaggaagaaccaatcggtctccaaaccatataattcccttgctgtcctaacggaagcatttgtatttgtccaccttttgtccgatcatttcctc

SEQ ID NO: 38199 - DNA, 556 bp, Zea Mays
gacgaaggagcttctttttctgtctcacctatcttcggctcagcagagggcactttgtcaagctttcgctttttagaaattgttgcctttggctctagagctgtttttgttttcttcaaaaaaaagtcatcttcctttactaaccgagcagcttgcctattcaggatgctgacaatcctcattcttttcaccccttcggtcccttggtcaagcttctcgtaatccgggtattcaaagtttcatgcatccatcacccagttcaacgttcatttcggtcgggtgacgaaggcagcaatcatcaattggtcttcctttttggtatagttgccaataatttcgtatcacatggtctcgatcatttctggccactctttgcatggcttcttgagctgtttcttaaatttgaatcgataagggagccaaacaagttcgtacttcccccctcctttttcttaggcattccccagccactagaagtcggaaatgtcctatttgccaagtactcttgtactagatctctagtgctaatttcggcagctaccactctgaatccaac

SEQ ID NO: 38200 - DNA, 498 bp, Zea Mays
tttccttgccttctcaaggggtagcagtaatcaggatatatgaagccaattgcatcaaaaaccctgttcaatcttttcttgccccgacccccaaaggctgaggacaaggcatcatcctcggctctggtatatgtcccaagcaactcgtcgttagtagcctcaatgcatttcaaccagtcaacatttggtttgtcaaactggtccctgaatctgaaggtatatttcaatcgaactaatccaccttcgctggattcagcagtagtctccttcggcatctcccagctgtccacaagtggccatactctgtaggctatgtgctcttgaattatgtctcttgtgccaatgaaagcacaaacattgctaaaggccttctgacacgctttggcatcactttcaatagctaccttcggccttcgaaggccgaagcgagaccagatggggcgctggataatttccttaatatcctccctctcaatcagattattcttaacataaaac

SEQ ID NO: 38201 - DNA, 372 bp, Zea Mays
ccgccgtgcggtggcctgctcgtcatgagccagcgccaggggaaggagagtgacagcgggtcgtgcgatatgaatcgtgcggttgtgattgaatccagagagcgaaggatctggcccgtaggattagcatcgtatggttaagatgaagggtggggacttcattaaatctccaccgtagatctaggaatgcagggtcggatggctatcgtgtatgctgcgggtccgatctaatcagagccactaatttcaaatccgatgaacgagaatcaatcataccgcttcagtcgccactcttgcaaaagagaccttctatttgtagtaaaacaacccgcggttcagggcaggtgtagtctgggtctgggaagattttat

SEQ ID NO: 38202 - DNA, 286 bp, Zea Mays
cggggaattccgattgcgatgccgcattcggctcgcacggtttaaaatttatttctttctaaaggtcgagtctagtgccagtctaaaattaatcaattaagactaattggaaagatcacctaagtatttctctcttgttcgagcggtctctacgaattcggtagacactactaaagacaagctgattaaataaaatgaacctgaactaactaaaactagagcaatttttagtaggttcgtttgcctgtttaaatatctgagaaaataatatggaaaccaaaaacga

SEQ ID NO: 38203 - DNA, 931 bp, Zea Mays
ctcatcgagcgtcaggaaattatgcatactgcatggttatccgagaggtatgtttcactgtcatgtactacactcatttgttttacctgcacttgaaatcctgttttgttgtcatcatttttttcattgtgatatcttttgattcattataatactctgtttagtcacaaataagtggtgttttggacattgacatggtttccaaacacaactttgactagtaccttttgttacaaaatgttataaaacatagaaaaagtataattatatgaatgcattttgtgacaagttactcagatcatttgaataatcgagtatccaaacttcacacatggaaaaagtaatatgcaatattgcaattggttcaggattgttgacttaagagctgagacatccccatatcgtcacttattgctgaccagagggaacaccagtcaactagttgtttgaatgctgtgcaacttggcttgatcagtctatattttctgtcacatttgcagttgttggcagctcgtgtgcctttaaggattttagctctaactgctacaccagggtgtaagtctctacattaaaatagacttacttgcacaattatgaaggcaccatctaagtttgcaaccttatcctacttgtggttcagccaagcattcagatatccaaagtgttatagacaatttaaacatttcggagctgatttattgtgatgaagaagattctagagtgaaccaatatgttaacacacgcaaagttgaacttgtgcaggtatgtgtgatttttttttggcaattcgttgttcctctgtgatgtaaaagtcgctggttccagtgtaggtcccttttggcagtgatgctactcaagtcgctgatatgcttttggatattatacgcccacatattaatcggttgcgtgatgctggtgtgattgaccatcg

SEQ ID NO: 38204 - DNA, 320 bp, Zea Mays
cgacaagggtgacagacaagatctttctcaaattttaatttgggcaatccttggatgaggtcaagtgagctcaaacgacacaaaagatcaaagctcaagtgacctagcctcctatgccacttccaaagagaagaggaagatcttgccagcaaacatcgagaatggccataagaatgtgaaaaatcaacactgaaaactcgaccaaaaggggaaatttggcaaataagatccccacaggcatccaaaacctgagacaaggccattttaaagcgcatttcatagtcatgcttaaggagttgcaaaactgaaagcagattcga

SEQ ID NO: 38205 - DNA, 278 bp, Zea Mays
gcgccctcgcgcgtatatgtgtaaaggcttgtacgatgaagttgtgtgccctcgcctgcctgtgcctgcggaggcgttgtgtactttgtctggtatgttttgttatgctgtgctggtgtggttatagtcggtcttaacgcggacggtttgatgctgtcgtttctgcttttgttgtactagttcggctgcgccttttaggcggcttctgcgtggatggtcttcgcggtagacttcggggtttttcgcacttgtgctattccggctgcacccttaggcga

SEQ ID NO: 38206 - DNA, 417 bp, Zea Mays
tttcattcttgttttgttatcataataattcctagggtatttgagttactataatgctgcaaggagcaatgtatcaagaatcatactaagttgctctgactgtgcttggctatcacatcacaaccgactgattaagtgattcttaacaagagtagaggaaagttttgcacttgtatacaatgagtggcactttctgtgatgttatgcctttcccaaacttcaaacagatattgttgatgtgtcctcacaatatggatgtgctattttcatcatgtctaaacacaaaccattagatgaattctactcctgttccgaattataggacattttgggttttctagattcatagcttttagtacgcacctatatatacattatgtctagatatttagtgaaaaccatgtatctagaaatgtc

SEQ ID NO: 38207 - DNA, 279 bp, Zea Mays
ccactccgtcacatttcaactagcctggtcaaagttccttccacacccagtctgttgcaagcagccaacctccaaccaatgcttgttgacattgtggagatcccggtcactttaggaatggattggttgacccgacacaatgccattataaactgtgcggataatactgttcttctcatcgaccaccagggaaaattagtttcgtgtaaagctcgactgccaacccaagttccaatggtgttcagcctggcagcagaaggcatatctgtggtagaagaa

SEQ ID NO: 38208 - DNA, 334 bp, Zea Mays
tatcagcaaactctgaggcgctatcatgataaggccatacggcatcgatccttcgcagtgggagatctcgtcctccaccgaattctaacgggggagggacgacacaaattgtcacctctatgggaaggaccattcatagtaacagaagtcactcgtctgggatcatatcgtctcactcagatggacgtcacggaaattggaaactcatggaacatagaacacctcaggaagttttacccctagctacatcccagaagctattgggacgacgatgtattctgtaaattgagaaatatatcatcaataaaaaggcttcaaaggcgctcaatttgtt

SEQ ID NO: 38209 - DNA, 523 bp, Zea Mays
cttggacagctacggtagggaagcggtagtgcgctatcaaaggcgtagaagcacccagttgcccacagcataggatactaggcagtgcatctggtcatagaacttcttttggacgtcttgagcttgcaccagccgatagctgacatccacgaggagctcttcctgagcagccatggtcttggccacagcagccacccgtgtctcccctggttcgtaggaccagatggatggaggatcccggccatacaccacctttaagagggtgtcctagagcgacaactggtatgccatgttgtagacgtactctgcccatgacagccaacgcagccagtgcttgggccagtcccccgtgaagcaccggtggtacatgacgatgactttgttggctgcctccatttggccgcccgactgggggtggaaggcgtacatcatctatagtttggccccggatagcctcatcagctcttgccaaaatgtcgaggtgaacacgtggtccctgtccgacaccatggattgaggaatc

SEQ ID NO: 38210 - DNA, 465 bp, Zea Mays
ggaatccggacctgagactggcatgcacttacggaggaggggacgacacagacctcgacgacgaacttgaacggtggaatgtgtagtcggggatgttcgtcgcactcgaccgccgcaggcccttgcttcgcgccacctcgttgtgttattcctcgtccgccaggcgacgctcaacggagccgaccaagacttctttctccaaggacaactccgcctctgctttgttcggaaggaattcgtgttcgtctgcgcgtcgaatggaagcgatgcagacctttcacttggtgcgcgcgagtggtggtgtgatcgtgaagccgaccgtggggagtgaacagtgtccccccccccatttgtcgtgagagagaggagtccctctgcgtaggggcgcggtggagggcgatgctgcaggaggaaggggcactataggccctaaactatgaactgtaatagagtagagggagagaa

SEQ ID NO: 38211 - DNA, 272 bp, Zea Mays
tgcaactcctaaccctcggtgtgtgcatagtgagatggacagacactgcttgtcaccgttcttatttctgttaccgtggccaccagtgtagtattgttcttcctgtcttctcatgcccctgatcctaaaccagcgagtcctttatccctctctatcttcgtgctcgtaagagctttgctgtgctgttctccctgcctgaactcgccccgcatcgtcgacggacatttagattgacgaacatttaggtcttacgaacatgttcttcgtgctcg

SEQ ID NO: 38212 - DNA, 296 bp, Zea Mays
gaggaatcctagtgttttacgccactggatcgagggtccggcgcctccacgctagctagctgttggcttttggctgctatagtagcagttcggtgtgccacccacacagtccggtgcccaccacgtcagatgattgttggtcgactagccgttgccgactgtttggaccggtctggtgtacagtcaccgatctggtgccctatcttgccaaaaacctgagaaggcctctctgtcaaaccggtctgatgcctcagtccagtacgccaccctcatggtccagtgaacccagtttcagc

SEQ ID NO: 38213 - DNA, 288 bp, Zea Mays
cagtagaagaaaaggttgctatctttttgcttgtagtgggtcatggcacaagatgaggatgattcatagctcatacgggtggtcacttgaaccaattagccgctatttcagtgaggtgttgagaggtgttctatcattatgccatgaatatatcaagcttcttgatcctttagctgtacaacctgaagattctaagtggaggtggtttgaagattgcattggagcactagatggtacacacattgatgtttatgtacatttggctgatcaagggaggtataggaatgt

SEQ ID NO: 38214 - DNA, 381 bp, Zea Mays
cgactcaattttactccggaacgatcaccacggatcaccggccgccaacaaacttacagttcagacttgtgttctgtctattcctctcagttcgccgccaccttctcctagtgtaagccaatacttcttattacagtctgttacaaggccacttgggccaaataaacttagccactcacagctcgggccatatcgctctcttactccttctgagcccgtcgaggcctgcttctggcttcacatccttctcctttcccgcactggtattcttcgcttcttccgcgtcctggttgctgatcaccgggacactgacattttccctcccttgagttccagcttgtccccaagctggtgcaaaggaaaaatgtcgcttgatgtccg

SEQ ID NO: 38215 - DNA, 298 bp, Zea Mays
cggaggggacaggatgacactgtccttattctccctacgctcacctacgccgcaacctacgtcgtagcctttgcccacacgtcgtagcccctcctcatcttaggattagggcgggtgttatctgtcacctgtctggagtttacctctgaccgtgttgatgtttgtgtggttcgtctctaggtggtctttatagggcacgacaaccatggttggctacaacgagccttgtttgtgggcgtagcttttcacctgcaatggctctgaactagctcgagagttgcatgcggtggtggacgac

SEQ ID NO: 38216 - DNA, 334 bp, Zea Mays
tcgatcgaacggctctcacataccaacgcgagtgggcacgacatcagctaatcctcaccgttcaccataaatcgacggcaatcgggtcatccccccaccagcccatctccaggcagcggcggcggtgagaccgagctccacccagggagttcgccagagttcctccccgcccagaacacagagaccctaaatcctaaacgcggacgacgctatacactgagggaaggaaggcgaagtgatggagagctcattaccgtgattcggttagcaggattccctggccacggaggtcagtggtgctgcggcggaggaccctcaccggtgaagaaatccc

SEQ ID NO: 38217 - DNA, 494 bp, Zea Mays
aactaatgcaggtatggagttaacaaggaaataccatacactatgtcggcatcctcaggcactgattccgcagtgacatgattgacccttcctctgctctggttctgcggagtcttgttctgagcagatccacgagcgggggtgttctggtcatttttctgagtattgctcctttggggtgtttgctggttgcgccttgggcagttgttggcatagtggcctagctcaccgcacttgaaacatccattgggttggacaggtgcgttgtttctggcctgcgtgttgttggtgctaccttgacggttctgggaatttccaccagacctctggttggtctgggagttgctcctttgctggttctggttttgattacttctctggctttgctgtccagagcgttgcacttgataattatttccaccctgatttccagagcggaactgcgaaccttgagcattgttcgggcgagtgttcctgctggactgaccttgaaa

SEQ ID NO: 38218 - DNA, 374 bp, Zea Mays
gaagtttgtttatgttctagctggatgggaagggtcagcttcagattcacgtgtgctacatgatgccatgtctcagcacgatgcatttgctattccaagtggaaaatattacctagtagatgttggatacaccaatggaccaggctttcttgctccatatcgatccactcgctaccacttgaatgagtgggctgcctaagggaataacacatccaatgccaaggaatttttcaatttgcgtcattcaacagctagaaatgtgatagagagaacgtttgggctattgaagatgaggtgggctatactaaggcaaaactcgtattttggcttagaaaatcagattaggatcatcaatacttgttgcatattgcaca

SEQ ID NO: 38219 - DNA, 356 bp, Zea Mays
ccaaatcaattctccgccacccgaaacccaacctcactgcggccagccttattctggtcagttcgtctccttctctccctcatttaagctttcccttaagtctacgatgcttgccgacccacacaatcgagctaggagccctttggtcgccgggaacgcgactgtcttgccgcgatgttcacggccaccgtggccagagcaagccattgggccatagatggaattaggttaggggaaatgctcgggctaggtccaatttgatgtccgccgctcgggaaccctagccgttgccccgttcggccggtgcaggcactcgccggagttcggctgggcgtgaacgccgtcgaggacctccc

SEQ ID NO: 38220 - DNA, 393 bp, Zea Mays
tcccagccgaaacgttattctaccttctaatcagggacatccataaacaaatcaccggccccacgcccaccacccttcacaccggcagtactcgagtggcgcccccatgcacccacggcggtgggtttgccgaagcgagggcccccgacgccctggtgctcaaatgagcaccccgacatattctacccgatgacccaaacacaacgaggtccacagtggctttcttacctcttattagaggaacgaaagatccatccacatgatgaggctggtcccacgatagcgtgaacgacgacgagtaattgctcggtccccacctgtttcttcggctccgctggtccacggacacacaccccgggtcctgtgaatccccagacccacaatcaaggcccc

SEQ ID NO: 38221 - DNA, 466 bp, Zea Mays
gcgattgacaccaaaaggatgagaaggagtatgtcactaaagagcaggtccaacaagtgcattatcaacgaccaacgttcgagcatctgctcaagaagtatgaataccattataggcagtgtcgctagcatgaacctgaggatgaggaatatgagcaccatactgggaagcgcctaaggagatgggaggacatacgagatcactggcattgccctttcatcaaacactattgaaacactagcatgagcctgcccacttctagcaactacccgaagtgtggaccacggaggcagaaggccaacaaggtttcaatgtttcactgtctaggcccgatgacacagcaagatgaacgaaatggaccattgcacaaaatgggtcttgatgacgaagaagataaatatcaccaaccatggtggtgtctagatggcctcagtcacacctagaagcatagtgtgttgcatttgcg

SEQ ID NO: 38222 - DNA, 440 bp, Zea Mays
cggcgaagggcggtggcgaagcggagagttagtgaggtggagggttgtcgtcttcgtgtggacggggctagtaaacgggagttgttgtcctcgccgactggggcgagtgtaggagagggggagctgcggaatctttttgagggtgaagagctgaggataatgctgtttaactacagggagatgggtatcatcccaaaggttgaaccaatgtaaggtgtaatgccctcgctacatgtatgtaactataatttgtatgatgaggctgtgtgccttcgctgatccggtcgtgcccgtaggggacttgtgcacttgatctagcgcgtttactgtgttggtccggttgcacccgtagtcggtttttgcacggagggtccggctgcacccttaggtgacttttgcacggatagtcttttgaggaagacttcgattttgcgcacttg

SEQ ID NO: 38223 - DNA, 842 bp, Zea Mays
tacaacagtttattgtgtttagtacctgcgcctagtacttcataggtgaattatcctttggtttcaggtattagaaattgattggggggcaatacagattgatgatagatgagaagaagaaggagaacaacagactgcctcagagtcagtgctttatgatcggttaggattgctagcagaagatgaacgtgaaactactgaaaggcaagatgcttttactagtagatcgtttggtgtccgtggaagcgatgaaattgatgatgaaactgctactttgccctgcaatgattgcataccacaagaaaggatatttgtttgcaacagatctaatccaataatgaagattggtagtttgtacaaggatataaaagaattcaggctggctatgaggcagtatgcgatcagtaatgagttcgagttaggaattgagtcaagctcacctttcagatatagagcttattgcaaaggaggtgattgtccatggagaatcaatgcaaggctacagaatgccgggtctcccacagtagtggtgagtaattttttagcacgcatttattgtactctgcatagtggatgaaattagggaagctcacaatgattcctttctgtgtgcaggttacagtaatcgtggatcagcacacatgcacttcaagtggtcgtcgaaaaacaacaacacccacgagctcatgggttgcatccctagcacttccaatcctaacgaagaaaccacatatgggagcaaaagaattgcaaactaccttgcaagagcagcacaattgcacaatttcttatgatacagtgtggaaaggtaaagagaaggcccttagagagttgtatggaac

SEQ ID NO: 38224 - DNA, 406 bp, Zea Mays
aggcgagcagaatttggagcggcgaatcctcccacgccgtggtcatggtgggcccattttttgagcaccactcgtcctccctatgtttgtgtatataaacagaggaaaggtcccttgggttggttacgcttaccgtctcttgtgcccttgcctccattgctccctaaagcattcttgctcttgcactctctacctgtttgagtgctccgcatgctccctcttcttcaccccgcatccatggcctccttgctggcttgcttgcttcgctgaagccgtgtcctcgtcttgtagaagaaggggttcctacctcttacgaaggttttaggatggcagctagaggataagggtgaagtgttgtggtcgcggtacgatgaggtggttgtgctcgtgtccttctctgagcacg

SEQ ID NO: 38225 - DNA, 427 bp, Zea Mays
ctgggcctcaatttctggaaaggccaggggtcacggggtaagttaccaaagacacagggaacagggtccctggacggcgggttggtatataaaaactccgagggctcttatgcaatactgccacaacgaaggggtatcgggcacccagagccgcccgatccatatctggcggcccggattagatcgcggtttaaatgaaacgataagcaataggatccgtccgatccacgattaatggctgtgatctacgataaccagagataggcccagattcggtcgatggcggatcaacggttcggattcaatgcagcgaaaatcaatccaggctcgcccgatccatgatggacggcccacgagtcctctccttcccccgacgctaccaaggcagagccgccggaaattcccgcggccgtggagctcaccggcg

SEQ ID NO: 38226 - DNA, 715 bp, Zea Mays
agcaattcacatgaattgctcgagggctgctgtcaggtacctaggaaatggggtacccaaaataaggcttgtaaacattcttgccgaccaaagtctccctgtcgaacaagtccgcaaggcagagtgaccaaccagatccatgtcgagcaagtccacaaggtggagcgaccgaccaggtccctgccgagcaacttcgcgaggtggagcggccgaccagtcctttgccaagcaagttcttgggacataacaaccaccaggtccctaccaagaaagtcaacaaagcagaagcccaagtcaagcgtcacgaagtccaaggaaactaggacaagacatgacaccctagggtgaggctagccacacgaacgataggccgatggcacaccgagtgaccactatcgacatgaccgcacctccccaagtacaaccctattcgtaaaggacctcagcattggagattctatagtggcccgaataacgggtagtgcgcaatagatacaccataccaggtatacgcctatacacgccaacgagtgacacaggctcgtgacggtgggcaagaccgcacgacgcacaactgctccatacgactgacttatgggacctccctgcactaccaaaagtgtgtcagtgggagaccagctacaatgacatgtatgactagcgtacgggatagtacgtcattacggtagtacgactacacatgaccctacgaacg

SEQ ID NO: 38227 - DNA, 331 bp, Zea Mays
ctggactgggcctcaattaatgggaagcgcaggggtcacggggataaaattcctaagacccagtgcacactaccccaggacgacgggttctattttagaaagacgcaggggttcttttgtgaaatgtggaccgaaggggtatggagcgatctggtccacacaatcgaccaccgacgctccagattaaacccacgcgtcatgaacacgtataatccgctccgaccgttagatccgatctcaacgcacaaaggacaaccacgcaccaatattgatctaagccgttcacgtccgcatcaacgatccagatcgcatttacgcaaaccgatatgcc

SEQ ID NO: 38228 - DNA, 2963 bp, Zea Mays
gcggagcaggagcggagggacgcggaggctgggggcgatgccgcgggcgcagcggtggcgtctcacaccagcagcatgcaggtgaggtctccgcaccctacttctcggctgtcctgtacgattttgggagctttatgatgcgtagatccgctcgctgctatttgattggctaaacctgcgtccgttgcgtgccttcattttagtttgttagtgcgtagtaggttctggaagggagctgtcggaattttgcatggaggcggtggggaatttctgtgggccaaccgtgccttagatccgagttagctgccgttggagctggtaaattattgttctgagagggattgggtgtgcttatttcttggtgaactgtagtaatgagcgagatatcataagacttggtttttttgttcatgaggaatatgtgggtatgtttttttttgttttttgtgctatccccatgctgctgtaccagcacctgcatgtttgggaagtagtgaggcctgctttactgtggagttagcctgtgtcacttggtttctcactctgtcagtgaacttattggtgatagtctcgatgtgaacagttcagcacaatgagattgacaatttaaacaaagacgaatgtgccctgagcatgatgtaatcactacccatatgccatatcatttcgtaaacgtggggcatacttgattgaattatattgatacaatatatcagctactaccattttgattatttctatgccggcagtagtatccttctatcttgaaaactgtagagccttcccatctcatctgaaatttctatacaatcaaaagttccagcttaggtggatgtgatctacattgataaacttaacatctaggaagtaggaacagaagttgttttgatttaaatttattgcatcatttgattatatgtaccggtgggattttgttcctctgaagccaaatatcccaacttcattgaatgtctcacttcattgtagaaaaacaatcgacttttggtagtttgacctaaaagaaagataataaaaggcacccatgatactccctttcagtggttgttgcgtatgtcagaaaggtcaaaacagcttgtgatacctgccagctgatctatggtcatatttgtatccgtagttaactagttatactacccaatccaagtatcggtcacttcagtattaaacaaacactgatagccatgatttgttagacattgttgcaatggactagagcacgtgatgaatgtttcacttgcacagaatttttattgtggataagaggcccttgcagcagcatgtcattaggtctaggtgcagcagaggtaccaaggatagcaaagtatgacagtagctgggcataatgtgggagagcctagagtgcagatctaaccacgtcaaaagtcctacaagtcttaacgttcatatgattagaccgaaattttgtttttaggaatttgcaaattttgattagttcttactgtgttagtcattggtccaacgtccaatgaatgtttaatttgtgttaactactagcctttctagggtatctatatcgaggaggtccacacgcataatataatgatgaagcattcttctattttctgtctctcgagctctctagttctctctaccaagctatatctgtctgtctcattacaatccttaaccccattcagccatgtatattactaacgatggttacaattctaactgttccagcgtgtcaaagtataccgtttggctgatggtgggaagtgggacgatcaaggaacaggtcatgtttctattgattacattgaggtatgaagaatttctttgctaatatgggtggtatttataatttcttattcatgggtctaagctaattctcatactttctcctgattttctttgatagtgcccaaatatttgtttgcctcttgatctactttagttttgctaccctagtaccttgttgcaacatgcttcatttgaccctcattctgtttctacaaataatgaaattgtcaactattcatttttttcactgtcaagggaacagtgtcccaatgtaaaactaaagaaaaccttgtcgaagtagacatcattttcatatttcatactgtaatggtgattcatggaacagtgtcccaatgtaaaactaaagcaatagtccactaaaaatgaaaataagcacaaattacttgatgatgattcatggatcaatatatcggtgtaaaagtaaagaaatggtccagtacaaatggaaacaagcagaaattacttgtagtctatgcctctatggcaccatgatattctgtcattgtattatgatttctaatctgtgtgcttactttttggaccttatatgatttattatttcgttggtttcagggttcgaaagaactcggtttgactgttttagatgaagatgacaatgagacgctacttatgcacaacatcacatctgatgatatttacagaaaacaagaaggtgaactaactcagtatcactctgtttttgagctaattcatatcttttttgcaacttcctaatccatttcttttgttagaaacaatcatttcatggagagatcgtgaagcagcgacagacttagcactaagctttcaggaagctgcaggatgctcctacatatggtgattgaagcaagagctgtggtgcagttaccatgtttttgttcaattactctttttggtttatttgtgttctttgttggtgctttgcagggaacatatatgtgaaattcagagaaaccttcagttcagtaaccttggtggtgagtttttaaaaatcagctgtgactgtttattcaaccacacatttgcatgcagcatgctcttctcattttaacgatgcctgcagctccggaagttggtcgtcgtcaatcatcagaatctctagaagcctctagaataatgcattcaaatggtacaccccctttgctgaacgtccacttgag

SEQ ID NO: 38229 - DNA, 387 bp, Zea Mays
gtgggaggcgctcgagaccgagcaccagcgccttggcgactggtgcacccaactggaggagcgcactaaggcggcgtcctgccaattcacctcagagcggaccgagcttgagcgggagcgtgagggcttctaggaggacatccgaaaggtgtctggccgagagcaggagatgacccagaaggagatagggctggtcaagaagaaggagcacttggaccaaagggagaaggtcatcacggcattccataaaaagctgaaagcctacaatatgatgctggagaaacagcgggatgagtaggctgcggctgaggtgaagctgtagaagctgcaacaggaacttgacgacaaggctagcaacgttgctcgcgccgaggaaagcctcaaggc

SEQ ID NO: 38230 - DNA, 531 bp, Zea Mays
gacaaacgagatctgggtgcgcagggtcttcaaatccggacggttgaacgagtacactgtctctggcagggttccatgcagaaagacattcttcacatcaagttggtctacatgccatttccgggatagagctagagagaaccatttccggtatagagccagggagagaactgtgcgaactgtagctggctttaccaatgggccgaatgcttcagaaaaatccacacctgggcgttgggtgaatcctcgaagaacccaacgcgccttgtaccgcaccagtgtcccgtcggcattgaacttgtgcttgaagatccatttgcctgttaccacgttggtctgaggtggtcgaggcacgagatcccaagtgtgattctgcagaagggcaacatgctcttcctccatggcagcgcgccaacttgggtcagcgaggccaccacggtaggtcttgggcaccgggagagttgggcagcatggaacagtgctagaacgcgaaagccctgtttcgcgcgcgtcgccatggggtgctggtta

SEQ ID NO: 38231 - DNA, 505 bp, Zea Mays
atttaaacaaaaaaatgtatactgaaaatttacacaacagcatgcaccaacttactcatcgggagtcaatttaatccttatatctgagcatatacacaaaagggctgaaagaaagaactttatgtgacaacggattaatacgaaacatggctttcaacgtagctgacaaaattaagacagcagacgagccaacaagcactggcggtgtagtggaacattttttcgcctccaacaccgcaagaagctaaccgcataattgacacgcttgaattgtaagactagctccagcaaggaccggtaaacggtcctgaacgctaaatatagcgcccctcggattgatctctccctccagcaacacacgctacacggtccactaaattttagcgtgcgctcttcgtaccctaaatgtggcgtctctcgagtgtccgctatccgggcaacggatcgtcctcccgccacggtgaagagtccggtacttcctttcccctttccctggcgattccgt

SEQ ID NO: 38232 - DNA, 509 bp, Zea Mays
gagtgaggtggacatctaggagtcatcgatcatatgttggaaacatccagtatcatttttacccaatgaattcctctagtcttgtagttcacctacccgcatcgaggaacaagatagatgtttagttaccatacttaatgggggcctacaaccatctcaaccaaagactttgctacctaaattttcttagggctattcttgtttggtggacctaacatcataacctaacctccccactcgaattttttataatcaaatagtgtgcactgaaggcaaaaggtccttagtgcttgggcaatatggttggtagtgtagctttgcagttatggacaaagtgtccctcttttgaacactcaaaagactcctttgtcttaggtacttacttcgtggttgtgctttcttctctctaaaatattggtagccaatagcactaatatctaatttcttgaccgtgttcatgagcaactcactttggagatattggccctttgtgaacttttgcatctcag

SEQ ID NO: 38233 - DNA, 511 bp, Zea Mays
gagagaaggcacggccgggtgagctacacgtttcatgtcaatttatagcgagctaggggaactgaactcccccatcatcatcagctaggtagccctcacttagataagatcgagcggagagacgagacggcagcagcgagttgaggacggaagcgaatgatgggctgcactgcacaatattgagaggaattctataacgagagggacgtggacagctgcatgagccaccgaggtggcaacaaaggtggtcatcacaagaagagagagccttcatgtcccatcacaccaactgctgaggttaattgccaccggcctcatgtcgacatcggctatgacgccccagtgaaaaaggtgttgcttggcgccttgcgccgggtgactgcgacacggcagattcccatccgctcctgggctagggcttcgggcggtccgcttttgtcgtaggtgaagtccatgcatgtgcttattgtacaggagcatcatatgtgtagtgttgctcttattagagtcc

SEQ ID NO: 38234 - DNA, 396 bp, Zea Mays
acctacctgagtgcttgccacatttcccttgccttgatatgtgcttccagaagccttttgagagtttgatttattttgctttggatagggacaatccttgatgaaatgtccagacttcccacagttgaagcagctattagatgaactgggtaaggccgggaaacgagtactagaggcacttgactgattgttttgagtaagggtaggagtgggacagaagaaaactagttgcttgaagagacaagcgtgtggacgaggaaaagagcgatttgggttaaagggacggatcaccaaccttgaccgcttctcggatccttgagaggatccttcacccccttcacacccaaatctttttgtctttccctgccccgaattcttggcctccaccgaaagtgt

SEQ ID NO: 38235 - DNA, 273 bp, Zea Mays
ggtcgtatcctcttctttggctcgcgagtttgtaacctcatcctttgttgtgcttttgcttcttattgcctctacccttctcatctctcaatcttaccttggtgattactctatgttcgttatctaaaacctccaatctcccaccttagttcaagcgtggtctcttacttatctcacccgtggttatatcctatactttacctcttgcaagacttatcttatctctattcttgattgtacctagattcctggttttttatgcacatttacctc

SEQ ID NO: 38236 - DNA, 631 bp, Zea Mays
atccgtgcaaaagtcgcctaagggtgcagccggactagcacaacaagtgcgaaaaatcgaagtcttcctcaaaaagactatccgtgcaaaagtcgcctaagggtgcagccggactagcacaacaagtgcgaaaaatcgaagtcttcctcaaaaagactatccgtgcaaaattcgcctaagggtgcagccggtctaagcacaacaagtgcggaaaatcgaagtcttcctcaagagactacccgtacagaaccccacaccaaactgtccgcgcaaagaccaactacaggcgcgccggattgacataataaacacactagaccaagtgcacaatgcctttatgagcatagccggatgcgcgaaggcgcacagcctcatcatacaagctatagttacatatgtacagcgaggacatcacaccttacatcggttcaaccttcggaatgattcccatctccctatagttaaacagcattatcctcagctcctcaccctcaaaaagacttcgcagctccccctcacctacactcgcaacggccggcaaggacaacaattcctgcttgccagccctgcccacacgaagccgaccgctgtccacctcactcaccctacgtttcgcaaccgcccttcgtcg

SEQ ID NO: 38237 - DNA, 271 bp, Zea Mays
gcattgaaggtaagcggcacgtgggaacacttcgtttgaaggacgggcccggtgaaggctacatggtttacccttcggtagtggtctttcttctgtcgttttatttcgaacttggaactagaccctccagtaatcatatggattcctcctcggaagggttgatcggcgaagtcctcttgctttggtagaggtgggggaggtggtagtggttggtttggatgttgaattggtggaggcggtaacgctaggatttcttggtgttgaaggcgtt

SEQ ID NO: 38238 - DNA, 354 bp, Zea Mays
tgggggctcaaaagtagcaaaaaagttgagtgagaaaaatgagaaatttgttgtaacctggagcgagtgactcgctcgtgaagctccccgatcatctattgaggagggtaacgacattgaatgtgttgtggagcctccttcaaggaagtggcctccccatcaacaatagcatgactgcctccaggctcagcaggcttaggctccactagaccccaagtcgtagaagaagtgatgtctggtccatcaaccgaagtagtggaagtaggctcgactgggtcagctgatggagttggctcgggatcatcccaatcgatgttgtcatgctcctcccccacaaagatggtctgtcccatc

SEQ ID NO: 38239 - DNA, 356 bp, Zea Mays
gactttaagtggcttgcctttatcctctaacatgtgtcacatttcgacagatactgggctatttttcttttcatcctggtccaccagtacaagggtttcagatcatggtacatcttggtgcttcctgggtgcatggagaatttggagaggtgagcctcatccaaaattttcttcttgaggtccctatttttaggaaccaccagtctgtcttcgaactatagtatccccttgctgtcttggcgaaatcacttctacttctccacattctggttaagattctctttgatggttttcactcccttgtcatcgagttaggccaaaataatctggtctaacaaggttggttcgacggagat

SEQ ID NO: 38240 - DNA, 461 bp, Zea Mays
gtaccgaagaggccattgagtcaggaggaccatttttcaatagtatactaaaagaccaggttgcaataggtctgcctccgtcacgacacgagggtagactgtatggaagcggtaggatgggacaaaaacccttcatcccaccggattataatacagtacttgaggcacatcacagcatcctacattagctagaaataatggagccatttatccaacaacacatcaatgagcttctcgagcaaaatcctgggcaaatagatgattgggtaatgaagcgacataagctgcggttcaacacatggctaattgtgaaggacattccacacggagatacaatagaagaacaaaccattaaggggttggcatctggaccatcacgccaggtcacaacatggcaacatatgacattagtggatttacattttgtgccaagtccaaggacaaaagaagcatatcacaaa

SEQ ID NO: 38241 - DNA, 342 bp, Zea Mays
ggaacttgcctccttccaaggcctttacccatttcgtgtcaaatcctcctgctggtgatggcggtttgggccttagagtgcgaccctctgccgaagaagttagtgctttggttgcttcgcttgaagaaattcctgatgatgaacggcaggttcattttgaggtgcctttggatcccagtgatgcagagataagtgacatgcttgatatgttagccgaggattcttctgatgccgctcctgctggaacattggtggtggcgcctctcccggaagctagtaaagccttggatattcagacgcctgtcagtgttcgcctgaagcgcccttgccgagccaatcagc

SEQ ID NO: 38242 - DNA, 486 bp, Zea Mays
cgagattcgggctctccccagaagcgtcagaagacagctggtgggactaaggagcccgaacctcgggtctaggacgggcagaggggcgtgagccctccatcaccaccatcttcatatcagataccaccaccgccgccgcctgtgtcagaccgaccgccgtcaccgcaagggcagcgacaacaacatcagcagggaccgcaacaatagcagcaacagcaacgtgtgccccgcttccaaggccactggaaggttcacggtcccaagtaagcttaggccctcccaatgttcgctcgatcgtagcttttatgtcgataggtcttgatccgccctttgcctgtcagggcctcctcttcctcggcatccgtagacgttccctccccgccgcccgccatgcccgccggggggtctggttcccatcggcatacgcctgctgggaacatcgtcggcgatccgtcagcggctaccatggatgctccttccttgtcg

SEQ ID NO: 38243 - DNA, 486 bp, Zea Mays
gatttcaatttcggtggattggtcggttccccttcctcctctcccctatatatatgggagggggaccggtcgtggccttcaccatgcattcgcactcttatcctcaacttcctctattttttctagtcatgaccaaagatcgaaattggagcgagaggggcgaagagaggttcaagtgaggggctacttggtggcagggtaagatccacgtacctcaccgtcgtcgccttctattttcttctgtggccgagagagtcaacgtccttgtgccccacgacccgtggccctactccaccgtgaccgtggtggatctgtggaaccttgtcgacggaggtctgctttgcccctctcctatcgaagtgcgcctcgaatggctgatgcccagggatgaggaggagtcgaatccacccgaggactacatcatcagctttgtttcattccatgagcaagagtttggggtgccgtcgagccgcttcatgcgaatgc

SEQ ID NO: 38244 - DNA, 617 bp, Zea Mays
gatggccttgtgaccgtcaattttaggatgaaccggtggttgtccaaccgcatggaaatagctccgatcgaatcatcacacaccgggctgcgttcgggatttgtcgcgagtttgtggagtttggttatgggccgaatcgctgaccaccggtgaagttcgccattcagataagtgtacgccgccgagttagcttagggctagagatgggggcgtgttgccgtcgttcctgttgttcgccacggcaaggaagaaggcacctggtgccgttgatctgcgagtggatgtgtgggattcgagcgcgtggtagcgaccccgagccgtcgattggtgagtgaacgactcggacttgatttcgtcgggttaaagtgtaggccgtagatttcgaatcgggcggtcatggttggtttgggttttataaaatttggaccatcagatctcgatctagtggctcatagcgcataccgtttcgagtagcagagatctaatccggggcgtagatttcttatcctacggctgggatgttccgataacctttcagtcgtgtacttatgcaaaagaaaccctatgaaaactgtgaatcaacccgccgtcctcgtctgcggcgctctgtgtcttag

SEQ ID NO: 38245 - DNA, 470 bp, Zea Mays
gtagcccgtggcttcaataatctaggttgatctcaactggttaaccccatcttcgttgtgattatctcagtgcgacgtcatgcgattcactagtgcccttgtcgatgttgtgcggagacatcctaaccgatgaggatgtacaagaggtgatttaggccctcttcccccacccatgtcctttccttggtttaagctacatttgtcatcaattttcttaaactatatgtatggagcatgtatttctttgtggatgccataactcttcggctttagaagaagtatggttgggattaggcattccgtgcctttctgtttgttgggtttacaatttgtcttgtcttctatgtctctactaatcaagctagtgccttggaatttggacaatttaaaaggcatcaaatcaacaatggcacagagatttcggcgacatcaaagaatggtctagatgtataacgatgaagagttcctcc

SEQ ID NO: 38246 - DNA, 545 bp, Zea Mays
gaagcccgaatatgtctggaaggaataccgcgaaaatggaatagagaagtgctctatggcggtctacctgggagaaagccgaagctacccaaaccaccctcccttccaagtcaccttcatcgggcaccgcttcccagacacttgccaaagtgttgcccgaaaagcccttaaacagctatgccaaaactacagcagagagatctttgaaaccccccttcgttacttcccacctagcaacaaaaatacccccacctagaggaaaagactttaggccccgtcagggagagaccccaccgaggatgaccccaccattgtctacatgaccggatacctccacactctcgataaccactatgatgatctctcctcccactgcacccacctaaactcccgggtggaaagcttagagcagcaggtcaaggagcttaagaaggagaaggcatccctccaagagtgtctcgacatagcggaaggcgaggaggccaacacccgtgaagcctatcgaaccctaaagatggactatgataagaagctgaagaagctcg

SEQ ID NO: 38247 - DNA, 702 bp, Zea Mays
tgaaggatggatgaaaaaattacaagttcagtgtgaagaggcagacttgctgggatagctctagtgttgccttgacagcgctgcactgctagggacgcattagtagggttgccttgagatagctgcactactggggttgtattggtcgtcttgctagagggctgcattgttggggtaccattgatagggttgcctttagatttttgtactgcaggggtaacactaacatgattgctgccaagcaagttttcaccctcatcagagatttcatcctccacataagcttcatcttcatgaaactgagcaatattatgtgtttgatcaatatgttgtccagacctcgtgtgctaaaataaatatgagggtaataagtaataaatattccatagattttaaaatgactctaagatgttcagctactttaccgtatggtgtcgtgtattagaaccatcatgcgagatgatttccacatctctcatttcatgagccatcctttgctcctgcattttctcctccatttctgctatgcgttgttctagagcagctttctcatgttcagcctttttgcattctcagataaatttctttgtgtccttggacgcaaattatgaccttcagttgcagcactggtgttgtgagttatctacaagaatgaaacatggtgtaagtactttttcttgagaaatggaagaaagataagtt

SEQ ID NO: 38248 - DNA, 377 bp, Zea Mays
atggtgaagtgttcccccattaaagtggtaatgacacatgcatggtgaagtgttccccccatgaaatatggaggtgacacatgcatggtgaagtgtccccccattaaggtggaggtgacacatgcatggtgaagtgtccccccattaaagtggtagatgacacatgcatggtgaggtgtcactcatccataactcctaggtgcctatataaggatgtgcccccctctttccatgacataccatcccactccacacacattcaagggcaaggtagaagtaaagtagtgttgaagtataggagcccttgcataaccatatgtgtccttgttgtaagtatactgttatgctgtaaaatttctatttgcttagtgcataag

SEQ ID NO: 38249 - DNA, 753 bp, Zea Mays
atctctgatacacagtgcttgtgtatctaggtcaaaccgaggtcaagatctgatcattttctcagcatttcaggctatatctagatgctagtttctagagggtttttttgggggttctcagcgtttgtgctgaagaaatcacttccctttcgaatgaaatcgtgcatctattcggggaatatgcacacaccgttggaacaaagggaaatagtgtttactgtcagatttcaaccatctcattggggggtgtgaagcacttttgctgtttatcatagttcttcagtctgacactctgactcatcgcttattatggacgttcttgcacatgatgtaatggcaagagcaaacgtctgtgctgctatagtggcaaatttcttgtgctctacactctgactcttgctgtttatcatagttcttcgcggccagagcaaacgtcagtgctgctaaagtggcaagtttcttgtgcatatattggggttcctgttttccttgtgctatagtgccaaagctgaactttaattgcaagttatcaggccaaatgtttgtagatactgctgataatcacgcactgcgggtcagctaagcttcaggaaacgataggcgaaacactggccacgagtccagaccatgttcctctcttccctgtaatggtcgccctttcctacacagggcggctagaatgcgcagcaagggtcgagaggcctgtcggcagtgcgccccttgcgaccgcgtgtgacagtgctgagccatcac

SEQ ID NO: 38250 - DNA, 543 bp, Zea Mays
gtggcacgggacgatggggacttcgacgatgaggagcccaggagctggaagcgcgtcgacgaggcagaggtatgaccgtgtgagagatcaccgagatctcggtctcgggctgcggtcgttgccgtgctggcttaggccccttctcgagatagcgcggttggatgatcatgcgtcatgccaatttcgtctgcttagcaggctgggattgtccttgatcaccgaaatttagcttgtcatgtgatcgtttgcagcatttcatggtactgtggttaactattgcgaattgtgatacctagtgtgcctggtgggttggttcagttgtggcattgccgagtatccactatcctgcctgtttggcatggagggcttataccgatatatggcatggacaaatactgtcatggtgtaacaatctatgtcaatgtgagattaggatgttgaaaattaattaattaatagaactataaccagtgttttaagttgttatggttgttcttcttcatacaattcttacttcacaccagttgcctacctgcagctatg

SEQ ID NO: 38251 - DNA, 356 bp, Zea Mays
aatgactcttaatttttactcaacagttaaattaccattccgacagtttcagaagagagaggatgtgatagtgaagggcccaaaacagagggtgccgttagtatttgaacctaataagaaaattaaataacagaaatgccaaccagaagataacctaggctggccagggccatacagcacattagaagtcagaaggaacagaggacttgggattcccctgccactgctgatcagatgccgcctctgcacactaattacctccaagtgtgctttcgactctagtggaactagtactgcgttttagaaattgcaattttgcaagcaatgtttgactaattagtcagtgccaagtgtca

SEQ ID NO: 38252 - DNA, 440 bp, Zea Mays
ttgaattatctcgagatctgatttgacgcgtattcttccatgtcgaggttgatctccttctccttccttgacgatgttggtcttctttggccttcctcctggagttgctatccgagttgagggcatatggctatagctaggatagctagggtacatgaggtagttagatttaaacagagttttactttgcttttaggatatctggattaggcaacctatgatgtaggttaggttgttgtttacagacgagttagtccagggcattaatttagggtaagatatgtttatagaatcagggcctaatttatgtctaacttacttaagtaactcaatttggattagctcatgttagattaggtgggatctagatcagattggtataactagataagatctatttattttaggctagatcatggttgttactctaggatgaggta

SEQ ID NO: 38253 - DNA, 315 bp, Zea Mays
aattcgggcggttcctccacatcttcttctccatgacaatctccaaccaaacgcgcgattctcgggtagatttcccctatccatccaacgagctagttggccgccgagaaatctggaggtaggaactcgggattcagttcagatcccaactaacctggctataagtatttgggcgccatcccctcctcctccatcccatccccgccggtctcctattatggtcgcacagagtgaaacgatgaatggtgatgccgccatgggccgccgtcgacgacgacgcaatccatcgccgtcattgtcgcccatgctatgggt

SEQ ID NO: 38254 - DNA, 420 bp, Zea Mays
gccgaacttccgtaatagcttgaagaagggtagcgccctctcggccagtcttgagatgaagcggctaagggcggccagtgaccccgtaagcttctggacgtccttgattcgggccagaggcctcattgtctcaattgtttgatcttctctaggtttgcttcaatgccccggtacgaaaccaggaatcccagcaacttccctacggagacaccaaagacgcacttttccgggttcaacctcgtgtgtgttgcccgcagcttgtcaaagaccagggttaagtcttccactagggtcgaccctctcttagtcttgaccacgatgtcatcaacatatacctctatcctgtccctaattaggtcaccaaatgttttactcatcgcccgtacaaatgttggcaaggcattttttagaccgtaaggc

SEQ ID NO: 38255 - DNA, 285 bp, Zea Mays
gggggtgagcttcttcagtttcttatcatagtccatttttagggtgcggtaagcttcacgggtattggtctcttcgccttcagctattgagaggctctcttgaagggacgccttttcttctgaaagttccctgactttttgctccaggctttccacccgggaggttagggaggtgcagtggagggtgaggtcatcatattggttatcgagagtgtgaaggtatccagccatgtagacgatggtgggatcattctcaataggatctccccctgacagggcctgaag

SEQ ID NO: 38256 - DNA, 305 bp, Zea Mays
ccgccgtacccacttgccttatggcccgtccagataacctcgccggagttggccgcctgccgctcgggtgccacgtgcctaggtgctctaccatgtcgcaataaatcgccttagaaagttcgttcatcgccggtggtcgtgccacagtgaaagccatgaatcacttgcgccagtgacctcccttctctccggccgccaacgcgccattccaaaattgggtgccactgcccttggacactataaattggtgccccaacctgctctgctaagtaattacgcacccagtgaaccagccctcacctcca

SEQ ID NO: 38257 - DNA, 300 bp, Zea Mays
tcaattggtatctttttgtgatgcaattgatatattatgcctagaccaaggtatgttgtgatcccctctagttctgaggacgctacaatgtgcaagatgcaagtcattcgaatacttgatgcataactttagggggagcacacataacttgtgtcttttgagactaactgtttcttgagtgatcctatatagtctcaaggtggaaaagggaagatgagcaagaaatggagcaatcaggacttgggtacctccacaagttgagtaattggtatctaaagttgtgagtaattggtatctaaa

SEQ ID NO: 38258 - DNA, 329 bp, Zea Mays
gaggtgtggaaaatgtactttgatggctcgttgaaactgcagggagcgggtgaagggattctctttattgctcctggaggtgagcaactcaagtatgcactctagctactatttccagcgtcaaataatgcagcagagtatgaagcactgatccacggtttaagcatcgccgtatcactcggcatcaagaaactgatggtatatggtgattcgctagtggtcataagctagataaacgaagactaggactgctcgactgactccatgggcaagtactacgcggttgtgcgaaaactggaggacaaattcgaaggattagagttccatca

SEQ ID NO: 38259 - DNA, 440 bp, Zea Mays
ccgaggtccaggggggcagggcagggcatagcatatcatagctaggggagaagcacgtgtagcagcgcgacagacgagagagcagatagcagagagcacgcatgagtagagtagcggcctggagctagctacagtaggagtagtagtgtatatgcttgctagctcctccgcatcgtcgcggatggacccacccagacccagcggcgaggcctggacgggtggctggatccctccctctgtctctctctgagactgtgcccgtctctagatccggccccgacaatctttcaagccccggccacggccagtctctctcctctgctgtcacaccccttctctctctttctcttccccccggccctccctcatgcatatgcatggtactcgcattagattctactcctagctcactcgtcagcagtctcgtctcagtttcagcc

SEQ ID NO: 38260 - DNA, 407 bp, Zea Mays
acggcggcggggtcaccggagcccacgattccggccaacccgagcgccagacccaaattcgttcgacccccacgagattgacgactccctgaacacaattcccacccaaatttcggttgtcctcgagcgtaggacccggtacacggtgtaccgcggcgacgccatggtcggccagtgctccccggaattcggctatgccatactccaattcgctagggcataatgtgggggagaggaagacaaacacgatggaaactcacttgtgaccagccgaggtgaggtgatgcccgaccacggaagaacggtagtacagcggtgaaagctcacggcgaggaattcagtcgacgtccgaggcagtccctgcgccgatccaccagtaacatgttccacgcgtccaggcggatcac

SEQ ID NO: 38261 - DNA, 384 bp, Zea Mays
atgcctccgttataaggatgtcaaccaaaggcagcgagagagtcactacaagacaagacaacatgtaacgacaaccacaacgttgctacaatattctaacgagaagaggaaaggtcatccgcagttgtcttttggccagggagaaccctagaggacaaggatctatgtgataagacccgacccccactcatttcgtctggcctctagagtttatgtaataggtcctctccttgccttagcctataaaaggaaggggagtgtcacgatctaaagacgcaggcaactacatgcactggtagcctacacacttgtaatcgtacagaacaattttcagctcgctttctcactagagacttcagagctcctccctctctcaatagtttg

SEQ ID NO: 38262 - DNA, 294 bp, Zea Mays
gtgcgcatgtcgttgatggcataatgaatggcgattccatcctctactaatggcaaatgagacttgagagacaggaacttattgtagtaatcacgaaggctttccctatctagatgtcggcttagtgatagttcagtgagggtgtcgatatgcagtatgtaaccttggaagtgtaggaggaatttttcccaaagggtggcccatgagtcaatcatcagcacaggtagcctggagtaccaagttagagtggggccctctagggtgatcatgaaggactttgccattgtgttgtcg

SEQ ID NO: 38263 - DNA, 407 bp, Zea Mays
ctgatggtacagtaacccaataggatcaggttcagccccctcgccgccgacgagccgcgcgcggattcgagctatcgtgctatcgccgccgtgattcgcagtcagattagctggatagcaccgggggtcagtaaatatcacaccgtggatatgctcctgccactaaattactccgaccaccgtacctgagctagtcacggttgcttcggatgagttcaccggagatagccgcttcacggccttgcgccacatgccttggcacatccaccgcatcgtcgtgactcgtattagccgtccgttcatcgccggggagcttgccacggtaataggccacgaatcaccgcgccagtgacttcctatttctccggtcgccgcgcgtcttcatccaattccccgaccaccgctca

SEQ ID NO: 38264 - DNA, 464 bp, Zea Mays
agattgattataacactactatgtcatcgaagcccagccatttggattttggaaagtcaactctgtctgaagctgatatggctatgatgacgaagctaggctacttcagagaagccgacaaggggttgattcgctttggtggggaagaaactatcccgaaaccagaaaatgatgaagtggtggtctttaagagcttcttcaaagcagggctgagatttcctctgcacgggatgattggatatgtcttggaaaattttgagatttaccttcatcagttgacccctaacgccattgttaggctcagcgtttacatctgggccctccaaagtcaaggggtggagccactcaccaaagccttctgccgagtacatgaacttcactatcagacgaaggctagggaagacggactacatgagaacttcggctgctacaactttgcttatcgcaaagacatgaagacaccg

SEQ ID NO: 38265 - DNA, 387 bp, Zea Mays
cacgcttcttgcgtggcggtctgccctttcgatcgctggttttgccgaggatgagagggcgtataaccgcggggcggttacatgcttcgtatgcggcggtttgccttctcctcgtttcgggtcagctcgtatgacatgcgagacctagcccccatgtcgtagggtggaaaccctggagcgcgtcgggggagacttcacccgtgatgctttggggcgcaagtggggagatccgcctttaaaaagggatcgatcccccaggcagtagccatgccttcgcactcctcgctttcatcgcgcctttccacattccgagcccctagatggggtgcacctgtgttgccttcttcttgctgccattggaggagcgcgacttcgtgggggttggcg

SEQ ID NO: 38266 - DNA, 280 bp, Zea Mays
cgtccaagccagtgccagaagtatcatacagtgctatctggccatcagggtgcccaagatgctcgatccattcctgtccctttatggagccatgcgttgatgtgctccgtgacaatttgaaccaactcgattggaatgcgacacctagctagctcatgtctttctctaatttgcgcccagatttggatccatcagtttagaattgggtaatcaatttagtgcctttttaatcactataattaagtacagtacaatacatgagaagaaaacacactgtttt

SEQ ID NO: 38267 - DNA, 312 bp, Zea Mays
agtgttttggagcgtgataaccttgttttgcttggtcctcaacaatacctggatgctactttcactactcttcgtcataatgatgcttggaatcatcaggctctttttttcaatcgtgaatgttggctcatgttattgggtttccctctggactaccgctcttcagagtacctgcaagcagctattggttcgtttggcaggttggttctttgggaggaggatcacaataatgtcaccaggatgttgcttcgtgtccgtgtcacttcccttgaagaagtccctcagttcattgttttttcggaagcggatggt

SEQ ID NO: 38268 - DNA, 427 bp, Zea Mays
acaaactctcaagtaggtctgagtcggaaacgatttaaaaccggcacagcgtacctgcacgggtacatgactaagggtgattactataccctactaacggaggaattagcttaagtcggagacatcttaagtcggtgcaacatgctcacgcttacataacttagggttaatactataccctactaacggagcaatcagcttaagtcagagacgtcttaagtcggtgcgacatgctcacgcttacataacttagggtgattactataccctaataacagagcaatcggcttaagtcggagatgtcttaagtcggtatgacatgctcacgcttacatgacttagggtgattactataccctactaacagagcaatcggcttaagtcggagacgcctgaagacggtacgacatgctcacgcttacatgac

SEQ ID NO: 38269 - DNA, 904 bp, Zea Mays
ggatcaggacgtcgatccttctgttcctgatgttgaggaagtgccagtgcctgcatttgctgaagctgaccctaatgggtgtgacccgactgctgtggatcctaatgggtgtgacctagatgacattgaacccaatgggtgtgatctggccaaagctgaacccaatgggtgtactgtccgcattgttgatgaagatgaggaagaggaggatgaaatccctctaattcggaagaacagccggcgttgcctagccagcagggaaagcagtggtgttccttctccagctttatctgccctcattggtctgcaagaatgatctgtggcgaattttgatcagactcttgaagacatggtcccagaagatctgttgtcagagccagcagacggtggcatgatggatgtttgcactgatgtgcctgatgctgggctggagttatcccgggcggcgtcccacgcctcatcgaccttggagtgcgatcttaagggtcaggaggctggtctggattgttctgctcccatggaagtgggtgaaggtccttcagccttagaggtggctgttacagagagcttggccctcaaggatggcgctagcgcttacccagcccccgagggtgttgccggggatgacccggctcggatgggtagcgcgagctatgacccagcccccgaggatgttcgagtcggttctccctctcacacttccatagacgttcacgtagggtcttctccttcgcattctggttgcatggcagcagcccaagcttcgggtcaggaagtcgccttagaggccagcgctcctgatgacagagttttgacccctgctgatgatactgatctagtccccactgatgcattgcgggttgttccggttggtgatccttcatcgagccatcaactaacttcc

SEQ ID NO: 38270 - DNA, 316 bp, Zea Mays
gcctaggaaggaggcaaattctaggccgagtatgcaacaggggcgccgatgttcgataccttgcctctgagtatcatctcaagccgattcactaagtccacaataggaattcttctgttggttacccgtgttgagtcagccaagcctcggtacagataagccagatatgctctgtctttcagtggctgaatgttcttgaaaacaaagttagcaaccacagcttctgcagtcagacccctttccttcagcaatccaacttctgctaacaaaacccctgcttcagccacttcctggtccgtggaggactcgatccagc

SEQ ID NO: 38271 - DNA, 687 bp, Zea Mays
tccacccaccacgagcaccaagtcgcgacgtggtgctgcaggcgttgatcccgtcctccttccggaccccggcagcgctggggaggctggcacggatcctgaagtcaccctccttgcggttgagctcactgtttgccttgctaattgttccagcaagggcaaggtgaaggaacctaccccttatgaacgactcatcagccttttcaaacagctaaaaccatggcttcggtgagattaccaattttgtgatagtattcatcaaataagagagatactgagtgggcttatcaggaatttatgtttgtgtgcagtattcttactaatgaagtcagcaggaagtatctcccgttgcttatgaatgccatgagccggtgtaccctttttctggtttctgagtcttcccttttcaatactgatctagtgcatggattctgtcgttacacgatgcaagagtgtgtgggggaggggatgattgagcttttgccagcagtatgtgccattatgaaattgattgccttaatcacgggccttaacaaataggagccttagattgtttggttaatttggatactgtttttccccatctgcagattgctcgcaagatttgctcttctgtagatttgacttggggagggagcacacagcttttgctccatgtgctaaaaactgtcactgattctgttgtac

SEQ ID NO: 38272 - DNA, 350 bp, Zea Mays
atgaccctcatgaactccatctgcttgtccctgggcatctgaggcatctacacttgcatctgaggttggggtgggggttgttgctgctgcacccgctgctaagatttggccaattgcttggactgcttgggtttgcatcaggaacaactattcaatggtcatcgggggtggcggtggtaactgctgctgaggtgcctccttctggggtgcctgctgctcctactgagcacgtcttccacctctgcgcctgttttcagacatctgtagaaagcatacacaaatcagatctgactttgcagtctttcagcataagaaaaggtatatggaaatcttcataacactgaacaatt

SEQ ID NO: 38273 - DNA, 440 bp, Zea Mays
tgggtggttgccgctgatccgttaaccagcagtctcgattagaacctgagtgtaccgcttcggggttgaacctgagtcgttgacccgctgtgctgtgtgggcaacatcgctaccgccaccctatccaagtaagcccaccgtaatcagttcaatatgctccgtagaacgtgtattacctatcggcactgggaatcgtgctctggggcgttgggcgcgtgctcaccggcgcggtgcccctgcgccatcgctgggtacgaccaagggaagaagaaagtggtctggccgttggatcagcggtatttggctaggattagatctagctcatattggccttcaaccgttgatcatgcgttgaatggcccagatcaaatcccggcgcatcccttcaaatcattaaatctggaccgtcgatcctcaatcctgtggcccagaaaacctac

SEQ ID NO: 38274 - DNA, 449 bp, Zea Mays
aaaaaatttgcgaagattgtcaatgttccaagaatgctctaagtcttcgccggatggcgttgtgagcctgtacgcgccgggggacgccttcgtcttgacgatgaaagggccctcccattttggttctagcttgccccgggactttgtccgagctgtccggacgagtacgaggtctccttcgctgaattccctcgggatgactgtgtggtcgcgccatgcttttgtttgagcttggtatttatttagagcctgtagggcgaagacgcggtcaccatcgatgaggtccttcgaagtaggctcgtctacgtcggggacggctgacgtgactgtccgtggtgacccatgttttatttcttgcggggtcatggcctccgatccatatagaaggcggaaagggatgaacccagtcgccctgcactcagtcgtgtttagtgcccagactgcttcag

SEQ ID NO: 38275 - DNA, 327 bp, Zea Mays
gctgaggggaagaaaaagaaaaagagacggcttcagcgagtgtcatgcttgaatcaagatgtcggccctcctgctcttgctgccgaggaagtgccagtggagttttttagtggagttgatcccaatgggcgtgacccggctgatgctgaccccaatgggtgtgaccttgatgatgctgatcccaatgggtgcaatccggccagagctgatcccaatgggtgtgttgttcgtattattgacgaggatgaggaagaggaggaggaaatacccttaattcggaaaaacagttgatgttatatagtcagtggggagagtagtgatattcct

SEQ ID NO: 38276 - DNA, 440 bp, Zea Mays
aacaaaccatcggtcaagaagtcgtgatatgacgttctctagtcggccacggggtcggctggggggttggtttcctccatgacggcgaccggttctagggtcggtgggtccacgcccgtgagttgcctaccactctggtgggcatcgtcgtactgggcggttggtttaaaaaggtcaatcacaaagatctcgatgggacgctagttcatcccgatgccatttttgtagtgtctaccgtttcattgtcccgtcgtgggagtcgcacaatgtactgcaaccgctttcctaagggtgacataaaaaacaaggccaccactagctccccctttgtcattgacccatcgaagtgcatgatccaacatttcttggtggttcgcgtcagctctaattgggtctcggtccacttcgcgatgaagtcagcaaggacttgtgatttaatc

SEQ ID NO: 38277 - DNA, 355 bp, Zea Mays
ttatgatgttattatgccatcgaagcccagccatctggattttgggaaatcaactgtgtctgaagctgatatgactatgatgacgaagctaggttacttcaaggaagccgataagggattggtttgctttggcggggaagagactatcccgaagccgaaagatgatgaagttgtagtttttaagagcttcttcaaagcagggttgagatttccgctgcatggaatgattgcagaagttttggaaaaatttgggatttatcttcatcaactaacccccaacgccattgttaggctcagcatgttcatctgggctctccgaagccaaggggtagagccactcgccgatgcattctgc

SEQ ID NO: 38278 - DNA, 372 bp, Zea Mays
ccaaagaacatggtccggtaattgtcggagagtccggtaaccactaaggacagtgcaacgcccctaaggacatcccactaacagaaaaactgggagcaacttggtcgatccaaaacggaatgactccaaacttggtagggggttctctaggctgtagaagaaccatacaccgaagctcatcacccaaaacttcccatgacaccagagatctaagaatcaaggagaatgttgagcaccagatttggcacctgtgtatggccggacggtccaaccatgtggcccagacggtccgcgtctcgaacgatccgcgggtgtagcccggacgatccgcgattagattaactcgggcgaaagaccctttcccacgcgtgc

SEQ ID NO: 38279 - DNA, 323 bp, Zea Mays
atctaggggttggccgctttaaagcattatggaagaaattttgtagctcttgtgctttttcattgtgagagaagacccacccattaccggtccgcaaacgttgaatgaaattttttcgcctcctggagccagctttccggtggaaaaatttagtgttggcatctccgaatttaagccaaagcatgcgtgagttttgtctgtttcgtgccctttcaattaccgcatagccaaggatgcgcatcttcaatctatttcggaggttcacttccatgtcggacagccccctattttcttgtgccatgtccagtcttagaataacttct

SEQ ID NO: 38280 - DNA, 408 bp, Zea Mays
catatatgtcgacgtcaccgtgcgccgcggctagagacagcaatgaataaatatccaccaggtattactatctcatacacatacctacgatgaaaaaatagccccatcggatcaaccatatccactgatgggtatagatttaccctcatacccgcaaaagattaaacatctacattatacagatgtcaagtatatcaatctaaataccattacaaaatttataacatcattcaatcatctattaagaacaccatagaggaggtttataatgtacaaatggtgtgttatactgttataagaaaaggtgtgttatactggtgagtgccgcaaatggtgtgttatactggtaagtatcgtacgttgcaacggaaacatataaatacaatgataacatacgtacaaatggtg

SEQ ID NO: 38281 - DNA, 361 bp, Zea Mays
cttgtttcgtaatgataaggctaactgggtatagaatttgagagtattgtgattcaagcaataaaaaacaactcgagttgttcgttttatgtggcctagccaaggtagcagctaggcatacatattcagcatgattagttaattaggtggccgagtgtggtctaagtcgtgtgagcatggctcgctagaaacggaacgatcctaggtacctagggtacctacgcatgcagtctatgcagtctggagaggtgattttttggcaaaccctgcatctgcagatgcaggcttagcgtcacatacacagttaagtaaataggagttgtccacctagagaatcagatgcctaggagcagactctgtc

SEQ ID NO: 38282 - DNA, 322 bp, Zea Mays
tcttatggactaatcagtctgagcgcgaggctacgtgggaacttgaggagctgatgcggcagaaatatccggaactttttgttgtgggtaagtgttgttgattcattaaatttttcccttttgtcgttccgatagaagcatcaaaattcgaggtcgaattctttttgagggaggtagagtgtgatacccggtttgcaaagaggagaagtggaggttattgtttttgttctttttcctcattcgggtgatgcgctttgggaatttggaatttgtggaaaatattcacctgtaagacagtagaatttctttggttagttgtttg

SEQ ID NO: 38283 - DNA, 551 bp, Zea Mays
tgacccaggggatggcagctctgttgaaaaatttatgaaggtttttcatgagaagggcttgattttgtaatgacagattgattacacccaatcccccctgatgttttggcctggaaaccgaactccaagcaacttgagggggtttcttggcgtttaaatcagcacctctccaaaggcagtgccttctgagtctgtcaatatgcctgatcaccgttttggggagcttcagagtgcacatgtagtatgttgggagagaggaaaagactgcattaaccatttgaagccttccagcctgtgataagaagatggaggttgacgccagtcttttttcaattttctggatcaggggcagaaaagcacccaatttaggtctttggatacccaagggaagccctaagtaagtaaagggcaatgatccaattttgcaatgaaaagtatttgcaaggatcttcattttctggtccgtgacattgatggggtaaatgttggacttatggtaattcacatggagcccagtgaagtcagcgaaagagttgagcattgcttttaag

SEQ ID NO: 38284 - DNA, 334 bp, Zea Mays
gtcatggatggttagcgcttggtacatctagggatagcaatttgatccgcggattcagatatgcgtcgaatatccgatccgacagagccggatatagatacattttttacccgtgggttaaattcgtatccgatccaaagtcaggtggacacggattaggatattatcacccaaccacagattattcgttggatatctgaaatcgacccatagtttattttttgtcgtagtctatatcacatagcaaagagcaaatcgtaactccatgaacctcatgcctaacgttctcaattcccaaccttagattgtcccttctagctttattggcttcttg

SEQ ID NO: 38285 - DNA, 815 bp, Zea Mays
atgcttttccacaaacttagtggctataaatgaatgggatgctcctgaatcaaaaagcacagtagcgggagtaaattcaacaaggaactcaccgagcactactcccggggcttgctgggcttcttgagcgtctacgtggttgactcgtgctctgccctagtactgagtcctgctctgctgactgttggaaggaggttccatggaggtaggtgccaagggaatcttggggccattcaccgagttggagtaggtaggtccgggtgccttcaactgggggcagttattcttgaagtgactggggtctccgtagtgccaacaggcatttgctggcggttggttgcttgcaacggagggtgcctgatgggagctctgactctgctgattgtagcacgatggagtgggtctagatggtttattgaagcttgttcccctgggtggaagcccaaagggtcaagctctctggtgacgttcttgctgatgagcttggagaacttggaatttcctcttgaggtgccctttttcttcctcttttgccctttccacttggatggctttgttggagaggtgagaaaagttgaggaagtcttggctggcgaggatggtcttaagctcgggtcttagtcctttcagaaaacgggccattttcctggactcggtgctgacatcgtcaggcgcataacgggctaactctgtgaacttgtgcacatactcactgactgttctcccgccttgagttagctaccagaattcatcctccttgagttgaactatcccctagggtacatggtgctcacggaaggctgtttcgaattctg

SEQ ID NO: 38286 - DNA, 303 bp, Zea Mays
aagatattgacgtgctggaagaagagcgattgaatacagtaattcagtcagctagataccagcagaccctgaggcgctatcatgataaagctatacaacatcgatcctttatagtgggagacttggtccttcgccaaaatctaacgggatagggacggcacaaattgtcaccgctatgggaagggccattcatggtatcggaggtcactcggccaggatcatatcggcttactcaaatggatggcacggaagtggggaactcgtggaatatagagcacctcaggaagttttatccttagcaag

SEQ ID NO: 38287 - DNA, 582 bp, Zea Mays
ggtacagcacggcggtggtgcatccacttcggcgaggaatctccggacatccagcacacaacccggccagccgcgggcactagaagttcccagagagcgccgccaagcatccaaacgggccggtgattcaccctatctcccagccaagcaccgaagccaacagcggctcacaatcgatggcagcatggagcgacttccaccgcgctctcccccatggcggctctcagctctcacggttgcgtggcgtgggtaggacgggatgcggaggagtatggggagctgacttaagtccccaggataatcacgtggtggcccgagaagtaggggaagggggttgagggagatgcgagatccacgggcgggagatcggcgtagtctgttaggaagacgctcctgacgacccgaccccaccgcacagcgactagaagatggcacaaaggtgcacaagggagagttggagagcggggcccacatgccagtgagatgacagagagggcgcgggcgagaatgggctgcgctggagaatcgctagatgggccgaaaggagtagagccggcccaggcgcatggttttctctttttt

SEQ ID NO: 38288 - DNA, 510 bp, Zea Mays
gacttatattactcgcaccgtggtgcatgtagtaggggtttacaagcacggcgggagaggggaggtccccaagtccctggagatgattgaggcaagtgccaatatctaagagaaagtggaggagtgagtgttcgtctgcgtgtgttgtggacatcgtccctggagtgaccactgccctatttatacacgaaggggagtgtccgtagtgtaaccgagtgttgtattcgaaggagggatgccttagcgtttgcaagtcgacgtgacggtgaactgtgctgttgacccacgcctgctgatttcccgtagagaacagatgcagagaccaaggggttgtccgtacgcttgagcccgaggaagaggtcgcccatgccatagttgttgtaacagcgccggggtatgggccaaaggctgcttacgaggtgtgtcagcgtcctggcacgtgatgatgtcgagattccctgctgcgcttatcgagatcagagcccctgcctggttgaggcggaagtcttc

SEQ ID NO: 38289 - DNA, 616 bp, Zea Mays
taggaaggttgcaaaaaatgtgttccaataacaaaataaatcaagggccggtactatacaatgtacaattatgtttgccttggtagtatttgagttggaaattcgacaacgtgttttagcataataggtcccatatgtagagtagtgaggaatgatagagtccaactctcctcagcaactcagacaaaaggaacaactttgcaacttgtactaaacctacataaataactctgatgagttataaactgatactgacttgaggctgggattcaaaactgggttcacaagtcacaaccagttgggaccaacgacttacataatccgctactgctactgcaaatgtgaacagatgaaactgcagtaatcacctgctagaatttttattctgataagtatactgctaaaatttctcttgctacaagtatatctgactctatccaaagatcatggaggtaaaatccagtaacccagtttccacctaatcgagaatgataggccacgaaaacaaaattcacagccatagtgaacaagcatactcagatcggccgagatgttaccagccccacggtctccgcaccacctaatttcacccctcaaaagcgtgcacacacaaaca

SEQ ID NO: 38290 - DNA, 1051 bp, Zea Mays
cgggagatggagtgtaaaggcatgaatgctgatgctgtgttttacggcagcatggttcatggatacatgagtcgtgggttcttgatggaaggtcttcgggagcatcgatccatgctagggaaggggatcacagctgatgtaattaactatactactgttattgatggactctgcagagaaggtagtgtggagaaagtaacaggtttcttggatgagatggtgcgagtggatgctaagccgaatttgattacttatacatcactggttggtggcttttgtaagagagacaggtgggaagatgctttctctatcgtgaggaaactggaacaaacaggcatggtggtggacgagtatgtatattcgattttgattgacagtttgtgcaaaatggacgatttagacagggctttctctttactcacagagatggagaataagggaataaaagctagcatcataacatacaacgcgataataaacggtttgtgtaaagctggtcactgtgaaaaggctgttgaaatttctgaaggtgttgctgctgataatttcacatatagcacactgttacatggttacattaacagaggtgacataactggtgttatggcaatgaaggataggctcgaaggtagtggtatttctatggatgttgtcacatgcaatgttcttatcaaagcattgtttatgattaacaaagtgaatgatgcctggagcttgtttcataaaatgcctgagattggcttaaggcctaatactatcacctaccatacaatcatagacaaattgtgtaaagctgagcaagttgacaaggcactggaattgtttgatgaatacaaaaaagatgcaggattctccagtgcagttgttcatgagtgcctgattagagcactgtgtaatggaggaaaagttaacatggccgaccaaatattttatgatcttgttcagaaaaaaataaggcctaatttctttaactgcaggaagttgattcatgcacacttcaaaggacacggtgaacatagtgtgctggatttcatttgtaaggttggtgaac

SEQ ID NO: 38291 - DNA, 580 bp, Zea Mays
gggcgcagccggaatagcacaataagtgcgcaaagtcgaagccttttcctaaaagactctccgtgcaaaagtcgcctaagggtgcagccggaacaacataataagtgcgcaaaaatcgaagtcttttccaaaagactctccgtgcagaagtcgcctacgagagcagccggatcaacgaaggcacgcaacctcataatacaaattactgttacatacacacagcgagggcatcatatattacattggctcaaccttcgggatgatacccatctcactgtaattgaacaacattatcctcaattcctcaccctcaaaaagatttcacagctccccttcacctatgctcgccacaatcgacgaggacaacagttctcgcttaccagtctggtccacgcgaagacggccacgctccatcccaatacgatgacgcctaccactttgcgacaattcactcactctctgtttcgccaccgcccttcgccgcctatacctagtattcacacccgggagaccaccagaaccttccacgcgcggcgaaggctctgctacatccacatctaatgctgcaaaataatccaag

SEQ ID NO: 38292 - DNA, 272 bp, Zea Mays
ccacctccgaacagctgtttagggaggtggacctctacatcaccgccgacgaacgggccaaggacctcatcgggggaacaaagcttgctccatctgcaccatgccgcgacgcgaaccagcaaaccgacaagcgctgggagaagaggcctcgtgaagaagtccatgtcactggaccacccgtctctcgtgcccgaggggcaccccgtggaggcgaacgaacattggacgacatcctcgacgcccagtgcccgtaccacaaggatatgcgtcat

SEQ ID NO: 38293 - DNA, 419 bp, Zea Mays
cttcactgcctggacgaacccactgtcctgtagcagtaatgtgcaatacaggatgattctcacatactccatgatcaagagcaccatgtttccatgctaaagtggcctccagcattgtttcggtgatttgaatccatggatcgaatccaccttgtagacaagatgatactgcacctagaaataaacaaccagcttctactctatacatcccagagctaatgtcacttatccatggtgggatcgaattgaagacctgtgtagtggcagtgaacacttgcttgacaacccaaacgatacaactcttaccaaccatatttcttagaagctgacaaaattgtgcacgcagatcatgttgctgacgctccatttctgttaacttgaagttcaggttgtctcttttatgtctagctaactacgac

SEQ ID NO: 38294 - DNA, 283 bp, Zea Mays
cttgctcccaggcgaagcactatctctcccacaacctagaacactcgatagctcctcacggattagagctcacacagagagaatttcgcattgcggaaggaggaagatgaacagtagcacatgaggcaatttgtgcccaaacgctcggcgacgaatgcctctcttcaattccttgctgttagtgttaggtggctcaaaggttacaagggagttttatagctcgcccgacgtgcccacgtcccacgcgctgcctgaaattcgccggtcgacccgctctgctccg

SEQ ID NO: 38295 - DNA, 448 bp, Zea Mays
gtcttagtatgctcgcgtccttggagtcttgcatactctcatatttttatgtatggttatctttcataccacaatgactgttcaagacatttcggttaacatgcttttgaccacccttatttcttgatgatccatgagcgaccattttatttcgcacatccttggtgatctcgttgtttccttataacttccttcgataatgaatttttacctaaaccctcctattggaaccttacctaccttacccttgattgttttctccacttcgtcacttcgcgagtcttgccttaactttatcatttgcaatgctctccgttatcatcatctttacccttgacacctctatatcttacattgatgtctatcttatacctatcatttaaaatctcttgtcctccatctcaatctgagcgttgtactttacttattttcccttggttgtatcctc

SEQ ID NO: 38296 - DNA, 298 bp, Zea Mays
tcagaacacatgtgtaggccttggtgtaggttgtggcgtagtctgatatgttgtcatgcgtatgggtgtatgggcggtgtcgtcctgtctcctccccctctctcttgattcctcggtaacacacgaggaacaatagaggtcataatgaagggcgcacaagcggtgcattgagtaaatgctcttgccttggaaacgtgtgggtaacagtgatccaatacgttgcaggctgggcgcgccgcgtgcatttaatgcggggggtacaccacctgccactgacgtgggcaagtgtgcatcccgc

SEQ ID NO: 38297 - DNA, 309 bp, Zea Mays
ctccgccacattacccatagctcgggacacccattgcttcgtcctttccccatctagttcgcttggtccacgctcaccggttcactgccgcagctccatcgccgtcgacccgtgccctcaccgtgccccagccaccgttgtgcgttcctaaggcttccctcaaggtaaccatcctagccccgcccttattttcccctgtgtcgcatttacttgcccgcgattgctcgtcggagtattccccggcccaccgaggactcccctccgtcgtcaggtcgcctcagtcccatccacacaaacctgaccccgcca

SEQ ID NO: 38298 - DNA, 463 bp, Zea Mays
caactatgctgaggtaaacacctcagtaaatatcaacaatggagatcagattgcagacatgtccatttctcctttttcaacaaacagaaatctttcttccctgtccacactggcagctactcctgaaaggaccacagacaaagactgtcatgattcttttattaacagaagtgtaaattctcactatgagaaaaagagaaggttgagctccccaatgagttgtacttacacgacgcagtctagtcctccaagcaaatcattctgccacactggttctgttatgcctggggatttgaatagaaattctgaattgtgttgtaaaaatataggattgtccaggtgtgaaaatgtcaagtttgaaagaaactacagtccagaagaggtttcagcaaagaagtctatgcaaaagaaacttcttataaattgcattagatgcaaaacagctcttgggttagaagaagat

SEQ ID NO: 38299 - DNA, 513 bp, Zea Mays
agcaaacgaataactcgaagcggggtcataacactgtttctgtgagtcgctgacatactatagaaaacccctccaggttctaatccttcgcaggtgaagtccccgacggcgatccgcgctgggagctgagctctggcgagctggaccgaccggatgacgccacggctggagctcccgagcgacagggacacaattggatccaccccggccatttcccctccattaatttcaccgaggggacactgaatcgatcagttcacggtgatcgggcggatggacaagggggtgaatgtgttccgaccaaatgacgacgaggacgaccaaattgaggctggggaaaggttcacgggtgccccagggtctacggacactctttggtttgggcagaacaagacccgaagagcgggtcgacggtgagggggggtcacgacgccgaggtgtaaaggcagagccacgcggcgagcaacgacgaaggcttgacgacggtgagcccctttatccacgggcggtgag

SEQ ID NO: 38300 - DNA, 449 bp, Zea Mays
aagacggtggacgacgacacgactccgacttatgacgacttcaccatcgtccatcgagtacgtgcacattgagggagctgggggagtaggcaactcttctccgagcaggtctacctagcccccaagtctccaccgactccagcgccacgctctccagctcgagatacaacgagctcttcgccaccacgtactccagcatcgacggtaacccctctggaaacgtcctctccgacgccagctcgtgtcgagcacgacccggtggagctcgttacctcgctttcccacgacgaggagcgcgtcgacgcgtgctacgatggcgagccgttgcggtatcgtacggtggagggtcttctcatcgacctgttggtgccgggcctggcgtctcgcattctagcgggagaattgcatcttgcatgcgacgacgatgagccttggtctttcgctgatgc

SEQ ID NO: 38301 - DNA, 645 bp, Zea Mays
ctggattactgctttcccgtccgaaggcaaaggggaaaaaggaaagttgctacttcaacatcttctagtgtgccgaaggcgaagaaagttaaggtcctaacacatagaccgaaacccattgagacggccgatgtgccgaagctaattgaaaaggcagaagctgccccctagccacagaagcaactcatgtgatgccgattgaaactaggggagacccggtcaaagaaccggaattagaaaaggtagcagaatagccaaaggtgttgagctgcccaactgtgatagcattgccgaagctatcagccactgcaacaacaactctgagaaaaaggagaatggctagtgttttggatgttgttttggaatccgtgaacactcctgcttctgccagaacttctggtgggaaaattgaagataccagagaagtggtcactgcaagcatttcttttgttcatgctgaagcaggaccttcaaaagctgcgccagtaaaactggtgggagaaagccttccagaaaaacccacaacacctactcccgaagcacctccctagggtgatttgaattatatagttcaacatgcttcgggaaaacagctatcggcagagcaagttgccgaaacacaacattatgctaaggagctgaaat

SEQ ID NO: 38302 - DNA, 526 bp, Zea Mays
tttacggtactgccattctgctagtttccattgttctttgttccaacttgttgtgctatgcctcggatacatctcttagccagcaattgtgacttgtgctttggatatttattgaacttcgctcatctgcactcgattttgttccacattcacatacatattgtgcgtgtcctacagctccacatactttcttctgatcaatacaactttgaccttgcaatcgcggtttcactccctcttgttaagtatcatgaaccagcctcagattgtaccatcctttgcttgtatttcgtcagacacttgtaagagcttggtaagatacattagagcgtgttcctgtgttccacctgagaggagcgtgtagtgaaattattagggataaccttcactgtttgtttcctgttttttgtgtttcgatggcaggcgacgaagaagaagcaaggatccctacagacttcaatgaatgtgttagccgccaagatcttgaggcaaacaaccagctcctaaagaagcaaatggaggagac

SEQ ID NO: 38303 - DNA, 635 bp, Zea Mays
gtgagcatatggcaactaacgccgggcacgaagtccatccaatatcgtgtcctcgatctcacatataaggaagtcaacaacatcaaactctgaatgcgagatcagggcaccaaggagccagagatggatatgagtggtggcctccctataacccatctggggcagtagcgtccgtctcatgagctgatataagtacttggccgctatagtgaaatctgccggagaacgtcgcgacccatctgagaagggcggtcggaacaaagccgcgacgtgagctatagctggagcaactccgtcgtgagggcgacaaggaggatcagaggtaccgtagcacaagatgtgaagatgagtcgatgactcgttgaatccaaacagctggtgaatctggctagcatgtagagtaacatcctctcgctcaaagcggaacctcatccactggtgatcggggtcgatccatactgaagcatagaaaactcggacccactcctcaacatatctaccgctggtagtcataagagtgagaagtccaggcaaatatgagaggtgtacctcagagtcatcaccggctgctagcaggaaagcagggagatccaatagccggtgcgctcgcagagcaatctaggctgacatctgtg

SEQ ID NO: 38304 - DNA, 533 bp, Zea Mays
gtcatcatccaccgacccccatcggtgggtcttgagaatgaattgcttccatagcttcttgtccctcttccttcttcttctcgtccttattattcttctttgccttagcgacatcacgatttgttgtgtgcatggccatgtcttttagtagcggtgtgtgggagaggtgaaaatgggagcatgactgcaaatcatagtccatgagaaattgatacatcaaaacatgaaaagaagagagggaaataactcactagatatgaacgaagctaggctcaggctacattttggggtgtcccacaatcgggaaatcctagctaccctatcacgtcacctctcaaatcctctgagcaatctcattgtcccaatgacacatgtcactgatcgagatcctcaccaatgagagactagggaacatctggtatatggggaacagacgcaccatcagcaatgcaaccattcgatcatggtacaccgtacacatcgatgacaccagcgctcgatagaccttagccgatgatgtggaggatgtcgtg

SEQ ID NO: 38305 - DNA, 517 bp, Zea Mays
cactggagttcgccctaaacgatggagactgccggaactgagcatcagattgtcatccccgagcccaggtgagcctagtctatgccctaattgagctagtccgacctggatttctcttgcccacgacgacggcaaaacccgagggtgaactgatgtgttcctgatggtccagcgcaatctagctcaattggttgagccgaggagcatcacgaatgaatgggggtgtcgaaacagggacaagaaagacgaggacggacctgagagcgactggccacggtggggtgactcacggcggcgcagacgaccaatttgggggaaaacccaaattctccggctatggtggctaatcagagcgagagttggtgttctgagttcgtaataagttggcgaagcaggccggggcatcaatttatagtagctcgaagcggtggctccaaatttgggaggagagcggggcttatcttctcggcgagacgattaccaaggctcgccgtggagcgcagcgttcaccgagtga

SEQ ID NO: 38306 - DNA, 405 bp, Zea Mays
gaacaacccataatcagacattgatgccatgcaaatgtagaaaaaaataaatatagttcagatgtatatatatgcacacaataccatatcatcaaaaacataaatatagcacatacagaaatacacattattttgaagcagtaagtccttaatcaaacataatgaatcttttgttgatgaagtttgaaattttatcagtattattgcatatgcaaatcggttaaccatacacattaaataatcgtatgatgattgagttctcacaaatactctacactacgcatatttgcggtgcaaggtagagcctgagagaccaataatacttgattgccgtcattgtactaagaatatgttttttaggaaactgaaggcaaaatgtaatgttttcaaaacattgcaaggtaa

SEQ ID NO: 38307 - DNA, 466 bp, Zea Mays
gtggaggccgcgtgtctggggaccaagcagctgctggcaccagcgagtctttccgttgcgataaacacagacgcaacaaaacgttctttctccctcctcctgttatcttgttccttctcccagtgaaaaatctttatgtcctcaagctcaagcataccgccaccaccagtctcagcccaacgctctacctcaacaactcacctcgttgtttacatttttgttctttggtcgtcgtccatagaaaagaatccccatcgtcaggtcgtttatctactccaagctggcgtctgtgatagggtgaggcagccaggcaggtatggtctttgggctcatgttgtgctgaatggggcagggtagttgtggggggggaagcgctcgtcttatgcttgttgagattcggctgggtgcaagcagccagggccttgcagccagaaattgttcgtcctgtatgtttgtgtggagaaga

SEQ ID NO: 38308 - DNA, 398 bp, Zea Mays
caataatcttacccggcatatatgtgtttatcgatgcgctcttcacatagtaatttgcagtttaacttgggcatcacatgaacactactaatttttacccgcgactgtaaccatgcgcatttagactacaacaagcaatttattgcgattacgtgcttaactaaagccgtccaacgattcggctaactagagtaacgacatagcccgctaaataacatacacgtcagctagtccattgttaccacaatccaagacacaacatatacttcaacgtttttataaacatatatattcacaagtatttttgcacaccgaccaagcatacgaatcgtaaaccaccaatatccaaatcgaaatcaccatgcatttacttaccaaaccatgaacacataacgtgt

SEQ ID NO: 38309 - DNA, 301 bp, Zea Mays
gaagatgtccccgttcaaggcactgtatggaagaaagtgtagaaccccattgtactagaaccagactggagaaagacagttctttggactagagatcatccaagaagctgaggaataggtctagatgatcagggagaatctgagaaccgcacagtccagacaaaagagttatgctgacacccgaagaagacagttggagtttgaggaaggtgatcatgtgtacctaaaagtgtaaccaatcaggggcatgaaaagattcaaagtcaaggggaagttgtcacctcgctttattggacccttt

SEQ ID NO: 38310 - DNA, 598 bp, Zea Mays
ccagttttcttttatacgctcacactggtaaagcctgattccaagggccgttcgggcgatccgatttcagcggacgacaaagcggtgtaggcgagtttgttacgaggaagacgaagtttccggcggcgctggcgtggggaaagtgaagaggagtttcagtccgatggggtccacccgccattgccacaaatgcgaccatcgacgtggagtcggagccagggagtgggccccataggtcggtgaaggtggagagcggtgagactagcctgcatccatgcagacagtgccagaggtttatgtactcgcgtgatggctcggctgagctgctgccgcgcgggcccggcctggtagtgacacgaggtgaaggtggactggctaattcctgggccgtggtgagaagttgggctgtgcaggtttgggagtagagtggactgggccgcgcggatgaatggccgagattggagtgaaatcggcccaagcgctaggaatcccccctttcttttattcctgttttgttttttattccaattcataatttgaattcaaatatatttatgagtttcatacagggatcaagtgctcaaataaaagtactagc

SEQ ID NO: 38311 - DNA, 364 bp, Zea Mays
aactggtggtggcggcagtggtacttgttgctgctgttgatgttgttgttgttgttgcatttgttgttgcagctgctgttgttgtgctctccttttctggcgtatctcctctcgctcctgacacaactcctgtcgtatattttctctttcctgatgcatctcctggcgttcttgctgcatttgagcacgcatatcagccatagtgtccgccatttgctgcatcactgccatctgagcagcaaccagtgggtcaactccgcctggtggaggattaggaggattcatctctgcaggttgtggctggggttgtctatatatccaccgagtgtgtcgattaggaggcaaatcaattccaccaccccgc

SEQ ID NO: 38312 - DNA, 484 bp, Zea Mays
gaaaggtgtgttatcaaacatatgtgccgaattgtgatgtagtagtgattgcgtaagttgaaccgaagtgtcccaagtacatgtcgtgatatggttgtattgagataataaattataagtgttgcgtgatatgagactcgatcgatgtagttaatattgaattggcctgtagagaggtggtgacatgccgaagtagtcatcgcttcctctacggttaagtcggagtcatgcgtgatgatgttatttatggggtgaatgcgtattgaaatattttatgttgtgccatatgattaggaagatgaaggatagatatgttgtttcggaaatgttagccaatagattcgaacaagcgtgatagaggttgagtcacttatgttataaaattgatgctcgacatgttaggtctcctaaaatgtggtgttttaggtgacttgtgtgttatccattttaagttgagaaatgtttaagagaagctaattaattt

SEQ ID NO: 38313 - DNA, 594 bp, Zea Mays
gaataagatctcaggtgcagtgcacctcgccgccagcaatcccgtgctcggatttgcgccggcgctgctattcgcgcccagtagcacgtgaataacttcgtggggtaaaaagatctcgccgtggatgaacttgggggcactgttgcgctctgtcgcctcgtccacttgccggcgacgtggccaagcggccgtcaccgggatgtacaccattcaccgcgattgcaccacgccttaggacatcttaccacgtcgtcgcgattcgtagtgactgcccagtgaccgccgtagctcattacccagtgaccgccatgacagatcgccacgatgactcacccctctctcggccgccaccgcgatttcttcaaattgggcaccaccgctgatggacattataaatcaacaccccagggagttccactaggtattttcgcatccaacgcaccaacccttgcctcggatcatccaccagagcccctcaatttctcatttcccccaaattggttagaacaccgccgtgagagagctcgtcgtggccagacgtctacgggttagttcgtacccttctgtgtgatgttctagcctccctcatgtctt

SEQ ID NO: 38314 - DNA, 414 bp, Zea Mays
gtgaaatatcttcgttcctttgtcgttatttgggtcttcctctttccttgcacaagttatccaggcagcagttccagccttttattgatagaattgctgaccagctttcaagttggaaggctgacttattgacaaaggcagggagaagagtccaagttcagcatgtccttaccagcatgactgtttatatggcaatggcagtggatatcccacaatggggcttagatgccaatgccattgacagaataaggaaaggttttctttggcgacgtcgaaaagaggtgaaagacgggcactgccttgtggtatggggaaaggtttgccaccccctttagcttggagggctgggtatctccagtttaacagagctctgttgggcccttcgaattagatggctctggctgtctaaaaccg

SEQ ID NO: 38315 - DNA, 515 bp, Zea Mays
cattttgttaccaaagtaagaactaagcctgatgcaagtcactggctttccaaaccaatagggtgatcattcaatagagctctaatgcataaaggtcgtttcgaaatgcatctttctcggtcatgaccatctgatcaatggatcaacagatatagaatggaggtgccctctagcctaaatagataaagggactatgcatgtaccattggttcatcgtcgtaccattccatatttgaaaaagacaatatatcgacgatgagtaggcgagtggaaagtatcaaggcatcacaagatgaataggcgatgcttgccgcgtcacctttcgagttgtcttattcggccgttttgttttagtgggtgactggggttttcttattggccaatctcgtagaacgaccttcttgctagcgtatttagagagcaattgatcgaaagtagggccagctttgtccagccgaccgtgtgtgttatacatgctttgctcctatgtctcttttttcgctttgtgtggaggc

SEQ ID NO: 38316 - DNA, 657 bp, Zea Mays
tcccgccaactcatagccgaactaggtaaacgagtgccaccgtgagcttcacaagcatacagagacatgaaaacaatgtttgatttggacggtgtcttaccagaatggattggccacggttgagctgctcttcgtgatggcggagaccagtttggggaaagtttgaaattcaagagctcaggtgaatgattaagggtgcgagcgggtgctatggcttcacaaagaactctagttttactgcgcacacttaatttgagagaagggggcagaggtagcacaaattcttgcttcggttcaactcactgtgtgctggatgttcatacctcgccgtggatcacgggctatttatagccgcggcggtccggcgatcacttcccagccatggataacttctttagtgcatgcctagcacgtagaggagaggtacagtgaggtaaatcgaagcatgtgtgacagcgcagcgagagctcactgagtcacggtggccgccggtgaataactccggctggactcggggtatggtgccacgtacgctttatctaactccggcgttatccgttccttaccgagcccaaattggaacggcggcggcacgaatcgcggcggtgagatttttttggcgctggcggtctgatccatttcgggacactataccat

SEQ ID NO: 38317 - DNA, 289 bp, Zea Mays
ccagtacctggtgggcgaattttttagcaatccaacctattggacatcaggttacctgggaagagttcaagctggcattccgggaacattatgtttcggagggagtgctacaaatgaaactagaagagttcatctgagtgaagcaagagggagatactgtgatgcagtatctcaataaattcaaccacgtctcctagtacgatattgaccaggtggatacagacctaaaatgaagaattgctttatgagggggctaaatgacaggctccagcgtaagatggctacatgt

SEQ ID NO: 38318 - DNA, 467 bp, Zea Mays
agatagtgtaatggagaacaattatcataaaaattgatccatgcgagaacagagtctaatggagaacaattatcataaaatgttgatctatgcgataacagatagaaaacagaagcgatccccccaatctggcaacgtaaagggtagcacgactttttttttaaaaaaaacgagacagaacaattacgacgcgccgcgagcaaatggtttacgagttaatccagatccgtacaaaccaaacgaataatcaagcgccaaatcccttggaaagcgatggaacaagactaaacaaaccatgaagccaaaaccaaagtgaagaagacaaaactgctcctgattggaggtaaacaaccggacgagaatccccatacatgccagggggcagcagaggaatacggaaaccttacttatctacggaacgaaacatgactagtcgattaccccacccaagcccaactgcacaagca

SEQ ID NO: 38319 - DNA, 473 bp, Zea Mays
cgatctcaaaggcgtctgaacgcatacctgattttgacatgttgtatcctactgagttcctaaactctattaatgcagcaaatttcccttgccacaaacttgagctaaaaaaaggcgttactgtcatgctgctacgtaacttgaaccagactgcggggctctgtaacggaacaaggatgcttgtagctgagatcggccatcgtattcttaaatgcgtagtactaacgccctccggagtcggagaagaagttttcataccgaggatcgcgcttaacactaccgacgccaaatggcccttcacattgcaaagaagacagtttccagtacggatatgctatgccatgacgattaataagagccagggtcagaccctctcaacggttggcctctaccttgacagacctgtgtttacgcatggccagctttacgtcgctgtttcaagggttacatctagaagcggtcttagaattttg

SEQ ID NO: 38320 - DNA, 399 bp, Zea Mays
gccgtggtgccatgacgaactggatcggctgctgacggtgtgctcgctgcctctaggcactcggtgcctcttcgttcggcccctgggaggaagaagcgctcctagccgtgcatctcagatcgagggccaagaatgaatgtaggcattccagggatcgtactgaatcaggaccgcaaatttgaagatccgacggctgtcaccaggtaagaactcaaaaaagcctaagtctaatctggtccattgatggatgatccagcggctgtggcgtgaaaataccctttcgccgtgcgtttttcacaaaagaaccctcatcttgatcaaaaataaacccgccatcctgcgcagtgaatactgagtcttagggaaaatgtgatttaggcccctgaccttttaagaaat

SEQ ID NO: 38321 - DNA, 614 bp, Zea Mays
ttttttctttcagtcttctcactgcacttacacttacctttgcacagatggattcacccacgcctattgagggaggggacgcccctgtcacttttgactacctttcccgagagggttttccctctattttgtgggaggtgttgagtgcagctggctaccccacgccccctcagtacacggtgcagttgtacgaggagcaccgggtgccacgttgcagggtgtggctagccttggagcctcatcccttgcagccaggttggcgttctctggactctaagactatcgggttccgcgccgacgacactacggaggccacagccctgtaggctctaacgaccttttgcggatttcacccactggagatgctgacgcatcccatcggtctcttccccgctgagcagagggatgacccgatgtggtgcaaccgggtgaagtacgcaaaggacgtgtgggcacttcaccccgagctggtgggtcgagtgacggttcagtgcatgagcgcactgtatcgcctacaggccttgcagtgcgaggctatgtcacacttgacaggcctggcgcagactgccaaggtgacccttgacgacagagagggcttcgtggtagacttgtct

SEQ ID NO: 38322 - DNA, 338 bp, Zea Mays
cttttggatatttcaaactctgggcataatattgagcttctcgcttttcttctgcagataaccattttcccgaagcatgtcgtacaatataatcgagagcttcggaagatgcttcgggaataggaatggcagttttttagacagaatttgttctgcagattctttttccgcttcttcttctccgatttccaaggatttctccttggcgggctctgaaggcctagcttcggtctcggcatgactttgtgcagcttcggcttcagtttgttttgtttcaattcgcgtttttgaagcttcggctgttttccctggagtagagcttgaagtctttattttct

SEQ ID NO: 38323 - DNA, 380 bp, Zea Mays
tcggaggaaggctccaccccaggcatgttaggacgatctacaatcccagctcaggtgatgacagatgaaaccactctcaagggcattagcagagctcccaaactttagggatgcaacaaagctcttacaggccaccgactctaagaggtagaggaggcagaagcttcagaggaaggttcagctcccagcccaggagattgttttgtttattccgcggggaggacaaaggacatacaacaaggacgtgtcaagtcacaatccagaagcagaaagagatagctgaagctgaagcaaggcagaatcagtcgaagcgggttctgcataccacttcgtgctattccccatacattcccaagtatgtgggcaaccaacagcccacg

SEQ ID NO: 38324 - DNA, 299 bp, Zea Mays
tgttgttcatatgaaaacatgttatatcaggagcaacattaataaacatattgctcctaaattgttttatccccatgaacttcagaaaaatggagataaaaacatcttgcaaacaaagtcttgtgataatcttactgaattattcacaaatctctatcatactcaaagtttcagtaatgtgttgaggggattggtacgagaagacttaagtgcttgcaaggatcagggggagtaattctccatgatatttgacctgttttgtaccatcatattacactcttttctttgtatgagttttg

SEQ ID NO: 38325 - DNA, 458 bp, Zea Mays
ttggtgatcttcttgacattcttcgtatggctattccaaatggacaacaactccccaagaatttttatgaagccaaaaaaattatttcaaaatttggattagggtatgaggatattcatgcttgtccaaataattgccaactatattggaagggaaaaaaagatgatgatttctgctctacctgtaaggcctcacggtggaagggtatgcaacctgagtcggttttaataaagaaacaaagaaggaaagctagtccttgcaaagttttgcgatactttcctattaaagataggctaaaaagattgtttatgtgcaaggatatagcacctctcataaggtggcatgatgaagagcgcataaaggatggtgcattacgtcatccagcagatgcacccgtatggaccaggttcgatgaaaagttcccattttttgcatcagaatcgcgtaatattcgtttt

SEQ ID NO: 38326 - DNA, 474 bp, Zea Mays
atctcaatcgccccttaacgatctaacgaccacacaccactccctcacaacaacacttacccacggtggcgctgaacagggtctgtggcggctcatgcgctacggtgagcgattccggctatcccagactccaatctctcctgccgaggccatgatcacccttcgaatgacgccatggagcccccagaccaacattcttgctctgaaagttgatgcaagagaggacccgcagcggcgcgtgaatccgcggcgccacattgctctggtgagccattgctggagcttcgaccgcccgttcaccgaattggtggtgggaatagtttccccgtgcctaagcgacactccacatcagcttcatggacactagccgccggcataggggaagaaacgaagttggcggcaggtccccctttccttggaattggcggcccacggggcacgacgacgtttagcgccacggcacctgatggatga

SEQ ID NO: 38327 - DNA, 684 bp, Zea Mays
ttgatgacccacttgggacattgaagagcaattaagtgatagatagggatagcagttaacactgcttttaccagagttgttctcccagccaggttgatcattgaggccttccaccccagaagtctatcagccactttatcgatgagctcaaggaaatcatgcttggaaagtttatgcattgatattggtagacccaaatatttgcacgggaagggtatcacattgcaaggcagaatactccaggctgtttcaatatgatggtcattacactgaataggggtcattgagcacttaccgatgtttgtgatcaggccggaggtttcaccaaaaattctcaggatttctttgaccagatttaactcattctcttcaggttgcagaaataacacgacatcgtctgcatacagtgaaacccgctgtccattacctctacacgcatgagaggctgcaaaaggcccaattcacttgcttttgtaaccagggagttcagaacatccataaccataatgaaaagcataggagacaaagggtccccttgctttaatccgcactgatggcaaataagatccccatgttccccattaaccagcactctagtagaggagcccagcaatttagaaagcaagttacactagaccaggccgaagcccaaatgccttaaaacctccaataagaaaggccaag

SEQ ID NO: 38328 - DNA, 545 bp, Zea Mays
cacgaagtacggttttttaacatgtcacgagcccggcacagcacggatatatgagggcctgggcccaacccggcctagaaagcgtgccgggctcgacagctgtttgagcccatttggccagcccgagcatggcctggtattagccgggccttgttaccggcccgctacacaaatacacggcccagtgctagaggcctagcccacaaatacctcgtgtagtcgtgccctcgcccgccgtggtcgtataaccctaaccctaacaccactccgcacactcgccccactcctattctcatgcctctccgctcgtggctcgcctcttgctcagtcactctcgatctctccgctgcgctcttgtgtctcctctcgtcatctctcgaaccctccggattttggtgctccctgcctccgtgcgaccggctgaccttgcctccggcgtcgttgcctcatcggtctcagtcattccgacgtgctagtgctcgggtggtctggtgctcgtgctccctgctcctccagtcctccccctctgacctctgtacctcgac

SEQ ID NO: 38329 - DNA, 468 bp, Zea Mays
tatgcgatactatgctcgtactcgaggattagactcgtgcgcgaccagtgttcatcgcgccggtgagggatccgccgtggcattagatgcgccgccgcgtctcagctcggattgggaagaagagtggcggaccgtcgattttgcatcgtgcggctctgatttggcgactatgtaccgtttcgcgcggtgtaatctaaggcgttgattcgggattgggcggtggtgatctgatcgcgtacccataaaaccgtcgccgtcgatctagatcagatggatgctattagaactcgcataattaaatctgggacgtgtaactgtgatcggatagctctgattggcagatgcccgttcgctctactacagttgcataaaaccccctgggtaaaatggatttcaacccggagtacccctcgtgtttgtttgagtcttgagttttattgcgcctaagcccctgtgctcctgtttaat

SEQ ID NO: 38330 - DNA, 408 bp, Zea Mays
ggatgatccaaacctcctttagcaagtctgtcagccgtccaacatctcttatgagcagcgagccagataaaaaacctgcatttcggaggagcccatgttttcgacaccctagtgtaggggccagataaagttgagcctgcaaagaagccctcataagcagcctttgccgagtagcaaccatctgatactaggcaagtattgcaatttgttttcttttctggtaccctccatgactaataatgtaactaatttagttaatatggcatgctttcatgttcttcaaaagcactgagtaaagccaattactcaaaaactttgacacatccagtaattatttccattacagccctaaagatgtggttgacagttgatagtgacacttagtctttataagagttataacaactt

SEQ ID NO: 38331 - DNA, 343 bp, Zea Mays
gttcacagagggcctgattggttgcccgtggagctcagccaggctcgtacctgccaacctgtctcgctatagccaggcgtagatggtacacaagtagatgtttggttgtcgaatggaacagagacaagacatgtatggatgttgtttggatgtgtgaatggagcagcttttcagtggaaaagtcaaggaaatcaggtattggggcacgcacttgtgcaacgccagcgaggcccgccagaaatgagattgattttcgtttccaggcagccagacctgtgggacacttttgcatctgttcaatcagacccaaacaagtatacaacgaaccaaacattcacttctt

SEQ ID NO: 38332 - DNA, 625 bp, Zea Mays
actttgctaaagaaatagtccatccgagcgacactcaacatgaatcccaaaaaataatgaagaggacccaaatccttcatggcgaactcgtgctgaagcgtgagactaatctgatgcaacaggcacaaggaagaggcagtgtgcacaatgtcatcaacatacaagagtaggtatgtcgtgtcactaccgtgccagtagatgaatagggagatatctgacttggcttcagtgaaacccaaggagaacagataggtggcaaacaggctataccaagcacgagaggcttgcttcagtccatagatggatttgttgaggttgcagacctgtcagggcgagctaagtcgacaaaaccgacaggttgaccgtaatagacggtctcagtgaaaatcccatggaggcaggcattcttgacgtccaactgatgaaccagagccagcaagagaacagtacggacaacagcaggcttgaccatgggactaaacctctcaatgtagtcaactccaggacgctgagtgaaaccttagagaactcaacgagctttgtatcgatccaaagatccatcagcctttcgcttttgtgtctaaacctacttgccagtcaccccattgtcgctcgagggacgggg

SEQ ID NO: 38333 - DNA, 365 bp, Zea Mays
ggttaatttataacaataacagggactcttaagcaaaacgtccacggcgaaggggtatggtggcatcttgaccatgggatttgatatggagggctcggattaaatctgcataagcgctgaaccggtacacgatcgtggtcgtcggattcgcgatcaatggctatgcttttaagatgatgcgatatactctggatcaccggatccaaatctaacggcctgagttcaatccaggtgaaggggtacacggttctaatcttgatcgttcaatctaaatctggcggctgcaacatcatcaaccctagatcaaatcttggcccttggtttgcgatgaacggttaggagtgcttctcccacctcgcaaccac

SEQ ID NO: 38334 - DNA, 318 bp, Zea Mays
cgaggtgtgacacttgtagacgtgtcaaggcgatacatatgaagactgctggaccattacaacccttgccaatcttaaccaggaaatgggaagatatcaatatggattttattgtaggattgcccaagacagctaaaggatttgactctatttgggtcataattgatcggcttacaaagactgcccatcttcttcccattaaggtgaaatatacagtggctacatatgcagaactttatattgctcgtattctcagttttcatggagtcccaaaaacaatagtttcggaccggggaccgcaatttttatccaagttct

SEQ ID NO: 38335 - DNA, 312 bp, Zea Mays
aatccgatcatttcttttagatctttatattcttttctagccttgtgtttatggttttgaagttggcaacatatcaggtgcaacccgtgcaaccaagacacaagcatgaaggtgggaggacttttttaaaaatatctagggagaggtgggagggttcttttgaaaaaggaatatttttaaaaaggtccttccacctccatacttgtcttggttgcacaattgcaccaataggttcggttgcacctaatatgttgactttgaagttaatgctagatttttagtagtgttatgatcacttgtatatgttcttgg

SEQ ID NO: 38336 - DNA, 332 bp, Zea Mays
gcctgacagtgaaaaccttgtaatttacatatgatggtagattaagaaaaatccttagacacacatgacatgactatggtctgaagtgcagaaggccatctggcccacccacattgcatgacataaaactgaaagcctatcaacaatagggctcgcaggtcgcaacagaaagttataataacaacagcaaaaatcgcgcagaaacattagcaatgaaatccatattttctgttagtatttgatccatatacaaataccattattcctgaattctactgcacctatgtatcgacgctaatttataacccactccaaacatccgtccgagtccg

SEQ ID NO: 38337 - DNA, 477 bp, Zea Mays
tcaatggtaatttaactgatgccattcagccacaacgtgggctcagacagggggatccactatccccttatctttttctcctctgcgctgaaggtttttcagctttactccatgatgcggaagcgaagggtctgttggggggcatctgtatttgcaataatgcaccgagtgttaaccatttattatttgttgatgattctctacttctgatcaaagctggtgtacacagtgtgcatcacctgcaaaatattctttcactgtatgaggtttgctcggggcaaatgataaacaaggaaaagtcgtgcatcatgttcagtaagaataccaagcagagtattagggaagaggtgatgaggaaattgaatataaagactgaagccatgaatgataaatatttgggactgccagtttatatggggagatctaaagctcaaacctttgcatatctgaaggatagaatatggaaaaagattcaag

SEQ ID NO: 38338 - DNA, 325 bp, Zea Mays
ggttactatggtagttttatcacaaatttggattatggtccccttaaagttctagttaatgtttatgacttatggatcgatggtacgagtgtatgttttcttgaccaattccttgatgatatggccactttgacgatctagggaactagttagattatgtgtggggtgctgtagtagttgttgatagtgatgctaaatggaagctaaggacaaatgagcaatttgagaagatgattcggtctaggtgggctattagggtggcaaagctagttgttgaatttgtagacaaagctggttattagatgtgcttcaacttagtagggtc

SEQ ID NO: 38339 - DNA, 596 bp, Zea Mays
acaggagtttgttttcattgatggtgcaaaacgccttgaggttcgtttaaccctcagttttttgttgtcattaattttctgatattgaaagcatgaactataatttgctatcttctgtttatatagggaaagaagcctgatatatttgtagtcaactcttttggttctggtttccaggtaagacaatagagattcacttctttcaataattgttccttttgctcactgaaaatctttgttgttgcaccatacaggcactttttattttcctactccttccatttctctctaacttgaaagggattccttttgctgaactccctgcatacctaacccgtggtgctgcatgctttctgaatgtgggagggaatctgaagggtgagtattgtttctcatatcacattcatgtggtaaataagtggagcttctcatattatataatttcaaatctatggttaattagagaaaaagtgatgttctcatattatatgatttcaaatatatggttgattggagaaaagggatcttcatgaaatctttcacaagtgaatattatccatctcaacctttttgttttggtattatctatattattg

SEQ ID NO: 38340 - DNA, 274 bp, Zea Mays
gtgtagggacatgacatgcgaagaagcacgccaagtgagagaaaaaacgcacaagagaacgaattgtcaaactcacgaccattgtcacattgcatatttttaatagtggtgccgaattgtgtggcaacaaaggagaaaaaattagcaatggtaagaaatgtgtcggatttgaggcgtaggggaaacgtccacaagtgatgagaataaccatcgagaatggcaagataatatttaaatctagagacactgggaatcggggaggtccacaaatcac

SEQ ID NO: 38341 - DNA, 368 bp, Zea Mays
agaaattagagaactatggtggctaatcggaggcaggagcgggtgctctagcttcgtgattacctaacggagctagcggtgtgcttaatttatagtgttcaagagcggtggccttcaattttggaatggcgcgctggcggtcggagaggaagaagatcactggtggcgcaatcgtggtgttcaccggtgcagtggtttagagagggtaagcctaagtgtgctacggttactaccgcgtagtgaagagtcacgacgtggcataaatgaggtcgccggagtgtccacgacgacaccggcggtccggccacatcgcaatagctataggcacggtgataagcttcccttgcgaccacatctgcttccccgcg

SEQ ID NO: 38342 - DNA, 276 bp, Zea Mays
gaacaatatagctccagcgattttttggtggttttccagtatgctagggttgttttgttagtttatgctgaggcctattggatggggtggatgcccagttctgtccgagtagcgtgctgcagccatgcttcatcggtacttttagatgtacaggagcaaatatgaagtcaaaaggattgtaaacataatgtcctcggatataagcactatggatgtcaagctaaaaatagcactgtagcaacatgttaaattgtacgttcagtcaaaaacaatttc

SEQ ID NO: 38343 - DNA, 407 bp, Zea Mays
acctcctccattaagaatatcccaagctaccccacagctgatggtatactcaagaagactaagacgagtacaaaaggcaaggttggtgtaagacaagaaaagagaggacccatcaggttattgcggcaacagtggatgatgtgggggacacattggagaggactgacatgaatgcaggacaaaaccaggttgaacaggcaaattgcgttgaagttggaagaccagctccacaagcagctggaaataccctaacccctgagcagagacagttcttcaaccagcttaccaagcagatctctagcatcctccaaacccagttgatctgaccttgaagaataatagcaccaaaacccctgctgccaccccgacgcagccatcatattgcagggatgggggctgaatttgat

SEQ ID NO: 38344 - DNA, 512 bp, Zea Mays
ccacggcgccatcgacctcgttgttcgcgtctgcaccatcgtcctcgccctgaactcacccacgttgtcgtccattatttaccacgagaggcccaatccaggatgagtggtcccagcagccgccgactcgagcggacccacgccgccacggccgcgatagacctctgctcctcatggaatgagcaaccactagctccgatgaagtggcgctaccactgcatatcgtctggttcactctaagcaatgccagcatgatggacgagagatgagactcgatagggatccgaggaggttgttggtatttggtagatgtcgtgcagttgaaacgttcgacatgatgcagcaccgacagacgtctggatggatacacatgcaatatgttcgatgaaatgcatgttcgagatgctgtgacatagaaatccatcctcacctccgtctttgtatttgatttgatatgtaacctcgaagatagcagcaacttgtgtttcttgatatgttaatttatattttct

SEQ ID NO: 38345 - DNA, 283 bp, Zea Mays
aacaccatgtggcactgggagcgaaaggaggagactcgccgggtgcacgtgctagccctgacagaccacacactggcacaccttgtcctgcacaagctgtttcatattagggaaatgaaaatcatgccggaggcggtgaagtgtgcgctggacgcccttgtgaccatcctcatggactgcccccaagatttcctacagcagcggggagtcgggtggtatgtacagccggccgtcgaactgcaccatgccgtccacgaccgaccatggcgctggacggccaccc

SEQ ID NO: 38346 - DNA, 654 bp, Zea Mays
cgtaggtgctcgacgatggtgaggcagcacggagaagcttggtccaccatgttcgaagaagtaggagacgatagagttcagagcgaggtctgttgcagatgtcttgaacgatggtgaagctcatggagctagagatgggagtggggtgctctggtgaaggcagaatagtcccttgaagcttagcaatggtgatggcgatactagtggcattgtctcagggcttctggtggctgagggttcgggatgtggtgggtaggggtgtggaggggtacgatttatagcccggtgtgctcaatttagatggaagagcaacggtgagggggtatgggtggagattgcctgtgacgaccgagatgctctcgggcattgctggcgccattaagaaggggatcgagcggggaaagggtctagtaatgttgcacatgatcttagctaactcctgacgaaagcagagagaccggttgggctctacaggggtgagatccacaaggaacacgcgacaggttggggatggcagctcgatccaacatgtgagacaccgagagagggagcacgttcgcatgaccgggtgaggaaatgatagcaagggttcacttgcagcaagtgggcgcaggcgagacgctctgtcagagagacatgggcgctgggcaggtc

SEQ ID NO: 38347 - DNA, 489 bp, Zea Mays
gggctcttggacatagctttcgctctcagggttgtcgttcagggtcatgtaaaatttggaaagctacttacctgcttgaacatggtggcaccactaaggaaatatggtatcgtcatcccatcacagagttatagctgcttgattggtgcattgtgtgaggatatgcgccctaatgctgcgaggggcttgctgcagtggatgatagaggacgggcactgtcctagtttgcagatgtacaatatgattgtggattgcttctgtcgatgtgataatccaaaggaggctttggatgtgaaggttgagatgacctctagggaagtgaaaccgaactataacacttaccagacactcataatctgcctttgcagattgggaaagagcttgtcaggtcagtcagtaatggtggagatgattgagtccgatttccatccaaatgaggccatttgtactgccttggtttgtggcttctgcaaggaaggcgaccttgat

SEQ ID NO: 38348 - DNA, 386 bp, Zea Mays
accaagtatatttccgacccaacaacggaatttccaatagatcattatcatccaaaaaacgtcggaatctccccatcatagccctatccagattggcattcttcttgtcagcggcttggtaaattaagttaaaatcacctgccacaagccagggcccattgcaaagagccctaatatttctaagctcctgcaggaacaacactttttcatcatcaccttgaggaccatagactccagttagccaccaattacgaccttcctgctcagcgaaaagaacagaaactgagaaattatcaacccttgaagcgacggcctgacaagaaccccccttccaagcaaccagaactccacctctagtgccaacaacaggtaaagcaacaaagtta

SEQ ID NO: 38349 - DNA, 434 bp, Zea Mays
aaacaacaaaggccaacgcgggagctaaaggcaagggcccacatcctacgaagggccgagcaagtaagcgaaggcgcctcttagcgagggctgagggaacacctcctcttaatgaaatccccaacgacttcgccccaaccgccaagaacggcttcgcaacatcgacacctatgacccgaaaggagacccgccttgctccaaggtggccccacttgtcaatggttactaagggtagagagattagtgtagctagggctatgtctgtacaactctacaattaccccgttgtacatcatattcatggactgtagcatgtaacagggggcacagatgtatttaggccacctacccccggttaccctataaataccctcacactgtagctagacggaacacacttaacaagacatatgtgccccctgcctactgttttg

SEQ ID NO: 38350 - DNA, 589 bp, Zea Mays
gcgaccacaggatcccagatctacggctctagtttattccccccaataggtattcccatgactaatctccaccgtccgttcacgatcgaacgacaggaagcctatcttcctccctcagctgccaggcgcgacgatgctcctgcgtccctttctctctctcctatctctcactctgttctctcgtctaacctcaccccggccatgaagcccgccggccagggagcccagaaattcaggtgctccaacgaaactccatatattctactgtcgcgcaaaggggatggtagggaggaccccatggggatttctcaccggtaatggaggcagcaacaggggaagaaatctggcgagcgattcccatggtccgaagcttcttcgtcaaattggggactcccaaagccacaccccattctggtaaggcgcgcggcggcgatgaggttgtcgcgaccccatggacagggagtggcacaacaacgagtgcatgggggaagttggcggagatcgacgcaaggagcacggggcaagcttggcgtcgacgcagtggaatttgagggcggaatcgcggagaagacggcgaacttctccctct

SEQ ID NO: 38351 - DNA, 392 bp, Zea Mays
caatccattcctaggattacgtcaattccgtgggatgggagcacgactaagtctgccaggaacactaccccacttaaaatgattctgacttgggagcacctgaggtggcacagaaggtcggaccctagggtccgggtgatcagagggacttctaatggtgtagtggggatgccatgcttttccacaaaattagtggcgatgaaggaatgagatgatctagaatcaaaaagtagtgtagcaggggtaaattcgactaggaactcaccgagtactactccaggggcttgttgagcttccttggcgtcgacatggttcactcgagccctgccgtggaactatgacttgcttaattgactgccggtggagggtgccttggaggcaggtgttgtgac

SEQ ID NO: 38352 - DNA, 300 bp, Zea Mays
cgtgctcggatcgtctgtggatcaggcgtaatcttaagggagtcgtccgtctttcccacgccagacgccctcaaacaccggagatagaacgggacaaagccatcgagttttccttaagataagcaaagtcagttcactatttgctaggagataagctggaagagtgtgatcaacgtgtgcgtagggagtgtcccacagtcgtgtatataaggcctagggggaacctcatcattttcatctcattttagcacctctccattccggaaacaccacttgtaaacacaccacacatacaaagcc

SEQ ID NO: 38353 - DNA, 553 bp, Zea Mays
gctcactaaagatcaggtccaaccttttgtggataaaattgcaaggcaactctagctggaagtctgacttaatgacaaaagcaggtagaaggattcagattcaagtcttcaacatgtattgacaggcatgatggtttatttagcaatggcttttgattttccttcctaggcctgggaagccattgacaaaatccgaaaaggctttctttggagaggacacaaagaggctaagggaggccattgccttgtggcctggggtagagtctgccggcctctccggctgggaggcttgggatctctagtctgcccgagatgtgttgggctcttcggatgagatggttacggctgcataaaactgattcaacacggccttgggcgtagctcccctttcatgatcctaataaatttcgggctttcttctccactgttcttctttcagaagttggaaatggatccaacaccctccctgtcttggactgagaaatggatctcagggcagagaatatgtgacattgctcccaggctttttcagtgtatacccagaaggatttca

SEQ ID NO: 38354 - DNA, 335 bp, Zea Mays
ctgacgccgacgcattcttcgtgcgcggcatcctgatctgatgtctgcatattagagagagtgactaagcacagagcaaaagtgaccgatagatttagcaaagaatgagatgtctacctggaaagctcacacgaggggtgacgatccaggcaggacgggagacgccacacggtcaatcaaggtcactgaaatgatagaagaggtgagcacgtattagtcacatagtcataagcatatgaaatgtgaataaatacatacacagagagatatggcacgagacgggacgatcaagaagtcaaacgacgtgaaaacgacgtttgacagacaaatagtga

SEQ ID NO: 38355 - DNA, 585 bp, Zea Mays
ccttgtgcaactaattcagataatatgtcatgagccaactcgctggattcgaccacatgagccaaggaaaacacatatctaggcatggtgaagcggaacatgaagtaatatagatacctttcgatgatctgaggcacgttctgggcagcgacgtctacaaccacccacccatgacgactgtggtcgaggatacctccgtgcgtgggctcttacctcaccgcaatacctctcggcggatcgagcctccctcctcttcgacggtctactgatctgatcgtagactcgctccatgaccgcgactgtcatcgtactctagcaccgccagcaaggtttctcttgatgtccgcatacaggacccgcaccgactccgatggacccgcccctttcctcgtcgtcgcgccgcaaccagactccaaaccacctccacctatctactcggcaacttcgcagcaaccgcggacaacgaccaacgacgaggaacagtcagatacgggaagccgtggatcactccacatatggggcggggaaaggactcacgagcgaagggagagcagatggggagcatcgttggatcgtgtggggtgg

SEQ ID NO: 38356 - DNA, 327 bp, Zea Mays
agagagtctacccttcatacaatgttcacccacaaacaagattctaaaaccctaactatttcttaagccttaaaccctaacaatgggattaaagggggaagaatgggcaaataatcaaaacaacaaaaaggaacctttattaaagatgaagagtattagtaaagctacaaaacttagtaagagaaatattacaaaaaggccccacaaaaaccccacatcaattcactaagtggaagagcaccctagaaccatccattttctctctaagtccgcaaaaccaccttaatccaatgatcagaggtgttcaccttggtgctagcgccaaac

SEQ ID NO: 38357 - DNA, 281 bp, Zea Mays
ttaggccacagactaatactctttagtcctagttgaagccaccaactgagattaaatgtccatgccatatatctccttagctttctttctcccatgacccaagccatttgaagctctcttcttgcccgtggaatgagttcatgggtgattcgtgaagagttgatgacacctttcactctagggttctaaaggttagcaacttcaacatctcatgtttcatttctcgtctagcacatttcatagtttagtactagagaaaatcgtgtgtttctagattgaaa

SEQ ID NO: 38358 - DNA, 363 bp, Zea Mays
ctctcgcccgctcttcacttttctatcgtgtcaaagggagtccgtcaactggtgccaaccgagggagggcctgagaattcatggcgctgtctgctgctgcagctgctgtcaactgtcgcctcggccccgtggggctcaacaatgaaacgcgcatgcgtgtaatacactggacagctgacaagaaatatagagaaggcaacggcttcacgtaacggtacgtacggacatggacgcacaagtgcacggctaaagtacgagcacgggaaattttagccggccggggcaaacttttctacgggccatgctggtcagacacgtctcgggttccaactcaccttgttttctctgcatcggaggcttcaa

SEQ ID NO: 38359 - DNA, 726 bp, Zea Mays
gcagcccgcgctcgtcacctacaacgttgtgttccatgcctactccaagatgtctgtcccgtggaaagaggtcgtggcgctcgtggactcaatgaaggaggacggcattgagcgggacaggtatacgtacaacacgctcattagttgttgccgtcgaagggggcttcacagggaggcagcgcaggtgttcgatgagatgaaggctgctggattcgaacctgacaaggtcacattcaattccctgctggatgtatatggtaaggcgcggaagcatgaggaggcaattggggtgctaaagaggatggagaatgccggatgtacacccagcgtggtgacctacaactcgctcatctcggcttatgtgaaggatgggttgttagaagaggctctggagctaaaacaggagatggagttcaggggtatgaagccggatgtggttacatacacgacattgatctctggccttgacagagttggcaaaattgacgcagcacttgctacatacagtgaaatggtgaggaacggatgtagcccgaacttatgcacctataatgcattgatcaagttgcacggggtgagggggaaattcacagagatgatggctgtctttgatgacctcaggtctgctgggtatgtgccagatgttgtcacctggaacacgctcttgtccgtgtttgggcagaatggtctagattctgaggtttcaggggtgttcaaggagatgaa

SEQ ID NO: 38360 - DNA, 641 bp, Zea Mays
ttttcgggttgccatggtctcgcagtaccccgaccacgtgcatcaacaacgtggccgtgcggccgtcaccggagtttgcatcctccgccgcgattgtgccactcttccggtcagtgaccacgtcgccgtgaactatgatcattaccctgtgactgtcgtggcttctcatcccgtgaactgccacgaatcaccccgccggtgactcgcttcttctctgaccgccaccgcattcaaccccgaattcccggccaccgctcacttgatctataaattgagcctcccttcggcttcgccatgtatcccagcagctaccgcacccacctacatcccaaatccctctctggcgagcgctaatttcggatttcccccaaattcgctcaagaacaccgtaacagccgcctctccgtggccagcgctcctcaggttagaacatacccaatcgcttagtgttctagcctctgttaagtcccttattgctcgtgaatctgtccaattgcgctaaaccaccttgggtagccatgaacgcgagcgaatgtcctcgcggctcacgattaccgtgggcagagagctgtagggcagtagtccagaaattggtttgggggaaatacgcgggggaagttcaatccggtgtctgccacttg

SEQ ID NO: 38361 - DNA, 302 bp, Zea Mays
gttctgtgccagccagggtcagactctaatgactagagggagccaatcatcagatatataaagaatgaagaggaaccgaatgacaaagctgcagaagaacgcatcgcaaggcagtcagctcactacaccctcattggggaggcactatacagaaggggcgcaacaggagtcctcatgaagtgcattctttcggccactgggaagcaactgctagatgagatccacgccggacagtgcgggatacatgcagcatccaggactctagttgggaaggtcttcaggtctggtttatactggccgac

SEQ ID NO: 38362 - DNA, 804 bp, Zea Mays
ggttgctcgacattctgtcgtattcagcgcccatatgacttcgggtaattggtctgcccatttgccatttttgtcgtcaaggagccttttcttaatgtcactgaaaatcttgccattggcatgttcgacgatgtcgttggattgtgggtggtagacagaggcgaagactggcttggtgccgatggaactgcagaattcccggaagtcctggctatcgaactgtttgccgtcgtcgactgttagcttggacaggactccaaaccggcagacaatgttttgccagaagaatttttgggcggtcttcgctgttatcgtggagactgctctagccttgatccacttagtaaaatattcgacggcggcaaaggtgaactttaggttcccttgagctgtaggcagtggcccgacgatgtccagcccccaacactgaagtggccaggtgtgggcgatgagcttggtgaattgtgaaggggtgcctgagcgaggagagaatttttggcattctttgcatgacctggtgactcggttggccgtgcatattatcgcgggccagtaaaatccctgatgaatcaccttggctgtgagggccctgggccctgagtgtgacctgcaggttccgccgtggattcgtgaaggatctctaggccttcggtttcggttatgcatttcagcataggctggctgatgccctttttgtaaagctgaccctcgactattgcgaaatccatgttcctgtgttttagttgtttggcctcattgcgatcggttggatggtaatggccctggaggtatagtgttattggg

SEQ ID NO: 38363 - DNA, 782 bp, Zea Mays
cgaatgttggtatgaagaagcgtgtaaaaggtttgtttgaggaagaaaatagctacatttctgattcaattagcacagataggcgctgtcctacttctagagcatcatccatggaaattgtcgcctcttcaagggcatctttgtattgcaaagctgaaggtttacttgaagaaaatcatcatcctggaactgaagagttgtgttgccaagtagtatgttctagcttgtcacaagtggatcctttatgttccattgttccatgtagcatatcttgcgatgaaggtcccagtagccaggctcctgtgtgcaaacagagtgaaggccatgaaggtcccagtaaccaggctccttcgtgcaaaaagaacgaaggcaatgaaggtcccacttgcctgacacctgaacgcgaacatagtaaaaaaaaggaggaagaatttatgcataccaaagaatttcctatgatgcaatacctggatgaggaggctggtccatcttgtgtgcctttagttaagccagcagattctaatgttccattccggcgaaggaaatacagttcactaaggccatttagcacaatagcaactaagtcaaacatatttggaagtacatcaaattctaatgctgatgttccagtttgtcagcttgagagattcacacccattgttctaaataagaatgtacagcgtgtgcaagctgccaaggaattcatagaaaatagtgctggggctgaaaatttggaagatttctctgcagttcggaagcagacatattatcctcaggatggc

SEQ ID NO: 38364 - DNA, 404 bp, Zea Mays
gcgccacggaaactgatcctacatcacataatctgatactggtgtttagtaccacataggaaaattgatcctacatcacataaactaatcctggtgtttaataccacataggaaaactggtcctacatcacataaactgatcttggtgtttagtaccacataggaagggttgtttatacttgcgagcattatatttagttacaaaagggtaggatcgataacaaaaggtggtgcaatgcatacaatggttgaatctcagttagtttcgtgtggttgcatatatcattcctcgtcttttggtctgtggaatctttgattatgaatgatccttgtttgaacctattaaatgaaaggtaggattttaataatcttgtcaatcattatgtagtgaagtacaattatgc

SEQ ID NO: 38365 - DNA, 291 bp, Zea Mays
cgagttaagtcccttggggacactgtccttagggacacactagtggggatctcacttaccaaagcctatagagcgaagagatacgcggtgcagaagattggtggtgagtaccatgaacaatacaggagaatacaagattatgctcacacagtgttatctgctaatcctggaagttgcatagtgataaaatgttttgtggatccaacacgagcaataaatcctagattcgagaggatgtatgtgtcctttgatgctcaagtaaaaggattcctagctggttgtagacctttc

SEQ ID NO: 38366 - DNA, 286 bp, Zea Mays
ggtcttcgccaagaattatttcttgcattggcagaagaaaaagataggtggactgattgcgcaatttaggtcctgcacattcacgctgaggactgcgaagacttcgaccgaagtagttgagactgttccttgtgccaagaataagtggggtaactagttgtatttttggttttatgtggcgccgggggatgacgaagggttgcctggtttgcccctgtccatcttgtgctcgcattgttaagtggccttctcatagtttcaagtgaggaaaggggataagaacgag

SEQ ID NO: 38367 - DNA, 306 bp, Zea Mays
tgaacttgtaatgaagtcagatctttgtaatgattgtcaccaaggtgtgggtatcccctgcaacttggtgtagttattaataatgtcagttatttagttgggtaatccctttatttccactttcctctttatctgagaagctattagtgaggatgatcaagtgttcagtgttatgaagattttctatacatcttttcttatgctgaaagactgcagagtcagatctgatgtgtgtgtgtatgctttttacagatgtctgagaataggagtagaggtgcaaggcatgctcagccagagcagcaggca

SEQ ID NO: 38368 - DNA, 361 bp, Zea Mays
cgacatgattacgcctacacaaacagtgcacgcatgccacttgacgcccttcgatgggacacctaatatgacaagccgacctaactagccttcggatgcaatttctccacctcgcccaacgtcaagctcagccctcaagtggattctccgcctcgctcgagctcgacctcggccaccaactacgccgtgaatcccgtagatagccactctacacgtctatagcgcacatcgaaggacgactcggcaaaaagcctcagcaagacttccgcatcaaccgagcaagggcgttgatctcgatgaatgcagtagggaatctcgatgtcatcacacactaggacaatgacacaccccgtaagaagcc

SEQ ID NO: 38369 - DNA, 380 bp, Zea Mays
aacacataggcagaccagaatctacagctattcctttttgaagcaaaatgtcccctagttgggattcgaaatttacacaccggcaaattcagccacaagcttgatgtgttagaaagggtgacagtgtgcatgcacaaagtcatccaaacatcagcaaattaactttaacaacagataaaacgtacagctgctatggccctaatacctaagcttgggacatgaagagttctttctctgacatcatacccagcatcatgcaccagcagtcatctcaacacaaaaaaattaagaggtttttaaacatagagattctactgtttgaatttagatcacagtctccatgtcccttggctctgaaaccagccaaccttattctcctc

SEQ ID NO: 38370 - DNA, 943 bp, Zea Mays
ggataacactatatctgtgcggagtacactgtttttgctgatggctaatattctgaatggaacgacccatctatctgtggagatccagttaatggcttttaggtttttggagcttgtggttcttaatttcccgtcatccttttctagttatgctgaacaggtaagtcgtctgctttcacagttggtgtactgaatgatgagtcacttctattgttctgagaaaattattttgctgggagatgcatattccttgcttccatcacttaattagttctactatatctccatccattaatatctgacgttggttagttcaattttgaactaaccagtgtcaaatgttaatttacggatagactaccccccccctaaaatttgcatatgttaactaccacagcttgtttcatagtccagcttttatcaagtaataactactaaggaatatatgttttatttgaactgcttctcacccctagagattgtatattccccgaccatattcattaccaacttaaacttatagtttcatttgcattatctttttctgacagaccttcaacaactttgttgcggtactgagcaacgacagaatcaacctacatgataggaataaacttaacagtgttcttagtgggcttggccactgcctttccttggttgctaaaacgatagaaaatgatgatacatcaaatcgacaggtttgtgccctgaactcagtaaataaccttttgtagttttaataaaataaaatttgcattcctcgcacatttgtagctacagtgaggaacttgatgaaatagaaaatctgtgttctggaatgtgtatgcgtctaggtagtagctatactccattgatgaaagcctttgctcatcgcctacaggctcataacctctctgcaagggaaaattggaaatttaccactgatgaagatagcacaggaggt

SEQ ID NO: 38371 - DNA, 300 bp, Zea Mays
cccaggcagctaaacatgccataatgacactatacagccaaatgataatacatttgcatgactgaaaaaaggcattaaattctctaactacccactagggatctggacactgcacgtttgagaatctcgtaaaataaaatgtcgcagagatgcactgcagctaataaactgccttgcaggtgcataaaattgttgtattgaggtgacaatcgtgccacatttcatatcaaaaccacccggtatctccgggcattagagcatgtacaatacaattaaatgaggtgtctcttaagaggtctc

SEQ ID NO: 38372 - DNA, 684 bp, Zea Mays
ggggggggggggtgattttggtggtggatgtttggttgatgctgggcggggccatggttgtatggttgtgggtgccgagatcttcctagtgcgggtggagggcgtaggtggcgaagggtggtggggaaacatagtgtgggtgagttttcgtggagtggcaggcgccgtcgtatggggatggagcgtggtcgtctccgtgtaaaccgggttgataaacgagaattgttgtccttgccggatggggcgagcataggcgagggggatcttcggaagctttttgagggtgaggaattgaggataatgttgtttaatcacagggagatgggtatcattccgaaggttgagccgatgtaataggcgatgccctcactgtgtgtatgtaataggcgatgccctcgccgtgtgtatgtaattgtaatttgtatggtgatgtggcttgttggccgtattcgtatgcttgtattggtccagctacgtacgtgggtgactttgtgcggagtgtccttgtaatgagagacttcgattaacgttattccggctgtgcccttaagcaactattgcgctgtcttttgaataaaaagacttcgattaacgctcttgttgtgctgttctggctgcacccttagtcgacttttgcgtggagtgtcttttaaataaaagactagcgcacttgtgctattccgg

SEQ ID NO: 38373 - DNA, 310 bp, Zea Mays
gacaggagttacaccctgtcattccagcttgttcgagaatttttagtgcataagcactttggcacaaagttgtgaacccttccttctgaaccacctgaatacccaaataatatgtaagtaacccaaggtcactcatactgaagctctccatcatttgccttttgaatacaccaatactctcttgtcttggtcctgttatcacaagatcatccacataaactcccacaatcagaaaattgccattactatcaattcttctgtatacagcatgttcatgaggattcttcacaaaaccaagcctcagtaattc

SEQ ID NO: 38374 - DNA, 422 bp, Zea Mays
gtttgtgatagtttgtgaagattttagataggattttaacgttgtagttttggaggcagatggggcagtagtcagccactgccagggcatcaggttttttgggagggtgacatatgatatgttgatattgtctaggttgatttggtcattgtggaatgctcaaaggaggttcataagagtgttttttctaattgccagacaaccttgtagaaactagacccaaagccgtctcaagattcttttgcaatgaagggaacgtcaaggctggtgggaggtaagagggggagtacataatttgtacgtagaaggtggggattggaacgagagtagcccccatagatgaggcgtagtattcagagatgactttggttttttcttcctggcttgagtagactacttggccaacttgtaccccgggcgat

SEQ ID NO: 38375 - DNA, 318 bp, Zea Mays
gcgggttgcccgcagcttgccaaaaactagggtcaggtcttctaccagagtcgaccccttcctattcttgaccacgatgtcatcaacataaacctccaccttgtcccgaatcaggtccctgaaggtcttactcattgcctgaacaaatgttggcaaggcgtttttcagaccgtagggcatcacaacataatagtaaagcccatccattgttacaaaagcggtatgcttcctatcctccctagacatccggatttgatggaaaccggagtaggcatccaagaaggacaagaggtcacaccccgaggtagagtccacgat

SEQ ID NO: 38376 - DNA, 340 bp, Zea Mays
ctagcgaccccatggtccgctcgctccacatccgcctcattcctcccggcctccacatcaccccgtctcgcgtctacaccgccgttgtgtcgcctctagccctctcacagaggatccacgttgtctgtgttagcggtgaaggagaaggtgatggtcaacaacgcgatcgatggagagggtggcggaaaccgacactccctcaaggtgtttgatgtcaagaacaagagttggaccacggtacacccacacgtcggagttctcgggccgagcttcatcttctccatatcatttgtccggatatgaggatctggaccatcttcgccaccagaacatgcaccat

SEQ ID NO: 38377 - DNA, 488 bp, Zea Mays
tggagactacaaaggccttgagccctgctcctacaaagaaaattgctgaagctgccaaagcgcaagccgaagccgaaactgggcaagcagaagccgaagctacaaaaactgaggctgaggccgaagctgggccttcggcgcccgtcgtggtgaagcctgccgcgcctgaggaaaaaacggcaaggcagattgcacctgaaaagatcgagactcctgctcccgaagctctgatcgaaaatgttgactacatcattcgacacgcttcgaggaagaaattgtccgaagaagaaattctggaagccagacactatgcgcaaaagttgaaatatccgaagggagctttagtgtttaatggcactaacaatgatgacttcttgtactgtctcccagacaataaagaaatatctgtttgccgggagataggtaaaagcatgggattcccgaagctggaagatggcctttcaattttatcgaaggatgatcttgcc

SEQ ID NO: 38378 - DNA, 420 bp, Zea Mays
tcgctcggtttatttataacataaacaaaacatgtcatgatagtcgcagagcggagtccacctcaaccccacaaaggcttggaggcaaagggatcggtcggtccaggcagaggccacgacaagatccgaggacctggcgccctgtggcgaagaccacagttaatacccacacgtgtcaacgaagtgggcccacgcggcgccctgctggcttatttgagcccatgtgtaagccccattctggggtagggttgatggtgtgccggttcaggttgtacttaaccatgctgtaatgacctgtaatggcccccctaagggaggaatattctagggataatgtaggtaaccaggggcacaattgtacttataagggtgagatcgccctcctggttacctataaatacccctgcattgtaccttgat

SEQ ID NO: 38379 - DNA, 289 bp, Zea Mays
gcgcaccactatggctatttggtggcactaccatgtccgagagagcacataaaggagtagggacaccatatttgggaggagcaccataaaggaggatattggggaggagcatcatacgagccatatgtaggagcgtatgaatactatacatgtatagaggaggatacaagatcgtgtagggcaaatattggtggaaggagctttattagtgatgggaggagtgttagtggttggaggcttaataacagaagaaatgccagcaataatgcagtctgcaatatacaacgac

SEQ ID NO: 38380 - DNA, 315 bp, Zea Mays
ccgaagtctgattccctcgacacattaccactaagagacatcacatttgcatccatcaaaatatcatcactcatagcatcatcagggtttgcttgcgcaagctcggacgtcggaacttgcgcaacaaccgatcttcagtatcatacaaaactaacactatcagtctacccccattacattctctcaacctgcgtcgaagcatctgccgtcgtaggaccctcaacgacacctcctggaagcgtcgtttgctcttcggctcccgcctccgtcgaagcatccctctaggtcaccgagctttcaaggccagcgagttcc

SEQ ID NO: 38381 - DNA, 287 bp, Zea Mays
gcaaagcactctttaattatgtcacaagtttgcaggcctaggagtcttgtttgtttgtttgcataaatatgttcagattgttacaaaatggttacagattgtttcagttcttccaggttgtgaacagtaacctgaacctgaaacttgctccagtttagaacctcaagctgaacactgccgacagttcaggttctgtatgaaatactccagttcaggttcatgttcaggctacaagcattgtcattttgaagaacaccatggctacgagtattctcattctaaagaac

SEQ ID NO: 38382 - DNA, 600 bp, Zea Mays
gccgacgagcatcacaagcatgcgagagtgctgaaacacggatagggaggacgagtgcagacctgagagcggctggctacggtggggtgacatacggtggcgcagacgaccgatttgggggaagaacgaaattctccggctatggtggctaatcagaggcgggagtgggtgctctgggttcgtgataagctaacggagctgactgtgcactcaatttatagcagctggccacggttgtctggaatttgaaggagatttggatcacggtggtgataggatgttgcactggtgagctcgtcgtggcgttcaatggcactatgactcaagggcggtaactcttagcttgccacggcttcgggtacgtggtgaaaggacttcgacatggcgcaatcacggtgaacggtgatctccacggcgatgaccgcccgaccacgtcgctgcgcaagtgggtacaacaactgggtagtaacagtgccccgacttcatcccctgcgcgagatctttcactttacgtaggtatccacatgccattgggcacgaatcgcaacgccggcaaggatcatgatgagggatcaccggcggcaatgcactgaacctgtc

SEQ ID NO: 38383 - DNA, 480 bp, Zea Mays
ccggtattgagtcacctataatgttcaccaccattagaattacgtgtattccggttcggatcgaagttttcggctcgggatcgggtattggtgattgcctaccatgggcgccgccgtgagtttctggggatggcctcagtgttggcgttggggagggagaaggcgtctctgccgtttgatctgagcggacggtggagattagaagtggcgtaccctttcgccgcgactcgatctggtccgtaggattgatcggacggctcggagtataggaatctttcattaaatctgcaccgacgatcaggcattggacgatcgagattgtttaccggttcgtataaaacgtaggtctaatcttggcgactgatttctgatcaggcaactcagattaaaagataccgcttcggtcgcacgttttataaaatagacccctgggaactaaagaatcaacctgccatccaggggccctgttctctgtgtctg

SEQ ID NO: 38384 - DNA, 894 bp, Zea Mays
ctgtggatcaagctaataggccgaaagtccttggcaaggatggcatcctctttcttaggtaaaagagtgatgaaggctgtgttgaggtatctgaaattctaaaagtccttgttctagatagccaggataacagccataatgtcttttttgatgattgaccagtaggccttatagaaatgacctgtgaacccatcaggccccggggctttgtctggaggaagctgtttgatggtattccacacctcttcctctgaggttggctgctcgagcccctgaaggtcaatgtgttgtagtcttaaggtgtcaaggttgacagttctggacctttgctgccctgtaccaactagatctgaataaaaggaccgaagcacctctgccttatcactatgactagtcaatagctgctccctgtcttgaattttggctatgaaattttttcttttccgataacgagaccaagagtggaagaactttttattagcatcaccatctttgagccaggcaattcttgatctagtcctagccatcgagcggattaaggaggcaagagccagagagcatttcttcaagcgcccaagcagccatgtctccaaaacattaagaattctgctctcttttgccacttcaagctacagcaatatttctctggcaagctcaagttgcagtttgaagtttccaaactttttgtcactccaactttgcagcccttttgttgtcgccttgaattttagggaaagggtcttgaggggacaagaagactgctgaacagaaccccaggcattagttaccgcttccacaaatccatcaaatctgggccaaaaggattcaaaatgaaatatccatttcccagtgtggttgtccttcaatcccaataggagaggacagtggtctgaa

SEQ ID NO: 38385 - DNA, 272 bp, Zea Mays
gtgaaaaacgtataggtaatatcttttgatgttcagcttcggaatttgtttttgtggcttcggactgattaatttttccactgtagctgaattatctccgccaccggaaccgttcgatcctctggccgatctagaaacgaaagaagcactggagatcattaatatggctgaatctattgttgacgaagtcgtcaacaaattgctaaatgaagttgcagagaagatcctgaaagaagactagcgcttattataaaaacatgtttagatggtcg

SEQ ID NO: 38386 - DNA, 327 bp, Zea Mays
tttcaaggtatgaaactatccccgaagtaaaacagtgtcacaaataaaagcagttgacctcttgcgtctagaaagaacagaacatacatttaaaatagaaagggaaatacacaagcataataatttcattattcggaatagccatctataacattgtaggcatcgtgttcaatgtaatgtatacacaagatcagtaataatacaaagatgtcaccaaagaactgaaccattaacgagggaggaaagtaaacatcctattacccagctctagcgaactcagaacaaaaagctctagaactaaaaacaaccagtggaaggaatttctac

SEQ ID NO: 38387 - DNA, 434 bp, Zea Mays
caagaaaaccagaggtatggtgtattttgtgttaatgaacatgcaagaatggccagttgatgtaatggaaatgcgtgcagctgaagcatctattgtccatctccgcatgcagttgcttaatttctgttcactgtgtcataaaattgtatatctttctttgtacaaaacctgcttgacatcacagaagatatgggctgcaagcctgcaactccccttttctaattaccttatctgattgtcttatttcagatggcaacttttgttgacaacgaagtggtcaggtccatcattcatttattgttagaagaagacaaggctcgataagcatgaattcatggcaatcctatcgatactaattttttagtaaaaacactatcggtccctaaaattttttagtaaaaacactgtcggtccctaaacttttaagtgtatca

SEQ ID NO: 38388 - DNA, 609 bp, Zea Mays
aaattgggtttcaaatcgctcggtcaggctaactgaataagggatgccatggtacagtatctggataagatcagatcagccgttcaccgtcgacgacctctccgccgcgattcgtgccaccgccttctcgattcgtgctcggggaggaatggataacactggggatgggtaaaaatatcgggcgagggatggattgtgattgctagctggtccggccatcctatccacttgccgcgcggccgaccgagtttatcctcaccggagctcgccgtttcactcaaccgtgccacgccgcaaagcattctccacgtcgtagggatcgtggaggatagtcagttacccctccggcactgttttctccacgcgcgccacgatacgcagagcacggtaaaatatccaagtcgccgtgagctgatctccaacccaaattcactggccgccgctcacgatcactataaattgagtgcacccgtggctccacagggtaatcacacatctattgcaccaatccttgccccggattatccactagggaccaagaattgctcactttccccaatcacggtttctgccaccgtaaaacgcacctcaccgtggccagccccttcc

SEQ ID NO: 38389 - DNA, 367 bp, Zea Mays
gtgttcaaccctatcccttctagccaagtttcgacaccagctccatcacaaggctatatgccggacttccctttccctcaaggtgtttagactccaaggaggaggacggtctgagctttggcctagacttctctaggctacaagatcctgagtccatgttgcaattcctatatgcatgcgacgagatgcttttcgagagctcggaaggatacaacactagtgaggaagcatacaacccgatccgagaatgcctccacgtcgactcagagatccacgacgaaggagatcacctcggtatgccataagagggaaaccaacttcctccatgcgttcgggatgtagtggagccaggtggggcctagacccc

SEQ ID NO: 38390 - DNA, 624 bp, Zea Mays
gcagagggtatgagcggacctgagacgcgctggccacagtgaggtcaaaccgagcggtgttcttgagtgatttgggggaaatgagtgattcgcggtctctggtggacaattgaagacaagcgtgggtgctatggatgggtgattacccgacggagctcgcagtgcgctcaatttataacgggcttaggcggtggccggggatttggatgaagacgtgcggcggccggagaattaggaggtcactagcgtagttgattcgtggagtataccttggcggactcaccggcgatgatgagacggctaacgtgagtcacggcggtgcggtgaatgtgccaaggaacgtggcgcaaggccatgaagcggctgtctccggtgaactcatccgaatcatccatggtctgctcgggtacggtggccggagtaaaataatggccggagtttttccacggcgtgataattactgacccccggcactatccaactgatctgagagcgaatcacggcggcgatagcacgaatccgcgtgcggctcgtcgacggcgagggggctgaaattgggattatgtctgttactgtaccatgggaagcatttgacagagcgcctgacagaccactttgcagggc

SEQ ID NO: 38391 - DNA, 321 bp, Zea Mays
catatgggcgccggaacaggaaaagaggactcgaccaagagtcccaacaggggaacaaaacagcttagactagctaggccttaatgggccaatagattaggccttattagtataggattagattgagatagggatataaataagattttggagaataaagctaagcaggatcaacacagacgttggtctactgccccagccaacgattaaccacaagtataatctatgcagtagaagacaccaatctggtatcagaaatgccgagatccgacgacacgtccagcgagatcgcatccgctaatgctgccacaaccaccaatt

SEQ ID NO: 38392 - DNA, 1380 bp, Zea Mays
aaaatgcggattatgtgttgggaaatacatcgataggtgtctatgtgaaaagtgtattgttttatgcatgtgatcgatgattgggatagtcgaggcgaatgaggagtatgattaatcctgttagagtcactatgttgttgatgccttgtgcgtaacatggggacacgtatgtgcgtttgtgctgtggtgtattatagtggtggtggcgtaagatatttgattgaggtgtgcgggtatatgccgtaatatggttatactcgcaacgaggaaagatgtatgcattgtgtaacacgacacttaggtcactattatataatcgtgttaaggatgctcatgatggtcgtgtgattgaggagtgatgtagtggcaagcgagaagtaagtttagtttttcaaacggttagtggatagtatctatcggcttcatcatgatttttgttgtatggcggatcgatgccttgtcgtcgtaatctcgggaaattttcgaaaatgtgctggtgctttactgacggggttgtatgtacttgtgatgtattacaatagctgtgtgtcgtgcaagtatccacaaatggtgaaaggtggtgtatgttggtaattagaaaatggtcacttcgttagccaatagccaagcttatgccgtgatttaaaatatgggcaagttaaattgaaatctaggcgtgtggttaaataataataattttggcttgtgtagtgaggtggtgacatgtcgaagtagtcatcgctccctctatgtttttaagtcgagtcaaaatgcggggtactagtagtacgctaggcaggcggtgttccaaatagataaatcgggtgatgtggtagttgtcaagcatgatagaagttgagtcacttaggttataaattgatgctcgacatgtgaggtctcctaaaatatggtgttttaagtgacttgtgcgttgtccaatttaagttaagaaaatgcttaagaaaaactaattaacctgctcccacctatgtttttgagttgcgaagtctaaaatactttgctaagttttatactggttaaccaacttgttagatgactttagttaagctcgtggtcacgatgatttgcttgttgtagtctaaatacgtatggttatggtcgcggatgaaaagtattagtgctcatgtgaggtctaagttaaaatgcaaattattgtgtgaacaacacttctatatcgattatcggggagaatgtgttgttaattaaatatggtacttctagtgctcataatgacacggataaaaattagtaagtccacttgttagttctcacttggttattttaactctaacaattgtcaaagtgttagaataattcaagtatctagaacgcggcaattcttgaattgtataggagccg

SEQ ID NO: 38393 - DNA, 505 bp, Zea Mays
aatttctgagactcaagcctcccacattcactggatccagcaatcccctcgatgccgacgactggctgcgcacgatcaagaggaaattggaagccatcagatgcccccgaaaatcagcaatttcaattggctgctcatcaactttctaggatggccctagcatggttggataccttcagcgcggccgttagggacgctacctaggcagaatttgaaactgctttccgtgagcaccatgtaccccaggggatcgttcaactcaaggaagatgaattctgtgaactaactcaaggtggaagatctttcagtgagtacgtgcacaaattcacagagttggctcgttacgcgcctgacgatgtcagcacagaaactaagaagatggcccgttttctaaaagggctaagaccagaactcaagaccatcctcgccagccaagatttcctcagcttctggcacctctccaacaaagccatacaagtggaaagggcaaaagaagaagaaaaag

SEQ ID NO: 38394 - DNA, 804 bp, Zea Mays
gggacctcatcaagtgaagtgacacgaacacgaagcaaagttctagagatattactctgatcctcctcccagagaattagtcttccaaacgacccaatggcggcctgcaagtactctgaagaacgataatccaatggaaaccccagaagcataagccagcactcatggttgaaaagaagagctcggtgattccaagcgtcattatgacggaccgcggtgaaagtagcatccaaatattgctgggggccaagcagaaccaaattatcccgctccagaacactacgaaactgcactatcacctgccccaagtgcgagcgctgaatggctcgaacaccgaccctacgatgctcaacaagatactccctgaccacatctctgaccgcagggaacaagacctcgtgctcaggcaaaggatgaatattgataatcgcccagtcctcatgcattggcgataaacgctgcgagactgacctgaccatgatcccacgatgctggaccaccgaggcgctgaagcctggtgggaggaacggctccgggtctacgcgccggtacgcccattgatagattctcagagggtcaccggagagccaaagagcaaaaggagcggtttggggttttggtgaagtgacacccagcgagagctccaaggacgtttcgggcgcctgttcgtatatttttaataagaccgccctggcaaattcaccgaagcaggtaaaggtgggaggggtcccacccgtcagggacccgggggaagggcggaaccaggacccgaagtccaagaggtgagacgacccctccaaaagg

SEQ ID NO: 38395 - DNA, 344 bp, Zea Mays
cggccgtcacgattcgtgctcggtgcaaagtggataaccacgagggagtaaaagatctggcagggagatggattgggtcgcgagcagtagtttatcagaggggcttggggcagtgcgacgtggccgaacgaccgtggttgtcagaggtcgccggtgagctcgactgcgccacgccgtggtcctttaccacgtagtcgtaaccgttgcatgctcagaattactctcctcgcatctgtaggccgtcgagcgccgcggcatgcttgccagtgcaatgtcttgtcaccaccgccctccaaatcccttccaaattcggagtaaccgtggccaacctcccttgcttcgcc

SEQ ID NO: 38396 - DNA, 648 bp, Zea Mays
atttcccgagtcatcgactcgtcttcacatcttgagctacgatacctctgatcctcctcgacgccctcatggcggagttgcttcaggtacagctcacatcgtggctttgttccgaccgccctgctcagatgggtcacgatgttctccggcagacttcaccacagcggccaagtttctatatcagctcatgaggcagacgcttctaccacggatgggttacagggaggctgccactcatattcagctttggctacttggtgccttggtctctcactccgagtttgacgttgtggatttcctcatttgtgagatcgaggacaccgtgttggatggacttcgtgaccggcatcagctgtcgtatgctcactatctctaccacatcttcgcacaactgatccggccaccgtagtttcagggcactcttgaggcctcatgcctatactttggttcctaccatcccacccctgaggaccccgtgccagcgccagatctagtggccgacactcaggcagaggatacaaccttccatcagttcgagactcagggcgcagcagtccatgatgatgatgatgatgacgactttggggttccacctccgcctccgcctcctatgcctcctcgcacacatgatcatgaggttgggagttc

SEQ ID NO: 38397 - DNA, 306 bp, Zea Mays
gaataacattgtcgtgtgtgtatatatataaggatgaggtaatgaaagccctaggttttcattagttagaggaagcgcccaccatggtcaggtgtaggagtgaaaacaggatagatactatgtcatcccgtatcctaccctaatataattctctcgaatacacgatcatatacgtatagttaaaatttgggatggatacaggacgacatcggataataatttgggcgggtaagaaacggatacatgatattatctcgatagataacagatattagttggatagtccgtcttaataatattaggtgt

SEQ ID NO: 38398 - DNA, 316 bp, Zea Mays
caaaaacatccatcaacattggtacggaggacaggtctgagtgccaagtcgatggacaaacaacaccatttattgctctattccaaatagaagtctcgtctctgcttgcaccttcatacttctgatatagtttgaatattaccttctctctagcatagctagtcataaagcaaacatgtgtaccaagaaataatttatcctcatttagtaagagatttgtcacatcaagagcgtcctgaagactacaccaatatcttatatacaaatccagatacgttggacggcttgtattggcactgcaaaggatcgtttctgg

SEQ ID NO: 38399 - DNA, 471 bp, Zea Mays
cgcaacttcatttaacaatttattgacgacttcgtcaacaatagattcagccatattaataatctttagtgcttccttcgtttctggatcggccaggggatcgaacggttccggtggcggagataattcagctgaagtgggaaaaattaatcagtctgaagccacaaaaacaaatgccaaagctaaacatcaaaagatattacctatacgtttttcgcgctctgcagcttcttcagcttgtcttgcttctactcgggcgtcatggatgtctttttcacttttcttcataatttcatgacccatctctcggtcaccattcacccagacatcattatagaattttccgcccatcaaggttgcttcagctgaaggatccttcgtgtcatctgctgagaaggcagcttcggcctaggccatggtcttgatgtgatcacatctcgccttcttcaagatagctaaaatctcccgcgc

SEQ ID NO: 38400 - DNA, 390 bp, Zea Mays
cgctagaggcctttgtaccatgtcccttgcagatgatgcggtgggcggcgacggccaggatctcaatgacgactctgcttctaaggtatcacactccatcgatgatcttgttgctgaggtagaagagttgaatgttgctttggctaatcaggataagttgcttaggcttgctgcttgtgagaggaaaggtttcaagagaaagtacgagagcacacttagggagcttgagtctactagagcttcagttgtggtgtctgacgagactgaatgtggtggatttgctctacacatgtcgaacatcacaactttctagaccaagtactccaccctactagatgagcgcgatgagcttcagtctaggtctagcttgttgggtgcatgttagacttg

SEQ ID NO: 38401 - DNA, 374 bp, Zea Mays
cgccatacaacaaaaatcatgacaacaccgatagatgctatcaactaaacgtttaaaacactaaacttacttctcgctttgccactacaccaccctacagtcacatgaccatcatgagcatccttcacacgatatacaatagcaatctaaacgtcacgttacacaatacatacatctttcctcatcgcgagtataaccatattacggcatatactcgcacacctcatccacatatcttacgcaaccacaactacaatgcaccacggcacacacacatatgtgtccccacattatgcacatgacatcaacaacacaagtgactccaacaggaccaatcatactcctcattcgcatcgactatcacaatcacctat

SEQ ID NO: 38402 - DNA, 490 bp, Zea Mays
gtgatactgaaatttttcaatggaggggcaaaactgtaggacccagtacaacatactatttcaccaatgacgaatgaaagaatgctttactctacatgtataacaacatggaagagatgagtcgatttctcctgtaagtgtaaacttaattttagtcattgccgctacaattttttttgttatactaaaaggtttgtttccttgtactaacagtgaatttgattctcaaaattgcatctctggctgtgaacatgactagattcatcgagagggaaaagatgggggacctaatttcttgtgttggtttcgagattatgtagatacaaatgaaaatatacacccggaccttcgacaattatccccaggagcagtaactgccagacgttatggtcggtatgatgtcaatggttttagattccgttctacaaggttcaaagatgatcatcctctagtagccacgacaaattctagagttgtaactagagctgtc

SEQ ID NO: 38403 - DNA, 496 bp, Zea Mays
atggtttggagagcatcaagggcacatgagaatgttagaacaagactgaggacgacagtatcggacctgatttgcgctggccgcggcgaggctcgtttcacggtggcggagaacgaagttgggggaaatgagaaattctctggctatgggggttaatcggagacgggagtgggtgctacagcttcacgattatatggcgcaactatccccgccctcaatttataggctccaagggtggtggccggtgaattttgaggagacgcgcggcggtcggaagtgaggaagaacggcgtgcagtgaacacgtgtttatcgccgtggcagtaactctggtggtctacggggagttcagaggaggtcacggcaatgcgatggcgcggttgggacacgcggtggccaacggcgagggcacggcggcggtgaacactttaccgcgggcggtgagccaggggagatggactacggctagtcggagtggcttccaggtcacggggggg

SEQ ID NO: 38404 - DNA, 359 bp, Zea Mays
gattttcacctcggtttggcgcctgcaggtatattgcccacgacagaccgtggagaagcagcggcggcgatacctccacaactcacgacgatggcgctcgacacggcatccagggcttcaacaaggaggttgctgcaacgcggcccgggtgggaactagtggctcgtccagcggtgacaaggcttgagggggggagggtgaagttcacggccaaggcgcgatgcggaaagggaatggaggggaagtgagcgcgcaacagcggggtgcaggcggcggcggagcatctaggtcaggctgcggctttatagtctggcgcagggacaagctcgaccgactaaactcagggttgaggcgagatt

SEQ ID NO: 38405 - DNA, 297 bp, Zea Mays
aatcgtggaaaacgacggtaatgaaggcgacggtcgcgcggccacgtcgcgggcaagtggatatgcgagaacggctgaatccactccccctctgatcttttcatcctcgtggtaacatcccttctgaatcaagcatgaatcacggcggccagcccgaatcaccgcgcccgatcaccggcagtgagatgcacttcatctctgatcttattcagacattgtacatgatgaatgctcctttgaaagcacctaacagcccgactttgggggtgttttcctccaatttttgtacactactag

SEQ ID NO: 38406 - DNA, 404 bp, Zea Mays
aaaagctcacctgtgcgcttgggccgtttctttcccggccggcccaattgggcatttcacacccgcgcagcccatcacccctcccttccttttccctttttccgcgtgagaatgacaggtgggccccagcgaacggtgactcactgggaactcctctcacggtcgcgcgccgtgccgccggcgggtgggccccttaggccagatcgttcgttcccaacagatcgcgaaccaggcgggcgaaacagaagccgcgcggtcctcacggtgctccctgaaccggatccgtaataatcttaactaatcatctgccctgagtatatatatggcccatcgttaccctgctatgtccatcatcggtgaagccgtaggcgccatcgggtcttgctgtgtgcgaatgtggtgat

SEQ ID NO: 38407 - DNA, 412 bp, Zea Mays
atgatggcaggatcgagaggaagctgctcgaacccagccttgaggcaccttgcttgccactgctggtaagtttctggcctctcagtcctgtcagcaccctcacatgctattatgtttaagatgtcccgcccaaggagcccaccctctaacagctttctcgcttcattatcccgtgaaacattggtattaagcatgtcgaacagcgaggagtaatggaacagaagctctttgaaacgtgtcacgaagaagggggaactgtatgatccattcagaatgccgaaaatagacaccttcgggttcatcctcctcattatcttcagtaccctatcccttgcgctatccatggctactgtctcatcgccgaggttcttcatccggtacatgcagttgattataagcacttcatcctcct

SEQ ID NO: 38408 - DNA, 305 bp, Zea Mays
gtcaggagcacgattgttattaccttgctggcggtgttggtgtggcataccttctgtgttttgatgaagacggcgacgtaggcgcaaatctctggtggccgcttcatcataattaccttcttcatcaaacacgacatcatcgggaagacgtggacgaggaggaggtggtggcggcggtgcttgttgttgtgtctccaacacagcaagtctatcgatgatttgggacaatcgttgatccagcctctcgtaagtctcgccaaggttcatgtcaatgaaggcatcatgcacttacttgtggaccgtgt

SEQ ID NO: 38409 - DNA, 291 bp, Zea Mays
gtcattaccatccaagtctttcaacctgtatgatccaggccttaacgaagatattaccaagaagggaccttcccacttaagttgatgcttccccagtatatctgtattggctaccctccgatgctctaggtgccctggcctgatgttcttcagttttaccttccggtcacgccatttgattgtttcagcctgatacttattgatgtggtctactgcttgaagcttggtttcttctatggtgtcttttgctattttgcaattctcttcatcttttgccaaagccagggtcct

SEQ ID NO: 38410 - DNA, 281 bp, Zea Mays
ataccttgtaactttcttcggtattgaatttttacttcaccttttctgtcgaaacctcacttatcttatccctgattgttttctccatttcgtcactttgcgagtcttgtcttaactctgtccatggattatacttttcatcattatcacatttatacttatcacctctatatcccaccttgatgtttatcttataccagcctttaaaatctcctcttttcatctcaatctgagtgttacactttacctattttaaccttggtcgtatcctcttccttgtc

SEQ ID NO: 38411 - DNA, 541 bp, Zea Mays
ctgccttaattatgctctgtcaggcgccttaaacagagtttcccatggtacagtagcagaaataactcagatgcaatgcatctcaccgctggtgaccctccgccatgattaacgtcgatcgtcgtgattcgtgcgccgtgacttgcggataaccgtgggcaaggaaagatctcaactcggggaagggagagaggcttatcaccggactattcaccgtgacacttgctgcgcagtggatagtggtgtcctcgtcggagttcgccggtgattgtaaccgcgccacgtgcttagaaggtgtaccacgtcgtagtagatatccgtaggaggtcagttcgtcgtcggaggcattaccccggggagcgccacgatagtttacgccggtgactcacctctcctctcggccgcctttctcccctttcaaaattggacaccaccgcttagcgctcctataaattgttggccgggtctgttgcgccatgttatcatgaagccaaagcacccattcccgccttcaattagccaccatagccggagaatttcc

SEQ ID NO: 38412 - DNA, 460 bp, Zea Mays
tggcataacctttgaattcaagggttgccaactttgccttcttctcagcagggtactcatacaaatcaaatatttgttccacctttgtctcccactcataataagaatcagcattttccttgccgttaaatgcaggtatggacactttaactttgcccagaccatcttcacctcgtcggcgttctggatcaccacgacgctgatcacggtggccatcatcaccagcaaattggtggtcaccaaaaccaccaaagtgaccacctccacgatcatcgtaaccaccacggcggccatgataacctgctcgatggccattttgataaccagaattaggatcaccatcaaaacctgtagcacctccaattggaacacgttgtgcacggccaaaaaattgtggcctcatattcggagcaccgaaattgccaaaactagcaccatgtcctcgaccagcaccacgtcc

SEQ ID NO: 38413 - DNA, 294 bp, Zea Mays
cacttcaaccagcaaattatccaaaggaaaatgaagcccttctttcatgaatcttctatagacaactacctcatcagcttcgggcagagggacattactctcccctccagcccgcacaatagaaatgtcacgaaagtaccttcccctcatggcatcaatctgtccttgtttgattgttgacttttcgaagacaacatgacttggcctctagggtcgatcttcagcaccctcattctcactttctgcatcaaagtcttcactgtcactagaaccctcagatatcccagccattgt

SEQ ID NO: 38414 - DNA, 275 bp, Zea Mays
gtctttcaatacctatcagataaagaattgatctagccagtggcacttgatcttcaaaagatctatgctttccctaacaattgtatcttatatttggacaactagtatgcgagcttgaacaagtgtactcactttggcctgagtcgatacaatagaaatgttggatgtcatgtgaatgtcaataatgtgggatccttgggcgggacaaagaatgaaaggaacatggatgcataatagagggttgtaacacctcgtccactctcggaccagcggta

SEQ ID NO: 38415 - DNA, 312 bp, Zea Mays
cttttcttgccatttattgacaccttgaaagtacgagttgttttacatttatcaatttatctgcatggtccattcagttatgttatgatcttattgcatttctataacctaacatctcaaaacgtagaatcaggaatcgattctatacagatagcatgttgttctatcaaatgtttcagtagtgcaccctgttctggtcactttgttgatagcttttgcaagattgccacacttctataaaagaacattactaatttcttataggaaaaaaactatcacctaacaaattgatcaaacataactgaagtcgtc

SEQ ID NO: 38416 - DNA, 591 bp, Zea Mays
gttggctcacgtcggcgatctagcagtagagaaatcctactgaggcagcgatctggtgtgccggtgttggcggattgggatgatccatccgccggtccttgactctgggtcctgggtgctcgttccatgttgaattggattcgagtattcgatcagctggttcggatggtcttatgtgacagtgcacgctatgagctgccgatttgtttgtatatatctgaatcagagattaggctgatgccgctgctatagcttggatggggaggatattggactgatgtatgctgttcgttgtagttccaggtcgatggtaatagagttcctgtgttgctagcccttaattctttgtttcattagataattgaccttcaatgtcaaaacttaaatcaaaagctgtctactacctacaagaatatcttcatgactcgccttaggtttacctgattcaatttgtacccggctcagttgagaattaggctgatgccagtgccaaagctttgatgggacataatatgggttcacaggggccggaatggggcgtgtgtgtgctgttcgttctaatgtgtgatttccagaaattaatttagtgta

SEQ ID NO: 38417 - DNA, 364 bp, Zea Mays
ggtacgcaaccaatctttagcgtccatgggatcagcagagtgggcaaagacaggggatggcccctcatgatttctgcccgcttgtctctgggcacctatggcatctggacttgcactagaggctgaggtgggggtgactgctgctgcacctgctgcatcgctgctaaggtctgaccaattgcttggactgcctgagtttgcatcatgaacatctgctcaactgtcttcgggggtggcggtggtaaatgttgctgctgggctacatcctcctggggtgcctgctgttccggctgagcacgccttgcacctctgcgtctgttctcagacatctttagaaaccacacacatatcagatctgactctg

SEQ ID NO: 38418 - DNA, 272 bp, Zea Mays
tgctgggtatggatcacacttaaactcacacgttgttactgatttgttcattacagcagcttccaatcacccttgctacctgcaccatcatcagagcctgaaatcgtgaatgttgttttcgcgggcccaacagtttcaatttcttccccgtccatgtgtgctcttacacacgtggattgagcaaaagccatgaacagaattaggacctgaaagtcactcaacacagtttatgcaccagacactttgtgtgatactgtgatgtgtaagtttca

SEQ ID NO: 38419 - DNA, 317 bp, Zea Mays
gagctgggaaatgccaaaggagaccatcaccaagtctagcgaaggtgaactggtccggctgaagtatacattcagatatggggataaattcgatgaaccaaacgatgactggctaaaatgcatcgaagttacaagtggtgaacttcttggatcatattccaaggcagaagataatgcattatccacagccttcggaagtcaaggaaagaagagattgaacagagtttttgacgctattggcttcgactatcccgactaccgctacccgctgcgggggcaagggaagaagaggaaagctactgctctggccgcctcgg

SEQ ID NO: 38420 - DNA, 476 bp, Zea Mays
aatccgagattccaggcttaaatttcaccaaatttcccgttttgagcgatcgtttccgagccgagtgcccaaattcctttttcttcgcctaaattcaaaccaagcacacacttcactcatattcacctatataaacctattcgtgaagtatcggctaaattccatatcgtttcgtgcctcaattcgaattccaaacctcctatggcactatttatccttcaaacgtcgctttcacgtcgtttgacttctcgatcgtctcatcttgtgtttcctgtgccatatttctcttgtgtatgtatttattcacatttcatatacttatgactatgtgactaatacgtgctcacctcttctgtcatttcagtgaccttgattgcccgtgtgccgtctcccatcctgcctggatcgtcacctctcgtgtgagctttccaggtagtcatctcattctttgctacatctatcggtcacttttgctc

SEQ ID NO: 38421 - DNA, 303 bp, Zea Mays
gcggtctagatcaattcacagagtgggcagtcgcgtgaacaaattaggaccgtaggattgagatcgtaaagcccagattagatcgtatctatttaaatctgtgccgttgattcctaatctagcgctcgatatcgcgtaccggttcatcacggcgcggatgtaatctggaccgtagggtgtggatcgaacgtctctgattaaaagataccgcttcggccgtgtagttttacacatgtgcccctgtgtttttcctatatagaacccttcgtccacatacattgttcactgagtctaggattttat

SEQ ID NO: 38422 - DNA, 397 bp, Zea Mays
ccggaacacaggaatttacgtcggtattcttccgccatcgtggtcagtctaaaccaaggctgtaactacgtaattgaaacccgttctaaggttgtctcacgcccgtaacactcacccagtagttaaatcaggcatccactaccgatcttggccggtccgcacagcaggatcatcgctgatgagcgcgccgtcgatttggacttcttcggagaagaaatagaatttgaagggcatgattgtataatgtcagtgactcggcaaatgatcccgggagcgttttctgaattattagaagtagcgagggccttttcgcaaaaccgccagagcagcgcggacgcgcgcatgagcgcacttctgccctaactgggccgacgcaggcctgtttgagcccagtact

SEQ ID NO: 38423 - DNA, 376 bp, Zea Mays
gattaatagtggtaggccccccccaggtctacctgtctttttagcttccctgacggctgggagaaaatcagaaaacacccttctctcttcccagctcccttcttcacccttctctctccctccaaggctccaacacaacaacacctttctctctacatcggctgggagaaaagagaacacagggactggagatgagctcctcatctgaagccttcttggttatggtctactggtctagtaagttatagacttgcagtttcatataaatttgttgctgctgtgcttttatgaactattcaagtattgaataaacttgttgctgctgtgctggtctagtaagctggatgtactgctgttttggactattcaagtattg

SEQ ID NO: 38424 - DNA, 618 bp, Zea Mays
caaatatattgtcgttcgaagtccttttgttttttcgattggtgatcggacttgcgtcgcccactgcccatcgaccacatgcatcttaaacattagcatcgacaacaccatcatcttcatcttcttcgactatgctgcatcgtgccctgcgacgtacctgaaacgcacgtgtgtgccatacctcaaggcctgcacgacgacctacaccaactcatcctcaccaccaccgatcgagaggctccaccttcgacattgccttcaccatcatcgtctctgcctcgcacgctctcgacctaatcaatcaattatgtgcgaccatcctcccatgacgtatgttgtctactgcatgcctctccaagtacaagggttgtcgttgtgtcacctcctcaagaagcaacgtcgttactgcttgttgccatcctagtcgttgcccctacattgtcgtcaactacttcgttgtgtgcctctcacacatggactaccccaactgttcgtgctcttcaccttcttcgagtacaactatctcaacactctagcaccatcgcgtctctccttgtgtggtgcggctctctcacagctgcaactccagaatcctagatgtgtcacccatcacttctt

SEQ ID NO: 38425 - DNA, 533 bp, Zea Mays
ggacaagtgtgtctttggtgtctccgtaggaaagttgctggggttcctggtttcgcaccggggcattgaagcaaacccggagaagatcaaagcgattgaggcgatgaggcctccagcccgtatcaatgacgtccagaagcttacggggtcattagccacccttagccgcttcatttcaaggctggctgagagggcgctacccttcttcaatctattgcggaagtccggcccattctcttggaccggagaggcggaacaagcctttcaagagttgaagcagcacctggtgtccctaccaatactagtatctccagaacctggggagccgttgtatttatacatcgcgacggctgcagaagcggtgagcatggtgctggtcgtcaaaaggacggcataagaaggccaagagcctgagggctcgggaccagatacagaggtccggactgttcagaggccggtctactacgtcagcgaggtcgtccatgaagcaaaggccaggtaccttgaaatgcataaactgctatatgttgtgc

SEQ ID NO: 38426 - DNA, 495 bp, Zea Mays
gccccaggtacctagctctttccttttctattctcatctcctgctttgctacacttgcttatctctctggttcttgtgtagcgtgtcaatgttcagtcaggatggtgaggaccaagaatgtcaccccagtagggggaggcgatgaccaggaccctatttgccccttcagactggacaagggaaagtatgtctaccttgagcagcagggaggcaagaagaagagaaagatggatagagctagtcgagcagcagtagcagcagcaacaactgagagagcagagcagggaggccaattgaggatttgctctaatcagatcaccttccgtgtctgtcgcctctcgtctcagactcgctccactccagctcggtttgacccctcatctccagtcaccactaccactccaccttcctccactacgccagcttccgccactccagtgcctatcaccacaatcgctacgcctacagcctccaccacacctacttccaccattc

SEQ ID NO: 38427 - DNA, 1002 bp, Zea Mays
gcattcctgcctgactcgcttacatgcgggcccgggttgtcaggcccatcttccccaaacggtctgccgatcccgacggagcctccactgcgcgatgtggccaccggcggatgcgggatcaccatcccccataagacccgggatgtggtgcgccctctcctggtcataccgctagagccgtccagaaaccaaaaacgccgagagcagagcgagaaagaagaaggtccgccgcggtgggagcttcgattcaccggcatggaggctccggtgcatgcctggggatacgctctgggagtcggggaacacactggtgggggacacaaggcaggcggccagctcggagctgtgaatttctcactggtgggacggaggcgccaacactctgctccgtgtcatggccgtcctcgtttccgcctcctctcgcggtaagaaatccatcatccggttcaccaatacctcctctacgtgtaccatacctcggatccatgtttagggcttgagttcgtgggttggtgtggcctggaccatggcctccgccgtgggcgctggacgccggtggccctggtcgctgggttgaagatagaagaatggccctggccgttggatcataatcaggcactgcgaaatcgaatggtgggcgctctgtacaggggattgcatagcgagcgttgatccgtggatggacggatggggttagatcacgcgttaataaaacctagaccgtagatgtgagatccagcggtgcagaatcagatctgcggttcattaaatccaaatcgtcgatcttggatcgaacggcttcagtcgcgtaccggttcattaaaatctagattcaatccaggccagagaatcccgatcggatggctcagattagaagttaccccttcggccgcacgtcttataaaagaaccccctggaaactagagattcaacccgccatccatattcaactgttcactatgtcttgaacattttacccccgagccccctgcactctctgaa

SEQ ID NO: 38428 - DNA, 568 bp, Zea Mays
gcgagccggccgtgtcgtgaggaggaggatcacgtacagatcatggcacgcaacctgttacgcgtcgccatcgtgctgtggatccggtcttctccctcatgcgtgaggcagatttgggcagcgatcgtggacgaggccattgctagggggagcacatcgtgcgaggtgcgtccgggggagcggtggcgcggtcgcattgcgcgtggagagtggcggcgaggttggggcaagcgaggttgggacggttggtgagaaggagaacgagtggacgacacaccaaggggggcacgggggtgacgcacgaagtcaggagtggagacgtagatcgtgggcgtgggcacgaacggtggagattgaccgaaggcagaacacgcagatggcagaaccaggagaggtagactacttttaggttcttaataagtagtaaagatgggccttttcgtgcctctatatgggccatttcgtgcctgccttaaacgggtcgtgctcgtgcccgcccataggccgtgacctcggcccaaacctggcccgaaataacgggtcgtgccggcccggcactaaaatattt

SEQ ID NO: 38429 - DNA, 641 bp, Zea Mays
acagtggcccgacccctacaacccatggtctgggtccatccacatgtggcctggctcgcgggctctcggcgtgcctttggctcctcatcatgctattccttcacggcacccgtcgacacagcagcccaagtcccttctcatcgacgtttaggggcagtgtactgggtccaaccgcagccctggtattcgacgactccgcaaccgtggacgactccacctcctggcttctatagcctgacaccgtccctcccttcctgggattagcaggctctaccctccaacttccaaactatgacgttgcagcccccagcggaactagtggttcttcaactccgacgctatgactcatgtcctccgatgccggtattctctcctgatccactcctacacaacaaccttattccattattgtcggtaacggaaactctattcctgtcacggtgtcacgtccactggtcatactgttcttcccaactcccttcaccttaataatgttcttgttgcacctaaccttattaagaatcttatttctgtgcgtcagtttacttccgacaataactgctccattgaatttaacccttttggttgttttgtgaaggatcttccctctcggggagagatcgtccgctgtgacagttcgg

SEQ ID NO: 38430 - DNA, 354 bp, Zea Mays
acgaagctagcgagggagcccttaccgaacatgtggtggcagcagtggcctcgcccatgagttcttgcaaccagatggcaggttccatgctctggggagcaattgggtcgaaagcggtggtctacccagtctagactcatcaacgagaagagaagcagtttgtttctttcacccaaagcaggaaacgacaacttggtgtcatctcccgctgtgatctggtggaggatcaccgaggacggcctggcagagatggacaggtagagccagaaggagacagcgaagcctccttcctcgccggctcaggccgctcccgtttctgggtcgacgcgcacgccgcagagctcgcgatagccg

SEQ ID NO: 38431 - DNA, 518 bp, Zea Mays
gtccattgtttctgatcgagactccaaatttgtatccaaattctgggagagtcttcacagtgcattgggcatcaagctttcacttagtgtcgcttttcaccctcagactgatggtcagtcagagcgaacgatccaaaccttggaagatatgttgcgtacttgtgttctgtcatggaagggtagctgggaggatcatcttgcattggcagagtttgcttataacaacagctaccaggctagcatcaagatggcaccatttgaggctttgtatggcaggcggtgtatctcccctttgtgctgggagactttggtagagagatccctggttggtcctgattgggttcaacagacttctgaaaaggttcgggaaattcgtcagaatattttggcagctcagagccgtcagaagagttatgctgatgtgaggaggcgggatttggaatttgcagtgggtgaccaagtccttctcagggtatcacctactaaaggagttgttcggttcggtgtctctggaaagc

SEQ ID NO: 38432 - DNA, 318 bp, Zea Mays
cccgcctaccctagaaggcaacattcacacttgcatctccgaagacctcccccgcaatgacccgccacctggattcgcacctttgggattccacctagtccaaggggaccaagacaatctcagcagaagaccaactaaatctgcatagtcttcacatcaaaactggccatcttcggagacagggaggtactcacagccaagagaccgagaaccaacatgcaagtcagaatcagacagttgatcatggaataagaagagaagccaagggcactggaacatgaaattgcagaagatgcagcacgaagacccctctcatca

SEQ ID NO: 38433 - DNA, 355 bp, Zea Mays
ccaaatacggacgacgggttgatattcattaaatctaggggctcttgtgaaaaagcgcgcgacgaaggggtatggttgtatctggaccgtgcgattacagatggagggctgagattaaatcgttctcatccccaaccggtatggcaccaggaccacaggatcagagatctatggcctagatttcaaatatgatcgatcagatcaccaccattggactccggatggacgacccagatcacgagcccgaagtggatacgggagatctgatctccagcgtccatcgaggaaccgaccgctcagataacgtccacggccaatgcccttcttccccaagctgctaccaaacgcggcggcg

SEQ ID NO: 38434 - DNA, 427 bp, Zea Mays
atacagattcagtttccatctcttatcacctctttgtttaactagggtcaaacacatgagctgcactggttggggttacactgggggctttcaccgtggctaactggggttaaattgttcctctatatcaactgcaggcttcccatgcagagccaagcacataggaaactttacttctccttctgttgaatgttggacagcaagacaaatagtgaagcaactgagtcactatggccaagattattacctccttgctctgatccatgaagtggtaaagctgggacaagttatcccccctaggctacaagttcctttcggtgcaatcactagaaacctccagagcactggtggagatggatatgtttctcagatttcacaaccctgaactacttcagtcgacagcagtaccaacctcattcgctccttt

SEQ ID NO: 38435 - DNA, 424 bp, Zea Mays
agaactgtacgcagtgtagtaaactctttgtcacaaccctttgattcatcatataaaggttcttttgaggcactttccagtccctccattttagatagccccttctgtgatcccacagaactcaacatttctggttccatatggcgcaacatctctttgcaatcaaattcttgaaaattttgattggcatccacagaatccactttaccttccactttatctaaaattctgacaactctctcgtcattaccaggcacttcacatggatccaactcaccatgttatgtccatatcgtgtaattgtttttaaaccctcttttcaacagatgtgattggattactcttgcatctctccaagctaccttattaccacaatcgatgcacggacataatatctccttactctttcgcaaattcgcgtgct

SEQ ID NO: 38436 - DNA, 500 bp, Zea Mays
tagaacttacagagatattggcatcagggtaaggtactcctccagtcgtagctagatagttgcccctgggtcggtgcaatctcgttaccttggagggtccttcccagctgggggagagttgtggagcacctcttggtgtggcacttgccgccgacccaagatttctatccgcatttgacacgagaacccttgcctctggatgtgatcacttctgcatgtacctgtctgcagctcggacccgtgggaggtccggatgggcctccggaggaaggcatgcttcagcttcgtagaccgggggacacggagttcacccgatgtccgtctagttgtcttcaccggagtaggagcctccggcaaagatatccttcaggtccccctcgggcgactgatacccgaggtctcgttccggcgcgaccacctcactgtcgtccaccttttccttgccgggctggcggcgaggcggggagccgtctttggaggactgctcgcgccgctcgctg

SEQ ID NO: 38437 - DNA, 489 bp, Zea Mays
gtggatactgacttaaagaaaaagaattgttttatgagggggctcaatgacaggcttcagcggaaaatggcaacatgcttggaccttacctatagtaaggctgtcagtacaacactggtagtggaagccaaaaatgcagaacatggaaaatcaaaggggtttggaggtgaaaggtcaaatcaaggacctgagaagagaaccaggttggtgatccaaccttttaatcaaaatcgtccttcgcctcacccaccttcatatccattcaagaagcctatctttattcgtcccactactgcccccgcttctaccaatcagccgagtgccactggtactcatttccctgcccttcccagttcctccagtggttgcttcaactgtgggaagtccggacatttcatcaaggacagcctataccagaagcaaaataaatccaactttcagcaaactcctgggaactcgaatgaaggaaaggaaaacatggctgactct

SEQ ID NO: 38438 - DNA, 497 bp, Zea Mays
tcgcttttgcgtactctactcgctcgacagagccgcggcgtgctgtgcttatcgccggtttgactccgggccggtggtgcaggtgcaggtgcacacagaataacagtataccactcgatggaaaggtgtcgaggtaagcttttggccgcgcgccacggagagccgttactgttatattagcaggcagcaggctgatggccgtcgactttggcggcacgcgcgggacagacagtaccgtgatgtaaccctctggctgccccgattaggagcacggtggtgttaagtgttatcctcggccgccaccatcgaaagcgaccgttaccacgcccctccaggacaaattcaccacacactgcttcgcttcgtatacgtcggcgccgacgattattattattagctagcctgatcaacacgtaatctgcaatcagttatccttaatcttcacaagcagtcgtcgtcgtcgtcacaagatctgcagctgcgtgtggagttgccag

SEQ ID NO: 38439 - DNA, 327 bp, Zea Mays
tacatatcgaatagtcgtcttgtgtagtctactacatatatcatggcaacactacacctacttaaccgcaatgtcacacgtcacatttaatatgctgcttgagagtcatatctaggccattagtaccacgagttagtctaaagtagagttgatgatacactacaagagaaaagcgtatcaacgaccagaaaatgacgaccacctgtaatatgtggttgttatgagtctcgacggtatagtgcaagctttgtccaacccagcagacgaccaaaaaaattgtcgtcgttagcgagctgacctctgtggtcgttaaacattgaatccagc

SEQ ID NO: 38440 - DNA, 423 bp, Zea Mays
aaggaagctcgattatgccatagtacactcattctatgtcaacactcacctacaagctaaaaccgaatgtacccttgttttccatccccacctaacatcaaacaaacttttgatctacatcatgtagtctatctaacccatatctacctcatcttggcatattctatcgtacctttggacattcaccttatacaactagttaccccgatttagacataaaacaaagattaagccttgttaaagaatcttcatatcataaccagttactagcttattcattccgcttatcgaataaactcccctgcaaaactatttttccttatgcttctaacttcgatggtcaataccaggaaggaaagattatcaggcaacagcaaacaaaaatgaatcctccaaatcctccacctgttggaatcgatcaag

SEQ ID NO: 38441 - DNA, 488 bp, Zea Mays
acatatgtgtagtatctatcatgtatctctagtgtggaggcttgtaagactacaatgtgcctaaacaaaaagactgaagatgctgatccaatgggaggaaaaaatagtagctggatgtgctttctgacaaaagtgaactaacatcaaatatccttgtaaagcaggaggaacatatgcttgtcactgtacgtttcttcaatgaccaccatagccaaaacatatatattagtgttttctagaaatactgagttacattactagccaatttctagaaaacctaagacaagtatccgtcaataatcccattggtcctcatgtacgtgtcttccaaacactattcatttgttcacagtattttaatgtatgctgaaattgattaatgtaaaagtttcgtccaaaaatttaaccacagaagaatgttcatggattagtgccctatcatgctaggaagatctaccaatgggggtgggtttaaagattgggatgtc

SEQ ID NO: 38442 - DNA, 567 bp, Zea Mays
gacaagctatgttaacattcaaggatgctagaacatggcatggaggggaaggaatgaaccttagaatggttggtcacggccgggtgcctcacggcggcgtaaatgaccacaatgggggaaaactggaatttgtgagctctagtgggtaattggaagcgaggaagggtgcactaggcgcgtaaccagaaggtggatcagggagagcctttaatttatagtagctatgtgagtgcttcgcgaatttggaatgagaagatctcacggccgaaagggaggtgagtcaccggagggcaactgtcgtggcgctcggtgaggtaaggcccctggcggtaaatgggttgtccacaacgacctattgcgacgtggtaacatctccaagcacgtggcatcctcacggcaagtgccgaatgccaacgaggacattccgaccggtcgcgaagcaagtggttacggtggccagctcataaacttatcagtagtcacgatcttttcacttgcccggtaatatccacgttgatccatgaatgaatcttcacggtgagctcgaatcgcagtgcccgatcatcg

SEQ ID NO: 38443 - DNA, 523 bp, Zea Mays
atttggagctaatatgaatttaatatgaatttctcaagtttctagaattaaaaactaatttctataattatttctcgggttttaatcccttctggactgggcctcaaataccagaaagagcaggggccctggtgcaattaatcctaagacacagttgacccacaagctggactgcgggttgatactcaacttctgcggggacttttatgcaaaacgctatcgcgaaggggtatccaacgccgagagccatacgattacaaacggacggccctgattagatcatcgccacaacagatcggtctacaaccatagccccaggatattgatccaacggttactgacttcgaaccccgctcaaagcacccgaccgttcgatcttagatcaacggtcgatcgtccactcaccgaatcgttatcttggaaataatcgcgcacgttgagctaggatccaacggttaccaaccaaccctatcgcccaagccgacagcgcggcggcgcagtacccgcacggtcacagtctgac

SEQ ID NO: 38444 - DNA, 796 bp, Zea Mays
gacaacctggccctccctctacaacccatggactgggacgatctccatgtaccccggtccaactatgggtgaactacagcagccctcacgcccccaacagcagtaggtgttcctcactgctccgggccagcccgtgggtctatctcagcataccaccccactggcgcccatccctgtttcgacgcagctgtatgctgcccaacagcaacatcagttgcagcagcaggcgcaggctgcgtatggggcgcaacagcaacaacaggttgcccaaacaccctggaacccgtggcagggtacctgggatcagcagtcgctggcctcttccttcaacacgatgactcttcagcggtcccaatccatcatcgagtggattgctgactctgaggcctccaaccataccaccccggactctggtaacatctcccgtttccgttctccaatttctactattccttcatccatagttgttggaaacgggtctagtctgccggtcacctctataggagatacggtgctttctggccagttttatcttaataatgttcttgttacacctgctatcattaaaaatcttctttctgtccgtcagtttacgactgataataattgttccatggaatttgacccgtttggcctttctgtgaaggatctcaattccagaaacacaatccttaggtgcaacagctctgggcccctgtacaccatcagtcttcctactgcgcgtgctcctccaaccactacacactacgcccttgctgctattactgctcctgcgtccctatggcaccaacgtctt

SEQ ID NO: 38445 - DNA, 480 bp, Zea Mays
attaaaaacaacatgagagtcatcattgttagtacaagtatcaacaacaggatcatcgtcaggactggccgtgggagtagagcgaggacgacgaatgtaagtctgagtgacatgtggtttggaagagtaagactgagatggtggggaagtggaaggtgatgtgatgggaataagaaaatctggggtagaaacagtaggtggtgatactgatgaagtttcagaaattggaggaaagctcatgaaggaggtagactttgtggaataaaaagaagaattagtggaagagttgtaaaagaagggtcgattttcattaaagctcacatctcgagaaatacgcatgtgacgagaagatgaatcataacgccgatagcctttatgttcagggctgtatccaagaaaaacacgctcaacagattgagcagtcaatttagtacgttcacgaggtgataatagtacataacacgtacatccaaaaactcg

SEQ ID NO: 38446 - DNA, 283 bp, Zea Mays
tcgacgtggacactgtcctcagcgacgttcattgaacgacacaatggtgttccagttaaccatgcacggtagagttcaaatgggaaagagcataagcttcaccatgacctatagaatgcgaaacacgagttaaacaactatgactaaccttaggaaaggctgaccatgcggttgcaccactcggcggcgctggtgaccactgatggggaaaaccggtgttcctgggtaccgacagtggaacaggggcaacaaagggtggcttgggtgcgtaacggagaggcgg

SEQ ID NO: 38447 - DNA, 371 bp, Zea Mays
gttttagaagtaacagccgagtgataacgggccacgtcggccgctttggaaacaatggccaagtgaagtctggtaacgtcagcgtttttagaaataacagctgagttaaattaggccgcgtcggccgttttggaaataacggccgagtgatgacatggcacgccaacattttagaaataacaattgggtggtgacttgatgctttttagaaatggcgtctggcccgggaaaaccccatatgtactgcactgtcgcatgcctctgctttctatgtcctagttttgcttttctgcatccaggccttctctgctctcttgcaatattgcctccgctctgctcgccagcaaggttgagatggcacccaagcagaa

SEQ ID NO: 38448 - DNA, 306 bp, Zea Mays
ttcctgcacttcaaggtagctcggttcgagtgcgggtacaacaccataatcaggagaccaagataggccaagttcatggccatcccacactacgcctacatgatactcaagatgcccggacctcaccgtcgaaccctcggtagcacctccaatgataattgccaacgaatcactaggggatgacctcacaatcccaatgaatgaagcatctaccactaccaccatgtggccggctgaagaaaccaagagagccaaccttggcttctctgacgaacgcaagatggcgatcatcagctccagcctcac

SEQ ID NO: 38449 - DNA, 429 bp, Zea Mays
ttgctgaccgccttcgacgtctggatcagattcttggcgcccgcttggaggccgagggcagcagactttgccggtcggcaatagaatacgtcttgacatgcttccggagccacgatccggctgtctccttggggccagtcatcgcaggtctggtgccgatgccgaagatgctgctcatgagggcgtgcaggacgttgtggaagcggtggccgagcgctttcagcgggatcctactgacgatgagtagctaggcctgcgtggagaaaacgaggtttccgctgggaagcgggttgtaatataccattgatttcgtaagatactcttcaggtactacttactgggcgatattacaacttatctgcgtgccacttttcctttgttgtgtgcaccgttaccaacttcttccttggtacttggccccctgggata

SEQ ID NO: 38450 - DNA, 422 bp, Zea Mays
gtcactttttccttggcttcagagagcccatatgtaaacgctaagcctcacaatagtgttcggggtcagctgatggagatatatctcaaatctctttaaaacttcccctatcatatcataaaggggaaccgaagccccactctgaagaagctcttgaacacaacaacatcatcttccttcggctctagaattacttcttctccagcaaagcgaatcagtccatcttcattttctccaaaataacctagcttcttcatcacaaccaggtcctctgcttttactatggattttccaaattcaatatgactaggtttggttgggcacaaaatactatcatcctcttcacttttgttatcactcccgacttcagccacaacttgttcagcttcggcgttggaggtaccttcggcagtagctccctc

SEQ ID NO: 38451 - DNA, 386 bp, Zea Mays
tggcggggggtggcgaggatgaaggcgactatgatgaggtggacatcggaccactactcggctccgatgagatgctgcacctccctgtggcatggcgcttcggagcgacatgatggaggcgagccaatgtcgaggatcccacagccgtggacgtcgctaggacgtagctgatgccggaggaggaggcgctctggctctgcatcggctgcgtccacttctagacttccttgccttacctatcaccagtaggaaggtacgtgtcatccccaccccacccctccattgtcccttcgctatgaatccccatctcctcacctccacaatgcctcaacaatgaccgccttggaagaatttggggatgaggagcccacgtcgcaacgttccac

SEQ ID NO: 38452 - DNA, 954 bp, Zea Mays
cttatgcagatgcacacactgctataaatatactcttgtacctcaaatgaacttacactgtgaatctgttctgatccatttgccgcctttgtcatcggcctgtaccttgcctttcggagccatccggaccacctgatcatcccttgctgcagtatcagagaacgctgggttttcagggtgcgccttcttgagcagcaaaccccagacaatctgtcaaacaggaacaagaaagccatgcgtgattaactctgaattctgaaccgattcggttctgaaacctgagtgcaacctgaactatatatagcacctcgtcaaatctcatttcgggtacagtttccctcaagcttggcctgggcccgaaacctccgaaggctcttgttgcaagtgtcctagaggtggaagaagagcttaggagccgctccagctgcaggtgatttaccctgcccagttcattggctgtggcgagcgatttgagctcctcctgcagcctgctgagctcgtccagatgcccacagctcttcgttgtgttcccttcccccatgccgaacgtcccaatcgacagcatcgccgtggtccagccgtcgtcgaggttgttttctgtctgaggaactccaccggaggcgtcagcagctgcaacatggggagtgtaagctattacacagacacatgaatgaacgagtgcgttccaggaaaacgggaatatttatctccgctactgccatcacatcctctgtcacttacgccgagctgtgcttgcgctgaattctgcaggcctcctcctgctgcgatgtgatccatggagcttggtctgcatccagttgagaacctgcatccaccgcaacaagcaagagttgaacacctacagggtcgttcagccatagcaagtttcagatgaaacggacaacgcctacgtacccccatggttactagctagtgctctcttctcgacttctc

SEQ ID NO: 38453 - DNA, 487 bp, Zea Mays
ggtattctccgtcccgagaccttgctgtgggtggcccggacctcacttagaggggtccgggtcccatccgggggaacgtggaggtcttgggtcgtacccggaggtccgggctatgcatgctggggtccgacactttcccatgggtgtccggatccactgacgatatcatggtatatgttaccttctcttggtcacgtggcggccccggagtcatccatgtggtggggtcgggcactgtttatcacgcgtctagatatagacgcgcgggtaccacgccttcatactgtagtaagggggtacccctgttccagggtaccgatagtggccctcgggcccaactcaggggaggttacaagcctgcaggtggggccaaagcctgattggtgattggcgtgccattttcgggcacttgctgacgtagtcaccgccaacccgccttcggtcatgccgctgccacgtctatccccgcagctgacgggtacgtggc

SEQ ID NO: 38454 - DNA, 400 bp, Zea Mays
ccgaagagaaagtcgctttgatccgcaggaggttacttgaagctcagagtcgacagaagagttacgcagacaatagacgaatggaactcagatttgaggaaggagatttcgtttatctcaaggtctccccgatgcgtggtgtcaaaaggttccaaatgaaaggaaaactagcaccacgtttcgtcggtccctaccctatcatttcccgaataggacccgcagcataccgtcttgagctaccagagtccatgtcagatattcacaatgtgttccatgtgtctcaactccgcaaatgcctaaaggtaccagaaacccacatcgaggcagatgcaattcagattcaaaaggatctgcagtaccgggaaaagccagtgaagattctcgactcagcagtcagaag

SEQ ID NO: 38455 - DNA, 618 bp, Zea Mays
ctaaactgtgtcaaactcattcttgactgttttggtgaagcttctggccttgtagctaatttgcacaagagttgtgccatcccaataagatgtgaagtggaattactgcatgaagggtgtaacattctgcaatgcaccccctcttccttcccttgcacttacttggggctgcctatatcagataagaagcttagcaggaatattttgatgaactgggttgtgcgctttgtactttcagccatcccagtttaccttttccttgctatgaatgtccctaagtgggtgattaacaaaattgataaaatcagaaaaggatttgtgtggagagggagaaaagaggttaatggcggcagctgccttgtggcctgggattcagtcacaagacctttgaagtatggtgggcttgggattcctaatttacaacacatgtgttgggctctccaaaccaaatggttgtggcttcaaaaaacagatcagagcagaccttggcatggattgactattcccattcagcaacctgttaaagatctatttgcagcatccctgatttcctatgtgggaaatggctctaataccttattctggacagataagtggcttaatggatgctccatcaga

SEQ ID NO: 38456 - DNA, 400 bp, Zea Mays
catggatacatccaagttctctcagtcgagcattgcttgtcaatagattttatttttgttgataaatagcttgtttgtctttgttcaggtctgaaactgacattgtaaatgtcgttgaacaaagaatatggcattcaatggaggaagggcactttgaaaatctaccagggaagggcaaacccttaaacctcacttcaaatcctcatgccgatcctgccgaagacaccctttacaggatactttcaaagaatggttgtgcacctgaatgggttgaactgaataaggaaattcgtggcatgatcttgagctggaggtcggcattaaggaaagcatgggcaaaccgctctgaagatgatgattctaactggagtgatgacagcagggctctccaggagcgaat

SEQ ID NO: 38457 - DNA, 476 bp, Zea Mays
gcagaggaaaaatgtggcttagcaaaaaatagtgtattcactttgagttgaaactataaattaaggaagaagtcaattcaagactcataaaatttcaaggaaaacttcgtatgtgattattggattgccaacagtagggctgctatctgctagctcttgtgtcaggcgttgggagtgcttttgggtggtctcgcctactacagcctcatgcatgcctctgaatcaggctgtgaacagatgtaatgtgtgaacagatgagaacagaagcagtgtgagtactacagcctactaatgtatctttaagatagaaacatataatttgcaatgccaccagtaagtaattaagctaaatatgtaccatttaagtagcagttcacctacttcgcatgcacaagtatcacagaagaagaaacaccatgctaggagccctaagcaaaagacatttgtcgaattaaactttaatgtatcttccaaac

SEQ ID NO: 38458 - DNA, 482 bp, Zea Mays
ttgagaggtgatatattcaatgagggtgcccctcaagcttattttgcttggaatcttcctcctgctgtaagttcactctccttagccctgaattattagtcgctgattcattcctctgtttatgctgatgatgttgttcctttggtgtagagccacgttttcaagtttgtgtctgacccacctcggcgtggagaaagcagtaccctcgggagaagggcatgattgactgaggaagaggtagaggcagtcgttgctgccaaccggagtttggctgatgaagagaaagtgacccacatagtgatcagacaaccagctgggagttctaagatagaggctgttctaagatagagttctaagatagaggctgttcttgatatgccggtaagatatctgttgttggttcacttgacttttatcactcgttcaccatgttgttgcatatgatgccttgcggctgctgcaaagagatactctgatcttga

SEQ ID NO: 38459 - DNA, 351 bp, Zea Mays
gtcaggggccgttcttccctcgcccctcgttgacccgaacgaaaaggcaacgccgccgtgagaggagtgctgtgaaagtccagatctcgcccgccgccgcaattctccacctcgcctccgatctacgtcgggagtccagtgtagtgggagcggggagaaaggtggaacgtgccccaaggaattgcgcacggatggaccgtgcattggtcagaatttctcgccattgacctcatctccgccatgaagccgctcgacgccgtcgccaggtgtctctgcgccctaatcatcggtgcgtacccatccttcgtgttcgcgtgaccgtcctcttcatttaacgctcgtagaatcggt

SEQ ID NO: 38460 - DNA, 426 bp, Zea Mays
cggatgaagccaacctggctcggcccccagatccaggctcatgggagcctggttccagtggtgcaaggggggcgtgattggttgccggataagcagaaccaggctcaacccagcagttgattggttgcacagttgcattagcaaattcaaacacacagatgcaagtagagtgattggttgcagctgcttacaagtggtatggtcaccactgcatacaagtggtgaggttacccaaaccaaatgatcaacaagagcacaactatcagtacaaactgagagagaatcaaaccatctttccaactgaaaccaacacgatcagtcttaatgactgattgtttaaaagcagcaacagcttcatcttttgaggagtagcttttgtagcatgctcctttgaaaccatgaacttgagcatgacaagaatcccag

SEQ ID NO: 38461 - DNA, 357 bp, Zea Mays
cattgccgacttaagtcgattgctccgttagcagggcatagtggtcaccctgagttaagtgagaatgcaagtcaatcgtaaataaatcgagtatccttgagacctcttctttattgatgacatatttccactttacagagtacatcatcatcatcccagcagttttgaggtacagctagggataaaactttctgaggtgttctatgttccaggagttcccaacttctgtgccatccatctgagtgaggcgatatgatccgggccgagtgacttctactaccacgaagggtccttcccataagggtaataacttgtgtcgtccttctcccgttagaattcggcggaggacgagctccc

SEQ ID NO: 38462 - DNA, 278 bp, Zea Mays
tgaatattctttcattcttaccttgatcctttcttatagcaacttatcttttgagaagtctggtaacagagtgccaaataataggttatatatatagggggtatgggagcaacaagtagttggttccataatcgtaggtcatgcatgcatcatatttaaactacactaagtaatcttcccctcttatagagacatggcacgcacaaagactaaccagcggaaggcgaccaggctttagggtgtaccaatagtgggattaatgatcccataggggatct

SEQ ID NO: 38463 - DNA, 907 bp, Zea Mays
ccattcccttgtcgctaattgggtctatccctttcattaaaaaagttaactagaaaccaagtgcagcctattactgataaaatcgccgatcagcttccaggatggaaggcagacctgatgtcgagggctaggagaagagtgcaagttcagtatgtgttgacaggtctgctgatttatcttgctatggctgttgagctaccccttgggctttaaaggccattgacaagatcaggaagggattcatttggaagggaagaaaggaagtcagaggacactgcctagtggcttggggaagagtttgtagacctgttgaactcaagggtttaggcatttttagcctcaaggaaatgggttgggcccttcgcatgagatggttgtggctagccaaaacggatcccgggaaaccttggtccttcctgcccattaagcttcctgatagggttaagtgcttcttttctacagccttgctgactgagattagcagcaccacttcaactctattctggcaggattgctggttgcatggaaaaagaatcgaggaccttgctcctagactgcttgctgctgtccctaaacgtacagctagcagcagaactgtacatgatgccctcatgagtatgagatggatagaagatatcaagggcgctgtaacagtaggtgttttggctgattacctcactctgtgggatattttaagtactgttgagctgcaccctgagcgggaggacaaacatattttcagaatcgctaatgatggcaaatactcagccaaagctgcttatgagagccttttcattagatcaattcagtttgaacctagtgataagatctggaaatcgtgggcccccccgaaatgcaacttcttcctttggcttgctgcccttcagagatgctggacagcagaccg

SEQ ID NO: 38464 - DNA, 283 bp, Zea Mays
gactgtgaaacggcgccgccagaggtatggccgcaagtggcacactgcctagaccaaaccaatgagctcacgctcgtaggctgccagggcttgatgtcgaggtgccaccggtcggctgaagaaggcgatcagatacccctcctggatgaggaaagcaccaaacccgtgggacgatgcatcgcactcgatgacaaagggcttgtcgaaggccagcatagcgagcaccggcgccgaggtgaccgcctccttgagggcgaggaaagccgaggcagcctcaggctcc

SEQ ID NO: 38465 - DNA, 335 bp, Zea Mays
ccgatatcaccattcttacgaccctgttgaaggtaagatccaaacaggtagctatctaccgctgcaccctattgctcaaaccccccataaagtagtttttcttctttaaggccgtgttgacttgttctatggcatattgagataggtggttgaacttagcaaggtactgcattacagagtcatcgccttgcttcagacaaacaaactcttccagcttcatctgcagaatgccatctggaatgtaatgctccctgaacgcttccttaaactctgcccatgtgatgagatgaccttcaggctgaatggctacgaagtttgcccaccatgtactagcg

SEQ ID NO: 38466 - DNA, 410 bp, Zea Mays
gggggaggacaggaagaaagcgatgccgccactgccgggcacgacatgctgcctcaccccgagctgtctcgctatggtttatccgtcgtcgccgccatgcatgcctcgccgcagtgcaggtcccctctggcgcctcctgatggtggcggcggagaggaggaacggtggtggtgccctgagtggaggaggcagcgatgccgatgcggccatggcttggctgcagccatcagtaatgcagcggagaaaatctagagagggtaggggaagccgtggatgtggcaggggggctgcctcggcggccatcgcggggaggaggcatgtgcgcacggtgaaggcattggtaggcattgcgagggaagaggcagacgagggtgtgggtgatgtccccgatggaaggcgattgtgggctt

SEQ ID NO: 38467 - DNA, 359 bp, Zea Mays
gcaaataatcagtttggtgtttcactcgtctagtcgataaatgttgttataaataattgcgctaaaacttggtcataagagtgcagtgggcacatggtgtaggttggatgtgataagtagattggaagtgtgggtttgttgagcactgtattgttgaaagggtatatcgaagtgcatggtagtggtaattgcatcaagttaatcggtagtgtctcgagtacacgccgccacatggttgtatgcgagacggggaaatataaggtgtgctcgacacgaaagttcggtcggtgtaggtagaaattgtcttggcttaattagagaggtgatgtcatgccgtaagtagtcatcacttcctctac

SEQ ID NO: 38468 - DNA, 302 bp, Zea Mays
cgcaagccatcgaagactagatgtagggacgttctgcacgaaccagtataaatcttgcgcccattgagcacaccattcagaccacggaacacaaacacacaaatttacttgtcagagctaggttcgtaacaccgacaaatggtgtgccgggtaggggccttgcgcattctcgacaacctttgcagactctggatggctgaccatggtgtagtttgggcccctagaatgaccattcatttcaggagtatcgaattcattgtcaacaaaaaaggaataatgatcagggccacgaaagcctaatc

SEQ ID NO: 38469 - DNA, 399 bp, Zea Mays
tgacgatggagtgtgaaccgttagattccaggcgtacgatccagattagatcacagcataccgcttcgctgagataacccatgtcgttagatcgcgatcgggcgtgcgcgggtggacctcaactacttaaaatccatgccgtcggttggctgacagagggtgcagatcggatcgccgggatgtgatccggaccgtagaaatcgtatccaacgatctctgtccgcaccaaagcagtaaggtctatgttctaatcgtggccatcttggtctgatcggacggtcacgattatactataccccttcgcgggtacattttgcacaagagaccccagagataggcataataaaccgccgtccagtggaactattccctgagtcttggttagcttgcgcagagacc

SEQ ID NO: 38470 - DNA, 428 bp, Zea Mays
ctcgtttagcgagccggtccgccgtccaacaacgatttttgacagccaaccagacaaagaatttgcattttaatagtcttatctatcctctgtccctgcgccaatgatccaaacataaccaccattcccctataagtccacctttctggtatgttgttttaggctgcagttgtactgaataatgtctctatcaacaatagattcttatttgtccccgtaactttgaatgtggcttaagcgaatcatttgatgtcatgaactttgaaatcaaattcccattagcctcttttatcccatagcaagaggtttagttttgttttaagtcaaagttttatctttgttatggagacaataaattttggaaatgttaaccaaaaagtatttttagggatggtaacggataggattggagtccctaccagggaggc

SEQ ID NO: 38471 - DNA, 287 bp, Zea Mays
ataccaaggtctctggacaccgaccaggcttctgcttgtcgctaggaggcgcgctagataggtactaacgttcttcactgttcccttgtcaaaacacacatacacattcgatccgaattgctcgccgaagttgtctcagccatcgcagactcccctcaccaccctcttagcactcccagttcacaactcgtcccaatttggtgctcagttagttcaccgtgaccaacaactacctagcggtgaaccatgaccccctaccgaacctcgtagcgctaggtgtacccatc

SEQ ID NO: 38472 - DNA, 297 bp, Zea Mays
ctctctggtctgttcggtggtaggctggtttctgtagttgtgtctcgctctggatgctttcctggctgcttgacaaaaatcacgataagcaatagcattagcatgcatggtcgacacacaggtgatgtcgtcgttaccttgtaggacaatttgccttcatttctacatcgctcaatctctacttattaaggttgcaagaatagtttgtcatttcgtgttctaccaccattctcattccttgttctgcgtttcttattcacatgttctgtcaatgaatggaccgataacacgatcgcg

SEQ ID NO: 38473 - DNA, 300 bp, Zea Mays
tattgtggcgtgcactcgagacgcatcgatcatcgtagcgtaaccactaatatatgaactccgacactcatgtcttaacaatacatcctccacacaatctagcattttctaaactactcgtcacatcaacaaatatatcccctatataatcacgaatcccatcacatggcataggatttgcacttcaatctctacttaattgcacgcctcatacttgtctattccacaattctttgcctagacaatacactacactctgcatacataggatccatttaacacactcgacgtatacactta

SEQ ID NO: 38474 - DNA, 564 bp, Zea Mays
caggcatctcctcgcgacgatattcttgaagcaggataagatcttcgcggtaggggggtgattattccggccgccacgcggtcactgatctttccggccatgcttggtcaccggtgccgctctcctctattcgtccacgccatcaccgatttgactgctttacggtcgcggtttaacgtggcaagctctaagagaagtaccacgcttggtgtcgtcgttgatcgccagcagggtccggtgatggttatcaccgtgatcgtcgcgatgctcatggagcctataaatccaccctgctctcacttcgtttgtctcaaatcaaccaagcctagctcttcattcctcagttgctaatccaacaagccactagccatcatgttctgtcccccatcctctgtgatcaacggaattccccagaaccagtttcttctgccgccgtgaagaactcttccgtggccagcactcctcgggttagtgcatacccaattgattcgagttatttcttgtttttagccccctgttgctctcggagccagccaattggagtttacctgagtctcatcaccg

SEQ ID NO: 38475 - DNA, 425 bp, Zea Mays
cgagagcaactgcagcggtgggcctccgccgccggtggcgccgcatgcgcttccttcttttcacatgagccccttctgcatgtaggcagctagctgcacggctgcaccactgatcgacaggagcaaggggcatagttgtcattagtgctagcttaagtacccaataatttctgcggcgatgtcttgtaaagactttgcacccttgcttggagcctttggacgcttgggggcccgtatgtaaattgttttggtacgccatgcagcatgctgatcgatgcggcccagcaagtcgagagtgcgtcggtgattagtactacgtcatcagtgctgcgctggctttatttgtctgactaaaataagtgggcaaataaagactattgggggcatgcatgcatatatgcgtactacactggagtctggacagg

SEQ ID NO: 38476 - DNA, 300 bp, Zea Mays
aagacctgctggtttactgcacccgcttaagatacctgagtggaaatgggaagagattggcatggacttcattgtgggattaccccgcacatctgctgggtatgactctatatgggtgattgtggataggctaactaaagtagcccactttattccagtgaagaccacgtattcaggagtcaagctagcagagttatacatggcacgaattgtatgcctacatggtgtgccaaagacgattgtgtcagaccagggatcacagtttacttctcggtactggaagaagttgctcgagtgctt

SEQ ID NO: 38477 - DNA, 434 bp, Zea Mays
aaacaaggcgtgaggcctcaagtgtgccctgaaactgtggaggccgaatcagctgtgcaaagatgtgacacaagtagtgagcatatggcaactgtcgacgagcacgaatgccatccaaaacggtgtcctcgatctcacaaataaggaaatccacgacgtcaaactcagagtgagagaccagggcaccaaggagccagagctggatatgtgtggtagcctccctgtatcccatcctcggcagaagagtccgtctgataagctcaaataagtacttggctgctgtagtaaaatctgccggtgaacgtcgcgacccatctaagaagggcgggcggaacagagccgcgacgtgagctgtacccggagccacaccaccgtgagggcgacgaggagggtcagaggtgccgtagcataggctgtgaagtcgagtcgtcgac

SEQ ID NO: 38478 - DNA, 392 bp, Zea Mays
gattgtagctagatcatcaggcaacaacttcgttactggtggattagcaagtcatcacatgaaaaatcgagatctgagccctacaaaatagtctgttaaacactctgatggtaacccaccatggtacagtaactgaaacagatcacaagtttagcccctctcaccgccggtgacctttgcgccgtgatttgcgctgtagccgcgattcgtgctctcaggtgaggggataatcacggcggagtaagaatcttggcaccagataggctcgggctcggtcgcagatgagtttcaccatacccacttgctcgccgatcaaccgggatagacctcatcgtcgttggccacttactgctgtgcgccacgtgctcaagcattgtaccacgtcgctgtga

SEQ ID NO: 38479 - DNA, 387 bp, Zea Mays
caactacgcccctccgccacggcaagctcctgtctacccagtggtagtggaggaaattccggtggatctccctcgcattcgagtggagcatggagtcatcttggaggacagctcggaggaacttctgtcggcgcccaccacgttagcagagtcactggccttcgcagctaggtcatcaacctcagcaccgcctgcaccagccattcaagctcctgcacctggaggcaacgacccggatgactctggggatgatgatgaagatgacgacgacgatgaggatgacgaggaaaacatcaacgaggaggccaatgatgctcagcaggactacttcatgggatttggatctgccaccgaacattacacgtcaatgtttgagacggggcactt

SEQ ID NO: 38480 - DNA, 1216 bp, Zea Mays
ccctactggcaaagaggtatggaatccagaagttgtgagtgcaacctatgcttccatgctcgatactggaaacttcgtactggctgctgcagatggctcttccaagtgggggaccttcgataacccagcagacactattctgctcactcaggtgctcacccctgaaaccaagctccacagccggaccattgccacagactactccaatggacggttccaccttaacctgcaaaataatggtgttttcttctatgctactgctgtgcaatccgatcctcaacatgaatataattggtccatgcctgggaacgccacaaatttggtattcaatgcgactggcatgatatacatcaccttggataatggaacacaagtaaaaatcacatctgggaagacaagctccatagcggactactaccatcgtgccacacttgatccagatggcgttttccggcaatatatgtatccaaagaagttcagcaaccacctgtacactcaggcatggtcagttgtcgacttcaaagctccaaatatctatatcccaagaaggtcaatagcagagacacaggtcagcagtggaacatgcggtttcaacagttacagcaaggtggatgtcataaacaaccagactacctgcgtgtgcgtcccacagtacacatttaaaggtggaagtaaaggctgcacgcctgacttccagcaaccaagttgtgacttggatgaagcaggtgccacgaagcagtttcagttagtaacaatgagcaatgtggattggcctcaatgtgactatgaacagcatgacaacatacctaacaaccagtgccagcagctctgcctgacggattgtttatgtgctgtcgctgtgtttcgtgatagtgacaatacatgttggaagaagaagttgcctttaacaaataatgttgtaggggatagtgtgcagaggacagtttacatcaaggtaccaaaaaacaacagtcaacaacctgagcttcttgattccaacagatggaagaaagataagaagcactggatccttggaagttcattgtttctaggaagctctatcttgctgaacattgtcctgatctctgttatactcttcggtacttactgtactataaccataaatgaaagcccgtctgtgcagtcatcaaacaatctaggattgcccctgaaagccttcaattacactgagcttgagaaggcaaccagtggattc

SEQ ID NO: 38481 - DNA, 282 bp, Zea Mays
attcttttatagccaccagttttatggaaaagcatggcattccctctacccatctagaaatccccttggtcactcgaaccctagggtcagaccttctatgccagctcaaatgctcccaggtcagaattcttttaagtggggtagtgttcttagcagacttaaccgtcttgccatcctaaggaattgatgtgatcttagggatggattggctaaccaagcacaaaggaatcataagttgcgcaaacaagacagtccttctcacggaccaccaaggaaagtcat

SEQ ID NO: 38482 - DNA, 271 bp, Zea Mays
acatctgactaagggagatcactggcctaaccttcgaactaatcaaagtcttggaactcctggaggtccgcttcttcaacatcttctttgcctaagccatggatgcatcgagagcaacctaatatttgtatgaaagcaagggtgagcacacaacacactcaacaagtgccccatttggctaaaatggactagcttcacgtgggttaggttaatagtagctgcttttagtacatcatgtatttattattagtacaagccaagttttagcatt

SEQ ID NO: 38483 - DNA, 1054 bp, Zea Mays
gtttgaactgaagatgtttcataacttgtttaacacacatagacccaatttatatctaaaaactgcattagacatgagtgtcttgataggttgggtgaaaagcatgaaaagtttcaatacggttacatagacatgcaacaaggaggtttggcttcacaacatcttgttccataacaaggaagccacaaaatgtttgttccatatcaaacagttgcgattcacagaatgttgatccagcgacacagctagcgtccgaacttgaatctttgaatttctacaggcaacgggaggcacttgttcttgctatggaaggtgaggtaatgtagagccagagatcgtaggtcaccagagttttcctgcataatacagattatcccgaggtgaataagttgtatctgaaatgttgaatgtataaatacaaacagtataatcataaaatgactcactcgttttataaattgcttgatagaaccatccgtatggtcatagtactggatgtatctcatgacaaaaaagccacagtcattagatccagctatcatggtgggacacataggtggcatgtcaattgggaaatttccaaattttgggatgcgtgaattgggccggacttgttgcaaagatttgttcaatctgttcattataaccctagcccatggtagtttcctggtccctatgtccttttgggagtaatgaaacatcttccatgaagtaccacccaactctggaccatatggatttgaatctaatatgtgaatacatcgtaactggatatttatgacatacaatgtccaatgtcccatatgaagaatagggaccataatctgtcaaatatcaggagttatataaacagaatgataacattattgtgtagctgagcgatgaatataattgcataacaggagagcgttgatacaaagataaataagtataccgttttgtagtcaccaaaattgtccagttggggcagggtcttgtccacataagcatcaaggacagtttgatcaaaaatctgaggagacttactgtaccgttcatgctcctcaaagttgag

SEQ ID NO: 38484 - DNA, 362 bp, Zea Mays
ttgatttagccggtggtagaattcgagccgatagcatttgcttgaatgtaagtgtggaaataagggggatagtgtttcccgctaatctcatagtaatgggtactcagggaatagatgtcatcctagggatgaattggctagataagtatcaggcagttatcagttgtgataagaggacaatcaagttgatgtccccactaggagaggaagtgatgaccgagttagtctcgcctgagccaaggaaaggaagttgttatcagatgcctattgatagcagtgaagcagacccacttgagattatcaaagtggtgtccgagttcccagatatgttcccaaaggacttatcaggcatgccacccgag

SEQ ID NO: 38485 - DNA, 521 bp, Zea Mays
gattttcttgcttcaggaggttcgatggatgtaagtttcatgattcatattttgctgtcctctttatgcaactagctcccgctcacctagatgtgaccataggttaatgttgtccagttcagtggtctcgaatgtaatggtttattatttttgttttttcctgatctgtgtggagaaattaatgccaaggatgcattgtctttctttttgttcacagttagataaaagagatgtgaagaattccccgcagccagtaaaagaaagcatgcaggtatggttccacttagtgcatagaatactagaatttcttaactagttattctcatctacatgggcatattcttataatataatgatgtttctgccttctcatctacaggaagaggtcaaacaaaccaagggaaatgttttgactccacgagtgaagccagagttgaatgcacactcaggcaatttacaggatccatctgagagattatggcaaatgaagccatcttcagccaagcattcgtacaaacttc

SEQ ID NO: 38486 - DNA, 529 bp, Zea Mays
ggagttgcaacaccccctgcatggcgcaataggttgtcatggccaaggacgagtcgcttcgcacgcagctttacgaagccatcaatcgtgtcgttggtaaggcagttgccctccgaccttttactggcttcattgcctcattttcttaccgtgtttgtctgtcttggcagccttggggccaagctagagaagttgcatcgtcgcctgggtcagcttctagactacattagggcacgtggcacttccctggtcgagtgccttgacaatgcctcgtgttgcatccgggacattgccgatttcggcgttcatcggggagtcgcggtggcgctgcttatgagggagatctgctccagctgtcgtcttcgggacatcgtcaatcctccttcatccattttaggtgaaaggctagaagacatgctcgaaggttacgatgagatggttagtcgtgtcgtgcttagggtgtcgactcattacatcgcgcatgacgcatgttgatctgtatcgtacctcggcgttgcctccctaaaat

SEQ ID NO: 38487 - DNA, 915 bp, Zea Mays
caggagggccaacgcatggctgccgtgatcgggagcagcaacctctcgcgcgggcagggccaagcggaaccgtcggctgcctcagccggcgtcggcggtagaaagggcgtcacctcctgggcggatactagtagtagcagccgcggaaaagggaagacgaccgagctgccgatgcgaagtacagctgggacgagcttgggaccagtagggaagagcgctgtaaaaggtaacaattatgtatgctgttttttcttttccaagctagtttagtttagctatcaagtatgggcctggaagctggctattgattttgtcaaagctaggagttaattttttgctgttttgagcttgggaagggatgggggaaaacatgtgagcaaacaatagttgttagttactccctcaaatgcttactaagatgctatgagttgagattgcacaattcgtcttactccgctgtagccgtttacacttgaaacacgtgcaaacgaagcaagtttctagctgtttaaagcgaaatcagcaagctaggagggttatagtttataagtcgagttagcaagtgcttgctctttttgttgcttgaacgcaaggcatttctaatgagcaggctcataaacattgtttctatatatgcatcttattgtatatatgcttcattaagggtacgtttgatttctaaaaatattagtcaaatgctacttctgcagcagagatattgtttgtgtatgcgcatagtaatttctccaattccccttctttttgtctgttatgaaaattatttttgacaactaattggtgggctctccttttggagctttgttctatttttctctctccacaaccttttgtgatacatgggctaatccatctcattcacagctaaacctagtgcacagcggaaccattctggag

SEQ ID NO: 38488 - DNA, 312 bp, Zea Mays
cgcgccgtcgggtgaggtggagaaatccctcagccacacaagccagattgcgccacgcccttgagcgaggcggagaagccgccagccgtcccagcccacaccacgccctcaggcgaggcgggaaagtcaatcagttgtttgagctagcccgtgtcaagccctcggccgagacgagaatccccattgtctaaccaccatctccctttcttcactatgctcagcatgctatgccctcggcgtgttatgccctcgacacgctgtgtctgtcctcggcgcgctgtgtctatccttggcacactatgtccttggcat

SEQ ID NO: 38489 - DNA, 800 bp, Zea Mays
ccggcaaggggaatgctgcagatcttgtgagtatttaattctaagtttctcgggtacaagcagcagtgcaaccaatgtagcgacaggggcagacgggcagtcctgttagttgtacatcgcatccttccacaaggtggaatagcttgcgaatgtctattcctctgctgagttgctctctaagtattgtgcttcttggcagtgttgctatcatgaccaaggcgtacccaaatgttgagaggagcgagctgattttgatccaggagatcgctacttacatgcttcttgtgtgtggagctgtctacataatcgcagtaagcttaccgagttttgcgcgctcatgtttcgttgtgtcagcataactgccttttctattatttttcagatagtttaaatgcgacaactgttggatgtgaaatatcgtaggtttcaaccatcttctgtttgggaaacttagtctatacccagtcttatttgattcaaatcatatatagcatgatggaccagttgaatgcttcaagtatggagtggaatctctcttacaagtattaaaatggttacggcatctaatagtaccactgttcctgaccaggcatgcctgtcatagcaaaaaaaacctctctctcgtttttggaaagaaaagtatgattatgaccttttgattgtagtaccattatatatatacactgtatcattcatcttccgcgtgcgctaaaaacctttaatttcaacatgtagggtatactatgtcttggtgttttaaaacgttctaggcagcataaagcaacatcacaggagcaagc

SEQ ID NO: 38490 - DNA, 538 bp, Zea Mays
agcagcatcatgggcagcaacataagaatcccaccaatcagcagcaggacctgtcaaacgaccagaggcataaagaactttctcccggtctgagcattgggcgatgttaagcatcttctcaattgacttcaaccaatcatctgcatcaagtggatctggcgagctggcgaaggttggcggcttgtgactcataaactcccggtgcttatcacgaggtggaactggtggtggtggtggaggcagtggtacttgctactgttgttgttgcgcccttctctcctggcatatctcttcttgttcttggcgcagctcccggcgtatctcctctctctcctggcgcatctcctgacattcctgctgcatctgcgcactcatatctgccatagtgtctgccatctgtggcatcatcctcatctgagctgtaaccagtgggtcaactcctgctggtggaggcggtgttggaggatccatctctgctggttgtggctggggttgtctaaatatcctctgagtgtgtcgtctgggaggtaaatcaatt

SEQ ID NO: 38491 - DNA, 805 bp, Zea Mays
ttgacctgctcactccaaacgctgccgccatggcggagaagctcagggatctgagtcagccgatagacgtgacgctgctcgatgccacagtcgccgccttttacggcactggatctaaagaggaggtaatctcttccgcgcgcctacccgcccgccacctcgcggattacttgccccggaacgactttagggtttacttcggttgctcgagcttcgagtctatccgagctcgacttgctaaatgccaatgctacctgttttgctaaacaaggctactctagtggttagggtttttcttgtgttggtgataaggtttagcgtgccatatgttgtccgtctgtgagatggcgatggcgacaccaccttagtttgctccgttcacacttacgctatctaggccttgccttcagaatgactaaatgttagtgcaaacctgaacagttggcggtctttcccactttgaactgactggtctttctcatgaccaggggctgagcattgttagttatgtgtctctgtttatagctttgtggctttggtaatgaacactaataactgtatcggctctttcattttagaggagcgccgctgatcagatactacgtgatctacaaaataatccagacatgtggctacaagttgtacatattctgcagaattcccagaatctcaacaccaagttctttgcactacaagtaagttcgtctactctgctgcctatcgttatacatggcaggtagcttgtgtggcaagggaggatggatgctactgtttatgccctggtcaattggtttaaagtaatata

SEQ ID NO: 38492 - DNA, 372 bp, Zea Mays
catcccaagcatctgtgtcagctatccctaaaggaagatcaagtctagcaatcaaacgacaaagctcagttctagccacttgaggatcatattcctagttcctaaaagacccatcagggttcaaagcaagtctagtttgaaccatagcagcatgatcagacttctttttacatgatttctgatgcctaagcaaatgtccagtgccagcattagaattagcactcaacctagctttgcaaaatttgcaaatacctgcaatgcgcaccttcttaccattacggttttctgtgacttcagtgaagtcatcccaaacatcagattgacgtttaccagtgctagaagaagtcaatgaatcaagttcattagagccag

SEQ ID NO: 38493 - DNA, 451 bp, Zea Mays
cgcgagggcgcggggatcgcgtgcaagaaaattgacggtcgcaaagttcctgtaatctaaaccacttgtgtctaatctaacaacgcatggtcgttcttctcctttcaccaacaaaacgggacgacgcctcctcgccacggtggatgctcgtaggcgtaaccccgatctagccatccgagcacctccacgcacaacgttcggtaacgaatgtagccaagacaaccgtcaactatctgatgcactccttacccggatcgttggtggcgaggtaatttcgatcgctctggtccctccccatgctccaatgtgtcgggaacacgtttgaggtgctccagcaaccactcgggtgccctccaatatccctgcgacaaggcgattttgggtttggtgacttctctctcccttcctctctctctctctacgttcgccactgggttgagttcctcggctc

SEQ ID NO: 38494 - DNA, 388 bp, Zea Mays
cgggatttaagggtagtgggacacgacaagatggtggtggcatcaagactgcaacgggctagcagtgggggcgtgtggcgcgagtggtctcctatggccctatgactaagggagtacgaggttggggtagcgacaagaggcatgcgacagagtgaagtgatgagaggccaagatcgtaaggattctctataggactaactacccgtcaaggaggtgagccgatccacgaagctccatgaagacacaaaataaggtggtgtgttctccaaggtagaggattatcgacttaatcagactaaaggagagacgacttttctaaccggactagaactcatgctacggactactagtcgtcggaattgcatggctcgaccccaacatctggggt

SEQ ID NO: 38495 - DNA, 1161 bp, Zea Mays
cacctgccgatatgtgccctcgggcccctcacgccccgaggcacctaacgttattagcccttgaggcccctcgcgccctaggtcacacgttggtataagcctctggtgcccctcgcgccacgggcatctgccaatataagtcctcggggccccttgcgtcctagggcacctgacggtgtaagtccctaaggccccttgcacctcgggacacttgatgatatatactctcggggccccttacgcacttgggcaaccgatcatatatacctctaggcccctcacatcctaggacacctgatgatatatacccacgaggctagaggatccatggaggaattgaggattttgagtgacgccctaggcttgtctcagagttgaaggatgtaacaggcccaccagtgatagtatgatgccgagacatgggtcctacacctaaatgccttgtagactgccccacatgcgatggcttaatatataagtctcgagtattacacattaaatgctcaatgggaaacattacgatactgactcagtgtgtaggcatgcaacacagattgcagggcactctaggccactgcacagtgcacacgacgatcctataaccacacaagcacacacattgtgttctcggaaatacaataaactacaagagactataccagcagccaatcacccaaggcccatcccttcgcaaggtgaccatcataccggatatcaggtaggtattgcaacctacgacattacatgcacaccttggccatgataacacacataggggcaggtgtacccaaggccattgagtaagcatactttagtatttatcaccgtatccatgcaagtgatcccccgtgtcggaggatcgagagaatccttatagctaacactagacagtaccggggccctcacgtgtgataaagggtacaaggaatcatactagtatccattaagacctagtccttactctaggcggaaccacaattacatacctccacaggaacgattacacagatgcatgacttttgtaggtcacgaggtcacaagaccaagacaagaaaatggttgttggcccgatgacgggtagggaccacaagaggtatatacatgtaaaactaccaccccttttgactataaaaggggacggtagagcaacattcaatttag

SEQ ID NO: 38496 - DNA, 278 bp, Zea Mays
gggtggttgtcttcgagtggacgggactgcgaaacaggaattgttgtcttcaccggctggggcgagtgtaggtgagggtgagctgcgaaatctttttgagggtgaggaattgaagataatgttgttcaactatagggagatgggtatcatcccgaaggttgagccgttgtaatgtgtgatgccctcgctgtgtgtaactatgatttgtatgatgaggttgcttgccttcgttgatccggtcgcgcccgtaggcgtgttttgcgcgcacttattgtgct

SEQ ID NO: 38497 - DNA, 455 bp, Zea Mays
tccatgtgctgttgcgcccgttgcaccgcagcatacactagagctggcatctagagcctcctcgtagggcacccctagtggggcgctgttgatggctagggagttgctccgcaacccccacactctgcagccttgcccgaggcgatgagatagtggtgtgaagacataaactgcctcctcaacccgacctagactgcctttggttcaacacggactggggcacatccatcgcttggccgagcaacactcgaggttcttccaccacgttagcgcgaggtgtcggcctttgagcgctcaccctttgtgaggggcacacaaactgaggacttgtgaatagagctcgaccacagacgtgtgggtgagggtgcccgcgtctccatggaaagggcgtgtgagtgctagcaaaacatcgagggctaaaacctcaatgctgacttcgttgcggcagcaccacc

SEQ ID NO: 38498 - DNA, 293 bp, Zea Mays
gacacctagcacacacctcaaacatccctgggaggaaatccgacagagtgatgtcaggcaacctgagatttccacccacaaactcaatgaatggtcgctagacatggcggagaggatcagagacgaggtagccgggatgttcagggacaaactcggtgttagtgtgccaggtacagggcaatcgtatcggaagccttatagccaccgattcgacaccgtgtcatatccacagggaactagaataccagacttctctaaattttctggtgaaggtgggaaaagcacacacgaac

SEQ ID NO: 38499 - DNA, 362 bp, Zea Mays
aggtaccaatttctcagtgttcggtgaaaagtctgctgagaagatggtatggggtagggtatttggttcagattcacatggcctagtgcaacagctagctcatggggtaggtgatcagtggcacaataattgtgagcaggatgttgaacctaatgtcccatggatgtttgttggaatgccacagcaagcaagtacatacccagtgtctagtgaaatgggtcttacagtggcatgggacggggagatgcaagttgaaactcacacacatgagggattactgcagcaacttgctcaaggtggagaagccttagaagaattggctgagaagaagggtgatgttgtagatgagaccagcaagtctg

SEQ ID NO: 38500 - DNA, 410 bp, Zea Mays
gtggtcaggccaagcttcttgaccaaatctgaactcaccaaattattgcagcttccaccatcaataataacacgtgcacgtcgattctcgatggtgaagaaagtttggaacaaattatggcgttgctgcttctctgatgatttaggctgagaactaagaacacgctgcaccatgatgcttcgaaggttcaccgtagcatcaacattaagcatggcatcatcattagcagcaacatcactagagtcatcatcgtcaccctcaccgtcggaagcactaatgtagccatcatccgtagcaatgtatgttcgctgactcgggcaatccttcttcacgtgaccaatggaaggtgctgcaggtgctggtgaattccgtttcttggcgggtacctgcaaaggaagtttaccaacatg

SEQ ID NO: 38501 - DNA, 280 bp, Zea Mays
ggaggggttgggcatgattacgtaccaaaattccttagtctcacaagtagcctcttcctctgagtgattactccactggaccttatacatcttgatcgatttagcccgagttgatctttctttgcaaaccagaatcttggaagggtactcttggtacgatagatctggctctatctccaattctggctctgctatgatctcagtcggcaatcgaacacacttcttcagctgagatacatggaacacattgtggatggcagacatttttggaggtaacttc

SEQ ID NO: 38502 - DNA, 380 bp, Zea Mays
caggggctctttaagaaaagaggcacggcgaaggggtatgctcatatctctaccgtgcgatcacacttggatggaccagatcacatcgcacgcttatgaaccagtatccacccacagccatccgatgacatctcaacggcctggatctaactgagtgaaagggtaccttgcatcaaatccgagccctcaaactgacgatcgatggctcaccttgggttaactcaggatctattcccatccgcacgatccggatcggacgttcacgagatcgtcttcttccccaggctctgagaatagcagcacagtgcagccgccaagatgagcacgccggcgcaagcactgcggcagaactgggtgcacggcgagggattcctaagtac

SEQ ID NO: 38503 - DNA, 389 bp, Zea Mays
cgccacctcgcgtcagtgctctcaccaccgcttcgatccgaggtaagagactgcccatgtagtttgtcatacactcccttctgtgttgaagtagggcattggggggtggggtggccatgccagaccgatcatgccaccaccgtgtgggtattagcgctgccgtcccacgtcgtcgggtgagggcgctgttgtctacccgctggatttacgatggacgcgcgcgatctgatcagtgccatacccctctagccggtcgttgtggatcgtcaatcatagatcggacgtgttgcactagtttgaacataataagagtcggggtcggacaatcgtgtttatacgactctgattaggtcttcgattaccctctaggtgtgaatccgagggcgtcc

SEQ ID NO: 38504 - DNA, 469 bp, Zea Mays
tgcaatccgtcttctctagccttcgtctgataatgaagttcatgtactcggcaaaatgcttcggcgagcggctctaccccttgacttcggagagcccagatgtacacgctgagcctaacaatggcgttaggggttagttaatgaaggtaaatcctgaatttttccaagacttctgcaatcattccgtgcagaggaaatctcaaccctgctttgaagaagctcttaaaaactacaacttcatcatcttctggtttcgggatagtctcttccccgccaaagcgaaccaaccccttctcggcttctctgaagtagcctagcttcgtcatcatagtcatatcagcttcagacacagtcaatttcccaaaatccagatggttgggcttcgatggcataatgatattataatcaatctctccttcattagcatcaccctcttcaatatctgcctgctcggttttagcagcgggtg

SEQ ID NO: 38505 - DNA, 322 bp, Zea Mays
acatttggtgcccaccgttcatgcgacgaagaacaacccgtgatggcccccaagagagcaacgtccaaggccgccgcatccatcgacgacacggcgaaggcagcaatactcacagagaagaaaggcaaggccctcgcggacaccaccccgcaagaggcatttgaagacgacgctgtcaacagcaagagacagcgccaggatcaccccacccccgacggcactgtatgcacctgcagttccgagggcgcaccacaagcaccaccaccaggcttcgctttgccagagggcaaagacaccatagaggacagacaagttattgaca

SEQ ID NO: 38506 - DNA, 336 bp, Zea Mays
gcacagtgtaactgtacttgtatactcattgttttcctcaaagtgatcttagaagcatatgttggattccacttaggcgcatgcctcaattttcaaaatgcctcaatttggaggagaaaagaggtggtttggaatgtatattgatttacttatggagccttcagcctctttcatcatgatttagttcaataagttgtcaatattaatgaatgtgcaaaaatcaagaggtgctttcgctgttattcttcttgaaaaaatagttgtcaatgaacataaaatcccatttgcttgacgtttcaaatcacaatgccaaagtactttagtgttaaggttttt

SEQ ID NO: 38507 - DNA, 1005 bp, Zea Mays
gaagtcttttatttaaaagacactccgtgcaaaagtcacctaagggtgcagccggaatagcacaacaagtgcgttaatcgaagtcttttatttaaaagacactccgtgcaaaagtcacctaagggtgcagccagaataacacaacaagtgcgtcaatcgaagtcttttatttaaaagacactccgtgcaaaagtcacctaagggtgcagtcggaatagcacaagcacgataatccaagtcttttattcaaaagacactccacgcaaaagtcgcctaagggtgcagccggaatagcgttaatcgaggtctctctttaaaaagatactccgcacaaagtcgcccacgggcgcagccggaccaacacaggcgtacgaatacggccaacaggccacatcaccatacaaattacaattacatacacacggcgagggcatcacacattacatcggctcgaccttagggataatacccatctccctgtaattaaacatcattatcctcagctcctctccctcaaaaagcttccgcagatccccctcgcctatgcccgccccaaccggcgaagacaacaattctcgttttccaacccggtctactcggagacggccacgctccatccccatacgacggcgcctgccacttcgcgaaaattcacccacactatgttttcccaccacccttcgccgcctacacccagtactcgcaccaggaacatccccagcaccctccacacatggtgaagtctccgccgcagctacatccaacgcaacataataatccaagccttcattcgaggactcctccatccatggaaacgagctctcagattcaccatcagactcaaaacattcagacacagaaccaaacaaactatcatcggtaggcactacggttgaagtctccgccgcaaaatcagtattgccagtagcggttgcttgcgcaggcccaaacatcggaacctgcgcagcaaccgagattcagtatcacacagacaaaagtttacac

SEQ ID NO: 38508 - DNA, 274 bp, Zea Mays
atttattgtctccagcacatctagtacattgaccatcctttttctcttaggagtcgccgtaagatctttttgtgccttcggcactgtcattcctgccgaagggcttgtaacttctaatatctttgttttctcggcctctatttcttcaatattatcggccttcggcatcatagccggctcttcattcttctgtgtaagagcaggtcctttggcttcagtagccgtagaggtctcaccaccaaattcgggcactgtggccggttcaatgaagcgc

SEQ ID NO: 38509 - DNA, 289 bp, Zea Mays
cactaggcagcgatgaaggtaaatcgttagtgaaagtaggacctccttttgcaagagcacaaagaatggggctgtggtgtttctcacttctctcagatcactcttgctcacaaagagacactcagtgtggcgtggctgtttaggattggcatgaggctttacatggctagatgggttagaactctctcccttacttgggttgggggtctcactcaattttcttttgtctgattcctctcttttcttatgagccatatctgaagtatgtatctcctctggagataatgga

SEQ ID NO: 38510 - DNA, 934 bp, Zea Mays
ttggtttgtactctatccattttgtgaatttgttgatggcaatgagcacatgagtatatcctccctgagctttcttgaatggctcaatcatatccagcccccagcatgcaaaaggccaggttacagcgacagtttgcagatgttggccgggtaagtgttgttgctttgaaaggaactggcatgcatcacacatctggactaagtctattgcatctttctttgatgtcggccaatagaaacatgacctgaaagcctttcctaccaaggtcttcgatgctacatgtactccacacagcctcgcatggatttcctctagcagatgtctccccatagccgagtgaatgcatttcatgagggctcctcctgcacttctcctatatagcagatctcctatgatgatatagtgagttaattgccttgcaatgcactctgttgcggccttatcatccggctcctcatttcttatatatctgataatcggcttcctccagtcgtttgggtctgtctttgcctagtataccgtgttgcattcctcagcgtgccttattgcgatgcttggctactcacctcctaaacaaaaactccgggtggaacctaggcccgactagaccctagttttgacagtgcatctactgctgcattgcgatccctttccatgtgatggaattccaggccttcgaatttatcctccagttttcgtaccgcgacgcagtagctatccattgagtctgtggagcaatcctagtctttgttcacctaactgatgactaatagagaatagccatataccattagtctcttgatgcctagtgatatggtgatgcctagcccatgaattaaggcctcatactctgctacattgttggaagctgggaacaggagctgaagcgcatatttgagttgatctcctccaggagcgatgagaagaattccc

SEQ ID NO: 38511 - DNA, 545 bp, Zea Mays
caacatcaaatggccagggtgcgctcaacagctagggttacacacgacggagaggaaaccgaaactactgaaactactccaatctttgaagttatgaggcggtcgggactagttgtgatggagggcgctcctgacgaaggcgcccctgttactgaagccgagcaggcagatgttgaagagggtgatattggtgaagacgaaattgattataacactgctatgccatcgaagcccagccatttggattttgggaagtcaactgtgtctgaagctgatatggctatgatgacgaagttaggctacttcagagaagccgataaggggttgattcgttttggtggggaagagactatcccgaaaccagaaaatgatgaagttgtggtttttaagagcttcttcaaagcagggttgagatttcctctgtacggtatgattgcagatgtgttggaaaattttgagatttaccttcatcagctgacccctaacgccattgttaggctcagcgtttacatctgggcccttcgaagtcaaggggtggagccact

SEQ ID NO: 38512 - DNA, 879 bp, Zea Mays
taacaatcgtttcccctcaactaatttcacgagcggcgctctaacctgctctttccgcggtgaccgcatgatcagcggacattctaatgcgttctcggcgatctaaggtagcttaactcaatcgagttggtcgaggagtattaggggcacacaagaacactaaaacaagagggcagagggtatgagcggacctgagacgagctggccacggcgaggtcacaccgctcggtgttcttgggtgatttgggggaaatcccaaattggggagttctagtggatgattcgaggcactggttgctctgctgggtgcacaattacttagcggagcaggcggggtcggcaatttatagcaggcttgagcggtggccagtgaatttgagagagacgcgcgacggtcaaagaagaagaaggttactggcgcggtgattcgtggcctattaccgtggcaagctccccggccaccaccggacgagctaacatgagtcacgacggtgaggttaatgtgtcaaggcacgtggcgcaagaccgcgcagtggctagctccgacgaacccatccaacccaaccgtggtctgctcgggtacggtggccggagtaaaatagtggccggagcgtatccacggcatgatatttacggatccccggtgttatccaactgatccgagcgcgaacaaccacgacgatagcacgaatccgcgtgcggctcgtcggtggcgaggggatcagaacctgatcctatctgttactgtaccatgggattgttcttcagtcagcctgacagcccaagtttggggcgaatttcctcctgattttacatggcaacaagaccattgttctgtagcaaagttgtagcctaatagaccagctccaattttgctac

SEQ ID NO: 38513 - DNA, 594 bp, Zea Mays
gggtttcccctacttcagaggcttcgtcctaggagatgggttatgctagatcccgttccctggcttcgtggtgatgtcgtatgttaccacgcctgttccggcgtcggcgtgcgtcacgctagggggggctcttcccccagtatggtgtgctcgtcattggaaacaggcgcgtcctccactcttctctggatgaagaggatgtctgggaagaaagtgcttggtgtgatgcttcttgctctctccatctcctttgagggcagaatggtcgggatggtcattagttgtgcctctgcggttgtgccaaacccaggggcacatgcttttcttcgccgagtaatctgagtccatgcccgagtgggcgacgtggacaagggagttcaccatgatggaggcactacctcggtcggtcgattcacatgcgtcacaacatccctgggcccgcccgatgtaggcacgatcttgcgtgaaatgaaaaccaaccgagtttctcgagctttgcagttcatcgacgtaattctcgctggtggtgttcgaagcaatcatgtagctgcttttggcgccaccagagaagatttcttctcatatgggttcgct

SEQ ID NO: 38514 - DNA, 332 bp, Zea Mays
gaacggacaccccaatctaatggggctgcagaaagtaaaaaccggacgtaaatggacttagcgaatgccatgttaggaacgtctggtatgacaaaggcatggtgggggaaggctattttgacatcatgttatgttttaaatagggttcccactaaaaatagtgagataactctgtatgaagaatataaaagaaggaaaccatcactccattacttgcatacatggggttgtttggccatggttagtgtaccaattaacaagaaacacaagtttgaacctaaaatagttgattgtatccttttgggctatgcacactatagcacgtcttataa

SEQ ID NO: 38515 - DNA, 391 bp, Zea Mays
gggcacaatgctattgactgtgcgagcttcggactcctcccgagtatcgcgttgttgctacgcctggcgatgcccttccggctggtgattatggaccaaggtaggcaccagtggtggtggtagctgagcccaagcagcttgagaatgactcgccgaagcaaccgacgtcgtgggttgctgattgcccacatattcaaggatatatggcgaatagcatgaagtagtatgcaagacctgcttcggctgattctgccgtgctttggcttcaacgatctccttctgcttttggatcatgacttggcacgtccttgttgtgtgtcccttatcctccccacaaaataagcagaacaatctcctgggttgagtaccaaacctgcctccgaagcttctc

SEQ ID NO: 38516 - DNA, 677 bp, Zea Mays
gttcaatatattcatctcatatacagccaaaacagttcctgaaggcagtattgctttttaagtgtggtgtggaagaaaattgtttgctccttgatttatatttctatagttgagttcaattcctggtcgaagcgaattttcagacctgggttaaaaaatcgcctcgttgtgtctcacccgctctcgggctacagaaattctgtgcaccaccctccggcctgggggctgttgcagagtgggcagagccggcccccgttagtgattggaggccagggtccagaggtttccttgtggttcagtgacttcttacatgaatgtcattggggcagcttaacgccctccggttgagttttttatatttcaatagttgtacacactgaggataattccatgacccattcgttacgcattgtaaactccttgatccttgtgtttgcttctcagagggcgcatgaatcccaagaatagtagtgtttattgtttgtatcaatgacgtttgtagttttgtacatttagtcaatgatttacttaaatttaataacttatacatgcgacatctgagcttcaatacaatcaactttcttaaaaatatccatcctccaaaatgcaaatatcttctcaactattctccaccacatctacccttcacatcagaacctaggcgctgacacacgtca

SEQ ID NO: 38517 - DNA, 668 bp, Zea Mays
tgagggcagcgttgccacttgaattcaccaaagaacggccatgtcaacaccgacactttacataggcttcgcctttgggatcaagctagcctcccggaaattaaacaacatcagtttaagctcctcaccatcaaatagagctcgcaaatctccctcttcaaaatgctacccagttgtcggcgcaaggatgatccggcgagtcccttcctccgaccgcattctttcccgtggacgagggctctccattcccatacggtgacacctttgagggactttgatgccttgcgaagactcgcccaacagtcccacactccgtttcggcactccaatccttcttttgcccctcgccacagtcggggcaaccgtagacgaagactacgccacagtcggggcaaccttaggtgaagactccaccaaagacaaatctaatgccataaaataatctaagacatcttccgaggaatcatcgtccatcctagcgaatgggctcagcaaaccctcactttccgatgaccatgggtcaacatcagattccccactactaagcactaccaaactttggcacatcaacgatttgtcatttccattgtcaccaaaatatgcctgtgcaggcccaagcatcagaacctatgcagcagtcgactttaagtatcatacaaattaaaagc

SEQ ID NO: 38518 - DNA, 368 bp, Zea Mays
ggggagaattgttatctgttgattaagtcttgcaccttagtcgaactgcatgtttacttatacaattgtttgcacttagtctgcatgcgccgagcgccattgtgtggtggccgagcgcttaggagatcatgcccagaatcgctcggtcttagctgaactcgtggatcagtgcgcgccatgtggacgtggggatggacacgaccaagggtgtggcacgaagctctcagcgacgtttgttttctttttcagttgttggtaataaaaggagtagagaaaaacagaaaaccctgcgctttcaggcagcaccaaatccaccgtgttcgagtttgtctgtgtgcgtgtgtgttcatcttcgatcgtgtttgtcg

SEQ ID NO: 38519 - DNA, 390 bp, Zea Mays
ggccttcacaggaactttggttgctacaattttgcggatcagaaggatacgaaggccatggttattggctatcgtacaaagtggctgaccagatggactaatgaatggttctacatgaaagtggatgagaaaaagagggagaagctaatgagcatggttatgagtccgttagagttaaactttggcatgactcaacccttatgcaatatgcaattggggctaccctatcagctggctgaagtagaatttagagtggtggccgagcacatcagtactagagacttagtgcaagagtatttatcaaacataacatatccgacttctagtggttgaggaatgccaaagagaaaagaagtgggaaagaagcacgagcttgtacggctcccctat

SEQ ID NO: 38520 - DNA, 354 bp, Zea Mays
ctgggctgaattcagcccaaaccgccccacgtccaggcaaacgcgcctgcgcgcgcgcccgcactggaaatcttgcgtagagaccctcagcgatttgaatgaccggtaaagaatccctacgcactattccatgtctcactcacaatcgcacttaagcccctctcctttctttccttcacaacaccaagtccccgacggtggacgacggcgtgcgctctccggcgaactcgtaccggccacaatacgcaacaatttgtgccctaagtcggtctacgcctaattccgcccctggcgatccattggaaatccctaatttaacctgaacacagctctagagctcagtccacgcacaac

SEQ ID NO: 38521 - DNA, 374 bp, Zea Mays
agcacgaccttacttgaacaggatctgttctataggatcgtactgttgcatccttgattaataaggaggcaagtacttaaacctggttgatgagtaaatgacctgtgggccagagcgtgattaacggccaggattcagtctctgtgctttgtctggtgctgtagatgatcgttcctggtcaggagcccctggctaagggtggcccacaggttgtctgacaggtcttcaaatctttttgccctgcttcagttgaacaatggacacctcgacattttttttgccaccaataatgatggaatcatggaactgtgttgcgtttgaagggaattttgatgctgtgctgtgtttgaagaaacatttgagtaaaatatttc

SEQ ID NO: 38522 - DNA, 291 bp, Zea Mays
attgaaaatcaatgtctagaaaagtagggcctgtttggtttactcgtggccagacttgcctggcccaggcagcattcccaggcgctcgggccaggatatgttgcctggcaggcaactgcctgggagagcacgaaccaaacgagcccgtagtgtgtatcccattcgatgtgaagatgagatggcagtcctacagcagcagctcccctgtgaaatctcatccttcccttatctctgtccttaaagaaattatccagaagtcaggtgcagccaattattggtagagttgctgat

SEQ ID NO: 38523 - DNA, 503 bp, Zea Mays
ccataaaacacgaattatcagtagtgaagcaacgaatagaaaggagatcctaaatgatatcaggggtaagaagaatgtcgttgagttacaatagcccgagaagaaccaagccacctgctgaggtgatggggaggttggagccattatcgacaacgatagatagagtagctgaattagaagggtggaagagggagatgttattggcgttattggtagtgtggttggaggtatcgaagtcggccacccagttgatgaccatagcaggtggattcaaagcaatagtgctaaacaagttagcagactgctgatcccagctgtcgggccatggactccaacttggcagagtggatgcctatggtggaaatgctggagcctgcaggggttcagagccaaggatgtcgagcggcccaaacagtccaaatgtcgaatcatggcatggagcgcctgacattgttgttgttgctgctagctgccaagagccaagcctggtcacatggtgatgc

SEQ ID NO: 38524 - DNA, 410 bp, Zea Mays
atctggacttatacctaaatcatttgctaacctgaataaaaccaagcacttgtgagtataatatggtttgtatctctgttatcaaggaatacgtaccctaatgaattttctatcttcatccagtcacatgaacaacaactcattgagcggtcaaatcccacctgagttatccagattaccttcacttgttcacctgtaagtttctgacattgcatatttgcatcattagtctttatactttattgagaacacaattaatttgcagattattggataacaataacttgtcaggctacattcctccagaactatcaaagttgccaaatgtgctcatcatgtatgtaagcttctattgcgataccttgagacatactgttttgttaatttggttgtcttggctgcctatcatt

SEQ ID NO: 38525 - DNA, 393 bp, Zea Mays
ctggattcgagcatcccttgcagtgaagtcttggtcgaggttgcgtccctcgaagttttgtcggcgctcacacgccctctacagagagactcgagcatcctcgcccgcacgcctgtggttgagttctgcccgcaggtcattagtctgtgcaccactcactgagggtgagcacacagatgccgacgcctcgtgttgacgccggaatgatcgaggcatggacctggccgagctaggatgggtcatgccgaggagtcagtcgacatcttcgcgccattgcctcatggcccccggcgaggccgtggaactcggagggttacgttgcaactccctggccgcagacaacgccccaccaggaatagcccttgacagagtcctggatgtctgcgcgggcgt

SEQ ID NO: 38526 - DNA, 485 bp, Zea Mays
gccagcttgttgtaaatgggcctagggctgccaaatcttaaacttcaacaactactcttacgctcaggttctgttcgattgtcaattttgtttgtccctgcgtcgttggagacaagagccaggcgtccagcacatgcgttgttgcatggtacatacttggacatgaagctttgctcagtgtttgtgcaccaagcatgcattggatttcactttcttcatttttgagattccaccagtgctgatagatattactcctctgctggtaggtttatttttaactttaccaattctttgaaagcattgttagacgaagcctgtcaatgcgcctggtgctggatttgtcatcagatgatgataacaacgaattctttatctctgttactcatatggccatgaatgcggatgactcagataatgaaacaatacatcgtggtaatttcaaatgcaagggacagagagacaactgaacaaaataagcataaatt

SEQ ID NO: 38527 - DNA, 861 bp, Zea Mays
cacagcacccctcacctgtgcccctgctccatggcacaccatctgtgcctgtctgcgcacaccatccatctgctcctcaatggtgcactgcctctactctgcttgcgtacatgaaccctaggagcgaagatcgagcagagggcaagcaaaatcaagcagcatggacaccatgttgtaagcatagatgaaatcacaccacagtaaccattctgctatcctaacctagtctcttgttttcttcaccatctataggtccatcagctcaccccacgtttatttaaatgcttatgacctaggcaacgcgccaaagctatcatgttttttgaatctatcaaccacattctttctgcctgtgtgctctccagggaggtattgcatgtttattgagggaactcgggctgaacattttgccgcccagctcctcgagccacttttgttcttggtggagaaaggcaaccgtttctatcaaaaaaggtcagcagaaaggtttcaattctttggtcatcctagtcacctgggaattgtggcagcacaggaatgcatgcgtgtttgatggaatccggcctcaatcacaaatagttcttgccagggtcacttgtggtgtctaaccggaccgggacctttggactgcaagatccctctcatggagtgcgcctgtcccatagccgcggtgttttgtaagtgctgttatgagttcagggaggtctcgctcctccctttgtacttggtgttttctatcttaatgaaatgacacgcagctctcctgcgttgttcggaaaaaaacattgggcagactagagactacatgacggctatttgaggtgcattgtgttaaacatatcctgatgttttccacctcat

SEQ ID NO: 38528 - DNA, 354 bp, Zea Mays
gttaagtaagcgtgagcatgttgcaccgtcttaagtcgttgccgacttaagctgattgctccgttagtagggtatagtggtcaccccgagttaagtaagcgcgaacatgttgcaccgtcttaagtcatcgtcgacttaaaccgattgctccgttagtagggtatagtggtcaccctgagttaagtaagaatgcaggtcgacaatcaataatttgagcgctcttgaagcctttctattgatgatatatttcccagtttacagagtacattgtcgtcccaatagcttttgaaatacagctaggggtaaaacttcctgaggtgttctatgttccatgagttcccaatttccgtgccg

SEQ ID NO: 38529 - DNA, 399 bp, Zea Mays
gttatatacttgtggattatgcctaaaagaggggatatattgctgattttttttttgaaattgtgtttttgttctataatgaacttgtgattagtaattttgaattgtatggtgtcaattttgtcggtattttttctatatttgagctatcatatgcatgattatgtatttcttattttattcgtttgttcgatggttgggcaactaatatcatcaggacggactatccgactaatatccgttatctatccgggtaatatccgatatccgtttcttacccgccccaattattatccgatcccgtcctgtatccgtcccggattttaactatccgtatccgatcctgtatccgagaaaattgtattagggtaggatacgagatgacctagtatccgcccg

SEQ ID NO: 38530 - DNA, 299 bp, Zea Mays
ataaccagatatccttcatcaagctccaaacgtggtgccggagaggtcgttatgtcattggcagacacaatatccaagttcccaaagatcgtgatgacaaccgccgtagcaagatcctcctcaacccgtgacatattctgattacagtcgatgatacatggggaagaaggtggggaaggatccgctggcgcctgtgaggtagaaccttggatgggagatgaccccggcgccaactgatcatcctcctgattaagaggcataagggtcgtttgcgtggtcaacgacgacgcctcttagcc

SEQ ID NO: 38531 - DNA, 567 bp, Zea Mays
gttcagtataacagcgagtcattattaacaacgtcctgttgtcgaaagaccagtgtcagtatggtggtaggggcctttgccaactcatgagtttggccacagtgttttgcggcgaattttgaaaggctgcaaatgaacttaaattttttttggatatcagttctttctttaaaaaaacgtgagaagattaggataaaccacgtcactatgttggtagacgctttacaatcacccaactgcaaacggcacgtctttaattaatcacctctttttcatcgtctttctttgtcatggtcgatatcgactttcgcatttgtgtcgctaaaagttagtgggcgaaactctgtaacacggacgttcttcggtgtctgctgtggaccctctgatattacttcgagtctcgagtttttacattcaagaccctgcaagtctgctgcaccttcacgcctccatggctccgtcgaaagaaacttaaccagttcagttgcgctatcaagtactaactcagacaatccacacaagtaatctgaccaattgattctttcagtcggtcgccttgtataattc

SEQ ID NO: 38532 - DNA, 490 bp, Zea Mays
cgagctcgaaccggtatgcactgactacccttggatctgggatctgcggtgagggtttaatgaaggtgagtttcaatcacagccctcggttcagatcgcacggttcagaatggctaaccccgaaacgttttctacctctaatctgagccatcaatcatttgattaacgatccgcggttaactcccaacccaggctatcccgacagcggcggtgccctcggttcacggtggcgccatcaccggcgcacgcaatccacgccatcgttcaccaatactcccacctgagacgctctacgcgtagcggaggatggttcaaatacaaggaatggacttactgggggcagaatatgcacacgaggcctgaccacggtgtatggcggaccacaggttttggtcggagttcaatggcaaattcccagccacccacgcccttgtctgaccaatggtgatcacgcacacgagcggcgctctagaatgaacacaccgcccac

SEQ ID NO: 38533 - DNA, 432 bp, Zea Mays
ggacgaaacaatgagccaaaacagggcttacctgattcaacacatgttgtaagtagcaactgacagttttccagttaaacagaacacgctatatattatgtttagtgagcctgtattctatttggttgaccgttgttcagaccagaacatttcaaaactcaatgcaggattcacttccaatcccagagggtggaatggagaaagggaagagcatagttgacacatcagatgtcaaagcaatgtctgaagtagagcacttgttaatgcgaaagacatttactaagtatgtagctgcataattactattcttcaatttattgtgtttgatttgctatattttttcttgaaatgaatttcgtaaattctcaattcataactagcattcaccgtcacccctggtattatctggttctgtgatgtcccacctcttcc

SEQ ID NO: 38534 - DNA, 730 bp, Zea Mays
gtgattgctgaagaatttgttgttgatgaaacgctacagcaggttgatggagctcttctcgcgatgtgacggtgcccttttttttgtagcgggagaacgcagcagcctgagcggaaacgatgtgagcagcagactagtctatcagcctgacgtcgattcctgatctcagcagcctggtggtcctttttttgtctaccccctgtagcctgacggtgacctcttatttataggcgcagacgcgctgcagacatcgtggccgtgcagtgcagttggcgtgcggcgtgcgcggagacgtgcagtcaaatcgtggtcgtgtcttcgtgactcgagcggaagaaggaaatatataaatttaaattttatctggtgtgcatgcggggtggaggattgtgcaaaatgacaactgctcattcacgtacatgagacatgacggatcatacgcgtgaaaatgggtgcaagccgcctgacgtgcgttgactgtgagccaactgaaccgtgctctaatttgcttcttctttcttttcgtttcttttttgtttcttttttatgtatttttgttttatttctgttttctttggccgcacgtatcttatttcctcttctttctttttctttttctctttctcttttttttctttcattttatttattttaatatattatatattattgttattattattttagagaagactactttgcagtatttaactatatatgtatataaaag

SEQ ID NO: 38535 - DNA, 309 bp, Zea Mays
ggcaaacctcaaattgtagaggttgatttgtctaaggagaggcaagtaagggagtttaggaagttgaatggtttgtgctatgcgtgtggggagaagtttgagccgggtcaccttgctaagtgcaccaaaagggttcaagcacatctaaatgctattattactaaagaggaacctattgtgctcactgatgatgtattgaaacaactggaacaggaggatgataaggatgaagtgtgttgtaaagtgtctctacaagctatggccggtagagatgatgagaacagtatggtggtgagtgcaatggtgaat

SEQ ID NO: 38536 - DNA, 684 bp, Zea Mays
tgggaaggaggactctccagtgtctggggtttgcccagataaggtctatgagggcgggagcaacgattcaatcctggtgtatgggcaccgccaggatggagtgtcctttgtcaggtatgcgaggaagcttgatgctgaggatgccaagtatgatgtgccagtgggtgccacggaggagatggtggtgctttgggccattggtaggttgcggccaccagacacaatgcgcccacactacctcccacagaaccatggggggccaagggacacgacctttgggtttgcccggttgaatttgtcggagacggtggacaattgccttggaccgttggatgcggataataaggaggatcaggagaggatcattgcagatcgcaagacaccacttgtggtgacatctgctccagccgtgcgctacccgaacccaccaaaccctgacaaggtgctttacatcaacaagaaggaggcgccgctgcttaaggtcgagagaggtgttccagttaagttctcggtgcaggctgggcatgacatggcactctatatcacttcagatcccattggtggtaatgctacactgaggaataaaacagaggtcatatatgctggcgggcctgatgcccatggtgtactagctaccccaaaagagcttgtttggctgcctgatcggaacacgcctgacctagt

SEQ ID NO: 38537 - DNA, 329 bp, Zea Mays
gtgctacccagttctatggatttaaggtgtcatagcacatgcggatggaggtggaatgtgccaaaagaatgtctacgagataaaatacaccaaaattattaattgacaatttcatgtccctcagctttctgtccactcgttgcctgcatgcacactactaccctagcacagtacccgctcctaacgttgagaataatgacatacatctaaatggcacttggggaagaaaaattgtaaaaggatggcaacaaaaggaacatgcaatttctgatggcatagaagagcgctataggtttcaatggcatagaagaattttctcaagagtctaa

SEQ ID NO: 38538 - DNA, 384 bp, Zea Mays
agcacagcagcacacccaccgcggctccagaggcggaccccatcggcaaccggctctgtccggaaagcccccaagcgcaaccgcttcttcccggaaagggcaaaaaggaaacgcgcctcgtccggtcggacggaagcccttcttcccctccccatccgccgccactgccccgcgagattcggcgagaattaaaggcaccatatcctgcctcctctctcgtctccctatttctctctcactccccacctcccgcgcattccgcaccgataggtaggctcacccggactcgtctcccgctcccccctcccttttcccaaaaccctagcgggtttcgacctcccaggccaatcagatcgaccgctgccgcgcgcaattgttgagcca

SEQ ID NO: 38539 - DNA, 379 bp, Zea Mays
gagagtcaggatggatgtcgtcactaatggcgccaccgcggatgggggcactcccccgtgctctgccctcgggggagggtgatgactcggttgccgttgatcccagatttggcgactacgattagaaaccatgtaacccttcatgctaccgatctcggcccttcatcgtgaatcggatggttgcgagcgcacctcggttgttttaaatccaatccgtagatctaaaatcgtgtggttgtcgttcgaaactggttcataaaaggttggggctgatcactattgtccagagtagatcgaatggccacaaacatgtaccaacccatttatgggatcaatctaatctggcacgtaggaatctgatcgggcagcccaaatagac

SEQ ID NO: 38540 - DNA, 575 bp, Zea Mays
ttgaattgtccatgtttagatccaaaagctacatcttttggtagatctatggtactcctacgtgcaggggtggattcagtgggcggtcacatcctaagaacacaaaagaacagttagcttagcacgtcgaagcagcctcttttccatggcaaatcatatgcaaaagccatattcttttgattactccttactctaggcttgtaaaattcgatcatgtaactccttattttaatacgaagtgaaatctgtttttagctccttgtaaatgattgctttactgtccagctacggaaatttccagtcatgcattaatttgttgccatgggatttgtcatttcttattactttttgttttctaaatattctgaggcacgccctgattcagtggttgaaattaacagggccatgcacaagatgttgtcgaaagcgacccatcaacccatagcttggaaaataatgatgtttttctttctttctttctttctttctttctgttctcgagaattcttggttttgctagctttaatttggttataactattgttgtgttccttaaacaattcacacacgcttgg

SEQ ID NO: 38541 - DNA, 322 bp, Zea Mays
aacgttagcgtttttagaaatagcagctaagttatattgggctgcgtcggccgttttggaaataatggccgagtgatgacatgacacaccagcgttttagaaataacagctgggtgatgactgggtgcttttttagaaatggcgtctggcctgggaaaaccccatatgtactgcactgtcgcatgcctctgcattctgtgccctagttttgcttttctgcatccaagccttctctgctctcttgcgatattgcctccgctccgctcgccagcagggttgagatggcgcctaagcggaaaacccagagttcattcgtcgcaat

SEQ ID NO: 38542 - DNA, 524 bp, Zea Mays
atgtccatccaacattcctcaccggaggatttcctacttttcctgccggatgaggacactgcctccaggattttcaatggtggcagattattcactggacctcgtttctgcttattgttcaaaagatggtctcgtttctcgcatgcttctatgtctcgcatgtctcacttagtggatgtgcagattaggggaatccctgaacatgcatggtcttgctccactgcggaagctattcttgatgactcatgtcatattgttgaggtccattctgataccctgatgaaaaagagtctctcatcctttacagtgcgagcatggtgttttgattttaaaaagttacaacggcagatgacgctacacattattgagagagggctgcagagcaatgacaagggttgtttatcatacaagatcagtatcagtgcaaccatggtcaatcctgaggacacggatttgggggggttgcaccccttgcccccagatgacgctcatcagccagaagattttgaagatcaggataatgg

SEQ ID NO: 38543 - DNA, 510 bp, Zea Mays
ggccagtcgtggatggcctggacctttgcggggtccatagcgacgccagccgctgaaatgatgtggccaaggtaagcgatggagtcaacaccaaatgagcacttggacctcttgacaaagagtcggtgctggcgtagggtgttgaggatgacgcggaggtgccggaggtggtctgcccatgaggtgttgtatatcaagatgtcgtcaaagaagacaagcacaaaccggtggaggtaggttcgcaggacgtcattcatcaaagcctggaatgtggctggggcgttgcacagcctgaacgacatcaccaggaactcgtagaggccgtcgtgggtgtggaacgtcattttatggacgtcctcctacagcatccgtacttggtgataccccgactgcaggtccagcttggtgaagaggcatgctccatggagctcgtcgacgaccgggatcgagaacgcgtccttgatagtgagcatgttcaacacgtggtagtcgacatagaagcgccacgac

SEQ ID NO: 38544 - DNA, 393 bp, Zea Mays
gaacatgatcggacctgtggagcgctgaccgcgacgagctcacacacgcggtgttctggaccgatttggaggaaatctcaaattggggctctctggtggataatcggaggcacgagtgggtgcgttaagtgcttgactacatggcggagccgatggcgtgctcaatttataggattcatgggcggtggctcgtgaatttggattggcatgctggcggtcggagagaggagatgagtcaccacagtgatctaccgtggcgatcacagagcaatgagctatggcgatcactgggcagtcactacagctcgcgatgacgcgataaatgtcctaaggcgtggcgccaccatggtgaatggcgtacatgccggtgacggccgctcagccacgtcgccg

SEQ ID NO: 38545 - DNA, 331 bp, Zea Mays
gtggggcatgaaggcgcggagaagacactgcatcggtttcgacgggattttcacactccaagggcaagggctatcattcaggacctggttcggcactgcatcacctgccagcgaaacaagactgaacatcttcatccagcaggcctcctcgcccctctaccagtaccaacgtcagtctggtcagatatatcaatggacatcatcgaaggccttcccaaggttgggggcaagtctgtcatcctgttagttgtggaccgcttctccaagtacgtgcacttcatcgctcttcgacatccatattcagcagaaacagtagcatcagtcttcttct

SEQ ID NO: 38546 - DNA, 655 bp, Zea Mays
attaccgacccaaggcgactcaggaacaacctttaattttggtttgtatacttagagaatgtcctacccacgcgcacggcggaaaccgtgacaccgagcccgcgttcccattcaaacatgcccgaattggccaaatggttgccacgatgagcttcatgggtacacagagctgctaaaacaacatacgagaagtgcagagccatactagagtggtccggccacggagcgcggagaacttgtgctcaccggtgacagaaaaggggaaaatattgctgcgacgagctcttgtgaaattgggaggtgagattggggctacacggtcacaaagtgctaccgattcactgtgcacactcaatttgggaagagatggcagaggcagtgtgaattttgggcttcaatcaaactcactggtggagatgtgaatacctcgccgtggtccatggtgctatttatagccacgacggtccagctaacgaccagcgaccgtggaaggctttgttcacgcatggcaaccacgtatagaagaggcacagtaaggggaaatcgaggcatgggtgacaccgcggcggaagtgaccgagccacagcgaccatcgatgggatatctccggccacgcacgactgagctcttgggatggtgccatgttcaaagttac

SEQ ID NO: 38547 - DNA, 476 bp, Zea Mays
aacgaggcggagccatgtaatatacctgcaaaaatcccctgcaaaaactcagacgcaacatgtcgaaaaagaccgcatcgacggtcttcggcattcgaccactccgaagtcaccgcgagaggcagcgcagactaccctcgcatgcgacactccgcgcaaaagttgcctaagggtgcagccgaaatagcacagcatgtgcattaatcaaagtcttttatttaaaagacactccgcgcaaaagtcgcctaagggtgcagccggaatagcacaacaagcgcattaatcgaagtcttttatttaaaagacactccgcgcaaaagtcgtctaagggtgcagccggaatagcacagcaagtgcgttaatcaaagtcttttatttaaaagacactccacacacaagtcgcctaagggtgcagccggaatagcacaacaagtgcgttaatcgaagtcttttatttaaaagacactccgcgcaaa

SEQ ID NO: 38548 - DNA, 464 bp, Zea Mays
cacacatgaatttggacagaacaggggtggaagagtgggtcgacgtgagtgtgcgctcggaggtgttccacggcggcgagacgatgttcttgatgcccaaacgcggtagcgctcaatcgattgggccgatgagcaacgttaactgtcaaggatgctaaaacacgaaacggagggggatgaacggacctggaaatggctgaacatggcaggatgcctcatgtggcgcaagtgacccggtttggggaaatcaggtgactgtgggctatgatgcacggtagaggctaactgcgggtggtatgagcgcgtaatagagaggcagagcaagggtagtgctcaatttaaaggaaccggcaacgtgcttcaccaatttgggccgaagacgatcacggcggcggtgggatattccacaggacgagctcgtcgtggcgtccgctggtacaacggctcaaggacggtaattccac

SEQ ID NO: 38549 - DNA, 715 bp, Zea Mays
cttgcatgacgttgccacttcctcgcccacacttggatctggagcgtgggggagtatctccatgaatctcttggtcgtcagaggagtcggattcaaccacagaaggattcctccgacgcaccatcctttaaaaagagaagacagaacctatgatgagcaaggatcaaacacgtttgagtagagacgcgtatgatattgagcatgcacttcaaccgttcatatgagcggttcaactacaacgaacaatatcaaaccgctaaactctaacaatgttcgtgacaaatgaagataatctaagtgttgcaagcacttaaactaaaatgtacccaacgaatgatacactagataatcaagaacgagtgagatcgagtaaaaagaaatgaaatagggcaatacctcgatccggagtttgaatcaagaaatcccaacaagatcgagggagatgatggagaatgccgagatgaacggatctccaacaaatcttccaaagatgagatggcacaagtgggttttggagtggagaaagtgtgaaggagagagaggaaaaagagtgggcgacgtcggctggaaagagaaactgagaagaagagaagagagcaaggggagagaaataggggaggcgtcggccagtcaaaagacagaaaaccggttcaaccggttataaaaccggttcaatcggtttctgatcagactgcacagtaaaagcgcgcagaaa

SEQ ID NO: 38550 - DNA, 569 bp, Zea Mays
aggggtgttggtcatgaagcattcctacatggggtcatagcttgccctactagatggggtgttgaggctacaaccagattctgacaagaacaggtcgtgaaacgaatccatgatagggtcaaccattcctaggaacttgatgtagtagggtctcaatggaccctgccccagattgtgcttctgagggaggccaagttggaggccaccaaaggcctctgtgatggtgtcgatgtcttccatcaagggggtccgggtagtcgaagccctaaccagtcccccttcatcggcgacgataaactcgaggctcccaaagcgtacggttgctctaggagcccatatgatgtcgtggctagccatccaaagcatggcgaagagaatgacgaaaacacaaaaggcccctacccgtcgtgccaactgtcagtgtttcgaactaccaccagcaagtaaatttgtgtatgcgtgttttagacccagatggtgtgcttagtggcgcaaggtttatactattttgggtagaatgaccctactccagtcttcggttgcttgcgctactagcatctaatatgctc

SEQ ID NO: 38551 - DNA, 1445 bp, Zea Mays
gtcctcttgttactcagcaaattgaggcatgtcacaatacagtgggaataccacaggtaccacaataaatctgctgttggtgattttcttatttttatttaggtagaagtctatttttggccatccaattattgcccgagtttgtttttggccatgcaactcaaaaactataaatccttggccactgaactatcaatactggacaaatgtggccagtttcaaagggcttttgtattttctgaaaatagtaaaagctggtttattttttaaatgataactaatttattttaaatcagaaaaacatgaaaacggcactgattttttttttaaaatataatgtgtctattggtgctgaaattggagttatttggattttatttttgccattcctagtgttttattgcttgcgcctgttatttttttaaatcaccattttgtgccatattaaacctagagatcaaacaagagaatccatactcaaaccaataatgttgattaaattaaccaaattatttttggaggctagcaatgctatactagttgcaatggtatatatctagtggagcacggcacctgcaaggttggtgtcattttccatatctttttgtttactcatagtgtattatggatttttaaggtcaatctcgggtataatatagtgcaaaacgatgatttaataagtaacgaacataactacgagcaataaaacacttgtaatggaaaaacaaataaattcaaatagagcaccaacaaatggattatattttataaatattttggtactggtttcatttttttctgatatcaattgaattggttattattatttttcaaataaatcaactttattgtcttcagaaaatacaaaagcacattcgaaacaaattgggtggccaaatttgtctaatcttgacagtttggcggtaaaaaattctacttttagagttccatggtccaaaacaaacttgagcaatagtatggtatctataaatctcatttttgctttgtgctgtacatttttctgtaatgcgctgcacatttttctctgccgcatgctggaaactaacatagttatgcattttcaggagtggataatagatatgaaaggagatcaatgcccttctattcgatcagttcactggaagtcaaagagagtgttctttgtcactccacaagttcttcagaatgatatacaatctggtgattatttgtaaacgtttctggaaatctttattgctagttccagttaattaaacttgacgctcagacaacaaaaataagaagaaaacaagctgtttccattgtccagaggttgtgatatattctttggttgttattgctaatccatcttgctatcagttgaaggtccgtttactatttttagaatgataactgaacacgaacttacttgaaaatcagcatttaagaactctatatagttggtt

SEQ ID NO: 38552 - DNA, 311 bp, Zea Mays
tggtgcgtcgctgccataccctctgcacgccgttgtggacagttcatccgcggtcaccaaactgaggtgagaaccatcgccaagcttacatttgcctctacgattgcagtgcacctagaatggtaggaaatagcgctgttatgggtgggcaattgctcgccgtcgtgcgccgccaccgcggtgccgctctgcatcgtgggtagattccgtgtaaattggaaccaccgaagtgatgtctctacgttattcggtagacgctctgctccccgtatcttgagccaggggtagaaatcatggctctgggccgcgat

SEQ ID NO: 38553 - DNA, 348 bp, Zea Mays
gaagtccgctaccatccgccgcggccgcggcagctcaggtgtcgggcggagacgatgattggatagatgtcagattaggagttaactgtcaggatctggtcaacgtaccggttcactggggggaatctgaaacgttgacgcggtatcggacggtggtggattgatcggggtgagatcgcccctcatccgtggatgttagatctcgcggtcgaaaagagttatacgttatttgctgcgcagacctaatccgggccgatgggcagagatcggacggcctggattcaccgatacccctttgttttccttatttgataaagagaccctgacaaacacttgaatcaactcgcc

SEQ ID NO: 38554 - DNA, 340 bp, Zea Mays
ttgccgcgagcacgcttcgcacggggacaatgacttctgacaaaatggccctgcacgacagaggagggaagatgccccgcccaacgctagagtggctgaccgatgggccaggtgtgtcagtgatagggcgatgaggatgtgcgcatgaggtcgggctggttcctcagggaagtgggtcgcgcggttagtttgtcctgggcccaaacggtggcccacgcatggttggagccggaccgaggtggcaaggggcgcgaatgggccgagaaagatctttccacttttaatttagtctctttgatcactttatttatttattttatatattttttccttataccaa

SEQ ID NO: 38555 - DNA, 389 bp, Zea Mays
ggggcgaatcctgatgagaaggcctggtgtagtttttcctgatgacattgttgctgatgtcaaggctacgcctgatgcctcgagtcacccttcttcctcgatcgcccctgcgaaagacattgccaaatagagatgttttgccatagagacgtgtttagaagatactgaatgcattcgtgaattatatgtgtgtgtgatcagtgtgctcggatactcggtggatagggtactagaatgtgttcttggtgctgaaaactataacattttgtttctattgttagaattcagcagtcgtcctgaacgattgcggaagtaagtgcggcgtgctggttttggagtcttttcctgatttacgccaattgatcggctgctaaggcatagaggtcgcc

SEQ ID NO: 38556 - DNA, 347 bp, Zea Mays
cttcgttgttcgcagaaatcgaagaattcagagctggtgaagttggatcccagatcagttataatgctatttggtatcccaaacctgaatattatgtcttgcatgaactccactgccttggctgaggttaaagaggcaatacgcttatactctatccattttatgaatttgtcaatggcaaccagcacatgagtatagcccccctgatctttcttgaaggtccaatcatgtccaaaccccagcatgcaaatggccatgttatagggatggtctgcagctgctgtgccggtaaatgttgttgctttgacaagaattggcaagcttcacatctctggactaactcggcg

SEQ ID NO: 38557 - DNA, 548 bp, Zea Mays
ctcgcagtcagtctgagcaagaggttagagccttaagacaggatatgaatcaaatgaaagaaaaaatggatcaaatttatcaaatgatggtagcagctcaaggggtgcaacatatagaaagcccatcacaacatgggcctaattctcgacaggtgatataatattgcatatgtttagtcagtgtagcatatatcgagcagttcggcgtctatcatgttaattaattaggcttgtttcctttatctcactaacactttttccctttttattttctttagaactcaagggtgcatcgttcagatgaggtggcacatgattacaatggtaataaccattcacaaaatatggttgaagatgacttgcaacttactaggcgagttgcaagcactgtgggtcgtctaaggaaccgtgaagatgttaattctattgaagagcaaagtcgcaggcgagacattgcaacaatggtacctcaaagaaatcatggatcatctcaaaatgcagatgataatcctgtaattttctcatctatcacttcatatttatgtttc

SEQ ID NO: 38558 - DNA, 588 bp, Zea Mays
gcttaggcgacgcctttgaaacattgatgacaacgtgatgcaagactatggttgaagaagtcggagactcggaggaggcttcttgatgacaaaccaacgattgggacatgcagataagatgatcgagaagtgacgtggtaaggcgtctcctcagtagcacatgcctgtccagaccacacatccaaagaggtagatgtcggtatagttgatgtcagtgttggagtagatatgtgcggggttgatgaatgttgggcgactcaaccccgatagattgggcaaatgatataagcaacaacaggtgagaaccaatgttaatggagggcgacagggtaggtcatcaagaggtgtcttttggttacacatgcaacatggcccacatgtgggctcaccatgcggattagacaaatctcgtcgacgcgggagggagcggtagtgtagactgtagagacgacatggatcggcggtggggcaggttggcgactgtggaggacgccgaagcgcatggttggggcgtgacctggctcggccgccaacatgacagcacaaggacagttcacaactaagcgtggccgcaccacgatagcacgg

SEQ ID NO: 38559 - DNA, 429 bp, Zea Mays
cttcactgacagcttctcagataaagaggaaagtggaaataaagggattacccaactaaataactgactttattaataactacaccaagttgcaggggatgcccacatcttggtgacaatcattacaaagatccaacttcattacaagttcgtcatgacaggcatcaagacatatgacaagcaaactaactctaactaagactaactgagactaagactctgaataaagcattattaaagactccaactctatcaatctatggatccaaatctatctaggtcctacagtcaggggtaccatactcgaagcgaccacagggcggtgaacggtaaaggtgttgaatcccaacagggcgggagaaccacaatccaaatagtggcgtgttgcgcactcagcacgcaattctacaacctccgccagaaccttgc

SEQ ID NO: 38560 - DNA, 365 bp, Zea Mays
attggattaaaatgaattgttgaagctggtaagggttgtcataaaagagtgttgttttaagacattgatcttgatgtatagctgcatccaaatttgatggtgtgaaatcgtagtgttgattgcatctatgacttgctttgagcttcattgcatgttgtttcatgcttgatatcaggttgtgtagtttccttagacaattagtccgaggtagaggttcttgtgttaattaagaccaataatggacccatgttttgaatggtggtgctatatggggtaccttggatgctttgcttggaagtggtcgaattcgaggacgaattctttttaaggggggtagagtgtgataccccaattttctgaaaaga

SEQ ID NO: 38561 - DNA, 454 bp, Zea Mays
cacgtattcaccgcgcccagtgttcttctccacctccggccgccgcgcgtcttgctcaaattcgcggccaccgcccgctagctctataaattgacctcgtccgtagctgcgccatgtagttgtgaagctgtagcacccgctcccaccctcgatcgtccaccagcacgcacgaatttctaattccccccaaatccattctccgccgccgtgaaacgtgcttcaccgtcgccagccttttttctggtcagtccagccctccctctccctcgtttaagtaccctgatgactctacgatgcttgccgaaccactgaattgagctaggagcccgccaatcgctaggaacacaacggtattgccgcgatgctcacgaccactgtggccagagctacatagttggtcttagcggcaattaggttgggggaaatggtcagggtagccccgatttcatgtctg

SEQ ID NO: 38562 - DNA, 287 bp, Zea Mays
cggggacaaggtgttgtcgacgaaggtaattttgcatttcttggcagtgagggctgccttcacgatcttgcccgtgggggagttggccctagtggttgctttcttaggagccatctcgagagttggtctttggagcacagacggtggacgccaaatgttaggcttcgacaggtggaaccaagcactcagagacaaaaggggagctccgcgcatgataaaatgttaggtggggaactgtagcgtcttgttatgcgtgtcctgtttagctacatgatgggggtgtatat

SEQ ID NO: 38563 - DNA, 277 bp, Zea Mays
aaaagatcgagcataatgctacttacgaacaatgaaactgttttacaagcgattgagcatactgctaatttctgaatagtgtatgcacctcaacgcagcaatcaatcctaacctggtagccaaactctcgccaaggcaccacactaacaagcatcagtcacccatgatcttgacaaaagcgagaggagaattgacaaaagcgagagagaccgagaagcaggcagggaaatcgtaccttctaggcctcgttcgatccacgagctgctgcagcttctca

SEQ ID NO: 38564 - DNA, 481 bp, Zea Mays
ctcccactgcgaaggattgatgtcgtatggccttatcatgatagcgcctcagggtttgctgataccgggctgactgaatcaccgtattcaatcgttcctcttctagtatatcaacatcctccaatctagtggcctcagcttctgctatgttttcaaagattaatctcggtgccccaaacttgagatcagcgggtagcactgcctccgaaccatagaccataaagaaaggagtgtttctatgcagagctcggctaggttgagtcctcaggctccagacaacatatggcaactctctgatccactttcctgcgaacttttcattcttgtcgaagactttctttctgagcgcctccaatatcatcccgttggctctttctacctgcccgttggctcttgggtgcgccaccgaggcatatttgatctgaatgcttttttgttcgcagaaatcgaagaactctgagcttgtgaaattggatcccag

SEQ ID NO: 38565 - DNA, 521 bp, Zea Mays
caaatgcattcaccataaccatgcgcatttaaaccataacaagcaatccaccgtgattacgagcttaaccacacgcctagataagcatgatttgaaatcaaattgcccatattttaaatctcggcataagcttggctattggctaacgacgtgacccttttctaattaccaacatacaccacctttcaccatttttggatacttgcacgtcccaccgctattgtaatacctaacaagtacattcaacccctcagtaaagcactagcacatttcagaaaatttcctgagactacgacgacaaggcatcgatcttatcatgtacataaaagcatcacaagcatatttttggaacctatcggttaacttgatcgacacactacacatgttcttcgcccttcaaaatttatcgcacaaccgaaatcatcccacttgccaatgacacctacaaatacctactgatatatcattcacatcacgagcacagttgcacgccgtatactagtttctaacataatcctcat

SEQ ID NO: 38566 - DNA, 376 bp, Zea Mays
caccgtcatcagtgtaattggtgagcatgtgcaggagagtcttgtttgcttcaattcgcacaccttttcatggctcaaaaggatgtgaagaatatagtatgctaccaataataatgggcagtgcatgcatgcacagttgttttagctcatctataaacatggccttagccttttgcgaaccctagaagaggaacacgtagagtcatgctagccatgaaccttgaccctgacagtggctagttttataacccagaggacacctcatcatcaagacatcaaatgatgcaaattgcgtgtagtacgcatgctacatctttctcaaggatgcaaccattgaaacttgaaagtgggcaacctccttgccaatggatttctg

SEQ ID NO: 38567 - DNA, 313 bp, Zea Mays
aatgcctcgaacggtgacattttgatgctggcctgatggctgttgttgtatgagaattcggcgtacggcaagctggactcccaatccctgtcgaacgttagcacacaggctcttagtaaatcttcgaggatcttgttgactctttccgtttgaccatctgactgggggtgataagcggtgctgaaatctaacttggtgcccatcgcttgctggaggcctttccaaaattttgaggtgaactgcatccctctttctgacactatcttctgtggaatgccatggagcctgactatctccttaagatatatccggg

SEQ ID NO: 38568 - DNA, 426 bp, Zea Mays
atcaaggcgaacatactggtacctttggatcagccagtgatggccagagacgggctagcggcgaggaactgcttgtggagctcgccatcgacggcgatcttgctcactggtgcggtagcacgtcgagggagaggcccgagagcttcactaggacttcatgaagctcaccatctcctcgaatttggtggtgagtggccggagacgcgtgtccacggtcaccaatggagagaggggcacaacagtggtcgatttggcttgtcgacagtggtagcactagaactgactgaccgaggagcttcactgtgccacagagaagctcaaggcatgcttggttagggctggggtggctcggcgggctcgggccacagcggccgtgctccgagaagaaaggtaagaggcggagctcggtgttcaggcgagagtccg

SEQ ID NO: 38569 - DNA, 325 bp, Zea Mays
gcctgcccttcaaaatggtcatcatggctttccttggctgaattttggtacaacacaagtttccattcatcattgggcagttctccttttgaagtcatgtatggtcgtccaccaagacagttggatctaacaatggttgatgccacgtcactccaggatctacagacgtggttgaaggacatgaaacttatggttaggctggtacgccagcatttgttgcgagctcaacaacgtattaaagcccaagtagataaaggtcgatctgaccgtgaattcaatgtgggtgatttaatttatcttaaactccaaccgtatgtccagactt

SEQ ID NO: 38570 - DNA, 914 bp, Zea Mays
tcagagataattcttgcagaccaatgagggcagacaaagcaggagaaggaacaccgctactttccccactagctatgtaacgccggctgttcttccgaattagagggatttcatcctcttcttcatcatcttcatcaacaacatggacagtacacccattagggtcaacttcagcaggatcacacccattgggatccacagcagtcgggtcacacccattggggtcagcttcagcaaattcaggcactggcacttccttagtagcaggaacagaaggatcggcatcctgatccaagctagacactcgacgaagacgtcctcttcttctttttcttcccctcagcaggacaagtgggctgattgtctcggcgagaacgcttcgggcgaaaactgtcagacctctgagcatccaaagctttgccggcctcagggatgaacaccaccaccagtgtttcagcaggagcggcatcagaagaatcctcagctaacatatccagaatggcacttatctctgcgtcacttggattcaaaggcacctcaaaatgaacctgcctctcgtcgtcaggaatttcgtcgagtgaggcaaccaaagcactaacttcttcggtagagggtcgcactctaaggcccaaaccgctatcaccagtaggaggatttgacacgaaactggtaaaggccttggaaggaggcagattccaggccgagcatgcaacaggagctccgatgttcgacaccttgcctctgagtatcatctcgagccggctcaccaagtccacaacaggaattcttctattggttacccgggttgaatcagccaggcctcgatacagataggccggatatgctctgtctttcagcggctgaatttcttgaaaacaaagtcagcgaccacagtttctgcagtcagacccctt

SEQ ID NO: 38571 - DNA, 385 bp, Zea Mays
cgcgaaccggtacgccatgggatccacatgatctaagatcaacggtcaccatttaatgaatacagagataagcgcctatcgtccgattcgagatcgacggcccgaacgaagggggtatcactgatctaatcagaaccgttcggccgtaaatcaacgaccatgggttcatcacctccaccgctggccacccacggcggcgctctgctccccaacggtggagccattgccgccaacagaggccgtgcgccaccgctatcccaaactccgattgaacagggcaacatgcatggtagatgatggcgaatatgggtaaccgagactcaccggtgatggcgtgcccaaggggtcggtctgcgacagtatgcggtcccacggtggtccttca

SEQ ID NO: 38572 - DNA, 359 bp, Zea Mays
gtcggcgtagccaaaatgatgacgccagggaccatcgtcaccccacgtcgtccgccacgataaatacgagacaaccatgtagccctggccccacgagtacgtgtggatccacccatgtaaaacgttgtttttacccttgacttacaactcattcccaaggaagccatcgctggacaacccctctcccggcctataaaagggagaggctggcctcaaggcaaggggatcgaaaggagagagctcttggggcaaccagacgccttcagatggacacgagcccacaaggacaaacaggaggaggaagagcgtcgacaaggactaggagatcggagctctgccgaccaagacttagctaggac

SEQ ID NO: 38573 - DNA, 822 bp, Zea Mays
cgggtgggacaggcagtcaagactcgtccgagggcaaccctgggcaggagatgtagtcacgactcgcccgtgggcatcctcgggtgggataggcagtcacaactcgcctgaggccatccatgggcgggataggcagtaatgactcgcccgaggccatccgcagacgggatagacagtcacgactggcccgaggccaacctccggcaagacaggcagtcacgactcgcccgaggccatcctctggtgggatacacagtcatgactcgctcgagaccactctcggtcgggagaggctgtcaagaatcgcccaaggccaagcccggtgggagacacagtcatgactcgcccgaggccaccctcgagcgggagacataataacgactcgtctgaggccaatctcgggcgggacaggcagtcacaactcatccaaggccaagcccgggcagcagacgcggtcacaactcatccgaggctaagcccgggtagcaaacgcagtcacgactcgcctaaggccactttggcagaactgtccgcacccggcctcctccacctcttcccgcctctcgctctaaccgcgccacgttccacatgtcgtggcctccatccacctaatgccctccaatctgcctcctgatgcaattcacggtcccacacacccgacgccccgccccgagcctgcctcccaatgtcacctccctcgcatgtcgatccgaggtgtgaaatttggttgataacatcactaaacaatgatctatacatacacaagtgtcaccctgctggttgattacctcactaaacaatgacatatgcctgcataagtat

SEQ ID NO: 38574 - DNA, 449 bp, Zea Mays
gacggccgagcagaaccccaagaagcggcgcgacgtcgtgttgtagcctgtacgtaggaacagagcagtgagagagctagctgctgaccgacccatgagcatgagtggccaaacaggcggtggttcgtgtatatatctaatggtaatggatcggcgtcgagcggctgatgccattgccacggccgagagagcaaggcactggcagccagaccccaagcatgcacggtgagctgggtggagcctggactggaggagccagggaccctttgacaatgtaaagtaaactatgggatgatgaaaggatgcacgcgctcgcaccgtacgttattgacaacgacctctcgacgtgcaatggccatggactgtgtatatacatgcataccttcagatgtgtaacttgagggaatagcagaaatctagatctaatatgtgttcagtaaaggggcacg

SEQ ID NO: 38575 - DNA, 355 bp, Zea Mays
gcatggttcgccatcacgtcagacgccaggacatctctctttcgaatacaagactcggcttcactgcggacgctccccttggtgtataaataggggagtggtccctccatggggcacgggaacacacagagacgaactctcgctttctccccctgtcttagatattggcacttgcctcaatcttctctagggacttggggacttcccctctcccgctgtgcttgtaaacccctactacaggcaccacggtgcgagtaatataagcctcatcctctctgctggaagtaaggccttgagtagcccgaaccaggataatcacttgtatcatctcgcacaccatctagagccggccacg

SEQ ID NO: 38576 - DNA, 332 bp, Zea Mays
cgaccggacattgcttatgcagtgagtgtggtgagtaggtatatgcatgatcctagaacaagacatatggaggtggtctatcaaattctgagatacctgaagggaacccctggcaaggggttgtggtttagagcgaatcaacacctgaatctggagggttactgtgatgctgattgggcaagcagtagagatgatcggagatccacatctggatattgtgtgtttgtgggaggtaatcttgtttcatggagaagcaagaaacaagctgtagtgtctcggtctactgcagaagccgaatatagagcgatggctttagctctatgtgagatgat

SEQ ID NO: 38577 - DNA, 369 bp, Zea Mays
ctagagccaaggagcaaaccaccatgacatccaaggcttagcagagagcaccagtctcgtagtctttaggtatagccatgcataagatacttggagctcctccctctctcgttcgtttgtaacccctactacaagcattgagcaaaaaagtatcgaaagcgcgagccaccaaaaattggatgtagggacgttcttaccaaaccagtataaatcttgcacccacctagcataccatccagaccacagaatgcacacaaataaatttacttgtcggagatggttcgaaacaccgacagtttgctcaccaggttggggccttgcgcgttcacgacgctctcttccccaggatctggatgggagccagtgaca

SEQ ID NO: 38578 - DNA, 435 bp, Zea Mays
gttggggctatgcggtcgcaaaaggctattgattcaccatgcaccactaatttgggggaaggtggagagaattccgtgaatttgtgcttcaaccgagctcactggtgaagtggtgagtacctcgccgtgggtggcggggctatttaaaggcgcgatggtccggctagcgatccacgactgcggattacattgttcatgcatggttaccacgtaaagaaaagacacagtgagggaggagcgaggcatgagtgacacggtgacggaaatgaccgagccacggtgaccactggtgaattatctccggctaagatcgggctaggtccgcgggatcgtgacacgtccgaagctatctccccgcggtcgattcttaccccaaatcactcaaacacatccaattctacagtgcccctgatctttgtcctcactttttcagat

SEQ ID NO: 38579 - DNA, 301 bp, Zea Mays
aacccactcaaataaaccaatgaagcctggacatataaaggtcgttttagatgcatcttcttcggccatgaaaatctgattaatccggcattaccatcaagaaagctaataattctatttcctgacgcattattgatcaacgtgtcagctatgggcatgggatattcatctttaggagttgctctattcaaattgcgaaaatcaatgcatactctaagcttacctgattctttcttctccaccggcacaatattggagacccactctgcgtatctgcaaggtctaataaaattagcttcta

SEQ ID NO: 38580 - DNA, 637 bp, Zea Mays
ggagaacgggacctcgggtatcaggcccccgagcaagtcctcaaggacatcctcactggagactccgactccggtgatgacaacgactgccgcaagaagctgtacgttatgtatggcgaaagctgggagctcatctcccgtaggaacgtgaagtccctgcgccgcgaggtcctttcggcgaccccaggggtcctgaaggcagccccacatcagcggtggcgaagcaccactatctcctttagggcatccgactgccctaaaaacatggcaggggttggtatactaccactcatcaccgcccccgtcatcgccaacatgaagctccatcatgtcctgattgatggtggggctgggctcaacgtcatcagccatgctgcgttcaagcagctgcaaatcccaggatcctgactaggaccctctcgtccattctccggagtgggccctcaatcggtgtatccccttgggagcatcgcacttccggttacattcgggactgaggaaaacttccgcactgagaatgtccagttcgacgttgcggaggttaacctccctttcaatgccatcattggcaggctggccctataccggttcatagccattgcccattatgggtacttggtcctcaagatgttgtccc

SEQ ID NO: 38581 - DNA, 519 bp, Zea Mays
gtcggttcagaagaacactgaagatcaaactctgaaaaatatctgatgaacgcgataaagatcaggggcactgttgaacaggatgtgctcgcgtgatccagtggtgggaatcgatcgcggggaggatagcgtcgaacgtggcaccatctcgcaagctgagccgggcgtggccggagttattcaccgacggccaccgtgactcagtcaattccaccgcggtgtcacccatgtcttgctcctccctcactgtatctcttccctacgtggtaaccatgcactaacgaagttatccgtggccgtggatagctagccggaccgccgtagctataaataacaccatgaaccacgacggggtattcacatctccaccaagtgagtttgattgaagcccaaaattcgcactacctctgccacctcttcccaaattgagtgtgcacggtgaaactatagttccttacggccgtgtagccccaatctcacctcccaatttcacccagagccgtcgcgacgccattttcc

SEQ ID NO: 38582 - DNA, 451 bp, Zea Mays
gacgactgctatagttccaacgacaagcataggcattcaactccctttcgtcgccatggcctggggatgacgccgtcttctcgctgggtgcctaaggcgaaggtcagatctgtctctttctcagaccccattgttaccgttgtttggccgcaggtggaaagccaagggctatctgaagatgttggagggaagtttggtttgatggacgctgacatccaagaatcattgcacggcccttctgccaccacgtgcaaggtaaccaatactgttgatctcgctaatgttttcaccacaatccacaaaagcttagacagtgtgctgacatgttcccctagcgtcaacctgatcagcctgaacacagctatactagccaatgctccagctgcccaaccggttgagtttttgatccacagcagtttagacagtgttctagagggttacccaagcgtta

SEQ ID NO: 38583 - DNA, 372 bp, Zea Mays
agtttcagtttatgtacctcttgttagcaacaatcactccattactcaagatagacctagaagtaatattgttttgccacatcgatatcgtgacactaatagtatggctcattatgctctcattgctgctcaagaaactaatgttgcatttgaaccttcttattcgaaagctatctcatgtgatgattcatccaagtggttagttgctatgaatgatgagtttgagagccttcaaaagaatggtacatggaaattggttgagctccctgaaggtaaaaaaccattaaagtgcaagtggatttatgagaagaaggaaggtatatctggagttgaacctgcaagatttaaagctcgtttagttgtgaaaggttt

SEQ ID NO: 38584 - DNA, 337 bp, Zea Mays
gcaggtgtatgaacgaaccagatccgaactcgtgcatctcctcgcgttggtgtaatctggtgcgtcgatcggccaccggtcggcacggattaggtctggcgaccctgtgcgcctcactaggtccttgccattggatctagatccggtggccggttggtgattgcggttaagagtagtggggatctaatctgcaccttcgaatttagatcgtgcggccaggatcagcgcgtaccccttcgcgggtacgttttacaatagggaccttacgattttagagaatagtacccgccgtcctgcgggtattgtgcactgtgtcttggagaagttaccccgaggc

SEQ ID NO: 38585 - DNA, 583 bp, Zea Mays
cgctactcgctgatggctagctagtcgctgagcccctcccagtggcctataaaaagagcgctctgagcccctctccattcgcacctctcacaacttttcctcccctcccccgagctcaatcaaagccggcaccatcgccccgttaactctgatgatctccccttcttcccttctcgggtgactagagccaaattggtatagctcttgagctttactacaatctcacaggcacaaagcacctcatcccaccccagataccccccaacaccccaccgcgacctcgtcgtcgcggtgacccgctaccccactatggacaaccctctctagacctccactggccaaattgagcccaccgttgtgttttcctgaccctacctgtgctgacatacctccccaatctcagggaaatagaccactagcagagaaccaccgtcgaacccgccggcgatcggttctccctcgtcccagaccggtccatttccccctaacgccatcaccctccctctctctctggtttatggcccaccccacaacaccatccccgtgtcgtttcccagctcgtgggtcggctaggtcatgcccg

SEQ ID NO: 38586 - DNA, 528 bp, Zea Mays
gtttgatgtggcagccgcatattcctttgtaaagtttgactaggaggtttttgccttcgggttttaggatacacttgatgaggtggtgagcgacccctcttctataaagggagtcttcgatgatgacgtacacccgacttctatagttgagtctggttcttcatttgtgtcaatgcagtggtagtgtcgtcgtaaatatgaaatgatgggggcacgccagtcctcttgcattatcatgtggatggattcggtcccacttatggttgtctaataaatgatactttgatgactcgataaaatatgtctaggggtaagggctctcctctggttgtagacttcgcaagtgcatctgcctctttgttcttttctcattcaacatactggaccgtgaatccgggaactgtttttctaagcttctggctgctgataaatactagagtagcactggttcgtgatctgtgcaacatttctctatctatcctgagataattcaggaatcgatttttagtagacatgtttggaccccga

SEQ ID NO: 38587 - DNA, 398 bp, Zea Mays
ggcccgccgagctgtgacgatgtaaaggcgggatcttggtaggatgccaggggttttgagcagggtttgctttgcttttacttttcccgagttaggatttgagagttcaaatgcgctatgcttaggctactactggtagggtttacgaaggctccattcattcacgatatcataatgactaatatgttggtgtgctatgaatcgttagttcaaattcctgaatcactggctgcgtaattgcgttcctcagtagattcttggcgttggaatagctctgacagtcactgcgttgcattttagtgctgcagtttgagaccaaaatgttgctacagtgcatgtgtgtttatactccagtagagctaatgaaaattgactcgaaatgtaccatacactttgtg

SEQ ID NO: 38588 - DNA, 622 bp, Zea Mays
acctaaagtactaccctcgccgttcgaccggtagtgctggaggtgtgactgtctcgctagttggtgaaggcaatcccaggctgaacagcatggtcaacctggccgcagtgctcaacacagagctggaccacgcccatgaccagttgggcaaggttcgggcggaggttgcggaattgcatgctgagtgtgcagcacgccactatctggatggtggttctcccgcccctgtcgggattcagcacccttatcgttcaccgccccatggtcgctttgactatgataccccagactgcaggacccggatagatttggatccatagatcgacagagtcggagtctgtaataatgcttaattcagtgtcttagtctagtcagtcttagttagagttaatatgcttatcttatgttgggatgcttgttatgatggacatgtaatgaagttggatctttgtaatgattgtcaccaaggcgtgggtatcccctacaacttggtgtagttattaataaagtcagttatctagttgggtaatccatttatgtccactttcctctttatctgagaagctgtcagtgaagatggtcaattgttcagtgttatgaagattttctatatatcttttct

SEQ ID NO: 38589 - DNA, 352 bp, Zea Mays
cgggagtaggagggtcatgggcgaatggaaaactgagctcatcaaatacaacatgacgggaaataataatgcggcgcgtggagagatccagacagcgataccccttgtgagcagaagggtaccctaagaagacacatgcgacagaacgaggtgcaagcttatgcgaagacgtggcctgtaagttaggataacagagataaccgaagacgcgcaagtgctcataggaaggaggggtattgtacaaacgggtgtacggaacctcatggcgtatggaggaagaaggtctgcggttaagcaagtatgtggcagctgcgagggcctcaacccaatacttgggtggcatggactcatg

SEQ ID NO: 38590 - DNA, 367 bp, Zea Mays
gtcggaggctctttctgctttcatggaacccaacatagaaactgtgcctattaagattcctcccaaatgcttgctcccccctaaccaggatccgcttgtggatgctcagtcccctgtgacttctgaagcagttaacagaaagaaacgtgcagccttggtcgacactaaagtgagaaggagtgcaaggcttagagaaaaggacaaaggctttaagccttgttttggaataaaaaataactgctcgtgctgtgctggggcatcatcgccatctctctcccacaggactatcaagaagttgggcactgacttctgcaatgttgacccccacaagttgagccttgatgctttaaataactctaggtcctcc

SEQ ID NO: 38591 - DNA, 362 bp, Zea Mays
tgttgttgtccctgatgacatagtagcagatgtgaacgccgctccggattccaccagtcgtccctcttcatcgattgcccctgggaagaacgttgccaagtagaaaacattatctgcttcgttagtgtactcgagtattttgttagaaaacacttttcagtgccaaatgccgtgattgcttctcctgttgttaggactcagcagtgtttacagttattggggtaaatgcagtatggtgatttcgagatttgttcatgtggcataaaggccacctcaggatgagtagctgtatatgcgccgagtgtattgtgccaattcgagttagtattagcttaaaccgatcattccgttagtgcggtata

SEQ ID NO: 38592 - DNA, 374 bp, Zea Mays
accaagtcccaccgcgcgcagacgctcctccgcaccgacagcttgcccccactcgtctgtttcttgcacgcgcttgctcgccttgtgactcactgtcgcctggggcccaagggtcaggccggtcgtcctctcgggtcgttttgccaagtacgtctcttctaccgcagtgtcgtcgtgcatatcagagccgcgtgcccacctccgcggcataaagctcccccacctcgtggttgccctcctcccatctagccgccagttagttccctgccccaatcacttggtacctaggtcgggtgggatcgaattgcgtctgctccgtggtcacactgtcgtgcgcctccgccaaacctcagactctattgccgttccccgtg

SEQ ID NO: 38593 - DNA, 313 bp, Zea Mays
ataagattggcaccctacttccacagcgtgggacacaaccataatttgcccagttgtacacatatgacacggaacatgagacctagaataggctagggatgtttgagaccgatgatggcgctggtggccagccagaccctgaaatagcgtcggcgctgctcgatatgctgaatgaaaacaactcgcttgtcaaagcgttctgatacgcgagagagcgccttgagcgtgagggtgatcaaaagataacactcagattgctaggctgcaacacacgccatgatgtacaatacaacctaccctcaaatggcgagat

SEQ ID NO: 38594 - DNA, 510 bp, Zea Mays
cgaaggcaccatctctagactttcttcttgtggggatgttttttatttgatttaggtttttgtgcaggtgctgatatctattccaatgcccacgaggttcattggtgctgatccatacaagatgtgagtagagggcaggcttcggcgtcaaggccaaggcggcgtggcgaccggtagcagcagggtgactacctagctcgcctatgtgggtcgccctagacagtcgtgctggcttcgctagcggtcgcgaccttgatatcgaggagcttgcccgggtaagtgcattcgatcaccctctcttcgttccctttcccaggctcaacacactaatcataggacggacggatgtagctcgccataaccaacaatggcggtggcgcgggcggttgatgcatgaacaaagaccgaaaaataatagactcatctatcctcccgtcggtcaggctcaggctagggctccaaccggtccatggacgtgacggagagactatcgctggaggagctgttccc

SEQ ID NO: 38595 - DNA, 697 bp, Zea Mays
agatggttcacgtgttaagtgttaattgacgtaacaaaccaagtcaatagtacaagcttcgtaaaaatcacactaataagacacttcaacaagccacaatatcactagagtcggtatttgtgaatatcctgtggggatgaccgcaagagcctgtacaatatggtgatcagagtcgacaacaatcaccaacacagttcaacgttctttcgttgtctttaagccgcctaagtggtgacaaccaccaattgtaacaagtatctcgtagcttaatatgattactagtgcttaccagatacaacaactcaatgcaaatcggtagatatcactctcaatcttactttggatgaatcattatcacaaaaattgagtgatagatgttttcttgggattactagggtctatatcaagttgagaagtcggtacccttacaccgaactcgaacatgctctatttataatgtctcgagaagcaactagcatttggtcctttactatgtagaaatctaggtcgtcgaaccgttcgactcctttagtgcaacaacgatcgaactatagtttgtagagcttatcgccctccataaagtgaacatagagcaactagtgacgttaaattagtccaatgtcccgtccttgaaccaaaacacatgatccggcgaccttgttcctaaacatacagaatgtctatcccaacaacctac

SEQ ID NO: 38596 - DNA, 757 bp, Zea Mays
gcgacgtcgcaggaggctgccagcactgacatcacgactgtggcggtgaggtgtcaagaggagcaggtcggcgcagggcagccgaaggaaaaagcggaggcggagatgtcggatttgcaagaggagaggccgcagagcagcgaggtcgtggagacagaaacgggggcccatgagcgcacggacgatggctcaccggccgtcgttggagaagcagcagcaacacctgagggagaagatgagcttgcaaccagcgcggcagaagagaagatcgtcgaggagatccagcgagcagaggcgactgagaactcgaaggcgaacgcgaaccctgaggaaccagaccaagaaaccggcgtgatctccgaagaacccaaggagggaacgagcgtggtctctgaagaaccaaaaccaaaggaggcagctgatcctaccactgcgcagaagcgcgaggaggcgtccgacgagccaaaaacggctgccggatcgaacgcgtcagctccgacgacgccactgacagaagcggccaactacgacggcaacgacgacgtggaggcaacgcctaaacaggtgagcgcttcggagcccgtgacgccggtggcagaaggcatcagcaagggcaaggaagtgatggagacgcagcagcagagcgcgtcggcgccgacgacgccggcgtcgaagcaggcggcgatccccgaggacgcggcgtcggcgctggcgttcagggggcgcagggtgaggacggccatggagaggcggtcgg

SEQ ID NO: 38597 - DNA, 469 bp, Zea Mays
gtggagccgctggacatcgttgccagatccctgcgtcgctcaatcgccggtaaggagtggtcatccgtattcgccatggtccctacttggtttatcctcagcgtatttagggaatcgtgcgtttaggcctggttcgtagtcgcgccggcgagatcccgccgtgtagagcagcgcgccgccgcagttgagtgcggatagggaagacaaccagcccacctttggatggccattggacggctgagattcatctggtgcagtcgctcaacggggaactcaatcttgaccgtcgatcagatttcctaggtgtaggtttcaatcccgtgcaggtgagctcacggctgttgatcgggggatcgagcgtccaccagcatgacccagtttgcgtagcggagatttaatcctagccgtcagacttcgatcgggcggctcatagtgaacgataccccgtcgccgcccctttttgctaaag

SEQ ID NO: 38598 - DNA, 403 bp, Zea Mays
gggagttgcctctgactggggagggagttgaggcttagcaggggaatcctgactgggtggagggggaattctgattgaaatggtgcccatgctgggtgcgacgaatgccgagatagctcccgacaataggaatttcctggcccaatcaaacgaatctggcctcattaaaaggcccatgaagaaagcaacccaaacctttggaacagaaactgagccatcattgtcagggaacaaatcagcccaagaggaggaacgctttctggccaagaaatcttcaaaagcaggatcaaggatggtttgatccaagtgcaacatgaggcccacattgatgttatcatcaatttgcatgtcgtcctatccctcgacattgtttccctccaaatttatgttgtcaggagggaaa

SEQ ID NO: 38599 - DNA, 362 bp, Zea Mays
tgcacggccagcaacaaactctgtatagggcagcaggccagcaacacagcattggttgaattgggggagcaggagggacaacaggaagtcagcaaccatccactacatgcagtacaaagaagggagagaagtggagggagcaggagagaccttcagatgatgtgctcatctcgccactggtttgcagccacagccgctgcaggactccaggagaatgggcagggacgcagggtgctgtgccgctgcccgccggtgtagccgccgcccgccggtgtccaggactgcaggggcagtggcgcagtgcaagagaaggagaggcaggggcggtgcaagagaggagaggagaggacagaggagatgtg

SEQ ID NO: 38600 - DNA, 324 bp, Zea Mays
ggtgcaggttcggtcagaggaggaaggcggggcgtggccatgcgtatcacatccaagagcaacaaatcaaggatcctcttctgctctcctctctggtctccactcgttgcctttggcttggcacgctctggaatctctattgttgtcaagtcgtttctgcttgtgattttcagttatactagataagtgtccgtatgtcgctacaagctacagtttatatatataatccgtagattagtagtgatatatgattttgttagatataccacacctctttccataataatgtaattttattgctgcaactatggtacactatacgta

SEQ ID NO: 38601 - DNA, 283 bp, Zea Mays
caaaaaggccatgcaagtggaagctctctagggaaatatgaaaattccgatttgtgaatttcagccctcacctagaactcgagcgcgttcaccttaatccctaactcaaaaccttaagccctcattgacaaagttgtgctaaattaacccctctgcaatgtgtgtgaagatggcatcgagatttgtgccctagacatgtcaagtcaagggttttagcttggattcacgcagtgagacaaacccgatttgatcaccccatatctttggctccagtcaacaaaat

SEQ ID NO: 38602 - DNA, 387 bp, Zea Mays
ctctttgccactacaccactctttagtcacatgaccatcatgtgcatcctttattcgattatacgacagcaacctaaacgttatgttatacaatacatacatctttcctcgtcgcgagtataaccacattacggcatatacccgcacacctcaatcaaataccttacgccaccaccactataatatacaccacgacacacacgcacatacgtgttcctatattacgcacaagacatcaaccgcactagtgattccaacaggattaatcatacacctcatttgcctcgactatcccaatcatcgatcacatgcataaaacaattacacttttcacatagatgcctatcgatgcattccccaacacataatccgcattttgtaactaat

SEQ ID NO: 38603 - DNA, 428 bp, Zea Mays
ggtaagtatctactcctcgtggtcgtctagtgtagggcatcatttagcacttgccaattcaaagtttagtacattaattccgtgatttgggtggctgttcatggcgccaccgcgctggtgctctgcgccgccgtgcgtctgcggtgaggaggggggaagaagggtacgggccgttagatgagatcggacgacgtaggattgatctgcgggctcggagtaatcagagcccatgattccagatcggacggttgaaaacacacgttagtttataagtgcgagatctaatccacaccgcccgcgcgtgatccaacggccgagatccaagaataccccttcgggtgtgtagttattcaaaagagccctcatagtatttaaaaatagaacccgccgtccgttgtgggattttctaagtcttaggagtatttgca

SEQ ID NO: 38604 - DNA, 392 bp, Zea Mays
gactgttcaaaacatttcagcttacatgcccttgaccacctttctttcttgatgattcgtgagcgatcattttatttcacacattcctgctaatctcgttgttccttataacatccctcggtaatgaacttctttacttcgatcgtcccgatggaaccttacttatcttgtccttgattgttttatccacttcatcactttgcgagtcttgccttaactctgtccttggattatgcttttcatcattatcacctttatccttatcacccgtatatcttaccttgatgtttatcttataccagcctttaaaatatcctcttttccatctcaatctaagcatcgtactttacctacttttcccttgggtgtatcctcttctttgtcacctgcga

SEQ ID NO: 38605 - DNA, 419 bp, Zea Mays
tcctgcctacccttgtgcaaagccgtcaacactaccgcgtgcagggatagatttgggggggaagagcgccgctacggcccggtttcacattctccaccgtcgatgccccgctggcaggcaaagaagcttcgctccatcgtcaggagcgctcctgtaaccttcgctagtgggtgaagtcctcggtgctcgttgaatcgtgcgtcggctccgaccgagttgaaaacttgttttagccgttgcaggcatcggttactgaactccagacatttgttttgaagctctgtcaatgatttttgcaaatttgaacttttctcgacctcagtctcaaattttgcattaaactttctgcttttcctgttcgaagctttctgactttgagagaagctctgaatttaactttgcaattttagcttcatctt

SEQ ID NO: 38606 - DNA, 582 bp, Zea Mays
cctggttgaacgcgacgaagggatgagtcagtccctaatctcagccaccggctagagatcctacggtgcgtttgacatctccctcccccaaccacaaccacggtggtcgccggccatcgcggcggggtcttcaccggcgaccaccaatctgtggcctaggtaatcccaactccaatttgaaaggcgcaaaacgaccaggggatgaagatgaagccagaggaaggaaacttaccatccattataccgcagagccatccacccacgactgggcatggaatcgcggtggagcataaacatcagtgagcaataattcgccccatggtgcaactccaagctcaatcgtgcatgcagtaaggtccacatgccctggcgacgcttcctaccctgcacctgagggcccaacaatggtgaatcagactttttctccccgcggcggacgcatcacgcttttcctctctctgcctctggttgccgatgcagctcggtgctggttttgtgtgcttctagcctttggtcgatgggagggtcacggggctccgtgctttatagcctcgagaccgaaactcgcgcccagagtggttg

SEQ ID NO: 38607 - DNA, 649 bp, Zea Mays
gatcattcttgaacccatatccccgagtattgtctacgctcggtggcgtgatctgctattgctcactctacgccggtatgccctcgacgatcatgtcacctctgaccacgtcgacccctccacgtatcggtaccaattcaacgacatcgttttgtcctggttacttggcaccatctccaatgacttgatggagatcattcacgagccctcgaacatgacgctccaggcatggcttgccatcgagaaccagtttctcggacaacatgaaacccgcatacttcacttggaggcacaatttcacatgttcatgcagggggacctcagcgtcagggactactattgaaagatgaagacaatggccgacgcccttcgagacctcagtcacgatgtctcggatcgtcactcgtcctcaacctccttcgcgggctgagcaaacgcttcgaccatctcaagacgtttgtcaagcgtacagtcccattccccacatttcaagctattcggaacgatcttctcctcgaataacttactctggttggggacaactcagagtcgacatccgtcttctacactcgtcagcaacagtagccgacgaccactcctacgccgacctcgacacccgtgacaaccctgctgcagcagcaacaccccc

SEQ ID NO: 38608 - DNA, 1533 bp, Zea Mays
tttcaatctgcgccgatgcgtcggccgtcgcaggaccctcagtgatacctccttggagcatggtttgctcttcggctcccgcctccgccgaagcatccctctgggtctccgagctatccaggccggcgagatcctccacatcttctttgttcatcgcctacgaagacagcacaacaacatttcaaaacagtgaacacacacaacaccacccgccaaacccataacatacctgcgccagcgctcggtctgccctctcccagacgatgccgcggccgtgagggccccacatcctatcataaagcgcccaacagagcgcttcaggacgtcatcctcaatctggaacacgccacgatcgaagtcctcgttcactcgatcgaagacctcaaaatccctgcacccctctctagacaaaccattcgcggccccttcgcaagtgacgagagacgcatatgacatgagacccgtcacgatagacgggagcgacccccagtaaccttcagcatgcgcgaagaagtttcccggaggtcaggcggagacatcacttcctcgggaaccgcgcacgtctgcattaactcatcaacaaaaatcccgaagggcctcggcccagtcgcgtcgtccccccatacctaatttcctcttctaggtggccacgaccggagccttcccctttgaggtgccttcgtcaacccgaggcttcacttgcttgcctcgatcgtcaccgacgtctgcggagtccccctccaggtaaggaccatacggcaaactattcaattcaaaaacacggttaaacctcacgcggatatcccagcttctcaacatttcagccttcggtgcataatttccgacaattttaatagcctccgactcaacttctcgcacgaaagcggcagcatcccggccacgcaagtatacagcgaaggctgggcttcgcaccagtttattccctagggatggcatccggcgaggtacaatttcgcccaaagcccacccgtgcgccaaaggccacactccgcaagcaacgaattcttccaccagatcacgaccactgctaatacaggccgcgtagcgaaaggcctgctcgtcctgatcccatttcgccaccttgaactgtggaaacacgtcataacaatgggagcacaaaatagcagggggcaaactaggtaacccttcgacgtcgccaggcgccacataaaaccagagataccaccagttaccccacttattcttcgcacatggtacaatctcaaccacttcagccgaagtcttcccggtcctcggcgtgaaggtgcaagaacccaactgagcaatcaagccacctatcttactcttctgccagtgcagacaatatttttttgtgaagacctcaacaggcggctctccaccgtatgagaacacagcccacacatacttcgccagtgcagccattgcgttcggtatcagttgatggatttgcaccccaaacctccgcaaaacctcgactacaaaccaatgtgccggcaaacgaagtctagcggcaaaaaagcctcaaaaaca

SEQ ID NO: 38609 - DNA, 300 bp, Zea Mays
aaagttgcggatccttttattactgggttttatgaatctatggcaaagacaaacacagaaaagatcacaaaggaaataatggcagatttgtctgaagattccgacgacagcgatgattatgatgtggaaagtggagatgaagattctgaggaccggccctggcggccaagccataccatcttcagaaaatctaccattaaacaaagtcatattgacaccatgagaggaagatactttcgcgacatgtctattgtgagggttggaggagacagcaccgcccctgctcctgaggaaaatgaa

SEQ ID NO: 38610 - DNA, 836 bp, Zea Mays
tcttggccggggaagcggagatcggaggttctgccaggcgtacggattgggcgctggagctcctgtttgtttggtgggtttctggctttctgctgtcgggctgtagttttcagatgttcttctctttcgttctcggtgtttctgttgcactttatgatgtgtacagagttctgcatcctagaatggttagattttgaatgggccatccttcgttgaggaacttgtgggaacaatgcttggtttttcatgtcaaaaattacattttgtgtgtgtgtgtgggtaagttttcgatgttttcctctttttgttatttgtaaattgtaatcgaacagtgaggcacttggttccaaataacgctgtggatccggcgtagttttttcgtacttgcttgaaaaaaagtggaggtttcgtacaactgctccctttttatatttcctgtcagaattccatgtatatgtttcttttatttggtgctactgtgataaccttgatgatcttagctcgttttcgttctattaaattatgtgttcagaattgaattttggggaaaagcttccacctttcttctgcctttaaaaggagatggctttttcacacgacggaaagatgaaggtatgaattggtgtgcctattgtttcacttttgttcatatcatggtcatgatctttctgacctttctatcattgttcctcttccttctgttctttccaactaaatcttgaatgcatttgcgtagctgtaattaaatggaacatttcacctaaaaagtgttctgctttgtactatagggctgtcagacaaaccttttccggacaaaggataagaaagtcgtcaag

SEQ ID NO: 38611 - DNA, 473 bp, Zea Mays
ggagcgcaagtctacttctgggacttgttagtttttgggtacttcgttggtttcatggtcttctcgaaaacagtctagtgttgccctgtctaccatagaggccgagtatgttgctgtcactagctgttgttcgcagttactttggatgatggctaccttacgggattttggcttggattttcatcatgtgcctctgctttgtgatagcacgagtgccataagtgttgccaagaattctgtgctacattcgaggaccaagcacattgatgttcactttcttcgtgatcattatgagaaaggcgacaccgaattgcgctatattgataccactcaccagcttgctgacattttgaccaaaccccttgatcaaaaaacttttgttcatttgcgaggggaattgggtgtttgtttcccctttttattagagggctcccttttggtcttttcttcttattttctgctttcactttctt

SEQ ID NO: 38612 - DNA, 361 bp, Zea Mays
cagaaattatatcatcaattcattaccgggtgtacatttgtacacagtacacccatgtccttcactggatccgcccctgtagtgaggataatatctttggagtttcggagggggcgcgctagaaggatggtttccaaaatgaggtattgttctgtacctttgttcagattttaggatttctcccgtaccttatccgcgaagttatattgaaatttatatttatgagcatggctagtgacgaggatgtttacagaatctcttgtacggcagatttcggaatgctctcggttctagaccatttcagtgttgttcgcgtgagaatcatacatatgtccggaagctgttggaccgagtgtcggag

SEQ ID NO: 38613 - DNA, 530 bp, Zea Mays
ggtttcatttcatcagcatggtttgtggttccgggtttgtcatcgctttgcttatacaaattttttttagtgcttcggtggtctgacttacttactgttcttgtcatatgaatagtctgtagaccaacctagcaaacctgtgagatgtttctgctcttttgctgcaggcttggcaccgtaaagaagaaaaaaaaaggagtttggtgaaatcactgccccaggaaaaccttccaggcgcaaaaatcctccatgttgaccgaccagccgtttatttgggcttattcaccactcgtggtcaagactcaataggaaggagggcatatgtgtcttcagaataattcctggaccaccggtagaccgataaaggccctgtactgaccgtgctctcaccatggtggtagctcatgagcaccaatctgtcatttgttctatcaactctgggcaatgattgattggttggttttacttccatgtgtcaagtaaaacccttggattctacgtggcattgaaggcgagagagctaataccag

SEQ ID NO: 38614 - DNA, 331 bp, Zea Mays
ccgaagtctgtatgcaacctacccacatcgttcaagaatagggaacgggccaatgtatcagggtgctaactttcctttgaccccgaatcgactaacacccttcatcggtgatactttcaaatacacatgatcttcgacttgaaaaatccatggtcgacgtcgtttatccgcataattttttggtcgggcttgaacttctctcaagttatgtattacgtgttggaccttttcttctgtttctttaaccaaatcaggcctgaaaaaccacagttctcctggttctgaccaattcagggttcttctgcatcgtcgtgcgtacagagcttcaaac

SEQ ID NO: 38615 - DNA, 289 bp, Zea Mays
cctgattttgacatgctatatcctactgaattcctaaactctattaatgcagcaaatttcccttgccacaaactcgtgctaaaaagaggcatcacagtcatgttgttatgtaacttgaaccagaccgcagggctttgtaatggaacatggatgcttgtaactgaggccggacatcgtgttcttaaatgcgtagtactaacgcccttcggagtcgacgaagaggttttcataccgaggattgcgcttaacactaccgatgtcaaatggcccttcacattgcaaagaagac

SEQ ID NO: 38616 - DNA, 372 bp, Zea Mays
cagaggaggaactagggagggcggggaaacaagcaccaggagcactcgactgatttgtaggagtgggggcagtggcagggcgaatgaaaacaggctgtttgaacggataggagggtggacgaggcaaagaacggttctgattaaaaggtcggattaccaacctggttcgcttctcaggtccctgattggacctatcacctctgaatccccttgattttccttggcctatattcttggcttctactgccagcgctgtgctgacagctctgctgtaagtaagatctaggtaggtggccattttccgttggagctggtcgttgagtcccctcatgaagcaattctttttcttcaggtcagtgttcacttgatcaa

SEQ ID NO: 38617 - DNA, 669 bp, Zea Mays
ctgtcggtcatggtagcatcgtaagtcctattggtacttggaagagcacacaacaaccatgttctgtgcttcgtcgaggaggtcactggagatttgggcgtccgtcgttccttgcctgttgctgaaggcttggacccttggggatccatactccaactctatggggagcatcgcctctacgccaaatgccagcaagaaagacgtgcagtctgttgccctagagggtgaagtacgtaggctccaaaggaaggttggtagctctatcgcccaatatctggtgagcttcttcaacttgtcaaagatccatggattaagccttgaagtattaggatgttagcgcactcaacatggtcattggttcgtgggtgtaccacgatggcccatttgacgcagatatcgaagtcatcacagaaccagaggaagggttcacctgtgaactgagtctcgttatcggttatgatggagttggggacaccgaaactatagacgatgtcgtggaagaatgtggcggcctccgatgacttgagcttagcgatcggttttgcgtatatccacttggtgaggcccccacgacgagcaaatgggtgaagcccctaagcgccttcttaaggggcccaaccaggtccagtccccagaccacgaagggctaggtgatgggtatggtttgta

SEQ ID NO: 38618 - DNA, 378 bp, Zea Mays
ctcgcagacagtccgtcgaacggcaggacttcatccgaaaggaggtccggaagctgctagacgccggcttcatcgaagaggttcatcacccagtgtggctggccaacccagtcatcatacccaagtcgaatgggaagcttcggatgtgcatcgactacaccagccttaataaggcttgtcccaaggacccgtatccacttccacgaatagatcaaatcgtggattctacctccaggtgcgaccttttgtctttcttagatgcttactctggtttccatcaaatccagatgtctagggaagatatgaagcataccgcttttgtaatagtggatgagctttactgctacgtcgtaatgtcttacggtctgaagaacgcct

SEQ ID NO: 38619 - DNA, 753 bp, Zea Mays
aggtccacctgggagaacaaatggaatggggcatcaaggtggagggagtgggcctcctggttaccaaggaactgggccttgagtggaaaatgggcatgaccactgccctaagggtcttgcatgtgcagattaggaggacgaggcccttgcggccatgcacgctgggcgaagagatgaatcctaatggtgcaggcgccatggggagaactacagatggttctagggttgccgatgatgttggggagggaagcatagggttgtagagacccaatgtggctgaccaactatagcaggcgaggttggcgagtacagcgaatgtcggtggaccgttcgcaggtactagaggtggcatgttcatggagcatttgtggagcattggcaggggtgagtggaggaaacccgatcacatgcaccaggcaagttatgctggtggagcaagagtagatagaaggcatgacgagcacgggatgaccatccactaagatgacgaatgcattggcgagtgtcgaagaagagagtaggcaagaagacggtcatgccatcagtgatggctagatgggtgatgacgtttgcaccatgtaggggaaggggtgacctagtcaatggcaggatgacatgtgccccgcgtgcagagaagagatctagccagcaacggccatgtgcgccacgtgcggggggagcagacatgggtagcacgcctttgggaagataggtcatcgccatgaaggcattcatttggggaggggtggccag

SEQ ID NO: 38620 - DNA, 604 bp, Zea Mays
ccatattctatgaaaaggctcaaaccaagtcgctccgatgaagagagcatcatatactgcctttgctgagtacatcccattagcagctaaacggaagaaatgtgtcttctacttagtccttaaccgaagcaaccaagtcccacaaacaaagaaattcagagataattccaaaagtaaggcctccttgtatgtccgagatccaactctgattagtgagagcttccaccactgtcctcttattcactcttctttttggaacgatcttgtataatcgaggggcaaggtccaatattctgtgtccctgcaaccatcaatcagaccagaataaggtagtggcaccatttcctatttcagattgcatagccaccgagaagagatcctttactttcttgggtacatggatatcaaaagaagcccatgtcgttgtggctccgttttgctgacacctctatgactaaaggctacaatgcctaacctttggggccccatgccctccaccactggacacaccagaatctgtggaagtatatcaggtaggggctcttcgttcctcccatcagctttcaaaaaaagttctcctgttctttatggtctacagtcctgg

SEQ ID NO: 38621 - DNA, 469 bp, Zea Mays
cacggcggtgtttcgactgatttgggggaacttcgaaattggcgcgctctggtggacaatctaaggcacaggcggttgagttggatgcgtgactacctagtggagctcactgggacaacaatttataagtttcatcggcggtgacgtccaattttgaggtggcgtgctggcggccggagagaaggacgagtcaccggagccgcataacgtggcatttaccagggcagtgtctcaggcgatgaacaaactatctaaagcggtctactacgacgtgataaggctttgaggcacgcaaccgggccggataacggcgaacttcggtgatgccagtgtaatcaaccgcggcgggacacgacggccggtgagaacagtggccagaggttatctacaatgcgatatttcttacccattctttgttatccatcagcgcctgacacgaatcaccgcggcggcacgaatccgaacgcac

SEQ ID NO: 38622 - DNA, 379 bp, Zea Mays
atccttaccaactagtgaataagtgttgcgtgtcccggcctagatgggtgatgcaagaagacacaaggtttatcttggttcgggcagtagaaggccctacttccagtagaggaggatgagactcatattatctttcacctaagtgcttgtagtaggggatacaagctagtcgagagagggagtggacccaagtctctgaggatgattgcggcaggtgccaatattggtcgaggagggcaaaacctgtgaagtgtggttctccccctcctggatgccctgcacttcttttatagccttaaggagggacctcaggagcaccaaggtttgttgaaatgaggagaggaggcgagaccgagcccctatagcagcatgaccgtcg

SEQ ID NO: 38623 - DNA, 365 bp, Zea Mays
taccggcaagaaatgagctgtcttggtcaacctatccacaatgaccgagatagaatcatggtgtcgggaggtattgggcaatcccacaatgaagtccatgcaaatatcctcccatttccaagatggtatgggaaggggttgtaaagtgcctgctaccttcaaatgactggccttgactctctggcaggtgttgcattcaaatatatacttagcaatttccctcttcattctggtccaccagtacaaagatctgagatcatgatacatctttttactgccggggtgcatggagaatttggaaaggtgagcttcatccaatatcttctttctgagctcggggcccttgggaacaaccaatcggtctc

SEQ ID NO: 38624 - DNA, 300 bp, Zea Mays
gccagcaacctcgtcgtgtatggctgtttcggtgccgtgtactccggatgtggcagctatggctgctgttccagaagcaactatggggctaaccgagtcaggcaggagcaaaagaagaaacaggagcgggaatggggacagcatgcaaagagcttcaaagttgaaggctgctcgcaatttagatgcggtcctctctacaggtaattccatacgcagcctaccttatgttcttattcctgatgaagtagtgcagcggttaacttctttaggttttgtttgtgggaataatgataaatcttg

SEQ ID NO: 38625 - DNA, 332 bp, Zea Mays
ctgacaacagggtggactgtgggttggatactcaattttgcagggtctctttaacaattttgacatggcgaaggggtacgcgttgcttacagccgtcagatcggatccgagggccgcgattagatcccgcgcatcgctcaacctctcacacccgtgaccgcccgatcaacatctaacggccacgatttaaaagaacccagatctaatttgatgcacatgatacaggatcgacggctcgaatcttaaaacttgaaccggtatctgtgttctgatccgagacgttggtttgagatcggacggtgcccgatcgatgaccgccctaactctctctc

SEQ ID NO: 38626 - DNA, 766 bp, Zea Mays
tttggacctaaaattgctctgtcaggttcatctaactgaacttcctccatggtacagtgctatcgggaggatcagatcgccagcgcaacggtcctcaccgccggtgacctgccgccgcgattcgtgctgctgttgccgcgatttgggcttggctaagttggatagcactttgggtcacataaatatcctcgccgtggataactccggccataaacaagtccggccaccgtaccgtgtatgccgcggtggaaagttcgatgggctcgccggtaaaccgtcgtcgcacggccttatgccacgtatccgagcaccccgtcgtatcatcgtgactccttactgctgtctcatcaacgccggtgaggttgccacggcgggggacacgaagtcgcgacgacagtgctcttccttatctccggccacccgcacggcccggccaaattaagcgccaccgacgaagcttcctataaattgatggctcgggctacgacgctaagtcatcccgaagctatagcacccgctcccaccctcgatcatccaccagcacgcgcgaatttccagttctccccaaaccagtctccgccgccgtgaaacccaccccaccgtggccgaaccgctctggtaaggctctgcccaaatcaaatgttgtttccgcaactccgtacgcttgtgatgctcaccgtggcgcccgattactcaatccggccctggttgagcgggaacgcgtgcccgtggtcacggtttccgtcgtgcacatggaaaggccgtt

SEQ ID NO: 38627 - DNA, 365 bp, Zea Mays
gccagatcaagcattggaggctctggtatagccgaagaagcaggcaatagagaattaccaacggatgttggagagaggccttcagagaccgcaggagatcccgctgctggtactgcatcgggtgcatcagtgagagcagattgctcaggatcaacagaggaaccgacatgggcaacttcctcggcaggatgatccggtgcagagggtaggagtagtgccttgtgtgcatgctcctgtacaccaagaccagagctttctgggaagcaagcagtacgtcgagagaagtcatgtacatcagaaaattcctgcacaggacaatcttcacgcaacagattagtagacttaggcattaaggacaaatctac

SEQ ID NO: 38628 - DNA, 313 bp, Zea Mays
cccaggtgttaccaagggctggcttcctaatgacacatatgcctatgatcacatgtggttaagacttggaggagagggagcacttaagaccttggaaacatgagtgatttaagaaatgctaagggccaaagcattacccaagcttttaggcaatatcaccttgggcaaggtaggattgaaccttgggtcctctctcttaaagcctttagttgagagaaagatcaagcaaatgcacatttcataatttaaaccttaaccaaagtgttagagtaccaaaatgtttacaaaagacagtaaaggaactttaccaaaa

SEQ ID NO: 38629 - DNA, 461 bp, Zea Mays
gcgaaacacgatataaatagggaaacacaataagtcagacaaggaaacatcaatcatgcatgcaacatatcctaattaaggaatataatcatgcatgccctacaaaaaggaaacacagaataaaaaaacacaataatcacgcaaagggaatgtgcatgcaccccttagctgtgacaaaggggcttcaagaggaaaacaacatcatgcattagcatgggtgggcgggccagtcgtgaaatagtagatttgtttgccagtgataaaaatggagcttaaaaaggccatgtgtagaactgctatcatttcgcctctacgcctatttttttatctagactgtggccacaactataggaacagtcatggaatgaaatgatcttccacaccagcacttatcatttaaactgaaaattctatgcaactatactcaatacatttcagccacaatctacaaagagaactgt

SEQ ID NO: 38630 - DNA, 284 bp, Zea Mays
atatactgaaatctttatccagttcaggcatggtcggaatgttcaaacggcagagagcaaaatcgaccatgaccaccgcgcgcacatggctgcaacatcacagcacatggttacaccaccacttccaagtcccaaccacacaacacatcacaattcatgttgcagtcccacactgcccgacttctacagtactactacagctgtgtcgctctatgtttttataggctgtggatcgtcaaaaatccacgcagaaacgcctgacccacatggtttctccatgactt

SEQ ID NO: 38631 - DNA, 604 bp, Zea Mays
gcataacatcacaagccagcagcaaccaggagagaacccccctcatcgttagggatacccccgcaacaaggctgtggtggcaatgcgacttggtgcagaggcagaggccgaggccctcaccagccaataaaattctactgtgtcttacatggaaaagactcaatgcacccaaccaaggattgccctgagaccaaggcgacaaaggaccgaatggctagggctgccccggtagacaaccaaagggtcatcgcccatacctatcaaccgcaacagtaccaccagcatcaataccaaaacgagcacccatactaccccagtagataaaccccaatctctttccacagcaacaacgccttcaacaccaagacaggttagccctgccaccaccaccacaacaacatccaaatcaacacctaccacccccaccaccaaagaaagaagacttcgccaatccacccttctggggagtgattcacatgatcaccggagagtccagcttggatttcaagaaaaaacgacataaagggatcactaccaaagggtcaaccatgtcgtcgtcacatgccctgtcgctcagacgaagtggtctcatgtaccattaacc

SEQ ID NO: 38632 - DNA, 311 bp, Zea Mays
tgaacatcgacggccccacaagtgtccacacgccacatcacgtgaaccttgtggaggcaaaggtgttcgcctcattcgacgtggctgggcaccgggactcacggcgatgggtcctggacactggcgccacgaaccatatgatcggatgtcgtggtgtcttctccgacctcgacaagaacatcgccggcacggtgcgcttcggagacggatccatcgtcaacatcgaaggccggggcaccatcctcttcgcctgcaagaacggggagcatcacaccctcgcaaatgcatattacattcccctcctcactacg

SEQ ID NO: 38633 - DNA, 493 bp, Zea Mays
gaagcccgtttggcctttacagccctaatttggtcggaacatgggtttgacaccacatgaactgccctgatatcaactcgctcaaaaacttagttggtccgatgtcaatttctgtgagcaccacgttgtccgtgtattactcgtgctccccatgcccttaatttgaagcatcacgtgcttaaaccagttgggcaagcgccgcggtaccgagatcccgtcatgggcgcggtcatgtccctctcggagtttaggagacaaattaatgcccatagctgctcggatcaggttaggatttgatctggccgctgtctaaatgactgctcgggtctcctccgctgtggggtcgcgggagaacgcgtccgtgccgccggcgatgtcggggattcaattttaaaagacaagaagtttaggaggggtcggaagtaaagtgtcagtgactcgtgggattgggttatggacttcgttcctaattttggctctggcgggggctttt

SEQ ID NO: 38634 - DNA, 334 bp, Zea Mays
cgtaggtagccgtcgctccacctcttgattccggtaggataccctaccgtaacgtccacgaacatagtcaccgatggccggctgatgcaagggccgtctatggtccagccccgtctagcaacggcggaacgttacggcagaggagccgttcgtctcctgattccttcgaaaatggcaatggcatttcccctgacaaattctctcctgcctttcttcttgccgttgcgaggcacccttggcctccgcgtccacaatccaaagtgtggctgaatccgttggtgtggttgtggcatgcgcctccttcttcccccaaattccacagatcatcattgtc

SEQ ID NO: 38635 - DNA, 327 bp, Zea Mays
ataggactggccgtaggtcgcagccctgaccttaaaagttgccttaaaactaaatacctcttaccctaagaaaaatcttctctcctttccctcgatattaacagacccttcttttcctattccagatggaagactctctggtcattaggacatcctactgctcagaggtggaggggttcccacatctgttgcgaagttgtgcgcttcgcatggggatccacaagaagccagaatatgtctggaaggaatatctcgagaatggaatggagaagtgctctatggcagtctacctgggagagagccgaaactacccgaaccacccgtctt

SEQ ID NO: 38636 - DNA, 337 bp, Zea Mays
cgccaggagcatgctcaaggccagcggcctccctggcacgttttggggggaggcggtctccaccgccgtctacctgctgaacaggacaatgacgaagggaaatggcggtaagacgccatatgagttgtggcatgggaggacgccagcggtccatcacctgcgcaccttcggttgtgtggctcatgtcaagagcacaggccccaggatcaagaagctggacgaccgaagcaagccgatgatttttgtcgggtatgaacctggcacgaaggcataccgggtgtacgacccgacttctcgccgtgtacacctgagtcgggacattgtttttgacgaggag

SEQ ID NO: 38637 - DNA, 443 bp, Zea Mays
tgatgctgcgcggatatctgctgctgggccgctttccccgcgtcatctccaggcccagggatacagtatcccgtctcgcgcgatggaacggcccctggttgcgcgttcttcttggattgggtggagcccgggggtgtcgccgctctctcctcttttgctcctccccacgcgtgagtcgtctccttcgctgccttctccgccagaaaacccttctcccaggttagggtttcctctggatttcgttggttcgtactcttttcctcattgcgacgccttcctctcgcacctctggtcgctcccggtttcggtgaggtctagttttggcgggggctggtgcgtctcgtcctttcgtccgccggtggttgaggaggagtggcctcgtctgggttctggcgattttcgaagcccctcgaaaatctctgctatggatccgaaaggcaaga

SEQ ID NO: 38638 - DNA, 495 bp, Zea Mays
aaaaaaaatagaagaaagataacacggtagtagttaccagtctgtcggcaattaacacacgtcaggaaaggtgaccgatccatttctgtcggaatcggaacagaaagcatggcagttgcatgagcactactgaaccttgcttaaggtttgatgctgccgagactgaaagacaccactcaacaccatgctcaacgtgcgcccgggactcgagtggaaggtccactgattccgttcccgccaatgtttgtttcctctggatcgcttccacacttgtagcaaataatcttcctgagaattgcagttaccactaaccgagttcgagtagattactggttgatgagaaagatcaaatccaccactggcatcagggatcctcctgctggcggcggcaagtttggtttcgctttgccttttcatgcctgatggcagttcgttaatgcactacatgtaagcagatttgttgcctttcaccagaaagtaccaccccgacaaacg

SEQ ID NO: 38639 - DNA, 311 bp, Zea Mays
ccaccaccaatgtttcagcaggagcggcatcagaggaatcctcagctaacatatcaagcatggcacttatctctacatcacttggatcaaaggcacctcaaaatgaacatgcctctcgtcgtcaaaaatttctccgagcgaggcaaccaaagcactaacttcttcaggagagggtcacactctaagacccaaaccgctatcaccagcaggaggatttgacacaaaattattaaaagcctgggaaggaggcaaattctaggccgagtatgcaataggggcgccgatgttcgataccttgcctctgagtatca

SEQ ID NO: 38640 - DNA, 304 bp, Zea Mays
aataaggtctgttatatagtggatgacatcacaaggcatgtagcgtgcacactggttataagatattgtattaacaatcatcgtacgaagaaagtaggcacaggccttgcgatcctagaacgcaggttccatggaagtgacattccagatgattattgtagggtagaagtgacgatagtcgtccaaggatccgaggaggacatgctaaacatccctgggctcagaggtatcgagacacttagacaagccatcaagaatttcatcctctaggctcgaagtgatgtcgaattggttgatccatcac

SEQ ID NO: 38641 - DNA, 418 bp, Zea Mays
gagattgatttcacagtgttgttcctccagtggttgctagcgcaactggagcacgtttgctttggtgcacacagaggtgaggaatcggttgtcgcatctgaatctccataagcttgtgtatgtgaaagttgcctagagggggtggataggtcgaacctgaaaattataaactttgaacatgaacttcactggggttaggattagaaatgagaaataacgaaatcgaagtgcggaagagagttcttcttattatgagttgctttgttaatgcgtataacttcgggggctaactcaaaaggattgtaagcattagaacatattgaaatactcctcaacactatgtggtggattttgcactgtccaaccacccaaatggtaccgctgacctcgataaggtgctagaaatccattggcgttt

SEQ ID NO: 38642 - DNA, 697 bp, Zea Mays
cttttcgtgaacacaaagaagaaatgcatgccaattgattaggaaatataatttgttggagctaactttaagttttcataagtttcatttaaacccgaccgtccagtttagggaagaacattcagaggtggcttatgtgaatagcaataaaataccacccaaagcaggaagagcagtgtccttgggcgcgtaggagaacggagaacatgaattaacacaagctagacaacatatatttgtgtagtttaggctttcctttcaaaggcaatgtttagtacggtaattgaaggtgagacattcgaaatgtagacaggaataaagatgaaggggaatagatggtgagaaaatttagacacaccttagtaccttactgtagccgaggaccaactccatgagcagctctatttggtcttctcgcatctcccccgacaaaataatatttttaaaaaatatatagaaaagataatcaacattttttgtcatgcaacagaagaagaatggaggtgaacagttaagtgattagcagcgaagacgactctgaaaagggatctaccggcgatgtcgtcgcatcctgatcactcaatcattgggataaacaccccctggcagactatttttaatccccaaaaatcgctcgagcagcagcgacgaactcaccaactcggcgaggttgtggttgtccatggcctctttccgc

SEQ ID NO: 38643 - DNA, 839 bp, Zea Mays
gccgctttgtgcatcggtcggggctgcgtctcttgtcgtggaaagaagacctggagcatcgccgtgatgcggggatgatgtgtgtgcccccacctggcggaatcagcggctatggcgtgcgaatttcctcgccgacgttgatactccgccatggatggcacttcaccgtggtcaggtgctccccacgtcgctacaaccagtaagacttccttctttatgctcgcaaacatcaaagcttcgtgtagctccattcgatttggggtttggggctctggctcgtttggggggggaaccacaatcatggcgccgtcgtgcccgtgagcgcgccgtcgctcctcggccgtgggtggaagataggctccctgtcgttcgatcgtgaacggacggtggagattagtcatgggaatacctattggggggggataaaccagagctgtagatctagatccaacggctgtggacctatatcggtttccaagccgtcccgatgtgatctgggccctccatctctaatcgggcggtcccagatcgcgtaccccttcgtcgtctaatctggtccctggatccaggatcgaacggctcaggtttgatcataccccttcgccttgacatttattctaaagacccccttagcttttctcaaatcaacccgccacccgagtcagtgttaagatcattacagagaagacctcggatttacaaaatgaaccccgaactcctgttaaattgtgcctgcagtacacttattcgctggaattaataaaatagacctagaaaatgatttcttgtgtaaaggaaatactaaatgcttacaaaattcataacttctacgttttaac

SEQ ID NO: 38644 - DNA, 438 bp, Zea Mays
cgagaccaggcgagtgtatgagcctcctcaggcttgctactacatcactcgcatttatgtcagggtgatggatgcatgtgatagagggttcaggactatgtcagcacatgagtctctgacgccgctatccacctacactgctttggtcagcaacgctgctaggccaactctgtggtctctcagccacacctaccggtagcagctgcacaataagaagtacatgcatcttcctctacgtatttgtggagagaaccagactagcattgttccaggtggagcaaatgaagatcgcctcaacaccttagctggtgtggtggcaggtcttaacaccaacctggatagtgctaccctggacctctctagggtaaacttggagctggaggatgcacatgcgaggatcacagctttggaagcccagcttgatggaaggaatccccc

SEQ ID NO: 38645 - DNA, 1623 bp, Zea Mays
gggcatgtatgatagtttctagaaatatgatccatatgttctatgactatattgatatattctgttgctaataaacatcatgtgtcatcgtgtcatgaaaatacaatttaatagatcttctggtgtaggtatatttagcaatggaagctggttatatggagaaggttgacgagctttgcaagcgatactctattgaaggttatgttgattctttgggtaagccagctagaaatttaattattcaacattaagttacagaggcatattcagttgatcagtagccgtttcttatagtggtaatagtagcttatgttgtagccttatatgactacacatttatgcttggattatgttttaaaaaacactcaacttaagtttcattcggattgtgtaatgtccactacagcgataaagtttatgactttctggtggaagtggaacttcaaaagctgcgatgtctaatgaaaaaagtgttatgaagatgtgtattacaagcctctcaattctcaaaagggcatttaaacagttcatgggagattggactatttggcatccaattcacaagacattcaaaacaaaacacaattggttcacacgagcctaagggctctaagactgatgttttgtgctactgctgcatagatgatttggcagcagaaacctggcttacagaatcttgcgaaattgctaactagttgcaaaattgtttatgtaaacatttaggaaccaaacattcaccaacactggaagacgagaaaatatgacaacttgggtggatacaaagttagccaaatgttataaaaataattttttttttgtcatagacggtagtttttgaggtcttttttacccatcacaggtgaacattgatctctaaaacacttatctttgtgtgttgtacttggggatcttttctctttgtgttgtacttggggatcttttctctttcttctttaatgtaatgatatacaactatcctgtgtgttttgagaaaacatgtttgaattttactcattctagtttagttttggacaatacatgctgatgaatcgcatcagaattctcttgtttatggatgagcgacatgacatgaggtgaaaattgagccatgaaatcagttgatctaggcatctagcatttcaatttgaacttgcgtatcgtgttcttgatgccatcccattttgcagtccgaccctaatttatttgaacagttaggaacaatatatatttttaaaaaggttcacatcatttgctaccttttctgtattgattacatttctattcttgatgcacttatataccatgtacaagcagttccggagaaggttttctgtgtatctgactacttagatctgaagaaattggatgtggaagaaattgtctgggttgatgagatcaatgggctgcttaatgcaacaagtgatattgaagcttgtaaaattattggcatggattgtgagtggagacctaatttcgagaaaaatactaaatctagtaaggtaacaccttggtttgtcttggtataagtttcaatgtctttttaattttctggctaaaactgtaatagtggcatggttgcatcggcctatgggcgaataaaaaatgacagttttgtcagaaaac

SEQ ID NO: 38646 - DNA, 392 bp, Zea Mays
gaagatgaagtccctttgactgggaagaacagtcggcaatatgtagctagtggggaaagtagtggagttccttctcctgctctgtctgcccttattggtctacaagaaaagtctctggcgaactttgatcagactcttgaagatatggttccagaggatctattatcagagccagcggatggtgacgcgatggatgtttgtgctgatgtgttcgacgccgggttgggatcgtcccgggcagcatcccgtgcctcatcgaccttggagcgcggtcttgagggtcaggaagctgacttgaatcgtcttgctcccatggaagtagctgagggaccttcagccttagaggtggctaccgtagagaacttgggcctcgaggatggtgttgacaatta

SEQ ID NO: 38647 - DNA, 449 bp, Zea Mays
cttccaaaaccgggtgtgacatcatgtccagtccccagcacgcaaatggccatgttacgggtatggtctgcagttgctgcactggtaaatgttgctgctttgataagtattggcaagcttcacacctctggactaactcggctgcatcactctttgctgttggccagtagaaaccagacctgaagaccttcccaaccagagtcctggatgctgcgtgtatcccgcattgtccggcgtggatctcatctagtagttgcttcccagtatctgaaagaatgcacttcatgaggactcccgttgcgccccttctgtacagtgcttccccaatgagagtgtagtgagctgactgacttgcgatgcgttctgctgcagttttgtcatatggctcctcttcattctttatatacctgatgattggctccctctagtcatcagaatctggctctggc

SEQ ID NO: 38648 - DNA, 766 bp, Zea Mays
ccattatctctactatctattaagtcaatagtgtaaaccacggcactaccatgacttcaccctccccagaccccaccggcagatatgcggcccgtcgcggcctctattggccattccggtctcgaggcccaagcatggcggcattacatcagaggctcaagcccaacacaactagcttcagttcggtacacctggtagctcgatagtccgataataattagcaacaatgacatacatgtagaagcgacagttgagtttaagtgcagaaacaacccagtcccagcagtgtgtagctggcggcaagtctcctgagcagcgcaatggatttttattgcctctcacttaccaatacagttgtagtatctgttcatgtatgcacacactcacaccaaaacgcacaccaactctctcctaccgtacacaagcagaccatgactccaccctcccctaggcccacgcacgctcgccaacactcgtgtcacctcccgcaccctccgcacgacacgccctagccagcctctcgcttatcgcattcgcgtcgattggctctcgcaacgaactgcctccgcccgcaaaccatgaccttcgcgccagtcgtcagttttacgccatccgcaacctctatgccatgtcagtcatcgtgtcccacccgcccactccacaacatactcccgcccgcttctccactcgcaccaaaacgcacaccaactcacctctaccgtacacaagcaaaccatgactccacccccaggcccgtgcacgctcg

SEQ ID NO: 38649 - DNA, 361 bp, Zea Mays
tcacagtgcattgggtaccaagctttcgcttagtgtcacgtttcaccctcagactgatggtcagtcggagcgaacgatccaaaccttggaagatatgttgcgtgcttgtgttctgtcatggaagggcagctgggaggatcatcttgcattggcggagtttgcttataacaacagctaccaggctagcatcaagatggcaccatttgaggctttatatggcaggcggtgtatctccccctgtgctgggagaccttgggagagagatccctggttggtcctgattgggttcagtagacttctgagaaggttcgggaaattcgacataatattttggtcactcagagccgccagaagagttatg

SEQ ID NO: 38650 - DNA, 480 bp, Zea Mays
tgagtcttcgatattaagggtgaaaacgggccaaatacatacaaatagtaggtcatcatgtatcctacattgattcgcatacccaaaagaacgtaacagtacgccataccgggatgtatgtctacacatgccaggggagacgtaggcccatgacgacaggcagaaccacgccacacatgacctctctatggaatggacccaagggaccccctcgcactactatggaggtgtcagcaacagactagctacaaaaggccgagtgacaaacaagcgagatgatacgccataccaagagtatgagtacgcacgaacctacggaggacctaccatgacaacccccagggggttcaatctctctctctctctagtagaaaacaaacctcctttgtaatttcctacccttgagatataaaaggacagggccccttccttcttcacacataagaacacctattgtaacacgccacaaagcaataccac

SEQ ID NO: 38651 - DNA, 619 bp, Zea Mays
agtcattctgctacaatttcaaccattccattacaatcttagtcattcatttatttagttattatgttacattttgtgtcgacccattatagttttcatttttattatcgttacaattttagtcattttatcattctcatcatccactctttagccattatgttacagtttcaatcgttctgttacagtttcagtcattttgttatagtttcagttattccgttattgttacagtttcagtggaccataggggcgctaggattagcacgtggtgggtggttggagcgtacagactgatccgatgcggcgggtagcatgcgggggaagggggttaatcgtggtgtgggagatggtgtgtcggccaggccagttgcacgcggggtgcgagtggcgtgccggaccggttgttggttgatgcgggtgatggaccatgatagaccttcgatatattcatcgccctaggtaatgatcatccaccttatgttaagccattcatgatttttactaagctatttcagggtggtgatcatcacctctggtgacgattagtgttgctctatatatatttgggtgatgaataacaacgttgtatataattatttcgtgggttttttaaatc

SEQ ID NO: 38652 - DNA, 300 bp, Zea Mays
gcatctggctgttgttggattcgggatcttgctggtgagtttgctgggtgtggaacgtgcctgatgtggccacgcaggtgacgggcttgctggtggagtgctccttgccgctaccgtcgcctgtaggcttggcgaggattgacactgacaaacgactgaaggcggcagccactttggtctcactatccaactcgagatcgacgtcgacgaccagccgtttcttgcctctcgtcggagtcgccatcggagaagaggaggaacgagagagattggcggtgccgtgggacgagtggacttagg

SEQ ID NO: 38653 - DNA, 360 bp, Zea Mays
ctcttcggaagaatatgcacccaccttggcaaagctggttttcaattttcttacacaatccaaggatttctcaaagcatctctccttgaattcacgaagctcctcaacattcttctccagcctagcatttgaccattcgcttatctcttgctttacccttgcaacttcaaaattttcattagcctcggcaagtttttttaaggccttcaacttcagctttatgagcttcagattgagcattaaattttgcttcgtcttttttcactctgtccaccagtgaaaacagaattttatctttttctaaggcttcatttcaaagcttgataacctctgaccgaaggttgccgagggctatctggc

SEQ ID NO: 38654 - DNA, 499 bp, Zea Mays
ccgcggtggtcgctcttctggccaagggcagttcgcggggcgctatgggtacaggaggccgctcggttctttcaatggccatcgtggcggcttcgatcaggctgggagaggccggtccaattccaatctggttggttttgctgctggttcgcgtggtcgcttttctggaactggaacttcatcgcatctgggggggcagtatctggggtggcaggggcctcaatcagccggtctccttgccatcagtttcggatgcgcagaatttggctggggtagctgctccctccactgaccttttggctcaagcagtggcgctgttgagccaggctattaacccaccgacgcctcagagttcctcggctgctgcttccgtggtgcctggtcagtcacatttttcttgggaagataaaggaaaaggagtgtcggatgagcatcttgtagccaagcctcctgggacagtgaaaccagcagcgaaggagggcaaggcaccatactgcta

SEQ ID NO: 38655 - DNA, 446 bp, Zea Mays
aggttttccatgtcgtgacatggcgtgatggtctagatgccaatctttgatggtttgttcttctattgtctccccatgtggaatgtctttcaccattagccatgtgttgaaccgatgcttgtgttgcttcattgcccaatcatacatatgcccaggattttgctcacgaagctcattcatatgttgttggataaatggctccattatcgatagctgatgtaggatgctatgatgtgcctctagtactgtattgtaatctggtgggatgaaagatttttgtgccatcctccctcttccatacaatctaacctcgtgtcgtgacataggcaaatctattgcaacttggtcttttaggattctattgtagaatggatctctagactcaatggcctcttcggtacagtacccctctatcatggatgcctcaggacgagcacgggttgatg

SEQ ID NO: 38656 - DNA, 509 bp, Zea Mays
atgcactccttacccggatcgttggcggcgaggtaatttcgatcgctccggtccctccccatgctccaatgtgtcgggaacacgtttgaggtactccagcaaccactcgggcgccctccaatatccctacgacaaggcgattttgggtttggtgacttctctctcccttcctctctctctctctctacgttcgccactgggttgagttcctcggctcatggctggcagcaactctagcggttatggcgacagttgcaaaccgtaacaaccctaggtggaagacggttctagcaccatggccccacatgccagtgattctagtgtgtgcatgtgaaatcttgtggtgcggctaacatcgcggcccatcagtagcggtgtgcgcgcgtgaagatgacgtctggtgaaatgggagactgacgagtgggcatgtggtgtcggtgactggtctcgagggcgtggacggcttcagcggctcgacgtttgcccagcgaggcccacttgtcggcaca

SEQ ID NO: 38657 - DNA, 436 bp, Zea Mays
cgattagttaaaaatatattaacttttgcgttagacatctgaattaatatgtttctattgagttagcttcgtaataatatcatgcacacattaaacatattatcttgtcataacgtatgtttgttttacttaattgtaagttggtctgttggttattaacatagcaatttagttaaaactattttatggttttaagttacgcttttataaatatatgttaaaatgattaataccaactcaaataagtactaatttaattattaccaacttaaacgtttggattcgatactggtttagtataaatatgtcatctatttagtttttctcgcctgtcgcgcgtgcggttccgcactcggtggcgtgctgtttcgcgcatcgttctctctagtcgcgcgtactgtctcgtgcgttgttttgcgcagtgtcgcgcgtcctc

SEQ ID NO: 38658 - DNA, 308 bp, Zea Mays
gtgctgctgcgcactgattgattgtgcaggggatatcgacggaccgtgtgctggacgtgcggaggctgctggggtcgaacgtggaaacgtgccacctgacaaactattcactctcccatgtggtaataatgctcgcctctcgcactctcgttccctcaactgcctacagtactagcagcaggcacggctaattctctggctgcgcggtatggtcgtgttgcaattgcattgcaggcgcgcgggcaccggctggaggacggcgtggaggtcgtggcgctcaagccctgcgctctccggatcgtcgaagg

SEQ ID NO: 38659 - DNA, 505 bp, Zea Mays
aagcatcaagcaaccatgtcgtctaaccatatattcctagaaacatcccaacaccagtcaggcacctgcattcccctgctccacacggaattacacaactgtttcatcctgttttgcaacagttttagccatctagcaacataactcccgatgcagagcagaaatcctagcaataataggctcaatccccccataaaaacaatagctacccagcctcagtaaaaatcgcaacaacaagcaaagagaagcgagaccccgatcagccataccgcgtcctcgcgctcgatccgctcggcgggcgcgtcgttctgttgatccttcccctttccggccccaacgcgcagcgggaggtcgtcgtcggactcgtcgagcgcgtaccgcggccgcctctccgaccgcacgcgcagccgctcgacaaggctgctcatcgtcgcgtagagctcgctctaggcagtaggggatggaaacccaacgagcgagcgagcagcgctaccctcgctacctc

SEQ ID NO: 38660 - DNA, 309 bp, Zea Mays
tgccttggctttagtaatttcgttttgcttttggattgtgacctggcacgtcctcgttgtgtatcccttgtcctcgccacagaaaaggcagaacaatttcctcggctgattatcgtaccttcctccactgaagcttctccttcctctgcctctcagagctggtggtctataagaagtttgctgcatgcctaaagactgtgagctgtgatgacttctctgagcattgttggccctttcgtctttggcattgggattgtggattgtattgacatgcctgggatgaagtcttcctctgagtcccctagtaat

SEQ ID NO: 38661 - DNA, 312 bp, Zea Mays
ccgagctggcaggcatgacagactttggtggacgaggcacactaattacatgttatggatgatgagctaattaaatgcgaaagagactcatgaccaatgtatctgaggcgacaatgccacaactgaggagaggcttcgacgagcagggaactggcaggagcggcgggaggtgtcggtaggtttaatgggtagagaggtccagagctattgcacctggcaatcaaactccgagtcttgagatccttcacagagaaaccaaaagggtcaaactctacggaacaatggttgtctatggtaaattgacgaatagaa

SEQ ID NO: 38662 - DNA, 311 bp, Zea Mays
gcattacgttttaacacagaatcaaccaactttagcttgtttgaactctcaaatcacacagccagaaaagtttctcggtggaatatatcatgatcctcagttaaacatcaaccaacaacagtatctgctatcagagctacacttgcaacccctgattcctggagtccctgaacctcaatcctctctattgaacaacatgctacagctcaggcagcaggagcaacagcaacaatacatttctcagtccatacctcatgatcgttccatgcagcagctttatgattcttcccatgggacaatacatacttcat

SEQ ID NO: 38663 - DNA, 571 bp, Zea Mays
gtgagagcaggggctgacctacctactaggatgcagtaggggatgggcacgagcagcacaaggagcgaccaggcttggggcgaacgttggttgcagaggctgcggcataccactagaagcgaggaagatagagaagggagagaactcaccggaaatggaggagatggccagcgaaaggcaccaccggcgacgatgaaggggtaggttgccgtggcaccgcgcgagtacgcattaaaaggatggctgcacgagggggaggagttgtggtggaccggtgactttggcagtgggggcagggacatatatttatatagagagtagagggctcggggagccagttgtgtgcacgacgaggcaaacgagatggttacgactgcgtccgtgttatgagcgcgagaaacgggccacaattggcgagatgaagctgacataaggactcaagctagtaggatatgcaacgacgaggagtgcatgtggccagagagcagaggttgcgtggcagagcgaggcggagcggggttgatggtggtagacgaaggtagatgtctgggacagacgaggtagatgctgg

SEQ ID NO: 38664 - DNA, 504 bp, Zea Mays
gctcaaatatatggcatcaacaaaacaaaaaaaggaaaatggtaaaaccggggtcctaatgttccgtagaaaacagaagaatatatcttcctacagcataaaaatcctcagaactcatccactgcactaacatcccatatgccaatgccaccctcatgagaaaggactaactggctaaaactgcatgctgacatggtgagggggtgtggataattcgagtaagaagaaacattactttgaggtctgtttggtggctctggcgcaatggaaaacttcttgtagtttgacaatatttggcagatttcagtgggccgcagccacctactctgagcttccagtagtatctgaggaatatctgcagattaacagcgacattaatcagtcgttagccaacaacaccatcaatcacttgtggtacggtttccacactaactagtgcagtaagtttccttcacccatttccccttcgtttcgagaaattcaactccgtgatacctcatagac

SEQ ID NO: 38665 - DNA, 498 bp, Zea Mays
ggcttctgaaggtgcctgaggatctggaccgcttcaaggacatggctatgagggtgcagtacctcgctgaaggcaacagtgaccttgcgtcgaagcagagcctgctgaaggacggcatcttcttgctcgagtccgttaacgctgaggctgggcactgtgtttggaggctggcagatgtgaaggaaaaccgagcagaagctgggaagggaaggccgctgaacaggaaacagagagactggaggctgcagacttgcttcaccgcagtgaagaaggtgaccttgtacttggacgccaactagtaaatccgggccaggaggactattatggcttgtgaaaactatcctaaccctagcagattatgtagaataagaatgttgggttttctttatatagagtagagctatgttggtaggctgcacaaattggatatccatgaaattgctttgctatgagttgctagtgcgaaattgactgatgtttctcacacttgcagtataa

SEQ ID NO: 38666 - DNA, 309 bp, Zea Mays
gtgtaccagaattccccatcggacaagcattagcatagtgcccaatctgactgcacttgaagcatgtagggccggtcttctgtcctgtaggcctcgttggggtgctagtgggagtagcctaacgaatgggaggtgtccatggagatccctgtggagcatactgagctgggcgtggtcatcctcctagacgagtaggtgtaccctgtggcgaaacgtagcggggacgaacactgctgctaccctgtccctgtgagatagccttcctcttcaagtctcccagttgaacacgcttgtgttcaatagcaagag

SEQ ID NO: 38667 - DNA, 308 bp, Zea Mays
cccaccatgatctaataccccaaaggcacaagtaactggtgatctcaattctcaacccgcattccccatgtgcgcacatctattccacaaacaaatacctcattaatgttagtatttaaaaaataagagagatctacaaactgtagctgaaacagaaaactggaatttggtgagagacaataaatcatttcaatagaacaaaactaagttaagataattgtagaaatggttgatattttcagacaagaaacattcgaagcaaagagagatttgttaccttgcattgcacatcaataccattgctcttg

SEQ ID NO: 38668 - DNA, 1017 bp, Zea Mays
tgctttggtagtttaatatactctggtaaataaatggtggtggttgattgcagatttacgaactttttggtctgataggatggtcacacctctaatctttttgctggcaatggtggagctgcaaacttttactcccctaggcacaattgaagtgtgttatcaaccgcttagctgattggctttactagtatctttatatttattttaaatgcttttatttatacaataggtgatgattataatatgctatacatgtagaagctaatttggttagaaatctttggtagtctttgccataccttaaatcgtttctgtcctccgccactgatggccgaggtggccaagaggctggagatgacatcgtggtcggggtggccaagacaacggtgccaagtggaggcagaggcagcggaggcgagggcgtagggtgtgtcaacatgggcggaggaaggtggggcaaggaagcgaatgggatataggcggtcggagctgtcgcatcgagcgaccacaacacgagtggtaagatcctgtatggtgagttccggtgagttcctaaggatcgaactccatagaacaatggttgtcagtggtgaagcgacggaccgagagaagaatctggatgatattgggggcaacaagaatgttgttgaggttcaaaggaccaggaaagaccgtgtcacctactgagatgacaagcagagtcgatccattaccaacaatgatggaagaagggaaggtggagctatgggaatggggtaaagaaacaacactcgggtcaggagtgatgtgatacgagacgccggagttagcaagtcagtcgattttagtaggagtaggtggcgatgacatggggaacaaggagagagccaccagagggatgctggggcctccagtggcaagcatgctgacatcgcgcatgggtggtggagacgatgggacctcgagcgtcatggagacaatctcagaaccgcggaacagaaatggtccagtagcgtggcggccctcttgagggtggat

SEQ ID NO: 38669 - DNA, 365 bp, Zea Mays
atcaataagatatttatttatccaatgggaatgaaatgcaatacttaccaagcaaggcatcgatccgccatacaacataaagcatgacgacaccgatagatgctatcaactaatcgtttaaaaatacgaaacttacttctcgctttgtcactacaccaccctttagtcatatgaccattgtgagcatccttcacacgattatacgacagcaaacctaaacgttgtgttacacaatgcatacatctttccttgtcgcgagtataaccatattacaacatatacccgcacacctcaatcaaatatcttatgccaccactactataacacaccacggcacacacacacacatatgtggactaattcaa

SEQ ID NO: 38670 - DNA, 297 bp, Zea Mays
ccactatgacaagacatacatgcctcaatgacaacccatatttgtcactacagtaagacaagctccatgttgtggcactttgggacgtgtgactgcgtacaattccatgtatatgacaagacgagtagttgagcctctactggaaagggcctactaactagccaacatgtatcacttactcctctctttagctataaaaggaaggtgctcgaaggattctgattcaacaaatcccagccgaatccacagtttcgtcgttactttagtctcttactcttggtttagtcgatacatggg

SEQ ID NO: 38671 - DNA, 539 bp, Zea Mays
ggagtatctccgctgaccggtgagaccagttaaacccagtcgcggggacctcagtatcgaggtctctacggtgacccacacaccagaagggttggggcaatacgtcgtaccatgcgtatatctacgcatgctggaaagtgacgcagaggggatgacgaaagatgaagttgtactaaagacgtccctaaacctcaccgtaggtcgactctgcgggacccaccaggcaccactacgtttgcaacagaatagctacatgaactcgtatggcgaacgaacaagacgcatcgccatactaggtgtacgacggcgcatgacccagcagatgacatcgtaggagcaacaccgcccataagcaggaggtcgaccctaattgtaaaatctacccttgagctataaaagggcaagacaaccccatcttctacacacaagcactcaactgtaagatgcatcaagcaatactacgatcattcgatcaatactatactggactagggcgtaagtctgaaccagtataacccctatctcagatccaccttcga

SEQ ID NO: 38672 - DNA, 520 bp, Zea Mays
gctgaaggagaggggtctgactgcagaggctgtggttgctgattttgtcttcaagaacattcaaccgttgaaggacagggcatacccgacttatctgtaccgaggtctagctgactcaacccgggtcactaacagaagaattcctgctgtagacttagtgaaccagcttgaaatgattcttagaggcaaggtatcaaatgttggtgccccagtggcatactcggcctggaacctgcctccttccaaggcctttactcattttgtgtcgaatccacctgtcgctgatggcggtttgggccttagagtgcgaccctctgccgaagaagttagcgctttggttgcttcgctcggagaaattcctgatgatgaacggcaggtccactttgaggtgcctttggatcctagtgatgcagagataagtgctatgcttgatatgctggctgaggattcttctgatgctgctcctgctgggacattggtggtggcgcctctcccggaagctggtacaaccttggatatt

SEQ ID NO: 38673 - DNA, 281 bp, Zea Mays
ggccaggataacacaactgaataagttcgaggacctatcgatcgatttgcgagtttagggactgagataacacacatggacaagtttgaggacctaaccgattgatttctgagttcaagggctgggatgacatagccgaacaagttcgaggaccgctagctctacttgaaatctagtgttcactatattacttgtttccatccaagaaggtttgtttggatttgtgaaatcaacttcaaggatttacaaggttgcacctaatgctgtacctaaggatattt

SEQ ID NO: 38674 - DNA, 340 bp, Zea Mays
ggggtacagggaggctaccacacatatccagctctggctccttggtgccctggtctctcactcagagtttgacgttgtggatttccttatttgtgagatcgaggacaccgtattggatggtctgcgtgcacgtcgacagctgccatatgctcactatctatgtcacatttttgctcagctgattcggcctccacagttccagggcacacttgaggcctcacgcctcgtctttgggtcctaccgtccagcgcctgaggatcctgcgccagcacctgctccagtatttgacactcaggccgaggatactgctcttcatcagttcgaagctcaggacgcagca

SEQ ID NO: 38675 - DNA, 361 bp, Zea Mays
ctagaaaagtcaaaacgtcttatggaattgaggtattaaaatctgtgcacattattgttttgtgcttttactttatctttgcacttacatgttgtttcttgccataatattgtactatttattctttttcatgagtcattcgatccactttagattcagatatttgtcttttttggcatgtttcatccgaacccatgtttgtccagtatatggtgattgtttcatgcatataattaattcctggatgtttcctgtgctgatttatgttattaggatgaagctatgtgcgtcatcaggtgtttttctccatgtttgcataattaacttgaataacagtttgcccctagttcgtaaagttgag

SEQ ID NO: 38676 - DNA, 997 bp, Zea Mays
cccagtccagaggggaaagcgcgcgcgtgcgcccgcgccctggcggctttgcaaaaagggccttggggtttttatctatctggagacaggttcttctactgtttcagtgagtcgctgacggtttacactaaggccctcaagcttctaattcttcacaggggaaggtccccgacgacagccgcgcgctgaggagctccggcgagccactgcaccggccgattgaggcgatgaccggcgctcccgagcgacagacaccaaatcggatctatcctaagcttttcccccaactcaattgcatctaataccaactaaggagccctggccatggtgaccgagagcatggcggctaaggtgttgtgttcccggcgatcccaggcggttcagtttgattaaaggggtcggggagcatcactaacatgtaagggtgctagaacaagaacgagaagggaatgagcagacctggggaaggctggccacggtgaggtgagttcacggtggcggagagtggatttggggcgaatccaaaattcgcgagttctagcgaaggactgccagcgattaacggtggctgggtggatgatgatgttatgcagctaggggagggctcaatttataggcagcttcgacggtggccgggaattttaacggcgatatgtggcggtcggagataaggaagaggtctggcgtcgtggttacgtgtccccaaccgtggcgagctcatcggcgatgatgggacggcagtagggaatcacggcggtgccgtggaaaggctcggacacgcggcgggcacagagatggcacgacgacggtgagcggctttatctacggcggtgagcaaaggggggagtattgcggctgaccggggtggcttccagctcgacggtgacgacgatttttttacctcgcagcgttatccggttaccagcgaacgttaatcttaacgcggtggcgcgaatccttgcgcgggggagggtcaccggcggcaagcacgcgatgc

SEQ ID NO: 38677 - DNA, 364 bp, Zea Mays
gcatagatggcaaggtgatgctccggtgaggtgaggacgacttcgtgcatggcgggaagagatcgacgcaggtgggggctacctaggcgagggcaactctgagcattgcgtgtgtgggcattagcggtctgggcgatgggcggtggaggtggtttctgcgcatggaagggggcaattggggggttgaactggccgagatgtgaggcgggcactgctcttcctggcggcatgggcacaggaagttggagaagatgctcctggccggtggggctagggcatggtggtggatgggggcactgggcgtggctgggccatctaagccgtggccacgtggggctgagtcggggcaggtcgacatgggctg

SEQ ID NO: 38678 - DNA, 402 bp, Zea Mays
ggagatacttggctataaagccgcaaggaggtggggtcgaccacgcaacgacaggcgacgttttcgggcggttctaacggtgggcgagagagagtccggcagcctagacagagaaaagatagggagggggagaagacagacccggagcacgaggccccacaagacaacgatagcacgttagtgctcgcgacggctgggacacttgcaacccgaggagctggtcccacaggtaagtgacccacgcaaaaaggaatggagaggggactgatgggccgcgcgcccgtggtttaggcccacgcaggtatagttctccctttttctttatttatttctgtatcattttctttcctatttgttttgttttcagttttttttcaaacccacataaaaatccaaatttca

SEQ ID NO: 38679 - DNA, 347 bp, Zea Mays
aaaaaaactttcaggtggctgcactagcgctggaacacttccaccaatcaaacaaaagacaattttgcttccatctgacagcaagtcttctcttctgccagccttcaataacctatcaataaacatgataattaatgctttgatgagatcaacaacgagtcagctacaaccaaatcagtgcttttgtaatcagaaccctgttaattagagttaggtgcactcataactctacaaatttgactaaacaaccatacactactcatccaccagatacgcacactgctcaaccaacatccattccttgtgtataaatatatgtgttgtccatagactatcatgcaccagat

SEQ ID NO: 38680 - DNA, 325 bp, Zea Mays
cttccgttgtaaccggtcattaaggcctctcataaaacagtttctcttcttcaggttagtgttgacctggtcaatggcgtactgggacaaatgattgaacttgttgagatattgtgtaacagtatctccaccttgtttgagtttcatgaattcttcttgcttcatatggagcactccttctggaatgtagtgctcccgaaatgccaacttaaattcgtcccaggtgacttgatggccggcaggctgaatggccacataatttccccaccaggtgctagtagggcctcttaactgctgcgccgcaaataatggcttctgggtctcc

SEQ ID NO: 38681 - DNA, 493 bp, Zea Mays
cagggacccatatggtgggtgaataggacggaatgccataccagcagtacgacagcacacgaccctacggacgacgtcgagaggaccacaccacccagaggcagcaagccaagctcccttctagtagaatacgagttcctactataaagtcctccccagatttataaaagggcaggtgcaaccttccttctacacacaagcacacaagctgtaacccaatataatgtgattccatgatcagcactacactggactagggccctagcctgaaccagtatgaacccatgtctcagatttctcatcgagtcctaacgactcaccattcaaagcaagtccacgctagcacccctgccaaaccaaatctcattgtcccctagttttccaaaaccatgacagttggcgcgccaggtagggggacattagtgtgccaagtgacactttctgctctgatggcccaatcgtcagcatttgccggaggcgagacctttgcccc

SEQ ID NO: 38682 - DNA, 641 bp, Zea Mays
ctagaaggaaggaagaaaatgactttggtatgctacttggacctgaaattatcacttgtaacatagaaagtatattagtaaatttgttatgatcaacactttccaatgacaatagtttcaaaaaatgtaaacaaaaatttgcttgcaaaaagtaagtgtaaaaaatttgaaggccttgcaatatccatagctcaagcaaaaagaagggagttggttggcttttagtgctacatttgttttgtgcaagagatttttagtgctacataacactgttgctaaccctttggtgcacacgttgattcttgtgtgctttaatcttcactttatttatatgctcttatttttcagatcttgaatgtgaagccaggggatgatgattatttggatacatcatttttgcttagacaagcatctccttacatgaaaataaagtactgctactctttttactgctttactgatccgtttccttttctttcgcataattgagtagaataaggcataactagtgggaaagggtggtattaggtatttaggttacctattggtgcaaatcatatcactgtttagaaggttgataattgtaactgttggatagaatagaaaccctaactctaaattagagtagacatgtgtgtatt

SEQ ID NO: 38683 - DNA, 450 bp, Zea Mays
ccgggaaggccaacgtggtagcagacgccctcagccgaaaacctttcgggattaaagggaccaactttttagaagattggaagaaagaatcagctcagctaaatgcatgtctgggagacaacggtagcctggaagtcaagccaatgctagaagatctcatacgcaaggctcaacgcctggacgcagagacagccatacttatggagagagctcgcaaggagcaacttccggatcttaggacagatgagcaaggagtactctggttcaagaaccgcctgtgtgtaccaatgggagaggcacgggaagtcctgctcaatgaagcccacaactcagcttactccatccacccaggaaccaccaagatgtacctggacctcaaagccagatattggtggaaagggatgaaaaaggaaatagcacagtatgtagcccggtgtgacacctgtcagc

SEQ ID NO: 38684 - DNA, 370 bp, Zea Mays
tgagcatccccaccaccgtgtcccgagtcctcaagtacatcccggagctgcagaagcaggtggacaacctggagaggaggaagcgggagctgaccaacgccaactgcaagccgggagttctcaacaccagcgagatcgtaactactcccattgtttctgctacttgcctcaacgacacggagatcatggttcaggtcagcctgcacagcaatgtggcagccacggctctccctctctccaagtgcataaaggtgctggaggacgcaggccttcacctcatcagctcatcaacctactccacctttgggaacaagacattctatagcctccatcttcaggtgtgcatgcatgttcattcaatggttcctgc

SEQ ID NO: 38685 - DNA, 618 bp, Zea Mays
cgagtggagagcagagagctcgaatgcgatgcacgatgggagtgtggcacgttgcacatcgaactcggaaacgagctgatttggtcgtgccgtgcgaaactgcactgtgtgtacatgtacatcacgatctcgcgcagatatcttcgacgatggtgttagcagacggcaggtgagtaggtgacagacaggtaactaggtaagaaactgttgacatcgaagggtgagagtgatgtaaggcccggaaagactttaaaagggccgagacttggaccacttgattgcgcgcacccatacccatgatgaggccagactattttcctcgctcgagagggccggattaaaatggtgcacgcccggcccatgagggctttcgattatcttcaccccctcccgtaccgtactcctccttttctcccgccactcatcatctggaaaacaagtactacggggcaggactccaaacccacacttccaaagccgaagcatgctgttcgtgcagcgaacatgacaataccgttgctgattcgtaccaagcgtcgcacaaaaaggaggcaaggactggagtctgaactctgaagggcacgcagcgcaggccctaggttccaacttacaagccag

SEQ ID NO: 38686 - DNA, 447 bp, Zea Mays
taggaatccagaatcctaaatccaaattgtatatttaataattagaagcagtttctcttggttaatttgttctgctacaactattatcatgacatccttaaaaaatatgaaactattatccattgttggttgtccatatatcttgagtctgagttgttgtctttccttagtgcattttccagtgagaagctaatttaacgtagagttttctattgagaactgagtgcatcttgcattttatttcggctgttggaggagctagaactaagttcagcttgcatatatcttggagctctgacataagattagtaacactgattgctttgtttagccattggtcgatgttcaaatatatttgtaccttatgcaatgtgtacctgaggtcatatctcatttgtttgtttgcatgagcgaatcaaaccatatagtatacgagctttggattag

SEQ ID NO: 38687 - DNA, 390 bp, Zea Mays
tgcctcacttctctctgctcagatttcgtggctagcataactagatgttctccctcttccttctttttatctttggaatttggcttgtagcactcactcaccgaattatggatggcactcaatttcttttgctctttctcctcctctacttgttgtactaatttcagttttctttgtaagtgttcagccatgatttgttgaggggtcataggcttgagtacaaactttctccctttcagatctagcgtgtattgatttgttcttccacaatgttgagaatatcggtcatattgccaaggtcttcctagcagcatgtgacacacagacatgggtgcaacatcacactccactatgtcaacatactctccaatcttgaacggaactttcact

SEQ ID NO: 38688 - DNA, 439 bp, Zea Mays
tacacgcccacgtccacgacgacggcagcgcgcggaggagctccggcgaggttctataccggccgattggggctacggcaggtttctccgagcggcggacatgaaattggggctagcctaaccatttcccctaacttaattgcacaaataaccaacccccgagctctggccacggtgaccgagagcagagcggcaagatcgccgtgttcccggcgaccagagagctcgtagtttaattcaatggcccggaaagcatccaaggcatgtgagaaagcttaaacgaggaagcaggggatgggagctgaccggagttgggctggcgacggtgagctcggtttcacggtggcgaaagcttgaattgggggaaactccaaattcgagcagatgagtggacgattgtggccaattagcggtggctagctagcagactaccccacgg

SEQ ID NO: 38689 - DNA, 507 bp, Zea Mays
gtctgattcggtaattctagattttgtggcgctaacccaagttaaatggggctttaattttgacatcatgtttaaggagtattaaaggctataaactctagtttgtggggtagtatatatgtagatatatatgtatgtatgatgaaaaaatggaaatagaagaaaacctcagttttcctacctctctctcatcctcatcacgccatctctcatcccttatcatacgagctcatctccaattctccagcctacctattccctccacgtagaaagattctacatgtttctactagccattgactccttagtctcatccaagcacgcacacatctctttaggatattctttatcgtgtcctactccctcaccagcacttcattcttattccattacgcgctcagggattaccatgacctttgctcgttcgttcccagcacctcgtcttcctccctctcgccgtgctcctcagccgaggtggcgaggacccaccatgtacatcgtctcctc

SEQ ID NO: 38690 - DNA, 333 bp, Zea Mays
gaggaatcccaaaatcatcatcatcatcatcatcatcagctgctgtgccctgggtgtcaaactgtcgaagtgctgcatcctcggcctgagtgtcaaacacaggagcataagctggcactggaatctcaggagcaggacggtaagatccaaacacaaggcgagaggcctcaagggtgctctgaaaacgaggtggctggatcagctgcgcaaagatgtggcataagtagtgagcataaggtagctgccgtcgagcacgaatcccatccagaacagtgtcctcgatctcacagatcaggaagtccacaacatcaaactcagagtgggataccaggg

SEQ ID NO: 38691 - DNA, 360 bp, Zea Mays
tgggcaccatcggccagacaaggacaagaggagccgaaagagagacagggacgtgaggttctgcaggtcgaggttgcatagagatcatctgtttacctatgaggaggttgtgatgaccaacctttgtcccggatatcatacacacaatcatattaaccgtaaaactaaatatgactcgctcttgcacgcaagccagtcaatttatcacgcatatgagcaatcatgttgccagattttaatctcgactgaattatatatgcattctaacaatgattgttgtaatgcacactccactgcctcatatattgacttatcctgagagaacacctaaaaatccaaagggccaaggaacattaacaa

SEQ ID NO: 38692 - DNA, 304 bp, Zea Mays
atccgatccaaaactagtggcccagattagaagttgtctaaattgaaccggtattcaatccgggttgcccgatcagggatcaacggttaacatttaacgaaagggcccatctgttgtacaccgtccgaccggagctcgatggtcacgatcggacgagcgaagagctaaagcacgaacggatcctggccactggatccgtgatcaacgaatgtcgctctcccctcacctcacccacaccacactgcccctaagcgacagcgctatacagggccacggcggaggccatcgcttgccgttcccaatc

SEQ ID NO: 38693 - DNA, 465 bp, Zea Mays
cagctcttctgatgagtcctttacgattgtactttccgatgagcatcaattaaaggtcacaacagaggtagtgcacagtatttttggtcttcctactggagaaatatcaatagaccagaagaatttcacccatacagagttcctgaaattttggaaaattctgaaagctggaggacatgtgacagagtccacgaccagatgtagagggaaaccagtatctaccaaaagaatcactttacaatcgttgttgaattacatggaagctgaagctgacaaggaaaagcaagcctttgctttcttcaccattctgctatccaagctgctcctaacaacaacgagcaatgtgcccactaaggggcacgtggcgttgtgctcttacatcgagaacacgcaaaagtatgattggtgcaaatttgtttgtcaggatctgaaaaataaaatcagttcatggaaacagaaaccgac

SEQ ID NO: 38694 - DNA, 286 bp, Zea Mays
aagtggtttgtcctgtaccatccttgactgtgacgattcagttccaaacctagccagctaaccgtttcgcgccggaaatgcgttacctacaaccattttacgcacaacaaccatgcatgtatgagctttccatctaggtgatttaaccgttgggacctgtgttgtactcactcagatggttgcattgtgtagcactatctttcatgtgcttccttgttctaatttgtgccatcgatgaccaaacctagtttggttgtcatttgttgcttccaaatctagttccttg

SEQ ID NO: 38695 - DNA, 425 bp, Zea Mays
gacactattctgtgaaagaccaggggctgttttataagaaaccagggcccatccgcaattgccttatacaaggataggacggcaggttgattttactgaaatccgagggctcctatgtaaaaggggttctgcgaaggggtatcggcgaagatcggccgcctgatccaacgcggacggcccagatcagcccagtcctataaacgaaccagtatccaataacggccactggattcacgatctacggtccacacttaaatagatgagaccacatctgatccgctggattccccatggacggtcccgatcacaaccctgaagcggtaaccggaatcgaatctccaacgtccatctgtgatcaacggcccacgcgcgtcttccccacccctatctgagccgggcggctctgtgcgcacacgacggcggcg

SEQ ID NO: 38696 - DNA, 282 bp, Zea Mays
gaacatctagcggtcgaatcaaccacctgatctattctagggagtccgaagggatccttcggacagtgtttgttgagatctgtatagtcgacgcacatgtgccaatccactttattctttttgagtacaagaacatgatttgctagccactcatgatgcagtacttctctaatgaaccctgctgccactaagcgagctaactcggcgcgaatagcttctcttttgtcaggcgtgaaacgacacagtttttgtcgaatcggccttgcttggggatagaccttc

SEQ ID NO: 38697 - DNA, 694 bp, Zea Mays
tttttaaaccaactatccaatatgacgaagcccaccagacgggtaggcagctcgcgggcatggaaacgccgaccttggaaccgatcgccatcgtggaggaaaccgacaccccagctgaccccgtgggcggctggagaacacagtatcatgacttcttgaccaacagtttgctgccccgagacgaaacagaactacaaaggcttcattggtgggccaattccttcgttgtaactaggaaagacctctacaagaaggggcacaatgaaaaataaggtagttgtgcattccaatcgagcagggaaagcaactcctagaagatatccatggcgggatctttgggcaccatgctgccctgagaagcgtcatggggaatgccttcctacaggggttctattggcccaccgcaatgttggatgctcatcaggtagtgagaacctgtgaagtgtgtcagtactacgtgcgacaaacccatctgctcattcaagcactccaaaccatccctgtcacctagtcgtttgtcgtctagggacttgatttagtcaaacctatcaaaagggcactcggggggctacactcacaccttggtcgtgatcgacaaattctctaagtggatagaagcatggctcatcgcaaagattacctcggaacaagctataaaatttgtcaccatcacctcactgttttggagtaccca

SEQ ID NO: 38698 - DNA, 784 bp, Zea Mays
aaagaatataggccatttggtgtttttcttgggctcaatcagtttagagaaaccactatttttggtgctgcaattctctttgatgaaacagaagcctcatttacatggctctttgagacctttctagctgcccataattataggcaacctagaactatttatactgatcaagatgcagcaatgggaaaggctatacccaatgtgttcacggaatcatatcatggattgtgcacctttcacatcatgcaaaatgctgtcaaacacttatctccagtgaagggccaagagaaagaatctcatattctctctgattttagtgcttgcatgtatcgctatgaggacaaaatagaattcgaagaagcatttgacagcatgagatataaagtgcataagcaaacttggctagatagtatatacaaggtgaaagaaaaatgggctgaatgcagtgatattatgtgcacatggtctgaaagtgcttgatttgatgaatataaaaatgttacccacacattatgtcctaaaaagatggactagagaagcatgcagtggaagcatactggatagacaaggaagggaagtggtggaaaatccaaagttggaggctcaacttaggctcagatctttgtctcataaatttctcaacatggcatataaagcagccatttctctagagtgttgtttgctaatagacaatgcacctgatctccttggtccacaagtagaggataaactcaatgcaccatctagtgttgccaatgaaaaaccatgtaatgaccaagaaaat

SEQ ID NO: 38699 - DNA, 335 bp, Zea Mays
gccactgtgtgagttcaaattcaccggtcaccactcaagaaccctataaattgagcacaccctcggctccgttaggtattgcagcatccaatccacctgctcgtgcctccaattaatcaatagagcccacgaattgcttagttccccaaatctattttccgccaccgtgaacaagctctcaccgtggtcagtgcaattcaagtccggtcttgccctctactctcttgtttcagcactcttatataccactgatgctcctcgacccattcaattaaactagaacgcgctagatcgttgggaacactcgtgctcacccgtggtttgcactgcctccg

SEQ ID NO: 38700 - DNA, 362 bp, Zea Mays
caccatggccgtcgcggtggctcactgggccaataaattcaccatgctctcacccccttcatccaaatcaaccgagcacagctgttcgtcccttagttatgaagccaacgaatcactagccaccctgttctgtccaccaccctcaaagatcatcgaaattccctaaaatcggtctcttccgccgccgtgaaggacccctccgtggccagcactcctcgggtcagtacataccaaattgcttcctattctagctttactttggccttctattgctctcggagctggccaattgaactttaccgaagcccacactccggaacacccattcgtcccattgaacgccgtcgcagacaccctctctg

SEQ ID NO: 38701 - DNA, 272 bp, Zea Mays
gcgaggtcggaactctatgtcgtgagctccaagctcacatgcccacttgactgtccttccgactgcttctttgttgtggagtatatctcctattagtaaacctatgactactatgactttgtgattatcgaagtagtgatgcagtttgcgagtagtgaggagtaccgcgtatagtagcttctggacttgagggtatcttattttagagggtccgaggacttcactgatgaagtagacatgatgttgcaccggctatgcatgcccttcttctg

SEQ ID NO: 38702 - DNA, 316 bp, Zea Mays
cctcaagagtgccctaaaactgtggtggctgaattagctgagcgaagatgtgacaaagatagtgagcatacagtagctggcgccgggcacgtagaccatccagtatggtgtccttgatttcacaaatgaggaaatccacaacatcaaattcggagtgagagaccagggcaccaaggagctagagttggatatgagtgacagcctccctgtaacccaaccgttgcagaagcgtccgtctcatgagctgatatagaaacttggccgctgtggtgaagtctgccggagaacgtcgcgacccatctgagaagggtggtcg

SEQ ID NO: 38703 - DNA, 322 bp, Zea Mays
gaccgattggtgaagaagaagtgttcctttccttgctaaagagcaggtgatcaatgtgacagaagattccgattagtagttagattttctgatagactgattattacatgacgtgacaaaggcgagaggtgaaaaggtcagcaggctaggacagagtaaaaattaccctcgtgttgcgtgtgcgtaaaccgggtagatctggatagaatagagtgatgccttctctaaactctgccctccttgcatataaaatagattatactacctattaagactgtattgtagaccacgagtggaaccatgcccccacctctgcccctag

SEQ ID NO: 38704 - DNA, 329 bp, Zea Mays
tttctgagtgcttccaatcattctgttggctctttctacttgcccgttggctcttgggtgtgctactgatgcatatttgatctggatgcttttttgttcgcagaaatcaaagaactccgaactagtgaaattggatcccaggtcggttatgatgctattcggtattccaaacctgaatattatgtcttgtatgaattccactgccttaactgaagttagagaagcaatgggcttctactctatccacttagtgaatttgtcaatggcaaccagtacatgagtgtatcctccttgggctttcttgaagggtccaatcatgtccagtcccc

SEQ ID NO: 38705 - DNA, 551 bp, Zea Mays
cgggggtctaactgcaaacgcgaccggccgaaggggtatcagcatatcagggccgcacgatcaaggtccgatgcaccagattaaacctttaatcggtacgcagcgcccatcgttagatcgggatctgacggccatgttttaatgaaacagggagctaatcatatccatcaatcgccgatccaacgacccaaagtagatcgcgaagcggtacacacaggtgtccaatggattacagatgaacgaccaagctttaatgtatctgagatttaatcctatccctctacaaccgatccaacggccccaaccaagccgcgacgcttgatctcatcccggccgttggctggcaatctacggccatagtgtgcctccccaacattccccctccaccaccgccatcagagcgatggagcacagggcccccgcggcatgagttcaccggagatgtgagaacctgcgacgcaaagcaccattctatcatctaacgattgctatgcgatgcggagtggttataggagcttctgaggataatcttacccatggcgaggttatgg

SEQ ID NO: 38706 - DNA, 363 bp, Zea Mays
gtccccttcctccgcgtagcgctgcattccgcaatccgccccgaaatctctaccgctctgcgacgatggaagggaatcaattcggtgatggaaggaggcacggattgcggattacacggcctcgtttcgtccctcaatccgtcgatggagggaacatcctcggcgcccccaaccaaactgcgactattaaagaaacccgaggggagcaaccaatctgtgcggagaccgaacccatgcgccataatcctcgcatcttcactaggtacccgatccattttagtgccccaatcctcaattctcttatgcacatgcaggatggcatccgttttataataatgtcaatgttcattctttagaactctg

SEQ ID NO: 38707 - DNA, 530 bp, Zea Mays
cgatcttcgacattcgacgcacacaacagtcaccgcaagaggcagcctagactgccctcgcgtgcgacacatccgagcaaaagccgcctaagggtgcagccgggtatgcgtgataagtgcgcaacatcacccatagggtgcgaagtcttttctataagacacgtccgagaaaaagccgcctaagggtgcagtcgggcatgcgcgataagtgcgcgacatcacccacagggtgcgaagtctttcctataagacatgtccgatcaaaatccgcctaagggtgcagccaggcatgcacgataagtgtgcgacatcacccacagggtgcgaagtcttttctataagacacatccgaccgaaagccacctaagggtgcagccgggcacgcacaataagtgcgcaacatcgcccacagggtgcgaagtcgttactataagacacgtccgagcaaaaaaacctaagggtgcagccgggcatgcgccaaaagcgcatgacatcaaccgcgggaagcaaagtcctcatcctgagtgccg

SEQ ID NO: 38708 - DNA, 636 bp, Zea Mays
agaaagaaggcccctctagcagcaactcccgccaggatagagaatttgtccgacgtcgaggatatgtccctagctagccttgatgaccttctcaaggaatttggggacactttagaacaagagttcggtagtacctcagagaacgctcgcgtgtagtacgacttgtagtagctgtatgcttgtaatgtattggtgtaatgaataaaataacttggttgaaaacaattggcatgtgcataatagtgactctctccccctggcagatggattcagataaaaccacgcctaccgcctccgggattggagcagggtttcccctaagagctgaaagagaagccggtagagaagaaagtgagacccacctccccgcacctccagaactacccttagatttagcccaggttctagccaaccaaacccgactcatcgaggtcctcactcgaagtctggaaaatcaatgcccgaatggtggaagaccacaagacaggatgggagatttcctgaggctcaagcctcccacgtttgccggatctagcaatcccctcaatgctgacgattggctgtgcacgattaaaagaaagctggaagccatcggatgcccggaaaatcagcgtgttcaactggctgctcatcaac

SEQ ID NO: 38709 - DNA, 285 bp, Zea Mays
cattgaagaaccaactgtaatgccgaagacgcctacagtcgagccaatcgaagctaaggatgataaggctgaagagccaaaggttgaagaaataatgaaaatgccagaaattatgagccctccaacagaggcaaaactgccgaaggtgcaaaaggcttctgccacgactcccaagaggaggaggatggccaacatgttggatgctgtgctggagactacaaaggccttgagccctgctcctacaaagaaaattgctgaagctgccaaagcgcaagccgaagccga

SEQ ID NO: 38710 - DNA, 306 bp, Zea Mays
aaacaacattagctacagatagtgggtcttctggaaactggaactggaacattttgcatcaacgatttggagtatggttacacattaagcattagctgaaaacataagaagtcacgctgaaagtagaagactctacttggtgctgtaacttcaaccttaatgcttcatggcacatgtgacactttcatatgaaacgtcaagacgataagttatttgcaggatcaactactgcaactatcaaagcaatgctaatagcatcaagtggggtggcatagcataaaaagtggaaggtatttggatacactt

SEQ ID NO: 38711 - DNA, 357 bp, Zea Mays
cacaagagcaagcgtgaccgaagacctcggcgagtgcacgctaccggtgaagccttcaatccccatggccgacgacaaccgcacgaggacatctacaagggaccaggtgatctcatttgtgctttaacaagagatgcaaaaaatcagatttaccccatagtttgggttgtttagaaataaactaaaggttcttggacttggttcttgggattactacagaaggatctgcaaattcctatatggcaagggatgggttatcataccacaccagcaaaaggtatcaaaatttgcttgatgtatgcttgtccttcattaacatgtccatagctatatgtgtgctttgatgtttactgcagg

SEQ ID NO: 38712 - DNA, 800 bp, Zea Mays
cgggcatatagcgaagtgtgctaaaagaaatcagggtcagctgaatgcattgactactgaagatttccaaatggaattaactgatgaggtgttgttgcagttggaacaagaggaagaaaaagaggaggcgtgttgtcgtttgtcaatccatgctttatctggcagagacagcagtgatagtatgtgtgtcagatccatagtcaacaaacaagtgatggttatgctcatagattctgggagttctactagctttatcagtgagcacatggtgaagcagttgggtctgactaaggtgccttgccaacctgtgcaggtgaaggttgctagtggggagaagctgctgagtgctactttgattcagaatctggaatggtggtctaatggacatttctatcatacagatatgagggtgttacctttgggagcttttgatgctattctagggtttgattggcttaagcaacacaacccaatggagtgtgattgggagcataagaagttgcagtttgtggatgaaggagttcaggtgaaattgattggtgatgaagtgcaagaagttacttctgtgcctgggatatctgtgttgcaggtacagaaatggattaagggcaatgatgtgtgggcctttgtgctagtggaatcggctgctgctaacaaggaaggttctcaacattctgatatccaacttctagttgaggagttcagtgatatatttgccacacctactcaacttcctcctgttagggtttatgatcatcacatatcactggttcctggagctgttccagtcaactctaaac

SEQ ID NO: 38713 - DNA, 566 bp, Zea Mays
atgctcaatttaaaggaagtcaccacgacggtgggcaatttgatcgctgactcatggcggcggtgatagcctgaggagctccacgttagccttaacggtgtccacaggctggtaacgtggcgaacttaccgcgaaccctttatggcggttcaatacgcgagcgtccaaccagttgtgtggatagctgaagcgtctggtggatggcttcggcggcggtggatgattcacggtgaggacacatggtgtccgtggctagagcggtaattcgatcatcgaatctgagccagagatctttttaccacgcattgatccacgtctcggcggcaccaatcatggcgcgagctcaaattatggcggtgggatgttagcggtgagcacacgacacttaatcttgtttagttgactctaccatggcgatgttcgttcaactagcctgacagagcgatttgaggagctcctttctctaatttttatatgacaatatgcttatccgactacatcaaagttattgtccatcatgccagcttcaattttgttataaggttcgtgctcatacctccactcga

SEQ ID NO: 38714 - DNA, 361 bp, Zea Mays
gtttaaggagggagattatgtctatttgaaggtgtcaccactccggggtatgagaagattcaaagtcaaaggaaagttgtcccctcgctttattggacccttcttaattttaaagcgagtgggagaggttgcatatcaattggagttaccagatcatcttgcggatgttcatgatgtatttcatgtatctcagctgaagaaatgtctcagggtacctgaggaacaattaccaatggaggaccttagtgttcaagaggatctaacttatactgagtaccccatcaagattttggatactttgacttgagtcacaaggaataagattataaagatgtgcaaagtgcaatggagccaccacggt

SEQ ID NO: 38715 - DNA, 997 bp, Zea Mays
catttataacttttctagcagcattgtggaatacacgttttgcatgttcttcgttcgctgtttcgtccaatctaaattgttcctgcaaaatgaagaagcaattaaattcatttatagacgcccacgataagtaaatttaaaagacataataaactcacccaaaacgatgaccaaactgcgtcttggtgagtacggtcgagtccatatggtttgaggccctagtgagcccagtgatacgcccctatctctgccccgttgagttgtaccacccctggatagtgaaaacgagctatagatcccagcactgtgttaactggtgtccggtgacctttgccactccatgccacctccacccaactcctctctcctgcagggtttatgaccctacattggtccaagggttgtgtcggtggaactctaagggaccgccgaaacctacaaaattgtaaattgtgcactggtaataatatcaatccaacaaaaatagaactcctcgtcaaaataaaattacctgaagttcgttgcatgtgtcgttgtaacaacctcgtcatcagcctctccatcggcctctccatcgtagtcctccccatagtcatcatcatcacgcatcgatgaaccttggcgtgccagctcgtcctcctgcctaggtgcattgtgctctgccgcctcgcgcgcttgctcaaatgcattgtggtcctgctctatcataggtccacttgagcctatcgcctcatgctctggctcaagtgcattgtggcatgccacatcgcgctcttgcccaggtgcactatggcctgccacctcgcgctcgtgcccaggtgcactatggcttcccacttcgcgcccctgctcctccatgcaaccaaggagctgctctagccgttgccttgacgctgtagagccctacaaacataatcaacaatgagatatatcaagtactcgatgtatacgtagaagaaaagaaaataaaacaaattaaatacctggaacaacatag

SEQ ID NO: 38716 - DNA, 271 bp, Zea Mays
ctacgattcacctcgtttttattacgttgttgatttggtccaccgcagtggagtcgtggaatcaggacgccaggcgcgttgcgtgaggttggggattgtaatggttgcctagcatagttgctcagtcctcagctgtagttcaggagcaactgttcctgctcccttgttgccgttccacctgggatcgtgttgggatcgatcacaaaccgaacaattgtcggcaatctgtgcttatttacctccaattctaatttcatggacttagatttgc

SEQ ID NO: 38717 - DNA, 284 bp, Zea Mays
cagtcgacagcaccgtcctacccaaaagcatcgcaaggggtaaccctgagtgtgcggtcggactctaaataccgacagctatcctctcctccagaatgccatacacagatcttcaagatcccaaaggatgggtcccaaagtgcgcagaaatgtgatacccaatgtaatgtcaaaggaatctagaggaatggcgtatgcgtccatcaagaactcttcaccggcaatggacataccaatattgttagcaatctgtcggcagtgaatcttgtcgccatttgctactg

SEQ ID NO: 38718 - DNA, 336 bp, Zea Mays
ataaattctggatgacatggatgttaaacaatttgtttatttctgtttttactagcaataatgtgcattagtcaagcttaaatatggtccattaccttcatggattggtggtgatggcacgagagggccttaattccattaccttcctcggtgtctggactatgtggaaacgtaggaattgttgtgtttttgataggatgtggctggacatgaactagagctttggaggttggctggtgcttggagtctctctctcctcatcggttctataccgggttgcggaatctttagttggtagttgccctgttgttttagttatgaatccttttgttattg

SEQ ID NO: 38719 - DNA, 278 bp, Zea Mays
agtcaggctccatggtattccgcggaagatagtgtcagacagagggacgcagttcacctcaaaattttggaaaggccttcagcaagcgatgggcaccaagttagatttcagcacagcttatcacccccagtcagatggtcaaacggaaagagtcaacaagatcctcgaagatttactaagagcctgtgtgttaacgttcgatagggattgggagtccagtttgccgtacgccaaattctcatacaacaacagccatcaggccagcatcaaaatgtcac

SEQ ID NO: 38720 - DNA, 283 bp, Zea Mays
acctcgctctgacaagtaaatttgttgtgcatgttctaggctccggacggtgtgcacggttggagcaagatttatactacttctaatcatcggcggcttgcgctacctacaccattgatgatcaaagctcgtagtaagggttacaagcgggcaagagagggaggagaggctcccaagtctcttaatatggtggaggtagtaatagaatggagtcctagctaagtcttggcttggtggtggggctctggcctctaggtcctcgttggtgcgtcctcctcctgtt

SEQ ID NO: 38721 - DNA, 808 bp, Zea Mays
gccatacgagtacctgaaaaagaagacacggacgacagtccaaaaggagctgtaaccgggttagagtgatcatcgaggaagtcgaaggtcgctggtgtgggtggattggaatcctcagaaaagggaaacgaggtttcatcaaaaaccacatgatgggagatgatggtacgattggactggcgatcaaagcataggtagcctttgtggtggggagaatagccaagaaagacacaaagggttgagcgaggagataatttatgtggagtggtggcagaaagattggggtagcatttgtagcaaaaaacacgaaggtgctcataggatgggttgtggttgaagagagcaaagtgtggtgtagaaagtgcaagtgttttggtgggtaatatgttgagaagatattgttaatggagtcgcaacccaaaagctggggggaacactagactgaatgagggtgcgaatgatattgttaatggagcggataacacgttcaaccttaccattttgagctgaagtgtaggggcaagacatacacacatgaagttgcgagcttgaaggttgtcaaatttgcgaccattgtcgcactggatgccctggatggtgacactgaactgcgtacgaacgtaggcaaagaaattggttagggtggagagggtgtcagatttgaggcgtaaaggaaatgtccataaatagtgggagcaatcatccaaaataacaaggtagtatttgtagccagacacactggtgatgggtgatgttcagagatcgcagtgaattaactaaaagttacaggtggcgcgggaggaagagg

SEQ ID NO: 38722 - DNA, 306 bp, Zea Mays
ctccatacattcccgagtatgtgggcaaccagtagcccacaacatcagttgcttcggcaagtcactctcaagctgcatgggctcccttaccaccaccaccacctatggcaccaactttgactcacaataagcagctagaagggcaccgccaagtgcagcaacagtgtgacacacgtgaagagtccgaagcttgcacattaaacaacactgtgcctgagtcaagacatatttactgaagtaatatagggcctcaatcagaagatcttcatacttaatgtactctttattattttgtctttatatttt

SEQ ID NO: 38723 - DNA, 504 bp, Zea Mays
cctccgacgaacttgtactggccgggatgcacaacgatcggtgccctaactcggtcgacacctaattctactcctggcgatcctaatccgaccctcaattgcacgaattcggcccagagttcatctgttcacgacgacggcgagacctgagggaaaactgaggtgttctaggtgactcaatgtggtctagttcaatcaatcgggtctacgagcaacaagagacttaagggatgctagatcaccaagcagagaggcatgaaccaacctgtagatggctggccacggtgagaagctcacggcggcgcggaaaaccgatttgggggaaatcccgaattaaggcgctatggtggacgattggaggcaaggagcgatgcactgggcgcgtaacaacctagaggagctagctatgcactcaatttatagagactaacaacggtggcacccaatttgaggaagacacgctggcggtcggagagaggggtaagttactggtgcgagctaccg

SEQ ID NO: 38724 - DNA, 390 bp, Zea Mays
gtcgtgtttgaggcgttcttcatcccggccttcgcctacccgcacattgttttgtggcggaggtcctgcagaggtttgaggtcgaggtccaccagttgacacctaacaccatggtggccctggcgaagtttgtacagcggacagccttccgtagaggtcttcaccaagaattacagtctactctggcaaaagggaaagattggaggtaaaattgcacaatttggatcgtgcaccttcacgccgaggaccggaaagacttcggcggaagttgtggagttagttccctgtgctcgcaacaagtggggcaactggtgggattattggttttatgtgtcgggaagcaaagtcgaagacctcccagggctccccgcggccgtgatgtgctcccat

SEQ ID NO: 38725 - DNA, 570 bp, Zea Mays
gtaagtctcaacaccaaagagtcatccaccaaaggtaaaggtaacaaattcaatagagttcaatttgattactctcgtaattctattcccaacttctcttcggcaccactcggaaagcttccaactcttagtgagttgaactatgatgagtaggtcaacaagatgaagtcgcatctaatcggtgtgcatccgagtatttgggagattgttaacataggtatggacaagcccactcaaggagaagagatgacgccgtaaatgatgcaagaagtgcatcacaatgcacaagcggttagcatcataaaaggaagcttatgtccggaagagtactgaaaagtccaagacagagaggatgctcgtgatatttggaacattctcaaaatgtcacatgaaggagatcctaaagcgaagagacataggattgaagctttagaaagtgagcttgctagatatgattggattaaggatgagtccctccaatctctctttgatcggttgatggttctagtcaataagataagagtcttaggaagtgaggattggagtgactctaaggtcactaggcttttc

SEQ ID NO: 38726 - DNA, 581 bp, Zea Mays
cgtcggtgtgtcgtggacgactctggtgctccggtgcgcagcgcaggtaaacaatggtggcctaacgccctatccccaatcacttttcttgtgcttaacacatttgttctttgtctttgtttcttagatccctgtcgcgcaccgttgaggagccagagtcgccgatgcccagcgaggtggttggctggtcgccatggaacttgacgcggtagccgagcacgaggagcacttgttggaaacccataacgaggaagaagatgctgctcaagccctattcggtagtagctctgctgctctccgtcgggatgctgcagcggctccttccagcgatgttgggggaacgggctccagcagtgcgacccgtaccgaggcaagcacgggtaacgaggggcgaacgaggaagagggcctccagttctccagtctgggaggactttgaacaggtgttcaactttgagaatggtaagagggtaagaactcatgccatttgtcatcactgcaaacaacaattctctgctaaatcatctgctggcactgggcactttcttaggcacaaggatagttgtaaggttaagaaagagt

SEQ ID NO: 38727 - DNA, 403 bp, Zea Mays
ctctagtgtatttgattttagtcaaaaccttctattcaccccccctctagccgatgtcctagatactacaagtggtatcggagccaaggactccattgtttgtggatctaatcatcccggagtttgataaaatggctagtaacaacaatgtgcacattgggaagccaccgcattttgatgggaataattatgactattggaaaataagaatgtcaatgcatcttagagcaatgggtggaaaaatttggcctattgtcaaggatgggtttgttgtgttgaaacaagatgaaccatcagctagtgataatgaaaacattcttacaaatgatcaagccatgaatgtattctatgatgctcttgacataaatgagttcaaccgtatcaagaatctcacaactgctca

SEQ ID NO: 38728 - DNA, 589 bp, Zea Mays
tcacaccggtcaccgtttgccacctgcagtgctggtaagaaccttgtaagagcggggtaagacacttcataatttgtattccaccaccaccaccaccaccctgagagatagttgtagggctcacattgtttgttgcttttttgtctctgttttatgctaacaatgacaggaccaaagaatcaaatggacaaggacaaggggcctaagcttaacgacgatgagtgtgtctcttagctagaattgaaggagatgatgcacgcgatgactgaagcttttaaaaaataccaggactctgcggcgacatcctatgagcagcttgattgacgagttgctaaacttgttacacgcatgaacgtactggaggctcgtccccccaccaactccagccccagctaactctcctgtggacgacgacgacgatgacgacgatgtttatgcaccgctgcgacaacgcctcgcacgtaatcgacaaggtctgggaggtaatggtagacgttgtcatcataatcctgaaccagaccacgatccatttgctaagattaagttctctattccaccgttcatgggttcttatgatgctgaagcttac

SEQ ID NO: 38729 - DNA, 373 bp, Zea Mays
gttttagggtgccggattggggcaactccgggcagcatccaccgctgtgtgggcggcgctgccgtcggcgtggtcggatgggagaagattgcctcggggccgtccgatctggtacgaacgacaaagattagatcgtagtgttaccccttcgctaaatccatcctgaacgctggatcgtgatcggagggtggaaatcagatcgcgtagactttaaacctaggccttagatctcggatccgagggccttggctgcgcaacggtttggatctaatctgatccgtggatgcatgatccaacggtacgaatctcccaataccccttcggctacgtagttttgcataagagccctcgtggaatctgggattcaacccgc

SEQ ID NO: 38730 - DNA, 473 bp, Zea Mays
atcgggggtgagagttggtgttctagcttcataacaagctaacagagtaggtcgcacgctcaatttatagcgtgcgcaagcggtggcttcgaattcgggggagataagctagaggccggagaggaggtgagtcaccagagttttctaacgtggcatttactgggtaaaagcttacgaccgtcactggttatactccacaacccgcgacgacatggtgaaatggtttaaggcgtgtcgtgaacgaagtaaaggcgacacgacggcggtggtcacgcggccacgtcgccggtgcaagtgggtactacgattgagcagtaacagggcccaagctcatcccccgcacgagatctttaaccgccagtcattatccccgcaccacagcgcatgaatcacgtcgaccgacgtgaatcgcgacgcgagttcaccagcggcgaggtgcgctgcatctgaagatctttttactattgtaccat

SEQ ID NO: 38731 - DNA, 376 bp, Zea Mays
ttggcgctttctaggcaagctgctcgtttgaatgatcaagcaagcccctctagcacagcagcgcatcccagacaccgcgctcgcgacgaaggaatatgaacttggccatgaatttcaccatgagacctagagaaggaagtggacaccatcaagacacgccctacgaaaaggaatatgtcgccatagaagatgctcgatcctcttacccgggccatgtgctggaactcagcccacatcccctgctcttccatgtcgtcaaggatgaacattggctcactatattcatctagccacaaaaggaatgggtctccccactcaaagggatccctcccaacgcggacgatgccattgctcacctcatcgtcagggaagagcg

SEQ ID NO: 38732 - DNA, 364 bp, Zea Mays
gtggaaaattttattccgaagtatggctgaagggtggccgagaaatagctgatgaagctattagaaagaaatagaaagaatcccatgatgccatggaataggctagaagaactgaagaagctgttgaacgtgctagacttataggtacatttatcatgacttagcttcgtaaattattttagcttcgaactattcagacacttgtattttggtgcaactaagatctctccccctccagaaccataagatcctgaagctgatctatctctgaagggggcgcttgacataattaggatagctaacgaagctattgatgaagctgtcaacaggcttttaggcgaagttgctgacaaggttttgaaag

SEQ ID NO: 38733 - DNA, 501 bp, Zea Mays
gccagattttgattgatttgtgagcttcggcatttgcataagtgctgactaaatggctgaagagaagaaggttgttgaccctgcactagctaggttttacgaggctatggagaagacgaacataaagaaaatcaccaatgaaatgctggctgggttgtctgaagattctggtgatagcgaaagttttgatttggaaagtggaaacgaagatgccgaagatcggccctagcggccgagtcataccatcttcgtaaagtcatccatcaagcaaagttagattgatgctatgaaagggagatatttccgcgatatttccattgtgagggctggaggagatagcgccgcccctgcgcctgaagtagacgaagttgttgtttataggagcttcatgaaggcagggcttcggtttccattgagtaaatttttagttgaagttctgaagacttttgatattttccttcatcagattacccccgaggctatcattaggatggggatttt

SEQ ID NO: 38734 - DNA, 466 bp, Zea Mays
aacagatgcagcttgggattgattctgggacactgaaggtgtcataggagtttgtggtgagggtggtgacgcagcagcaccccctgaagactcactcgtatcacctgaaccagctggtacttgtattgtctgatctggcacagtaaactgaaactgtgtagtgaaaggaattgtagtttcagtctgctgattcttttctgcactctcccagtcccatctttcactttcttcaaacactacatctctgctgatacacagcttctcagtgataggatcaaacaatctatacccttttgtacctgactcataacccaacaggaccatcttagtggacctatctgacaatttgtttacccctggaccaattttcttcacatgagcaatacagccaaatgttttaaggtgctgaacactgggtttcttgccaaaccaagcttcatatggtgttcttccctgtacactcttg

SEQ ID NO: 38735 - DNA, 553 bp, Zea Mays
acgtcttttttgaatatcatccttggcatttttctattaaggatcgccagtcgaggaaaagtctgttggacggatgatgtgagtcgggcctatatcccatcaaggcacaagatcttccagtcctcaagcatgctcttgcaaccagatccattagttactcccagtggcatgcacgtttgggtcatccctccacacaagttgtgtggtctattttacatttaaataaactttcgtcttcttaagtggctacttcatctgtttgtgattcttgtcaacttgctaagagtcatcaattaccatatgcctgttccgttcatcattcttcatctcctttagaactcattttttctgatgtatggggtcctgcgccttgttctattggtggttataaatattacatcagttttattgatgactttagcaagtttttttggatatatttgatgcatgatcgttccgaagcaccgggcatctttatgcaatttaaaacccatattgaacgactccttgacaccaccatcaagtacgtacaatcagattggggaggggaata

SEQ ID NO: 38736 - DNA, 354 bp, Zea Mays
gactgataccaagtgtctctctaatggttctgcgcttcaatgaatggggttcagatcagttgggatgagacattgcagctcatttcatgcccaatctagatgtttttacatgttttgtcttcagtagttgaaccagtgtcagccaactacaccagacttttagtccatcttggcaaagcttggagcctagtcggcaatgtcttgctttgaatgctaatggactgatatcaagtggctctctaacgattctgggcttcaatgaaatggggctcagatcagtagggatgagacattgcgagctcatttcatgtccaatctattgggtttaatatgttctgtcttcagcagttgaac

SEQ ID NO: 38737 - DNA, 679 bp, Zea Mays
gtctcgcacctcgaaaggatatgattctatatgggttattgtggaaagactgaccaaagtggctcatttcattccggtcaagactacttataaggtatctcaattggcagagttatatatggctcggattgtgtctctacatggtgtgtcgaagaagatcattttggatagaggatcacagtttacccccagattttggaaaagttttcatgagagtgcggatgataagttgaattttagcacagcttatcaccctcagactgaaaggactaatcaagtattggaagacatgttgagagcttgtaccctttagcatggtagtagttgggacaagagtctaccttatgctgagttctcatataataatagttaccgggccagtctgaagatgtcactgttcgagaccctatatggcaggaaatgcaggactcctctatattggatcagactaggggaagacaattctttggacctgaacttattcaagaggtagaagaacaagtctgtataattagggagaacttcagggtagctcagaccaggcaaaagagctacgctgataatagaaggagaccactggaaatttgaggaaggtgattatgtgtacctcaatatgtcaccccttcgtggaatgaggagattcaaagtcaagggcaaattgtcccctcgctacattgga

SEQ ID NO: 38738 - DNA, 327 bp, Zea Mays
catctcctgaatggagaagggctaatgagatgaaaatgatggggttccccctaggccttatatacacgaccgtgggatactccctacgtacatgatgatcacgttcttccagtatatcttctaactaatagcgaaccgacttagcttatcttaaggagaacctgccgactccatcctggtctatccctgacgttcgagggcgctgggcacgggaaagtcggacggttccttgagattgcgcgtaatccttggatgatccaggtatgggcccattgccttcttgggtcggcccatttcacttgcagtctttgcccaacccacgacgag

SEQ ID NO: 38739 - DNA, 497 bp, Zea Mays
aacaaatgagagaggaagttgtgggaagagggcggttgctgagcgtcgtaggaggcggcgtcgggaggcaggatcaagggagcgggcgcgaggttgaggatgggaaatgagaaaggtacaatgggcagaatcgagaatgatagaacagactattctttactgttttaataaagtaacagatatttgtataggtgtagccagagccggtcctgaacaggtgccgacggtgcggccgcaccgggcctctaagaaccaggcccctttccacagtagtttatgtagattacaacacaaagatcgataaaggctaaagcccatcaacgtacagtatgcaggtctgtttaagctcgattatttggcttctcgtggacgcttgagctgcaatcctcttgccttctcgtggaagccttcgctcacattgtccaggctatagcaatcgcccggcaccagcagcagctagagcgacaggtaggagggatcgccctgtccgctgctct

SEQ ID NO: 38740 - DNA, 276 bp, Zea Mays
ccaaacgaaagaacatcttaagggttgggatgttgtgtataaggtatcgccgcatggtagattacctgttcctaacgatgaagattataacttagacccggacacatgatggagagttcttccaagaagatgggctagaagggcgatttgagatagacttaatcgaagctatcggaatggacatagatattgaaatggttgttgatgaggaggatgatgaggtgcaaaatgagaatgacttagtaatccttgaaggcaatgacattaatgacgaac

SEQ ID NO: 38741 - DNA, 384 bp, Zea Mays
tgcacaagcacgctagtgatgtctgtagtctgctctagagacggtgcctttgatacgatttgacttccagttccaatagtttttaatccaacaggacgcctaggagactgacaggaagtcgccgagatatgcgacacgcagccgaagcggaacgcgcggcgcacacagcaggcgcgcgagataaggaaggtccggaagaggaaggtccagaagaggaaggtccggcagggggctaagataagggaatagccttccatgaataaatccttcctattattgagatagctttatataaaataaaaccttcctagtattagtagttctttcctgttatgagatcctaaattagtgggctgatggcctatatatatgctgtaaccgcac

SEQ ID NO: 38742 - DNA, 305 bp, Zea Mays
atttagtctggacgtttctttgaaaagaaaatctgatgttgctcagctcattatgaacttccacgcctacgctagtacgcagttcaacattcccattaaagcttttcaatcagataacgatggcgagtttgacaacaacgttcttcgctctttctattcttcccacggcatactcttgcgtctcacttgctcccacacgtcacaacaaaatggctatctccctctttaactcttacagatacctcgtgatcctggtaccaaacagccttaaatcgaagcggttggcgaaggcgtcttctttcttt

SEQ ID NO: 38743 - DNA, 394 bp, Zea Mays
tgcttaccgcaccgaatcgctgctctagcacccggaattcaatcttcttccaagcccataaatccactccccaaagacaaacgcagccagaagacaggccccagttccccaaaccactctctctcccactcacatggaccccaaatagagagaacaccacgaatcccccacgccaaattgcccgaccgaaccagaccaaatttcccggagtccaccgagtcacatgatcccatcgcgtccccgcgtaccggaacgcccgctccacccgccacccgagccccggaggatggaggtggagggaagtagtagagggggcagagagcacgggtgactcaccgtcccatcggcacggcgcggcgggtggagctctcgcggctggggttagggttccggc

SEQ ID NO: 38744 - DNA, 484 bp, Zea Mays
acgcttcacgcgaccgacagcacgaaaatgagataaggcaccgggaggagtatgaccgggatcacggcgtaccagcacggagtcgcgccacccgagttgagtcagatgtagcctcaactagtgggtcgttctggggatggtcgagacaacctactaccgactcccctccccgggaccggcgacacgaacaccggtaggaggacacgtgcggagtttccgcgcttactccattactccgggccatctagtggcctcctaacttcaaggtctccaatgtcgacaagtacgagcctaagcaggacccgggtggctggttggttgtttacacgactgctgcccgggccgtcggggtgacggaggatgtgatgacagcatacttgcccattgttctggggcaagatgctctacaatggctctgacacctaccccggcactacatcgatgattggagcgacttcagtcatcgcttcatcgctaatttcca

SEQ ID NO: 38745 - DNA, 806 bp, Zea Mays
ctggagacgtccaggaggtctgtaagtaaggaaggggactcattgtggttagagggggcatagacattagtcacggtgagggggtgttggatgcgcacatggagaaggtggtggtcaggcagaagggggaggagtggcaattctccaagcttagaacattgtcgttccagatcgtgaccacccctccacgcttgccacaggtgtcaatggagcgaaaacaatttagattacgggggaggaagtgttttgctttcattgcggagaggtcgcagagcttagattcttgaatacacacaatagtgggggtagaagaggactgggtacccctaaccacggtgcatttctgaggatcaccaaggccacgaacattccagcacatgatagaatatataggaggaacgaggattagtcattagaaacaaaacaagcactagtacaataccaaagttttgtataaggcatttatgatcctccacacaaggggagagcaatagggagggatcacagctgataacataagcgagggggagactcagccctagcggcagagagaagggtctagcatgatcacacattcggtgaacaagggcctcaccggtggatgtaaacttcggaccaagcttcatttcgccatccatgacaccacgcccaccgcatcgacggacttgcaccctagcctagtagcaagggcaagcttgcgaagcacgtggatgaggacagacacctcagtgtgggagaggacattgttgtcgcagatatccttctagacttttttagaggagtggaggtcatcgagcattgctttg

SEQ ID NO: 38746 - DNA, 434 bp, Zea Mays
aacgtacctactatcatgcttggtgtttcctagactacttcgacctcctattggttcagcctcccatggttgtagcgtgtctgaccattgttgcctgctccttgctgagctgcattctgtcttgctggggcattggggttggttgttgttgagccatcttcttcaggcaatgcatcgcccagtggccctactctccacagtggaagcatcctctgcatcctccttgcacagaggctacctgactgctctgattggttgctagggctagaagacgaggtgtctggttactctacctctgatactgattctgtcccagttgactgttctggtagtactgctactgctgagggtattgccttcggaattgctgctgatgatgacgctgacgttggttcttctgctgataccactgagggagactctgcttgaactgc

SEQ ID NO: 38747 - DNA, 562 bp, Zea Mays
gtggagtttgacccgtatggttgttctgtgaaggatcttctctcgcggaacgtgatcatcaggtgcaatagctccgggccgctctacccactgaagctgctcgtggctcactcccttgttgccagctccacatctgcctccctgtggcatcgtcgcctcggccaccctggtcgcgaggcactctccaaactcacttcggctatccctggttgtaataaaagcttggagtctttgtgccatgcatgtcagctaggacgacatgttcgtcttccttttaatccttcagtgtctcgagcgtccaacaactttgatcttattcattgtgacttatggacctctcctattgttagtgtctctggttacaaatattacttagttgttcttgatgactgctctcatcacctatggacgtttcccttacggcttaaatctgacacgttttccaccctgtctaactttttcgcctatgtgtccacccagttcagcgcacgcatcaaggccatccagagtgataacggccgggagttcgacaactccagcatgcgcaccttcttcctcacac

SEQ ID NO: 38748 - DNA, 444 bp, Zea Mays
atgaaaggcggcccaagcagcccataggccaggccatgctaggagatcaggattagagggataaggataagtttgttagattagatatcaaaaggagagatagtaggaatttgttagagaataagtaggggcagcacagtttatgtgcgcctgtactggactatataaagtccttagtttgtacctaggaagattagcaaagatcaatctaagaagagtattgctccttgccacattctatctcagccgtgcgccaacatggctccctctcgccctcaatcctcaaggcctcgccctactacccactcatacaacctcagaagtcgagatcattagaatctggtatcagatatgtcaggtcatgatgatgaagatagcatggcagccactgccctgcagccgtccctggcgtccatcgccacgacactaggtgaagtccaacgt

SEQ ID NO: 38749 - DNA, 329 bp, Zea Mays
catcgagggtgcgggagccggaaggaacggatcgtggagactgagctggcagccgcagactatggagttccaccacggcaccacctattcatgtgccgcgggagacgtacgtgaggtgctctgcctctcagccaccacacgacgattcacccacgtacacagaccacaccacggtgctctcctctacggtcacgagatcgtcctgtgcagcgggcacagttcggcgggctccgtcgtggagtggaggttatgccaccgagcacaaggccgcgcccgcgtcgagtttctacaggaaacatgttctctatttcttccccgtggagagtaga

SEQ ID NO: 38750 - DNA, 335 bp, Zea Mays
ggcaagtgctggtgtgttggacgcataattacctagcggagctccctgaggcttcaatttatagcacgcaacggcggtggtgctcaatttggaggagaagcgctggcgactggggagaggggtgagtcactgcggagatcaactatggcgatcgcagggcaagttgctatagcggtcactgggcagtcactatggctcacgatgaagcgataaatgtcctaaggcgtggcgcccccacggtgaatggcgaacacgtcggtgatggccgctcggccacgtcgctagtgcgaacagatgaataaccgagcgcacagtacttacaagctcatccgcgg

SEQ ID NO: 38751 - DNA, 390 bp, Zea Mays
gcttgccgacccaatgatgctgcggaagcgtcgcgagccgctggtccagcaggtacttgaggctgtagtggtcggttttgacgatgaaccggcgtccccaaaggtacagcctccaatgtcggaccgctaggacgaggccgatgagctcacgttcgtaagccgccagcgcttgatgacggggtgcgacagcccgactaaagaacgcgatgggatggcccccctggaccatcaccgcgccgaaaccatgggacgatgcgtcgcactcaacgacgaatggcttggagaagtccggcatggtgaggacgggggccgaggtgaccgcgtccttgagggcgacaaacgcctccgcggctcctgcgctccaagagaatccatccttcttcaacaagg

SEQ ID NO: 38752 - DNA, 330 bp, Zea Mays
ggtgccgacatagcacaaagcgatccccaaacggtccagatcagcgatcaaaggcaaggccacttttggaaccccggacctgctaagggcatcagccaccacatttaccttcacagggtgataatgaatggacaaatcataatctttaatcaattcgatccatcgacgctgcctcaaattcagctccttctgagtgaaaatgtacttgagacttttatgatcggtgtaaatgtcacaagactcgccatagagataatgcctccacgattttagagaaaagaccaccgcggccaaatcaagatcatgagttggataattcccttcatgctt

SEQ ID NO: 38753 - DNA, 350 bp, Zea Mays
attgcagtggtctgggtggtcttcgaaagaagcttgccggtcgcttcaaatcaaagcgccctcgtgcagacgatgctgactacactccaaccactgactcagaggcccaatcctcagctggggcagtgaatctatggacacagaagacattccgcatacccatcctgactatccaattgacatcacatgatggacatttataaagaggaggttctctatggcagaattttgctccaggagaactctcaatcaatatactctgccatcagacacaaatgttcaattctttcacactcagctctaatttgatgttttttggggcacattgatggataccaactttcacaaac

SEQ ID NO: 38754 - DNA, 356 bp, Zea Mays
aagatgccagcagctgcttggggcttggtacgtggccttactcacccatcaccacgctggttcaaagggacaactgggcagtaaaccaggtccggtaatgggtaaggattttatcacggataactctgaattccacccatgtgcagatattttcgttagtgaaacccatcagacactagaagctccccagccactctctgtaatactcatccataactcagtcttgacaaaccagtggagcacagtagggatacacagatcttttcaaggttggaaaccaacactgaattctattgagtccaacactccactgtccacctgaaccccttaggtttacccctttatctctctatttc

SEQ ID NO: 38755 - DNA, 432 bp, Zea Mays
gtcgttgtgaggggaagagcagcaacatcaagcataggtacatcatttcccccctacccccccacccgatgaagcaccagacccaccaacattccattcttttctttgtttcttctttgcatgacctgggtttttgtcatcttggtcatctccattatcccctccaccttcgccatcccagcgtgggtcatctttgaagaccacaaggtctgcaggagtgaatttctcatcttccaaaacaaaagtgatctcatatcctttagtgccaaagacaatgtcaatggtaaggggaagaggatctctattcatcattccaacaagcactctaatcactcccatctttctatatgtatacatatccacatccaaggtcgctccaattaccgaacctagagcccaaaatcctaggtagtgtctccaagcatggggaac

SEQ ID NO: 38756 - DNA, 401 bp, Zea Mays
cgacccgaatggtccctgcctgttcccttgagctctgcgctatatattctcggaactcgccccttcccccatcatgcacggcaacgggccgccgtgacccatgaaactaccacttgccaaatccgattacactaccatctgcgcctctactttctgctcgggttcgggtgaagattgatatcgccatcagtgcttgttggcgacagtctcggacgtttggagtcgttcggtgcctgttgattcctcgctggagttagcgctcggccgcatacccgccctgtgccgtggccagcctcgacgtccgcacaagccgtaggtatgacacgccgtacactttcgcgcagtcctatttaccgcgttgtgccagtccaatccatggattggtcaccagggagggagac

SEQ ID NO: 38757 - DNA, 497 bp, Zea Mays
gaaagaacacagagagaagtaaatctgattagtctattcttgctcttgcccctttcaatccggcgcactgggtttaggacttagaacacccctgcgcccttgctactttcggttccggtatacaccaaggcatgcatacatagacatatacagttactcctacttcctaggcctacttgaaagttgaagcaaaatagaaggctaacatcaggtttcatttgtagttgatagttgactaagtaagaagcctgatccactccaaatagaacacctgaattgcagaagtacattcttcgtatatattgcacagttgaccattgtttagtgtgtggacatcattcacttgtaaattcatatcggttatgtggagcactagagaaaagtgatcgtgcttcatgaaccttccttcatacaaccaatacccaggctcaggctcaaaaatatacaatctaaacaaccaaatgctacctccagtatggtatttagaatcatgaatt

SEQ ID NO: 38758 - DNA, 535 bp, Zea Mays
gcaattcatgcagccagagccccaatcacctgcatctccagtcctagatctctcctcaggtctctctccatcaagctcctcgcctctacctaaaatgggtaatactactccttctcctgaacatgttgatttaccccttgcacaacgtagggatcatagaatcaatgccggcaaacctccatctcgctttggctttgagtacgatatagctaactacatgtcatactgtcatgtgtcgcctgcatatagaaccttcatcgcatccctgcagactgtgtccatcccgaaagattggagatgtgcaaaacagaatccaaggtggaagaaggctatggaagaagaattacatgccctcatgaggaacaaaacatgggaacttgctctgctcccagaagggaagaaggttgtgggttgtaagtggatcttcactgtaaaacagacccctgagggcaagatagacaggtacaaagcaagactggttgcaaaaggatacagtcaaacatatgggattgactatgatgagacttttgcaccc

SEQ ID NO: 38759 - DNA, 535 bp, Zea Mays
gggttgcaaagtgcctgctaccttcaaatgactagccttgactctctggcaggtgtcacattcggatatgtacttggcaatttccctcttcattctggtccaccagtataaggatctgaggtcatgatacatcttattgctgcccgggtccatggagaattttgaaaggtgagcttcatccaatatcttctttctgagctcagggttcttgggaacaaccaatcggtctccaaaccataggattcctttgctgtcctgacggaagcatttgtatttttctgccttctgcttgatcatttccttaattacttgaacacccttgtctccaatctgtgccatgacgatttgctcttgtaatgtgggctccactgaaatataatttaaagcacctgaggaaacaacttctaggttcagtttgcacaactcatcacacacggtggtgactcttgcatccatgttcatacaattgcactgggctttcctgcttaaggcatctgccacaacattggctttgccaggatggtaatgcacctcc

SEQ ID NO: 38760 - DNA, 504 bp, Zea Mays
caaaatcgtttcggtgttgaaggaggcggtggcattgccaatggcaccaccggagcaggatcggtctagaaatcccatcaaaaacgcccaggcaagagtgggttggcattcaagacttgcacaatcgagggggaaggagaaaaaatttacttgggtagggtgggcacgcctgtgatctactcctacaccgatataggtaaggagattgtaggcataatatctgatggtcaggacgtccagactatcaagaggtaccactcctatgtccattacatcctctcctttgtttgtatatgattgtgtgattaaaggtgttgtctattatgtatactgatgaaaggtgttgttaggttgcattctttttttataggggggtactactgcgccactttcaagtgttacatgcctgggatgtctccaatggtaacctcaactctgacctatgtgcaggaaataccctttattgggatacactacatctcgggggagtcgtggatctcgtcc

SEQ ID NO: 38761 - DNA, 594 bp, Zea Mays
ggcggacgtaggtgcctagcgcgtgcagcacttcttgcagtaggttggggaagtgccctgtctcgaacattgatgtataatgttcgacaataggatcaaaccccatgaagtagtcctgctgggcgtagtcagcttcctcgtggacgtgttcatctccaccttcttcgtcgtcgtcgtcctcgtcatcgtcgtctccggagtcgtcagggtcgttgcctccgggtgcaggtgcttggaaggctggtgcaggcggtgctgacgttgatgacctagctgcgaaggccagggactctgccaacggggtgggcgtcggcagctgctcctctgagctatcctccaggttgactacattctccactcggatgggagggagatccgccggaacttcctcgactaccactgggtagaccgggatctaccgaggctgaggggcgtagctggtgtagatgtgggtagtttggagagtacgaaccatctacaagagaagagtcaactcagttgaaattttaaagaggtaaggctgataaaataagttataagaatgaaattagcaagttttgaataactaggctttccatttctaactaatctaac

SEQ ID NO: 38762 - DNA, 310 bp, Zea Mays
caagaaggcacagaaacagttcaagaaaatcagcaaaaagcgcaccacagcagatcaagaaagttgcagggtggtcaagatgctgtctgaagccagagagattgttgcctcaatgctggaatcctcatcgtatctgctgtcaagaaaaatcatgatgagttccagcaagtggtctcttttctccaagacattccagaagaaaagttttgtttgcgaggaggagcaactgcaggagttagagctggacatcattgatcttgagggtggagttgagtctttgttcagggcattaatccatagcagagtttcc

SEQ ID NO: 38763 - DNA, 357 bp, Zea Mays
gaagtgacagcgacctgtaaaatcactctgggattgtgaagtgtcaaacatttgttctaaactttttggtgactatgtgctgagacatgaacttcgacaccagaagaatgtttagcggtgggttgtaaattctcagtaaagctctcctgaatgttgttggttatatgccgaggcatgtgacctgatgcctgaagagtttagcggattggtgtttgtgtagaatattgcctctgcttacaataagagtcaactatgaatttaagttgaatttgtagaagtataatgtcgtgttcaacatggtaggaggctctggacgagctgatttaacatcacgccatcacatatgagtggtacgcc

SEQ ID NO: 38764 - DNA, 874 bp, Zea Mays
agtgaacaaattttaagggaagttgctatgttcttaacaaaaatccaaagataaagagggtagaaggtgatcggttcagaagaacgctgaagatcgaaccctgacaaatatctgaagaacaccaaaagatccacggcactgttgatttggaggaacttggatgaatcggtgaggatttgatcgcctgggagtagctcgatacgtggcatcgttccgcgggccgagccacgtgtggccggagttggtcaccggcgaccgccgtgactcgattaacttttgtcgtggtgtcacccgtgcctcgatctacctcactgtacttcacctctacgtggtatacatgcgctagcaaggttatccgcggccgctgatcgcttgtcggtccgctgtggctttaaatagcgtcatgaaccacggcgaggcactcaccgcctcaaccgcaagcttgagaagaacccaaaattcgcactgccttctccacctcctcccaaattgattgtgcacggtgaaactacagtctcttacggtcgtatagccccaatcccatcccccaatttcacccagagccggcgcgacgtcattttccccttttctctgtcaccggtgagcacaagactccgtgctccttggccggaccactctggtaaggctctgcctctctcgagtgttgttctagcagctctgtaggcacgtaaagctcactgtagcatctatttgaccaattcgggcataagtgattgggaacacgggatcaacatcacagtttccgtcgtgcacgtgggcagaccattctcaaagtgttcaagccaaagtgaagctcgttcctaggtcgccttgggtaggttatgctcccctgtcgctcgactgagcattcgcc

SEQ ID NO: 38765 - DNA, 373 bp, Zea Mays
gtcatttagtgcactaaaattaccacattcatttaacaaacgcattcaccacaatcatgtatcgatgcgcccttcacacactaatttgcattttagcttagacatcatatgaacactactactttttacccgcgaccgtaaccatacatatgtagactacaacgagcaattctccgtgattacgagcttaaccacgtcatctaagaattcggttaactagagcaacgacatcgccgctaaataacatacacgtcaacttgccttttattgccgcaatccgagacacaacatatactacaacatttttataaacccacagattcacaagtatattcgcacaccgaccaactcatatgaatcgtaaaccacaaat

SEQ ID NO: 38766 - DNA, 423 bp, Zea Mays
cttgaaaggctcgttctgcctcctcggtccaagagaatgggccagacttccgtaatagcttgaagaagggtagcgccctctcggccagtcttgagatgaagcggctaagggtggccagtgaccctgtaagcttctggacgtccttgattcgggccggaggcctcattgtctcaatttctttgatcttctctaggtttacttcaatgccccggtatgaaaccaggaatcccagcaacttccctgcggagacaccaaagatgcacttttcgggttcagtctcgtgcgtgttgcccgcagcttatcaaagaccagggttaagtcttccactagggtcgaccctctcttagtcttgaccacgatgtcatcaatgtatacctctaccctgtccctaatcaggtcaccaaaggtcttactcatcgcccg

SEQ ID NO: 38767 - DNA, 300 bp, Zea Mays
gaaaagttatgcggacaaacggcgaatgcctttgtattttctgattggagattatgtttatctgaaggtctccccgatgaagggggtatcacgtttcggggttaaagggaagcttgcaccccggtacattggtcctttccctatacttgagcaatgtggaccagtggtataccgactccaactacccgaaaccttgtctgctgtgcataatgtgttccacgtgtctcaactgaagaagtgtcttcgggttccagatcgaaccattgaagtgacagatgttgtccttgaaccagacttaac

SEQ ID NO: 38768 - DNA, 518 bp, Zea Mays
aaggtaaaccccaaacttcttcaacacaatagcaatcatcccatttagggggaatcttaggccagctttaaagaagcttttgaacaccacaacctcattcttttccggcttcggaatagtttcctccccgccgaaacgaaccagctccttttttgcctcactaaagtagcccagcttcaccaattttggaagatcagcttcagagatggtggactttccaaagtccaaatgactaggtttgcttggcatcccgcagctgtactcatcttcggaaccaacttcttcgacaccagcttgtgttgcttcggcagcaggtgtgtcctctgatggaaccagcccagagcgcctcattgcttcagaaatcggaacagtttcaacggcttcggtctcgtctccatcacgctcaaccctagcagtggagcgtattctggccatttgattttaaactttcttgaaaaattctttggaagtcaataactttttttccgaagctcttatcgtgacgaagcacaatccaa

SEQ ID NO: 38769 - DNA, 285 bp, Zea Mays
ctaaatcactctgtccatagagacagtgcaaactacgggtgaacagaagtgttcctagtgatctagcgcagtttagttcaattgaatgggtcgaggagcatcagtggcatgtaagagtgctaaaacaagagagcagaggacaagattggacctgaatcaagctagccacgacaaggaccttttcacggtggcggaaacccaatttgggggaaatgagcaattcgtggtctctggtgaacaattggaggcaagtgctggtgctttggatgggtaattaccctatgg

SEQ ID NO: 38770 - DNA, 1035 bp, Zea Mays
taccgacccatgatggctaactgatttacaatgcatcatggcattagatgtggcagttgctagctttgtgcagaagacgctaactagctatcaaaacccacgacgaatatgcatggactggataagcagcatgcaaatttatatttagacataagaatgacacgggcatagcatttggcataggatttggagttcctcctgtgcatctcacggcaggtgcccttgttgatttgaacacaggcgtggagtacagcgaggaatatttccggcatgttgatcttagctctcgttcttgggaacaagactcttccctatccggcttgtatgacaagtccggcgtggggccttgagacatctcacagcgacttcctcgagggagcgaagccacaaatgaggccttgatcatggaggtgatggtggacatagctcttgttcataagaacaatgctcttccctgtctggtttgcaaggcaaatccggcgtggggccttgatcatggagatgttgataaagatttgcttgctgccgagcgccgtggagccacgaagatgaagagaggaaggggatcaagagagcgccatgctgtttttttttctcaccttcacaggaactccgacgtgcaacgacggccttcaccacgaactcctcttctgggctgatgatggtgcggcagagagtcagggtgatggttatttttttttggagatgaactgcagcaggtcttgcggtgatttggaggcagcctcacggcagtatcgaatcgagtcccctggatgatcgttgtggcctgctatttatagcgcagggaggccagcagttcctgagcaattttggcgctctttgcatttgattttcttttgctaatgatgccggcgccggagtttgaatcgcggagcgcgttaatcgtgggagcgtgtgggagttgctttcttctgactcaatcagtcgatacagaagttgctattctttctccatggcatgtctggcgtacgtatgcatgtacactgcatgtacgtttgtgaaagggaaatgtgc

SEQ ID NO: 38771 - DNA, 313 bp, Zea Mays
ccggaacaaattagatggaaatacaagacaacatagcataaaaggatgcatcttttcacaccttttggggtcttgaaggcagcagcagtctcgcccacccaacccaaaccttgagcttgggcgatgccgccaaagaaaggcagaagctgtgagccgttgacggcaccaagctggtaagcttcctgaaagactgaagggcgccttgctcggatcagatcttgggagtaccgccgtgcgcaatgcggcaagttggaggggcgtcttcttcgctgtagcttccctatccgatcgtcccgcggcatcgcctgagttt

SEQ ID NO: 38772 - DNA, 317 bp, Zea Mays
tcacatgaagttttcttctatgagatcttacgtggcatagtttccttctttcacataaggttacgacgtgtctcgccacctacccaaaataaaatgtgtagatagtgaccactcgccgtatcaaaccaggagccgctgggacttctagtggtcgtaaccaggatggtaatcaagaagtacctcttcctccatctccaccttacacacccgagcagttttttgcacaatttctgggagctcaaagaaatatggaaaacttcagaaaaacatggaagcagagcttcacaacattgctgacaacactctccatgggcaac

SEQ ID NO: 38773 - DNA, 329 bp, Zea Mays
ccaggatcagcggtggagcagcatcgagaaggtggtcgatcagaacgcagccaacatcgccaatcttcaagggaggctcaacgacgaagaactgacgcgcgtattggggaacgcttggacggacagatggcggaattccagcaagaccaagcgtatcgtgtccaggaattgatggcaactacttccactcgcgtggcggtgctggaaaacgtgtcttccgtgtttgaggcatggcgaccacacatcgagggttccattgactccgtcaggtcttcagtcgacaccatgcggtcagagctcgcccgtctcactcagctcctggagggcgg

SEQ ID NO: 38774 - DNA, 366 bp, Zea Mays
gtcacacagtgcagtgatgcttgcagacttgttagaaaagagaattgaggggattggtaaggaaaacgttactcagattgtcactgataatggtgctaattataaggcagcatgtaagattctaatggagaggattcctaccttgttctgcactccttgtgcggcacattgcttggaccttatgttggaggacataggaaagctgaaggattttaagaagcctattgctcgtgctcgtcatgtcaccacttttatttataggcatgggaggatacttagtgaaatgagggtgcatacaaatgagatggatcttgtgagacctgctgctactaggtttgctactgccttccttaccatgaagagttt

SEQ ID NO: 38775 - DNA, 472 bp, Zea Mays
ctttctctgacagctcatctatttgcttcttgagttcaaccaactctgatccagataccctgtaagctcttttataaatgggggtgttgccaggaagaagctctatggcaaactcaactttccgctcaggtggcatacctagtaaatctttcgggaacacatccggaaactctaacacaacctttatagtctcgagtgaatctgcctccttgctatcaatagccatctgatgacaacctcctttccttggctcgggtgagactaactcagctaccacttcttctcctagtggggacaccaacttaattatcctcttatcacaactgataactgcttggtacttatctagccaattcatccctaggatgacatctattccctgagttcccattactatgacgttagcgggaaactctatcccccttatttccacacttacattcaagcaaacactatcggctcgaactttacc

SEQ ID NO: 38776 - DNA, 480 bp, Zea Mays
gaagacgagatgtgcgaataatcagtttggtgtttcactcgtctagttgataaatgttgtcgtaaatacttgtgcgaaaatttggtcataagagtgtagtgggcatgtggtgttggttggatgtgataagtagattggaagtgcgggtttgtttgagcactgtgttgtcgaacgtgtatgtcgaagttcattgtagtagtgattgcgttaagttaaaaggtaatgtctcgagtgcacgctacaatatggttgcatgcgagatagggtaaaataaggtgtgctcgacatgaatgttcggtcgttgtaggtagaaattgtctttgcttaaatagagaggtggtgacatgccaaagtagtcatcgcttcctctatgtttataagtagagtcgagtcgatgcgcattatgtgttcgttaaattatgctttgcatatagtgtatggttgtgctcgcgatttcgagtagtcacatcgggtggtcaa

SEQ ID NO: 38777 - DNA, 290 bp, Zea Mays
caaaaagtttggattggaaaatgcaaagtctattaagactcctatggcaacaaatggtcatcttgatttagatgagggaggtaccattgttgatcaaaaactttttcgttcaattattggtaatttgctctacattaccgcatctaggcctgatgttatgtttagtgtttgatgtgtgctcgttttcaagcatcacctagagaggttcacttaaaggccgccaaaagaattctaagatatttgaagcatacccccaatagtgctcaatttgaattgattgggtattcgga

SEQ ID NO: 38778 - DNA, 452 bp, Zea Mays
atcgggggtgaggagtggtgctctgagtttgtgacaagataacggaacaggccgaacattcaatttatagagggcgaccgcgagtaggacgaatttgaacggagaagtgctcgcggtgataggagaaggagtcatcggagcaactatcatggcgctcactgatacaatggctcgaagatggtaattataagcttgccacgacaattgctacatggtgaaagggtcactgcgtggcgcaatcacgaagaacggcgtccacctcggcgatggccgcttggccacgtcgccggcaagtggctacagcgactgagcagtaacagtgccccaagttcatccctcgcgcaagatcattgaccgccagccattatccgcgcaccagagcgcacgaatcgcgacacccttcgtgaatcgcagcgcgtgttcaccggcggcgaggtgcactgcatctgaag

SEQ ID NO: 38779 - DNA, 325 bp, Zea Mays
cattcaaagttataaaaatattacacactttgttcagcaaatattacattccaaatgtttttacaataacaactattcttctttcaaaactgcttctgcagcttcgttcaacagtcgagaaacagcttcatctaaaatagcttcggccattttagtaatttcttcctctctctttgcttctgggacggttgttggctcgaagggctctggggaaggagatagctcagctgcgatagaaaacgtaaataagttcgaagttgcaaaaataaaacataaagctagaagttattaagcaatacatatcctcttttctagttccacagtt

SEQ ID NO: 38780 - DNA, 453 bp, Zea Mays
cggctgattcggatgagttcgccggagacaaccgctccacggccttgcgccacatgccttggcacattcaccgcatcgccgtgactcgcattagtcgtccgttcattgccggggagcttgccacggtgaaagccactaagattgcgcgctagtaaccttcttcccctccggccgccagcacatctttgtgaaattggacgccaccgcccccagagcctataaattaccgctctcgtctgctccgctatgtagttgtgcaaccagtgaagcaacccgtgcctcaaatcatccactagaactccccaatttagaatttcccccaaatcactcaagaacaccgagcagtttgacctcgccgtggccagcgtgtctcaggtccgctcataccctctgccctcccgttttagtgttattgtgtgcccctgatactccccgaccaactcgattgagcta

SEQ ID NO: 38781 - DNA, 288 bp, Zea Mays
tcatggtgatctctaccattggccaagggtcgtgacagtcccctcggtgccgctctcgcttagagggccccacgcctgccttgctgcgcgcgcatgcgcgagctggtctaagcagcgcgggcgaaagcgaccgccacctccgtgttggcactggaggaagggacgtgcacacttagggtgtaggaaggtgaaactgcgatggagcacggggacaacaacacatggacgccacctgttcgagcgaatgcctggatccctaaaccatgggctgccagtgaggtaacctcc

SEQ ID NO: 38782 - DNA, 427 bp, Zea Mays
ggtgggtcctacgggtgtgctcctaaaacttcaaagccgaagctgtgtgcaggtccaggtcctagtctagaggtaggtagtctcaaactatagagactacctcctaggggtcgggccaccaactttttctttggtatactggtatccagcctcgacacgtcgagcctacctcctaggggggccaagtaccaggtggtagttgatgacgctacacacaacaagggaaaataacatacagataagttccagtgctacttgattaacagttcttaaaatatgttacacaaccaaaagttattacagccacccccagcgagaccctcgccttgtctctacaggtacaactattcggtgtcggcaggatcatgctgaaagcgagcggccaccatctccactgcatcttgtacgctctctcggtcgacgtctt

SEQ ID NO: 38783 - DNA, 420 bp, Zea Mays
taggtcaacacatcagaagtctagagctattgtaggagagtaactttggtacatatatcttctttggttgttaaacaaaaattaaagaaactgcagcccaaagttgctatgtcagaactgtgttgaacaactgaaactgaatcctagaacagaaatggtcacagtgggatggggctaaattggacgcgccatatctttgaattcactcggttttgacccaagtatcctatagtaagtttgaacgctgttgtttagtgaacaaactttattaatgaagtttgctctgttcttaacaagaatcaagagaataagtgggtggaagggggttgattcagataaacattgaagatctagtgcactgaaatatctgaaacaaagatctaggcactgttgaatcggatgagttcggatgaatcggtg

SEQ ID NO: 38784 - DNA, 300 bp, Zea Mays
agggaagactggaattccttccaagactatggatccttccgggagttcccaagccttcctctctcctctgatagagaccgggtgaccttcaagaatctgggggtctttagctctgatgggttgaacagggttggatgaagcgggctcttggatccgcagggctctacgttggttatgggttaccaagtaggccttctggacgtgctcatccttggcttgcttcagggcttcaacagcaatggcttcacgactttccaaggcagctacacgggcttgagctgaggtgagatccacatggag

SEQ ID NO: 38785 - DNA, 348 bp, Zea Mays
ctgctctgaaaaaactcttgaagaccaccacttcatcatccttcggcgctggggtggtttcttctccggcaaatcgaaccatttccttttaacttcgccaaagtagccaagcttcatcatcatcggcatgccagcttcaaacatagtagacttttcaaaatctagatggctcggttttgatgggatcaaaatactataatcttcttcgtcctcttcaacatattattcttcagcagtggtttgttcagcttcggcaacaggggcaccttcgtcagtagttccctctgtcataactagacctgactgtctcatgacttccgaaattggagctgtctcggtggcctcggt

SEQ ID NO: 38786 - DNA, 614 bp, Zea Mays
tcaggcacttaacttgaaataattcggacagttccgccacaacaaaaggtcattagctagcccaataacgtcttcatccactagttgtactctaataccctctcgtgcgaatacaatgccctcaatatcatagaaacactatttttagtttcaaaggcatacctaaattgtgtttatgtccactcaagtaaaacaccacacatcaatatgacacatcatttctcaaaataaaataaagactatggaaaatttagccaaattgagagagagaactatccaaacatatgttaaggttgtaaggcacctttttccactaggctagctaatgaccttttgtgatacctgggctagctaatgaccttttgtgatacctggtttccaataatcccctctattcaagggatacctagattgtgtttatgtccactcaagtaaaacaccacacatcaatatgacacatcatttctcaaaataaaataaagactatggaaaatttagccaaattgcgtgagtgaactgtccaaacataggttaaggttgtaaggcacctttttccaccatacagttgataaaaagttgtaatataaagaattcaaaacaataggtcacctttt

SEQ ID NO: 38787 - DNA, 551 bp, Zea Mays
taaatttcttatgtgcttaagcttccgtcaaatccatggagtttttcttagtaagaccatattaaccttgtctatctatatcctctaagatcaacggtgttttcatacaagatttaccgatgtactgctaatgtcctatgccaatgaaatatgggaagcctgtagatatatggattttcattgctttgcagtcttttttgtgttttgtttctaatttttaaataggtcttgacctgccacctccaccttctaatatttaaataggtcatgacaatacacatgagtaagactataggatgatgacttggactactaatatttctgagatttatgtgagaacataataaacaacattaatatttctaggaatgtattatggactctgactgtatgactataccaatatctgtacagagagatcgcccctcgcgtaatagctgacgggcaggtatgcactcctttttgtattgattgaataacttgtagagtggtatattttcaaaaaagtaagttggtatgatgcttgatgtatatcaatgtatgactactct

SEQ ID NO: 38788 - DNA, 309 bp, Zea Mays
cggccgccgcttcttctccttgcatccggttcaggatttccagcggcctcgactcccgatccggtctccgtaggagcgtcggtatcctcgtgtctccggcagtctttcgaacctcggttggtcccgattggcgagaaacccccgcgtcgaattggcggccaaggggcgcgggacgcatcattcgattcttggcggctgcttgcctgcttgtgcttgagcgcttaacagaacttcgcgagctgggctttctctaggtggaaaggtgagcgattcgacgacttctttaaccgattttgcgctttactgtta

SEQ ID NO: 38789 - DNA, 455 bp, Zea Mays
agaatgctcggagatttaatccgatccgcacgtcgaatccgacggtgcacgtacatcgtccccaatcccgcgctcgttcctccgatcggcggcggcgcgagcccaacggcgagaaatcgaggcaacaccgtcgatgaatccttaatgcaagcccagaatttacacagaggaggtgagtacggactctatgggaacacgtaccggtgacgaagggccatggaaatagctagccacagatgatggccgcacggcggatcttgcggactccggcgagcaatcgtcgaggttctagtctccttgcgcccctggattcatgcccacaccttcacgaatacctgcaccctctcccggttccgcacacgggttgaatcgacggccaaccaaggttgcccacgccgcgacgctccctcatcacactactccccgacgtggttttctcgctacgctgttcctac

SEQ ID NO: 38790 - DNA, 272 bp, Zea Mays
tgcccctaaaacttcatagcattctcgttgatcatcctagctgatcctgtttgcgtacctctctcttcacttgaatctggtaaccattttccttgtgaatcatgttgtggccttatcatccaaatctctggatccttcattgattctgccctattatctggttatctgctataaccgattctcaagtatcggatgttgatctcgcctaaatctctcatttctgatcattctcatacccccttctctgaggctcatgacgttgttttatcgat

SEQ ID NO: 38791 - DNA, 463 bp, Zea Mays
ctaagatgctctatattccatgagttccctatttctgtgccatccatttgagtaagacgatatgatccaggccgagtgacttctgctactatgaatggtccttcccatagtggcgataatttgtgtcgtccctcccccgttagaattcagcggaggacaagatctcccactgtgaaggatcgatgccatatggccttatcatgatagcgcctcagagtttgctggtacttggctgactgaatcactatattcaatcgttcttcttccagtatatcaacatcctctagtctagtggcctcagcttcagctatgttttcgaagatcaatcttggtgccccaaacttgagatcagcaggtagtactacctctgaatcatagaccataaagaagggagtgtttccatgcaaagctcggctaggttgagttctcaggctccagaccacatatgccaactctctgatcc

SEQ ID NO: 38792 - DNA, 395 bp, Zea Mays
attggctgcgccctggcaacacgacgcagtatttgtgccgttcgaacttggctgcgtcatgtgattgctatgtcgcgctctcgcttaatcggatcgctcccgttgagttggaccgccatcgctgagtcacacatttttcgagggccctgaaggcattgcatgtgtgtcgcaactattgagttacaattgcgcttgttgcgtctgttgtgtctgttgcgcgtacttatcgtgtacccctactaccaagccacagttgtgtctgttgcacttattacgaaggatggatgtgttgtcgtagccctgatggctgcacacgcgttgacaccagacgctagagcttgtactcgtgtggattgtggtgggttgttcaagcccctgaagccacatcatagcgc

SEQ ID NO: 38793 - DNA, 285 bp, Zea Mays
ctcatttctagttagccagactgccgaaagcaaagcggatgctgcagttaacaacaacaaattttgtttattaccacccatcttagaccagctattaaacaactcctctgtactttgagggggtgatattccaaacaataggtatacagcacgccacagaaatttggcataagaacaactgaaaaaatgttgaatagtctctggtgagtgacaaaagctacaacttgtatcaccagtccaatttcggcgagcaaagttatcgttggttaaaatcacacctttttt

SEQ ID NO: 38794 - DNA, 281 bp, Zea Mays
tctcaagatggtggcgctggcaccagtcacgatggccgccattgccgacacatgccgcctagttattccgtgcctaaaacttctatctgaagggcgctacgctaagtagaagagcggggaaaatccctgggagcgaactcatcgaagacggcggccgagacgatgctggccacgacgaggggcgataccgcggcaggggaggagggccaacgagaaattgcccgtacgcgaggcgatttcaggcacccgcagcacccggattgactaccgcgatcctaggc

SEQ ID NO: 38795 - DNA, 799 bp, Zea Mays
gcactaataatcaactacggagctcttgccacggtgaccgagagcatggcggctagagcgttgtgttcccggcgatccctggcggttcggttcgattaaagggatcggggagcttaaggaggacctagggatgctagaacaatcaacagaggagtatgaattcacctggaataggctggccgcggtgaagtgttcttacggggtgttcaaaccgatttgggggaaattaggaattcgagctctcaggtgaacgattgaggacgatctttggtggctgggtgcgcgatgatgttgtgaagctctctgtggggtcaatttatagatccccggggcggtggcacttaatttaagcggacagtgggggcggccggagatgaggaagaaccttggcacggtgaatacgtgtccaatggcgtggcattaactccggtggtcgacggggagtttagagggagtcacggcgatgcggtggcgaggttgggacacgcggtggacaacggcgatgacacgacgatggcgagcagctgtatccccggcagtgagcaaaggggatgaattgcggctagccggagtgacttccaggtcactggcggcgaagatattttgaccccgcgacgttatcgacttaccccgagcgtgaatcacgacgccggcgacgcgaatcgcggcggggaggtcaccggcggtgggattcttttgctgcgtccgatctgatccgttgggggcactgtaccatcgtgaactcccatcagggcatctgacagagcattttgcagaggaatttcctcccaatttcata

SEQ ID NO: 38796 - DNA, 415 bp, Zea Mays
tccaaattctagacagcagatcagtaatcgggggacctaggaggacaaacgagaagagaagatctagaggggtactaacctgagaagagggagacgacacagttagggttcactcgcagctgagaaccgatcgaggtcgtaggagagcgatctaacctgagaagagggaggccacatggctaggcttcactcgcagctgagaaccgatcgaggtcgtaggagagcgatccttgcgaagcagatgaaaacaattgagaagataaagcagatgaaagtagatgagcaaccaagaaaggggctaaccttgcgaagcagatgaaagtagatggacaacgaagcagatgaacccgagaggcgagagccaagtagatcgacaaatcgagcttgtccgcgggcacggtgtcgtcaccacggg

SEQ ID NO: 38797 - DNA, 354 bp, Zea Mays
tcagggtcgatccatactgtggcatagaacactcggacccactcctcaacatatcagccaccaaaagtcattaaagagtacaacccttgtaaatatgtgatgtgaccctctgactctgcatcggccgctgtacagaaagaagagagatccagatgctggtgagcccgcagagctatctgagctaacaactgagccctgaagaaggactcttgggtcctggtgttgaagagtggtgcaactgccggatcccgctgagcaggtagccaagagtccactagctcatgcctgaaccgacgcaccctgatagatgtggctctttgaaggtcaagcaggggcaggtccacagcaagagga

SEQ ID NO: 38798 - DNA, 574 bp, Zea Mays
cggggggcattagggacacacgaggatactgaaatgaaagagggggcatgagcggacatggagcacgctgaccatggtgagatcactttacgcggtgctcgagatcgatttgggggaactccgaaattggcgagctctagtgagcaattggaggcacagtttggtggcatgggtgattgattaccttacggacccgacgacacgctcaatttataggctctgggggcggtggcgcgtgaattggagttggcgcggtggcggccggagagaaggagatgtactatcacgagagcttggtggctttcatcgtggcggactcaccagcgacgagccagtgatatagagcatcttacggtgactcactgcgacgtggtaaggctttaaggaacgcagccgggccagataacggcaaactccggtgatgccagcgcgatcaaccgcggcaggacacgacaaccggtgataacagtggccggaggttatctatggcacgatatttcttacccctacttcgttaaccaccagcgccggacacgaatcaccgcggcggcacgaattcggcgcatggctcgtc

SEQ ID NO: 38799 - DNA, 307 bp, Zea Mays
aaggcaaatgggaagcttcaattgtgcatcgactacaccagcctgaatatggcatgccccaaggacccgtatccacttccgcgtatagatcagattgtggactttacctcggggtgcgacctcttgtccttcttggacgcctactctagtttccatcaaatccggatggctaaggaggataggaggcataccgcttttgtgactgtagatggactatactgttatgttgtaatgccctacggtctgaggaacgccttgccaacatttgttcgagcgatgagtaagaccttcagggaccggatccggg

SEQ ID NO: 38800 - DNA, 471 bp, Zea Mays
ggtcactgggacttggacgcgtacaggctacgctgttatttaaatagacttatagacctcctcacaataccgcagtacagtgccacaacagcccaactcaaagtctgaataccgcagtcgcagacatggttttcggttcatcaagcaaaagaaagcgtgcagatgaaaaagaagatgatgatgtgcaagtcgtccaagatgtgcctgtagatatccaagatgctgacgcagacagcggtgacgaagatggggctacggctgcggctactggtatgagacatccactactagatgaaattaatattattggtgttccgagtggaaaaaatgttggtggaacaaaggagtggcagtgtaaacattgcaagaaatcgtacaaaggtagtttaactagagttcgtgttcatttgcttggtccattacctggtaaaaaggcacaaattgctcgttgtatgtcattgcaaaacgatc

SEQ ID NO: 38801 - DNA, 389 bp, Zea Mays
ccctaaggtatgccctaggggtgattgttgaagatttattgtgaatgaggagagagcagcaacaacgaacaatgatgctcatatggaaggggtagcaatcgtcgtacgaataaagctgcaacaccggtaatttggcgaatctttaaagcaatcactctgtttgtgatgtttctgaacaacagtctgatggcgctctctggccgcctagcaacagtactctagtctgttactgggcgtcttttgcagtagcctggcggtgcttttgatggcaatagcagtagcctggcgacatttttctcatcctttttttgaactcttacatatatatttattctatctaccttagcatgttgtaggtaaacatacaaggaatacgtttggagttccag

SEQ ID NO: 38802 - DNA, 694 bp, Zea Mays
aatcaaattattcttaacataaaatcattcctccatccagaccctgggccaccttttctgaaatgttggaaccgggtatcttgcattgggacgagcaatgaaaccataacaaccgaagttgttgtgatactgttctttgctagtggccttcgtttcgtacaatagttcatgcatattgcaaaaacactttgcactcagttccatcccttggcttcttacagcccaaacaaacatccccatcctaattatagcttcgggagtaattttatgaagaaagatctggaatatcttcaacacttcaaccacaaatttgcttaatgggaaccgaaggcctgccttcataaagcttcggtaaacaacaacttcattttattcaggagcaggggcggtgctgtctcctccaaccctcacaatagacatatcacgaaagtaccttcccctcatggcgtcaacctgactttgtttaatggtcgactttccaaagatagtatggcttggccgccagggtcgatcttcggaatcttcatctccactttccacatcaaaatcatcactatcatcagaatcttcagataaatccgccattatctccttggtaatcttctctgtatttgtttttgccatagattcataaaacccatcaataaaagggtccacaaccttcttctccttggccaccttcgtcacctcagac

SEQ ID NO: 38803 - DNA, 436 bp, Zea Mays
gggcgcggtcgactgcgaggaggttcgtcggttgaggtacaaagtctatggcctgaggaaggaggtggaccatcgtgagggagagttgtggcaggtgtaggagatcctgcaggcggtgacggtcgagcgggatgccctctccatgtccttggaggatgaacatttcgagggccgggctctgaacgccaggataggaggtattttgccgaagccttgtttcgctttttgggtttggtcttttttcttagccatggcttgacaccctcatccactttctagggctcgagaaggatctgacggccgcagcccagacctgtatgaccctatttcggaccatggagcagaagaggaccgagctaagggagttgaccgacgtggtaaaggacctcttccaggacctcgacgtagtgggcatccctcagagtggacccccgcg

SEQ ID NO: 38804 - DNA, 311 bp, Zea Mays
accggggaaggcttctacaagatttggccaaagggcctccgggtaacggatcggaaaaatttcagttttatcgaagtttatcttcagccctaaacacccttcgaaagtctctagaattgattttagcactttgagatctgctttatccgctctaatgaacacccctgcatcgtctgcgtatagggaacagcgaagttttgcccctcttggcaggacccgccccagtaacctagcctcggccgcccgctcgatcatcctctgaagcggatccattgctaatatgaagagaaaaggtgaaaggggaccccccc

SEQ ID NO: 38805 - DNA, 442 bp, Zea Mays
cctcaacctttgcagggttttctggatgccgtcgtggcctgtggagtgggctatgtgcaggatagcaggaagtatgctggaggattgtggtacaaaaatctgattgccatgcattatgagtccctctctgatctgccatggtgcaccttgctgccctatactgatctgattgtgcagcagctgaaactcttggttgcttgcacagtcttgttggaggtctttgtagagttgaaaggttagtgttgagatcgtatacaccgatccactggtggtttccctgcgcgaaagagcgtctgctactatatttagccgaccagccctatattccaccttgaagttgaaaccaaatagcttactaatccactgatgctgaggtacaattgagagccattgatcgagcatatacttgaggctaaaatggtctgtacgtaccacaaacttc

SEQ ID NO: 38806 - DNA, 337 bp, Zea Mays
caaattttggactataatatgttggttgtgacattttggacagttgttttaatggtgcaaattatggacagttgttttaactattgtaactgcagtgctttttgtaatgtgctaaatagctggatgtgaagctacattagactgttatatgtaatgtgctgtttggaatgtgttggactgctacttgtaaggtcctacaaaatttggacctataatatgctctagtatgttgtgttggactgctatttctaatatgttgtgtgcctgtgttggactgttgtttacaaagagagtctgcaactcacatgtcttgtaaaagcagacactgattgagtga

SEQ ID NO: 38807 - DNA, 796 bp, Zea Mays
ggatgtggatactgatatatctgatgaagacgaaggtgacgacgatgaactgaaagaaagcataaatggttcagaggatgaagctttagaccagaatgaagacagcgaagaggaagacaagtcaaaaggcagtggctctaaagcgcagaagaggaagttaaatgattatattggacagctaagttctgctgatgcaagccttcgagttctgaagaggttagcaactgccaagaaggctgaagttccatctgatgaaactggtaaaattctatccgatgaagatttcaaacgcatcaaagaactcaaggtatgtggattttggatggcttatagatctacagtaaattttttttaaagctaattttggcaaaataaatttgctcatattctgatcttagatggatcattgatgtcctaaccgaatatatttgtgtttcaggcaaagaaagaggcgaagctggctttggctcagcatggactaatcaagggtggcgacacaaggtctgtaacctttaagatgccatcatctgaccagctcagcaggaagcgtgtcgatccacttgagcttgaggtgctctccttgtacctttgtcgcgcactcacgcactcacacagtgacacacatgcaatgcacacgcttgacactgaataaatttcgtgaggcaggctcacgtcaggagaaagatgtccaaggaagaaaggttagcgatggtgaaagctggaagagaggatagaggtccttacatggcaagggcggccgtgaaacagaaaaaggtaagcttcctggctgttggcg

SEQ ID NO: 38808 - DNA, 482 bp, Zea Mays
cttgtcacatcagttggggtcgagcgcttggcgtcatcacggtggtggtctggtggagcacagagcaggcagcacctccggtgatggcgcgcagaggtgaacagtggctcagtgcaggtaagccgcgaggcgtggaggttgagcagcagggaacgaagcggaaacgtcacatgtctagcacgcaaggagagccgagaggataatttgaggcagggcacagactcagtgtggctctagccatgattatataggtcacgcagggagtaacagacgcgacaatggtagtaattggagaggagaaatgtggccattaatggctggaagaatagcaggtgtttaatggagagggaagaaatgacagaaacgtcgtgtcaagtggaggaggaggtgacgggtcgtggcaggagctcaggcgatgggaggcgagcggacaactcgcgtttgcagcagggagagaggccgcgaagcgtgaccgttcgtgc

SEQ ID NO: 38809 - DNA, 380 bp, Zea Mays
gtgatctagcacggtctagttcaattggccgggtcgagaagcatcaagggcatacaagagtggtaaaacaagagctaggaaggcgtgatcggacctgtgaagggctgaccgcggcgagctcacacacgtggcgttcttgaccgatttggggtaaatctcaaattgaagcgctctggtggacgatctgaggcacaggctggtgtattgggtgcatgactacctagcggagccgatggcacactcaatttataggacccgagggcggtggctcttgaatttggcgtggcgcggtggtggccggagggagggactgagtcactggcacggtgaccgtggctgttaccgtggcaaggccttaggcaatagaagggctgtgtatt

SEQ ID NO: 38810 - DNA, 450 bp, Zea Mays
ccaaggtggacacgtcgtccaaaatttggaagccgtcggattgtttctccatgacgagatcctaccgtctagctattgcaccagttatacaatccccgaagcctccggaagcctctggccattgctcccagctgtggatcgagtgttttctattccaacttattccttctgaaaggtagcactcattctttatctctctatctccctctctcatctgtgccatgtgctaccatttctccttcctcactcgctccgtccagtcgtcagcgtgccacctgctttcaccgtctatccctctgtcccctacgctaccattttcttagcaggttgtcgggtcgtgctcgcacgcgccgtttggacgtaggtgtgccatttgctcgtgttgtccgtggctccgttcccacaccttctcctgccgccatccccttcgccgccatcagcaggtcgccg

SEQ ID NO: 38811 - DNA, 451 bp, Zea Mays
gcgagacaagctgaagaagctgcagagcgcgaaaaacgtataggtaatatcttttgatattcagattcggcattttgtttttgtggcttcggactaattaatttttcccacttcagctgaattatcccctccatcggaaccgttcgatcccctagccgatccagagacgaaggaagcactggaggtcattaatatggctgaatctattgttgacgaagtcgtcaataaactgctaaatgaagttgcggagaaaatcctgaaagaagactaggacttattgtaaaaacatttttaaatggtcaatgtaagggacactagaatggacattgtgcttttattgtaacgaagctataatatttgatgtgtgtaactttggatcgaatatgtaaattattgtaatttattcctttacgatgcatgaaacttacatacataccgtttttgagccttc

SEQ ID NO: 38812 - DNA, 497 bp, Zea Mays
atgatcggagcgcttgttgcccacaggctaccgtatccatcgaggtccttcgacatggtgcactgtgcggactgccgtgtcccatggactgctcatggtaggacatgcaagacgtcatgctattcctgattaaacatacttccttcctgatgcatcatctattcatttattatttcactgattactaattgttcaaaataaagtgattttcctattggcaaatgttggagtcggtgaacactgaacagaacaggacaccctcctcatatgtcgatgtcaaaactaaagtacagtttgtttgtttttttagtcgagtgctcttgttctcattcacctatagctgattccagatgggctctacatgctggaaatcgaccgtcttctccaacctggtggctattgggttttctctaagccacccgtcaactggaaatctacatacaacatttcgaatcaagggaccatagacaagcaggacaatcaagtagctatggatg

SEQ ID NO: 38813 - DNA, 462 bp, Zea Mays
tagtgtccagtgtgacaacggacacgagttctataacaatgcgtctcgtgacttttccctctcttgcggcgtccacctccatatgtcgtgcccctacacatctcctcaaaatggtagggttgagcgcatgattcgcacaacaaacgatgtcatgcgctctctgctcttttaggcttcccttcctactcactactgggtcgaggccctcaccactgctacctacctcctcaaccgtctgcccaccaaggcggttgcccaccccactccttacttcgctcttttcggcacccacccctcctacaatcatcttcgtgtcttcgggtgcacttgctaccctaatctcgcctccactgctcctcatacattagtgccccgctccactcgttgtgtcttcctcggatattcccccgaccataaggggtaccagtgtctcgaccgcacctcacacagagtcctcatctc

SEQ ID NO: 38814 - DNA, 335 bp, Zea Mays
tacaaccatgggagactgaaccatttggaggctgaagcagtctaggaaacaccaggcatgatagtaggtatgtttctagtcgaattccatattgcagaagtgttatttgatacttgagcaacacattcattcattactgcatcttgggtagaagcacataatcttccaacaaccaccatgtcaacaccaattcaaattgatttagccggtggtaaagttcgagccgatagtgtttgcttgaatgcaaatgtggaaataagggggatagagtttcccgctaacctcatagtaatgggtactcagggaatagatgttatcctagggataaattggct

SEQ ID NO: 38815 - DNA, 442 bp, Zea Mays
ctttcctattctcggtacatgtagtatatgcttcttaacatacttggaaaccccctttactctgcaatagctaggaggcatgctacatcatttggatttggttgtcttgggaactctgaccccaataactgcacaactgtcctcgtgaattgcccaacggtttcaagtatactgctctctccaatacgcaagtactcgtaccgcttgattgattggctggccaatcgtaactaggtctgtcgcgtgtgtagaccatgcccaagcgcgtgattggttacatgtactgcaccggcgtggcctgcacgtgcatgtgcaactaaatcaccttttccaccatttgcctgcatgcgcggagacgagacccggcgaggatctctactaggtcaggcggcgcgtgagccggtcgcatctgtcgcacacaaccaatcacccggataaagac

SEQ ID NO: 38816 - DNA, 357 bp, Zea Mays
cgggaccgcccatccacgaatcaacggctctggtgccgtcctcaaccccctggctccctctctctctctccagctaatccccacgaccgagcgccattgacaccgcgctcagatccagcagctcgaaccccaatcctttgatcccgatagagctacgtataaagcaggtagtagcaggggcgatgagatgatgctcaccagcgaaccaacgacgaagaattctagccacgagaaggtgcgatccggtgatgagatacggactccaacgagcagttggcggccacctagcaccaagctctatccgcaggagacacgagcagcttccccgcaatcaagcgaagctcgtctgccagtcgc

SEQ ID NO: 38817 - DNA, 458 bp, Zea Mays
aaggaatagaggtgacagctatagaatcctcagaactgggcgccagctgctccacggtccctggctcatcaacagggtccaagggaccctggatatgctcagggcccggagccatggcccccaacatagcagtagtagacatgacagcctcaaccggaggagacaataataataaggcctcagacggagtccatgggacttccacatccaaggcctgaagaaccgcaaggtgctggtccgcgctcgcctgaggtggggaggaaccaagcattgaatatgcccgaacagcagccaagtcttcttccctaggctgaaccgcagaccctgggcctagacgttgaagagcagattgtctgcccttatgcacaccgtcatctgcagagcccctcctaccatcacggtccccaggtggcgaacgtgaacggaagcgcctcctccgccgtgcagaatcatccaaa

SEQ ID NO: 38818 - DNA, 580 bp, Zea Mays
cttgtttattgatatcattttcatgtaaaaaagctgactacttttacgtttgctaatgatcaaagtttggaaactttggctgcacacattcttggacaatatctctgtacgttctattaacagtacattcatattatttccttgctaattaggatctagcagctttcaactgataacacatgatttcacagctggaggtagaatcagttacacgcctatctcaatttcacggttcatagcacttgcctgttcatggatttcacccaacgagcaatattattggcatcttttgcttcttttcaatttaatttacatctctattttattttctcctgtctgctgctaggcgcgtgccggcattcaagaagttcatttcctcccattcaatccaactgacaagagaacagcacttacatacttagacgctaggggtaaaatgcacagggttagcaaaggcgctcctgaacaggtatatacattgcatgttcgattcctttataaaatgctacctgaaataaagtgcagaaggcatagtatggagactatttgaaaagcacagtagccaaatatggtaatatct

SEQ ID NO: 38819 - DNA, 347 bp, Zea Mays
cttttcctttttcagtagccgtgttcacagcagccacaacagcttcttcttcagccattttcagaagtatattatcaataacatcaagcgtggtttccaggttagaatcttcggtggtcccagctttggctcccggtggcttcggttcccggtagctttggctccagcggtttcagcttcagtagtttcggctccggtagcttcggctgcggtggtttcggctccggtggtctcggcaatgacaatttttgacaccgatgtcggtggcggtgtctggtgaatcacatctgccacttggataattcttcgttttttcggatttgcaggactttctgctgccgaagctt

SEQ ID NO: 38820 - DNA, 285 bp, Zea Mays
cgacggtcgagaagagcccagatcgaaacgattcacaagttctaatccacaccgaccaataaaatctaacgctcagaatgtcatctcccaccccgcgaccccaggacagcggcgcggcagtatccagggcggcggcgccagataccaagcaacagagcaacaccggtgccccaaacgaccatctcgacctctctcaagcacacgggggcacgatttctaccatggataggctctacgcgatgtggaggaagaggcaaatagctgggacccgatcgtaccagcggt

SEQ ID NO: 38821 - DNA, 335 bp, Zea Mays
ggagatcaccgttggtatatctgcagaattggctgctgtcccgggattggttgctgaccgggcacttttggggctagattcttccccaccacaggcgtgcacctctcaaccccttgcggtttctcatgccttggacgtggtagtcccacgaactccgtctgaggccttattgcttcctctggatgtggctgtcatgtctactactgctatgtgggggaccatggctccggccccagagcatgtccagggtcccttggcctctgttgatgagctcgagaccgtggagcagctggtgcccagtattgatgatgctcacgctgattcctctattccag

SEQ ID NO: 38822 - DNA, 308 bp, Zea Mays
tttaaaagctgatcgagaaagccagaaaggccagcttggaaccagattgtaaaacataatcagaacgaactaattattagcaaccggggatcaataaagcgcagtaaatccaaatttgaggagtgaacttgttagagcaaccggttccaattcagcgcactaatctaaatttgaggactcatgccaaaaacacatgtcaaacccatggaatccggaggccctcagatctcctcttcggcctttgcacgggtgtcgtgttagactttttccagcagtttatccctacctaaaataggtaaagattgtta

SEQ ID NO: 38823 - DNA, 551 bp, Zea Mays
ttcagcttcagtaaattcaggcactggcacttcctcagcaacagtagcagaaggaccggcaccctgatccaagctagacacccaacgaagacgtctcttcttccttttctccccctcagcagaaaaagaggcttgatcggctcggcgagaacgttttggacgaacattgacagacttctgagcgtccaaagccttgtcagcctcaaggatgggcgccaccaccaatgtttcagcaggagcggcatcagaagaatcctcggctagcatatcaagcatggcacttatctctgcatcacttggattcaaaggcacctcaaaatgaacttgcctctcgttgtcaggaatttctccgagcgaggcaaccaaagtactaacttcttcgggagagggtcgcactctaagacccaaaccgctatcacctgcaggaggatttgacacgaaactattaaaagcctgtgaaggaggcaaattccaggccgagtatgcaacaggggcgccgatgttcgataccttgcctctgagtatcatctcaagccgactcactaagtcca

SEQ ID NO: 38824 - DNA, 374 bp, Zea Mays
gccggcttgggggcaagcggtcatccaaggaggggggaatgtggacatctcggacggacagactgaagaagctgaaggtgggagcgatgatgagcaggtatggggcaacaacaagcaagcgcgcgatgggagcgttcaggcaagcaagccaaaatgtgaaagaaagcgtaacgaaaatatcatggaccaacttgggccgtataataggagccttagcaataatgctgctatataaaagggacttctgaaatctggtgaagatatggaaaaaccgaaagctgattccatcaaacaactcttgtctcttctgctctacgtctagttctccttcctcaatccacattctctctatcagctacgctaacacacgcaag

SEQ ID NO: 38825 - DNA, 285 bp, Zea Mays
gattttttctcatatgtttctagccatgctttaattgattctttgtcaaattgtgcaacttgtgcaaaccatatgattacttggtattattgctttgatatggacatccagaaaaatattcaacttcgaatatctttggctttagtgactagtgactgatgtactttagcgtatccactaaaaaccatgaaagtctaggtatgtgtcatttggcattaagttttgtgatgtaacacatgactcaacatcctctaatatgtatatctgttttgacattatattttt

SEQ ID NO: 38826 - DNA, 345 bp, Zea Mays
ctctgatcttcactgggtgtagtgttgtgctgctgtgatgtcagtctgaggctctattttttggtatactgttatggatggtggcagataagacataattggtatatgtagtctttttttcctaagttgtttgtattcttattcccagtgtgttgctcacttctactgtcttataaatgctcttgcctgatctgtccgagattttcagcaattttgttggtttgttttcattgccttttccatgtgtagtgtatcgtcatttgtttagcctagtttagaccttagttagagttgctctgcctagtttagttggtcatgcttatgtatcatcattcaaaattttat

SEQ ID NO: 38827 - DNA, 302 bp, Zea Mays
gccttgtaacgtcgcatgcctccccttttatagttgaaggggacatgtacaaaggtactgggccccgacatgtgggcccatggacataaagaatatagcacttggagctacaaatgcttgctgctggggccaacttctcgtgccccgacgcccgagatctccgtatccttggcgtacagggcaagcttcttgtagaagggatggtgagcacagtgcgccgcttggcacggatgtactgtttgccagcagactggacaggcgcgccgcctgctggatgaccttgacgctgtctgcctgtagat

SEQ ID NO: 38828 - DNA, 362 bp, Zea Mays
tccagatgaatgagtctttagggaaaggaggaattcccgctgacgagatcgtcggcaagctcaagaacaggccgagcaggaggcaagatgacgtcgagagaaccctctcctcggacgaaatctgaacccgatttcgcccaagccatgaacacaccaagcgaggtcggtggagtgctggctcagatagccgacgacctcccccggactccagacgccgaaagacaacacgagaacgagatccggcgccgagaagagtatgatcgggatcacggcgtccgcgcgcaaagtcaagccaccagggttgagtcggcgatagcttcaactggcggcacgacccaggggcggtcgaggcagcacatcga

SEQ ID NO: 38829 - DNA, 477 bp, Zea Mays
agaaatctagacctgaacttgctctgtcaggtcggctgatggtgactcccatggtacagtgcctgaacaagatcagaacaccaacgcatctcaccgccgacgatcccccgccgcgattcgtgccctcgccggtgtgattcgcgattggatcaactggataacacttgaagtcgtgtaaagatcatcaccgtggataagttccggccagtaaagtattccggccaccatacagagctcgccgcggtggaaccggataagcacaccggtgaccgccgcattccggccttgtgccgcgtgtctaggcatttccaccgcatcgtcgtgacctgctctcgctctccgttgatcaccagagtgactgccacggtaataggacactaatccagtgcgccagtaagctccccctcctctaaccgccgcgcgtcttcgctaaattcatcggccaccgctcttctctcttataaattgagtgtgtcg

SEQ ID NO: 38830 - DNA, 297 bp, Zea Mays
aacccaatgaggcgaggttacggaccaacctgtccgttgagcaacacagcgaggcgaggctgccaaccaacctgcccaccgagcaaccaggcgaggcgggctgtcgacgaactagctcgccgagcaacccagcaagacgacaatcgactcttgggcgaacacctctactgaaaggaagagccggcctactacaatcgagctacgtcggcacgatgggatagcaccgagccatgctcagaccatggaagcggtaccgaagggtctctatcaagcatgacgctggatatgtatcctcgc

SEQ ID NO: 38831 - DNA, 316 bp, Zea Mays
cttagctgctgtttttgcttccaaggagcgtctgattcctctttttgaatgccttgcactgcatgttccttctgaaagcaccagcccacaaatctgtttaagtgttctttctctgttgactaagcatgcttcttgtttggaggctatggttgcagaaaggatgagcctgattttgctatttcagatactccactgcaatcccccttgcagggacggagctcttgctgtactgtattctttagccagcacaccagagcttgcctgggcagctgccaagcatggtggtgttgtttacattcttgaacttatgttgcca

SEQ ID NO: 38832 - DNA, 434 bp, Zea Mays
ctagaatccacgaccgtcggatgcaaattcggatgtgaacgaccccacgtgtcacccaacggagccttctcaaactgggccgtaaccctgttcccagctgggctgaaatccccaccactggaaaacgtctgcgcgatttcaacacccggcatccatcccgtccaaatttttccttgcaaatcatggaaagagcctgtacgatcatcagcttcaaactcccaatgctccagattcctggtattcgactcaggaagcggagccacagtgagtgaagcatgaattgacaaatgacggaaatcgcttctcatccccaatgctgaggaatggataaacacagaggagaaggaaggacaggggaaacgaccgacacgttcgtctgagttgtagaagaccgaatgatttctcgcaactcagaaccaccactaccaaatcac

SEQ ID NO: 38833 - DNA, 271 bp, Zea Mays
gtaagcgaccctacatttgactacctaaacaaatcatagttggtttgactagcttccttaccattcgcacctgtcggtgatgtgaagacctttgcacattttttcactacactcgaacgtcgatgtatcatgccactaagtagcgacccgttccttgcttacttgacactgtgcctagatcgtgacacggtgtcacggtgtgtcaccaaggggctgctgattcggcccttgtccatttaacaccatatccgggttccgatatggtgcgtcg

SEQ ID NO: 38834 - DNA, 376 bp, Zea Mays
gtgaagcctgtggacgctctcgttagagacatatagagtagtatagattaactcagttacttaaagtcaggtctgtcctcacataaaaagccaaaaagaaccaaaagatttggcatgtagggttgaggaatatgagaaacttcataagagttcaaggctgtcccaaaatgagagatgttagtgaagatgaatttcagcctgaacaagagccaaccaatgaggaaaacatttactttgagtctgaccaggagaatgttgccccaatttaaccaatgaggaaaacattgactttgagtataccggccccattactgcacatgcatggttgcttattttattttgctttcgcttatgacttagaactaatttatctttg

SEQ ID NO: 38835 - DNA, 285 bp, Zea Mays
gaccgatttgggggaagtctcgaattggcgagctctggtggacgatttgaggcatgagttggtgtattggttacttgactaccttgcggagccgacgttacactcaatttataggctccgggggcagtggcccgtgaatttgggatggcgcggtggcggtcggagagagaggagagcactatcgcaagaaattggtggctttcatcgtggcgagctcaccggcgattaacggacatgagtaatacgagctactgcgacgtggtaaggcaccaaggcacgtggcgc

SEQ ID NO: 38836 - DNA, 301 bp, Zea Mays
ttcggttccggtcgttgtcactccataaggtgtctgaaccctgaacatgccgtccaccaactcgaaactcttgaccgtttcgttctcgcgatctggtgatccaaccgtcgactacctgacaaagaaaaaggcagagaaacaggaagacgatggggctgttcctttccttctagttctaggcaatcgcgtccttttgtgtctgtctgtatacaccggacaccagctacccgattacctgattacgcgtttgcatcgagtccaaatatcgtcctccagccgtaaatggttcaggatattgccg

SEQ ID NO: 38837 - DNA, 464 bp, Zea Mays
gcctaagcaagggtccggtactgacacgtgtcctggctttatcctgtgcgcttgcgctccccgctcaggcggagacccaatgctgccacgtggattgtttcccgtgacgtaagccagcgggaggagcctaacgtaaggcctctgggctgcacagtctctgcatttattacagagaggacgtgccacctgtccaccctgctgacaggcgatgtgccccctcagcatttaatgtgtcatgtccactccgctggcaggcggcgttagggccatcctgcagacggcatgcttgtccagtccattgtcaaacagtgcccccgtgctgcaaggtgcattgtgtccatcatcacttatacgagaagcttcctctgcacgccgatactacgcagatctcggatgtcagggcgcaagaagattgctccagcggcgagcattagtagctccaagtactacatccgttatgttcc

SEQ ID NO: 38838 - DNA, 468 bp, Zea Mays
ggcgaggagtacatcgaggagatgatcagggagctcacctactacggccctgtcgagatacagcaccacccgtcggccgccggcggcggcggcgcctgctcgagctcggcgatcgggtgactgacgagctgcctatagattgcttagccggctgtgcagtgcagtcgacgtcgttgtacagcgtttgtttcgctaggcatgcaggcacatttagcctggggcccgcccgacccggagggatgatgggccctttcctgttcctgttcctgggctggggattcggggttgagcgagagccagagcgggaaggggaccaaaggatctttcgggataagggctcctgatttggttcgttgatgtgaggcttgttctgacacttgtcgtttacctcatttggtatcgcagctgaagcttctttatctctccctttcccatcgcaaatggtttccctctcgaccacaaagatgc

SEQ ID NO: 38839 - DNA, 1130 bp, Zea Mays
tacaagtttgctactggcgaattagcaagttcttatgtagaaatatgtgttctggacgctacaagttgggctgtcatgggctctgaattgcatttctgatggtacagtatctcgatcggatcgccagctcagtccctcgccgccaacgatccgcgcgcggattcgtgctatcgccatcgttattcgcacttagaacaactagatagcgccggggtcagtaaatatcacaccgtggatatggtccggccactaaattactccgaccaccgtacccgagctagttacgattgcttcggatgggttcaccggagattgccacctcgcggtcttgcaccacgtgcccaggcatcttaccacgtcacggttagtcgtgttaggcatatccggtgatctccgggaggaccgccacggtgaaagccactaagcgcttgcgccagtgcccctcttcctctccggcctccgcgcgtcttcgtccaattcaccggccacctctcacggactctataaattgagcacactgtgagctccgtaggataattacgcatccatagcacccacgcttgcctccaatcgttcaccagagaccgtgaattgctcgttgcccccaatatccgtttccgccgccgtagaaacaccccaccgaggccagcttgctccaggtccgttcatgctccctgttctctcgttttagcgtgcttgtgtgtccctgttgctcctcgacccctccaattgagctagagtccctaggatcaccgggaacgggctcggttaaccgtggtgtccgctgtcaccgtgggcagggcgtgttagtgcgccgatggtgaaattagtttgggggaaacgctccttaggactagaattaggtgtagaccgaagaagagcatcggtcattgagtaattcgactggtgtgcgctcgctagagctcggctcctcgccattccccgtcatggacctcggcctgcgaagaaacagaacttgggggaggtttctgtaaactgtcagtgactccaggaatagtgctgcgaccccgcttctggttattcaagacaacgagggcctattcgcaaagtctgtacgcgggcgtgctttcctccagtattgggccgacttgggccggtttcggtccaat

SEQ ID NO: 38840 - DNA, 481 bp, Zea Mays
actagtagcattgatgccatcttcaaaaaaaacatttttcccgaaacaacctctaactcaggctaatttatcaaagaaaacaatacaccttgacaacaatcataaaacaatataaaatgaaacccaaggcattgtcataagtgcaatcaacactaggatttcccatcatcaaatttggatgcagctccccagtctttaaacaacacttcaccaagtatgttagaacactaagcacaacaatcatcgaattcaacaaccttgtttgttaatgccattaaggccaaacatccatatatcgtcaatgtatgaaacacctcacataccgctctcaagcactattaaacatggttgttattacattagaatccaactactagagacctccaaactattctgttgacatgaagcaaatggtgttcatgtcatataacatctttttctcctctcaaaagagataaaatttgcaagactcataaagcaa

SEQ ID NO: 38841 - DNA, 364 bp, Zea Mays
tctcctggccctcaagaccgcgttctaaggtcgatgaggcacgggatgacctcaacccagcatcgagcacatcagcacaaacctccatcacaccatcatctgctggctctgataacagatcctctggaaccatatcctcaagagtctgatcaaaattcaccagagacaattcttgcagaccaatgagagcagacaaagcaggagaaggaactccactactttcaccactggcgacgtactgccgactgttcttttgagtcagagggaccttgtcctcttcctccccgtcgtcttcaccagcaacacaggcaacacccacattgaaatcagcaacagatggagcacacccattggggtcaacagc

SEQ ID NO: 38842 - DNA, 311 bp, Zea Mays
cgttggtagtattaccacaatcgcgggaagcgattcatgtgtaataggctcaggtaaagccacaattacactcccgatgggtactcaaatcgaaatcaaagaagctctattataccctgaatcaaccagaactctcttgagttttagggacattcgtgcaaatggttttcatgtagaaaccacagaggaaaatggtaaggaatacctatacatcataaagtatggggaatatgacaaagaagtcatagaaaatttcccatcgctagaatcagggttatattatactaagattagtgcacctgcagtgtaca

SEQ ID NO: 38843 - DNA, 362 bp, Zea Mays
gtggtactaaaaattgctgctccgcacttgacatcatgttgatagtaccctgagaagaggaagaagtcactggctcccatctgagctttccattgggattcctcctacacaccacatccttgtggtcttggctgcagatagagcacctgccactccactaacactcagcacagcgatgcgcatcaccacaacggaaacacaccagccctagcccgggcttaggaacaacccgatacctctgagtacttcctcctgaagtacccaattcagaggatttgccacggtaggggtggtggcgctggtgttgtgacttgcccctcttgtgggctggacccctagtgttgcccctccttgcgtcctag

SEQ ID NO: 38844 - DNA, 428 bp, Zea Mays
tgaagatgtctctgcggtggtggaaactcagtttgggggaaatccaaaattagaggtctcgggtatacgattggaggcaatacttggtggcttggtgcgtgattatcctacggaccaggcgatgtgctcaatttgaagaaggcaagagcggtggccggtgaatttgggagagacgcgcggcagccggagaaacgaaaagttattggcgcagtggattcgtgtcttccgtcgtggcgaactcaccggcgatgagcaaatatcgcaagtcgagtcactgcgacgtggtaaagtgctttagcacgtggcgcacggcggcaatcggccaacggcggtgaggtcttatcccgatcgatcgatgagcaaggggtacggtgagcttagccgcggccggactcaagttgatccaggcgccaagatctttacccgcc

SEQ ID NO: 38845 - DNA, 530 bp, Zea Mays
ggggctttggtttcgtgatgacatagcgcagctgccccggccttcaatttatagagggcttagtcggtggcgcgcaatttggccaagcaatgctggcggccggagatagggaagaacactggcgcagtgtctaccgtcgtggcgacttcaccggcgacgattagacggctattagagagttacggcgacgcgacggaggtaccagagcacgtggcacaataccaacagacggccatcaccggtgaacttatccaacccgccatagagagcttggtacggtggccggagttgtttactggccggggcttatctacggcagcgatatttacatgacccgagcgttatccaggcactggtgagcgtgaatcatctcattggcgggaatcgtggcgagagggtcgtcggcggtgagggtcactgaacttgatccgatcggctactgtaccatgggatgcttcttcagtgtgcctcacagtcatagtttaggaccaattctctctcaattttctatggcatctcacccaaagatc

SEQ ID NO: 38846 - DNA, 373 bp, Zea Mays
gtgctatcggttgctaaagataaatagtttggttctcacgttttatctgcagatggaatgggctgcaggtgctatcggttgctaaagataaatagtttggttctccacatacctgcagatatcgatatgctattacaactgcactagtttggttctcacgttttaccaaccagttgctaaagataaatagtcctataactgaacagcttcattccgtccaccaaagctttttataaaggagagacagaaatgtgtgggcttctgaagcaaccgctagtccactactagttgatgtgtctcattccgaagaaaaaaacttgctgttaactgaactctctgtcgccggaagcgttgaacattagttccacccaaa

SEQ ID NO: 38847 - DNA, 361 bp, Zea Mays
caggatcagacctgatttgcgctggccgcggcgaggtcaagctgtgcggtgttcctgagcgttttgggggaaatcacgaattgaagctttctggtggatgattgtggccgattagcggtggttagctggctgactacctcacggagctagacacgggctcaatttatagagtccgcgggcggtggtgctcaatttggccgagccgtgttggcggccggagataaagaagaagcttgcgcggtgaattcgtgtccgccgccgtggcaacctccccgtcgacgatgggacgggtatagggagtcatggcgacgcggtggaaaggtttggacacgcggcacacagccgggaagcggcggtcacc

SEQ ID NO: 38848 - DNA, 292 bp, Zea Mays
ggcagaactctcaccgccgtgatcgccgacaagctcaggacggagaacaagagcgagtcgagcaaggtgcaaggctgcacctagagaaccctctctttgctcagaacctgtacctcgattttgcccgtgcaatgaacacgccgagtgaagtcggaggggtgctggcctagatagctgtcggcctcccgtgaaccccagacgtggaaggctaccggcggctgcttactcgagcagctaatcaccttctgcccatcgctcatcccccgaccgacctacggcacgccatcaacag

SEQ ID NO: 38849 - DNA, 444 bp, Zea Mays
gttgagtggacggaagagtcttcgaacgaagacttggattactttgcggccttggatgtggcagcggtggagacttcgccgcgtgccgtggatgctgaagttgtgccaggtccgagtgctgggcgtagacggcgaagggtggttgcgaagcgtagagtgagtgaggtggatggcggtcgtcttcgtgtgggcagggctggcagacatgaattgttgtcttcgccggccggggcgagtgtaggtgagggggagttgcgaagtctttttgagggtgaggagcttaggataatgctatttaactatagggagatgggaatcattccgaaggttgaaccgatgtgagatgtgacgccctcgctgtaagtgtgttattatgatttgtatgatgaggctgtgtgcattcgcgtatccggctatgtctataggggcgttgcgcgcttggcc

SEQ ID NO: 38850 - DNA, 1539 bp, Zea Mays
ccttctatacaaggccggccggctgtggaagccaggctcctggccgcacaaatatggcagcagattgctgtctaacagggtgtaatactttgcatgaaaaactaagcatttggttctgattaccttttttgtgaatccttttcatatttattgtaggaaagtaactggtgggaggaacttttagatgagaatacttatatgaaagcagattacagtggcaaaatgaccttgctccttgatatcctgtcaaaaagttctgaattaggcgacaaagtattagtgtttagccagagtttgaccactctggatttagtagagttttatctggcaaaattgcaaatcaatggaaaagaaggcaaacattggaagcgggggaaggattggtacaggtatgcttccacacttaaaagtttcccttttttacaaaaaaaaatgcagctactgctgtggtagttctacaagtatctattttcttttggtttcttatacttcgtatctacatgcccatgagataaacaagatcctggacctattgctttgtatgcatgtgtttccacggcctccccatagtatgatgtctattcctctaaactaaaaatttaggctgggctgtgagcctgtaaagtggcatttcttcccaattcatttgggatgaagccattgtgaaacctgcaaacatctgcattttggtagtaactggacgctggtatcgctttagtgccacttgctatgttttgctctggagtgtttggagttattgatctaccataacgaataatggaaaaaatatgaatgactgcaaagttggtctcaagtaggagctaagaaatatgcaattgcagtatcacatcatactctacaaccaaagacatcaatcttctatctaaactcttcttgcatattcatgcgtgcttgtcattaaccttttatggctccagacttcgccatgttcttttttaccaaggcaaatcatcatgtttgtttggaagacccagtagtgctagcttgacagtatattttttatgaatcatgaccattttgcataacaaaaaggcttcaatagcaataatagtaccattgttgcatctatctctgcaatgacttgtttttcttggcatagcattttttaccagagttgtttatcatcactgtcattatgactgattttgaggattattatatattcacatcatgctgaacaggcttgatgggagcactccatcttctgatcgtcagaatcttgtggagatgtttaatgaccttgaaaacacaagagtgaaatgcacattgatatcaactcgtgctggatccctgggtatcaaccttcatgctgcaaatcgcgtggttcttcttgatggatcatggaatccaacacatgatctgcaagccatttatcgagtttggaggcaagaacttgtcagttgggctgctcattaagtgcacttgaatattgccatttatttttttgtgtggggatgttctttccaggtatggccagaccaaacctgtatatgcctaccgcctaatggcacatcaaac

SEQ ID NO: 38851 - DNA, 508 bp, Zea Mays
cggggatggatttgcaaaatatcctagactcagactacatcaatggtggactgcgggttgatatcagtaaaatgtaggggctctttagaaattctgaggcggcgaaagggtatgagtgatatctgaccgcccgatcaacagtggacggcatggattagctctgctatcgaccgaaccggtatctaactcagtttagaccagggatctacggcgggtatctaacggagcgcgaccaatcccagccaccttatcatgactggagggtcctgatctcacctaagggcttcgcatctggaacctaatctaaccgtccgatagctgatcaccggtatcaagtcgtcttctacctcccgttagcacatcgagcagcacccatgtcaccgcaacggagtaagccccgccggagctggctacgtcatcctatgcaccatactgttctaacgagcacgaccgagtaccgatcgccaagacaccgccagccaacccatatgaatctacctgctaagac

SEQ ID NO: 38852 - DNA, 306 bp, Zea Mays
ggccgatgtatcagcttttctcttcttcccttgtccccgcagcgggtagcggtagtcggggtagacgaagcccaatagcatcaaaaactctgtttaatctcttctttccccgacttccgaaggctgtagataatgcattatcttctgccttggaatatgttccaagcagttcatcacttgtaacttcaatacacttcagccaatcatcatttggttcatcaaacttatctccaaacctgaaggtgtatttcagccggaccaaatcaccttcgctagaatcattgatggtttccttcggcatttccc

SEQ ID NO: 38853 - DNA, 501 bp, Zea Mays
ccgaagcaggcgaacgatcatactcggaggagacttccttggagtactctgagtccctgaagtcctctaagggagaacttggggggcttgcgcttcccgtcagcagggcagcaccctttcttgcccttctttcctccagccatggtctgctcggaatgaggggaagtgaagaagaaggagaaggcgagtaaacatgaacaagtggaaaaggcagccagggtgagcgggctatttaaagaggctaggaggcgaccgtccacttcctacccactcaccaaacagtcacaagaattcaatagcaattcaaaccacctggaaatgagtcaggcgtctggcgccgtttcgcgtaacatggcaacggatggaatcaagtcaaccactcaggcaaagtattacacctctccgtcgtatcaagttactattccaggacaacgcgatagacgtcttttactgggaagacacccattgggaacacccattgggtgtaccgcctggattttc

SEQ ID NO: 38854 - DNA, 391 bp, Zea Mays
caccttcagactgttataggcaaggctatctgcgagttggtccttcgtcattgcgtacaaacctaactcaagcttcagatatcctatattgtctgccatctctcgacagacatcaatttctttattgtcatgcagacaataaaggaagtcatcctcatcatccccaccatacaccaatgaccctcgagggtactgcagatccctggcgtaatgttgcgcttcggcaatttgttctttcaataatttcttccctgaagcatgacgcactataaattctaactcctcagtagatgctccaggggcagggaactcatattcttcggtagcaccctcttttcttaacaatgatggtccctcagcagcctccaaaggccttgcttcagcaccctcc

SEQ ID NO: 38855 - DNA, 386 bp, Zea Mays
gaagaggacacgaccaagagaaaagtaggcaaagtacaacactcagattgagatgaaaagatgagatttcaaagggccggtataagataaacatcaaggtaaaatatagaggtgataagggtaaaggtgataatgatgaaaagcataaccatggacagagttaaggcaagactgacgaagtggagaaaacaatcaaggtaagataggtgatgtttcaatagaatggttgaagtaagaattcattaccgagggaagttataaggaagcaacgagattaccacgggcgtgcaaaataaaattaccgctcatggatcatcaagaaacaagggtggtcaaggacaagtaaaataaaatatcttaaccagaccttgggatataaaggtaag

SEQ ID NO: 38856 - DNA, 442 bp, Zea Mays
cacgccgagcttcaaaagcggcaaagtcaacaatcaattaccacaggttttcattagatgagcaccacttatttgagccagatgctttgattaccaaggagcgagatgccaatcatcaatcaaggcaaagttctcaatcttgcagaacatatgcatacagaagattgaccactccccagtttgtatctgcattgtctggaatctggaatcttgttggccagcctgaatcatctggcacagctcaaagatctagtattcatgggatttcgagtagggaagaccctgtgtgctttagcagggaccaacaaggaaatatactgacaccttgctgtgtggaaaactctagtggtctgagatctcaatactgtttctctacaccaaaagaaatttatgaggatcttatttacgtaaagaagaagatgttaacgctgacaccattcaa

SEQ ID NO: 38857 - DNA, 366 bp, Zea Mays
gaagaatacagtaacctgtagtagaacaacggtcaacagggtcacttgcccaagtggcatcagaatacgcatgtagctgaagaggactagcagaatcatagagtaaacatcttgattgtgtcccacgtaagtatcgaagcacacgaagcaaatgaccataatgaactgaggttggtttggatacaaattggctcaacatatgaacaacatgagcaatatcaggtctggtgatggtgagataaacaagactaaccacaatatgacgatatcgagtggggtctgctagaggtgtcccatcctgcggtcgaagttttaaatgaatatccattggtgttgcaactgtccgagtatcagtaattccagatc

SEQ ID NO: 38858 - DNA, 520 bp, Zea Mays
ccgccgctcggagcgctgaggaatcgactatagtgccgaaggtgcctatagttgagccagtcgaagccggagatggggcggccaaaaagccagagtttgaaaaaacaataatgttgccagaaattctgagcccaccggtagaagcagaattgccgaagggtgcaaaagctcccaccacaactcccaagaggagaagaatggctagcgtactagacgctgtcatggagacaacaagagcattgactcctgctcctataaaaaaggttgctgaagctgctacgactcataccaaaaccgaagctaggccttcaatgcctgctgagacgaagcctgtcgtaactgaggaaagagctgagcaagaatctccagatattggcatagctatggagaaggaagaggccgaagaagctaaatctcctgctctcgaagcaccatctgaagatcttgactatattattcgacatgcttcgggagaaagattatccgaagaagaaattttagaagccaaacactatgcccg

SEQ ID NO: 38859 - DNA, 295 bp, Zea Mays
atttaaacagacttaaacctcacctgacagcataggaaagggagttgtacttcatggagaaaataaaggattggaaaagacgatctattttggatacttcagggtccagaaagcacagtaacgagattaccaggcggacaaaggagcatgctatgtggactgtggagggacgtgggagcaacaaacgaaaaggagggaagggaaataatatactgtagtgcaggagcaagcagcaaaggctagcctacgtaccttgttggcttgttcctggctgcagacatgtacagaagataat

SEQ ID NO: 38860 - DNA, 480 bp, Zea Mays
agaaagtcttcgagaatattacaaaaagtttctcctgttgaaatcacaactaccttcatttgatgaccacatagccatccactatacaatcagcggccttcgggcaggcgtttttgtacagccactgcataagggatccaccaaccaacctgtaggagttgtaccagctttttgaaaagtatgtctgatcagaagagctccacgagagaaaagtagagtctcagcgaaagcctaaggagaccccagaatccagcagaacatggattaggcctccgcagcaggactcagctcggtaagagcgtgcccagctccaggtacacaatattgcaaatcagaagcaaccaggagagaactcccctcgtcgttcagactaccccccacaacaaggccgcgatggcaatgctaccagggactgaggcaggggctgaggacctcagcaacatagaagattttattgtcttttccatggcgaagactcag

SEQ ID NO: 38861 - DNA, 358 bp, Zea Mays
ttgtaagtcttcgatgaagttttctgagttctccgttttgattaccacatcatctacataggcttctacacgcttgccccagtgatcagctaagcatgtttgaatggctctctgataagtcgctccagcgtttttgagcctaaacagcatggaggtatagcagaaagcaccgaatggagtgatgaacgctgttttttcctcgtcttcctttgccaaactaatctgatggtatccagaatagcagtccaggaaagacagcatagaacatccagcggtggagtctaccacctgatctatcctagggagcccgaagggatcctttggacaatgtttgttgagatccgtatagtcgacgcac

SEQ ID NO: 38862 - DNA, 279 bp, Zea Mays
cgtcaaaagctttagcttctttgccgatccattcaatgactcctttgggttgcctcgaataaatttttgctccgatgagtatgcacccacctttgcaaaactatccttcattttctttgcgcaatccagggatttttcataacatctctcttttgatacccgaagctcatccacattcttttacaatcttgaactagtccattcgcttatttcttgcttcgcttttgccacttcaaaatcctcgttcgtttcggcaagctttttctttaggccttcaat

SEQ ID NO: 38863 - DNA, 315 bp, Zea Mays
cgagcggcaaatggtcgagcaagtcgtcaaccgtccaggtgttgataggtcaatgctcacagcatattttgaggcgaatagtctacacaaggaggctcgtggcatcctgtatcgtgacttccctgaatggtacacttggcagagtggtaagggaaaagtatggcaacagaggaaacgagatacgggtggacaagtcgatagaatagtctctgctcatccggccgagggggagcgctactatcttcgtgttctcctaaaccatgtgactggcgccacttcctatgtggatctaaggacagtagatggtgtcacgct

SEQ ID NO: 38864 - DNA, 378 bp, Zea Mays
tgtctcaccttgattggcgcggtaaaaggccaagcccacgacggcgtgcggaaactgaggcggcgacaccttcttccccaaattccccctctcacactctgctctgtctatggcaaaggaacctctagcacgaggtggcacggtcgcgtgcgaaggaaggcggccacactcttaaacaaccccggtatggcgaggaccccagagtgcgtgcaatttagtcgcggcggacgctacattgtcggccattctgttttgccggggcacgaagtccgcggggacatggtctctgggccccaccgcgcagcgagcgtgttctaggtcggtgcgactagcaggtaggcccagcacgcacgacgcaaggtgaaggttcgtgcatgc

SEQ ID NO: 38865 - DNA, 281 bp, Zea Mays
cacctctcatcgtgtcgatgagctacgtcgtcgccgacttcactcgccgcatcccgctctatctcattgccatccgcatttctctcgcaccttccacctaacacgccccatccacatttctctcgccgacccgtaaaccctaaccatcgctggatttgggtcatcgcagacgaccttgatggcttcagactttaggggcccctcggaggatctttgcgtcaacccaactctcgatcgacagggcatgagggtgcaccttctctttgatattgtccaactcc

SEQ ID NO: 38866 - DNA, 320 bp, Zea Mays
tcgttattcttttcagcatgcatgcattataaaatttgaaggattaagaactaaagaagtaaaaattcaagctaacccacttcttttcaaaccatctaggctcttattttcttccttccaccataatctttacatctgatacccttccacaaatgaattcacccaccctcgccagtggaggagacactcgtttcagctctgacttcctttctcacgatggctttccttccatcttgtgggaagtgcttaactccgccggttaccctacgccccctttgtacacggtgcagttgtatgaggagcatcgggtacctcgttgc

SEQ ID NO: 38867 - DNA, 312 bp, Zea Mays
caagaatccctctgttgttaagttagcaatgtaattattccatgcttaacacaagacccatctaaccaaaattgagctcctattgtttgctcaggacttttggttttagaaactaaaataacatcacctatggaaagacataagttctgattactacgtccagacttttcaagcttgcatattgatctgtgtgatgcaataccggtgaaataggttcttccaaaatccagttacgagaacttttgtgctttattgcgttttaatattattttacacgtgcactttcttttggtgagcacacgttcattttag

SEQ ID NO: 38868 - DNA, 413 bp, Zea Mays
tgaagttcttcctggtctgagtgctgggcgtagacggcgaagggcggtggcgaagcggagagttagtgaggtgtcgcggagtgatgggcgtcattgtggtgaggtggagggtggtcgtcttcgtgtggacggggctggtaaacgggaattgttgtcctcgccggctggggcgagtgtaggagagggggagctgcggaatctttttgagggtgaagagctaaggataatgctgtttaactacagggagatgggcatcatcccgaaggttgaaccattgtaaggtgtgatgccctcgctgcatgtatgtaactataatttgtatgatgaggctgtgtgccttcgctgacccggccgtgcccgtaggggacttgtgcacttgatctagcgcatttattgtgttggtctggttgcat

SEQ ID NO: 38869 - DNA, 347 bp, Zea Mays
gttggatatcatctatcttgtaatggcatttatgtggattagctcaggatggagatgcgcccgcggtcttgtacattgtgattattcttcatttctatttctgctaccactgttctctgatgaagttcagatgttaagtgccaactgttgggcaatctatgacatactatgcatgtgtgtgcgtgcgcacgcgtgggtgtgggcgtgggcgtgcggtcttatacatttttagtatccttcatttctatttctgctatgctaccactgttctctgatgaagttcagacgttaagtgccagctgttgggcagtctatgacataccatggttatttaagaaccttttttt

SEQ ID NO: 38870 - DNA, 416 bp, Zea Mays
gtttagtgttatggatatggttagggttaagtgttaggggttaaggttaagggttagtgtttagtgtttggattagagttaggattaagggttatggttagggttaggctttagggttagggtttagggtgttggaacttgctaactcgtggtcagccaatttcaaacggtgggagaatagaaagcggtttgatgccaatagacgtaaggtaatagggcaactgtgtttttctccgtcccccataatggtacagtatgggggtatttataggtaaccgagggtcggtcctgccttgctaaggacaattggggggttatggcgggtaattatagcgtatcaattacagacatgggccaaccctctatcagccccgtcagcgtggcggcctatggtcgggaccctgtgacatgggccg

SEQ ID NO: 38871 - DNA, 564 bp, Zea Mays
tgcttatcttctcttttccacctggagactatacaagattgctcaagaaacagttagtctcaaaagacacaagttgtgtgtgctccccctcaagttgtgcatcaagtatttgaatgacttgcactttgcacattctagcttccttggaactagaggggatcacaacataccttggtcaaggcatactctaccactttcatcacccaaagatgccaatttgaatatcaaatgaaacgccacttaacaccaattgaaggctaaaagaaaggttgactaaatacaacaatgcatgcctcagtggcacctaagccaattggatactcacaggaagtctaacatttacacgcaacttagacatgcttcatacttaactatcattggagcacatataccaattgaaagacaacacgatcatgtcttaagcatatcatagttaagaaggttctttaggtacaccaaaagaaacatcattttaaggcataagtctcctaagccacgatgctaccaatgaaaagcaagaacacagctatgattactatcaatggaatttcaagataatcaata

SEQ ID NO: 38872 - DNA, 328 bp, Zea Mays
tgccctgtggtgaaactgggtcttgcttagctggctgttggaggagggtgccttggaggcaggtgctaaaacattcttggggccattcaccgagttggagtaggtaggtacgaatgtcttcaactgaggacaattattcttgtagtgactggggtctccacagtgccaacaagcattggctggaggttggctgcttgcaacagatggggtgtggagggaactttgactcggctggctgaaatttgacggagcggaccctactggcttgctgaagctcggtgctttgggaggaaacccaaaagatcgaactctctggtgcctgtcttgc

SEQ ID NO: 38873 - DNA, 359 bp, Zea Mays
agaagctcgcccccgcaagaaaaatccggaagaagaccaaaagtcaaggatgtcagactgagcaggaggaagaaaactctccaaccctaccccctcccgggttaaggaacttgtccgacaccgaggagatgtccctggccagccttgatgaccttctcaaggaatttggggacactttagagaaggagttcgggagtaccctagatagcactcgtgggtgatgaccttatggtagcagtgtgctgtattatgtaatggcttgatgtaatgaataaaataactagttaaaaaaatggcatgtgcatgatagtgactctcttcccatggcagatggcttcggataaaaccacgcctaccgc

SEQ ID NO: 38874 - DNA, 1124 bp, Zea Mays
aagaccgcgagaactggtccaaatgtcacgccctgccttatatcagctatgagctcatcgactttcatatggaagactcatacaactaagtctgaacgatcgcatggttgctgacccggttcgaagcgcaacgcatccgcaatttccctccatttggggttgcatgtgaaagtcaaaaaagatctggtgggccgtacactctgcaaatagccatcgcgtcttggtaattcataacatggtatcgcctactgccagtgaaactcgcaggcacgatcactttaccgccaacagcgtccgcactaattagccctctgtcaacggcatcagctatcccctgcactgattcagatcgcaggtctttttgatggtcggctatgaactgtaacctggagccctcgatagttgaatacgcgtcgacaatgacctgagcacttaacctaccataacacgtgtatgggtttgactcgtgtaatctgtaatgtaaatgtcttcttacaaattcaagcattgttacatattttcgtttggtcccaacactgtcttcatcatcgcagtaccgaatgccaagatggtaaccattttcaccatacggaaacaacagagggtactgcaaagccatgtaggatggatgcaagcatgagacacgtcgtagcccgcaatttctatcgtgcacaaggacatcatatgtgtattcatcggcggtgtagtcgccgacaatgatggcagcgacttcgccgctggagggaagattgtattggacatcttgtctagcatcacagcctaacagcctgagtgttatcctctggttacccgcttgttccaatcgctcccttgcatatcgaaacgctttgacaagtttgttattgtcatttaacatggccaacaaagccatagttatttcacgttcaggttgttcagcgacaccatcatcgacctcgaacatgtttagcctgttttgtgtctcgtggtttgtatcatgaatatacaattgggcaaatttaggcatcgctccacggcgtggaagcaaggtgccgatacgatgatgtactattccatttatcttgaaaacataaggcgcagtaccattgtttatcgctttgtctatagcggcaccaaaggaggtg

SEQ ID NO: 38875 - DNA, 889 bp, Zea Mays
cttctctgctctcagactcgacgcccgcgcagcaccgtgacccacacttcgtcgtcgactaaccctgctcgtgcgtcgttactgccttcccctctccgcctctcgcgaccaccaccgttggcatacctcgagcgtccgcttgaacaagaagcacacataagtgagagatcgagcgccaccgccaatgtgcgtcttcactgatccttcgcctcggcatggcgcttggagggttatccagatagtatggatcatgttggaggaagctattcggtgcctgtaaccctcaggccacgggaattcctgaacggagtctcctccgccgcagaagcgctgggcgatgtggttgggggatccccatggcatcacaacaggtaatactcccctcctgtcaatccataccctctttgcgtcgcgtagcatcgggaggcgtagaagctcaacgtgtcggatagcaggaattgctcgccgccgtgtgttcgccgccacggctcgggcgcagtcgctcggtagcgagagagaagaagatgcatccctggccgttcaatcggctatcgaactcacagcgggcggacctccgtttcgatccggtcaataacagggtccgtgtggggggtcctcgatttgcgtgctcgacggcgtgctatgccgagcagggtggccggctctgttcggtctggggttcggcgtgtggggacgatggggtcctggccatcggatcttgactgtgcggctagaattagaagctaccctagatcattgatccgtggattgatggtgcagatcaaagcaaccatcacacactcgcgatactaaatccaaaccgtaggccttagctccattggttgcgattagatctgggtacataaacatccacaccgttggatcctaa

SEQ ID NO: 38876 - DNA, 347 bp, Zea Mays
catctggaatgtcacaagacggagcggcagggactaattctgaatttaataaactgcgcggcatgactgatgggctaataaaatctgagggttgctgatttggaataaaagaagatgatgccgtcctttgtgtatctaggagctgaatagagaacttttgagtttttaaagaatgtgttttcagtggggattggagttgtgcattttctgcagatcgagtccctgtatcccctaaatcctggctgttattatcggctgtagctagagtggctgaggcatccaacctatcgtcatgatcaccaccaggcaaggaagaaactagagttcgatccactcccacacgatga

SEQ ID NO: 38877 - DNA, 677 bp, Zea Mays
agaggctctcttttccctctgtgctctctggctatctgccctctctggtgattccccgtctgctcactggcggtgatcgtcggcgacgtgctcctgtgactttctccagcgtgggcacctctgcctcctctcggtgagcagccttgccttccctctctctaatctctacttcgctggtcagtgagcttgccaccccttgattgctcaaattccaaattccttccgaattctgtgaatctctgtgcttgaatgagtccctagtgccacattatatccccctgcaggttcctagctccttagggagggcttcatattctcacatgagcttttctccaaaaccctaattccctgcacgccacgtgctcggtgaaatgtccaaaccactcaaaattgctccgattgaacccaaacttttcaggcaccttcataacactttcagtaacatattcgcgcaatttcacgccaatccgatataccaggcttcaatttcacacaattccccgtttcggcgatcggttccgagccgagtgccaaaatttcattttctttgcctaaattcaaaccaagcacacacttcactcatatttacccatataaacctattcatgaagtatcggctcaattccacgtaatttcatgcctcaattcgaattccaaacctcctatggcactatttc

SEQ ID NO: 38878 - DNA, 356 bp, Zea Mays
gggaaatgcaattcatacttcacgatgtaacttcatggttttggtcataatggatcatatcacatatgtttaggatgtgttcattctctgatgatgtgacggtcatgtttgaagtttttgaggcctgtgtggaatggctactaattctctgtttcagaggacagtcatatggaaggtggttcagaatatgattccagggaagaaaaaggatcatggttctggaaaacatgcgccttctggtatcatgtggtccttcgctgctggctccaatttggcaacatctaccctcagtgctgaaaaggagtcgcggaaaaatctgaacaagttctacaaagaacttcgaactttgaaaactg

SEQ ID NO: 38879 - DNA, 650 bp, Zea Mays
ttacagccagattggcatgtaagcaacatgaattcctgagacaacaagcagcagctttgagaattcagaaaaatgcacgatggtattttgcctggaaaacttattaccaactacgattgtcagccattacattgcaggccgggctaaggtccatggcagctcgtaatgagttcacctttagaaagaaaaataaagcttcagtccatatccaggtaggttagcacttatagcaattcactgctattttcacttattatactgcagatggatattaatctcctgtcagaagtcgctattatgtgttctcaattttttttattctgtttgaaccatcaatatgagattcctttcctgcagtcccagtggcgatgccaccgagattactcaaattatatgaatttgaagagagccgcactaacatatcagtgtgcttggcgaagaagggttgctaggaaggagctgaggaagctcaaactggtacttgaccaactattatagtattcattctgtaaaatttcttctaagtttgttatgggatgcatgctttttaggctgcaagagatacacaggctctaaaggtggccaaagagaaacttgaggaacgtgtggaagagctaacaagtcgcctggaccgcgaaaagaaactaagg

SEQ ID NO: 38880 - DNA, 589 bp, Zea Mays
tctttaccgcgctaggtccccgacgacggcagcgcgcggaggagctccggcgagccactgcaccggccgattgaggcgatgaccggcgccaatctttagtttacaccggattctacccctaaggagtatttcccctcactcaattgcgcttataatcaactatggagcgctggccacggtggccgtgagcatggcggctatactgtcgtgttcccggcgaccagaggacccctagtccaattggatggtccagtaagcatcgcagacatgtgagagagctcaaacgaggaagagggagggttggactgaccgaaaaaagggctggcgacggtgaggtgaactttgcggtggcggaaaccagttttggggagaactaggaattctcgagctctggtgaggaactgctaacaattaacggtggctgagtgcgtgaggatggggtgaagctcactgcggggtcaatttatagaagggtaagacgatggccgcgaattttgaggaggacgcgcggcggccggaggtggaagaaagtactggtgcacgcgaattcgtggccaacggcgtggcaacctccccggcgatgatggga

SEQ ID NO: 38881 - DNA, 286 bp, Zea Mays
gatttcttagtttgttgtatgggcgtcaactgcttctgaacatggacattcttaacgggtttgcacaatctgttgggctcatgagtgggaatgtacaacgcagacagctatgcacctcctagcttttggtatggaactcatgcagtcatgcctatggttttgggctgcatagtgggtggaatgtgttcaacgggaagtacaaggcaagaggaaagacctacgcgatcctatggttctagcaatgaaaacttggatggtttagatgagttgaagcatggaccatgaa

SEQ ID NO: 38882 - DNA, 295 bp, Zea Mays
cctcatttgtcactttaagcagtataatatcatctgatccactcgaccgaattgtggacaagcggttatagatgtcgttgaaaagtgtgatctttcggttgcttgtggaccgccgatccttgagtagcttaatggtacgatggaaggggcttcatcggtggtaggagcatcggttattggaggctcaatagtatgagcaagatcatcgacactcggtcggtcggtatggatgtaatggaggaggatatggatatagaaagatatgttgaggagtaagggatcggggcgagcagga

SEQ ID NO: 38883 - DNA, 528 bp, Zea Mays
caggaacttgttcttaccttgtttcttctgtttgaacttatttagttgacaaggtgagttatgcagggttgttatgtctgcattgtcacgggctattgtgaaggtggagacatgtgagtgtgctttggcggtcatccttttagttgcaacataaccacatttagttatgagaacctttgtcttgtttttcagggatgagctgatgaagaaatcaaatggtacctactttcctgaggaggtatgagaagacttgtgcattttgtttatctggttgaaggaaggaaatcatccacattgcacttataacaccgaataatcttcaggtattgcttaaatggttcgctcaattggtgttggctgtagattacttgcactcgaactatgtcttgcaccgtgatctgaaagtaagtgaaacacaatagatgatcatcattgtcaattttttatgcaataaatggtcatgactcctcaaacttgcagtgctccaacatatttctcaccaaagaccaggacatacgccttggttag

SEQ ID NO: 38884 - DNA, 428 bp, Zea Mays
agctggccgccggtgacccttcgccaggattagtgctgctcgccgcgattcgtgcgtctgggctgtggactgagttcgctggggaaaagatctcatcgcggatgggttcaaattactgtggcctcgctgttcttcaataacttgcaccgacgacgtggctttaaggccgtcaccggagttggtgcccttcaccgcggttgtgccatgctccaggcctttaaccacatcactgctagccacaccagctcgccaataaccgccgtagcccctccgccggtgagcgccacggtaaaacgcgccggtgactcacccttcctgtccggccgccgcgcgtctccaccgaattcactgaccactgcttagcaccactataaattgacaacacgatctgctgcgttaagtcattaccaagcccgagcacccattcc

SEQ ID NO: 38885 - DNA, 274 bp, Zea Mays
attagggaggagttgaaatctttagaaaaatgaaggtgaatacaacataatgacatgcatgatagctacataaaatttgaacattatgcttagctttatgtgttctatctataatgctgatttctacatttcgttggagaaatcatacattagacattttcaagtacttctcatccactcttatttcctcatcttagttactactaattgtattccttaatttctgcagtaagggcaggcaccagtgctaacgaaactgggatttgggctggtg

SEQ ID NO: 38886 - DNA, 623 bp, Zea Mays
acccttgcccttgttcgccacgcaatcctatacgcatagcgcctatcggcattgaaatagtgctcggggacctctgtgggagcagagcaacaaccatggtgccaccgcgtggaccacgcgccgccgctctggtcaccgtgaggggaaaaggtatccaccaggcgtcagatttcaatcggagggttgagaatataagccgcataccgtttcgccttggttgaagcgtgaccgttgatctatcaccggtcggatccaagtcgttctctactatttaagatgaggaccgttgatcgtggagcggacgctccagattagaagagagaataccctttcgcgtgtttaatcgggcccattggaccgagatcggacggctccatagcgcccatacccctttcagccgttcacttttgcataagagccctccgaaaattaactaatcaacccgccgtcctgtgtgggtaggctgagtctggtaaattttacagaataaaccctgagcttctctgtattagtgcgcccagtctaggaagttaagaaatcaaataaatggatttagaaaatgatttttaatgattaaataattgctagagtttgtataaaccatagaaaattcatattaggtc

SEQ ID NO: 38887 - DNA, 345 bp, Zea Mays
tgttggaaccatggtatcttttattggttacaccttcacattaacctttgctgtaagtagtaatttttgagaaccttttgtagtttcctgttatttcattgcatatttaattatgctgatcatatattttaggttcaaggagctgttaatacccttggtgatctgcgtggcacattggcttccgtagagagaataaattctattctttcagcgaaggacattgatgattcacttgcatatggtttagccaaagaacttgatggcaaagagtttgatgattccaatggagtgtatgaaaatggatctgttaacaaacatttcatgtcagagctgaaatcatccagt

SEQ ID NO: 38888 - DNA, 286 bp, Zea Mays
acctagggttttgtgggagaaagaaacgacgcatcagatgacttctgactttgcatcaaacggcccacaaccctttccctcatccacgcaccgaagatcaacttttggtcagcattttttgggatattatagctggagcctcgattgactactagggagtcttcctcggcatatgcggaagcggatagagtaagttggcaggtgcgagatcgaccagtggccaggaaattcctcgccgttgtcgcgcggtgcttcggtgtcgctactcatcgtggtcgcaagcgtc

SEQ ID NO: 38889 - DNA, 872 bp, Zea Mays
caagggaagagtggctgaagaaagctacagatgcagagtcaaagataaatgaactgaccaacacagtgctaaggttggcgttgtctatatgtgtaatctttttttatggtgatgcatcatgcacatgttttacagatttcattgaaaattgtcttttctgcatggtgagcagttttcaagaaaaggtaactaatatggaagcagaaaatcaactacttcggcagcaggcactgttgcgtactcctgttagaacaatacctgaaaacacatctccaaaatctgtatgtggtttctccataacttgagtcatacaaacatttcagtacaaatgttcacctgttgatgttttcaatttttttctactgcatattttactttttaatattttaaactacacattttcattgttgaaatgtttcaatgtctttctacatttgcagaatttgactaatggcagtccgcgcattgatgaacaaaaggtcagatgcatataatatattcaattgccaactaccagttctgttttgtttgaacctaaaattgatcactctcttcagacacctcatggaactcctgctcccaaagattatgggagctttggacagcctagagcatccttttttgagaggcagcatgtatgttaaaacttccatatctgtatgttttaaaacatttagtgtgtttataggacggtgtatcatgtgaagctcccttgaaccatatactttttgcaggagagtgttgatgcacttataaactgtgttagtgaaaatattggctttagtgaaggaaagccggttgctgcaataaccatatataagtgtcttgttcattggaagatctttgaaacagagaaaacaagtgtttttgat

SEQ ID NO: 38890 - DNA, 311 bp, Zea Mays
atgggtgattagtagagcataggtatcagctacctattatgtagaatataagagatggatgggttagggcaagaatagccagaggtaagaaagtttatggtgaggaagaactccatgttaggtggtaatgcatctgaagattgagtttgacttctctccttccttgatgaggttgatcttttattttcccggccttgagctcattgattcgcggtgagtgtatatcatcggggtgggggaatgtggttaagatggatttggatgagataggctacatgatgtaggtctaaagttcatttgatgttaggtgg

SEQ ID NO: 38891 - DNA, 292 bp, Zea Mays
ggcggtgtgttggctgcaatcaatcaagcaccgcgttcgatactggtcctggcatgaattttgcactcaaatacacgattgtttcggtcgtgagcaacatgggtcgctaattcgaaccagttccgtgttcgagtatgtcgaacggttttccaatttagtcgatcatctatcggcatatgaatccaatgcggaccccctatactataccatgcgctttgttgaccggttacagaggacatcaaatctgtaattatggtgcaaagaccttctactttggatactgcttgttcct

SEQ ID NO: 38892 - DNA, 465 bp, Zea Mays
gttcgccacatgtgggaagcagttcggtacggcgacgtcgactactacgaggatcgacgggcgctagatgccctcattgctgcagtcccgcctgagatgcagtttttgctttcccagaagcagactgccaaggaagcctgggacgccatcatcgcgaccgtgctcgcaagaccacactacaggcacttcgcaaggagtgggagaacttggccttcaagccaggtgaggatgttgatgactttgctcttcgcctcaacactgttgcagaagatggtgcagttcggcgacgacacctacgatgaggatagagccgtcgagaagctcttccgttgcatccccgagaagtataagcagatcactcgctcaatcgattctctgctagacccgccattccctggcctagtggccaagcttgccatagttgtggcagccgtcatctcgtgccggcttcttgttgtcgacggc

SEQ ID NO: 38893 - DNA, 283 bp, Zea Mays
acactcctattgttttagaattcagcagtatctaaatttgcaggagtaaaatgctgtatgatgattttgaaacttcttcacgggacatagaggtcgcccctatatgagtaatcgtaagcatgtggaatcgtcttaagtcgttgctgacttaaaccgattgcttttgttaatagggcatagtagtaatcccgagttaagtaagcgtgagcatgttgcaccgtcttaagtcgttgccgacttaagccgattgcttcgttagcagggcatagtggtcaccccgagt

SEQ ID NO: 38894 - DNA, 323 bp, Zea Mays
gcgaaggccctgagacggagggagtgtacgaagcaggcgacggccttgtcggtccccattagagccaggaacggtgaaggcctcaccgactaccgaagacctggcgcatggagcacgaaggactctgtcaccacccgcgcgttgttgagacggtgggtccatgtaaaaccgctctggcccgcctggtcctacttgcaagccactatgtgggtagagttaatggtgtgcccgtccttattatacctaatcacgttgtaatgacctataataacctttaagaggggaatattccagggataacgttgtatttgacatggtgaaac

SEQ ID NO: 38895 - DNA, 300 bp, Zea Mays
gcctaataacttaggaggttccgtcacaatgcatgtgttcatgtttgcaacgaagcttcttcgtattcaacaaaactctttgccaccgaagccggataatttctgtacatatcatcgttcgtgcttcatgttatgaaaatgatgatcctacgaatgtctaatgaatgtttgtacgaatgcaaagaatgatgcgatgtaatatgcaaatgtatgacccaaacgcacacgaaaccatacccagactctacatccttttatgaacgactttgtagtctcttcaccttgtaattcggtggcatt

SEQ ID NO: 38896 - DNA, 389 bp, Zea Mays
tgccgctttcggctcaggagctgattttgccttcttcaaaatattctcatcctcctttactagcctggcagcttgcctatttaggatgctgacaatccttttccttttaaacccttcgacacctttgtcaaacctttcatagtttgggtattcaaaatttaacgcgtccatcactcgattcaacctttgttttggccgggtgctgaaggcagcagtcattaactggtcctccttcttagtgtagttgccaagaatttcattgcacattgttcattcatttctaaccactcttggcatcgcttcttgaattctttctcaaatttaaaagggtaagggagccgaacaagttcgttctttttgcccccatccttcttcttaggcattcccca

SEQ ID NO: 38897 - DNA, 396 bp, Zea Mays
aagtcaatataattactgttccatgtgtcagtaagtttcaaaatgatatatcttccatatgttgagcataatctagacaatatatttgcaatcacatattgtgatactgtggtttcatttcaaaaaaatatttaactgagcattcaacataagagaagagcatccatgatctgcacctttggtataatcacttctaagttataaaatctgttgcatatgggagagggagtcgtctgggttgtaaaaatgacaatatgcatggaaatcaagtgggttggggtatgcgcatgcatttgagaatataaacgtttgagaaaactagttttttataaattacggtactttcttgggactttgttggatgtcaggtttttgccattttgcctcacttatttt

SEQ ID NO: 38898 - DNA, 298 bp, Zea Mays
cgagcatgaatggcgtgttgaataagggaaaacggaggggttcttttgcgattatccccggtcaaaggggtaccttaacctctgggccacaagatcagatagcaatggtccagattaaatctggaaggggtatgttatcacggctgttggatcccaatccaatgacttagattttaaatactgaaatggatccctatgcgtacgatatgaatccgacgatgaagatcaaagacacgaaccggtatgttttggcgtccgcccgatccaagttctacgatcatgattaaatgaaggcaca

SEQ ID NO: 38899 - DNA, 330 bp, Zea Mays
tacatttgtaggcacaacaaagttccacagtcttgggaagaattcaaatttcattttagagatgcattcattcctgcatactatgttgatcacttactttctgaattagacactttgaagcagggtgataggactgtaaaagaatattatcatgattttaaaatttgtaccacgtttgctggtttagatgaatgcatggaagatgtactgacaaggtttacaaacggactcaattctgaaattcatactatggtcatgcatgaaacttatggacacctttctcacttgtttttgcttgcatgtaaagctgaaaaagagatcgtgttatac

SEQ ID NO: 38900 - DNA, 505 bp, Zea Mays
cgcctgtgccgttgatcaaggcgtcaatgactaggattagagaaccttatcgctttgtgcattgactcctggccgtcggatccgacttgcacaatcggtagccgtaggatctcaaaagaatgggcggccaggattggtggatgggagcggtctgaccagatcctatctacaccgttgatcgactacttcacgactaggattagatcctcagaaaacgtttcggtcgggtggcagttgtcgtttgatcgtggatggacggtagagatcgaattgaagcatacctcttcactctgccgaatgcgcaccgttggatggcgatctgatggccaagataggataccggttcatttaagagtctggactaatctgtgccgtgtgctttagatcgagcggccagaatcctacgataccccttcgcgagacaaattctcataacaacccttatgtttttacagaataaaacccgcagtccacaacagaggaggtctgagtctatagaaatttt

SEQ ID NO: 38901 - DNA, 346 bp, Zea Mays
gaaggccgagtcattggatccccggtagaaatcttcaatcaccgctgcctcggtgactttggggatgcggtttctcatggtctgaaacctcttgaggtatgaccgaagtgtttcatcgccctggcgcctgatggatttgaggtcccatggttgtgtcggtttgtcagagagggactggaagttggcgatgaaccaccgactgaagtcgctccaatcatcgatgtagtgtcgtggcagatgtcgtagccactgcagtgcatcttgccctaggacgatgggcaaatatgctgtcattacgtcttccattgccccggcggcccgagcagcggtcgtgtagatggccaac

SEQ ID NO: 38902 - DNA, 423 bp, Zea Mays
ggaatttggtgtgccattcattacccctgaggatgaggccgaggagtttgatgactcctattatacctcggctcatcctcatcctcctcctccctattcgggtcagggacccattcccagtgaccccaggccatccggctccggtcactatcctcctcctccctacccgggtcagggacccattcctggtgacccatggccttctggctccagtaatcaccaccctcctcctcctcatcagcgtatgtcttctgcatccattttttctgcaggtgatgagcctcctcgggactcctcactcgaggaagacatgatgcggaccttctttcccgactacacttcctatcctccgtcctatcctcctcctggaggatattgattcatgtgccttcttctcactctctcctcgttttttggtacttg

SEQ ID NO: 38903 - DNA, 471 bp, Zea Mays
accggagaggggaaagagcactggcgcaaaggattcgtggcgttcactgtggcaagtttatcggagacgacccagctatctaaagcggcttagtgcgacgtggtaaatgggctgaggcatggcgcaaccgcggtgaagggcgcaaactccggtgacggccgcttggccacgtcgccggcgcaagtgggcacgacataggacggaacagtgcttcaagctcatccgcggtgaagatcttttcaccccgaggcattatctaggcaccagtgggcacaaatcgcatcgccggggttaatcgcggcgtaaggtcaccggcagcgatattctctgcacctgaagatcttttcctactctaccatgagaaatctaattcagagcctctgttcgaccaacttgcaggacccatatctcagatttctgtgtgagaacttgttaatctctctgtaacaaagttgtagccctataatccag

SEQ ID NO: 38904 - DNA, 284 bp, Zea Mays
caagttttaattaatcaattaatcaagtaattgtttaatctgccggttatttcaaatagctttctgattaaaactatcttacagtttctacactgcgcctttataaattcgtgttaacatgattaatcccatgcttatatgttttgaattaatatttacttagtataatcacgacatccgttggtggctctcgtgtgtcgcacgtgtggttgtgtgctgttcacgcgcatcgtcacgcgtcatttgctcatggtcacacgtggttgcagacgcttttcgtgtgc

SEQ ID NO: 38905 - DNA, 300 bp, Zea Mays
acttatttcggcagcaaccactctaaactcaacttcggctacctagcatggagagccaagttgcacatggcacaagggcctggtcatcctgaagcttagtttcataggcttcatgaccatagtcatcagcttctcccttctcttctcgcctgctttcacataaaaccattcatttgtccacctggttggtcatttggtgcgatagccaatcactggagcctttgtatcttttctatatgcaaagttgtagcaattgaagttcttatgaagaccatatgccctggccttcgtctgataatg

SEQ ID NO: 38906 - DNA, 986 bp, Zea Mays
gggatctagtgcaaggttggtcaccgctggcgtccctcggtcgttggggacttacagcgcggtctgtgatcatcacttggtggtgggggagctccgcctagtctccaggaataagttcttggccacatcggcgcgattgggtggcgtcaacgctagaatccctcatcagagtatgggcgcggctgcaaatccgccctgcgccatggctgaccctgctcctgccttcttcatcggtgaggatctactccgttgactcagctcatcctctatacgtgtagcgccggtctacgaccgatttggggtgccataacctcgggtcaccggttcacaggaatgcatcgccgacttcaccgccatggttcttgcgcgctgccatctggggactatcgcggggaagaaaaccccctggccgtccgattgactacgggtggctggttggagaagatggcgtgggatggaaacggtgaccgttagatcggtaaggtacgatcaagattagaacaacagataacccttcggcactttgaatcctcgtcgttgatcgtcgatccggtggtccggggtgatctcatttgtatgcacgtgtgtgtggtggtggggatcttgtgcggatcggatcccgtgcgcctcaccatgtgcaccggggtgtggcacgatctcagccagtcgtaggacgccacgtgtccttgtgcaggaatccgagattggttttgcagagaggcccctgtctttaaaggaaagtaactcggtgtgcgtgtatgtgcaaagtaattacatcaaagtccctagaatttttaaatatacccctagaaacctttacagagttaaaataaataattaggaaacctagaaacttgtttatggcataacttactcgttttaattctgttttactccgttccagttgcgttaggttcataaaaatattctctacatactaaaaacattaatcataccatatctcatacttttatagttagatattt

SEQ ID NO: 38907 - DNA, 456 bp, Zea Mays
gacctgaaaatttcaattatctacttcggaaacttcaccttattggtgctcttaaaaagaagaacgctttgtctccatgcaatctgctagatagcttgattgtgaatatacagaatgccataagcacgggctaccaattagacaggaaaaggcttctgggagttcctgttagcatacagccttgcagttcagctatttacagtatattcgtaactggaaagggatcttgttggattccttttgatatgtttatggagaatgcaatggatgggagacatcttcatactatatcatcagttgaatatctgacaggtgcataaatgcataaagctgttaattcttgcctttccactttctgtaaaacattttctaacatgaaacagttggttgacagaactatccaaaacacttcaagtgttgaatcgggcaacttggcaagagacctttcaggcttta

SEQ ID NO: 38908 - DNA, 690 bp, Zea Mays
gacttccatagtgtttcccaacagctcgtgaaagatcaagttcatagccctctgataagtagcaccagcatttttcagaccaaatgtcatgacaacccactcaaataaaccaatgaagcctggacatatacaggccgttttagacgcatcttcttcggccatgaaaagctgattatatccggcattaccgtcaataaagctaataattctatttcctgacgcattaatgatcaacatgtttgctatgggcatgggatattcatctttaggagtttctctattcaaattgcgaaaatcaatgcataccctgagcttacctgattctttcttctccaccggcacaatattggagacccactctgcgtatctgcaaggtctaataaaattagcttctagcagccggtgaatttcatcctttattcggggtagtaggtctagacgaaatgttctagctttctgcttgaaaggtctgaaaccggacttaataggcaaccgatgctttactatctctcagcttaatcctggcatctcagaatattctttcaatagatcgatcatttcatctctaggatcggtctccagggttttgttcacaaaagtcgggcttggagttttaccatctcctatatcgatctcctccaaaggatcggccgatgtaaacccctgtccaaatttgtcgagatctctgaa

SEQ ID NO: 38909 - DNA, 442 bp, Zea Mays
gaaagatgagtggcaggtttctgagttgagcaggaagaacatgaactgtccctctcatggtgttcatgctcagcctattcagggacgttctgtgaggcctagaggtgctttgcctcttgttgctaggcctcagacagtaagaccatgtggtggtcatgccaggtggggtgcttgtcgtgtgccatgtggccaaggacctcatgatagaggctttggttcttacttcccagtggaccatagtttcctccttgtggtgatcgcttccctatgggaccgggatgtttggtgttttccctaacacttttcaggtgcaaatgccgcagtactggtgttcttcacagtttacttaccccagtgttgtgccatttgctcacccagtgcattactattgatgtaggatggaggcctagagaacacgtggctcatggatttcggctgttcg

SEQ ID NO: 38910 - DNA, 293 bp, Zea Mays
cgcgagcctgaggatagtgcatctccgccgccggtgcaaccagaggagaatgccgggtccacgaccaccgcggttgccggcgacggtgaggggaaggagtcgctggacaaccctttggtggccatggagtgcttcatcttcctgtagcactaaccttctcctgacccgttctccgctgtcagcaaattactccacatagttttagcaggagtaaaggtggtggtgttggtagcagcagcaggcagtaggccagtagcagcgtaatttggtgagtaataatctcgtcgtgtaaa

SEQ ID NO: 38911 - DNA, 421 bp, Zea Mays
tgctggaaatggagaagtcccaattgctgcgagttggtctctagtcattgtagccgaaacattttgtcatgctgacgaaggggaacctatagatgtttttactaatcttggagaagggtctgacgaagaaagtgaggactttgagcttgaaaaggataacgacattcggccgctaaagcccagtcatgtatgcttcaataagtccacaatgatgaagggtcacattgaggtgctgaaaaatacatactacattagtgacattgacatggttagacttgggggaagacactatccctttgccagagaagaatgaggtggtggtattctgaagctttcttaaagctatatgttgggtacctaggaatagggtacccatggcgaggcccataaacctctttctagcccgctcgccgagcaatac

SEQ ID NO: 38912 - DNA, 319 bp, Zea Mays
cttatacaaagcatgtactaattaagcttccaagtcaaagcatccgtcttagacatagaacagaacagaggagatggaggagcaacagataaatagcaaagggggagactggaagactggaggagcagcagaactatggcgtcgctgaccctggtgggcggcggctggggaagacaggaagagccgaagaggacaaacggacaggcggtgacggcagacctggtcgactggggaagagggcctgaccggcggcagcagcagcttccacaagctctttctttcccaccgtttccctcctctcccacacggcagctctcgc

SEQ ID NO: 38913 - DNA, 952 bp, Zea Mays
gtagcaggcttcaccatggggctaaaggccatatgcctttagcttctgcttgaagatctatttcttggtgagcacattggcgccataggggcgtggcaacaagacccaggtgtggttcgccttaaaggcctcatactcctccagtcctcctacatggcatgcttttagttaggatcggtgagcgtagtacggacaaaggacaacttgggggagaccaccggagaggaggacgctaagagaacttggcagttgacatgctggaggacaccgacgacccgtgccagtaaccatcgggtggacatacctagggtcctagtggagggcaacagggtgatacattggcagctcgtcatgagagggagtcggtgcatcagcccaaccacaccgctagtagatgtgaatgggatttacgaatcgtgacaaggaggtcccctcagcaaacagcggtggggccacacatgccagcgcgagggatgctggctccgcatttggtggcacaagcgacactggagccacgcatggttgtgcgggagacgatgaagccatgcatggttgcaggagacgacagagccatgcatggcagtgcgggagactccagagccacacttggtagcacgagagactctagtactcatcgcagcgcaggggatgctggatctacatgagggggcacgtgcgacgctagagccgtgcatggttgtgcgggagacgacaaagccatgcatggtggcgtgggaatgacattatcgtatggtagcgcatgagactctagggtcggtgggggtagcatagggggcatcagggatgtgtgtagcgtggtgggggaccaaccatgggtgcaatagggggcaccatagagtcagcctcgagaatggtgttcaacttaagagggagaggcagtggaaggagaggtagagaaagggaagtcggactcgtcgaagatgacgtgaca

SEQ ID NO: 38914 - DNA, 389 bp, Zea Mays
gctgtggagatgcgcatcgccgtgcagagtgccagtggagtggcaggtgttctatctgcagtcaggaccacaaggatgtggtgtgtaggaggaatcccaatgggaagctcagatgggagccggtgacttcctcctcttctcagggcactatcaacatgatgtcaagtgctgagcagcagtttttagtacctcttcctccacaacagctttatgtgcctgggacttctcagttcgtgccgatgcagggttttcctcagtatcaggtcgcgcctactcctgcaccgtctactcctatgccatctcagtttggagctccgcgcctgcctcatccagtggctcagtggggttgttctgttaatttcactccgggggcttcctcttctgcgggt

SEQ ID NO: 38915 - DNA, 329 bp, Zea Mays
tgtttgtgatttatcctatagatatagatgtggagtggaagtgatattgggagttaagagctttcatatttgctattttagatgcatagtggaagtgctattaaggggtgaaagattccaggtatgatttgcttctaaattttagtggtgctatataattagttaaggtatttgtaaggcgtcgactaggcaatcaccttattcgcctaggcggctggaagggggtcgctcacctcgccctctcacctttaaagcattgctaacaattaaacctaggtgacccaaacaggccctaagtgtagtcatatgtaattgatataaacaaacta

SEQ ID NO: 38916 - DNA, 348 bp, Zea Mays
tgacaatcgaactggagtccatgctgttaggtgtgaaccagagtgacaacccagacgtgccctcatgcttctttgaagatgaagacgatgcgactagccaactatctcatctacaaggcctctgtccggagtgaaaaattctttacttggcttctgatttagaatcacagtcactgcaatataaacctgagaaagaagaatgtccttgacatgaacacttgtgacatttgtgggctcgccggtgaggacacaaacaacattatctttatgtgtccattcgctcgagccttctggatgagaatcggagtgaacccaaacatgatcgccgcggtgcaagaactgtggacc

SEQ ID NO: 38917 - DNA, 618 bp, Zea Mays
gtcctccttcgtatagttgccaagaatctcattgcacatggtttcgatcatttccagccattcattacatggtttcttgactatttctcaaattttgagcgatttgtggggaatttaatggatgtttgagcaaggtctttgtaacaaagttgtaactggtacattggacaacaactttgatataggcaggtgagtgggttgtcgcatgaaaaattgagaacaaggctctccaattcgctctgtcagaacgtctgacgaagatcgtgatggtacagtaactgaaccagatcgtggattcagtgaacctgtcgccgccggtgggcgtgcgccgtgatcctcgttggcgttgcgcttcgtacgctctgggtgtggataacggccggcggtgaaaagatcttgaccgcggatgaggtcatgagctggccgccgtacccactagccctatggctggtcaagatgaccctcgccggagtctgccgcttgccgcctagacgccacgtacttagaagtgttaccacgtcgcagtagaccaccgtaggtagcctgtccatcgcctgagacattgccccggtgaacgccacggtagttcgcgcaggtgactcacccccctcttcggcc

SEQ ID NO: 38918 - DNA, 468 bp, Zea Mays
aaagaatccaactctctcttttcgcttgacaaagatgatggcatcatccgcatacaaagaggtgttgcgtatcaatattcagaaatccttagtcgtgactatcaaatgcaggcgctggcctctacctcaatgaaattcttgctggcttcctgcttcaacaacgagcttccctattaaataccttgggatcccttgatggttacagcgctcaaaaaagctgacttccagtatctacttgataaggttagcagcaagttgacatactggcaaggtcgtaatttcactcttgcaggaagacttgtcttggtcaaattcgtgttgtctgcgcagtctgttcacacacttacgaccattaatgtaccaaaggaggtgcttgaagaaattgacaaatttaggaggcgattcctctgggcaaggaatgagaacctcatcgagggcaagtgcaaggttaactggccgacggtggtg

SEQ ID NO: 38919 - DNA, 510 bp, Zea Mays
gttggaccatgcccttgatgagttgggcaaggtttgggcggaggttgtggaattgcgtgctgagtgcgcagcatgccactatctggatggtgtttctcccgcccctgtcgggatttagcacccttaccgttcaccgccccgtggtcgcttcgactatggtaccccagactgcaggacccagatagatttggatccatagatcgacagagtcggagtctgtaataatgcttagttctgtgtcttagtctattcagtcttagttagagttagtttgcttatcttatgttggatgcttgatatgatgaacatgtactgaagtcggatctttgtaatgattgtcaccaaggtgtgggtatcccctgcaacttggtgtagttattaataaagtcagttcattagttgggtaatccatttatttccactttcttctttatctgagaagctgtcagtgaagatggtcatttgtttagtgctacgaagattttctatacatcttttcttatgctaaaa

SEQ ID NO: 38920 - DNA, 337 bp, Zea Mays
gtgagtataacctccctgagctttcttgaagggtccaatcatgtctaatccccagcacgcaaatggccatgttataggtatggtctgcagctgctgtgctggtaaatgttgttgctttgacaagaattggcaagcttcacatctctggactaactcggctgcatcactctttgttgttggccaatagaatccagacctaaagactttcccaaccagagttctggatgctgcgtgtattccacactgtccgacatgaatctcatctaatacctgtctcccagtaaccgaggaaatgcacttcatgaggactcctgttgcaccccttctatacagtgcg

SEQ ID NO: 38921 - DNA, 348 bp, Zea Mays
aaaagaatggcgcagttgaacgtgaatcgttgatatagtattcagaaaccaaaaaatgtatgagtgaccgaccatataatcagaccaactgacttaaagtaaaatatggaaacacgccttcgagcatagcatttgatccgtactcatccgaggatgtaatgatgaggttcgtcctgtgaactgaataccaagtcacggtacagaaggttttaagctgtaaagcaatcacggtgtcgttgcagcggatgagggagctgtaaaatcacaattagcatgttttgttagactcgcacaggtaacgtacgtatgaaatatctaatatagttgatataatcagcagcaacaaat

SEQ ID NO: 38922 - DNA, 317 bp, Zea Mays
gggagccgcatctcaccgccgtcaagcgcatccttcgctatctgcacgacaccgtcgacctcgagctgtttgtagctcatgcttcctcgccgcacacgctgactatctacacagatgccgattgggtcgagagcccgaacactcatcgctccatgtcagggtacgtcgtgttcctcagtgactgtctcatctcctggtccagcaagcgacagctgacggtctctcggtctagtgcagaggttgagtatcgcgtcgtcgccaatgacgtcgctaaggcgacttggctgcattagtttctactcgagcttcaccagcct

SEQ ID NO: 38923 - DNA, 813 bp, Zea Mays
atatcacagtgatgtaagtacaagggtaactcactagctcctatagttcctaaactgcaaacatgtcaaaactggcacccactctagcagtctctattgactacaggaacatttccctcccctgaaaatgtggaacccagacgagtccctgaccgagatcactttaccggtggcagcagaggcgtgctccaagaaagagtgacagtccccacacatgcggatgttcttcacgacgcggattgtctgcccagggcctgccatcagaagaccgtacattgatgctagcttcatgctgtggtacatcaggaagtgcctcttctggtactcctcgacgtcgtgcagaacaaaggtggtgtctggctcgtacccggccttgatgcactcgaggattagcacatccaggccagcgtatatgtccctggactgtgggtgtgatttatcccgtgcgaaaaatgagtggaccatgttgccatgaaacgtccagctcctggccgggatcttgcgcatacccttttcatacatctctagccttgtgttctcagaggagcgccaccttgctgattcagatagtaggtttgaagtcagcacgtacgtggacgggtcttgtggttccaatgccagcagatgcttcatggcccgcctccgcacagccatgttggagtgcttgctgcagctgtctagcaaagaccgccaaactaatgcaccaggctgcaatggcataccacctataagctgctctgcctcgtcaaaacggccccagcagccaaggacataaacaaaggctgcatagtgctccatggctggttcaatgcc

SEQ ID NO: 38924 - DNA, 630 bp, Zea Mays
gtgaggccggtcggcggacccaggcggaggggtgactactggcgcacgattctagcagcacagggcgcaattccggacaggcgaagctcaatagtattccatgtggtatggcgagcttcaccggcccgattccgactactcgacatcgccggaggcttcgaatccaccacggcggcacctgctctactacttcgcctcgccgtgatgcgattgatgagctggggcgagcgctggggttatatagtgtggggcacgtgggcaggcagagtccacacggtggaggactttatccccggaatcaggtgacaacaacccacccgaatccaaggggaagactccgagtcagcatcttcgtagtttctgttggcgctccttgattctcttggggaggttgacgacgcccgacaggtgggtccctcggctagagagagcggtagcggcacgcgatgcgtaccggctgacaggcccccccggtcggtgcggcaggctactcggttgggccgagtggtggagggaagtcgtgggctaaaagcaaggttaaggcccatttcggttaactcttccttctttctttttctttgttttgtttccaatttcaaatattcaagctagattcatatccctattttg

SEQ ID NO: 38925 - DNA, 372 bp, Zea Mays
tgcttatggagacttgagacagttttgtcaattggccagtctcttttgaaacgcagaggtgatatgagatcatttttgtatgttcaaatactgtcaacgggccatgattattggatacctttctttttgtgcaagttaaaggacacatttgtatctccatgcattactgtaatatctatggcagaattagcattaaatatgaaccaggtaatgtaaatatgatattgatcgattattattacagttctattttattttaatcaatcatatattacattgtttgtcataggatgcactggcactaatgtctactagtcgccccttgtgtactctttgtactccatatagttctgtagtcatttcagttctgca

SEQ ID NO: 38926 - DNA, 359 bp, Zea Mays
ggatttaatgcggtgggtgcttagtgaaactagtgcctataaaagcgctctctcagcacgagaggactattgtgcatggatagacgcccgaagcaccacttcatttttaatgaaggtcgggtgtaatcatctgaagatttgcatcgaccctaacttcagagtttctgttgacacgtccgaagatcaatcgtcgaggcttcagagtggtctaaaaattcttatctgatatatggaagaagggcgagaaggagattagtatcgaagaatttataaagaatagggagaaggtttgtactttgttacattcgtcttacctgtgcggggcgtacacacattgtgactttcaaacttttttgcag

SEQ ID NO: 38927 - DNA, 576 bp, Zea Mays
ctgggacaatcagaacacaacacacaactcacacaaaacacacacacaacacaggcacatacgagtcctttgattaagtaagttacttttcgataagtaaactataagtaaaagtggaaaaaaatagaaatgtaacaatgaggcttgccttattatggaattttactgaacattttatatttgaagtcaaaaccaaaatttaaagtcaatttgaattttggaaaatgacattagaaaagaagtacaaaaaaagaatagaaaaagggaaagaaaggaatcaaacctgggtcgaaacctcagccaccggcccataacaatccctggcaccagcatgtgggggcagctctcccctcctcagcaggcactgacatgcgggcccgtagcacagggactcgatgcaacaccacaccgcgcgcgcattccgttttttctgctgagtgggcccaggtgtccaagcgcatcttccaccttctgcaaacgcaacaaacctccctcagggagcgaaagtcctgggggattgatgtggtcgcctccttcacaaactccacgtgcgtataaaaaggcacccgcttcgcc

SEQ ID NO: 38928 - DNA, 305 bp, Zea Mays
ctcatgagtctctgacaccgctatccacctacattgtttcagtcagcaatgctgctaggcgagctctatggtctctcagccacacttaccggcagcagctgcatgatacgaagtacaggcatcttcctctatatcttcatggagaaagctagaccaacattattccaggtgagactggagaaggtcgcctcaacacccttgttggtgtggtggcaggtcttaacaccgaccttaacagtgctaccctggacctcttcagggtacatttggagctggaggatgcacatgcaaggattgcatccctg

SEQ ID NO: 38929 - DNA, 489 bp, Zea Mays
ttctaatttctagccataggaagattttgcactttgctataacccaagttctccatatatgccccatggctcaaaggtcacagattgtcggaagaaggtcgagtaggctgatttaactgaatattgcccagagctagagcatgtctacatgtgttgatcttcattagcattgagggccacttcttggacaacatcccaaagatgaaaaaactcataaatactagatggagagagatttccttgaatatcagggatccatcatttgatcctcgagaaccatcaactactgttcttgtttttttgaatcttgctgagctcctcaaacagatggagctatttcagctatagaacaacccaacggccacttatcagactagagcagagtttagacccattacccaccatcgttgacacaacaatggaggagagagctagggcattcttgtggacaagaatttccacccctttccaaactcttgaagactcggt

SEQ ID NO: 38930 - DNA, 427 bp, Zea Mays
tttatagggagtgtgtgaaagtgctcacacattaataaaaaaggcatacactatgttgtgtcaatgtagagtaggagaaagggtcaggtcacatttgggcgccagacaacagaagcagagggtgtctcagaacttccaagaagtcaaccaagccgcccttgctacccgatgaggttgggtttgcacccaaaatcagcgaggccatctatccaactcggtcatgcttggttttcctcagtgaccactactttcatattttacaagttgatatatttcttgaaaatttttatagtgtcttttcatcttccctcaaggtaccaaagcattcctttaattgtaccagagtaaggtctgatggtcaagcgtacccattttttaggatcgatgtctaccacatgtgaggtgtcgtttgagctactcggcaagg

SEQ ID NO: 38931 - DNA, 404 bp, Zea Mays
gaagagccaagcagaagggcaaggagcatggcctggcaggctggggctagcgacaacgccggtcggctttttttacgtggacaacccgggaggcttgaagatcacgcgtatttttctcccccctgggtcgggcgtcatatagaagcttcgtgaggcttgataacgatccagtagagtgggcggtcgtgttcgtggatttccaatcaaacggctgaaaaacaaaagactgacgtggacactatgaatggccagccttgttccctgctttaatatatagaaatgaccaggtctgaactccccctgagttaaggccacagacctctcggccctgcagccccagctaaacaccacatcttggcatcgtccctaatgtcttgactcttgagtaatcctagagatgtccg

SEQ ID NO: 38932 - DNA, 518 bp, Zea Mays
gcgggggttagctggagaagtgcctctctctctagaggagcaggcagaacggcggcgcctcggcttgtgctacaattgcaatgagccctattcctgggggtcacattcgtgtgtgtcgctgtatcttctacataggcggcatggagatcatggacgaaggggacgtggtcggcgaggcgaatctagatgccctggtcttctccctatgggcgtcactggtatgccaatctgtgacatgatgtaggtccgcgtgtctgtgggtgctgcctccttcaccgctctccttgacatcggctctactcataacttcatcaccgaggacgccgcgcgtcacaccagcctggaggtccacctcaacccgcgcctaactgccatagtggtgaatggcgagcgcatctcgtgccctagtgtgctacgtcaggcacccatctccatcgctggggaggacttccacgtcgacctctacatcatgccactcgcttgatataatctggttctcggcacacagtggatggtca

SEQ ID NO: 38933 - DNA, 300 bp, Zea Mays
gaaaattccgtcttgcccgagttcatcacggacagaggacaacctcgagcccatcctcggccaaagatcttgggaaccatgaagacgtgcgcattaaatgcaacgatacgaatatctgctccatgtgacaccacagtcaatagagaacgatgggacagcggtcccatctactttaactgactacgatgacgcacacccgcgaataccggacatttctcccccactctggtcactattctcgaacaaactccagatggaacatgcaaacatctagacacatcctcaccctcaggagagaac

SEQ ID NO: 38934 - DNA, 298 bp, Zea Mays
gtcgatgactcgttgaatccaaacaactgacgaatctgactggcatgaatggtaacatcctctcgctcaaaacgaaatctcatccagtggtgatcagggtcgatccatacagtagcatagaaaactcggacccattcctcaacatatctatcattggtagtcaaaagagtgagaagtccaggcagataggagaggtgaacctcagagtcggcaccggctgctagcaggaaggcagggagatccaatagccagtgcgctcgtagagcaatatgagctgacagctgtgctctgtagaaag

SEQ ID NO: 38935 - DNA, 365 bp, Zea Mays
cacgtccaccatcccctccatcacgtcctccaattattttctagtttccactgcacttgacatctgcgtcctcccccatacccttcggcaccatctaacccatatccatctatggtttgcctccgtgatatgaccttcgcgatcgacatacgctttgtcgccccgctcgtcttggttttgtagcttttgcttccattctctctgagcctacctcctaccgtgacacacttatcctgagtaaaaattatctatggttgagattgttgctcttgagcacactagcacttcaacacttgggatcttgtcccacttccttcctctgcttctcctatcaggtgcaagtgggcctataagattaagactcg

SEQ ID NO: 38936 - DNA, 840 bp, Zea Mays
tgtgcttatcggataagctaggattgttatcctcttggagctgcgtctccatctctatatctccccctgattttctccaaccgtgtaacagccatgcatggctcatctatataaagaatacatcggcaccatgttcaggtgtcgagtcttgagccatattaacatggtaccggagccaatggttcaatagatgtccatcatctcaactttttcttccgcctccacccctgccaccatgtctcactcgaccaacaacatgccttcccctcctaccatactgctgcatcatgcgatcaccatctgtctcaccaaatccaattatctactctggcgagcccaactcctttcatatctccgcagcataaagttgatggggtttcttgatggcaccctgccagcaccaccgacggttgttgcgtcgtcttctacagccggtgccgagatggtccagaatccggccttcatcaagtggtatgatgccgaccagcagctcctcagtgggcttctatcttccatgacggaagacattctccgtgatgtgatcacgaccacctcatctagggaagtttgggaatctctgcagcgccagttctcctcctccacgaaggcccgaacactacaactttgggttcagctcgccactgcgaagaagcatgatctttcggcagctgactattttcggaagataaaaggcatcgccactgaacttgctgttgccaatgaaatcctgtgtgatgatgaggtgattgcatatttactcgccggtcttcccgctgaatatgatccatttgttacgtcgctaaccaccagaaccgagcctgcttcccttgatgatgtctt

SEQ ID NO: 38937 - DNA, 368 bp, Zea Mays
gtagaccatccgtgcaccatgttctgccattctgcctcccgtcaatcggtaacgtccgtgacatccgacggctcgcgtgcgttgaccccgccccccgttctgcccactcccgagccatcgccactccaccccgttctgcctcctcccaccgcgcccccgctctcgcaattgtcgccctcgcgtccgcaatcctcgcccccaagctcactcttccgagctcctatcggcacccatcctagccttcgacaccacgtcgtgcccaaccctaaaacccacgccgcgctggtagctccaccttctttcctcgccaccacgcccagatggaaggcgcgactgggatctcggagcacgtcttggatctcatcttc

SEQ ID NO: 38938 - DNA, 584 bp, Zea Mays
ttctaccagaagaaagaaagatgagaatgatgatatgtgtgcaatggatttgctcgcaactgtggcaggaaagttactagcagatcaggacaattcatctagcgttcctaataccagtgcagcgaaagctaaaaaaaggaaatcagttaaggaagaacactttgatgaaattccgcctctaaaaaatgtggctatggagaaagatgtgggttctggtagcgttagtgccttccctaggcaagctaaaaactgcctggcagaaaactcatcgacaagaaatggagctgatacagtattagagtcactaacagtgaaatcaaatatgctagcaaaaattcctgagtgtggatcttatggaatacaccatgcaggctcctcaagttcagcagagcctgaacaagtgcatcaagctgaacctaaagtgagcagaagacaagcagatggacatcctgtggcttatggtatatttaactccgtggatgtggatggcaaacctccggctttggttagttctgacagtagctcgtgtgttcctctgagcagccatgacaaggaacatcaaacctcttccttgtatcggggtg

SEQ ID NO: 38939 - DNA, 397 bp, Zea Mays
acacccactttcttctctctcttagactatcttcaacggtcctctctatatttctccccctatatcccactatctcgccacatcaacaacctctattcccctatacctccaccctacagcgattcccttatattcttcctctgtaccccattacaactataaaatatcatttccatacctatttatcatttattaccaatattttcaactaaaaaacacagacatacacggaaaacgagagtaggggctgcctcccacaccccacatgatgcatcgtgtgctcttctattactgtagcgcgaagggaaggatgtaggggcctggcgttgaacgacaagaaggacgctaaacatggggaggtggcggctcgcgacagccgttggatatgaccttatgc

SEQ ID NO: 38940 - DNA, 348 bp, Zea Mays
tgccatcgtaggtaacatacataaaacattttgttgccctcactctctattgcgaagagggggagggcagtgttttcactcactatcgcaacacgagagcgaggccagcaaaaatgctacataggctccgccttcagaataagacccacctcccggaaattaaacaacatcatccttaactcttcgccctcaaacagattccgcatgtccccctccccaatacacgtttcggacgtcgaggatagtagaccgcgttgacaaccccaatctagtcgaagacgagaccgctccatacccatccgacgacgtctcccacttcgtgacgtcccgccaatgctctgtttcgac

SEQ ID NO: 38941 - DNA, 597 bp, Zea Mays
ccggccgtcgttggtggtaccggtgaagacccgaccgtggcggtggcagttgcctggttattcgttgcatggagagagatagcgagtgaggtgaaggaaaggacacttgggttgggttgagccctcgtaagatttgggcagctgcgacctgtgactgaggaccctgagggggggcaacttcgcttcgcgcattgcgtgcggcagtgataatcgcctcaccgaggcccaagacatccaaatccaatcgtcgtggctctcctcggagcggtggcggaggcatcaacaagagccgacgaaggatccgagaggaagagggataggacgtggcgatgtttgggatgagtggaaacacgtccgcgatagaggcatcgagccgagcgacgacgacagaggatccgaagggggagggaagcacgaagtatgggagagagaaggggacggtgacctcgcgactagagaaacaagcggactggacgaccgagcaagacatccaacccatccgaacaaccacgattttcctgatgacgtggaccgccccataacttgaaaaatcgcaccaagttttaatataagagaagagatgatagataataaaaa

SEQ ID NO: 38942 - DNA, 287 bp, Zea Mays
ccgccactcgtggtggtcgcccttgcccctcttgctcctagcaatctcaaaccctaaccctcctctcctccctccaacgcgacgagcggcgagttgacgatgtcgtcccttgctccctcctcctcatcgccttcgatgcctcagtgccgtcttcttgcctcgacgtcccatcacccggtcgccccctcttcctcctagcaaaccctaaccccctcctctcctacatctaatgtggcaagctggcgacaccaaccctgctccctcctcatctcctccgacgtcgtctt

SEQ ID NO: 38943 - DNA, 513 bp, Zea Mays
gtccttctgctcctttaggccgctcttcgcggcccatcctacgttgtggcctatctcgggcctgactgaaatccggtgataacacatgccccctggttttagcaatgataattccgaaaccaccattttcttcccattttattttccatcgtttcatttttttcttctcttgttcagtcatgtgccgcgcctctttaatgcaacaagacatacctgttcgaatccttggaaactggcgttgtgacgtctctcaccctgctcaagccctttctttgggcgtcgccagccttgggggctgacatgtgggcctggtaggcgccctggcccacgtgcagtggtaatgcgcatggtagtcgatcgtcatgaaattggccccttaaccttgctttgatgactcgggtcctccgtctttcttcccccccgatccttgttctgcaatgcaccatgctaatcttgcgagtaatggcccccacctatttttcctcctcgccattctccttcccctacttcgag

SEQ ID NO: 38944 - DNA, 389 bp, Zea Mays
ggctgtcgagcccacaaaatatatgacaacaattttcacccataactgatgggccacagaaaaaacttaaaagtacgactcacattttgtcttccacatttttggatggtggccatcaaatcgagggaaactcaattgaggcaagacaacaaccacatgtggaggataaactagtagaagtgaattagactgacgcggtataaaagttaaagcaaaaccctgaggtaggaacgagtgagtacctgtgatcggacctgtggagttagagtggtgaccacttcaaaaccagaacttcggtgaaacttggaagcgtccagatcactaatcccatagctgttcgttgccccgcatttgcgctgagtgaggaatgcggcactaatgttttgagg

SEQ ID NO: 38945 - DNA, 861 bp, Zea Mays
cgcgaggccagcgacgacatgctcgcctacccccacttgtgagcaccgcgcgcttctcccaaaatccctcccatccgcggtttacgagccgctctagatttggggttgctgctggatcctggcgcgcatgccgctggtgtcgttttgggcgtgctgcgggttatgagaccaacgagctttgcctttgggtgctaatacgcgagcgtgccgctgaaattgatttgggcgttggatttgtctagtgatcacctgtttgttgttcgttgagtctcgtggtctcaatttcgcatttggttttgagtgattcggggggtttaagcaccacgtcgtatagtggatagtgaaagtgagcaactgctgtttgctctgagtctgagcgttatggcgtcttttgaatagcttgaaagtgcatcaacgcaagaattagaaagtagagctgccaaggtgaaacttcttctttgaatagcttctatgcacccaactaatttcagctaagttaacatctgcaaaagtaggtgaaacttctttttagaatagcttatatgcatccaactaatttcatctaagttgccatctgccaaagtgaacttaggatgtaagtttaattatgcttgtcactaaatttctgacacatgcttaagtactatctgaattgaaaatcacaccttttaaagtcaagtaaagtaatactggctgtctatatgaattgattaacacactcaataagtttatctatacattgtgttatagagatgaagatgctttattgaaaaccaaatgtccgaagcatgtggagctgagatggcagactgaagttagttccagcatttatgcaactcctttgatcgctgatatcaacag

SEQ ID NO: 38946 - DNA, 630 bp, Zea Mays
ctcagctgggcagccattccatcaaccaaagcctgtgatcaaagacagataagcatatgagagataatttaccgatatgaacaataaaaggcaattagttgactcacctgaagattggagaggaacgatggcagacccaaggcagggggagctatgtcatggcttgacgggggaagatcagcaggaacaatttgaagggcattgtaaggggtgatctcagccccgccagcagataacagacttctcacatctagctcaccgacctctaaggcgacttgtttgttcaaagctgtggaagcatgcatcgccgtcgccccatcggaccgaggtggagacgacccaacatggacgtccatggaggtgtgggaaggagagcccacctgaacaccctcgggggctgggttgcagcttgcgctacccaccagagctggatcactaccggcaacaccctcgggggctgggtaactgccagcaccaccctcgggggctgggtcttttgtagtagccacctctaaggctgagggctcctccatcacctccatgggagtcgagcgactcggaccagcatcttggcattgaagactgccctccaaagtcgacgatgcgcgagacactgctcgggatacctcc

SEQ ID NO: 38947 - DNA, 558 bp, Zea Mays
tttcctgcccctccagaggaagcccttcctcagtttatcgattgctttgatggcccatacaggaaggtcaagtgccaaagctgcataaatcatctttgtcgtcataacgaactgcacatgaataactctaccatccctggtcatgagctcagctttccatcctggcaaaaggctggccactctatcaacaatggcttgaacctggtcccttgcgagtttcttgggagacaggcaaaccgaggtacttacagggaaaatctgaaatattacatggcagcaagtcctgtaagcaattcacctcttcttccccacagcaaattgggaacacactactcttttggatattagtccttagacctgaagctgaaccaaaaagatgaagaatatccataaccacactgatgtccggggcagtagggcttagaaataacaccgcgtcatccgcgtacagcgagatacggtgctgcatattccttgtagagagaggttgaagaagcccttcctcagaggctcgctgcacgagcagattcaagacatccattacaagaataaacaaca

SEQ ID NO: 38948 - DNA, 295 bp, Zea Mays
caaccattgtggtaccactactgagacagcatggacttcagctggagcacaacgggacaaggcgtcggccacacggttctctgagcctgggcgatactgaatcctgtattgcaatccaagtaatttggtaaaaactttgtgctgccatggagtgtgaagcctttgttcattgagctgtcccaaacttttatggtccgtaaggataacaaattcggtgtgttgaaggtaagcccgccattgttggactgcaagtattatggccatgtactccttctcataagtggaaaggccgcgg

SEQ ID NO: 38949 - DNA, 371 bp, Zea Mays
atttcggaagcaatgaagcgctctgggttggtaacaccggaggacgtgcctgctgccgaagacatccctgctgccgaagacatccctgctgccgaaacagaacggactgctgttgaagaatttgattccaaagatgactacagtagcgcagtgccgagcaagcctagccacctggacttcagaaagtccaccatatccgaagctgattttcctaagatggtgaagttgggctatcttagtgaagcaaagaaggaattgattcgtttcggtggagaggaaactatcccgaagccgagaaaaaatgaagtggtggttttcaagagtcttcttaaagctggtttaagatttcctctgaacaagatgattgctgg

SEQ ID NO: 38950 - DNA, 427 bp, Zea Mays
gtgagaccacatggtggttatacccgatggagtgctagtcgtgtgccatatggccaagaaccctgtggtagaggccttggttctcacttccctagcagaccatagtttccttctcgtggtgatcgctatccccctttgggactagggatgtttggtgtttttcctaacacttttcatgggaaaatgttgtagcaccagtatccttcatagtttactaacctcagtgttgtgccatttgctcacctcgtgtctttttattgatgcaggacagaggcttgtagaacacgtggctcatggattttggctgttcgcacgacatgactgaaagctctagatggttctccagcctcaaccctatgatcggtaaggaatacatcacattcgggggtaagtcgagaggaaaggtggtctctcatggcaccattcg

SEQ ID NO: 38951 - DNA, 457 bp, Zea Mays
ggaatagtgttgttcgttgggaaaatctaagctactcgccttttgagttatccgagttggacaccatgatcaatgatgatgagattaggaatgcggttatgggcatgcattcagagaaagcgcctggacctgatggttttatagggcttttctacaaggaatgttttgaggtgattagagaagacctttccaaagcgatcaatgatttttatcatcataaatgcaaaagtttgcatctggtcaatgaggcaaacattgttcttctaccaaaaagggagaaccctgacatgatagatctatttagaccaatccaccttatcaatagttgtatgaagattataaccaaaataatggcaacaaggctggcgccgcgtatgaatgaaattgtctccactacccaaaatgctttcattcaaaagcgatcaattcatgataacttcctctacgtccagaaagt

SEQ ID NO: 38952 - DNA, 528 bp, Zea Mays
gattaactcacttggagattggaaaggaatagtggaaggcccaaggcaggaggagctggagcatggcttgacaagggaagatcaacaggaacaatctcgagaacactatgcggggtgaccttagccccaccagcagacagcaggctcctggcgtctgactcgcggacctctaaggcgacttggccagttaaggccgtagaagcacgtgctgccgtcaccccatcggaccggattggggatgacctgatgtggacatccatggaagcattagaaagagagcacgcctgaacatccttgggggctggattacagcttgcactacccacaggggctgggtcgctaccagcaacaccctcgggggatgggtcttctgcagcagccacttctaaagctgaaggcccttcagccacctccatgggagtcaggtaactcggataagtgtctttgcatgggagactgccatccaaggtcgatgatgcacgagacaccactcgggttacctcttgcccggcagaaccaagcaatgaa

SEQ ID NO: 38953 - DNA, 556 bp, Zea Mays
cgcaacaagtatagcataaataagcttgtgcgtctcaaggtacctggcctttgcctcatggaggacttcgctgacgtagtagaccggtttctggatggttcggacccctgtgcttggtcccgggtcctcaacctcctggccttccaacaacatcatggtggtcggaccaccaccttctcctaggggaacctgttgactcccctggggttgttgtgccgccctctcggcgaccaacaccatgctcaccgcctcgaaagccgctacaatgtacaagtacaatggctcccccggctccggagctaccagtattggcagggacacaaggtgatgctttacctcttgaaaggcttgttcagcctcttcggtccaagagaatggactggacttccgcatcagcttgaagaaaggcagtgccctctcagccagtcttgagatgaagtggataggagcggctagggaccccgcaagcttctggacgtccttgatgcgggccggaggcctcattgcctcaattgccctgatcttctctgggtttgcttcaatgccccgatgtgaa

SEQ ID NO: 38954 - DNA, 272 bp, Zea Mays
ttaagtgctgaagacttaacatattgttagaaaataaaaatgcagattttaggatataatcatgcggtgcaaaacatgtcatcagactcaagctcaaattaggttgagatttataattcgaagaggtctttccatcctggcttcaaggttcacgacaagaaaatagtttacatgtatcatcattgggctatttagcatgattctgtgcattgaggtaaggaggagagggtcgactttacatctcaaatgaggggacaaccactctgttcgct

SEQ ID NO: 38955 - DNA, 313 bp, Zea Mays
gacctttgtttgcgacacccagggtttgagccctggttggtagcatcacaactggacaccctgacacgactaccacttctcaagtcagacaaaactagatcatagtaaaatggataaggatgatactcaccaatacaaagctttccaaagcctttggaattctagaggttagaacaagtaaatccattgcatcgtcaagaaaatgttctggaatgcaagcaaactccttggagcattgtgatggcaaaggcatcttaaaaccgccaactagattaactgaccacagaatcattaatctgtagaaagataatgc

SEQ ID NO: 38956 - DNA, 324 bp, Zea Mays
tgagcgtagattcaaagaggttgaaagcgatgatggtttgatcgtgacgaccgagatagcacgtaagcagcttcgtgacatgcctcttatacctcggttgaaatgtttgttcatctccaagaatacatgcagacacatgaggtggcacaaagaaggggtacgtgaatctagatgtcatggagcacccagctgatacagatgcatggaaggcactagacgcctttgattccagctttgctgatgaagtgcggaatgtccgcttcggtttggcaacagatggtttctcgcctttcaatctaactgcaccatcctactcatgctggc

SEQ ID NO: 38957 - DNA, 1040 bp, Zea Mays
tgaggaagcaccgttgaaaaggacaaacgaaggaataccttctgtttttcgcacaagaagaataaccttcgaccactgcattaaggagagagtgactgaccggaccaggcaaccgcatcgctgtaacgcgaaacgttcagtcagatcaacaggcctagggcctagacgggctgtgtcccatggtcacaggagctagttagtcacaagccctttcgcttctagcacgcgctgtctgatgcacatgcacgtcagctgctaagctaagctccatcctcagctaattgtctgatttaagcagtccagcaccgcaccactccggaaacaaaagcaagcagcacagcatctaagatgaacataagaagcaacaggactgacattgtcaagtactatataccacatgctttggttccaaaaggcgacaaaacttcaaaggcgaaatcttaactttacgatggccctacaatatattacctgcaagcaaacagaagcacgcagccaagtttattttccttcttgaggttcagctctcgcttagtactcgacttcccagcgatgctggtggtagtcaacagactcctgggtgacattagggcagtctgacaaattgactctcttcagcttaggcaatgttgatgcatgtaagatagccagtaacctgtcagtgatcaaggggcaccagcaccacgttaaattaaactcctcaagttggtgaaatcctacaagcataaggatcctgatttggacatcactgattccaatacgattcaaggtcaacttggttaggttggggcaagactctctgaggcacaccacaaagttgcccagaacgttcgggcactcgtccaatataagttcctgcagagctccctggcatgaacgagctacagtgcaaacatgcgtgtctggaaaatggtaggattgcagttcaacctttctgatcccattgtagtgcaggatgtcacataaaatgtgttccatgtgataagcctgaacagatgctggaaagccaacaagcctaagctccttaagccctcgacaca

SEQ ID NO: 38958 - DNA, 341 bp, Zea Mays
gtttaaaattgcaaatctgaaaacatgttaaaacagtccaatttattttgcaactaaggcacaagaaaattctccgagtgacgccaaatcagattctcgatccaaaaaaattcaccgatctctcattcatctggacaccagttttcctccgatcttcgcatcggtcgaccaatggatgaacgccgtccaaattgaccaaacccgcgggagtcttttcccttaaataaagttttcttagcctagaagaaaccccacctttccttctctactaagcagaccagcccctctctcttttagtcccacacgctacccttttctttccctccccacacgccactcta

SEQ ID NO: 38959 - DNA, 287 bp, Zea Mays
ctcgtcgccggcctggcaaggagagggtcgacgacggtgatgtggccgcgggagaacgggacctcgggtatcagtcccccgagcaggtcctcaaagacatcctcactggagactccgactccggtgatgataccgaccgtcacaagaagttgtacgtgatgtacggtggaagctgggagctcacctcccgcaggaacgtgaagtccctgcaccgcgaggtcctatcggcgaccccaggggtcctgaaagcggccccacaccagcggtggtggagcacaactatctcc

SEQ ID NO: 38960 - DNA, 489 bp, Zea Mays
gtgattcgtgcttggcacgcagtggatatccacggggaggtaaaaagatctcgcgggggagcggatttggtcgcggaggaagcttatcaccgcgcctgtagccgtgtgacatggccgggccggcggttttgctgtggaaactctggtgacctcggttatgccacgccatggctcgttattgtgtggtagtaaccgtggcacacttaggactacaatctttgagccgttgcaccggtgagcgccacgattaacccactagtgttctcctctctcttcggccgccagcgcgcgatttcaaattcacgagccactgccctcgggccctataaattgagcgtgccatcggctccgctaggtagtcacgcacccaatacagcaacccgtgccctagatcgtccaccaaagcgccccaatttgagatttcccccaaatcggtcaagaacaccgcgtgtgtgagctcgccgcggtcagcccttcacaggtccgatc

SEQ ID NO: 38961 - DNA, 477 bp, Zea Mays
gtcgggcggtccgcaccatagccaaatggtctggcgtaaggggccggacagtccacgatcggttcgaacgatctgggggtatatccagatggtctggccgtatatggtgctacttgggtggtctgcacgcggggctatgtagagttggactatccagcgaaatacaccgaacgatttgcgatgtagactgtccgagatgactctcagattgtccggatgtatccagtgctagtcgtgtgcctggtggcagcggttgtgatcatgatatggacacgtgcatggacataccatatgattactgggccaaggatgacccatttgtagccgatttgtaaggcatagtggttctgtattagaatcatgcgagggaaaactaggggtagtagatttttcatatgaatgtgcccattctttaacagattcatctatatattggtttaactgatcccccgctattctataaaagccttaaaagat

SEQ ID NO: 38962 - DNA, 490 bp, Zea Mays
tggagacttggtacttttactctaggagtaagtggtctgcaacttgggccatacatgaggagacaatgggatcctggtattacaaatgggcaattggtgatgagccgcgaggagctagctttgcagatcgcagtgttgcttggggacaagcaacatttcgtcggggcggtaatgtaacacccggcactggctcaccacgtgatgggccttgatgtcgcatggcccaactcagagcagcctaaaggcaggaccacaacgacaggagaggtatcgaagacaaatcagaaatcgaaaacagggttcgtccccttcgctcgtcttcctccacggagcggcatatcggtgcgtcaccagctcctcacgtcccggctcaccatcgacggccacggggatgtgacatgtccttgcaaatgtcctgaccggacaaatacaggatgagggtggagccatactgacaaagcagttagctgatttcctgcaactcactcct

SEQ ID NO: 38963 - DNA, 485 bp, Zea Mays
gagggaacaaggactacaagggtgttagccacattctggcacaaaccagcacctggaagatccaatcctagtccgaccgagccatcaaaatgtggggtgggacggtcaagagaaagcataatatgtctttgacgaagccaatggggaaatggggggaggtgtttcctaaagagaaccatagggggacgaccatgcctgtgctagaggagaaggggtgaaccagcactccatgattttccgtgaaggaacattggatccaagcactcggggatagcagcatggatatggaggatgagaggaaagggaatggcaaatggctggccggcgcagagctaatgctaccaaagaagtggtttaggggggtgttacgtacctcgagcttacctagggagctttggtgaccggcggcggtgcgcttccttgccctagaggaaggggacaagagactgtggaggcagtggcaggggctctggtggtggtggagg

SEQ ID NO: 38964 - DNA, 393 bp, Zea Mays
gggaaaagaggttggtttgtggtttaggaagggtttgcgagttgcgaacacgcactgcgtgttcgttcctcggctgtttcggctctttcgctggtcggtgcaccattctgggttctgcatagaaatttcgacaagttattttaggatgttgtccttgtccaggtcctccaggataccaattgaattgggctcagatttcacgtcattttaggatgttgtccaggataccaattgggctcggatttcacgcaatttaggacccctagcgacttagtggcagaattgctgtccgtcagcagtgacacgggtgttgcttctgaatactccactgttcctaatatttattgagtatgtgtctgaacccaaatgcccttcttatccccagcagcttac

SEQ ID NO: 38965 - DNA, 652 bp, Zea Mays
agacagtcggcccactacaccctcatagggggcgcactgtatagaagaggtgcgacaggagtcctcatgaaatgcgtctcctcggttactgggaaatagctattggacgaaatccactccggacagtgtggaatacacgcagcatccaggactctggtcgggaaagttttcaggtctggtttctattggccaacgacaaagagtgacgcagccgagttagtccagagatgtgaagcttgccaattcttgtcaaagcaacaacatttaccagcacagcagctgcagaccatacctataacatggccatttgcgtgctggggattggacatgattggatccttcaagaaagctcagggaggctatactcacgtattgatcgccatcgacaaaatcaccaaatggatagagtacaaacccattacttctttaacttcagccaaggtagtataattcatacaagacataatattcaagtttgggataccgaatagcattataactgacctgagatccaacttcactagctctgaattctttgatttatacgaacaatgaagtatccagatcaagtatgcatcagtagcacacccaagagctaatggtcaggtggaaagggctaatggaatgatactggaagcactcaggaagaaag

SEQ ID NO: 38966 - DNA, 834 bp, Zea Mays
ttatgaacgtgagctcatcggtctggtgcaggcagtacgtcattggaggtcgtacttatggggccgtcgttttctggttcgaacagaccatttcgccctcaagttcatgctggaccaacacctctcaactgttccgcaacaccactggattagtaaactgttcgggtttgatttttccgttgaatatcgacccagacgttttaacacagtggcggatgctctctcccgcagggacgctgaagcaatggagtccctagccatatctgtaccatcgttccagctatatgatgaaatacgcagtgatggcagcagcagaccggaatggaaacaactacatgaacaaatcctcaatggcacccaatcggcgccatgacacatccaagagggcctaatactacatgggtccagggtatttgtaccacctacatcacccacaataattcatattctacagctagcacatggcgcgagacatgggggttccaaaagacattacacaggcttcgcgcagacttctacattccaaatgacagaactctggttcgtgactttgtcaaatcatgtacagtctgcgagaaaaacaaaactgaggccttatacccatcagggttgctgcaacccttagaagttccctcacaagtttgggcagacatagcgatggacttcgtggaaggcctcccaaaggtgcacggcaaatcagtcatactaactgtggtggatcggttctccaaatatgcccatttcattgccctgggacatccttatactgcagcctcagtggcacgagccttctttgacaacatagtccgtcttcatggatttccactttccatt

SEQ ID NO: 38967 - DNA, 453 bp, Zea Mays
gcacgggtgggcatggcgtcatggtcgaacgccgcggtggcctcggtggcttccaggaatggcttgcgaggagtgagaatggggtgggaggttgaagataagcacggaccgtccgattggtgacgagcaccttagattagacaatgctaccccttcgcatggatgaagcttagaccgttgaattttgatcctagggttgaaaataaatcctgcttcataaagatctggccctcgatctatgaatgaacggctcggtttgatgcgttcctaccggtgcgcgtcagccattggatctgaatctgtgggttaggaattgtccgggcttcataaaatctggggcgcaaattgataatccaacggtctttgtggcgtaccggttcggtagagataggattaaatcgtgtccgtccaaggctaatcggacagctgcgatagtacgataccccttcgccg

SEQ ID NO: 38968 - DNA, 847 bp, Zea Mays
ggcttgcaacaacttctaaactttaggatctaattcgttctctttctatcttatcaaataatatattcctagttttcttcctgggtggacctggacgcggcgcgctcagcggcccgtcggacgtccctggcacgtcgtcttcgggtgtaggggagaccccacatgacatctctcccccctcgacgaccagctcgtcctcgagctgaaaggacgagtacttggtggtgaagtcgcccaggtcttcccatgtagctgtagaaactggctcacccttccagctcaccagcacctgttgcacgccacgcaagctacgcggtagcgcaccacacgctctggggcaggcaccaacaccccattgtgcacctcgggcagtggaggaggaaagtccgacgacgtgcccacccatatttttaaagaggccgacatggaagacgtcatggagcttggcttgggccggtagttccagccgtacaactacctcattgatcatctctgagatgcggtatggaccgaagaagcgtggctggagcttccccttcggcgtctgggacaaagaagtaatcgaccgactgcgcagccgcagcaggacccagtcacccacgacatatgtgaccggtctgtgggacttgtcgtagtggcgcttctgcactgcttgagcttgttccaggcggttgtggacctcggccaggaactcctcgcgctctgccatcgtcttggcgaccgcaaccaccctagtgtcgcccgcctcatatgatcgtatggatggcgagtcgcggccatagaccacccggaacggagtgtcgcagagtgaagactggtaggcggtgttgtaggtgtactcggccca

SEQ ID NO: 38969 - DNA, 688 bp, Zea Mays
gagatatttactgtaaccacaaaaaaacaaaaaaagaagcatcaagagaagtggcactgaagcaacatttaattttacaacaacagtcaaagaatgttgaggtaacctctctgtttttcactttattccttaacatcccaataatgtttacttaaacgtttatgattcttgttgtctctaggaacttaagagtgatctgataactacaagggcgggtatggagtatatgcaaatgaagtactctgaggatctcaaccttcttggtaatatgtaatgtgcttcaaaagttttggagatttatgaattactttaataccaaaataataatgaaagtgcacatttgcaaattttgtttcaggaaggcacctgtttagcttggctcatgctgcttctggttatcacaaagttcttgaagaaaatagaaaactatacaaccaggtgcaggatcttaaaggtgcgtttgttacagtgaacatttaagcatggagatcccaacctgtataggtgaagggtcggtgttttaaaaagaagaaaatgcggtcttatttttttttgtttccaatctatataggaagtatcagggtatattgtagggtgcgtccctttttgcctggacaagcaagtccgtccactgtgggttccatcgacgagggcaacataaccattgtcaccccttccaagtctggaa

SEQ ID NO: 38970 - DNA, 424 bp, Zea Mays
ttcggcctccgaaggccgaaggtggatattgaaagtgacgtcgaagcatgccacaaggtctttagcactatttgcgccttcattggcacaagagatataattcaagagcacatagcttacagagtgtggccacttgtggagagctgggatatgccgaaggagactactgctgaatccagcgaaggtggactagttcgattgaaatataccttcagatttagagagaagtttgacgaaccaaatgatgactggttgaaatgcattgaagctaccagcgatgagttgtttgggacatattccaaggttgaagatgatgccttgtctgcagccttcgggggtcggggcaagaaaagattgaatagggtgtttgatgtaattggcttcgtataccctaattatcactacctactacgaaggcaaggaa

SEQ ID NO: 38971 - DNA, 356 bp, Zea Mays
ttgttgcttgggaaaagcatggttgtagttctactgatgttggggtggtatggtgtttgtgttggtaatgagggtgggggtattgttgtgggaggtaggtctcagtgatggctctctggttgtttgctgggttagctctggccatgcagtctttggtttccttagtttctggccaatctctggttggatgccctatgtcttcgctgtggaacacacgataatacttcctttgatgttgggccctctacctcggcctctttctcttgctgcactaccagtgcggccttgttgtggagggtagtcctggcgtcgaggggccttcgcatttgctgttggttggcgatattatggacctg

SEQ ID NO: 38972 - DNA, 334 bp, Zea Mays
caggaatggaaggaagacacatgaaagaagtagattatgtgaaataatatgaggagtgagtagactgattatgaaagaaggggcgattttcattgaaactcacatctctagaaattcgaatacgacgagtagatggatcataacaacgataacctttgtgttcagaaccgtatccaagaaatacacactctacagaatgagcagtcaatttagtccgctcacgtggtggtaacaagacataacatatacatccaaacacacgaagatgatcataccgtggaggagtcacaaaaagaacttcacccggtgatttgccagaaagtttagatgatgg

SEQ ID NO: 38973 - DNA, 448 bp, Zea Mays
cgcgtgggacccactggttgggttctctcccaccccgtgcggtgccgaactcggaactagggactccattgctcgcgtggatctcaccgagctgttgcccggggctatctgtcccctccggccaggcatataagtaccgatgccccacgcccctgacgcacttgaatgccacctgggtggtggatgccatcgtcgacattaggggggctattcgtcgccgctgacgactctgttctacgtcgtcgttccggtcccggcaggtggtatgggtgcttcattaatgcgcgttcgaggtgtgtgttgtcgtattgagcggagaacttcattgggggagggtgaattgctcgccgtcgcaccgtgggtgccacggatccaccgagtgcaatgtgtgcagcttgccgttgctggaaccatggtgagcaatccctcaaaagcatcatactgttac

SEQ ID NO: 38974 - DNA, 595 bp, Zea Mays
tcaaatcctccaccagaattgatgtagcagttggcgagtgcgatgtctgttcaacagatgaccactccacatctgcaaataattccagcagctcaaccaccagcttccaccgattgtacaaccgtcccaagctctatcgcgtcaacggcaaataaggtccattatctacttgatgacataacaaggccagtgatgtgcacactagttataagatatggtattaacaataatcacacgaagaaagtaagaacaggcgttgtgatcccagaatgcaagtttcatggaagcgacataccagatgattattgcagggtagaagtgacgacggtcgtccaaggattccgtgactacatgctagacatccctgggcccgaaggaatcgagacacttcgacaagccatcaaaaatttcatcctttatcctcgaagggatgtcaaattggttgatccaccaacgccgtcggcgtctcatccccaaccatctcctcctcctcaaactttagtacctgtacatccatcatcacctccacaatcttcccatgctgctccccatcctctttctaatccaccgtctacgccacaagcatcaacattta

SEQ ID NO: 38975 - DNA, 434 bp, Zea Mays
ggaaactatcagcaagtctgacgaaggtgggctggttaggttgaaatacaccttcagatatgaaggtaagtttattgagccagatgatgattggctgaagtgtatcaaagctacaagcgacgaactgcttgggccatattcaaaggcagaagataacgcgttatctgcggccttcagaggccggaagaagaaatgctgaatagagttttcgatgctgttgggtttatgtaccctgattaccgctacccgctgaaagggcaaaagagaaaagtgcaacttctgggaaaggtgatgcttcagttgctctaagtgagcccgcgccaaagaggaaaaaggtgaaggtccttactcaccgaccgcgcttcattgaaccggccacagtgcccgaatttggtggtgagacctctacggctactgaagccaaaggacctgct

SEQ ID NO: 38976 - DNA, 313 bp, Zea Mays
tttaaaaaggggttcatcccttgagtagcagccatgccttgcttctctcccactcgtggtgccctttcgccttcgagctctctgcgcccctttgccttcaaggtttctgctttgtgctgccacagtttaccatggccttgtaagttcatctcgagcatgcccagactgagtgggtgctcaagatggtgtgccgcctacttggatgggatgcaccggcgttcggcggaaggatttgcgccggcgccctccaccccggtgaacttgccgctggagagttcgtgccttttgtcctccccagcgagttggtgctgcc

SEQ ID NO: 38977 - DNA, 651 bp, Zea Mays
taatacctaaatgggaatttaagctttaaagggaattctagaaatggggagaaaagaaaaagataaaggatatgaatacatagataatatatgtaaataaatatctccaggattagtacctctaatttcacaaatataaattgtaatgatgggccacaaaagtttgaattaaatttgaattcaatttgaatttgaatcaagaaaggaaataaagaaaatatgaaaaaaatgaatacagaaataaataaaagggagaaccataccagcgtgggcccaaagcaacgggcgcacggcctatttaaccatgcgcggccggatcctatcgtgcccccactcacgcttgggcagcccatttcattttcttgtcgcgcggcccaaaccgggaattgggtgctgacaggtaggtccatatgggcggtctccaacttagagctgctccgcgggccccgttgactggagacttaatcgggcgcccgtgtggacgttgcgctcgcgcttgtttcgctgacttcgtgggaccgtcttgccagggccttctcctccgtgaagttcgtggttgttgcaaccagatcggcctagatcgccggagcgcaactctgctcggactttccccctttcatcttggcccataaatcgcgcgccttctcatca

SEQ ID NO: 38978 - DNA, 312 bp, Zea Mays
ttctcccatcctgtccgtgttggccttagagtcgtttagcgtgtttcaatttatcaagtagtgcaccagagccgtggatcaccgcacgacggcgggagctccgccgtcgttcactgctgcgccgccgtgttcaggctgggggtagaagatcatacgcagaaccatggatccatagatgggcggcccagattaggtttagcatacctcctagggcattggatctgtgccgttggatcggtatcctatggctcgaaacagatcatgttccattaagttgtagccgttgatctccgatcttgcggctgatagcta

SEQ ID NO: 38979 - DNA, 347 bp, Zea Mays
cccacatcctatcataaagcgccccagcggaccgctttagcaccgcatcttcaacctggaagatctcgcggtcgaagtcttcatcggaccgatcgaagacttcgaagtgcctgcacccctcacgggacaaggcattcgcggccccctcacaggtgatgagcgaagcgaaggacatgagacccgtcacgatcgacggaagcacctccagctcctcctgcaaccacccgagaaagcggaggcccacctccttgccagatgcatcaaagggggccatacacgcaccaagttgccggtacgcgtccacgagcaatgcacgcgctcggtccacccctatgcgggtagaggcc

SEQ ID NO: 38980 - DNA, 334 bp, Zea Mays
ctggttacatgacatgtgggcctgggcctccatgctggaccgctggatgcggcgaagccgaaagggcgcacaaccgtggtgcggttgcatgcttcctgcgtggcggtccgccctttcgaccgctggtttcggcgaggatgggggaacgcttataaccgcggggcggttacatgcttcgtgtgcggcgatttggcttcttccgtttcgggtcagctcgcatgacgtgtgggacccagcctccgcgtcgggggggtgagaaccttggagcgcgtcggtggagactttgcccgtgacgattgggggtgcgagtgaggaggtctgcctttaaaaaggg

SEQ ID NO: 38981 - DNA, 406 bp, Zea Mays
tactgggacccacacaggcacaaccacacatccactgagctgttgaggacctgaggtgagcatcacttcgtgagcttctctctcgtcttctcctgcttctatctgaaactctggttgcctctcctatttggtctttagatattgatgaaaatgagatatgatgaacgatatttatgtatttatgtgaactgtgaagcacatgctagttgctaaattacaatagacagagtaatagaaaagagatgcattgttgagaaattgatgtatcacattttctctttgtttatcaatatagacttaatcgttgattgatgatttacaccagtacaaattgatacattgcagtacagacttcatgctagttgttaattgatatacagatatactatatctcttgtctcctctt

SEQ ID NO: 38982 - DNA, 608 bp, Zea Mays
cgggtttgtactagcctcgactggcacagcatgacctggttctgtggcagaaggggcaactcttgaacgttcaataagctctggcacatcggctgtctcaatgtgtcgtggtctacatgtcaagaccttgactttcttcaccttcggcgcgctagaagatgccaacgtagcagttttccttttccccttttgtttgcgaacaggaaaacagtagtcagggtagataaatctgataacattgaaaaccctattcagtttctttttccctcgagcgccgaaggcgactgtcatagcttcgtctttagccctcgagtaggctccaagcagctcatcacttgtcgcctctatagcatccaaccaaacatcatttggctcatcaaaccgatccctgaaccgaaatgtgtacttcagataaatgaggccactttggctggagccagcagcagcctccttcggcatttcccatccacttgcaaggggccatactctataagaaatatgctcttggaccaaatccctcataccgatataagtgtatatagtattgaaagccgtctggcacgcttgcacgtcatttccgagtgcggctgaaggtcttctgatgccga

SEQ ID NO: 38983 - DNA, 317 bp, Zea Mays
gaaggcttaaaatatgtaagtataaatcaattatcgtgggtacttaattgttattgtttaaaagtgtatattgagtaaaaacctgacccagcaaaccccgatggattcaggtgtaggtttagaattgcaccgataacctaggaaaccccaacggattcgggtgtaggtttagaattgcaccgatcacaaacagatttaggtagaacagatttaggtagactccactggtataatcacgagaggtttttttcttcacctgacccgaaccagattcattatcatccctagtcttgttaaggtgaaccgcaagttagaaa

SEQ ID NO: 38984 - DNA, 357 bp, Zea Mays
gcaccggacttgtggatagcgtcgtggggttaaaagatcgtcgtcgccgctgaactggaagccaccccgatcggccacgacacccctccccttggctcaccgcccgcggtaaagtgctcaccgtcgaccaccgcctcccggccgtgcgccgcgtggctcaacactttcaccgtgtcgccatgacctcctctgaactctccgtagctcaccggagttacggccacggcgataaacacgtgttcactgcacgcggttcttccttatctccagccgctgcacaacttcatccaaattgagcgccgccgtcgaagccttctataaattgagccctcccctagctgcataacatcatcatcc

SEQ ID NO: 38985 - DNA, 334 bp, Zea Mays
gaaaaggggctgctttgatacaaactgattttagctaatcacacacactataggcaagacctaaccactcctagtttattgacaactagcctgctcgaagaacttgacatatagctttcaagcttctagctcccacaaagcaccatagttggcgctcatcctcaaaagatcgaacagctgtctgcaagcaaggctgagccccttcaaaaattacagcatttatgtgctttcagaccgacgaagcacccacgatcaccagcgagtttacaccctttctcgtaggttttatcaggtgtttggtcactctactccaccactccgcaaaagataattc

SEQ ID NO: 38986 - DNA, 1192 bp, Zea Mays
aaaggaccaaaggggcattttttctggacacagagacctgatttccgggttccatcagaagaagaactgaggagattattgacgccagaaagtgtgagtttctgcaaattattattgccctcatgttaatctcaatcaattgtttcttgttgacatgttttttccacgaaaggatggcaaaagcgttgctacaagttttatcagaagaagaaacagaaagaagtattggtccagttcttttagggaaaccaggcccaaaaacccaacaacatctcccccaaacacaactactaaaacaacagaagttctccaaggacaaactcaacaccactagccgctcagaaaaacaaacaatgagccaactaaaatgaaatggccaaaccactaaacaactcatactcctgctaaccaactaagcaactatcacaactaagaaccaaacatctaccaagactaaatggcaccaactttgacaacaactatcatgcttcaaaggtcttgcatgctgtcgctccaaaccttttcaacgctcctttcactaaaaacctgtcaagtcttttgtcaatcgccaatacaacaacagaactggatgacaagctttatcttttgaagaaatgctttattttgcacgtcgtggaaatgcgagtgcttattacgctgtgctggcttatatatggaccacaagcgctggttattatgccatacccacatttccaaatctataggatgaaatgtctttaaaaattgggtcatcagagtaagttgactgagaatatatttttcttatagaaagttctattgaaagcaccaatacctaaataatgaggtttattctttgaaggttgccttaccttcttgacttggtgtttaataacagttctcttttcaatccgaaaatatgacgacgactcaactaaaatatcattatccaggtttgctgttatgaaagtatgcaagctggtttgtatcgtctcaagcgcttaggaattctgaagcttactcagcctgttggattggcttctgccatgaatcagcttcctgatgaggctattgagcttgctgctgcatcacatatcgagagggaactgcaaatcactagctggaatcttacaagtaatttcgtcgcttgtactaatcaggtaccttactttttgtctcatatggtgttttactcaagtattcagtaatccgg

SEQ ID NO: 38987 - DNA, 466 bp, Zea Mays
catcaatgtatttccagtaggttgtgatgctcagtatgggtatgcttaaattcatgaagaaatagaatcatcttatgttgtagttactgagttggaactaagcgtgtgtttggttgtgggggcaatgtgggatgagttggagtgagcccatttttggcagtgtttggcttggggacgatagggaagagaccgtcgccaccatagagggagtattcccctagattcggggtcagcactgtccctttgaattgagggcatgggtttgtcccctattcatgttgcctgctccgttctgatccctcaggtggtggctgcagaggttggatcttggtgcagggagctggacatctctgagtagggcagcacaacgagttccagtcactccaacacgtggcaaatcaaaccacgcggctcggtgttgagtgtagcatgagacatagatgcatggttgagcacaagagtgcca

SEQ ID NO: 38988 - DNA, 352 bp, Zea Mays
cgggcggcatccttattgctgctgattcggatttctttgacatggctctcttgccatgttcagcagcatattctctatcagtcaggattagctctagatcacatgaggaggtttgggacctcacgggggtttacgggccccagctggacaatgaaaaaatgattttcctttctgaactccgtaacatccaagccgtggtcaaaccagaatgggtattactaggtgacttcaacatgatcaggagagcaagggagaaaaacaaaggatcaatcaacagaagagtcatgagacaatttaataacacgattgattatttgcacctccttgagctagagctcaccgatagaacatt

SEQ ID NO: 38989 - DNA, 676 bp, Zea Mays
cggtgatcggctagctgactaccgagtgtacgaaattgcaaactaacccttacgacatggagtaggaggcttcgcgcatgtcgacaaagtaacataccgctgattcaggcgatcgcgaggctgctccacagtggacagcgggtctacggtggaggcaatacgcaatactccggagacggataccgcgcattctagtcgatatccacccacgtcgctctaatggtgaccctcccgagccactcgcaatgcactccggatggccacgaaggcttcaccaacggcggatgatcgagtccgcgacggcggtcgatctccctcatctcttctgctctctccccactgcgcgacgatctcggtggtgtggattccgatgagggatgttgcgtgcggcttgggaacctctccccttttatggatgcgaggcacaagtcggccagctggcccgtgcatgtcgcaggtggtttcaaccacccgattgtcgcggtagcagggggaagaagataactagtgcctcggggcccacatgtcattgaggaggtcacgatcacttgaagtgcgagaacgaaactgacaccaaggaccacgcgctagaggacgtccccacatgtcggcgtcgggaagccgaggcgggcacacgcaagtgtccataggcgtggcccacatgtcagcgccacga

SEQ ID NO: 38990 - DNA, 353 bp, Zea Mays
tttttgtgccttcgacactgtcacttctgccgaaggacttgtaacttctaatatttttgttctctcgacctttgtttctttaacattatcaaccttcagctcgcccaatttggccaatggtgtcttcggcgttgcaaccggctcttcagtcttctacataggtgcagtttctttggcttcagcagccgaagaggtctcaccgccatattcaggcactgtggccggttcaatgcagcgcggtcggtgagtaaggaccttcaccttttttctcttcggcgtgggctcgcttggagcagctgaagcatcatccttcccgaatgttctaccttttctcttttaccctcgtgactggt

SEQ ID NO: 38991 - DNA, 407 bp, Zea Mays
cggaagagtcctcggatgaggacttggattattttgcggcattggatgtggctacggcggaggcttctccacgtgtgatgggtgctgaagttcttcctggtgcgagtgctaggcgtaggcggcgaatggcggtggcgaaacggagaattagtgaggtgtcacgaagtgataggcgtcattgtggtgaggtggagggtggtcgtcttcgtgtggatgggtctggcaaacgggaattgttgtcctcgccggctggggcgagtgtaggtgagggagagttgcgaagtctgtttgagggcgatgaattgaggataatgttgttcaactatagggagatgggtatcatcctgaaggttgagccgatgtaatgtgtgatgccctcgctgcatttatgtaactataatttgtat

SEQ ID NO: 38992 - DNA, 484 bp, Zea Mays
tggagttccatttattgaagaagattcagctattcctgcttatgtatacaagtttgactttactataaggtgcatctatctagtggaagatactacctccagtcacatacacacaaatgctacctaacactctctttctcgatttcagcataaaatgcttcgtcaaagttgaatgcgatttcccaagtttaactattcttttttatgcagctatatgattatacctgggccaattccaagccatatttctttcacacactgctgggtactttgtagcataatagtttgcatatgatctcttcttgcatcattatgattttattgctggtacatatacctcatggtcagctttcatatataactatcataactatcatctcttgtgttggttaaattttattgttatattcacatcgtggaatgtaagtgtatgtatttagttttttttatatcaagcagagggcccactgtgcaagagaaattc

SEQ ID NO: 38993 - DNA, 644 bp, Zea Mays
gccggaataacaagcacgaaaaatcaaagtcttttccaaaagactccacgcaaaagtcgcctacgggtgcagccggagtaacatatacgaaaaatcgaagtcttctctaaagaactccgtacagaagcctacgggagcggcctaatcaacgaaagcgcgcagcttcatcacacaaaattatggttacatacttacagcgagggcatcacacattacattggctcaacctttaggatgatacccatctccctatagttgaacaacattatcctcaattcctcacccgcaaacagacttcgtagctccccctcacccacactcgccccagccggcgaggacaacaattcccgtttgccagtcccgtccacacgaagacgaccaccctccatttcaccacgatgacgcctatcacttcacaacaactcacccactctccatttcgccaccgcccttcgccgtctacgcccagcactcgcacccggaagatcctcagcacccatcacacgaggagaagtcttcgctgcagccacatccaacgctgcaaaataatccaagtcctcctccgaagactcctctgtccacacaatcgaactcccagaatcatcagactcaaaacacttagacacagaatcatcagaatcgtc

SEQ ID NO: 38994 - DNA, 684 bp, Zea Mays
cgaagctcttttaccaaggtttatagactcatcattccatccctcatcagtgatatcatcaattttaaagaaaatgtcatagaggaaaggtttgacacccacctctataataggaggaattatagcaacacttttgacatgaaccttgaatctcaccatatccttagagtctaaggataagatatccacctcttcaacagtcgcaattgtagaccctaattcacaaatagcctgatagttttgaagttcctcaggaacattttcagccacaatccacactgcatgaagcttagacttaggtttagccttagagctccaatgtgatacagaaattttagctcccgacattttcattttaagctcagggaaattaatcatcttgtcaagcttctcgtgagacggaaattgtatcaagaacccgacatggcacttggtagctttccaggttttgccccatgggaaatgaaaaccaaagtccttctcaaggtcttccgcagaaatcagaccctcaacaactttcaccaaacctatgaagcttctttttggttttctggacaagggtttggcgaaatgagaagagtaaaaccctaatccatcagtcgacataccaaaaataggaatgcaaggcttgttttgtttgggcaagacacagcgagcagtcatatgggtttctttgcgacagat

SEQ ID NO: 38995 - DNA, 304 bp, Zea Mays
ttttgggaaaggcatcgacatgtgtttatgtgaaaagtgtatttgttttatgcaatgtgatgggatttgtgattttatagggggtatatttattgatgtgacgagtagtttagagaatgctagtttgcgtggaggatgtattgttaagacatgagtgtcggagttcatatactagtaggttatgctacgttgatcgaagtgtctcgggtgcacgccacaatatggttgtatgcgagacaggggaaatagagtgtgctcgacataaatgtttggtcattgtaggtagaaattgtctcggcttaag

SEQ ID NO: 38996 - DNA, 417 bp, Zea Mays
accataatctttacatctgatccccttccacagatgacttcacccacccccaccaatggaggagacactcgtttcagttttgatttcctttctcacgatggttttccttccatattgtgggaagtgctcaactccaccggttaccctacgcccccttcgtacacagtgcagctgtatgaggagcatcgggtgccacgttgccgagtctggctgactctggaggcacatcccctttagtcgggttggcgttcccttgattctgagactgttggcttcaggacggacgacaccaccaaagcggcagctatgaagaccctgataactttctgtggctaccatcccctggagatggtgatgcaccccttgggactcttccccgctgagaagagggatggccccatgtggtacaaccatgtg

SEQ ID NO: 38997 - DNA, 391 bp, Zea Mays
ctccatccccatccccatcttccaccctcccttgctcactcatccacacaccccacgcttgcaatttgcaattcccttgtttggggtaacaagccaagcaagcaaacctcctgctggctgctgtccaacagcaacatgcaacaacccaagcaaatcaaagcttcaccatcaccatcaccgccgaggtcaggtcacctcagctttgctcagctccctagccagcagtaactgcccagtggaagtgcagagtggcctgtgagtactggcagtacaaatcacctcatctccagtcctgcccggctcgcctgccatgcagtccggctacggcggcgtgtccgagttccagcagttcatcatggacggcggctttgccatgtccgcgccgccgccg

SEQ ID NO: 38998 - DNA, 315 bp, Zea Mays
cgcttacttaactcagggtgaccactatgccctagtaacggagcaatcgacttaagccggcaacgacttaaggcggtgcaacatgctcacgcttacttaacccagggtgaccactatgccctactaacggaacaatcggcttaagtcggcaacgacttaaggcggtgcaacatgcacaggcctatgcaattcggagggtgacttctatatcccgcaaacaaatctcataatcatcgtgcgtcgtttcattactgtaaatttacgaactgatgaattctgatacaataagagagtaattatatcattcgaatgctg

SEQ ID NO: 38999 - DNA, 307 bp, Zea Mays
catagatggggcgcgtcgagcggaggctgctgtggagggagctcgagggttgaagggagagtccgcgcagcgcccgtatttatgcctgagaaggaagggatattacgattcctgccagcgcagatcacggattccgtttggtggtcggcgagtatatcacggggtgcttccattgaacttggccgcggagtccacgacggaggagatcccagtagcgttggcccaccagtcagcggagaactcgacacaagcgcgtgcagcgggatcctagcagctcgcgcagggtggttgagatacagggaggaac

SEQ ID NO: 39000 - DNA, 293 bp, Zea Mays
gattataatctttaggtgatgagatagtagggagaccagatccagattcacctatcgttgaaggagcaaagttcaatagagactgatcaagcttttgttcgatatgcttttgatacttgtcacagttcttcatatgcctcgataatgtcgttgttgttgacccttgtgcataactataaagctttttacaatatttgcactttgcctttagtaatggattctccttatcaaccgggtttggcaaattcaccttatcaaaaacctcccaaaccttggatttgcctttgctgccc

SEQ ID NO: 39001 - DNA, 493 bp, Zea Mays
ttgatcgtgctattgtgttagcctagactcagtatgatattttggagcaggcaaaagttaaggggcagcgtcagccattcattaacaaacagaccatgttaggatttaagggagaagggaagcagagtgatctgtccaaagaaagacaggtgagggagtttcgaagactaaatggattgtgctacgcatgtggtgaaaagtttgagccgggacatattactaaatgcactaaacgagggcctgcccaactcaatgttgttattactgagaatgtggagatggttttaacagatgagttgttgcaacagcttgagcaggaggatgttcaacaggggttgtgctaccaggtttcaacacatgctttatctggtactattgggttgcaaaatatgagaattcgagcagtagtgcagaagcaaatcatggtaatgttggttgattctggtagttccactaccttcattagtgaacatatggttcagaagttggcatt

SEQ ID NO: 39002 - DNA, 390 bp, Zea Mays
tggacttcggtttttcgcacttgttgtgctagttcggctgcacccttaggcgacttctgcacggatagtcttcgcggtagacttcaatttttcgcacttattgtgctagtccggctgcacccttaagcgacttctgcacggagttgtcgcacgcgagggtggccagagctgagcctcgcggtgactttgtattggtcgaatgtcgaagaccgtcgtcgcggtcttttttcgacgcatgtttttgcgggggatttttcacttgtatattacatggctccgcctcgttaaaaacctcaccccccgggaggaaaagagtgcgggccagaataaaattgtttttgcgaattacaagggcgaaccggccctgatgagtcaaacaaaaaatttgcg

SEQ ID NO: 39003 - DNA, 398 bp, Zea Mays
cttgctgctctaggctttccacctgggagtttaggtgggtgcagtgggaggagagttcatcgtagtggttgtcaagggtgtggaggtatccggccatgtagacgatggtggggtcatcttctgtggggtctcctcctgacagagcctggagtcttttcctccaggtgggggtacttttgttgctgggtggaaaatatcgaaggggggtctcagagatctctcggctgtagttttggcacagctatttaagtgtctgggaagtggtgcccaatgaaggtgacttggaagggagggtggtttgggtagtttcggctttctcccaggtatactgccatagagcacttttctattccattttcgcgatattccttccagacatattcgggcttcttgcggat

SEQ ID NO: 39004 - DNA, 404 bp, Zea Mays
gtgactcacccccttccggccgtgagatcatctcatcccaaattcacgacacactcatgtagctacgataaattaaaggccctccctgctccgccttctggttatgcgcctagcgcacccttcctcgcctccaattacccaccagagctcacaaattccagtttcccccatcttggtcatttacgccaccgtgaggcacctggccacgaccaactgttcccaggttcgttcattcccctctgtgccatgttttagcatccttgaatgttaacatagctcgtcggcccaaccgattaaatattaccatgatagagcatcgagaacatgacctcaccgccgcatgacacgtctgagagcgtgctcccgtcgacccactttcccacacccgcttcattcaaattcac

SEQ ID NO: 39005 - DNA, 1168 bp, Zea Mays
gagaatctttagggtggaagtaaatcggtggccttgaatggaccattcggcattggtcagttcagcacaacaagacagcttagacccattagcaacttggaccaataatggctgacagctgcaacattggtacatgaggtactatggatgaactgataaatgaaatggaactgcttgaatccaataagataaggacatatagctccccgatctctcccacgaacctcatagacttggactggctatcatccctggacaaggactgacataaatgcaggcaattaagagtttctgactgatcagctttagacatgttgtcttcatgcggtagctggaattgttgccacagttcttccaccatgtgtaactgcactgtgtccggacattggtgacctcgagaatatgccaagccacatttgtaacaaagacccttagccttactgtaagcatatactgaagacaaacagtcgggttgagcagttgctggagtcttaacgtcatggtgagtgggtgggatccctgttggtggaggcaatggcatgggaaccctctgagacgtcttggaatatgatctggagtcgaatttgctaaattcccttggcttggttgtcgccccaatttcatcctacaattgggcaagaacataggcagtatccatatctttgggacgttgaatcataacaatggacttaatatcatggcgtagaccatctaagaaacacataatataatataatgggtcggacattggttggtaactgtttagctggtctaccaattgagcgaattggtctatatactcagccaccgatccaagctgtttgatgtgaaacagctgtctgatcaagatggcatgctggtctttcccgaaacgctctcggagcaaaaacccaaactttgaccatgatatgtggggtagcttatgttcaacagattgaagccatcgagatgcggcgccagaaaaatgcatcgtagctaccttaatccaaactctaggatggacctcatacatagcaaaataattctcacagtgggtttgccaaagcttggggttatcaccatcgaaaggaggaaaagacacacggggcagctgaccaactctgaactaggatgaaaaccatgagatcgttgaccactgctaacggaatttgggttgatgtgctgaaat

SEQ ID NO: 39006 - DNA, 412 bp, Zea Mays
ggatcatctaatctggcccgttgccgttgatccaacgactagcgcattccttcaccaaccggatgctgaaccgcggcagcgcccctaagccggtggcggcgcagatgtcggcgactgcgattcccgcgcccccaagctttaatctcccgttaagcaggtgagacatgaagatgggggaagggcgacacgataagcgcacatacctatgatagaggatgctaggatgggctggccatggtgaatggcggcacggcggaaccagtgaaatccggcgaacaatcacagaggccctggtctcccggcgcccattgatccccacccaaaaccttcatcaacacccgcacatccacccggttcccctcacaagtcaaatcgttggctgaccggagctccctgcgtcatggcactgctc

SEQ ID NO: 39007 - DNA, 756 bp, Zea Mays
ggagggtgctggtagggtggaggttgagaaggtatgtggcggtgtgaagtgcctcaacccaatagggaggaggaaggtgggcttgcaagagcagggagcgaacgatgttgttgaccgtgcgcaagatatgttcggtacgaccattctgctgggaggtgtagggacaagacatccgaaggcggacaccatgagagagaaagaaagctcgtgcgtgggagtcatcgaattcacgaccattgtcgcattgcaagcttttaatggtggtgccaaactgaatgagaacaaatgaaaaaaagttagcaatggtgggaaaagtgtccgatttgagacgaaggggaaaagtccacagaaagtgggagcagtcgtcaagtatggcgagatagtacttataaccagatgcactaggtatcggcgaggtccacatatcacaatgaatgagatcaaagttggacagagcgcgtgactgggagaccgaaaaaggaaggtgaacatgacgaccgagttgacaggcgtgacaaatgtcggaggctataggccctttattacatgaaataatgtaacatgtaatatcagaatccgcaccatcgagtgcaaagagaacagggaaaagctcaaaagacgtccctaaggggatgcagggctgtaatcactccaaaggtgacgaagctacgaaagtcgttcctaagggagcgcagagtaagttccgaagctacaaaagtcgttcctaagggagcgcagagtaagtcctgaagctca

SEQ ID NO: 39008 - DNA, 307 bp, Zea Mays
ggtctttttgcgatgggcgcagtgccgggaatgagatctatatagaactctactcctctttctggtggcatcccgggcaattcttccggaaatacatcctcaaactccttaattacaggcatgctctccgctgttagattaaacatcatcggatcgtttgcgggcggttgggcttgacaggaaactgcctttccttggtgatcggtgaggagaacggtcttgcttgcacagctgatgatacccttatgcttagctagccagtccatcccttccttgggatggcaagatggttaggtctgccaggaac

SEQ ID NO: 39009 - DNA, 411 bp, Zea Mays
atttttgttgtgctatgcaaatttgtgtaagggttggggaactcatggctcatggtggtatttgagccaactttggtgctttaatggcatgcccaccattagacttgtgtcactgtcatcattgatgaactacaactgatgcagctttaaacttgttaagaagttcaaagtaccaatttcattctttgtttggtggataaaaactagcttgaagccttaaatatctcactcctgttcattttctctggtggtattgtcctcaagatttaataagacatggtatcttacaagccttttattctaattctaagagcaactccaaaagaaaccttaaactaaccccaaaatcaatattagggaaacaatcacttttttgtagctctaacaggtcccttttccttcccccaaaag

SEQ ID NO: 39010 - DNA, 731 bp, Zea Mays
gtggtggaattgatttgcctcctaaccgacacactcggagaatatacagacaacctcagccacagccagcagagatggatcctcctaatcctccaccaggcggaattgacccactggttgctgcacagatggcggtgatgcagcaaatggcagacaccatggctgatatgcgtgcccagatgcagcaagaacgccaagaaatgcgtcaggaaagagaggatatacgccaagagttgcgccaggagagagatgaaatacgacaggaaaggagggcgcaacagcagcagctgcaacaacaacttcaacaacagcaacagcagcagcaagtgccattgcctccaccaccaccaccagttccacctcgtgataagcaccgggagtttatgagtcataagccaccgaccttcgccagttcgccagatccacttgatgcagacgattggttgaagtcaattgagaagatgctgaatattgcacaatgtactgaccgggagaaggttttatatgcttctggacgtttgactggccctgctgctgattggtgggattcttatactgctgcccatgatgctgctgatactattacctgggcagagttcagtacgcagttcaggaactaccatattccagctgggatgataaagatcaagaagaaggagtttctgtcattgaagcaaggcaatatgtcagttagcgagtacagagacaaatttattcagctgtcgagatat

SEQ ID NO: 39011 - DNA, 635 bp, Zea Mays
ggtttcttggcgccatgccatcaagccaactgtcatgcaagaatttggctgtcttgccatctccaacggtgacgatggtggaggcgctaaagaggaacctgtccgcaaggttacaaggcacatcaaaccctttccaagggtgatcctctgtcgtccagctcttccaaagccatcttagccggagggcacagctgaatttgtcgaggttgaggatgcccagaccgcctagggttttgggcttgctgactagtggccaagccacaagacaatggcctccatttgattcagcctttcctctccagaggaaggagcggcggatcctatcgatgcatttacgggcccatgtcgcgaggggaaagaccgacaagcggtatgtgagcatagcggacaggacgaaagacataagcgtgagacgaccagcccgattgagcatgcttcctttccattcggccagacggttctggattttctcgatcagaggttggacatgaattttctagagcgcccgggtgtgaagttggaggcctaggtaacgacacgggaaggtccccctggtcccttggaacggctagagcacgtggtctaggtctatgttatcacatcttatcatgtggatagagctcttctcaaggttg

SEQ ID NO: 39012 - DNA, 282 bp, Zea Mays
cggaactcgaactgaccatggtgggtagagaaggtcgtcttgtgttgatcctagggtgccattctaatctgatggaagccagcgcttaagtcaagtgtagaaaaccatgcaaccccatgcaactcatccaaaaactcgtcaatgatcgggataggaaaacgagtcttgacggtgagagcatttaaatgacggtagtcgacacaaaaacgtagttgttgtccttctttttcaccagaatagctgacgatgagaaatcactccgactatgttgtatgatacccg

SEQ ID NO: 39013 - DNA, 354 bp, Zea Mays
gcgccgggtcgccggacctctacgtgccggtgatctatgccgccctggagctccacttttgatcgctcggatgactggagaaagaagaaaggctctggtcgttgtcttcgtgatgagaggccatgattagagggtgatgtaccgcttcgcgggttgtgatctgggccacacgtgtttggatcggcggccacgatcagagcgtgtataccggctggatcttaaccctcggatcatgatcgggcgcttgcggatcaacctaggcattttaaaatctaaagcgtcagttattgatccagtggctcaggtgagttggctggtttggatctaatcgtggccctcagaattgcatccaac

SEQ ID NO: 39014 - DNA, 579 bp, Zea Mays
caggatttggaaagaggaaaagggagatcccattttcagtctttttggacaaaagtggatggttttcaggaggctgtggcgcaggcttgggggtctgtttctgcagggccttgccctcttatcactttggccaagaagttgcagacaactgctaggggactgcagaaatggagtgacaaaatagttgggtgtgtcaagctgcagttggagatggctcgagaattgttgcaccagcttgaaatggccaggacaggagggctctcttgtgctttcttctctaccgcgaacgattgttcggttgagatctaagatcacttggctcaaagaaatgatgctaatacttctttttttcacgcgcaaccaaggttcagaaagaaaaggaacttcattgctgctatcaattccaacaatggccagatgttgactgctcatgaaaaagaacttcattgctgctatcaattccaacaaagaaaaaagaacttcattgctgatgatttggcagcagcctttgatttttatcacgagcttcttggtactgctgtgggtagagaagtcaccattgatctggaggcattggga

SEQ ID NO: 39015 - DNA, 295 bp, Zea Mays
cagtaactgaagaagaatctcaggttcatcccctcgccgtcgacgaccctcgcgccacgattcccaccggtgaggtgattcgtgctcatcagtgcttggataacgctcgaggtcacgtaaatatcgccgctgttgataagtccggccagtaaacaacttcggccaccgtacaggttgccacggtcgctttggataagctcgccggtgactgccgccttccggccttgtgccacgtgccctggcacctccatcgcgtcgccctgacccgctgtaaccttctgtccatcgccgggga

SEQ ID NO: 39016 - DNA, 429 bp, Zea Mays
gcggagtggaaatgggagcgggaggggtaaaaatggaagctggagtggtggaggtggtgggtacaacagaaataatggatggctttggagcgacaggagctggtgaagtgggaggtggagtagagacagtggtggaaggtgtagagggagcagtggagcgaggccgtgatgcaaggcgacgaactcgataggctatctaatctgaggagatctgcagctgtcctccttgctcagcctgctctgcagctgctgccgctgcaaatgctgcacgagcggctctatccgtacgacgcttcttcctgccctcctgctgctcaaggtaaactgtcttccctttgacctgcctgaaggggtgaggagggtcctcgtcatctcctccccctgacgatgagacattcttcgtccgcaccatcctgacctgactgctgc

SEQ ID NO: 39017 - DNA, 495 bp, Zea Mays
agaggtggagctcggggataaaacttaccctgcgactgcctagctctctctccctctattgcacacccacgccgagcccgcccctagtaccccaaaccatcgcttagattgtcgccattggtggatcgggtgcctgcgcggagagggtctgtggggtccctacgccgccaccaatcgcatgagcccctttcggattcctcgccaaccgactcttaaccccgagtatacagcccgaggccgcgaccccctcgtcctcgctcgcaagcccctgttcgccggaatccccgtgcccactaccaccattgctgcggattgatagccatcgtcgtgagcctgctcggtcgccgtcaataaggcatcatcaaccaccctggggtgttccctgggacacacagaaggtgtccgcgttgtcgctgggccatcttagcggtcggagccgaactaattgctcaccggagaaccatccccgccgtgttgccgccatcctccgtggac

SEQ ID NO: 39018 - DNA, 295 bp, Zea Mays
caagaatggccagtgatgccgacgacctcggacctttagaccgcgacatgcagaggtaggatcatggaagcaaaatatgtccaaggcatctggccgtctcgttagcgttgtatctacttttgatcaacttctctctaaatatataaacaagaaggttgttctacacggtcggccaacaaaatgatcaaagtcgtctgtaggaaaaacgcgatctgtgtaggggcaaaggctgactaaaccggcctgagaagtggcgtgacaaatgttgtctactcatttgtctctagggatatcg

SEQ ID NO: 39019 - DNA, 306 bp, Zea Mays
tgcacgaggaataggagtctctatgtgtctgagggtctcctagggagactgccctgtgagaagcctgagatggaaccccttggcgggtgtgtgctcttcccttgtatagcccaagggagacacgtacacagcggtcgagccccaacaattgggactagtaaatctaatgcagaattggagaagacgaagtggtggcttgcggtggacgaatatcttctcttggacttcatgcagatctcttggcttgtcgtgctcttaccacgtctagtcggagcacaagcgcaggcgtaggttgcgacgtaggct

SEQ ID NO: 39020 - DNA, 487 bp, Zea Mays
tggatgggagtggagtaacgaactagttgtgggggtagtgtggaaggaggccccggagtcaaccacccaatcggtggtggttgggggaggtggtggtggtgaaggtacggtgtgagcggagagggccaaaggaggtaccccgatagaggcactaggaagggagggagatgacatgggctcaaccgctaagtaggcgatcgcagcacgtgggaagacaagcggtccaggcacgtgacggcccgcctgagggtggagctcgacgcaatcctggagaatagggttccaggcggaatcgaaggacacgaacatgccctggatgagctggccgtcgtggaggagtgtacgtacagtcacgagagcagcgggtgaggtaaagttcgtgtatggtgggggtgacatcatgaaatcggtgagggtcggtggggagtgcacgcggcagcggcaagatcttctcacccctcgccctcctcggcaaccgcgcgctcac

SEQ ID NO: 39021 - DNA, 403 bp, Zea Mays
gtcatcctcggtagggtctctccctgacagggtctgaagtcttttcctccaggtgggtgtatttttgttgctaggtgggaagtaacgaaggggggtttcaaagatctctctgctgtagttttggcatagctgtttaagggcttttcgggacacactttggcaagtgtctgggaagcggtgcccgatgaaggtgacttggaagggagggtggtttgggtaacttcggctttctcccaggtagaccgccatagagcacttctccattccattttcacggtattccttccagacatattcgggcttcttgtggatccccatgcgtagcgcgcaactccgtagaaggtgaggaaatccttcctcctctgagcagtaggatgtcctaatgacccaagagccttccatc

SEQ ID NO: 39022 - DNA, 307 bp, Zea Mays
ggagaagaccctacatgaacatccatggaagtatgagagggagaacccactcggacaccctcgggggctgggtcatagctcgcgctacccatccgagccggatcatctccggcaacaccctcgggggctaggcaaacgctagcgccatccttgaggaccgagctctctgtagcagccacctctaaggctgaaggaccttcaaccacttccatggaaacagagcaatccagatcagcctctcgactcttaagaccacgctccaaggtcgacgaggcacgagatgctgcttgggataactctaacccgg

SEQ ID NO: 39023 - DNA, 282 bp, Zea Mays
gattaaaccaaaacacagggtctcgtttataaattaggactaccgaaggggtaacaaaggccctgagccatccgatcgcgggtggacaccccagattagatctgtctttaagtgaactaatacgtgatatgggctgccagatctaaatccaagggtcggaacctagatctaatcctacccctcctcggcccatccaacggcttggattgcactaaccgaagcggtatgatccaattaatctggaccgctcattacgcatcaacggttcacggcagtcctcac

SEQ ID NO: 39024 - DNA, 423 bp, Zea Mays
tctgcatgtacaagtagtaatttcttgcgtatggagcgaccttgtccaaatccatattcataatccgatcatcgcgctcctgctgctgaagcttgaacatgtcctcagagagcttcatcttcctttgtctatattcttttaggtcttccctctcggcatttgcagatgtagcagcttgttcttcaaacttagctctgtccagttggaatttttcgatcatctcgatgcatgctgtcgaattcatggaagcgttaccgctacgagcttttttggttcggcccctcccgggtggacggcgaaagggatcactcggtgaactgacattgtccgtctcatttgggaaccactttggcatgaatgacttcagcattggaaagccaagttgtccacttgacctcgttccgaagcatgtaccagcaatga

SEQ ID NO: 39025 - DNA, 445 bp, Zea Mays
tccagcagctcaccagatgcatctgctccagactggccactgaagctcctgctctggtacgtatactgtattcatcggcagcgcagaggaaactgtttacatgcatatgcatggggtcgggtcgggtcgtatgtattcaacgtatgatagatgtttgttaatcacagatcgaatcaaacgccgtcaaccagaatggagaaaccatggacaagattgatgccctagacaggatggttggactcgagatgagagaactggctcaatgtgttttccgcagcggtggcagctccgtggatagagagacgaggcagacgtttctccatgtgaccaagagttactactacgttgcactctgctcgcctgaaacagttgagcatcacatctccaaagtcttgtttgaggatgtcgtctagcaacgatgtttatattagagctccaattctag

SEQ ID NO: 39026 - DNA, 329 bp, Zea Mays
tggacgaggcgtgaggctgacggtggcgctggtagtccgcaaggaaccggatttggacgcgctctccctcgtcgctaggtaagagacccaggtaaggaacatataagtggttgttctgattttggatattagccaatttccccctccaatctgttactgatttatatgcccttctagggatcagcagatcccacacctattacatgatttgtccttctagaatagaatccgctttctatcttctgaaccggcactgccttcttcaatatcggccaccggtcggtccacctcttcaataatcgtccttcacttcagttgtgagttgtgac

SEQ ID NO: 39027 - DNA, 680 bp, Zea Mays
ttttatagaatattgaaggaattccgtccggtccgggcgccttgagatctcctatagattggagagcttcccaaatctcctcctgagagaaaggcttaataagtgcttcattcatctcatccgtaatgcgtggtgagatagaacgcaacacttcagccgtagtatgacctgcagaagaaagaaagagattttgataatggttagcaatgaactccttcagcctacttccttctacttctgctccatcatcctttctcaaacttcttaattgcatttcttctccttctttctgaggctgcagcatgaaaatattgtgtattccggtccccctttgtgagccacgcggtatgagatcgctgcttccaataaatatttagttgatcctgtaagcgctccatcttatacctcaaaagatgttcccgggatacactctcttgacagatttgctgcctcctacacctctctagctccttttttaccttacagatcctcttctccagcatccccaaaacattcctatcccagtcatggagctccctcagcagaattttttgggcctccacaactctatcagctcctgaatccattgcaccagcccatgctttctttaccctttccaaacagtcttcctcctccagccacttcgcctcaaacttaaggtatgattcatatgatcttcc

SEQ ID NO: 39028 - DNA, 472 bp, Zea Mays
ccgaccaaaccctgtcaagcaactatgcaaggcggaccagctgaccaagccttgtcaagcaactcggcgagacggaggaagcacaaggcccgtagcgggagccagtacgcttgtggcccccgaaacaatgccctcttgacacacatgcgtcaggagcacgcatgtacccgactgacgaggagataaggcagactctgttgcccactccaaccatggcagggcacgtcaccacacacatatcgtcttagatgacgccacatcacattggagggatgccggagagtccctgacaacaggataggacgtcacctcgtacgccccctcgtgccctccaacttcgacccatgggtcccaccaggcatcactatagggaaactcagcaccggagtcgctacagtgacccgcatgcggggtagatagaagcgagaccactgtggacaataggttacgccctccttcggatgacaactcc

SEQ ID NO: 39029 - DNA, 419 bp, Zea Mays
aagaaattggaatcttgtataacacctcctatagaggcagcacagctaaagaagtttccagagagactatctgccattcctcccagaattctggagggtcaggtcccagacataacagaagaagtctatgaggaggataataagttgtggaagaagcatgttaatacttataagagggtgaacaagctgataggttcttcaaggtacaggaatattatggacatgaatgcaggccttggaagttttgctgcaactcttcattcttccagttcctgggtaatgaacgttgtgccctctatatcagaaaggaacactcttggtatcatatatgagcgaggtctgattggtatataccatgattggtgagccttatgcttctgccattcactgtcgaatgagatgctgatgtttgggaactg

SEQ ID NO: 39030 - DNA, 340 bp, Zea Mays
cacccatgtacgcagccggaacaatacaagcgtacgaatacgaccaacaggccacaccaccattacaattacatacacacggcgagggcatcacctattacacatacacgacgagggcatcgcctatcacatcggctcaaccttcggaatgatacccatctccctgtaattaaacaacattatcctcaattcctcaccctcaaaaagctcccgaagatccccttcgcctatgcccgcccaatttggcaaagacaacaattctcgcctaccaacctcgtctactcgatgtcggccacgctccattcccatgcgacggcgcctgccgctccgtgaaaattca

SEQ ID NO: 39031 - DNA, 296 bp, Zea Mays
tggcgcgtgtggataactgtggggagtaaaagatcttggtaccccgataagctcagacccggtcaccagtaatgccaccgtacccacttgctcttcggccagtcgagataagccttgctagcgttggccgcttgccgcctgtgcgccatgtgcctaagtgcaataccacgtcgcagtgaatcgccttagcatatccgttcatcgtcagtggccttgccacgatgaaagccacggtatcacctgcgccagtgacttcccctctctccggctgccggcgcgccatcccaaaattagcc

SEQ ID NO: 39032 - DNA, 337 bp, Zea Mays
ggaacggttgcgggacgagtgaatataggggagggaatcttgctgacgtggctgcatagtaacatttagggggaaaatttaggggaacgcctgcggatagccttagggtggcttggtgctttggtgagctgaatggtgctttggttagctggcgcctggcggctgggctcaatggacaatggtgggctggtgatttgttcattagtgtccatgtgtcggccggcaataatagactaatggttaatttcggatatccaacggattacccgcgggtgagatttaatatccaaatccatgcccacttcatatcggctcagatacaggtctaacccgcgag

SEQ ID NO: 39033 - DNA, 336 bp, Zea Mays
ggatgttccaggagccatgcttgctcccttcacattctgagtaagttccattatcagtcataatcaatcaaacatactttggtctagtagctccggttgaccaaatctagcagccatttaactttttgccatctttatggatgacactaaatcatcagtcactggcaggtgagtcactgacatggcattttctgtgccatccaccctgtagcgatggcaaacaattagtttgtccaaatctagcagccatcaattggggtgttggatttcatttcatggtttctcccagattcatcactcttcgactgctttctgatgtcaagaatgattccagaa

SEQ ID NO: 39034 - DNA, 483 bp, Zea Mays
tgtccatgtccttcttcccctgtggctgtggctctccctctcctctgctcacctcactgatcgccacctccagctatctgaacgagtgaacgggcagctgcctaatgactgtactcccatgtgtgtactagctctgacgaccagagacatctcacagcctcggtggtggggggctagctgtgggctcctgggagcgtgatgtatgtcaacggacgccatgaatgcccccgcgacaccttcaggtacagggccggggacgccggattgagacacgcagggggcccatccggatctgttggtgacctgttctgtccacggcctcgcattcgcggcagttatctgtccacaaaagcctccctttcctgtgtcgcaacaactagcatgccctgctcaaaaagagtgctttgcttactatctttcctcctcctcctcctccttcttcttcttctttctttctttcttgcggcaagtcctccaaatccc

SEQ ID NO: 39035 - DNA, 377 bp, Zea Mays
agggggaggaatgcccatatagtgtaatgcctcaatattctattaaacgcacaaaagccaaactgaacctgtcgttcggtgtgtactcctgtgtatatggagtgtgccagaaatcgttgaggagtaaccatattggtctgaatgcttctacctgatgtagatgtggatatacccgggattaatataatatccacatttgacttattggcatttgatctattctcggggacgcctgcgaatatgatccattggccttagtcaaagcatatgttctgattgcagattcacgtggtctgtaataactttccttcgatgaactcgccctggtggtgatttgcatcacgaagaggttcatcttaacgatgaaattcctagca

SEQ ID NO: 39036 - DNA, 346 bp, Zea Mays
gttctgtgcaaattctaggacctaaccgtaatgcttctaatataattctggacggcgggttgtttttgaaataagtcagggtctctttagcaagattaccaggccgaagaggtatctcttgttgtgagccgttcgatcaagatttggtggataaaatataacaacgaagggcaagtaactgtaacccctgatccatgtatcagcggtccagatccaaggcaggcgtgatccactgtgcaccgcaggatcatgatcaaacgatcatggtttaacacctgaaccgttttccagggatcaaatcaaagtcgtccgtccatagatcgatggccaggtggtcgtcttcaac

SEQ ID NO: 39037 - DNA, 400 bp, Zea Mays
aattgcgataggtgcccccgcgacccaagcggcatggccctaggaagcaacgtgctaggatgcaaaacttatgttcgctccacaacaccagcacgcacgacatctctgattgttgtgtggtttgggacctcatccggcagcaccaggaggagcagtcctagtagctacgtgcttcgtagaaggacccgctgcatggggacctcagccctaggtgggctcaacgacgtagccctgatgaggacccatgagcatcccttcttagggcctccatgggtagcgtctacttgatagggcagacatcgttaccaatcacctttagcaccatcgaaaacttccgcatggagtacatcgacttcgacattgccaagctctacctcccctacaacgccatccttgggta

SEQ ID NO: 39038 - DNA, 476 bp, Zea Mays
ccgagccaccaattcgaactgagagaccaccaatcatcgggaacgcgatcaaatgctcatggccttcgcggttctcgtgggcaggatagaataggccaccatttgcgcaattaaattaggggaaacgtttgttaggtaatgaatttggtttaggtcgaagctgagcgccagtcattgccccatccggccggtcttggtgctcgccggagctcggctgtgcgcgcaacgccttcgtggacttcaaaccgagaatagatagaagtgcgagggtgtctttgtaattgtcagcgaccgtgttaaatagtgccttggactctatcggggtattcaagaagacagggacccttctgcaaggttgccaacgcgggcgtgggcgcgccccgtttctctgtgttgctgggtcgtctgagctgaaatcagcccaacactattcacaagtttctccttttcttttaattccagagctaaaacaatta

SEQ ID NO: 39039 - DNA, 317 bp, Zea Mays
cggtggtgtttggtgagctccgcctccgcagtgcgctttagtgccatggggggtctcatggttgactctgccctagacttttctgtcgatcttcgttttcaagattggatccttcgcaagttcaatcgctcgatcaatcttctttcgggtaaatttgatcgctacaagttctttttagtcgtctctttcggcaggtgttcatggcgtctgtgtgaagagtcggtgggtcttcttcttcaatccttcatcggtggttcagcgaagcttttcaggatttcttctcagtcggatcgggtttttcgtttctcgctttcctg

SEQ ID NO: 39040 - DNA, 340 bp, Zea Mays
tgtcaatcaagaaacattacgcgtagctaggagccaaaaaaggaaggctaccagtccgacacctcaggaggaggagttggaccaagaaatcagggaccttgaagccattcatcaacaggtccagaagaagaaagaaaagatgtttcgtctcgtcgatcttcagaggaagattgaggaggccgctgaagaaatgcgtcatctcacccaagatgaccaagaccaaaggcctcaacatagaatcttcactgacagcttctcagatacagaggaaagtggatataaatggattacccaactaaataactgacttttttaataactacaccaagttgcaggagat

SEQ ID NO: 39041 - DNA, 740 bp, Zea Mays
aggcggatgtctcgggacagcactgtcttggcgacgagtctgcatgggaccttccggcgggttggatagctgcggcggagcgccggtatgacctgctatggctctcgccataccttgtcgtagtctactagtctttttctctaacatcgctggcatgccgactccacttccgcagtctgcttctccgtcgccggccgccgccattctagttctcctctccagctctgcccgtcagtctactagtctttttctctaacgtcgctcgtagcctcgctgagtcgctcgcatgccgactccactgccgcagcctacttctccgtcatcggccgccgccattccagctctcctctccagctccgcccgtagcctgcttcttcgctcgcgtcttgttcgctccggtctgagtgtccgtttgtcagatagaaaaaagaccttctatttgcctgatagtaaaactcagaaatcaagcgttctctggatgcttgagatatattagatgaggatttctgcgtagcagtaggatgttgccactatttggttgaacatcttccgttgttaaaaaacagaaggtgaatcaacataataagcctgaagctgtagcttcgtgtctttttctgtccggttgcacggttgattgctctggttttggaccgcagggtcgtggcgctaacctaattttgttttttccttctttcctttcgtgtctttttatatgctcttttcacagtacaagtgaactt

SEQ ID NO: 39042 - DNA, 391 bp, Zea Mays
cacgagcacgcctcgtttattgccgacgaagagccccagctcctcgccaccgccgtgtacgccttcctccgactcctttccagaaaccgcttcgtttcggcctcaggtagcgtcgagttgaaggattgcgaggagtgcaagggtgccaaaaacctgcaagaatgcagggcaaagctggtgtctttctgcatctccatgctgcaggatcacttccaagtgtgcgcactgctcggaagggaccttgtaaggtcgctccacgagctggcgctggtgccggagttccaggtgttgtggcgagacttgatacttgaccatgctgccaatgtctgtcggatcggcacaccccgttggtgcactgtcgtttccatcacgtcagagatggagacgcagc

SEQ ID NO: 39043 - DNA, 310 bp, Zea Mays
ctgcgagcccgaatgacagaccatcttcctcctcgtatcgttgcgcctgatgccgatgtccgcgcaccgcaacaacccgccgcgtagatctcgggccgacctactggtcaccgcctcctcctcgctcggactcggggaaaataaatacccacatgttctcccctgctccctcaatcctcgaagccgaatgattcctgcggcagggctccagcgtcgggggaaaccaccacgccatagctgagcgccaccccgtagccgcccaggtcaccaagagaggcgaggttgggatacaaagagaaggatagcgatg

SEQ ID NO: 39044 - DNA, 681 bp, Zea Mays
gtttaacaaggcataggggattaatgcacgacggtagcctgtacaaatggacaaagtactctgacacaagcaaatgtctgagatgtcccggtagcgccattgcatcaaacattgcattgtcggcacgaccgcaaccaggatgactctccagttttagactctggatcttatggagatttcctagagattgcataagatctggcagtatgctctgttccatcgtgctaatgaccttaatctttagcaccctaagttcactcaggctgcctagttccttgaattgcccttggtacctgcagaaacgctcgttgaattgacattgtactgccaactcctccagggccgtgagcgttttgattaccccacggggcatgcttgttatcaaccctgaagcacgtaggcacaccaactgtgttagctgccctatgctcgatggcagttcctccatgaagaaattctccaccaggtccagtgtctgcagaaacttcagagctcctatttcttctggtagctcaggcatatatgtgtgttttaacccaaggtacctcagatgaattagattcccaatatgcctagcattgtgccagctcgtagtatatacattctctaaatctaggactcgcaagagcttaaagctcagaagaaacgagagctccttatcagcaccacacctgtagactg

SEQ ID NO: 39045 - DNA, 568 bp, Zea Mays
atatgtgttacgccatatcttttaacatcttattccatattttatctatcccttccacctttatgctccatggaagattcataaattccgcggccacaattaaccgaatccacgtctgcatgaggaatctaatccctataattccgcccactaccatatgataacacccttgccgttctgaccaacgttttacccataacacacttcacgatgacgtccaacctgcacgttccctgtcacggtccgatcgaacacccacgcgttcggttccagtggtcctgtacgctcccctgaccccgttaccgaccaggtctcctattatccgaagcccagggctcctattatacctgccctatctctactgctctataagggttcagtgtgggcgtccaccagggctacaccgtgcccccaccctggcgcctccggcctccaccacgtgtcctcgcccctgcctcccccctcactgcacattcacctcccctgcgacctgccccgctcgcccccaccgcggccgacattacgtgccatcaacgcatgcgcccccttcctcggagacagtggttgc

SEQ ID NO: 39046 - DNA, 329 bp, Zea Mays
acctcccttatctcgtgttcctacaccctacgcccccgctgctactgcctctgcctacacttggcatcgtcgtcttgggcaccctggtctcgatgtcctctccagactctcaggcgcctcgaccatcacttgccccggcagcaccgatgcctcattttgccatgcctgttaacttggtcgtcacactcgcttacccttccgttattccatgtctcgcactactcacctcttcgacctcgtccactgtgaatttggacatctccagttacaagtactatctagtcatcctggaagacttctctccctacctatggacctttcccttccac

SEQ ID NO: 39047 - DNA, 490 bp, Zea Mays
aagatcttcaggtacatcacccctcaccattggtgaccctcgcgccgtgatctacgctgttgctacgaattgtgctctctggcggggagatatttgcggcagagaaaagatcttggcaacaggttggctcggactcggtcacggttaagttcgccgtacccacttggtctgcggctggacgggatgatcctcaccggtgttagccgcttaacgatcatgcgccacacgtcttggaagcatagcacgtcatagtgaacctgtgtagcaagcctgtccatcgctagaggccttgccacggtgaaagccatgaatcacttgcgctagtgacctctcctctctccagccgccagcgcgccttcgcaaaattggacgccaccgccgatggaacctataaattactgccccagtgagctccgctaggtaatcacgcatccagtgtacccgcccgtgtctcagattgcccaccagagagctctaatttagagtttcc

SEQ ID NO: 39048 - DNA, 407 bp, Zea Mays
tttccttataacttccctcggtaataatttctgttacttcaacccttctgttggaaccttacctatcttacccttgattgttttctccacttcgccatttcgcgagtcttgccttaactctatccttggttatgcttttcacgattatcatctttacccatgtcacctctatatcttaccttgatgcttatattatacctgttcaaaaaaaccttttatcctctgtctcaatcttatagttgtattttacttatttgcccttggtcatattctcttccttgttgcttgcgagttttcaactccatcctttgttgcctgttactaccttcaccttcattgtccctccatcttaccttgatgactatcttatgtatgttatttaaaatccatctcccatctcgattcga

SEQ ID NO: 39049 - DNA, 281 bp, Zea Mays
cccgtatcccgagacaaaaccttagagatgggagaaactcccgatgagcgagtgcaccgagaaaggtgtaactctcgccgccgcgatcgccgacaaactcaggaccaggagcaagagctagccgagcaggacgctaggctatggcaagagaaccctctctttgctcggaacctataacccgatttcgctgagcaatgaacactccgagtgaagtcggaggggtactggttcagatagttgacggtctcccatgaaccctagacgcggaaggctaccggcga

SEQ ID NO: 39050 - DNA, 308 bp, Zea Mays
agatatttaatggaggtgcgcgggtatatgccgtaatgtggttatactcgcgacgaagaaaagatgtatgtattgtgtaacccgacgtgtaggttgctattgtataattgtgtgaaggatgctcccgatggtcatgtgactaaagggtggtgtagtggcgaagcgagaagtaagtttaatatgtttagacgggtagttgatagcatccatcggtgtcgtcatgatttctgttgtatggcggattgatactttgttttgtcaatcattgcattccatgtccgttggataaataaatgtcttgatgatcg

SEQ ID NO: 39051 - DNA, 873 bp, Zea Mays
cacgaaagatattggtgaagagaatgtcgcaaaaagaacaaagcagtcgatcgggcgaagaacaccaatggcatgtcgagtcaccatggggtgaacatggcgggtctcggtgaagaagaggagggtggtacaccatcggcttagacagagagcgaggcggggcacacccgtgcacatagttgatatgcatgcacaagatcagcataccgtggagaagtcatggccgacgagagaatcgagcaggtgaccgtattgagggcaaggttggaggagtcacggtcgaaggcagtgtcgccgaggtagcgggggccagaaaggaggcacgtgggtcgactaggggtggtaggacagcctgggaagtttgggtgcacaggggttatgggggggcactggtgttgtaggggggagaagactaggtgaacctgcaaggggaaaacgaggtggctggcgacagtggtggtcgagggcgacgagaaggggaattccacctcggcaaaaacaatgtgacaggagatcaagaggcgatgagtggtaagatcaaggaagtaaccaaggataacagcgagaggatcgaaggacaagcttatggggagcagtggcggaaaggttgggatagcacatacccaaagacacgaagatgtcgtacaagtggtgccaaagagagcaaagtggagtgtaggtgggctaatcgccttagtaagaaggcgattgagcatgtaggtggcgtgtggaggctctcagcccaatagcgagcaagaacgaaggcctagatgagcaaggagcacatgatgttgttagtagtgtgaatcagacattcaaccttgccaaattaggaagaagtgtaaagacaagacatacagagttgtacaccat

SEQ ID NO: 39052 - DNA, 303 bp, Zea Mays
ttcagacatgctttcttgttttgagtagaaaatgaggaggtaatcttattctttgctatagtcatggctgcagcaacctcaaccaaggctggcttctcatcaccatcaaccaatctcagcacgacaagaagcggtaaagaagctctaagacaatcctcaattgaattccaaaattcttgagagaaaacaatgtcatatgcttttttacctgcctctgttttggataccttggattgagtgaaaacatcacttgaaaatagacctttcaatgagttcttgtgcttgtgcaaactcttcatggta

SEQ ID NO: 39053 - DNA, 632 bp, Zea Mays
gctacacctaaaagtctaccactctcgggggcttagaagtgggcctaagtcatagtggggcaaagcctaggccccatggagaattgtcgaggccttcgcccagatatcagacccccgacttcatggtaatcattgagggtgcctttgctagggttgtgactccatcgtcgagggggtggagtcgagccttcgcccaccgtgtcaaaggcggccacgagccccctattctcgcacaccttttgtcgagccttctccagtggcccttcgctcagcatttctcaacgaccatggtcgtagactctgtcgctggcgtagggaaaagtcctctatgatagcagaccatgtgcccaaatagggttaatcacagccaggtgagtccaatcgatgatggtccgacctttgctccaacaaaggacaaggtcagcagagttggtatagtcaccccaagccttcgtgcatctctcacgacaaacgaggggaacttcttcctcttcttcaccatcacccccattgtgtagaacatcctactcttaccaaccatatattttcccgccatcttggacgtgtttgactcacactgagcaaacacaagttttgtgctcagtgggcatcgaagcctcctcctcttcttc

SEQ ID NO: 39054 - DNA, 329 bp, Zea Mays
ctcccaattttccatggcaacacaaccaatgctctgcagcaaagttgtagccctacaaaccatctttacttttgctacagcatccctagtcaaattcccactggatcatgattgaattcgagccctaagttcatgtaattccactgtcagtctgaattcagactccaagcattctgacagcccatccttgggtctaattatctccaaatttcttatgtaaccaaagcttaatctctatagtaaagtttctcccattttataactctacaaacttgatgtggtgacctagggcaaaatcttcataatttggaagttacaaagcttcaaag

SEQ ID NO: 39055 - DNA, 536 bp, Zea Mays
cagagagcgtgtagttgcttattagggataacctttactgtttgttcctgttttggtgtttccaatggcaggatccgatgacgagattgaggtagtcattcccacacaattttctgattgtgtcagccgtgaagacttcgatgttatttgcaagcgtatggaggaaaatatggaggaaacggtccacaagtctatccatgacaattattgcaatggatcttggcaaagtgctaaatagggtggagagacggataaccgagcttgtcgatcgggttgccacattggagacacgtccactacatcagcagcctcctccaccaccacaaccccagcagcatccaccacggcatcagcaacctccaccacaggctcaagatgatgccattttcgatgcacgtggcaattttgatgaggcagctaccagagacgcccacctacgacgccatcttcgtcggaatagggtaggtatgggtgacaaccagcgaggtaataacaatcttattcccgatgacccttttgctaagattaagttcaac

SEQ ID NO: 39056 - DNA, 377 bp, Zea Mays
ttatgcgcaaatgagtgctataggcagatgtgtcttctcaccgtcagttggggcacggcggatccgctataacttctgtactccggtgagaaatcaccacgcgctgtcgacctcccatatcctggaaacccttttgcacgatcctcacaacccagcgatgctcccaaaccaccccacctgttttgaatggccccataggcgagattccacggtggcggtcatcttctctgtgttctctctctccctcggtccctccctcacgactttactccggtgactttgaggtggcacatatatggctcgagggtggcaaggctcccacatatatactctagggcatcaatgaccgagacctcccaactaaatgactgatttcc

SEQ ID NO: 39057 - DNA, 378 bp, Zea Mays
ggagtcttcagatgaggacttggattattttgcagtgttagatgtggctgcagcggagccttcgccgcgcgtggagggttctgaggggctcccgggtgcgagtactgggtataggcggcggagggcggtggcgaaacggagagtgagtgaattgtcgcgaagtggtaggtgtcatcgtagtgagatggagagtggtcgtcttcgcgtggacgggactggtaaacgagaattgttgtcctcgccgattggagcgagtgtaggtgaaggggagctgcgaaatctttttgagggtgaggaattgaggataatgctgttcaactacagtgagatgggtatcatcccgaaggttgagccaatgtaatatatgatgccctcgtt

SEQ ID NO: 39058 - DNA, 457 bp, Zea Mays
cttcgaggtactaagcgaaggtgaaggccaagcgacaacttgagaactgaggtaccatggctaaggtgaagaagagagtacctgcattgagtcgaggaactaatcaagctatgaagagtcatattatgttgaggatcagatcattagtggaagtgacttgaagccaatgaagtgaactcatatgtggtgaagttgtttaagtcacatgctcaaggtgtgtttgcttgaagaaatgagacaaagatgattgcaagcccatatgaagtgatattgagaggaaatggcatatgaagacattgaagactcaagtggtcaaatagttatattctctttatcttgagtataggtatgtcgtactatcaagggggatccaatacgaataatagacaagtctcaattgctcaatctaaccaagccccgagtgctagcatgagagaaacacaaagtacaaaagttt

SEQ ID NO: 39059 - DNA, 1024 bp, Zea Mays
ggggtatttccatgtagagctcgactgggttgagttctcaggctccaaaccacgtatggcagctctctgatccattttcctgcaagcttttcactcttgtcaaatactttcttcctgagtgcttccagtatcattccgttggctctttctacttggccattggctcttgggtgcgctactgatgcatacttaatctggatgctccgctactcgcagaaatcgaagaattcagagctggtgaagttggatcccaggtcggtaatgatgctatttggtatcccaaacctgaatattatgtcttgtatgaattccactgccttggctgaggtcaaagaggcaatggacttgtactctatccattttgtgaatttgtcaatggcaaccagtacgtgagtatagcctccctgagctttcttgaaaggtctgatcatgtccagcccccaacatgcaaatgaccatgttacaggatggtctgcagctgctgtgcgggtaaatgttgttgctttgataagaattagcaagcttcacatctctggactaactcggcagcatcactcttcgctgttggtcaatagaaaccagatctaaaagccttcctgaccagagttctggacgctgcatgtactccgcactgcccggcatggatttcatctaacagttgcttcccaatagccaagtgaatgcacttcatgaggactcttgtcgcacctcttctgtacagtatgcccctctatgagggtgtagttggctgactgccttgtgatgcgttccgctgccaccttgtcatctggttcttcttcattttttatgtacttgatgataggctctttccagtcattggggtccgacactggttggctcaaggtgctgcactcttgcatctgatctaagaggataattggttgtgatatttcttggacgaagatcctgggtggagcctgggcccgactggatcccagcttcgacaacgcgtctgccggcgcgttgcggtctctttccacgtgatggaactccaatccttcga

SEQ ID NO: 39060 - DNA, 381 bp, Zea Mays
gggtgggtgctggacgtggccgttgttgtatggttgtgggtggtggtgatgatatgtgtgcgcgacaactctctggttgtgctcgagacatcctgtccctggtggcctttgtttccgagcgatcccttgttgggtgtgcgcaatcctcgccatgaaacaggcagtaaaatatgcgcggttgttgcatccgtccctggccccggcctcacatgccattcccgtggccttggggggatattcctgacggcgagcggcctcaccagtggggtgctggttggctcgtcgtggtattcatccacgacattctcatatattccaagaatcatagtgatcatgaggaacatctgtggatggttctacagaagttacgggctaatctgc

SEQ ID NO: 39061 - DNA, 463 bp, Zea Mays
cagatattggagtccacgtcgttgagtatgacgtagttggtaaatagtgtagatgtctacactttataatgcttgtgggtatactagcatgtccatgcgtgtctacaatgacaacagtacacaccatacaatggtcatggatacatctacgaccttagtcatggcaccattgtactttcttgatcgtaacatcatccatcacatttagcatgatgaactaaagccttatcttgatttccctgcaccatgtagcaattttttattagaggcccatgtggcatgatatcgtactgttccggaacatcctgctccacggacgtcataagggatgtctgaggaatctggttatatgctgccctagtttgtagggatcctagcacacttggccaagcagggagtttggtccctgacctgtagggtcctaggatctggtcctgtggtctagagggcgttagacttagcg

SEQ ID NO: 39062 - DNA, 622 bp, Zea Mays
acggccttcactagagttggcgtccttcaccgtgattgtgccacaccccaggcctttaaccacgtcgctactagccgcaccagctcgccgataaccgccgtagcccctcaaccggtgagtgccatggtaaaacgcgtcggtgactcatcccttcttttcggtcgccatgcgtctccatcaaattcactggccaccgctcaagcacactataaattgatggcatggtctgctgcgttgggtcatcaccaagcctgagcacccgctcctgccgccgattagccacaacaactctccaaattcccatttcccccaatcctgtttccgccgccgtggtagagccctcaccgtggtcagcctattccaggtctgttcatgctccctgctctcttgtttcagcatccttaggttctcctgatgctcctcgaccccgccaattggactaggaccccttagatcgccgggaacatgttcgattgcccgtggtgcccactgtcaccgtggacagagcgtgttatagctccgttagtgaaattagttgaggggaaacacttgttagagcttgaattaggtccaagccgaagtagagcaccggtcgttgcgtgaatcggccggtgtaagctcg

SEQ ID NO: 39063 - DNA, 392 bp, Zea Mays
gtaagattgacaaatgatcattggcctttgttacctgtttttgtgcagaaagcacattccctccagacctccacttgcatgtgatctggcgtaagactgacaaatgatcactggcctttgttacctgtttttgtgcagaaggcccaatccctccaagcctccacttgcatgcactattccactgcctgattgtatgatgctgtcccaccattattgtttaattgtacccatcccaactggaattgtatttttgttttagtgattcaagcttgagtcagtaagggtgtgtttggatcatagcctcccaggcagctgtctaccaggcattcaatcctggccgcaggcgtctgaaatcggtcgctgggagcgctgcctgggtcaggcagctccgg

SEQ ID NO: 39064 - DNA, 331 bp, Zea Mays
cgctgaccattgtggtaggctgatagctctattccaccaacttatacatgggcacattcacttgtgaccatctcctcccatgatctcttccatacatgaattagtatggtgacaactatgatgactagctgcaatgacactagcccaagaagccctcatgaaggctatttaacatgtaggacacccaccctctttttgtaatcttgccacctcaactatataagcggtggctttggtccctttcttcttctatgaaatgttcttcataattctatagaagtcctcacaactttcatgatttcttcataatccacaaacttttatcctcgat

SEQ ID NO: 39065 - DNA, 422 bp, Zea Mays
ccctgccccaccgctggatccgtccctgatcctgaatttgttattccatctgcgtttaaagtttattccgcggcagcaagacgactaatgaaagtacaaatgaatggatgatgatagcggaatccgctgggcctgccagattgtctctaggattttgacaagtgcacgtagcccatgtagtagctgccgcaaacccacaagaggatagatgtgagatgtcagtttcatcttcctccctggagccagttaatgtataaaccataaacaggaacatggaaatgatcccccacccctacatccctctgttagatgcaccaggttaattgggctaatgagcattgaaagagtgcatcatttttgtttctgatgggtcctgaccaataatgtcggctccctgccttcaagttcattccagagtatgc

SEQ ID NO: 39066 - DNA, 601 bp, Zea Mays
ccacatggtgtacactatacacatgatattcacccatcacaaatgtgtccatcgcagttctttagcgaagggagggagggcagaatttttgctcatcgtcaccaaagaacggctatggcaacactcgctattacatcggctcttccttcgggactagcttctcggaaattaaacagcatcaacctcaactcttccccttcaaaaaggtcctgtaggtccccttcctcgatacagaacccaaacgtcgatgccagtaactcgcgatgggcaccctgatctagctgtggtctgctctgaagacgagacctctccatgcctattcaacaatgtcttctaacacctcccaaagactcactagcactttgtttcgacacccccatcttttttcacctttgcaagtcacctgggcatgcaccgatcgaagtcactggtgcttcgcggggagtgaacctcaatggatactccgctgcagctaagtccaacgacgcaaaatagtctaaatcgtcctccgaggattcatccctccacgaaagggctccctaattctccaccctcggaagaccacaacccaaaatctgattcccacgatacattaccacta

SEQ ID NO: 39067 - DNA, 321 bp, Zea Mays
ataatattgctaataacattttttacatgatggtgcgactctgcgtaggaatttatttattgatctgttgatatacgaggggaacacatattgatttaacattcctagaaatatacaagagtatcttaatcatattatggaaaaaaattagattaaatagacagttatgattatgtttattttatatttattgatttaaatatctaaactatgacgttctataagaaatcattcttgaatttttaccattaaatggtcttattaaatcttatataatacactgctaggtcactgcctgtgtgctgcaggcccgagtttcac

SEQ ID NO: 39068 - DNA, 353 bp, Zea Mays
gccagatgatgttgttagcctgtaagcgtttggggatgcctttgtcttgactatgtatggcccttcccacttcggctctagcttgccccgggactctattctggtggtccttatgagtactaagtccccttcgttgaattctcttgggacgacattgttgtcacgccatgccttagtttgagcttgatacttgtttagggcctgcaaggcaaggacacgatctccgtcaatgagatctttggaggttggttcatcgacgtcggggacggataattggtttgttcagggggatccgtgctttaactcttgtggtgtcattgcctcggatccgtacatcaggcggaaaggtgtga

SEQ ID NO: 39069 - DNA, 354 bp, Zea Mays
gtgggttgatatgcacaaggggtaggggctcttttacaaaatggctcaactgaaagggtatcaacgatctgcggcagtccgatcattgaccgccagtgcagattagacctggtctcttctgaaagggtacacaatatagagcctcagatccagatccaatggtccgcgttttatgaaagtaggacctagactcgaaccgcacgattccgatccgaccgcccgaatcctacgaaatgaaggggtacacaaaatctgatctatgccgcccatttaaaatcctacgattccgaccatcacacaatctcttctaatcttaaccattcatcacgagattgatggccctggactcgtctt

SEQ ID NO: 39070 - DNA, 563 bp, Zea Mays
tacggatcatggacgatctcgattcttcatctccattttaaaataataggcggatgagcgccgaggagtcaacatgaggcagaagtagaggacagatccgatggcgtgcggtgcgtcgtcaatcgccgtctcgaccgctccctcctcatgtcatttcatctcgtcagcgccggagcagagtgactgagtgagagagcgcacgcacgcgcaagacgggaaggagtaattaattattgtaggaaaaaaaacaaggatgggatgagagcactcgtatgtatgcaacggatgaaattggaagcctatccggcggcggcggcagttgtaacatttgcatttggctaggatctctcttctcactgtcgtagtctcgttctcgtctcatcacatctgccaaccaccgtccagctaggagcgcagatggatccaatccaaccagccgtgcatgcaagcaataataatacggcaacagattacaatgaaccaggcaaagcaactaactctcgactggatgtgtggccatcgatcaaactgccagagcagaagctagctttcctttattgaca

SEQ ID NO: 39071 - DNA, 272 bp, Zea Mays
gttattctaggccactttgaatgcggggaatttttcggtttaccgcattttttctgttaaaattaactgatccatataaattttctgtataattcatctaaagttcctgtacctatacccttatataatccaccagtttaaactttgcaaaactcatccaaccaaatcaccttacaatcatgatcaccaataaattcatcaaacaaattgcactcaaacttaacacaccatcaaaaccaaatcaatgtttcaaatcgttggataactttcac

SEQ ID NO: 39072 - DNA, 319 bp, Zea Mays
caagtgacgtggaccgtaggccataacaatccgattggtggtaggatgtgggttggttatgcctagggaagtgaccgggatgctcgtcgtctcgaaaggggctgccggcggcgagctctgatagtgacagtcaggtgttcgacacgacgtcgtcgggggtcttgtggacataaatagaactaagtagaagggcttaggtgtaagtgtcagtgactcatgtaaacagtatcaacaagcgcttcgcaattgtttgaacgatcaggggccattgcgcaaatcaacccgcgcggtcgcaggcgcgccggaattctatacagac

SEQ ID NO: 39073 - DNA, 385 bp, Zea Mays
agcaaaatccgagcttggacgcctgaacaacgagaacaagcagctcaacgaagagaacaagcagctcaacgaagagaacaagcagctgaggagtatgctcagcaggctgaccaccagcttcaaccccatccagaagccgtcgatgcagatgcagttactctcactgatgcagcagcaagcgacccgtacccatcgaggccttcgtggagctccaggccatgaggtaaatcatgcacgcatgcatcgagtaccagtaccaccaccactccagcgaggcaaagtctgaccgagagagactgttgtgttgtgacttgctgcgatcgccaccaccaccagccgatgtacgccgatccggagaagaaggacgaccagaaggcgagccgcg

SEQ ID NO: 39074 - DNA, 411 bp, Zea Mays
tccaaatctatctgggtcctgcagtctagggtaccatagtcgaagcgaccacggggcggtaaacggtaagggtgttgaatcccgataggggcgggagaaccaccatccagatagtggcatgttgcgcactcagcacgcaattccgcaacctccgcccgaaccttgcccaactcgtcaagggcgtggtccaactctgtgttgagcacgacagccaggttgaccatgctgttcagcctgggattgccctcaccaactggcgagacaatcacacctccagcactgccggtcgaacggtgaggatagtacttcaggtcgaggccatcagctaccctgctgaacaacgagcaatactgagaaagtgcctgtcgtgctgcatcttgcatggctacctcggcagtatccctctcagta

SEQ ID NO: 39075 - DNA, 691 bp, Zea Mays
gagacgtcttcgtcgggtgtctagcttggatcagggtgccggtccttctgttcctgttgctgaggaagtgtcagtgcctgaatttgctgaagctgaccccaatgggtgtgacccgtctgatgctgaccccaatgggtgtactgtctgtgtcgttgatgaggatgatgaggaagaggatgaaatccctctaattcggaagaacagccggcgttacatacctagtggggaaagtagtggtgttccttctcctgccttgtctgccctcattggtctgcaagaattatctctggcgaactttgatcaaactcttgaagacatggttccagaagatctgttgtcagagccggcagatggtggcgcgacggatgtttgtgctgatgtgctcgatgccgggttggggtcatctcgggcagcgtcccgcgcctcatcgaccttggagcgcggtcttgagggtcaggaggctggtctgggttgcaatgctcctatggaagtgacggagggaccttcagccttagaggtggctgctgtagagaactcggccctcaaggatggtgctggcgcttacctagcccccgagggtgttgtcggagatgatctggctcggatgggtaacgcgagctgtgacccagcccccgagggtgtccgagcgggttctccctcccacacttccatggatgttcacatagggtct

SEQ ID NO: 39076 - DNA, 331 bp, Zea Mays
accagctgctgatggcaatcggaagcagtggagctggagcagatgggcgagtggcggcttacagtccgtatcggtcgcaccggtcctgcacggcgaagacgtccttccaagacttggagccctccggcgcgtagaacgctgcagcgtccgctccccacctgtcgttgaacagcttgcgccacagttcatcatccgaggtcaacgccctccatttcctgcaaactgaaaagccaggaccagcaccgtcgcagttaattggtatgcgtaactgcccaaaacgagagatcgctacgcacgctatctgcgtgtcgtaccaactactcctatgtat

SEQ ID NO: 39077 - DNA, 368 bp, Zea Mays
aaggtggacaaatttcagtggaccacaaaagcacaggaagctcttgaagcattgaaaaagttcctgaccacgccaccagtactcaagtcgccacgccgagccacaccgaatcagccgacagaagatttgttgttatacatctcctgcacgactcacgtggtgagcaccgcgttagtagtcgagcgggtggaggaaggacacacatatccagtacagcatccggtctacttcatcagtgaagttctgagactctctaaaaagaagtatccccaagttcaaaaactactgtacgcggtacttctaaccgctcgcaagctccgtcactactttgacgaccacaaagtcatagtagtcaccgggtttccaat

SEQ ID NO: 39078 - DNA, 297 bp, Zea Mays
tccgccactacgccacctagggctagaaccacaccgataccggcgtctgtacccccaccgagtgatgtaggcgctctgacgtggtgaactatgtagtctactttacccactcgggtgtgaactcgggtcactcggatgaatggagcagatggcatcggcactcccatagtcgctaggagcggtcaaaaaccattgttactgcctagcccgcaagagcagcagccgggccgtaggggacaatgtcatgcccttatttccgaatgtcatcttcatccatgggaggatagagtacgccac

SEQ ID NO: 39079 - DNA, 295 bp, Zea Mays
gccctctccccacccgcagcgcctcctcccattcccccaacggacattgcctaggaggctaggacagaaccacccagagcgcacaaccttacccgaatcgccgttgcatggaggccgtgcgcgcgtcggcggcgtgggtcgccagtcgctcctcccatgtcacggtcgaccttcaaggtattgttgcggcttttgcccagctgtaaactttgtaatacaggattgctcacttcctgctgctgtgagatgtttacgggatgatggaattctagggtttccaggtgtccgctctgca

SEQ ID NO: 39080 - DNA, 360 bp, Zea Mays
gaggaatcccaaaatcatcatcatcatcatcatcaacaactgctgcatcctgagcttcgaactgatgaagagcagcatccgcggcctgagagtcaaaaactggagcagaagctggcacaggagcctcaggcgcaggacggtaggacccaaagacaaggcgtgaggcctcaagtgtaccctagaactgtggaggccgaatcagctgcgcaaaaatgtgacacaggtagtgagcatatggcaactgtcgacgagcacgtatgccatccaaaacagtgtcctcgatctcacaaataaggaaatccacgacgtcaaactcagagtgagagaccagggcaccaaggagccagagctggatatgtg

SEQ ID NO: 39081 - DNA, 372 bp, Zea Mays
caaccgaccatattcattaaagttgccttccatcccggaagcttgttactagttttctcaatccactgccataaaactcttcttgtcaacttcttgttagagatagggagatccaaatagatacaagggaattcaacatgaacataagggagtgactactccatggcttgcacctggtactgatcacattgaacggggatggcacaactctcttgcatattagtgtgaagacctgaggcctctccaaacttgctgagaacattcctcgtgagttgcatttcttcttcatttggtttaatgaatagaaccatgtcatcagcataaatctatcgtttgaccttgaaaaccacaagaggttgcagcaaacctaag

SEQ ID NO: 39082 - DNA, 382 bp, Zea Mays
ggagggtggtcgtctttgtgtggacagggctggcatgcgggaattgtcctcgccggttggggcgagtgtaggtgagggggagttgcgaagtctttttgagggtgaggagctgaggataatgatgtttaactatagggagatgggtatcatcccgaaggttgaaccaatgtaaggtgtgatgccctcgctgtacgtatgtaactataatttgtatgatgaggctgtgtgccttcgctgatctggtcgtgcccgtaggggacttgtgcacttggtctagcgcgtttattatgtcggtccggctgcacctgtagtcggtctctgcacggatagtcttttgagggagacttcgattttgtgcacttgttgtgctagtccagctgca

SEQ ID NO: 39083 - DNA, 464 bp, Zea Mays
ccgttggatgttggttgtgtggtgtggatgactcatgcgcatgggagcaccagagagctgtgcgcacgggatatgctgagctgtatatactcctatcctatatatattataagcaaattaatgaagtgttgctagcttgccgagggaaatgaaattaaacagagaagatgagaggtccagtgcagctctggttgaactgtaaacaatgcatgatgacctgagagaccatggaagcatattctcttcgctgtaaagatgtgcgtcgaggctaccgttaggcatgaggtcgtagacgagcaggagttcgtcatcatggctgtggcaccatccaatgagctgcacgaggttgcggtgcctcaacctcctcggaggcgtactctttcctcccctgcctcgatcccttggacactctttctatggcgacgtggaggttcagctcggccaagaagcctctgtacactgac

SEQ ID NO: 39084 - DNA, 352 bp, Zea Mays
ggtctttgaaagcatagcagaagccgaggctactaggctggaggatattgatatactcgaagaagaacggctaaacacagtaattcaatcagcgcggtacgagcaaactttgaggcgttaccacgataaggccatgcgacgtcgatcctttgcagtgggagatctcgtcctccgccgaattctaacgggggagggacgacataagttgtcacctctatgggaaggaccattcatagtagcaaaagtcactcggccgggatcatatcatctcactcagatagatggcacggaaattggaaactcatggaacatagaacacctcaggaaattttacccctagctgtatttcaaa

SEQ ID NO: 39085 - DNA, 370 bp, Zea Mays
caccaagtttgaggagattgcaaggtgtcattatggcaaaatatactaaagaagctatcggtaccttaggctcttgcgtggcttgtgtgtgagattgatgacctctccacttggtgtgatgaggcaatgacatgtgcatgcgcaacaaggagacccttcctcaatgatgttccatagtggatgacaccaaggtgataggaagagttaagcaaacatggctaccctatgtgcttgttgggacttatgcttgtttgcttgaaactattattgagagccaaacaccatgatcagtgggaaatgtttagtgactaagatatatacttggtggagctctaacatggattaggatagcctttggcttaccaatgcc

SEQ ID NO: 39086 - DNA, 458 bp, Zea Mays
tgagggctgccaaatggggttcccgaggatcgtgcatgtggagacagacttgttgaaccgcatacgcaatatccggacgggtgaaagtgaggtactgtaatgcgcctgcaagactgcgaaattccgtgggatctgagacagggtcaccatcagctgagagtttggggttgatatcaacaggggttgtacagggtttgcagtcactcataccagctcgctcaagtatctcaatcatatactggcgctgagagagagtgatgccagaagcagactgttgaatatgcatgcccaggaaatgatgaagaggaccaagatctttcagtgaaaactcctgttggagagcagtaatagtgcgtcgtagaaggggcatggacgaggcagttaacacaatgtcatcctcgtgaagaatgtaaatcatatatgcacccttgtgatagacaaacaatgaagtgtcagac

SEQ ID NO: 39087 - DNA, 465 bp, Zea Mays
tattgatgttgttggccgaggccatgttcgggcagacggagacttctcccgaggccgaggtcgggtctatgcatgggtacacagtcgtgaggcgccactgccagggcagttggtgagactgagcttgggcgaggcgtagtttcctctcgaggctgaggccgacctcgggcgaggtggagtttcctctcgaggctgagcctatgtccagtcgtcgtatgtcatgtccgaagttgttgaagatagtgaccggagcgagggaatagtgtccagtattggcgggtgcacgtcatcaagggcggtgaaagtagatttgactgtggtcacatcatcctttgttgaatgtggtgtcattggtggagcaggtgttcgtgtcggctgcatttaatgtgcacgccttgtgtttcttgagaactttgaccgaagtcgggctcgaggctaggccttcgcccgggatgccctcgggcg

SEQ ID NO: 39088 - DNA, 552 bp, Zea Mays
attttacaagtttctaggtttgtttttgtattaaaaactaaattctataatcatttctctatttttaattatctctggactgggcctcgaaatccagaaagcgtaggggttattacagaagaattcctaagactcagaacctagctaagtggacggcgggttcatttacaaaaacaacaggggctcttatgtaagtgtggcttcgcgaaagggtactatgaactttgggccgcaggatcgcacaccaacggtgtggattagatcggccccggtccgaaccggtatgcgctagacaccgtccgatctggatccaacgctcccaatctaaataccctaaatcaattctaagccggtcatcgacagatcgacggcgcacatcggctatgatgaaacggtatgcgatcttctaatctgagccgtccgttcgggatctgacggcgttggggtatcgtcttccccacgcagacaccgacggcagtgccgcgcctgcacggcggcggtagcgccggcgaacaacgcatcgcacgcacgggtgataatcctaggtttcga

SEQ ID NO: 39089 - DNA, 307 bp, Zea Mays
ctcaaacctacagcacgacgaaaacagtacgtgcagcccaaaacagcaactaataaattcagcttctaattacttcaagaattgttgcgttctagagacttgaattattttaacactttaccatttgttggagttaaaataaccaagtgagaaccaacaagacaacttaccaatttttatccgagttattttgtacgctagaatcaccacacaattaacaaacacatccaccacaataatcggacccggtacatatacatgtatcgatgcgcccttcacacactaatttgcattttaaatttagaca

SEQ ID NO: 39090 - DNA, 280 bp, Zea Mays
tgcctttctgtcgtgttgcaacacgaaccatcgagtcacgatcaacgacgccattctacttaaaagcacctcgtgggtatccacatagtgtgtggtcggattgcaaacaccgacagttggcgtgccaggtagggggtgcgactttgataaatgccaactccatggcagtcacctttaaagccatggccaccttcaatcctagagagatcttctgctttgggaccatcttctgcattgcagaccaggaggaaaccttgcaccgcataacgatcccatctgg

SEQ ID NO: 39091 - DNA, 498 bp, Zea Mays
gcgggtttcaatcacggccctatgatccagatcctgcggagtagatttttaatagccagaaggttatcgccgatatgatcctgtccattgaatactggatgaacgccctagatcactactctgaagcggtatccgcaaatctaatctccaccgtccataaccggatggacggcccacgacacaacttgcctattccctcacctccccaactcaggccgacaggtgcggcggcgccgatagctccccacgacggggccatggccggcgatggccatcccacgcaatagtgcttagaacttttgaacgacaggtgctaaccaacgcttggatcctagcgggtacgttggtatgaatcttaccggggttggaagcgcagagggcattgcccatgacgacgagcggctccacggacccgaagggttccagtgagcaattccaggttcatcggtcgacgatcatccccgccgtgacgaagaccacctccccggaccgcccgtg

SEQ ID NO: 39092 - DNA, 348 bp, Zea Mays
gggatctgcggggtctcggctttctcctccctactccgggcggtctagtggtcgcctaatttcaatgtctcgaacgtcgacaagtatgagcccaagcaggaccccgacatctggttggtcatctactccatagccacctaggcagcgggggcatggaggacgtcatgaccgcataccttattgatcgtgctcgggcaggatgctccctaatggcttcaacatcttccccaccacttcatcaaccattgggctgacttctgtgactagtttgtcatgaacttccaatcactttctaacaaatcgatgcaaccctgggacctcaaatccatcaagcatcggagtgatgag

SEQ ID NO: 39093 - DNA, 411 bp, Zea Mays
aagatattttgtgcagcaaccaagattcgaaaacaagcagaaaatgccaaaaatgcccgcccaatgtcgacatttttccacctgccactgctcactgccacctgacatgtccagagctctctctctccatttatacagctcgccatctccagtccggcactcagagctctgcccccttctccttctagcgcagggcgctcccctagccccgggacagctccttcattcgacggcccttgctccaatactctctgcttctccctccatggacgccgagacgcaaagcccccatggccactagcctccatggcacttagccccttgagctcgccttcctcaactccggcagcccgggatccacttctccctgcccctgcatctcccatcgaggcccggatgagcagcagccgc

SEQ ID NO: 39094 - DNA, 309 bp, Zea Mays
ccacaatagaagggtctaatagagccatgacataggggcatgagcaagcaagcaactaagatggcatagtgagtagagaaaagagtagggtagtagtgatagtaggggcgagtcgaattgaatgcccttgaatggagttggaattgggatattaaaaccccctttaaatgttgctcatcccctcccttttatagtccatggtagaagaggggttactcaaacctcaaatgccatcggctaaaccaaactaccccaatcctatcggagtcatagcaagtcccatcccctagctgtggcatagtgtcagag

SEQ ID NO: 39095 - DNA, 290 bp, Zea Mays
tatagccgccatgatcacggccaccgtggccagagctatgtagttggtcttagttgcaattaggttgggggaatggtcaggctagccccgatttcatgtctgccgctcggagaacccagccgttgccccgttcggccggtacaggtgctcgccggagcacggccgcgcgtgaacggcgtcagggacttaaaactcagaatagatagaagaggaaggacttttatgcaaacgtcagtgactgtgttaaatagtgaaaaggctcgttcgcagttagttaaaaccccaagggc

SEQ ID NO: 39096 - DNA, 301 bp, Zea Mays
agtctacttgtttggtagaaccgtacgagtggtaacataataattccacgggagagactctaatattagttatttgattggagtgatatgtcaagatgctagaccaagcaagtcataaatggaaacgaaatacctcaaatccaaaatgcaatggattacgttcctttatctcctttgctagagtggtttggtcatctccatctctatcagtgcaaggtgacacatcgaaaataattatgtccaagagcttaggatcaaatggatcttgaagtaaagccaagaatcctggcttcagtacagc

SEQ ID NO: 39097 - DNA, 396 bp, Zea Mays
ctaaattgatgcagaaaatatgatttagtctcaatctgtccctgtttttgttacgcgtgcgtgactctggtgcctgatccgttactgtcattagataatgcataaaaatctcatagaatccctgattggagcacgtcgtttttaagtggaggtgatgtctgacctgcgggtttaattgggtatggaggactagtggactttctaagaatggacaccaatcctccacgtcccgcgatagcgttttttatttatgcctcgataacctcgtatggtgtgtgtgcggcacatcatcacgtttccgctttccgttttttccacccacggaaaagaacaacaggaattgctgtcacaccttgtggcaccagcaccagatggtccaaatcctttgaatacttt

SEQ ID NO: 39098 - DNA, 382 bp, Zea Mays
taaagggggttcataacctaacaaaacgtgtgcaagttaaagttgctgatgtgggttgtctgtggagtgagcagtttgtgcttgaccgtgcgtggctttgtgaaggaattacttttcatacctagttcaagtttttccactgagtgtgtatgatgttatactaagaatggactagctcgagagtcacaatccgatgcttgttcactgggctggtaaaaggatgaagtttaggcatggggcaaaaatagtacgcctacagggagtgtttccacaaatgcagaagtgtcagcacttgtctagtgtccaattgagaggggtagcaagatatgaagcgtgtgagaaagttcttgagttgagaattggaaatcatgactcaccaaag

SEQ ID NO: 39099 - DNA, 275 bp, Zea Mays
aaaaaaggcaaaagaagaggaggaagtggatcctaaggtagaatcccccattattctaccatcatttgttcaatttgtgcttagaacataactaaagtagcttcaccaaacaacattggtatttatggcataaataacttttaaagtgaaacatgccttatgtcatgtgtatgttcaagctttcagttgttcctcttccatctcccaattgtacatgagtggcagaaaatgtgtatgccttgtgccaagcacataaaaatataaatgcatgcagc

SEQ ID NO: 39100 - DNA, 413 bp, Zea Mays
aggaccgatccagtggttgccgctcaaatgcagatactacaacaaatgaccaacatgatgcatgaaatgcaaaatcagatgaggcaacaatgccaggaaatgcatcaggaatgactggaaatgcgtcaagaaatgaggcaagaacggttggaacggcaacaacaaccacctccaccaccaccagatccaccaagggataagcaccggaagtttatgagtcacaaaccaccgacattctctaactccccagacccactacaagctgatgactggttaaagtctctagacaagatgctcaacatagctcagtgctcggacagagagaaggtgctaaatgcatcgggttgccataccggccccgccgcagattggtgggatgcatactgtgctgccaatgctgctgtaaacacaat

SEQ ID NO: 39101 - DNA, 495 bp, Zea Mays
cgacgccgccgcgcagctcctgaacgggcttctcctcgccttctccgaagaggtaactgacctattcactcgtggtgcctctgattcacacattgctctgtcgatttgtgacatttgttgcggtttaggggccattgagagaggtgttcatggatattaagtgggaggtggaggaaggggaattgctgaaggattgcctggaagtgggagctaaggacttaaagggtttgcttgtcattgccaaagacctcttcgctggtgtttcaaggacttctacgcagcatagcgagctctgaggtttggtgactttaagttgccttttctgatcgtttcaggaactcacgcatgcttgtgtaatttagtttactttagaaacctgatgttgatccgtacagaaactaaacccttgtgatatcactgttgtgtctgctactaatgggctttgaattttgagctgtgcataattttgctaatctgaattcatttgtgatcatg

SEQ ID NO: 39102 - DNA, 333 bp, Zea Mays
tatcaaatgagggcaacacgtaaagaaatactacacaacaactttggttgttacaattttcagtaccggaaggatgctcggttccctgccctagcctatcaaagcaaatggcctaactcctagactagggagtggttttatgtaaagaatgacttggagaaaagggggtgttaaggacgttattcagggaccattgtgaccaatcttggacattaagaggccaatgtgttgtgtagaagacgaagcacatgctgccatggttgcctttaataccgtgtgcagttttattggtacaagggatttggttcaagagcacttagcatacaatatcta

SEQ ID NO: 39103 - DNA, 315 bp, Zea Mays
tggctccttacatcccagaaaaatatccccatcctgattatagcttcaggggtaatctgatgaagaaagatttggaatatctttaatacttcgaccacaaatttactcagtggaaaccgaaggcctgccttcaagaagcttcggtaaataacaacttcattttcctccagagtaggggcagtactatcttctccaactctgacaatagacatatcgcaaaagtacctccccctcatggcatcaatatgactctgtttgatagtcgacttcctgaagatagtatgacttggccgccacggccgatcttcagaatct

SEQ ID NO: 39104 - DNA, 393 bp, Zea Mays
gaggctcaccccattctcccttctgcctaattcaccctcttctttattcaacttcatgcacgtgtgtatacaactcccacaaactatagagccacaactcatcccctgaggatgatgaatgttgatcatatagcaacgatgattctagtgcatatagctctctagatctgaatcctccttgaacctttgagaagaagaactatgatgatgcctttgggctatgaaagtctcctagaggggaggggttaatagacgaaacctaagatgaggagggggcctagaggtttgcctggtcaaatggatgaacataagaacacaatgatttagagtggtttaggttgctggagagcaataccctacatccattatgagttgtattgctatgatagcttg

SEQ ID NO: 39105 - DNA, 524 bp, Zea Mays
catcaggagcagctggcggaggaccttatggggagttggatctctttggaggccctccttccatgaacctcacggatgatcgttctcacgaagctagctgtggagcgggagcagccaaggacacagataactagattagtgtagtagtatgtggtttccttatgtaatttaaataaggaaaattgagttgtataagttgagtatgtataattagaacaagtttggaataatgtaaccgaggttgtgtaatagtggcatgtaataatcaagtatgttttcttcttcagataccgtccagaactcgtgctcaggatggggctggaacttcccgtggtggcgaggaaactctgaacccgcctcctgtacctcccacgctggtagaggctatcgctgccttaatcattgccactactgataacgctcattttcttcgagaaaaggctgggaatcaaattcatcagcagggaggcaatggttaacaccaagcccccagagacactacgtacatggagtttttagaaact

SEQ ID NO: 39106 - DNA, 492 bp, Zea Mays
tcaactgggatattttcagtagggggactggacctcaagaccttttgttgtccatcccaatatagttcagtttgtgcacatggatggagaacagcagggagaggagatcttttctgcacccaaatctgatccaaggttgtgttaaatgaattactctcaccactatccccaaaacagtccaacccctagatattttcagtggagaatgagacctttagaaccttagttgttcatcccatccctatttcctactttatccacaagtgcaaccacagggagagaagattcttcttcagcttcccaactcaaaccaacactgattacttgaaccatctgaatcagcactcactgaactttgcatacctctatgtttaacacctcacatctcacaacttcatatggtaacagactagccttccttaaccaaaattattctctaattatagctctatcactttggtgtagagactttggtccaaaacctcaccaagc

SEQ ID NO: 39107 - DNA, 425 bp, Zea Mays
aaccttggaagatatgttgtgtgcttgtgttctgtcatggaagggtagctgggaggatcatctcgcgttggtcgagtttgcttataacgacaactaccaggctagcatcaagatggcaccatttgaggctttatatggcaggcggtgtatctcccctctgtgctgggagactttaggagagagatccctggttggtcctgattgggttcagccgaaattggagaaggttcgggaaattcatcagaatattttggccgctcagagccgtcagaagagttatgctgatgtgaggaggcaggacttggaatttgtagtgggtgaccaagtccttctcagggtatcacctactaaaggaattgtttggttcggcgtctctggaaagcttagcccaagatacattggaccgttcactatcgtggcccagg

SEQ ID NO: 39108 - DNA, 277 bp, Zea Mays
catcctgtcaccataggtcatggcatcatcgagcttgatggtgtcactctccccctggaaccacaacatgatgctaagggcctcaccagtgatgataatggcagcgtgcacctaggtgacaacggtcttgtagagaggatcaaccttgtccagttggcccacatcagatcctggtaccgtcaacgacacagggcatggagcctaggatgaggtcatgcgcggcgtggaggaggcagtgcacgtagggcatggcgaggtcaagggcgcacaccttgtg

SEQ ID NO: 39109 - DNA, 451 bp, Zea Mays
tgagtggcagcgttattctgcggaggaatccaattcctggaaactggttactcatcgccgttcttctccggccccgaatgtgaataagtctcgtattccagctctgacaggtgcaaatttggtccctttaggacatcgacagaggtctgttcgtgcccccgaaggattgatgcagatgcagcggcgttcgatttttgatcggatttccttctcccgccgctctgtccgtaatcatgttgctgttgatcgtccgcattttcaaaattattcaaatcgcagagttggccgcatggttcgctcaggatttcgggcttcgctagagacccctcacgttcccccatgggccccgcggatgttggtttggaggcccaagaagattttggaacagtgcccggagaattttggacaggattctgcccccggcattaatggctcttctgtccccgcggcg

SEQ ID NO: 39110 - DNA, 463 bp, Zea Mays
ctcatgttaagaactccatcgtgatccatatgtggttgttctcgcttttagttattctatgtaatatggtgttaaggctgtttcgtgatggtactcgtgattgtgttcaactatgtgcgccgggcctgtggttgatcgttgatccatccatgcatcaaccgtcgttggttatatcatcatttgccatctctcgcttgctattggacaggttgtctggtcgatttgtcgtattagttttagtataaataacgagaaagaaacacctagtacagtaatatgagactactatatgctataaatcagctcacgtcatggtgtttgtgtactggaatacatcatctgtccagttcttcacattttacacacctgcagggcctggcttcatactctatgttgtacgttgatgattattagatattttggtcatattttatttgatctttttaaaaacttaccattttcc

SEQ ID NO: 39111 - DNA, 288 bp, Zea Mays
aacaagtgaacactatcaccaactagcactagactggcgacatagctcatcgccaagagtaccccacacaacaaggccacagcaccaaccccagaggtagaggcaaaggccgagccccacaaccatgaaggttctactgcctttttcactgtgaagagtccgcacatcccaacagggactgccctgaaaccatggccaccaaagacagaatggccagaaatcagccagctaacaaccaacgagttgttgcacacacttaccatccccaacaataccaccagcaaagat

SEQ ID NO: 39112 - DNA, 452 bp, Zea Mays
atgagtatgaggatgaacttaaagcggctctgtatcagtcacgtgtggagcacgaatttagtcaaagggatggtgcaaggtatgacaggggtggtggatcctccagccagagggtatctcgagggccacttgataggatgatgggaaggagtagggaacaagtaattgagcatgttagagactacaatcttgctaaagcctctggaccaatgcaacagaggatagatactggtccctggacaagtaagggaaggagcttgaaagagattcatggtagggcttaggcaaaggcttgtcatgccatcggtatcccgggtcgaaaggtcgataacccatattttagggccgcaattatggagtcccaaaaacaaggtaacaaataacacaatatattttgttgtatttgatctatgttgttgacataatcttgttgccttaaatgcaggtgtggg

SEQ ID NO: 39113 - DNA, 525 bp, Zea Mays
cgtcgtgatctacaattattgtgtaacacctgattgtattctggatgcttggatatgggcggtgaagtataggcgatgacaaagatatttgtaacaatggaatagagcagaacagattttagtaggtcttgttaggagaagaattataagtacatgggaggtccaccagagataggtatatgttactagattttttttcttccctgaaacagatgtattgacattgccttttctgtagttaggattaagtcacagcctatgtaatcctaataaattgtgtaccaggtcataacttggtcaggatttctgataaaactagatccaccagtggaactgaacttcttgataaatcaatgtctcatgatgactgatgactgaacttgtgtcacttgccccagtccttttgtttgacattgctactaccttgcgaaacgtgactagagacgtgcaacactgataaacttaatatagatgttttttggatagggtttagtagatttcttacagatatgacccagctgcatt

SEQ ID NO: 39114 - DNA, 408 bp, Zea Mays
tgcctaggctgctaccaaagtaggggacaattaccacaatttaataggcaactgtgtactaaaaatacttcgaacacactgtgcatggattacccaaaacatgaccataattcgtaatcagtacatggacaaaccaatcaaagaaagcatgaccaaataatagggctataacacattaccttggttcaagtggatcttggatcctcagacgaatattctgagttgctggggaaatctgaagaacataaacgtaagtaagtcgatggtactccgttttgatgtactcaaaaacttgacatggtgtgaatctactagtatgcacttattgaaatgtattattgggtcggctgctaacaaacataaacacctttcaatggtttcccctaaaccgtaaccaacaatcgttca

SEQ ID NO: 39115 - DNA, 316 bp, Zea Mays
cccatgcctagatccgcatgatcctaaatagacggtctagattagatcagccccgcacttaatcggtatgcgcccgcgggctttagatcaacaaccaacgaccctagtttaaaacttctatgattgaatccaacgcatatgattcaaatcggacggttctgatcacatgaaccgaactggtatgcccggggaaacctgggccatccgttctagggtcaacgacacaggcacatccaccctcccacgatgcacagacgtggcggcaccgatagccaatgcggcagcgccatggttgaccaggcacatccaccctccc

SEQ ID NO: 39116 - DNA, 310 bp, Zea Mays
atcagatcgtggtggagacgacccgacgtggacgtccatggaggtgtgggaagcagagctcactcggacaccctcgggggctgagttgcagctcgcactacccatcagagccggatcactaccggcaacaccctcgggggctgggttgcaacttgcgctacccaccagagccagatcattaccggcgacaccctcaggggctgggtaaccaccagcaccacccttgggggctaggttttctgcaacagccacctctaaggctgaaggatcctcagtcacctccatgggagtcgagcaatcctgaccaacc

SEQ ID NO: 39117 - DNA, 383 bp, Zea Mays
caaaaatacacccacctgaaggaaaagacttcaggccctgtcagggagagaccctaccgaggattaccccaccatcgtctacatggccggatacctccacactctcgataaccactacgatgaccttttctcccactgcacccacctaaactcccgggtagaaagcttagagcagcaggtcaaggaacttaagaaggataaggcatccctccatgagtgtctcgaaatagcagaaggcgaggaggccaacacctgtgaagcctaccgaaccttgaagatgtattatgacaagaagctaaggaagctcgcccccacaaagaaaatccaaaagaagaccaagaaccaaggaggccaagctgagcggaggaagaaggcccctccag

SEQ ID NO: 39118 - DNA, 293 bp, Zea Mays
aaactgttatgtagtttgaatattttaaacacgtgaaccgtgtttccctccatatagattgatgcaatagtcacccaaatagccccagacacatgatacaccatgcaataattcacacatttgtccaaccaaattttgggttccaacccctcgaacttaggaaacgacaacttatgcggtggtgtctgctgaaactctcgatcccccatacacttgaattcaccctcccgaaagcccaaaggcagaggatcatgatacattcattgtggttcaggcggctcctatggtgcagc

SEQ ID NO: 39119 - DNA, 337 bp, Zea Mays
atgtgcactgatcacgtcattcatagaaggttgtaacaagtatggggagccagtgcgctcatcggatgcattcgatgggctccccgccgtataggaaactcaaagatatacacaatcatgttcttcaaggcatttctctcattggacatgtctagagaacatcgatcatgatgcaccacataccagtacaatgatgagaagttcaaaaactagtcgctggattctacacacagacacgtgtggtgcccctgtaattgttgaatggagggcactggcttgtcctatgtcatagaactataaatacccttccatgttgtccatttatggttgattgctc

SEQ ID NO: 39120 - DNA, 431 bp, Zea Mays
gcgctttagaggtaacagccgagtggtgcttgacgacgttagcgtttcagaggtaacagtcgagttgcgctagaccacgtctgcgttttagaggtaatagccaagttacgctgggccacgtcggcgttttaggagtaactgccgagttaggacagatactggcgatgctttagaggtaacagccgagtggtgcttgacgacgtcggtgttttggagataacagtcgagttatgtcggaaatcttattttctcgagtgatgacttggcactttttagaaacagtgcccaacccaggaaaacccaatttatatcacgtcgccgcacgcctctgagttctgagccctaacttcacatttccgcctcaagccactcctctgtttccctctgatttcgcttctgttcaatctgccggcgagattgcgatggcgccc

SEQ ID NO: 39121 - DNA, 344 bp, Zea Mays
ggggaatggaacctcatttttccttattattaaaccagaatcgtaccctcatttctctggccatcgggattcccaaattggacggcggccaccgcgtcagcgaagacgaggaagaggtaattcctccttcgtattccccattcaatctcgagttctaggttttctcttgactgttcctgcattgcgacttggccttgccctcgatgcgtcacttcactcgtcgtcatccttgtcttcggtctcgatcgtcctggagtacacgctgtgctgtgccgtgagctacgcgctagcctttccccctcccttctatccaagccggcacctagaagaggatgtcgttgtgg

SEQ ID NO: 39122 - DNA, 431 bp, Zea Mays
cacagcaaagctccttcaggccaccagccccaagaggcaaaggaggaggaagcttcggaggaagattcagctcgcaaccaagaaggttgttttgtttgttctatagagaagataaggggcatacaacaaggacatgcaaagtcacgatatagaagcaaaaggaaatagatgaggccgaagtaggtcctgcatactacttcgtgttattccccacacattcccgagtatgtgggcaaccaacaacccatagtatcagttgtttgggcaagccactccccagctgcatgggccctgccaccactgccaccactaatggctccaacttcgtctcacaatcaacaaccagaagggcaccgccaagttcaacaacaacgcgacacacacgaagagtccgaagcttggacagtcaatagcactgtaccagaatcgag

SEQ ID NO: 39123 - DNA, 1183 bp, Zea Mays
atgaatggcccttcccatagtggtgacaatttgtgtcgtccctcccccgttagaattcggcggaggacgaggtctcccactgcgaaggatcgatgccgtatggccttgtcatgatagcgcctcagagtttgctgataccgggctgactgaatcaccatatttaatcgttcttcttctagtatatcaacatcctctagtctagtagcctcagcttctgctatgtttttaaagattaacctcggtgccccaaacttgagatccgcgggtagcactgcctccgaaccatagaccataaagaaaggagtgtttccatgcagagctcggctaggttgagttctcaggctccagacaacatacgatagctctctgatccactttcctgcgaacttttaattcttgtcgaagactttctttctgagcgcttccaatatcatcctgttggctctttctacttgcccgttggctcttgggtgcgccaccgaggcatatttgatctgaatgcttttttgttcacagaaatcgaagaactctgagcttgtgaaattggatcccaggtcggttatgatactattcggtatcccgaacctgaatattatgtcttgtatgaattccactgctttagctgaagttagagaagcaatgggtttgaactctatccatttagtgaatttgtcgctagcaaccagtacatgagtgtatcctccttgagctttcttgaagggtccaatcatatccagtccccagcacgcgaatggccaggttacatgtatggtttgcagttgctgtgctggtagatgctgctgttttgataagtactgacagacttcgcacctctggactaactcggctgcatcactcttcgccgttggccagtagaaaccagacatgaagaccttcccaaccagagtccttgatgctgcgtgtatcccgcattgcccagcgtggacctcttatagcagttgcttccctgtagccgaaagtatgcatttcatgaggactcctgatgcgccccttctgtatagtgtttccccaatgagagtataatgagctgactgccttgcaatgcgctctgttgtatttttgtcatccggctcttcctcattctttatgtacctgatgatcggctccctccagtcatcaggatctgactcaagttggctcagaatattgcattcctctatcc

SEQ ID NO: 39124 - DNA, 788 bp, Zea Mays
ccaaggataaaatatttgaagaaataataaaactggaacagtcagaggtttcagctagtattattccttgttctggttgggctcttggaaatatagtgaacttagctaccaatcatgatgacttatccaattcagggtgtttcattcaagagttagatttctgcttatatgttgatgttattaattgtatttctgaaaacttactggaaagttttgagaaaagcaagggaacgtctcaaaatgttggtaatatcactttccatgccgacacatctgttgcagaggaagaggataccaatgacgactgcagaatgagaacattatttatggaccttctgaagccaatttaccagcaatggcaccttagaaaacttttgatgttggcaaaagaggattttccatgccgcagggcaactgattatgatccaaacttgaagaatattcactttcgaatcctaaagttgtcagatgttatatgcttctactatcacatgcttagaattttctcatcacttaacccttctatcggtgcaatgcctattctcaacatgcttgcattctcacctggatttctagttgatttatgggaggcactagaaatgcccatttttggtccacctatccagaattcacaagaaacaggacacgagaaacagttggctacaagtagttcaggtgtgcaagtatcctccatgaggcaaagaaggaatgccaaggacacagcaaacaggtggtcaaatgtgctccagaagattactggaaaatccaatgattcagaggagggcact

SEQ ID NO: 39125 - DNA, 271 bp, Zea Mays
attttccatatctctcatccgaccaagatgttctccggacaggtgatggtggatccgacctaggtttgtctcctcttggtcgtggtagatcagcgcgcacactatttcaatccaccagatccatttcagctcctatttctcatgcccgaggtgcaattcgaggttgccgtgtagttagggggagatgcactagtagtcgtggtggaggtcgatctgctatttctgcacctattgaccctgtcctcattgaagattttggagatgaaccaac

SEQ ID NO: 39126 - DNA, 293 bp, Zea Mays
aattcattactgacatctgggaaaatggcggccgaggaatggcacacgagataataaaaaagagtgaaaaagatactcacgatgcaagagaaacaacgaaggcagctgaaaaagctgcggaactcaaaaggcggataggtatcgcttaatagcttttagtttgatttttaattttgtgacttcgaacttatttacgttttctatcgcagctgaactatctcctcccccagagcccttcgagtcattggacaacccagaagcaaagaaggaagatgaaattactagcatggccg

SEQ ID NO: 39127 - DNA, 468 bp, Zea Mays
ggcgggttgaatactggaaactcggggtttcttttgtaaaatctacgcagcgaaggggtacgcggccatctgaaccacccgatcactgatcaagggcccagattagattgcacatccccgtgaaccggtacggcacatgggccgatggatcagagatctacgcctgatatctatccacgccacttatcagatcagggcccccagatccgcgatcgacggtctagagtgaagcatcgaaccggtatgcgtagatttaatctcgcgcttctattccaatcggacggactatatataatctgaaatcgctctaaccttagtcgctggcccaaaatccaatggctaggtgcctatcttctttccccatgccattctgccgcccatccgacagacggcgcgaccccattcacggcagaggcatcaccggggttcaacaatcccacgactaggcacccaaaatcatagctaatc

SEQ ID NO: 39128 - DNA, 440 bp, Zea Mays
ataagggccataaatgcgctgcaatccaaggggttcataggttatgagtgcgctgcagcgcaaggggttcggaggccatgagtgggaagtggacagatgcaactgccgtggctcgactccaggtgtagttaatgcgtctggtcacttatggcgggtcggtcttgggccgagcgagggatccacttgattggtttcccttcggctcacatgaccccctgtctagctctgccatgcccgaccccaggctctatgtcacgggattcatctgggggccgatacttctagggaagacgtttcctttctccaccagctgaccgatggccctagtcgccagaggcttttccccagcgcgctcgctgactgatgggccctagtcaccataggcttttccctagcatgctcgctggccgatgggccccagtcaccggggatcttttccc

SEQ ID NO: 39129 - DNA, 273 bp, Zea Mays
gagtgatgacttggcacgtcagtgttttagaaataacagctgagttatattgggccacgtcggcgttttataaataacagctgagttatattgggccacgtcagtgtttttgaaaataacggccgagtgatgattgggcactttttagaaatggcatctggcccggggaaaccccatttataccgcgccgtcgcatgcctctgcattctgagccctagccctgcttttctgcttccagaccttctctgcttccttgtgatctcgcttccgctc

SEQ ID NO: 39130 - DNA, 528 bp, Zea Mays
ctggacaagggtgggcggttctgcagttcagaacagttcttcggtcggttgtgcattccagatcttttcttgtccacgatgctaagatgggaggcggagggagcaggaagaagcaaccaagtggaggggagcaggaagacaaaccagggaggcggggaggatgaaggtcttccacgacgctgagatggaatgggcgtgggcacgagctgcgaactgggcggttgtgtggcggagtagatgctagtggtgaagatgaaggctgaaatgctggtgttgagatgggaactggcgtgcgcacgagctgcgaactgcgcggttgcgtggcggtggatcgggagtaaatagtgccagcgaagatgaaggttgaaacgtctatggagattggacgagtgcggaccatatagggccgcgaatcagtgagtctcaaatatgctacccttcaagttgggcctcaaaacgtttagacgaattttatgaaatgagactcctgttggagctatccattcttgttgaggccctatattttaa

SEQ ID NO: 39131 - DNA, 456 bp, Zea Mays
ctgatctggagaagatcaaagttattgagaattggcagactcctactaatgctaaggagcttcgtagttttttgggtctcgcaggtttttatcggaaatttgtcaaaaactttggtgtgattagtagacccttattcaacctgctcaagaagtatgccttattcgtttggacccaggatcatcaaacatcttttgacctgttaaaacaagcccttgtgtcagcaccggttcttgctttaccagattttacaaaacaattctgcatctacacagatgcctgtcagacaggggttggagcggttctgatgcagaatggtcatcctttagcttttctcagcagagctttgggacctaagaaccagggtctatccacatatgagaaagagtatatggctatcctactggctgtaactcagtggcgttcatatcttcagttcgcagagttcatagtttata

SEQ ID NO: 39132 - DNA, 449 bp, Zea Mays
gtgtttcggaccaatttgggggaaatccgaaattggggagctctggtgagcaattggaggcacgacttggtggattgggtgcttgactaccttacgaacccgacgacacactcaatttataggctccgggggcggtggccagtgaatttggagttggcgcggtggcggcggagagaagagttgcactggcgcaaggattggcggctttcaacgtggcgggctcactggggatcaccggacatgcataatgcgagtgactgcgacgtggtgaatgccgaggcacgtggcgcaagaccgcgaggtggctaactccggcgaacctatccaaagcggccgtgacacgctcgggtacggtggccggagtaaaatagtggccggagttcatccacgacgcgatatttacttaccccacgacgttatctaactgagctgagcacgaatcaccacgg

SEQ ID NO: 39133 - DNA, 456 bp, Zea Mays
gttgggcatgatggtcagtcagttcaagaggggaactggcggaccggggttaggctttgctactaagaatgggagtgtcgcttgctttgggaaggttggtgagtgcagtggtttgacaccttcagagaaaccttcacccactcccaagcttatcaaaaccacctctgttaagcctgtcacccctgtgagagatggtgtgattgatgaacctatgagagatcctcctcagaaacaagtgtggcttccaaaacctaaccatcttaggaacacacttgacacctttcccgacatctctagtgatccccttcctagagcccctcagtcatccgaaaagaaagcccccttccacaaacaaaatccacccaggagagaggtgaggtaccattgtgaatattgtgagagggatgggcatctagcttctttttgctttaggaggaagagagatgagcggcgggt

SEQ ID NO: 39134 - DNA, 505 bp, Zea Mays
ggaccgaataccccctggcatcaggactactaatcgccaactgctgcagcaaggattgtgcctccggatcagtaacatatgagttgagaacctcctgtagccactgaggttgaatgatagacaaagcatgaagatgaagtggagagtgcagacgagatagagcgtcggcgacgacattatcgtgccccttatacacaatctggaattggagccccatgagcttggtcattgctttcttttgaagatcggactgcaggtgttgatcctccaagtaacagagactacagtgattagttttaatggtaatctggtgccgttgtaaatataaccgccaacgatcaaccgccataatcaaagccaagaattctttttcgtatatagaaaggtgttgatgtttattggccaaggccttgctcagaaaggcaataggttgatctcgctgcataagaacagctcctataccatgagcacagtcatgagtttccaccgtaaacggaatcgtgaa

SEQ ID NO: 39135 - DNA, 480 bp, Zea Mays
gctcgtttagtcagtgtaaagagaaacggggtcgagaaagcagggcacccagttgtcgtcctcacacaagaaaaacatttctcgaagcaagcaactcgatccacggttggcacaattcggaaagaaaccgacggctgcaactaactgcggggatagacggaagaacaaacgaaggcaacagtagcctaacctgcaaacggtgctgatacctgtcaggccggtcggagagaaagaagatagggcgagatcaaagagtggaaggagggagctcaccagtagatggagatgagggataaccgctttagctccccggtcctccgctttccataggggatcgaaacagaagaggggaggcatgatttgttttttgtgcctgcatgtgtgtatctttgtgtgtgtcacagtgtcagtacctgccttcactttgcgtgacaagtgttggtaggacaagcgggccatgggtagttgtggccctcgccc

SEQ ID NO: 39136 - DNA, 500 bp, Zea Mays
gtggttcggggttaatgcttgtataaacgtacagtgtttatgatcctttacacaacaatatatgctccatatgaacacaccgtacacacactaaccaaccgatcgtgcacacactacgggtccccacagtcctgcgtcgcttcccgctagccgactgagccaatgtggtcaacgttcgagacccactcgtacgaacagaaccaacccacgcgtcgtggccccaccaaaaccctaataaaatatgtgccttgccgtcgccgccacccgctcctacgatcgccaacgccgagggccccaccgccccactcgccctaatcgccatccttgatcgtttgccctccaccgttctccgccctggttcgtctcccctctcattgttcgttccatttccctacattctctcgcataatccaacaattgtttacaatatgaatcagtgttttcactatcccggcaccccaactcctgcatagtaccgtcgccttcaggttcgccacacc

SEQ ID NO: 39137 - DNA, 424 bp, Zea Mays
ttgcacctgaagcgtagctctaggaacaagacgtgtctagttgtgtgcgttgggactgggggaggaataagggattgatggccaacagcgagtatgagtacgtgaagagggagttcgagtttgatcgctgcctcccgccctctaactggatcgttgtccgtatcgacggttgccacttccacaggtacacctcccaaatatcaatgcatccttttctcttcagtatacataggttctgtagggaccaagcttctattgtgttgttgtataatctcttttgcttctctgctaattttagtttctcctttgtaggttctcaaaggtccacgcctttgagaaaccaaatgatgagaacgctctaagattaatgaacgcttgtgccactgctgtgctcgagaaatttcctgacatagcctttgcttat

SEQ ID NO: 39138 - DNA, 297 bp, Zea Mays
tttctttttctccggtttccaaggatttctccttggcaggctttgaaggcccagcttcagtcccggcctggctctttgcagcttcggcttcagttagttttgtttctgcctgcatttttgaagcttcggcagttttccctggagtagagcttgaactctttatcgtccctagtacatctagtacattgaccatccttttcctcttggggtcgctataagatatttttgtgccttcggcactgccacttctgccgaagggctcataacttctgatatttttgtttcttcaattctagg

SEQ ID NO: 39139 - DNA, 511 bp, Zea Mays
ataattgttcagtaacccagcagtaccattaccacctctatagtcttgtggccttggaggctggagcagagtgcagactgcagaccatgctttatataagatgtttttgcacaatgtggaaggccgtggttgtattaagatgtgtatttaatttgccggtgcgaatcttatcttatggtgccgagagataagttgacattcatgtaaatgctggttgcttgtgtgtggacattcaggtaaatcctatggtttcgactctgaatcttattagtttgatggtctcaatcttataatgccaacgctgcctgtgtgtggacattatttttgtcagatagcagtgatgttgatgtggaggaaacatgaaaggaaccttgtcatgctactgctatctgttctgtttctgcctttctggtatgtgattagtatacctcttaagatttattacgctccccgtttctgtttcaaattaagatttaatactccatttccgtttcaaattgtaagtcatttc

SEQ ID NO: 39140 - DNA, 401 bp, Zea Mays
ctaggccatggccagtcatccgaatgataggccacaggcacgctgagtggccactaacgatatgactgcacctccctgagtacggacccagacgcgctcccacagcttcgaaggaccagacgaccctattcatgaagtgcctcagcatcgaagcttctatagtgacccgaatactgggtagtgcatgatagatacaccatatcgggtgtatgcctacacacgccaacaaatgacgtgggctcatgacgacaggcaagaacgcacgatgtgcaaatgccccatgtgactgacccacaggaccccacactaccacgaggatgtcagcggaagaccagcaaaaggaacccatacgatgagtggacgagatagtacgccatgatgggagtacagctacgcatgac

SEQ ID NO: 39141 - DNA, 309 bp, Zea Mays
ccctccccttgattcgcctttcacctgacatcatgtagaggggtgttaattgaactttggagggtcggggatgagattttggtgcactccggcgagggcgccaccgtgctcaggtagctgtgccgccgcgggatatctcaggggaagtggatgagcgcctgccgtcgatctaaattgaatggccaggatcatatgcagtgtaccgattcgtgggaattcatcgtggccattgatcggtcgatcgacgatcggcgattgatctggttctcttttaatccagagcgctgatctcagatcgggcggtgctgg

SEQ ID NO: 39142 - DNA, 473 bp, Zea Mays
ggccttcaaaacgttattagaggcaggtaatacagacgagcagctgtcagcccttggagaacttatgtaccaggtgaattaatttgggtctctggctctctgctcatcatgatgtatctttctctactcttattgcacaacaaggttcactgtgcaaacattaagttgaggaaattgtgctttgctggtattaacattcttctctttgtactgctacttgcatacctttgacgtgtttgatgtttctctttgattcacatgtttctggcagtgccacaacagctacagcgcatgtggcctcggttctgatgggactgacagactagtcaacctggtacgagaagtgcaacacaggaggacatccgaaggcggaagccctagtctgtttggcgcaaagatcaccggcggaggctccggcggcacagtatgtgttgttgggaagaactgcgccaggagcagtgaagagattgcag

SEQ ID NO: 39143 - DNA, 549 bp, Zea Mays
ctcggctggcgcgattgggggctggggtgcacgcgatttctcgccggtgctcctactccaccgcaggactaatatgcgccgtgggcagggaacggcgcggcataatcacaggtaagatcgctcccataatgatcgcccttcgctccacatcgagtagtagtcctccgattgagatttggtgtaggggagtgccgtggtggctgtgcgccggtgggtctccgtcgtggggagctcctggcaccgcctcgggctggcgagtgaagggagaaggcgtgggtaccatccgatccaactcggacggatgcgattagatgagagcgtaaccattcacgagattaaatctgagtcgtatattatccatccgatgggcatgggtaggtgcttggcatggcgaatcttgggtcgtcagtcgcagatccaacgggcacaattgcgtcctggctcggggttatgcggatctaatccagaccacacgtggttgatccaacgaccagaagcctacgataccccttcgtgggacaaattcgcataagagcccttatgttttta

SEQ ID NO: 39144 - DNA, 275 bp, Zea Mays
agcagggcaatccaaaccagcttcctgaccctcaagaccgcgctccaaggtcgatgaggcgcgggaagctgcccgggatgaccccaacccggcgtcatgcacatcaacacaaacatccatcgtgccaccatctgccggttctgataacagatcttttggaaccatgtcttcaagagtttgatcaaagttcgccatagataattcttgtagactaacgagggcagacaaggtaggagaaggaacaccactactttccccactggctatgtaacgtc

SEQ ID NO: 39145 - DNA, 405 bp, Zea Mays
gaataatggagtgggcggcacggcgatcatgttgctgtggtagtgagcgtggaatgcctggtccggatacgagaggcagtgaaggctagccactcctccatggtaatggtgctggtgcagcatgtgcgcttcactcgtttatttgctcagtggagactgctggaggccttcgagggtgcgaggtctcgatgtggctggcttcttggtgaattttcgctctcggtgagcggagggggcacttggttggtggaggccttttatagcgtaccaaagacagtttcgcttgccccctagcctctgccttgcccaactagagagagaagccaccttctctcgcctccaccgatccttttcttttcttattgggtgggggctattgtgttcttgcccccacttctaattgtg

SEQ ID NO: 39146 - DNA, 350 bp, Zea Mays
accaaaataaacaaatttttgtatagttagcgtggacaaatctaattaaaactaggttttgatctatttttccgtcgacgcttcactgctcagtccactcttcacctgagccatttgattctccctagcgcaagcccagtcgtggctcactcacttcttcggtcatcgactgaccagtaagtcgttgacctaacccgcccgttgcagcgcaccttgccttctcatcactcatcagctcgtcgactcgtcggggtcctgtagacaacgttgatattttgcctcctagtccgcaccagctgatgggcaagttgttggtgggaccatggtgtcacctgtccctcgctaactca

SEQ ID NO: 39147 - DNA, 400 bp, Zea Mays
aatccttgaagctatcgcatcaaatgaccttcaaatatggcatgcatattttggattgttggggtcccacaatgatgttaatgtgttacatcgctcgcccgtatttgatgacctagcatctggtaatgccaccgaggttaacttcacaattaatgaagaccagtataatatgagatattatttggctgatgggatctatctagactatgcaaccttagtgaaagcagtatcccttcctcaaaggcggaagaaatgattaattggacagaatagggtcggcgacacgccaagcgaagttggctagaaccgtattggaggagcaaccgggtaggtgactgatggaaacacctcctcctgttggagagcgcagatggcgtcgcgaagatagctaggtcaccta

SEQ ID NO: 39148 - DNA, 547 bp, Zea Mays
gcggaggttttcctggtgcaagcgggctcagagtttgcgagggagcgtgacacgaccagaggtccacccgcttccttacccctcacgtcttcaccatctgccgccccagactgcctcgcgcttttcctctcgcagagcttcgcaaaatgctcactcaagcgtggatgcaaaggccgcggtggatgaagcgagggtggtggccgcggagaaaatgtgtgagctactgcttgctcatgaaaatgtcattgttgcggggcaccaggcaatcgctcttctctcgaagaggagcgccgaactccaagagcttcgtctagttgtcggcacggtgtgcgcccatttctctcctccgccgtcgaccaaagtgcctctgattgatcgcctgcgggatctgcctaacagcatggagcgcgccgttgccaaaggcatttgtcgatgtggtggcgtcgcccttggccggatggtctctcattttgatgagatcgacgtcgtcattatcgtcgagggttactccgtcggccaaagcaacaaggagttggacgctatcgag

SEQ ID NO: 39149 - DNA, 328 bp, Zea Mays
atttcttcagctgagatacatgaaagacatcatgaacatccgcaagatgatccggtaactccaattgatatgcaacctcacccactcgttttaagattaagaatggtccgataaagcgaggggacaattttcctttgactttaaatcttctcataccccggagtggtgacaccttcaaatagacataatcaccctctttaaactcaagcagtcttctccgggtgtcagcataactcttctgcctggattgtgcagttctcaaattctcccttatttgctgaacttgctcttctgcttcttgtataatgtcaggcccaaacaactgcct

SEQ ID NO: 39150 - DNA, 435 bp, Zea Mays
gtgctcctaaaacccgggtgtgacatagtgctaacaagactctgattgtgtctagtctagccactggtacaaaaacttcatcataatccacaccttctttcagtgcataacccttggcaacaagtctagttttgtgtttgacatcattacctgcatcatctttcttaagtttgaaaacccacttcaaacctatggctttgtgacctctaggcaaatcagaccaaaacaaagtgttgttgtcttctattgaatgaagttttgatttcatagcttctctccacttctgactcttcagggcagtttcaacattcacatgttcatccactgctaacatacacacaccattgtactcataatcgagtatttctttagtattttcaaacagattagtcaatgtcttgtatttcacaggaaccattcctgagctttctgaac

SEQ ID NO: 39151 - DNA, 994 bp, Zea Mays
taattccttgcaatcaaccggattgtcagccacctgaacctcctctaacactgccaaaacccaaatttcatttcccttcagccacttctccacctgcatcttggacacctccttaacctctcgaacatcatccgaatcccctaccaactgtactaactgccccctgtccacaaaactaacaatccttcccttccaatcaaaattcatgggactatgactttgaagccaatcaaaacccaaaatcatatcataagctcccaagtccaaaactctcatatcatccgtgaacgagtgaccattagatcaccactccaaagcttccaccatgcgatcactttgcataagctccccattagccattttaaccttaaaaggttgacactccttcatcaacaaccccaaacgatccaccaattccctgttgacaaaagtggctgaacttccagaatcaatcaatatcaatagagtctgattgcccactaatgctcgcacccgcatacattctttactcgtagcaccactcatagcatgtagagacatataagaacactcttcctcttgctcctcttgttcaatctgatccaactattcctctgtcaatgtcatcccgagttcctcctttgttagtgagttcagttgcaactgcaccctcttcgaacacttcagttgatggcccagctcaaatttgtcaccacaactaaagcacagaccgttctgacgtcgatattccttcaccaaacgttctttagaaagctcagccataccggtacctcccctgacctccgttcttgatccagttgccacaaacttgctaggactggcccccttcaatgacttttgtcgttgcttatccataattctttgctgcaacctagcaaggaacacaacccttcccactgatgacggcacatgagactgcaccggagcttgtaatttgtgctttaaacctttaataaactaagccacataaaatgtctcatcaagagtatgattg

SEQ ID NO: 39152 - DNA, 593 bp, Zea Mays
gcagggacaccttttttgcagatcaccaggcggggaggcggaaagaagttgtcacaaggaagagtggtgctgaccacttctcccctcactaggcgaagcccagcattgtcgcatgtccgacgacacatagcatggaccacgggggaaacccgatctcaacctgcgaagtataatgcacctcagcattaactacgaacaagacatatacctgcccactctagcggtgggcgctacgaccaaagtacacggaccacatagtggctcacgcgttactgaagcgaggccattgactctctgcgccacatgggtcgctgccatcatggcccccactctactgcgcaagggaccaaggcaaagcgtgacatgcagagaagacaggaaaacatccctagagcatccctacacacggtagcgcttcagcccacgttacaacctacttctgcgctctgccccgattagatgaggcaagggtacggcgggtagcagcacttcagcctgtgtcgcaacatactcatgcgctctgccctaattcgatgaggcaagggcacggtgggccaggaaatctacgagaagatcagaagaagatctgttcc

SEQ ID NO: 39153 - DNA, 359 bp, Zea Mays
gggggctctggcttcataacaacttagcgaagctaatggtgcaatcaatttatagtctccgagagcggtcgctccgaattttggagaagagagcttgcggccggggagaaggggaactcactggcgcgagctaccgtggtggtcactggttaacgagctacgacagttactgctgagtccctgtggcttggaacaacatggtgaatcgactatggcgtggagcgatgacggtgaacggcgatttccatggcgacggccgtccggccacgtcgcggcgcaagtgggtacgatgactggtcagtaacagtgccctgacttcatccctgggcaagatcttttcaccctgtgtcattatctgc

SEQ ID NO: 39154 - DNA, 425 bp, Zea Mays
ttctgacactgcattacaaatatgcctcttggtttttttatgaaagccggggcttccccactgtgccagttcccgcagataaatgaagtgaagttcaattgtgtgaatacttacccaattagggatcaaataacagaggaaattggctgcggaggctgttttttaactatgcatgcctatcgagaccatgatactaacttcatgagcaatgccatatgcttacaagttacagcaatgtttcctgtgacactttgtagtccaagaatacatttatccaatcagatagttgagatgtgatcaatctagtacttcattttaataaaatcatcagtgatgaacttaccacttctagaaacctcagctagatccgcattattacttctagaaacatttgttgtagttagatccaccatctaacaaccatg

SEQ ID NO: 39155 - DNA, 416 bp, Zea Mays
gtatagggggcctactatatagaagaggtgcaggaggagtcctcatgaagtgtattcactaggctatagggaagcagctgttggacgagcaatgtggcgtgcatgcagcgtcacagactctagtagggaaagctttcaggttcgggttctactggccaacagcgaagaatgatgcagcagagttagtccaaaagtgcgaggcatgccaattcttatcaaagcaacaacatctacccgtgcaacagttgcagactattactgtaacctggttgtttgcatgctgggggctggacatgattgggcccttcaagaaagctcaagggggtatacgcatatactagtcgccattgataaattcacaaagtggatagaatacaaactcatcgcctctttgacctcaacaaaggcagtgaagt

SEQ ID NO: 39156 - DNA, 323 bp, Zea Mays
gcaagggccaaggggggtatatacgtatatcggtatatggtttaaaaaagacgctagataaagcctaatactcctacataaagtaatagtttaattaaacccatgcatggtaaaaatggaaagtgccgccgtgacccctgggcgccagagaggggcagtcgtacgtgcacgcaccaaagcccctccccctacagctacagggacagtacaggtacagggtgtgggcgcggtcaaaagcacgagtacggacgccgcgaccaccgctcgttttgggcttgggagcacatgagcgcccctttccccctccctatggattctttccc

SEQ ID NO: 39157 - DNA, 575 bp, Zea Mays
ttaaggtggatccaagctgctaattcctttcatttagtattctgtatcgtttccttacctcagaattcagaattttttggtgggcttcttggagggaagttctcattatatagcttatacgattgtcatttttcatcagactatatgacaaattcacaaccaatttcttatgaaatctacatgttaactgaattggaccatttcaatgtaatgatgcaaatgcttttcttgtaccacttttaacaggattctattaccagtatcaatatgctgaaggagcaaagaccatcagccaaaatgtgcagtatattggatgaagcaggctatgaaaggagagaacagtttaactgttatttaccggattcatctaagagcctcaatgctgacctctatgttgaggacgaggacatgttttatgaacctcaagctgaaaaagattggcaatgtaagttctcatgagtgacgacacaagttttgtggcctaagaaaatatcactctatatattcgtgattctacatttttgttctgaacagcaaagcatagtagatcagatggcaatcttgctgatgagaat

SEQ ID NO: 39158 - DNA, 310 bp, Zea Mays
ctcagcctcctagtcgcattgaaccggtaggattaaggctttgggcatcagctcgtggttcggcatgtcgccggtgcaccctccgccgtaagccagggcagcgccgccacggcttgggtctgggattgaagacgttcgcgcgtcgttagatccgtgatgggcggctaggattaggtctagggtgagaatcaccgcgggccgtcgatctccctcggaacggctctgattttattaagcgtatcgcttcgcggtggggcgctccggttcgttagattgagatcgggcggcctgcatcgaataccggttcgcg

SEQ ID NO: 39159 - DNA, 328 bp, Zea Mays
gccaaccttttccaaaattgatacagccccacaagcaccagcaaaagcacaaaaatcccctcgatcgctgagtatctcatcaaaagcttcggcctccccgctgatccactggataaccccatcggggtcatcgcagatgaacttctgctcgaaagagtatgctcccacctatgcaaaactgttctttagattcctggcgcattccaaggatatttcgtagcatctctctttggagtcgcggagctcttcgtcattcttttgttcccttgatttttcaattttgcttatctcatgcttcgccattgcaacttaaaaattttcgatcgct

SEQ ID NO: 39160 - DNA, 387 bp, Zea Mays
gacagggagatggtggccgctgattgattatttaaagagaaaacgagatgattgtttaggaggtaataaatttttttatttgatttctctgagacaagagctctcgtatgagttgtatattaagacaagggcaatttattggttggagaggagtggtcatctgttagccgattcgcgcagcgctcactcgttggttgagaccgacgaagggaatggagcgaactgacgcacggatgaacgaaaggccacagaataaaataaaccgagacattttatttgggtgttgcttggaaattgaattctcgcgcataagtataaacaaaatgaatcgaggtcgatcggcttcggattcggcatcgaaataaaacgagtcggattaataaaaat

SEQ ID NO: 39161 - DNA, 456 bp, Zea Mays
cggtaaaccagcaacacagacacggcctcccctgcagtgtcatgacccggcgcttcaggaaatcgccgagtacgtgcatcaaggttaggccaccaaccaccagttccttaatcctgtccaggacgggcccgaactccggcacgaggcacgactttaccctccattgcttccggttgagtctgggcccgtcactcggaagggcaaggcggtcgttgacctcagcactggcgatcacacattcatttcgctagttctcccactcgcgccgccaagggaggcgatgtaggtcactgttggatctgacctcgtctggaagtagtaggccccaaggtggtctttgcccttcccagacctcaccagcacaaaaaactggcagaagagggaagtgcaggttgccactcccacgaacatctcgcagaaatggacaaagatggccacctggaggatggagtgggg

SEQ ID NO: 39162 - DNA, 311 bp, Zea Mays
gcggaagatagttctccttgctaagggttgctcaatcgatgcattcgcgaaggggtatcgttgatcattgtccgtccgatcaacgcacaacgcgccaaattaaatctagacgaccacgaatacgtgaccgacttcgactatccgatctagatccaacagctgatggtcgctactgcaccgagccgttcatcaccgagtcaatgacccggatcaaacctcacgaaacggtatgtcgcggtctaatctgcaccgttgatctgccgatgaatgatacctgctcacccctctcgttcgcggtcgctcgagtggcg

SEQ ID NO: 39163 - DNA, 290 bp, Zea Mays
gagaggagagttttatgcctaccaaaaacaattcttttcatctttgcatgcacatcttttgagatgatcacgaaatttagaaaaagaggttaaagcagtaaaagcactattaatgctgagccctttgtggcaaaacatcccaaaatggacactcatctttttccaattcattcccaaaggtggtcatttttcaaccaactgctcagttggaacgaaaagcagagatgagttgtactagtcctacataactggcacagatcagcatcaaacaggaccttactgctgccgag

SEQ ID NO: 39164 - DNA, 456 bp, Zea Mays
gaaataataaagaagatgcagaagcaaaagagcaggcaaacctaatttgcctaaacgctaagcactgtgattttccctgaccatattaaaggcaggcagcagcaaggccaagactctctagatgcttagcaccagccctaccccaacacatcaactcatccaaagacatactttggactgtgctcatggaaggactcactccatcaaatacagccctgttacgatgaagccataagcaccaagccctcaaaatgatgacgctgttaaaaccttttctcatgttcttgtgcgcctttctatgcgcttttccccaccacacaacataagagatatcatcactagtaggagtgagatcatcaagcctcaagggcgatagaacaccatgccaaactggaacattgtttgaatgccttcatttttgtgttgacaactgctcgaaaccgacactgatgagtg

SEQ ID NO: 39165 - DNA, 308 bp, Zea Mays
cgatcatttcatttctaggatcggcctccagggtcttgtttacaaaagtcagccttggagttttaccatctcctatgtcgatctcctccaaaggatcggccgatgtaaacccatgtcctagtttatcgagatctctgaattcctctatcatgtccaccacagaggaatcagatgatctttgtgtgatggcggactctccggtctcgggggccggatcatccgtaatactgtctttacgctgtggtagatgtttggtcttaaagttagaactattttgtgaaagaccagaccatctagccttagaagcc

SEQ ID NO: 39166 - DNA, 577 bp, Zea Mays
caagaccttaacatacttaattgttctccttctcgtgacacgctccgaggactccaaaatatgcaccgggcgacactccagagtcatatcttgctgcacagcgatcggttccaactcgatttgatggtccggatcctgcagatacttcctcaacatagagacatgaaataccgggtgtacccctgccatggatttcggtaattgcaagcgataagccaagctaccaacctgagccaagatagagaatagtccaatgtacctcgggctaagtttccttgagacatcgaaccgaacgactcctctagtaggtgataccttgagaaggacttgatcacccactgcaaattctaagtcccgcctcctcacatcagcataactcttctgacagctctgagtggctagaatattctgacgaatctctcgaatcttctcagatgtctgctgaacccaatcaggaccgaccaaggatctctctcccaaagtctcccaacataaaggggagatacaccgcctgccatataaggcctcatacggtgccatcttgatgctagcctgatagctgttgttataagcaaac

SEQ ID NO: 39167 - DNA, 396 bp, Zea Mays
gacgtaatgacagcatattttcccatcgtcttagggcaagatgcactacagtgctacaacatctgccacgacactggatcgacgattggagcgacttcagtcgacggttcatcgccaacttccagtccctctttgacaagccggcgcagccgtgggacctcaaatccatcatgcactagggcgatgaaacatttttgtcataccttaagaggttttagaccatgagaaaccacatccccgaagtcaccgagtcagcagtgattgaagatttctaccggggatccaacgactcggccttcgtccaagccatactgtaaaaagggccgaccacctctgaacaactgttttgagaggcagacctctacatcaccgctggcgagcgggcccaggacctca

SEQ ID NO: 39168 - DNA, 542 bp, Zea Mays
acaagagaagccatgccacatacaaccacaccatgagattgatctgtggaacccactgcgcaccactacaaagatgtcagtgatggactcgctataggagccaaagtaatggacgatgccataccaggactacggctacacgcgaccctacgcaggacccaccacgacaacccaggcgagccaatctttctttcacacacactctctctctctgtcacaaatcagatctcccctgtatggtcctacccttgagatatagaagggcaggcccccctcctttctctaacatgaacacacaagcacatcagttgtaacacgctctattgtaatactacgactgacactacactagagtagggtgcgaacccgatctagtataacccttgtgtcccaagttctttgtttgaatcctagtgattcaccatttggagtgattccacgctagcaaccatgccaaacacaaatcctattgtcccccgatttccaaaaccataacatttggcgcgccaagtaggggaccgttagcatgccaattgacatct

SEQ ID NO: 39169 - DNA, 300 bp, Zea Mays
ttgaccatgtcccttgtaatgctgtgtcccctcccttttatagtttaagggaggtacatacaaggatgttgagctccgtcatgcgggcccaggagcataatggaaggaatacattatgtgaataattaatgctgacagcacacaaagatctttgctagacgctgtgttgcttctccgactggttactgccatgtcttgccgtgtccgcaggtgggtgatggcttgttgcagtagaatacggagtagcctggtacgcctgttgtgcatagaggcatataggcggagccgttcagattccct

SEQ ID NO: 39170 - DNA, 678 bp, Zea Mays
gtgaatgtgcgaggagaagaagatggtttcgccgcctgggtgaggatctaccagtagccttccgcgtctggtgtgcgcagcaagccgttggcaatttgagccaggactcccccgactaaacccgacatattcaatgcccgagcgaagtcaagcaacaggttccgagggagaagcgggttctcgcgttggagcctgacgtcctgctccgcttgggcatggcgatgatcatgatgacgggagttgtggcgctcgcagagcgctctgttgtccggggtttccctactttagaggcttcgtcccgggagacaggttgtgcaagatcacgttccccggcctcatggtgacgtcgtatgttacatcgcatgtttcgatgtcgacgtgcgtgacgctaggggactcctcccccaatacagtgggctcatcgtcggagaccggcgcgtcctctactcttccctagatgaagtggatgtccgggaaaaaagagcttggtgcgatgcttcatgctccaaccatcccttttgagggcggagttttctcaggagtatgaagattacaagtgagctttgtgggtgcttaggtgttgtcgatgagggtgagtatcgagtgagatggggtccgtcctcggccttatatacacgaccaaagagttatccctttacaagttgtgatcactatcca

SEQ ID NO: 39171 - DNA, 352 bp, Zea Mays
gtcttccaatacttgattagtcctttcagtctgtccatcagtctgaggtaggccgaactaaaattcaacttcgcatccgtattctcatgaaaacttttccaaaatctgggggtaaactgtgatcctctatctgaaacgatcttctttgatactccatgtaaacacacaatccgagccatatataactctgccaattgagattctatataagtagtcttgaccggaatgaaatgagcccctttggtcagtctatccacaataacccatatagaatcatatcctttcgaggtgcgaggcaatccagtaataaaatccataccaatctcttcccacttccactcgggtatcttca

SEQ ID NO: 39172 - DNA, 714 bp, Zea Mays
gtcgaaggagaccatcaccaagtctagcgaaggtgaactagtccggctgaagtatacattcagatatgaggataaattcgatgaaccaaacgatgactggctaaaatgcatcgaagttacaagtgatgaactgctcggatcatattccaaggcagaagataatgcattatccatagccatcggaagttgagaaaagaagagattgaacagagtttttgatgctattggcttcgtctaccccgactaccgctacccggtgcgggggcaagggaagaagaggaaagttgttgctctggcttcctcggctgaacatgtgccgaaggctgcagtcaaaaagatgaaggtacttacccaccggccacgttatattgagccagtcgtggtgcctgagtttggcggggaggcctcttcagctgctgaatcaagagaaactgctcctccgatgcagagggctgaagaactggctacaatgccgaaggcaccttcggttgagctagttgaaacgaaggctgacaaagataaggctgaaaggtcaacaactgaagaggtatcaaagatgccagggactttaagccctcaacagaagcaacagcgctgagggcacaaaagagttctgccataactcctaggaggaggatggtaaatgtattagatgtactggaaacaaccgactccataagtctcgctcccaaagggaaggttgccgaagctgac

SEQ ID NO: 39173 - DNA, 473 bp, Zea Mays
aaatgagctgtcttggtcaatctatccacgataacccaaatagaatcatggtgccaggaggtattgggcaatcccacgatgaaatccatgcaaatgtcctcccatttccaggatggtatgggaaggggttgcaaagggcctgctgccttcaaatgactggccttgattctctggcaggtgtcacattcggatatgtacttagcaatttccctcttcattctggtccaccagtaaaaggatctgagatcatgatacatcttattactgccggggtgcatggagaattttgaaaggtgagcttcatccaatatcttctttctgagctcagggtccttgggaacaaccaatcgatctccaaaccataggattcccctgctgtcctgccggaagcatttgtatttttctgctttctgcttgatcatttccttaataacctgaacacccttgtcttcaatctgtgccctgactatttg

SEQ ID NO: 39174 - DNA, 437 bp, Zea Mays
taagtatgcaagtcaattgtaaataagcttagtatctttgtaatctctttttattgatgacacatttccactttacagagtacattgtcgccccagcagttttgaaatacagcctagggataaaactttctgaggtgctctatgttccaggagttcccaacttctgtgccatccatctgagtgaggcgatatgatccgggccgagtgacttctgccactatgaaaggtccttcccataagggtgataacttgtgtcgtccctctcccgttagaattcggcggaggacgaggtctcctatcgaaaagaaccgttgccgcacagccttgtcgtgatagcgccttagagtctgttggtaccgtgctgattggattactgcattcagtcgttcttcctcaagtacatcaacgtcctccagcctggtggcctcggcttctgc

SEQ ID NO: 39175 - DNA, 659 bp, Zea Mays
ccggccaagagggaagagcggaggagaggcggctcttgcagctgtcgggccggggaacaacatcggaggggctagtcatggtcttggctaggggatttctgatcgcctcctctcctctcctgccccgccgtgccgcaagccgcaatgcaactatgaaatctgagctcgccgcttccctccgccattcacgtcggtgacatttattcatttccttcattcaggtaacatcctcgacgccccaacatctatatgtttcgaaaatgcacactgccagtcagtctatagctgattgcgatatggatcatggatcgacagtccatgcccttcacacaatcaaaatcgaatcttggttgcacaactggaataacgcacatcgttttcccccctcaacataggatcgtctctgtctgaaagcacagcaagttggtatttggatcaggactcggtaacacgtgtgcctgtttttttcactttttttttttaatttttggtgtggagcataaagccgatgaccttacaggcactaacattgtaccctgcatctctcagtagggagcaaaaacggcagcgcattgccaggacagaggtcatcctgaagttctccttaagtcggacacttagaccaggctgacgatgtcagcttccgagttcagaattcc

SEQ ID NO: 39176 - DNA, 491 bp, Zea Mays
tggggttatagaatataacttgctgggggtactggtggcactgtaattgattggctattttatgttttttttaccactccttgtctgtgatgaggtcgactgctgtacatgcagatgactaggtgggatgaaattttgactcttccagttcagaacccaccatcattggagttctcagcagcggatatctcgtggtcaatggtggagggctggagggattctatggataggcttgcgctgattccatattctagggtgaatgactttgtcagaggagagtcgaacaacaaagattgtccatcaagatttcatgttgaagcacggagaaggcgtcctccgacaatgaactgcaagcccaaagttgatgggatacttgagtatattctgtaagcaatttgaagcattacctgtgtttttcatcagacatgaccctaggctgtaggttgtttagttgtctcacctcttcaaatgattatattagtgcagtactg

SEQ ID NO: 39177 - DNA, 365 bp, Zea Mays
ctttttcagctcctcagccttgtctttggaaacctttgaaggagcaggcgtcgccacgttcgagggcctcataatagcatctagcatgtttgctattcttttcccctttttaggaattcccaccgaccccctcttttctgaacacacaagcacaccagttgtaacacgctccagagcaatactacgatcaacactacactggactagggcacaaccctatactagtataaacccaccgtctcaaacctcacgttagagtccctttgattcaccattcggagtgagtccgcgctaatcccccatcgaacacaaattttactacccctagtttccaaaaccacgatagttggcacgccaggtaggag

SEQ ID NO: 39178 - DNA, 311 bp, Zea Mays
gtcagagccagcagacggtggcatgatggatgtttgcactgatgtgcctgatgctaggctagagttatcccgggcggcgtcccgcacctcatcgaccttggagcgcggtcttaagggtcaggaggctggtctggattgttctgctcccatggaagtgggtgaaggtccttcagccttagaggtggctgttatagagagcttggccctcaaggatggtgctagcgcttacccagcccccgagggtgttgccggggatgacccgactcggatgggtagcgcgagctatgacccagcccccgagggtgttcgag

SEQ ID NO: 39179 - DNA, 1197 bp, Zea Mays
gagcgcccgtcgctggtcgccattgctgcatcaggatcttgtgcgagggtggcgtcgggaagtgggctcgggggcggggcgacgtgtcagcgaggaggttctgcagcgtcgaggctagggttccaagaaacctaggcaagggagcaggattctctccgtttgcggtggctgtcgcggtggtgggtgtgcccgcgagtggggtggctgtctcagggggaggggaaggcgcgggcgtgcagggcgcgagctcggtggcgagaatggtggcgctcggaggcatgaatggcggggcttccctcaagcacggagatctcaaacatggagatctcgcactcgctttccctcgacacagagatacctcaagcacggagatctcgcacggataggtcgaaaaaatggtgggctcgtaccttctacaggagaacctggtcgaaggagcattggagcagcgattggggttggacgagaggccgatggcgctggagacggatcttggcgtaggcgatcttctgatctccttgacctcgatgacggcgccatcgccgggcttcttgagggggatggggggttgtctcggcgagcgcggatctgggggtggcattgggcaagggcatggccttgactggtgtggtcatgcggatgtcctccttccactcgtaatggggtgagaacgatggcgggacacaacgtgtgggtgataccatcgatggaaggggattgcgggctcgggggcgaggattgcggtgcgtcgcgggggaggatggcggtcgccggcggggatcacggtcgggggggggggcgaggaaaggggatcacggaggcaggggtgggcgtgaagggcagaaccgtgcgctgtggtggaggttgcgcgaccaaggagaggcgctggcaatagatactgggccgcacgttgaagaggaggggcgctgggctgctgggccgcatgtcgaattgctgggctgcacgaacgctagacataggcgctggtatgggatttatttgattagtaccataccggccactgaaagagacggaacgtggcttataagcgttgttgtggatcatctgttgctcattctaactcctccagctctagtgccacactgaggtatgcctttttgcgcggctgctgcgtgtagaccggtggggccacggttcagaggcagaacggccgttggcagaacatgtcagaggtag

SEQ ID NO: 39180 - DNA, 317 bp, Zea Mays
cgatgacctctacgcaaggattcgcgctgatcgcgatgattcatgcaggactcaggcaggatagtgccgggagggtgaaaagatcagaaggggagtggatttggtcgcggagtgaagcttatcaaccacgcctggagccgtgcaacatggccagaccgccggtgtcgccgtggtactccggcgacctcatttacgccacgtcgtagctcgttaccacatggtagtaaccgtggcatgcctagactcaccactttagaaccgttgcactggcgagcgccacgactgacccactagtgacctcccctctctccgaccgc

SEQ ID NO: 39181 - DNA, 493 bp, Zea Mays
caggcttctgtctctgaacgaccaccaagcagccatagaagacagtgtatgtgtggtaggccccttttttggaattctacggtgtaaatcactgcataggacagactataggtgagagtgtgcaaagcaatactaaggaaccactcaatgtgtcaagctaaaatgaagctcaccagcgcggatgggaccaaaaattttattttctctaatgtcagctatgaattcatcgactttcatatggaagacccttacaacgatatcggaacgatcgcatggctgctgaccaggctcgaagcgaagggcatcgactatctccttccatttagggttgcatgtgaaggtgacgaagagatccggtgggccgtatactctgcagatggccatcgcgtcctggtagttcatcacatggtaccttcgaccgcccgtaaaagatgcaggtacaataactcttccaccaaccgagtccgcactggtgagacccttgccaatggcg

SEQ ID NO: 39182 - DNA, 1129 bp, Zea Mays
tcttctcggcgctatttattcccctatggactaggaatcataacagtgctgatgttgatggggttggaagacatatagacagtactgatgttgtcagagtagaccagagtggtgcggcgcagaggagcttgcagttcttggagtaactggcgcaaccaggtggcgtcagcgacggctttcgccacacctcagtattcagcctcggcgctggatggggagaccgtgtttaacgctcaaaggactaggagatgagactgtcacccaagaacacggcgaagcccgaggtagacttgtgtgtatcaggacaacttgcccaatcaacatcgtagtaaacctctagctcggtctgtgtacaaggtcggatcaacaagccgagacgtagagtgtcatgaacgtaacgaacgatgcgcttcagagcagctagatgaggctcacgaggatcatgcatatgaagacagatctgctgaactacataggcgatggcagacctggtgaagatgaggtaatggagagccctgccaggctatggaaatccacagggtcagccactggatcaccaacagtaccaggcaactttggattgacattaacgggggtggagcagggcttgcactcaaccatgtcgacacagtcgaggatgtcaatcatgtactggcgctgagacatgaacaatccatctgccatgtgttgaacctgcatccttaagaagtgatgaagtttgccgagatcctttatagagaattcttgctaaagcggggtgatggtgcgacagagaagaacaactgaagaagctgtcagaacaatgtcatcgacatataacattaggtacaccatatcatcgccgcgacgataaacgaatattgaggtgtcagacttcgcttcaacaaaaccaagtgagagcagaaatgaggcaaactgactgtaccaggctcggggtgtttgcttgataccgtataaggaccgattcagccgacagacaaaattcagatgagcaacatcagcaaaacccgacggttgtgagcagtatactgtctcaatagagtcccatgaggaaaagcgttcttgatgtcaagctgatgaatgggccagttgcgggacagagccaaggagaggactgtgcgcactgtag

SEQ ID NO: 39183 - DNA, 381 bp, Zea Mays
atggtgctcactgccgatctatgcgcagcatgagctccaacctgcgtaaccgacagctacatcctgtgctccctcgcgccaccgttatgtgggcccgccctgtcatcatttttccttgctgtgtgctcatctcaacggaatccgccgttctcgcgtggtcagctctcccgtcctcctcgccgcggattccgcgatctcctaggcgtcgtcgcctactctacccgttggggccttgttcaccacgatgttgtgccatgtatgccgccctaaccagctcaccgcagctatatagcatgagccccttgttcatccatctgctgctggcttcgcatcgcgcgacggcgaatgacgccagccacacctctgccgttgtagcgtttc

SEQ ID NO: 39184 - DNA, 281 bp, Zea Mays
ttttacaagttttagcacttatttatacattgaaaatcaatttctgtatttatttacctaatttacatgttctctggactgggccacatttatcgaaaagcgcaggggggtctggcgaaagttttccgagactcagtgaatagggttctcaggatggcgggttgataccctttaaacccagggtttcttttacaaaacttgcggccgaaggggtactttttgatttcggtcgcctgatctagatcctatggctccgagtttgaagtgccgcgatctaatct

SEQ ID NO: 39185 - DNA, 315 bp, Zea Mays
gtaagtgtcaacaccatccttgaggaccaagttctatgcagtagccgcctctaaggctgaaggtccctcagtcacttccatgggaacaagacgatccaagtcagttccctgaccctcaagaccgcgctccaaggtcgatgaggcgcgggacgctgcccgagatgaccccaacccggcgtcgagcacatcagcacaaacatccatcgcaccatcatccgctggctctgataacagatcctctagaaccatatcttcaagagtttgatcaaagttcgccagggacaattcttatagaccaatgagggcagacagagc

SEQ ID NO: 39186 - DNA, 580 bp, Zea Mays
aagagggaagcggtacaaaggtgcaccatgcatcggtacagatcgcagctagagcaggaagtgtgttttccttggcttatgaactctacaattctgaatttcgtagcatgctgttttcagttgaaaggatcccgctttgtttcgagctgtgatgggctctgttcctcttaaatggaagctggctgatgttggccgtggtgggcatgtggttatacgaaagttgaaaattgaagtcctctgatgaaatccattctctaaaatttgttccctgattatacgaaagttcgtcaaaatcatgttcatttttaactcatgccttcccatgtgcctttagtttcatcattaacagcaccattgtagttcaagcagttttccttgggcgccttttctatgacaggagaatatttttttgcaagttcaaaagaacaaaaaagaagatatttcttgatgtggttgtgtactgactgtgtaatgctctactcttgacatacctgtacaggttaacaaattgcaaaggcaactccaagaagagattgatttgcacatggcgttgacagatgccattacatataatgcggcg

SEQ ID NO: 39187 - DNA, 299 bp, Zea Mays
ctatggatatataggagtcccttgtcatgctcgagaggctctattttgtgtccaacagtgagcatgcctctttgagccagtcggtacgatacttgtcaaacaattacctgatgtccaagcaagctcataagaagaaagttgtgcccagatcgccccctgtctcctaaatctccaaaatctgtgaaggaggttctagaggaaccaaagttcagttgtttgatctggatgagtgagctaactgaagcgatgtccttacatagaaattccataaatttcatactattttcttcatatatttt

SEQ ID NO: 39188 - DNA, 307 bp, Zea Mays
ggaaacaacacttgaattggataggaactcagcagagtgggctagccacggacgggctgttcttcgcggtgcgacggaccaatttggggggaattcaaaattcgtgcgctctggcgaacgattgagggtgggattggaggttctggtttcgggatgatgtagcgcagctgccctggccttcaatttatagagggcttaggcggtggcgcataattcggctaagcagtgctgacggccggcgatagagaagaaccttggctcagtggcttcgtgtctaccgtcgtggcgacctcaccggcaacgattt

SEQ ID NO: 39189 - DNA, 708 bp, Zea Mays
gtcctgctcatgatcaccaattgtcctcatgggtatccgttgagttgctccaaccaaacttggatgaactgtgttgttgtcttcaaggattcctagcgccagtaacgcagccgggggagttacatcatgccgaccatctgacctacaaggtaatgtcgatgttgtattctctccacactgcactggtccgctagccgtcgccatggtgtatgccctaaccctcctaggtcaatgaactaaagcggcggctgtgtgtagccctgttttattttttggagttatgctcctggattggccaaaaccgtcctggccaatattcatggtctgttcaaaatatcctgcatgatttgcatgtcccgagatttacgtgtcccgaccaatttacgattacctgcctattctgttacagcaacataaactcctcacccccacgtgcgaccccaccacgaaaccatgatcccagtagacctgctcgccacccacaccacgatatgcatgcgtcagatcgttatgcagttgttatcggcaatttaaacaagcataaatgtccaaccacatcctgctcgcgtcccgacataccaatatgcccatttacgcacccactaacggtaaaatacgtatacataaacgtgtgaatcacgcctgaccccctattccctattacgcatccgtttcaggcaaattacttatgcataaccattgaactcc

SEQ ID NO: 39190 - DNA, 424 bp, Zea Mays
gccatatagaacttcaaatggagatcgtcccaaagaagagtgtgggcaagtgttataccaaaactccgccactgacaaccatgcagaccacttagacgggtaggattgcacaaagctgcgcagaaatgtttccaagcattggtttacccgctccgtctgaccgccggtctgtgggtggtaggatgaactcctctgtagctgtgtgcctgacaaacggaacaattcacgccaaatgttgctggtgaaaatgcgatcccggtcagagacgatagacttcggcataccatgaagtcggtagacattagacatgaaagcttgggccactataagagcagtaaaaggatggcgcaacggcacaaaatgaccatatttagtgagacagtcgaccaccactagaatggtgttgtattggccagaggaaggc

SEQ ID NO: 39191 - DNA, 550 bp, Zea Mays
gaagtgcacgtgctatacgaccagctgcacccgaacgtgccaccgaaggttggagcaatgggagccggaacatctggagcagctgatggaggaccttatggggagttggatctctttggagcccttccttccatgaacctcgcagatgatcattctcccgaagctggcagtggagcgggagcagccaaggatgaagataactagagtagtatagtagtaggtggtttccttatgtaaattaaataaggaaagttgagttgtaacaatgagtatgtataattagtaccagtctggcattatgtaataaaaggtggtgtacttgtggcatgtgataatcaagtatgtttttcttcctcagatgccatcaagaactcgtgctcaagacagggcgggaacttcctgcggcggggaggaaactccgaatttgccgcctgtacctcccacgttggctgaggctatcgctgccttagttaatgtcacttctgataacacccgtttcttgcgtgaaatggctgggaatcagtttcatcagcagggaggcagaggtcaa

SEQ ID NO: 39192 - DNA, 361 bp, Zea Mays
caagtagggagagatcaacctcgagtccttcctacattcgcctccgaccaccactataagtaaatttgatgacatccaaatccttaaatagtatgtagatttataaagggggtagttagaacaacacatggggggaatataagaattgctcaagaatctcgcacgtgcatttgaaaaatctactattccaaggttcccatcatgtgatgctagcaccgagatgtctatgccaaacacattgacaacaaatggggtttctcagccccaaccattatatggtattgctaatgaattcatatccagggcaaccacaaccaccaccttcattatacgataaactggtgccactaagcatgacaag

SEQ ID NO: 39193 - DNA, 382 bp, Zea Mays
ctatcagtaaactagagtggccaccacacccacgttatctggaactgaccatctgaaaagtgaggcaagagcttgaacctggggacaggagagaggtcgactgaagagcttagcataatcttctagttcctgttgattgatatgatctctgtccagatcaaactgaagaactctcatcaccattttcttagtcttggggatctgctgaatgtgctcagcgcccaatttggccacccgcctacttctgtggagctcctgcggaggtggagcaggaagtttttttttcttcataatcttgggaggaggcagtaagctgccgatggtcctggacacaagcctgaagaaaagctgctgcttgctaggtggttcatcccctggcgcc

SEQ ID NO: 39194 - DNA, 333 bp, Zea Mays
tagagacacaactcgtcatcacgaataccctgcgcagcagggcctcagcggaaacactagaggcaggggtagaggccgaagcccatagcagcgaaggttctattgccttttccatggcaaagactcggcacatcccaccagggactgccctaaaaccaaagccataaaggatagaatggccagaaaccaactggctgacaaccaaagagctatcgcccacacctaccatccccaacaatataactagcaccaattccacaatgagcattaccatccccactagcaaaaccacaacatataccagcaacaccaagaaatcccagctctaccgcc

SEQ ID NO: 39195 - DNA, 486 bp, Zea Mays
ctgcaacgaaaagacatgtttagggcatgtttcctagtgtatgtagaaggagaacgatgctttatattgtagctattttgttccatcgagtccaacagcaaaccttggcgctagatgaaactttgtgactctctggtgttagtgacggctcgcggatgaaggcagcccctctgttttgtgcgacacctgatccgtgtcctactgtggagttagcagccaaaccaaaaaacaggttagagccacgagagctgtagttgatggggagagggtgcagcgaaaagagctgcactaaaaaagaaacctgctcagtcagaagggggaaatgcttgttctatagatggaaaaatgcctttaaactataatattacggcctaaacggtgttatggcccctccgagtgtaatgtggctgagtctttaatatggctggaacagcgaaaagagttgcactaaaaaagaaacctactcggcagactctgcagtttgtg

SEQ ID NO: 39196 - DNA, 410 bp, Zea Mays
cggtgatacacggataatgactctgggtaaaaagatcttcgccgtggatgaggtcggggcactgtggccgccctattgacgtacccccttgcgtcgtgatgtggccgcgcggctatcgtggtgatgatcgccgttaacccaagcacatcacgctactgaccttgttactacgctgtagtaggtcacggtagatagcccctctgtcgccggggacttaactcagtgaatgccacattgagcagtctacggtgactcctcccctttcttaccgctagctcttctccgcccaaattcgtcgtactcgcgaccgctctctataaattgatgccccagtgagcttcgctaggttattacgcgcccagtgcaccagttgtcgcctcttatcatccaccgtagcgtcccaatttcgc

SEQ ID NO: 39197 - DNA, 594 bp, Zea Mays
gatttggattattttgctgcattagatgtggctgcggcggagtcttcgccgtggctggagatgggcgcagtgttggatcccccggctggtgcgagggtcgaacgccgtcaacgaaaagtggtggcgaagcatagtgttggtgagaggtcgcgaagtggcaggcgccgtcagatagggttggagcgaactcgtcttcgtgtagatcggagtaatcaacgcgacttgttgtcttcgtcgtttgggacgagtattggtgagggggacctatggaatttgtttgagggtgaggaattgaaaatgatgttgtttaattatcgggaggcgggcattattccgaaggttgagccgatgtagaatgtgtggtgccctcgcttgtcgtgcggtagtagagggcgcaattgtatgtctttgtgcggtgggtctggtgacccttcgctgtgtgtatgtaatctgtgacttgtattgtaatgtggcatgttgccattcgcttggcagtgtgatgttgtaagtgtccggcggcgccgttgggcgatttttgcacggggttgtcttgtgggaaagacttcgtgtcgcacacttgttgtgcttgtccgg

SEQ ID NO: 39198 - DNA, 494 bp, Zea Mays
ccggggtatggtgtacacatcaaaataattctcacttttagccttccacattttaggatgatgtccgtcaaatgagggaaaattaagttggggtaaggttgcggctaaacgtgactgataagacacccaataaggatcttgcgcatgaatcacaggggaatgaaagacatcagacgatgggattttagatgtacctttgaccggaggtggagtcagggtggttaccaccccaagtccatcgctccggtgcagagatgcaaggtgaagatcgtgattccctggactcgcctgttgcagagataaacccagagaggttgatggtaaaaaccccgactccagagccccggtgtcgaacaccttctgagtagtggtgttcgcctctttactcgccatcaattcatccaatttatccgacagagatcccacatcttgacgaagattcaacacctcagtttcgatctgaggtttccagacagaaagatctctcaccactg

SEQ ID NO: 39199 - DNA, 538 bp, Zea Mays
gttcaatgtaacgcggccggtgggtaagaaccttcatctttttgcccgcagccttcggcacagattcagctggggtggccaaagcagcagcttttctcttcttcccctatccccgcagcggatagcgttagtcggggtagacaaagccaatggcgtcaaaaactctgttcattctattttttgcccgaccaccgaaggctgcagacagcgcattatcttctgtcttagaatatgctccaagcagttcatcacttgtagcctcgatacacttcagccaatcgttgttcggttcatcaaacttatccccaaacctgaatgtatacttcagccggaccaaatcagctttgttagaattagtgatggtctccttcggcatttcctagctttctacaagcggccacactctgaatgctatatgttcttgaattaaatctctagtgccaatgaaggagcagacagtgctgaagaccttctagcatgcttcagcgtcatcatcaagttcgaccttcggctttggaaggccaaagcgggaccaaat

SEQ ID NO: 39200 - DNA, 411 bp, Zea Mays
cgagcatgcaaattttgtgatccgcttctaacaccttgtcgtacacaataccaagcttgtgatccatgtctttcagctagtaaactgaacatggcgtgtaactgaaactgcacatggcgtgtaaacgagttaattgactttataacactctcgtcgcgcggtttcgccggattactactccgcagctccgcttcgccaggatggtattatggagcacgtgcacacgctaaattggtatggttagtatcccgcccactgtaaccgtctgttttgttgcgtttaatgaacgtcgtatattcctatgtactaatctaccactagcgacgttgcccaagctcctgtccagttttgaccgtggcgctccctgcccactggtgcccgcgccgccaccatttggttcctgcgtcgtca

SEQ ID NO: 39201 - DNA, 371 bp, Zea Mays
ccgggagtagcagccgttctcgttacttaggatacccacctcagcagttcaatcaaggtcaccagcaccagcacgagcatcagcgttagcattagtagcagtaccagagatagttccctcaacagcagcagcagaacatccagtaagaaggaaatcagtaccaacatcaaaacaaccaggcacctcgccttcctgccctagcaaccaaccagaacatccaagcagcacaagcgcaaggaggaggccacaaatgtttccgctgtggggaacaaggtcacttggcggatcattgcccaaagaaggcaactcagcagccgccagctttcaacacctcaccaagacaaggagtaccacaacaagcaccaggaggc

SEQ ID NO: 39202 - DNA, 619 bp, Zea Mays
cggcgtcaagcacatcaacacaaacatccatcgcgccaccatctgccggctctgataacagatcttctggaaccatgtcttcaagagtttgatcaaagttcgccagagataattcttgcagaccaatgagggcagacaaggcagaagaaggaacaccactactttccccactagctacgtaacgccggctgttcttccgaatcagagggatttcgtcctcttcttcatcatcctcatcaacaacacggacaacacacccattggggtcagcgttagacgggtcacacccattgggatcagcgtcagtaaattcaggcatgggcacttcctcagtagcaggagcagaaggaccagcatcccgatccaagctagacactcgccgaagacgtctcttcttctttttctgcccatcagcaggagaagcaggctgattgggctcggcaagggcgcttcgagcgaacattgtcaggcctctgaatatccaaggctttactagcttccgggagaggcgccaccaccaatgttccagcaggagcggcatcagaagaatcctcggctaacatatcaagcatggcacttatctctgcatcactaggatccaaaggcacctgaaagtgaa

SEQ ID NO: 39203 - DNA, 281 bp, Zea Mays
ctactactgcgagagctgctcgggctgctatatccaaacgccgcttcttgcggctttcctgcagctccaaatagacggtcttgcccttgacctgactgaaggggcgaggagggtcctcgttgtctcctccccctggcgccgacaccttcttcgtgcgcaccatcctgacctgaagactgcatatgagagagaaaaactaagcactagacgatagcagtctatatgattacagaagagtggagaactacctagaaatctcacgagagagggagagaatccag

SEQ ID NO: 39204 - DNA, 361 bp, Zea Mays
gcaacctcagactttaattcgagcaggcagaaaattattagtcaaagccagattaaagtaaaggatcacttggcacctcggttggagaaatggatcctttgatttgttcctcttgcttcttttgtgggcacatcgttttcctgtgagttgtcaagactaaaatattggtctaatgcaattagcttcaacacagggtggatccacggcaccattatttgctacaagcgtatcaaagttcgtagctatttcaattgaaagtacatctctacaaatcaataaaccaaattaacccaatgcaagcaacggttagatgacgagactattaattgaaagagaagtgaaaagacataagagaagtcgc

SEQ ID NO: 39205 - DNA, 532 bp, Zea Mays
ttcaccgtttgttccctgtttttgtgtttcgatggcagacgacgatgaagaagcaaggatccctacagacttcgatgaatgtgttagccgccaagatcttgaggtaaacaacaagctcctgaaggagcaaatggaggagacggtccacaagtcagtgcatgatgccttcaataacatggaccttggcaggacttacgagagactggatcgacgattatcccagatcgtcgacagacttgctgtgttggagacgcaacaacaagcaccgccaccacctcctcgtccacgtcttcccgatgatgcggtgattgatgaagaaggcaattatgatgaagcggccactagagatttgcgcctccgtcgtcgtcttcatcaaaacacagaaggtatgcccgaccgccagcaaggtaataacaatcatgctcctgacgacccttatgctaagattaaattttctataccatctttttcgggtcattatgatgctgagggatatcttgattgggagatgacaatagaacagaaatttgct

SEQ ID NO: 39206 - DNA, 1177 bp, Zea Mays
cccaacttcggctgatgtgccgacgcatggggccatggtgtcaggtcttcccctccattggcgtcggtaacagaacccgagctcgccgggggcagttgagctcggccgggattttcgcttggattccgcggacccgcctcgcaccgccatgctttaaatcctcgtccccatcatccgaagcaccggaccatctccctcggccgcctaacccccaagccgtgtgacgcccaaatgcccctgtaacaccgccgccgcgtgccgtggagtgtggagggagtgcggccgcaatcgctccttgtcggtgcagccaattgggacacgccactgcaccgcgaccctctcggtgcggcagtgaccgctgggcgaaataggacatcgccacgacatcaattggagctcgaacccaccgtgctcacacctcgccgtggacgaagctgggcgcaacgaagccagtggtaaagaaactcccatttctcgcttagatttcataccctgtcgtgttccatcaattcggtttgggaatggcttatcgatgcctctggaattgctcaccggagctattgctccgccattggtgccgcgctttgtcgagggtagggcataccaatgcaccgctcgggttgggactaccttcaacatgttcgttatggcttagggttgctcttgcaatggaaaaccgtagttttaggaaacccgggcgaaattccatgcgtctccggtgaactcgccaccgtgggcggtggcggcgccgccgcatcctgaggtgtaggttggggcgatcctgtccgttggatccatggtgggcgcactcgattagatctgagtgatctcatagcatcgggcatcgcgggccgttcatttgttgatgagcgccttagattaaatgaggggttagaactgatttgagccatccgatcggatcgaacgggatcagatcaccatcgtgcggttataattgtgtaccggttcacagtatgttatgggccatcgatcgttcatcgtgcggttctagcgtctcggtagggttaggtctaatcaagaccgtaggatatcgatctaccggccagtattcaaccgtaccccttcgcggtgtcatcttgctaaagagcccctccacttgccagaattagaacccgccatccccgctttactgttctctgtgtctgggacaacttac

SEQ ID NO: 39207 - DNA, 488 bp, Zea Mays
gcaagtctccctgagggatgactgcgcatgatgtcgcaatctgtgtttgcggcaaagacatggtgtactggggtccccccatagccatggtgtatgatggaataggggaaggcgaaggtggcatgggcaatagattaatgggcaggcatgatgccgccggggcgctggtacatgacatggcataatatgtcggcggcagtggatgctgctgcggaggaagaagggtggctaccaatgttgtctgtatggttgccacggatcgcgtgagctcatggacgactgctgccaaggactcgagcgtgaggggaggtggaggtgttgtggatgaggatgtggcgggtctgggcaccgacggtgtggagattggcagcgcggcggaggaggctgagggctggatggtggtggatggagggcctgacatatccgatatcagattgttagggatcgtcgtggtgctacagtactgtgggtgcgttcacaaggtgggg

SEQ ID NO: 39208 - DNA, 414 bp, Zea Mays
acacaagtggggtggtgatttcactgaccaaattagccttgcttgatggattcctctcaaaggatagcaccaaagaactatagatgccatgggatcctggtttacaaaatctacatggactcgagggcgagtcgttttttaaggaggggagaatgttagggacatcgaccaattatgtctaacggtccatgccggcccaagtagctaaggaaaaatactacaaaggcgcagtggaggtcagcacgaaggaaacatcagagaaaatatgagaaccttttattattcatcttcctactccgtctagcattgttcttcttccccaactctctcttgtacccggatcttctagaactttatagcatcttcctcctagctgtgatttccctacttgctgcttccttcccaaactccatc

SEQ ID NO: 39209 - DNA, 457 bp, Zea Mays
atttttgtgattcagcgggggttcttctgtaaaacgcatctgacgaaggggtatagggacactacggccatccgatcttcagtcgaccactaggattagacttacccacatagcgaaccggtacacgatctgtgccgttcaatccagttcagacgccacagatttaattaccataacttgactcccgcccgcacgattgaaatcggacggccagaagaagatcaggccaaaccggtacactggattagatcgcagccctacatcgccaaaccagcggccgacgggttttcttcctcccccgaccagagcagcagtggcacacaacgtccacccagcggcgccatagccgacgcgaagtgacccagggatccattgccctaactcccctcccaaatgatgatacacagagcgcaggcgaccgcgaacttcagggaaggcacgttaccttcagcagtga

SEQ ID NO: 39210 - DNA, 633 bp, Zea Mays
aaataactgaatttacagagttatggactgagcgtactatttacagagaactcaggggcctcgggggaagatgtacaagactcagcgcatagtgaatatggacgacaggttgatttctctgtttcacggggactcttaagcaatttgcgcaaccgaaggggtatcttctattgtgggccggacgatccagatcctgcggtctggattagatcctagcgcgatgaagcggtatgccatagcagccgtccgatccaagcacaacgctcccgatttaaaaacctaagatctaatctcgagcgttcaaccgtcgatcgacgggcgcgatcgccccgttgcccaaccggtatgcatgacctaatctccaccgttggtgcccgatcagacggtatcccacctttcttcttccccagcgccaccgagcagctgcgaccgattcgcggcggcgtacacaaggcggcaagctcccatcccggaataacggcgcccgattctaaatgacagcgagtctaacgcgtagatccaaccaaggcaaatcgatctaagggtaactcaccgagatgtatgcagcccagtgccctgaccacggtgaggagcgagcacacggcggaacttttcctccggtgtccaattcac

SEQ ID NO: 39211 - DNA, 412 bp, Zea Mays
cttctgtcaggacagcaaaggaatcctatggtttggagatcgattggttgttcccaagaaccctgagctcagaaagaagatattgaatgaagctcacctttcaaaattctccatgcacccgggcagtaataagatgtatcatgatctcagatccttatactggtggaccaggatgaagagggaaattgctaagtatatatctaaatgcgacacctgccagagagtcaaggccagccatctgaaggtagcaggcactttgcaaccccttcccataccatcttggaaatgggaggacatttgcatggattttatcgtgggattgcccaatacctcccggcaccatgattctatttgggttattgtggatagattgaccaagaccgctcatttcctgccagtgcataccacccac

SEQ ID NO: 39212 - DNA, 428 bp, Zea Mays
cgagaggtcaggcaagcctcggacattagtccaccgaccaatgagtgtgtcgttgtcatagaatgtggagacccctgacaggtcccgcaagcaattatagaacatcatacctcaacttcttgtccaatgtcttgctcctcgaggatgaaacggaggtgcgaaggctccatcgatgagccaagtcctttgtcctgattggggaagacctgcacaaaaagaaacacaccagaataaagcaacggtgcataccaatgaacaagggaggcagctcctagaggacaccataatgggacctgcgaacaccatgctgtcccgtgaagcctcatgggaaacgccttacggcagggtttctaccagcttaaagcggtgtccaaagcgcactagatggtgcgaacatgtgaagggtgccagtactacgcttggcaaac

SEQ ID NO: 39213 - DNA, 303 bp, Zea Mays
gaggaggggcggcgaggaatctggacgaccccgcgacaccgcgcagagccccggccccaaatcgaggccacgcagttcgtatcccttggaacacggttggctcccagagcgcggggcatcaatggcggcttcactcagcacgcgatgaggttttgcacgacgaccactacggtgcttggttatggctcgatgagatgggccctagcgtcacctaaatacaccgcgaagaagtccggatacgagcggaattggtgagcttctcctacaatctcgccatggcggctcgatgagatttggttctcc

SEQ ID NO: 39214 - DNA, 398 bp, Zea Mays
gtcggtaccctgaatcaggggtaccccttactgcagcattaaagacacggtgcccgcgcagccatctctagtcgcgcggtaaacaacacccaacctttccgcatgggcagctccggggccgccgcgtggcaggaaaaggtggtatactccaggataccttcagtaggtccggacctcctcgagaaagcgctggacccctatactcacgacccggatctccgagtatggtccagggctcccatgcaagcaagccagaccccttgggtgaggtccggagtccggacccctctgagcggggtccacgccacccacagcgaggtcccaagacaggggataccctggcctaagcaagggaccggtactgacacgtgtccaggctttatcctatgctcttgcgc

SEQ ID NO: 39215 - DNA, 766 bp, Zea Mays
gacaagttgaccctttttgatttggtatgctccagcagccaagatgtcattttgtagcgtgatgcaccatactggggaaagcaggttaacttcattatgtttctacttggtgattttgtataggtgtccaagatggatctttatttgacgacaacagaccacattgtcagatcaagaggttcgtttatctattttctctgttgtggttacagtccacgctatgttatcatgatttattaagtgtcgatcaaacgttgtaattcaaagtctgaaccttctttctaagtccgttaggaggtatggcctatggctagttctcctaccggtatttcctttgaagatgaatacttcgaatgttatccttttgacctttttgtgaagactgatgcagtttttactaatgaaacaaacaccaactatatatgacaatacaagcatacaggggtgtgcatgtctacatgcagattgacagtacaaactgaaaatggcaaggaagaatgtgccactctattggatcagtgattgcgtttcaataaatttgaactttgttctgaacttaccatttcaatctaaccttctgaacttatctccctttgcatctgttcctgatagatttgactaaatatcattaacctgctacatgcatgtttttttgttgctggtaatttacttctaagcttttattttacaggaatactgcttcttggggaaacattgtctcgaatttcatttaaatatttagatgttattaccattacaacattgt

SEQ ID NO: 39216 - DNA, 462 bp, Zea Mays
gagttttcacttatacaagcatgtaaggaccaatcagtcaaaactggtgcatatatcctacaaagtccaatcttcctttcactcatttgacaatgtaaactcaatgtaaatcccatatgcacgtgtaaggtacaaggtagtatgctgatctatcatatataaagtcacatttgcatttgttaattaagctatttggtagatcataccatctgaattccattgtgttagctaatttaaatatggatcttagtgtctaaagtagcatatgcgaaagagttttggttggtattacacaacatggaatatttaatatttgagtatagcaggacaatcctcagagattaaattccatttaactaacaagcaacacaaaatattcagacacaattggcatcatggttctgaaatatggcatgtggacgcaaggtcagtgtcacgacatcacctaacaacggcgcaaac

SEQ ID NO: 39217 - DNA, 372 bp, Zea Mays
ctattcagaaacaaagggggaaaagaaaaattgcagcttcagcatcttctagtgcgccaaaggcgaagaaagtgaaggtcttgacacgtagaccgagacgcattgagacggctgatgtgccaaagcttattgaacgtgtagaagtcatcccttctgcccagaatcaagtcttgctatgtcgatcgaagctagcacagacccagccgaagagccgaagttagagaaggcagcaaatcagttgaaggtgttgagcccaccagttacaatagaactgtcgaagtcatcaagtgtttccgcagtgactccaagaaaaaggagaatgactagcatgctagacgctgttttggaatccataaagacatcagctcctgc

SEQ ID NO: 39218 - DNA, 301 bp, Zea Mays
gtcgttgtgtcatcacctgcaagcagtctcacatgccagagctctgcagcaatgctgcccacgccaccaatggttgaagctcgctcccttctatttataccccgtgcccctccctgctgctgccatggccgagcacttcccctctccacggcgccttctccctcctctctccctctttagcgcagtccctccctagcgcagggaagcttcttttttcccatggcgctcggcactggccttcctctgcttggtgcatggctcctctccacagcctcccatggaaatgcaggccccgctctcc

SEQ ID NO: 39219 - DNA, 459 bp, Zea Mays
tgaagcaattgataaaataagaaaaggttttctctagtgaggtagaaaggaggtgaaatgggggcattgcttggtggcatggggaaaagtgtgtcgtcctttgcaacttggaggtctgggtattgctagctttcctgagctctactgggccctccacatgcgatgactttggttgcaaaaaactgacccaagacacccttggtctagcctatccattcaagttcctagcacaacccgatccttcttctccaaggtgctgatctctgaggtggggaatgggaccaacaccatgttttggacagataaatggatccatggcaaaagggtctcaaatattgctcccagattgttcagcattatcccaaaaagaattattaacagaaggactatgcagcaggctctattgaacagacgatggattgcatacatcaaaggggctcttacagttggagccattgt

SEQ ID NO: 39220 - DNA, 606 bp, Zea Mays
aaaacagcagattctagatttggaagaggagagggtagtaaagcgaacaacataaaggacaatttccttcctatgtccttttctgttgagaaagcataccttggtttaccgacaccaaggaataagtagcaaagatcactaataactgtattttaaaaaggggggaaagggtcaaaatctggaagcgcagtgagtaactgtccatgccgtagacaggggacaatgaagacgaaaatgtggctgcaatataaaacgaccaatgtatcccaaattctaaggtgcgaatggcatgaagcaatcgactaatcttggagaggaaaaatggatctggtagaagcatgaaacattgggggaaaaggaatacaaaccttgcaattgacgaatcttgcgaaggaaaatggatctagtaaaagcatgaaacgttggggaaaaaagaatacaaaccttttcctaacctgatgaatatgttggacgacggaactagctgtagatgaagaatacggaggatgtaaggacaaagaagagcgtgctagaaatggagagagtgaggaggaagatgggcgaagccagcgacgcaggcaacagataggtggagtgaggaggaag

SEQ ID NO: 39221 - DNA, 273 bp, Zea Mays
atctaatcgaagatgtcgttcggggtcttgggtggggtgtggaggcttcgctccatggaagatttctcattagagttgatgtctgtcgcaggtccgagctcctcgtggtcgggaatccttgttccgaaatcgccggtgaggacccctctatgttgttcgcgttgcctttcttcacgtatggaactagttcgtgttgagtttcgtgcactggttgccgcttagggctgtcgccggccatggcaccaccgtgtttggcgctgtgccgccgacctg

SEQ ID NO: 39222 - DNA, 342 bp, Zea Mays
acaccttatgaccctagcatgctattgagaaagaatcggagaatagcaagggatcaattgacatactcccagatcattggctcgctcatgtaccttgcaagtgcaacaaggccgaacatctcatatgctgtgagtaagctgagtcggtttgtgtcaaaaccaggagatgatcactggcgtgttcttgagagagtgttgcggtatttgaaaggtactatgacatacaatattcattatactggaaacccaaaagtgctggaaggctattgtgatgccaactggatttctggaacgcaatgtgatagaaagtgcatcgagagaattgggtatgagatcaatgtg

SEQ ID NO: 39223 - DNA, 538 bp, Zea Mays
tgagaagccaagggctggaaccgagcgtgaagtgtttttgcaatatgcacgaactattgtacgagacgaaggccactcgaaaagtgcagtatcacaacaactttggttgttatggatttagtgctcgttctaatgcaagttacccagttccaccatttcagaaaaggtggcctgggtcctggatggaggaatggttttatgttaagaataatttgattgaaagggaggacataaaggggattatccaatgccccatctagtctcgctttggccttcgaaggctgaccgtggtgattgaaaatgatgccaaagcatgtcaaaaggctttcagcaatgtctgttctttcattggtacaagagacctgatccaagagcacatagcctacagggtatggccacttgaggataactgggagatgccgaaggatactgctggcaggtccagtcaaggtggattaattcatttgaaatataccttcagatacagagaccggtttgacgaacgaaatgacgactggctgaaatgcattgaggctac

SEQ ID NO: 39224 - DNA, 359 bp, Zea Mays
gccggatctccttgccatcttcaatccatggtatgtgcccctaatcgatgcgctatcgttcaggcatcgtgtagaagtctttggattggggaatggcgcactggcgtgccctgggaccgcctcgccggcgtggctccggcgttggtatgggggcgccaccgtcctggggtctgtcagaggaagagagaacgtgggctggatatctagaaatcaagggctaagactagacgatcgcataccctttcgcagcattcggtctgatccgttgatctagatcggacgaccacgagacgattccaaaacattaaatctggactattgatattagatcctacggctacggtagtttaccgtgtcat

SEQ ID NO: 39225 - DNA, 527 bp, Zea Mays
tccagatgaagtggctgatgatgaaaggaagtaggagcacttcatagagggacttaatggactactatagtatgcactggttgctcataccttttcatcatttcagagactcttagataaagctctagcgattgaacacaagcatgttcaaatgggagaaatgaagaggaaggccattacctaggggcagggtagcagcagtatttgtcctcgttatgctctgccctagggtacaccagctcatcctataggaggaccgcgcctagctcagtacgctccacaggggactccatagacaccccacactcatcaggctgccacactggcatcgcggcgagacccacaggacagaggacacaccccacatgcttcaagtgtagttagattgggcactatgcaaatgcttgtccaatgggaaattccagcacaccagctcataacaaacaacagactccaacctttggcaagggattcagcattgccagggtcaaccaagccagtggcgaggctactgcttatggagcaga

SEQ ID NO: 39226 - DNA, 348 bp, Zea Mays
caaggggctaccgtcgagtgtattcgccgatttttgatccagtctcaacatctgtataggatagagttgagactacagggggtgttagaaaacttaggatacccgtttagggttttggggttagcccattgtaattaccgtcatacccctgtttgtgtaatgggccaggcccaataaccttggtttattaatacactcccaaccctgagttagggtttcccattccaactgatttatttcactgacatgcaatccagtcccccatctgttagtgagagggaatctgaaagataatcctatcatcttaattgttcctaatatatccaatcatatgtacttagatttacc

SEQ ID NO: 39227 - DNA, 715 bp, Zea Mays
gtcgttgccgacttaagccgatcgctccgttagcagggcatagtggtcaccctgagttaagtaagaatgtaggtcgatcatgaacaaactgagtattcttgaagccttttttattgaagacatatttcccattttacagagtacattgtcgtcccgatagcttttgaaatacagctagggataaaacttcctgaggtgttctatattccatgagttcccaatttccgtgtcgtccatctgagtgagacgatatgatcccggccgagtgacttctgctactatgaatggtccttcccataagggtgacaacttgtgtcgtccctcccccgttagaattcggcggaggatgagatctcccactgcaaaggatcatcgtcgcacggccttgtcgtgatagcgtctcagagtttgctggtatcgtgctgattgaattactgtgttcagtcgttcttcttcgagtacatcaatatactctagcctagtagcttcggcttctgctatgctttcaaagaccaaccttggcgccccaaacttgagatcagcgggtaatactgcctctgacccatagaccatgaagaaaggagtatttccatgcagagctcgactaggttgagtccttaggctccaaacgacgtagggcaactcccttatccattttcctgcgaacttttcatttttatcgaagacctttttcctgagtgcctctaatatcatc

SEQ ID NO: 39228 - DNA, 325 bp, Zea Mays
tttggtttcagtttgaattattgtagcttcgacttcttcctgtttcgtttcagcttcgggttgcgccttagaagctttggcaatttttctgccaggagcaggattaaaggtttttgctatttctaatacaacatctagcacatttaccatcctccttctcttaggagttgtggcagaactcttttgtgtcttcagcgctgttgcttctgttgaagggcttaaaatccttggcatctttgttacttcttcagtttttgacctttcagccttatctttgtcaaccttcgtttcaactggctcaatcgaaggtgccttcggcattata

SEQ ID NO: 39229 - DNA, 366 bp, Zea Mays
gtcttagagtcgacaagggcgtcaactcctgctcctgcaaaggagactgccgaagctgctatagctcgcgttgaagccgaagctgggccctcactgcccattgaaatagagcctattggaactgggcagagtattgaacaaggaccttcagacgtcggtctagctcaggagaaagaagatgcactcgagaaggttgaatctcctactctcgaagcatctactgaagagcttgactttattatctgacatgcttcgggtaaaaagttgtcggaagaggaaattgcggaagccaaacactatgctcgggaactgaagtacccaaaaggggccttggtgtataatggcaccaacgaagatgactttcta

SEQ ID NO: 39230 - DNA, 603 bp, Zea Mays
tttcagtttaggtgcattgaatcgacttggctggaacaatgtaagaccaaccactaccaagacattggcccaggaaaagctcaaagattcagatcatgaaagcgggcttaaggataccaaaatggttgatcagaacaggatttctgcaaccgcttttgagggggatctgaaagacattaatatgacaaatgatgataaacctggagaaagcatcgaatcgtcacagggaaagccttctcaaacttctgaacctgttggaacagcgacagaaattggaactgaacagccttataaatcagataaagctaattatggaaccaatgatagcagtgaagggcagcatataacagaacaggacaatgaaatgactccaaagcaagtttctgatgatcagtcagtggccaactgtaatgggccttctaaagaaagggagcaatcagcagatgctacaacagaccagaatctacaatctaacacaacaacagaaaaggaaggtgacacaagtcgcacaggtgaagataagactgctcataatgtgaatgatcaaagcacacaagtctctaaaacagaagaatcaaaaccttcccccattactgtgaccca

SEQ ID NO: 39231 - DNA, 483 bp, Zea Mays
cgggctcaggacctcatcgggggagtgaagtctgctccatctgcaccacggtgtgatgcaaaccagtagaccgacaagcgctgggagaagaggcctcgtgaagaggtccatgccgccggaccacccgtctctcgtgcccgaggtgtgccccgcggaggcgagcggacactggacgacatcctcgatgcccagtgccagtatcacaaggatatgtgccacaccttgcagaactgcagagacttcaagcattccgtcgggaatggccgacccttccaacctctaccacctcccccaccgcgaggagggcccggtgaacctcgacgacctcagcagcaggaagagggaagagatggagcatttccatgcatcgacggagaggtcaacgtcatcttcggaggacacgggtcacaagaaaagaaaaggcaacagaagctcaacgaccgatagatactggtggcgaccactagtgctcttgccccctat

SEQ ID NO: 39232 - DNA, 649 bp, Zea Mays
cacaaaagcagaattaatgaaagtagtagaactgcatgtgtccaccaataacaaaaatgcttgatccttcaccaatgcttgcaaacgaatattctgcatacttttagtaccagaaatagctagcatcgacggtttacaagactcatcccctagttgatcttcctgatccaactgctgtaaaacttcctcactgagctccaaggacaaatcctcaacagaaagtgtattcaactgcataggaccttttattttacacttagcagcatgacctgcatcatacttctccccacaaacaaaacatagaccatgaatccttctataatccttgagtttcctttttttggagagatcaacacccccatttatctgcttatggtcaggtctatactgcccaccttgtctgatgacagcccccctcgtagaagtcgacctctacctttctccaaaacttcagagtgcaactttgccaatagcacaacacgattcaccgtagttggtacttgacacaacactgagccccgaatatcaggtttgaggcccttcacaaattgttgcccaaagaaaatttcatccaacgtaggattgtgcatagcagtggaataacgtaacccaacaaactcctctacatactcatccactgaacccgact

SEQ ID NO: 39233 - DNA, 289 bp, Zea Mays
aaagaattggtgacctggcccctaggaggtagtctcgactgggacctggacctgcacacagccttggctaggaggctttagtagtgcacccataggacccacttactggcatcttttatcctttgattcatgcaacaggacctgcaggatttagactgggaagccaagccgtgtgttcggaccccttaggtcacagctccaaatactagggcgctcgtcgtagcgtggtggagcgtgcaggcttagggtacgggactaggctaagaggctacacagttccagaccaccc

SEQ ID NO: 39234 - DNA, 562 bp, Zea Mays
tagaaaagcagatggcctgatggttcaaaagctagatttagtagtagggttacttagttaagattgttgtgccactaaaaataatatcagtcttatgtgtgtgcatttttctgattaatctatatgtaaggattgtttgatgtgagttatggtggtaatgaatgaaaagagtactcagattcattaagcatttgtaaacctcatccccagttcacagaagcattattgttgccatttaagttcatataggcaacatacaaaagcattcatgtttagctagcatttttgttgccctctgtagataacacacacaaaagactgatcaagagcatcagtgcatcatacaaaaacattcatgctcaactattatagttaaaggcattcatcggccttgatcaaactgcatacatctacttcaattcttattattcttggtccttgtttctcccttatttgttggtggttttgcaatcctctttcttgttgtgttccttccttctttggttgctgatgtgaggactataggtcttggcacaggaatgtttgctatgatgaatttaca

SEQ ID NO: 39235 - DNA, 290 bp, Zea Mays
aggtatacgacaaagtttcagcaatcattatgatcgtagcttcggctcaagttaattccgaaggtctcgcagcaagccaattcaatagtagaaggacaactttatcctcagaccttagtgtttgcattagagtgaatgtatagagattaggggcacaattgtaatttcatctgagttgtgtgctaggtctataaatagatgaagagtgtcccatgctgttcacgggctggaaaaaggggtcaccagagtgagcataaggagcaatctcttttatgcagaaacgaagatac

SEQ ID NO: 39236 - DNA, 316 bp, Zea Mays
ccaggcgtaagtacttctggtcctgttccaatgttaccgtcagctgtgacacgatagggacaccataccatttttcttcatctggacgttatgcgtaatgcttcagcgctgtcggaaccagatccaacggccgagaccgcacgaaatccgcgcacacccccactgccgctgccacaggggcagggcaataggccaataggtagccacaaccaatttccagttccattccctttccgtttctgttcctcagactctcttttcccgtcgccgcctctcgcccccgtactcctcgccaccaccaccaccaccacttccc

SEQ ID NO: 39237 - DNA, 339 bp, Zea Mays
accatattaaatttttcatacttaaggatatagagttttgcttctttttaccgttggtgtgccctcgtctgaatcttaaggctttttcatatttcatgtgcaaattcaagtcttggattgatcgaagcatctttggaacaatagcattatataccacattaagagcatgatcatttaattgcgattttcctcctctttctgtgttaggctctttatatcaagcactacaaattcaaacaaatcatcttcctctaataaccatattttttcccatcaaactgggatgacttgccaacatgattagttgccatcttttacacaataggttgttaatcctca

SEQ ID NO: 39238 - DNA, 498 bp, Zea Mays
ggcagaagtgacagcgttggtgggtggcccgtcgtgccatggtgatgccacagccagctctaatgtctcggccgagatgagcaggtctgttagactcacgatatcacgctcacagtttcactccggccagcatcaaaactgatcgccgtcgtcgtcacagccgtgttctggttctcagttctgttcgtggtctgaggtctttcccctcggccaagtcaccttattacacgtatgtgtttacagggccacttaggctccaaattcacttggaccactcatctcccgaataacggatgttgggccgtctcactcgctgggctctcctgggcgccgtcccgtgatccacttctccattcagcatccttccagctccttctccatggacgctaacattttccctcccttcagaaccagcttgaccccaagctggagcgcggggaaacctccgctggacgtcttgttcttcctcccacgtagctagtgatggatgccaaccac

SEQ ID NO: 39239 - DNA, 795 bp, Zea Mays
agagagggagagtcgtatagaacgtagagagagatggagagtcgtatagaacgtatagagagggagagagggagagtcgtatagaacgtagggagagagggagagtcgtatagaacgtatagagagggagagaggagtcgtataggacgtagagagggagagatggagagtcgtatagaacgtataggaggagtcatataggatgtagagagagagagagagatggagagtcgtaggcagccgcttgatgtgcagcccacatgctgtgtgaagggaaggggtgccaactaggctcgcccgctactctctgtgtcctccttctcacccgttcgcatatctttacttagtcttttttccgcgtctcactaaaaaaccatatcagatatcatgtgctaattctaatcacaactgtcattcatgtctctcttgcgattatgaccacggtaacacggtaactatggcagaggaaatggcgttgtatgcatgcttctcatttgtgcgagtggcaactaagtaaacaaattgaggaaatgtcgttcggtgtacagtaatacattccctctctccctcttctctcttctctctctctctctccctccctccactctctttcctctctcttccctttccctctctcttccctctccctcctctctcttccctctccctcctctctcttccctctccctctctcctctctcgctccctccctccactctctttcctctctcttccctttccctctctcctctccactctcttccctctccctcctctctcttccctctccctctc

SEQ ID NO: 39240 - DNA, 402 bp, Zea Mays
tgcgaatggaggatcatagattgttaccactagataggctgtgcagcagaagaaaaacatgtcgatgtagtgaaagtaatcgaacgttctcgtgtaccaagagcagcaatacgcctcaagttcgttgttgatcaacgctgcagcaacatcagcgtctacatggtatccacacatatgggcgcaacgagagaaacggtggtggcgtcttgagcgcttgcaacccttgaagatagacagcgagcggcggagactaagatgattctctcaagcacaccaacccctccatatatatagatcctcactaatgggcttttgccctaaaggctcattagcattctcatagatcatgattgtctcttggatatatattcagcatcacatatccaaaagcctttctgtgag

SEQ ID NO: 39241 - DNA, 280 bp, Zea Mays
aaggagcagtagattaccggaggcaaggcaacaacgaggccgaccatggagcagagcaacactggcggaagacctcaactccgggaaagaaaccagggcgacccggtcaccaatcaaattcgacgaggccacgaagacacgcggattctgccgtgggtaccccacaacgaccagccgaggcccaggcactggttggttgagagtgtaggcaacgttggccatggcggcgactggaacgcgatcacaccaatccaagcaatggatgcgttctgtgttttcg

SEQ ID NO: 39242 - DNA, 478 bp, Zea Mays
cttaaaaataatctcgtcctcgagatttaggaggaacgaggaaaaagatggggaaaatctatgcgaagctcttcttctctttcccaagttgcttcatcttctccgtggtgactccattgaactttacacatctttataaccttattcctcgtgactcgagtcaaagtatccaaaatcttgatggggcactcagcataagtcaggtcatcttgaacactaaggtcctccattggcaactgctcttcaggtaccctgagacacttcttcagttgtgacacatgaaagacatcttgtacatccgatagattatcaggtagctcgagtcgataggccatccctccaacttgcctaaaaactctgaagggtccattaaagtgagggaacaatttgcccttaactttaaatctcctcattccacgaagtggtgacaccttggggtacacacgatttctttcctcaaaatccagtggtcttcttc

SEQ ID NO: 39243 - DNA, 381 bp, Zea Mays
tatccaaagcttgttggcaaacaatagaagtcttctcgagcatcttgcagacatggtccaggtggccaacaacctttcctatcttgccccctcaacttctgggatactagaacagatagaattaatggtatgtaacagtgttgattgtctcctcatctcttgaatagtgtatcacagagaattcttgatgctaacatgatacttaaaatcaacattgtcctgtacaaaatagattgttatgctaaaccctcaaataaggaaacaatataaacacattaacactctgcgatatcgttctgttatgggtaaacaaacccacacactagacaaagtagccgcctcccttcccatttcttaacacaataaacggttacaaaaaca

SEQ ID NO: 39244 - DNA, 295 bp, Zea Mays
gtctgtcttgactcggctcccctattatgacgacctactccttccacacaacattgatgtgatgcacactgaaaagaatgttgtcgaggcactgtgagcaacaattatggacatttctgataagtcaaatgataacgtaaagacaagagtggatctgacagagttatgtgatagaccaaaccaagagataaagccgccaagtggtggaaagacatggagaaggcctaaggccgatttcgtcctaagcagggccagaggaaggaagtacttcagtggatcaagatgttgatgttcc

SEQ ID NO: 39245 - DNA, 303 bp, Zea Mays
gaggagacacatcggcttcgggatcatcgccgctgccgccggtatcatcgctctcctcgtcgtcgacgtcgccgctggagctgttggtgtcgctagacccgtggccgacattgtcatcgttgtcgtcgtcgtcgtcggagaagcgaacgtggaggggtggttcttactcctcctcaaaagacatgccgccctcctcactctccgacgactcatcggctccatcccagggaaaaggtcatcctcgatgtcctcccagtcctcgccaaggaggagctcgaggtcctcgccatcggtgagggagag

SEQ ID NO: 39246 - DNA, 549 bp, Zea Mays
aaaaaatggcaggtgtgcgccgcctggattgcagccattaagagagagaaaccaagggagaagggagtgggtttgatcgcgggtgagcgcaggaaaccgagaggagggcatgggttcttcgacgtcaaagcatgggggatggcccacgacgtctccctgattcagggtgggggaatcgtccgcaacatcacggagacaaagaagcagaacctcaccggcggtgatgaagaagcaccatcacgtcacgcggccgaactacgcctcaatcgctagtaagagcacattcctgtagttctccattatcttcgctatgcgctgtcgcggttcacgccttgatccacatgctggggctgttgcccaccggctcaccgagagattgcaccatctcggtgtggtgtggcgccgtccggagtcagagggaagaagaagaccctatagtcgttgatcgtctagtcgagggttaggatttagtaccggttcgtttttgtggggacttaatctgggtcgttcgatcgcatcagatggcaggtgttgggctggggcatggat

SEQ ID NO: 39247 - DNA, 427 bp, Zea Mays
aactcttcttcatattgccgaacatgaacttgtatcaggatggactgatggagaactcacctaatcaacatcctggacttagtctctcttgatggagaaggagaacaaacctaatcgacaccaagagctcactttgtctagatggggaacacagctaatcaacgtcttgaacttccaatcttaggatggagaactcaacttattgacatcctagacatattccctctcagaattgagagctcaactaatcaacaccccaaattaaacaaactcaacttaggacagtgtacacatcttctcaatatcaatgaccaaatgttttggacaccggtcgcctgagcatgtagtttaccgatgacagctacctcgtatgcctaggaaccctcaacatcatcggacttgaggaaggggtcggcgactgcagcac

SEQ ID NO: 39248 - DNA, 354 bp, Zea Mays
atagcttttgccggatcggttttgcttgaggatacaccttcagtttgtgttcggccagctctctggtcactcccgtcatgtccgtgagttgccacgtgactacatccagtttgtcctatagaaaacgagcgagtgtgtcttcctatttggcggtgaggctggagctgatgatcaccgtctttcgttcatcaaagcagctaaggctggccctcttggtttcttcagttgaccacatggtggtagcagtagatgcttcattcatggggattatgaggtcatcccctggtgatgcgtcaacattcatcgttggaggtgctacagagagctcggtggtgagggcctactggatagccc

SEQ ID NO: 39249 - DNA, 338 bp, Zea Mays
gaaagagaaaaaagacagtcgagaaacgatcacgttacatgattatacattaaaccactcgcttaacagaaggacattaatttggatactacgttttagcataaagtaaaatcaagttccacatttaatcattataagcgattgaagatgaatgaaagggagtggtcgcacgtcgagacgtccgacacgacatttagattaaattaagaggtaaacgactcgccgcgtgatagagcgcacaacgagacacttgcattaattataaagagacgttaagcatcgcgcgacgaagcgcacgacgacatacgtcaacagagctgagcttaaagtgaaacgtc

SEQ ID NO: 39250 - DNA, 322 bp, Zea Mays
gtctaccccatcaaccaccttaccgcgccgcgcaacaacccacacaactgcctccttgtaccctccgctatatatatatgcacaccccagctcccacttacatcatcgtcagtgccagcaccgcgtttgcttcactgtaccacggggcccacctgccagtggcacaccagcgcccactcttcatccctcccagaaaccgtctgtttcgcctaagccggccataatgtgacacacccgttaaccacccacttccttgcccatttataaatcacctgttctccactctcccaattccataaggtgctacccaactctggctcaa

SEQ ID NO: 39251 - DNA, 535 bp, Zea Mays
ccgtccgttccccttctcctcctcctctcctccccttccatgccctcttagcttctgaaggtctccgccacctcctgctagctacccttctgagctttcaagctttgctgaacgcacgcgggcggacgcggtaaagcatcacatcttctttgagagctgcagggaagagatcgataagagttctattttttgcaaaggcacacagacatatatagttcttctgctagatctcaccgccagtcagctcgcagcgaaggttccctgggctaccttgtcgctggatctgttgctggtcgtgttgttacttgtcaggcaaggtataatatatctccgtacagctaggaataggattgggtagtaggggggtacgcatgtgccagtgaagaaatgggaaggagctagtgtggaggcagcaagaattagggttggagaggttccgcgagaggagaaatgatgatcccggcgaggcacatgccgccgacgatgatcgtccggaacggcggcgcggcgtacgggtcctcgtcggcactgtcgc

SEQ ID NO: 39252 - DNA, 593 bp, Zea Mays
ggggagattcacctatggtggcgtcgagtccccggtgggtggacggttggcatcgtcggtgtgcgcgggatctcctggggggtctccactggtggtttctaactggagctcgcgtgattcgtcatcgaagcttcaagcatgccgtgattccgcctagtgtcgtggccgggaggaatcactccgagattttcggtgagaaccatctacactgctaaaccatgtccccaatttcgtgttgcgtcgtttaatttgagtttggggttgtgcggcgccggattgagtttcctccggcgaggtcgccgccgtgcgcgtgttcctgggtgctcgggtgctagcgcgggagagaagaagtactgtggccgttgattggcgcgtgaacggccacgattgcgcctagcaagtctgtgcgtcctgcgatgattctgatccatccgatctgaatcgtgtgtctgggattccaccacagttatttcaatctatgtcgtagatcgctgatcggacggaccgcacttcgtaccgtttcgattttagatgagtctaatccgggccgtcagatgtagatcggatggttgatgccacccgataccccttcg

SEQ ID NO: 39253 - DNA, 359 bp, Zea Mays
ttcacccgatatgtctactgagccactaagacgtaaacattatgttctgcgtggtgaaagacaagctatcttagcccatcaaaacaagaaatttgaagcaaacattgcacgtaacgtggctactttgactgaggatactatcaatgacgttggaaaaatggatgattcgacacagcccggttcaactatagagatcaacaacactggtaattatactaaccagttttaaatggatcttgcacgacgatgataaaatgtagtccgactaaacgtgtgtttccatcagtacaatataggaatacacgccaaagtgcgatcgtggcaacaaatgggagtgcaaacatggtcgaacaaggaac

SEQ ID NO: 39254 - DNA, 305 bp, Zea Mays
ggcagtggtgcttgctgatgttgttgttgctgttgcagttgtgcccttctctcctagcgtatctcctctcgttcctggcgcatttcctgacgtatatcctctctctcctggcacatctcttggcgttcctgccgcatctgcacgtgcatatccgccatagtgttagccatctgttgcattatccttatctgtgttgcaacagttgggtcaactccgactggtggaggctgtggaggatccatctcaggttgttgttgttgtggttgtctatatatcctcctagtgtgtcgattgggaggtagatc

SEQ ID NO: 39255 - DNA, 738 bp, Zea Mays
taaaaactgagtttcacctttaaacaaaagttttgggagcttttgagtcgttacttggaaatgctctaatagcatttagggataaaaatttacaggaaacgctgcgcacagtctcattgcttattcccccgccacccccgcccaaaaaagaaaaagaaaaaaaacaccctcccttctccttgcttgtcagctcgcacccatggaaccctcgtcgccggccaccacggccaccttccctgctgccgtagaagaacatgagacgtaccctcccatggtgtcatcctctctattcccacttttccccttcgccgcctccacctcctctgctccccccgccgaatcccaatggctttcaaaccctagcttctccttcgatgcctcctccctgaacatcccggctaccacctcatcgtcgctcccgtcgccgcagagccactcgtccgatgaggacacgccgctgcaggccgctcctgcgaaatacgagctggtgccttcttcgccgtcctccgacgaggagagggggtcgcggaggaagagaagtgggaggaggaaacggaagcgcgagaaggagcgctatgatggggcagcgacatcgcggaaggctgggattcgtgcctgggctggattggagacgaagccagccaaggattactatgtcgacgcgaagggcgaccatgataacctggcttttggatccctctacaggtctgatcatgaagtatttgatgtagcatgcca

SEQ ID NO: 39256 - DNA, 2301 bp, Zea Mays
tgtcagttttggtttcttgctgttccttccatgatctctctttcatctaacatatgcagcatgtagcttggtaaacaatgacaccaaacagttcatcattagttcagagacaggcgctattagggaggctgaagaccgggtaagctgcacatactgcactttggacaacatatataatgcttttagttggtttatttctatcgctaaaagtttctcctataaaactcaaaaactaaaataatgggatagtttaattgcaaaaagttcttgcaaagtaggaataataagttgttgagttcatttggtacttgactacttgtgctgctgtggtattttgtatttatgggtgtctattcatatgggatattaaccatgattttgacccgtgtttctggaaattttaaggcctcctactaatgttttttttgtggaatacatgtaagaaagcagttttgtttaattgatatggacagtggtggttttttgttctagtgctttgacgcctctattttgttgatgttgttttcttttacatgtcttattatacttatttttttgcataaccagttgtatgactgtttcctgttagttttgtcaacttgtgaccactgaccagtagtttgtacttttgggggatattatgagcttgttttgggggatgtgcattatatttttctgctaccatctgtttttatacggtagtatgcattatatttccatagttttgtgtggattgttcttccttagtgctcgggttgatttctcctaagtttttctaggtgctatttgttgctttgcccgtactaaactagtttatttggcccagtctctcagtcacaggtcatgttagttgtggaaggctagtttgctctggtctagtgttcccatggggggaggggcattcttctccctcttttgtactattcctttttcctcttaaagaaatgatgcacaactctcttgtgtgtttgaggaaaaaaacctcattatattgtcatagttatgtgagggttattcttttttagtgcttaagcctcactattttgttgatggttatcttggacgtagctcgtggctacatttttcttatttgtttgtacttggatcaagaataaccagctatattattgcattctgttgtaaactggcttaccaccagtagcatattcttttttgcatacctactactacatgtgccattatataacttgtcctttcagggtgaccctgtggaaattgcacgtgttattaaagattcagtaaaacagaatctgaaaagatttcacgaggaagcccggcattctttaattagcacccctgaaaggaagttggctctcattattgatggtagatgcctaatgtacgcactggacccaactcttcgtgttgatcttcttggattgagtctaagttgccactctgttatatgctgccgagtttctccgctgcagaaggcacaggtaaataacgtttcttgcagagtaccattttcctcttacccactgaagaattaacaatatgggattttgttggaccccccaacacacacacacacacacgcactgacacacacacgcacaggagagaggccagaaaaggaataaatattttacgagatatattactaatcagtgaatgctttactactgtggttggtttttactctttagcatactgtgtacactcatgtacttctgagttgcatttctgatgtgtgatcgtgctgttatcagctgtcattgtttttatcgggggtctttagtttgaggtatcagctactgttgtgataccagtcctcgtgtttgtactagatatgtgcatacttacttaggatgaggtgttgattagcttggccattccattcatcaaaccaaaccagtaggaagagcggacttgcaggtccattatcaaagcaaatgggggcaatagtctctgattgattgcatggtttcattgcacagtcttgtatacgtgaaaatataaaatgctgacattaatgtgtatatgtaggttacaagcttagttaggaagggtgctgagaaaataactctcagcattggtgacggtgctaatgatgtgagtatgattcaagctgctcatgttgggattggcatcagtggccaagaaggaatgcaagctgttatggctagtgactttgccattgcacagtttcgttttcttactgatttgcttcttgtacatggacgatggtcttacttgagactgtgcaaggtatggttatagttgctcaactttaacctagcatatagttcaaagtactgaatatgagatgttctgttg

SEQ ID NO: 39257 - DNA, 520 bp, Zea Mays
caaactgcaagcccacaaggaggaacgagaagcctgacaaactccaccacggtcgattcatatccgagcaccacaccgcaactccctcatagcaactttggtgatcatgccagaggaacctatcggcgagctcagttcacgctgagtatcacgataaacataacaaaacaacacggtgagaacaaaaacatgtcgatgcaaagagcaaaaagaaacacgcaaaaggaattgaagagatcgtcacgaagcggaaataagaacagcaggttatgagaccaggggcaggggaacgatagagttggttccattggagcaaatcgtctagccgtcgccacataaattgtttttggaagaggaagaaacggaagtgccctagaggacaccggcggcggtggaggatcggagggagaggacgactgcacgagcggcctccttttaaaagcgcgagcgacggatcacggttgggtggaccttgcgtttcggctgcaactcaacagcctgctcgtttcagttgaattat

SEQ ID NO: 39258 - DNA, 524 bp, Zea Mays
caagagaaacaagaagagaagattggtaagaaactgaataagttatgaatcaagttaatgtgcagatttctttaagtcatgagaaattgaataaggtaaactgaactatgtagtatcacataaggaagtatcgccacacgatggctagcaaatacagattcaacctgtataaattcaatcttgctacagctgaaagattcaacctgtataaatacagctagcaaatacagattgacagcaaataaattcaatcttgctacagctaatcatgctacagctgaaatggtatatcctgttatggtcaaatgaacttaaccaaaaggcatacagcagcattcagatgcaaagagaagatgtgagaaatggtataagcacggggcctcagatttttcgttcgtcaggacccctctggcccacacaacatgcagcagctcttccggttcaacttgccttgaagcgttgcaaaagatatccatgcatggaccacaccacaacgcttatgaagaacggattaaggccgcaac

SEQ ID NO: 39259 - DNA, 562 bp, Zea Mays
gccaaatagaaccaactaagtgctcatcgtcatcgatggtgcctgtccaaagcacacagagagcagcactagctagctaggatttgaaccacagctttttctagcgtgaccaacagcactagctaggcaagcagccgaaataacgcatatatatgaaaaggaatttggttccgcaaaaaaaaaaacggagaacggaaaaggagcaaatcatgcatgtggacggagaacgcacgcaccacgcgaattaatcctgcctctgcatggggccacgcacgccgtcgccgatggacacatgtatggcatgcagcgcttgagctacgacctgcttaattatcagtagcgaagaatctcatcccacatgcgtgtttcttcaacacgtacgcatggacactctttagtgtcaaagctaaagctgagaattcaaattaaccttgctattttgatcgcggtgggctcttaaaatgattggacagatgcagcaccgtacccacgccttacaactctcctagctagctagccgccccgcaaccacactagaattgttctagcctagtagcctgtg

SEQ ID NO: 39260 - DNA, 725 bp, Zea Mays
ggcagcaccaactcgttggtggtgcaagtttggagatgcgccgcgggaggaagacagaataccttgacattcctctcaaggacaacattaaagggtggcgccttgagtggtttattgtggaaaaccacggcaagtcccttccccctcggtcggggagacaaccagatgtacgcactccgagttgggttgagtctcccactgccttggaggtgacggaagctagggttctgcttgctgagatctgtctgctgaaggagagaggtctgactgtcgaagctatggttgctgacttcgttttcaagaatatttagcctttgaaagacagggcgtatctagcttacttgtacagtggtattactgactcaactggggttaccaacaggaaaattcctactaaggtcctggtgagccgactagacatgatcctgaggggcaaggtatcaaatgtgggtgctcttgttgcttattctgcttggaatctgccacctcctaggtcattttttaatttcgtgtccaaccctcctgctagtgatagtggtttgggtcttagagtgcgaccctctcctgaagacattgaagctctggttgctcctcttcgtgatcttcccaatgatgagaggaaagttcacttttcgatgccgacaagtccggatgatgcagaaatagatgttgtactcaatatgttggctggagaatcttctcactcggcccatgctgaaccgatg

SEQ ID NO: 39261 - DNA, 405 bp, Zea Mays
gagagatggggaatggagccaggtgtgcgcgttgatgggcctaggagaagccaacgggtgacacagcccaacgtccggctgtcgggccatgaatgggtgaaatgatttaggcccagatggtttagcagctagcagagagaaaatatacactgccgtggagaggaggagaggatcggactggaacttggaactggatccggctgcgtccggcgaaccgacggagtgccgtcgtgtaatccccatacttactgctacctccataaacttcgagagaggatctgagcgccgggagcggtgctcgactcattcccaaccgcgtgctctaacagttggtattcagagccttcgatcccgagctggagttcccgaagcacgagcacttcaccaggttgcaagccaaggcgg

SEQ ID NO: 39262 - DNA, 661 bp, Zea Mays
aaaagatcaatataaagaaagatgttgtgccttgattatgtctcttacctcgcggtgcaacatcacgacgcctctcgcccacgtgcgttcaggcctcgtcctgcgataagccattcatataatttcaggagaaaatgaagccttaacaatctggtatcggacatgccagggttcaacgaagacgacaatgtggcatgtgctgcccaagcaccgtcgttggagtcaatcgccacgattcttgctgaagtacaacgccaacttgggggcttcactgagtatatgatgtccatcttttcccatgtcgccgcggtggagaacgcacaaggaacctctaccgccacaactcctcctggatttccgtatgacatgccaggttacggtggccttcccccgagcactagagggaccgacggaccgtagcctctttcaactgccaccgactgaatcaccgcatccgcggatgcagccaccgcacataccctcgccgccatgacaattccactccacctgctaccctttccgcactcggcgtcacccctaccaccattgccgccattgccacatccaacacccagtacccactactcgaccccttacggtcggcgttacccgcttccaccggcttgagtttgccacattcgatggcaaagaagaccgctcg

SEQ ID NO: 39263 - DNA, 292 bp, Zea Mays
gcgggtagagccacctcagcaccctgccgagatggctcctagacataagggggcgggacgacaccctctcggacatccccgcgccacacttcaccgccttggtggcagtaaagatcagctcattggctcgacgtttggagctaaggacaaaaatgatagtcagaggagaaaacggtgcatgaaaagacgttctcgtactttgactacatgcctagagacaggtattgctgaaggccttggcttctactgccccactgcctaagtaggcggcatagtggtcaccacttttgca

SEQ ID NO: 39264 - DNA, 330 bp, Zea Mays
agacaagtcggtggtgaacgtcagaagccacgagaggctatataacacgagcccccaccacttcattcaccacttccaccatcgctaagcagccagaaaaatggacccatttctcgagtacaatcgtctcatgcgcatggctcaacacatggatgttgacgacgaggagcttgaggtagccaccattcactacttaaagagacgtcaggtacgcaacaaccgtcaacatggtggttccgttgctttggctgagttcggatcccgcgagaccatttaggtgttcgctcgaggattctagcgggctactttggagctcatccggtgtaaaac

SEQ ID NO: 39265 - DNA, 556 bp, Zea Mays
cgggacgtcattcatttcatgattgtttgggtccaagagatgatgacatgaagcatcgaaacctgatttatgagaaggcagaggcagatttaatgtggacagtggaatccggtggggggatcctgtctcctgggctgaaagagatggctgaagataggcaagacaaccctgatgtccttaatcctgcacttgagaaggtgaagaagctgaaggtttactctcgtcaaaggctcaagaacatcctgacactagagggggctggagctcccactcctgccactgcgcttcctccctccccctcaggtgtggcagctgccgacacaattccgtctgaggctcctgtcttagatgttgacgttgtgctggcaactccatctgaagatggcctcccattgtcactttctctacttgagcctggaacgctacctccctccctgtcagatgtggcagcagccttagatgttgatgctgagttggctgctccatctgaggagggcctcccagcgacacaagcttctttggagattagtgcacgagaacaattcatcaacagatt

SEQ ID NO: 39266 - DNA, 417 bp, Zea Mays
accgatatccgcaagatatggcatattcttttagctcttctttttcagccttcgtcaattcttgcccagctaagttttgaaagttgaaaatttcatcttccgaagtgtcttcggctatttctttctccttttcgggctctggggccatagtttctttggtggctgcggcatcttcttctgcggccatgtttagcagtatcttatcaatatcagcaatcgtgctttctaaatgaatatcttcggctctggcagcttcggcagttgtggcttccgaaggtgcagcttcggtagctctcgtgctctcaacagctggcgccttcggagttgaagctcctggtggtgtcccttcgatgacttctgtcactgtaatgattctttgcttttttggcctagctgccttcttcgtttttgcgggct

SEQ ID NO: 39267 - DNA, 459 bp, Zea Mays
tcaaccttcgggataatgcccgcctcccgataattaaacaacatcattttcaattcctcaccctctaacaaattccgtagatccctttcaccaatactcgtcccaaacgacgaggacaacaagtcgcgttggccaccccgatctacatgaagacgagtttgctccagccccatccgacggcgcctaccacttcgtgaactctcgccaacactatgcttcgccaccacttttggttgacggcgttcgatcctcaccccagccggaggatccaacgcttcgcccatctccagccgcggcgaagactccgccgcagccacatctaacgcagcgaaataatccaaatcttaatctgaagactcttcagtccaggaaaacgggctctcgaactcaccaccatcagatgaaaaagacccagattcagaaccagacaaattatcattagctggcactgcgttcatg

SEQ ID NO: 39268 - DNA, 345 bp, Zea Mays
tagatatagcgtaaattttgttacaatggtcagtgtgatatacgtacgaccactccataactgacgtgcgtaaatccatgtggttactgtgaattacgaaccaacatgacatacgtgaatatctcttggacatggtattaatgatcataaaattttcaagttcgagcataaatagtgtcagatatagtgtaaatgttattacagtggtcagcatgatgtcacgtacaacctcctatgtaacagcgtgcgcaaatctaggtggttaccgtaaaaaatcgaaccaatgtgtgatatgtggatatctctggggcgtcatatccatgatcgtaaaattctcaagtttaa

SEQ ID NO: 39269 - DNA, 421 bp, Zea Mays
ttctactccctgggtatgtgatcagatagtatggtgccactgtgaaccaaattccatgtatagtgaaaatataagctacagatacagagttggggagaattgaatagggtatggtctcgctagtctaacttgagattgagaacattgcaattcaatttgcctagaacaatggtgtggcaatgtatacgaaccatcaggtgtggatgtggctttgtttgtcatgattacactcatcagatccttggtttgatcaatgcttgaagtttccataagtgattttagtttagcctgattgaatagtgaattgaggttattagatgaactggtcttgaagtcttaaactacactggtcttttaggtgggctgataccatcgtatatgtaggctgacattagagtttcctaaactagtgcagtggcta

SEQ ID NO: 39270 - DNA, 273 bp, Zea Mays
ttgtgattttctaaagttcttggtcataggggtgctttctattaccactatacttgaaaaatgtcaaacaacagatttctaatttttcctacctttttctttgtgcaagagcaatcattctagaatttgtcaactttttgcttaggggaaagggtggtagaaatttttggaatatatggtccttttcatggggtagggggtaatgtatgttaccttgcatttttaattgggtatcatatttttctctggtggtttacttcataagtagttggg

SEQ ID NO: 39271 - DNA, 305 bp, Zea Mays
taaaatgttagcggctcatgcaactaaggtaactaatgcaacacgtcaagatgtaggtggttgttatcatgatcacacaacaacagataaaaagaatattaccatttacaccaaaaaaatgtatactgattttgcctatatgatgcaacgaaagaagtgtactaactaactacatcagcaaaaaagctctaagatcttaaaatgttagcggctcatgcaactaaggtaactaatgcaacacgtctagatctaggtggttgatatcatgatcagtcaacaacagagtaaaaagaatattaccattt

SEQ ID NO: 39272 - DNA, 302 bp, Zea Mays
cgggcacctacctagttaaaactgcagatccttaaaaggaaaagaaaatacttagtgacggttggatgatcttaatgctagagatttgtgccaagatttgtgatttggacgtggtgattatgagaggtagatgatttacagtcacatcccgggcataatcttcgggcgatgaggggggaggggtaacaacaaattgtctctccaacaaatttgagtactgaagtacacaaagttaaatcaaaaccattttccgcaaaaccagaagttcggcccaaactggatgcctgaaaaatcaaatcttg

SEQ ID NO: 39273 - DNA, 319 bp, Zea Mays
atgttggtcttgacaagttcgtcatcttgtttacctaattttctgtacaatgaataaggcattagatttacagctgcccctccatctaccaacattttagcaatcggtatcccatcaatgtgaccgtgcacgaagagcgactttaaatgatttaccgattcctttggtttagtaaaggattcgtctttaggaccaaaatcaaactaggcaacaacaggttcatcgtcgctgacaatagtacaatcggcggaaaatgtaataacatttacatccatacctgggcgctctggagaagcttcgtagtcgactaggtcttctc

SEQ ID NO: 39274 - DNA, 598 bp, Zea Mays
attggttccacccaggtaccagattggcatccgctatgccggtggagcacgcatggcattggcactctacttgaagttcaccaaagtaccggtcgtcgtgccggtctgggttcgagattttgatatcgatggggagttgtgggttaaactaaggctcataccaacagaaccgtgggtgggagccgtatcttgggcttttgtgtcccttcccaaggttaagtttgagctttcgctgttccggctattcaatcttatgggtatacacctcctcctccaaactgttagcatttctagttgcaactaaaatttcatcatccctgctgttggaaactgagcatagttggtgccttctagcttgaatgtacttatgaatttggactattgattctcttatgcgagatgcatgactttggtagactgttatatataaacgtgtccttgtaaaacaccatattactttgttctgcacgtaggtctggagctatttctgggatactatcgggtgtttcaggtttataagcagtttttgtaaaacaccatatacttgtgagcaattggtcatgaaactatcacataggttccattattgttacatgtc

SEQ ID NO: 39275 - DNA, 314 bp, Zea Mays
gaggtgcaccctcgacgccgatgtttcagggggcatcataccagctgccggttgccccctagaatctcgcacatggaggtgcatggaaccaggactccctggtgcagaacttcaacaccatgacgctcacccctctggcaccatcggagtggtacaccgactctggtgctggctcgcatatgactgcggatgctggtaaaatttccaccctatcctcgcccacattctccacaccttcgtctatcattgtgggcaatggtgctttactttctgtcactgccatcggatcacatactttttcttttccacatcgc

SEQ ID NO: 39276 - DNA, 559 bp, Zea Mays
ctcggtttctgtgtccagcctgcctgagtccgtacagccaaaatggccgttcctgctcagcctagctcatggacactatttgcaccaagtcagcctgactcagtgggagatatgggcagccaaacagcaaagtaggtggctgagttggacttggtcgagggttcatgcaggcaaccaatcgcgcccttagtgagagcccgatgttggccttgtgcctagcagcatggcctgctaaagactgaacgattggacctcattccactgtactttgtggtcatgacgtgcgaggcgaactcgcctcctctatgccatatatgcctgcactatcaatggtgcacctcttcctcatccttagcaccaccaactgtctactcctctatgatccatgccccagcactactgatagccacctcttccttgcccccacaccactagctagtggcctcctcctccacaccacccgcacggccacaccgcaagcaccagcttcaagcgcgtcaacgttgagcacaccaactttgagtttgtcggtgtctaatgaccagactgggtttggctt

SEQ ID NO: 39277 - DNA, 275 bp, Zea Mays
cttaggcacaactatgcggttattaaaccatactatgccttgatcatcctttctgaaacagtttgctttaccggcctttattttctcatgaatgtgtttcacacccttatcacttctttgtgcatcaacaatcttttgtagaaggattgactcaagcttcaattgatttaaggttccatgttgaatcattcctaggtttaatttctccattacttggcataatgtgatgtcagaagttttcactgtaagacaatggcaggaagccttgcgactta

SEQ ID NO: 39278 - DNA, 271 bp, Zea Mays
tcgtatatgaaggaagtagtcaggcttcacggggtacctaagtctattatttctgatcgagactccaaatttgtatccaaattctgggagagtctccatagtgcattgggcaccaagctttcgcttagtgtcgcttttcaccctcagacggatggtcagtcggagcgaacaatccaaaccctggaagatatgttgtgtgcttgtgttttgtcatggaagggtagctgggaggatcatcttgcactggcagagtttgcgtataacaacagct

SEQ ID NO: 39279 - DNA, 490 bp, Zea Mays
gcgtgtgcacctattttgcgcatcgcagacggtccgacgtatagacgtggacggtctgggacaccgccggaaagtccagaccattccagtggacgattcgacaacgcccaggaaccacgatgaccacataccttcaaaccgcaacgactagaaataggtacgtggaaaactaacacggtaaaggcagttggccgactagtaagatctgacacgacctttaaccagttattgtctaaatatgtaataaagaaggctggcccaagtgaccggccagcaaagcgacctcgctcacccactcaagagcgacagcaggtaagacccattggaccacctcaccaatcggaaagaatgacgggtcataatgtccaattacgacccaacatacctgcatagacacctccacccccatatccacctatgacatatcaatatacatacttgccaccaccatatgtcccgaatcaaatgtggggtatgccaccatatccat

SEQ ID NO: 39280 - DNA, 851 bp, Zea Mays
cggggctcgggtggggagacgtgagccgcgcgttatgcttgcgtattttgccgttattggctgcgtaaatgcggcgcgggtcgacgtggcagttggtgggtctacccacgcatgcatcgattctaggtggggcgattatgcatacggaatttgaatgaaaaagatgcataaatggtaacgaggggccgggggtcgggtgtgtagacgtgggacgcgcgttatggttgcgtattttgccgttattggctgcgtaaattcgcatctgacgggacgagagtggtcagatcgggtagtggggtgacgcgcgcgtcgatcgggaacgtggggacggtcgcacgatggcgtgatgcatgtttatggaaatgtaacacaatgatcatgtaatcgtaacggatagctcacgtaaatcttgcgacatgcaaactgcgcagcaaatcgcgcaggagattggatcatgccatgaatataggccaggacggtttaggcgagtataggaggtgaaaaaaaaacgacctacgcacagcccccgcagcttttgttcatagctatcgaaaagttagggcatacacaaaggagacggcgatgacgacaccctgtacgagcgatggccggaatgctgtaactccaccggctgcgttaccggcgccaggaattgttgaagaaggcaacacagttcatcaaagtttgatgggaacaagtcagcggatacccatgcggacaattggtgaacatgagcaggacacaccacacattctccaaagccatgtaagttcaaaggaatacccatgtattatgttatacaattttcgtgcaagttatgatttcaccgaatacacatgtattagttatac

SEQ ID NO: 39281 - DNA, 776 bp, Zea Mays
tatgagatgaaatgatagggggggccctcggccttatatacacgaccagagagagttatcccattacaagttgtgattaatatccacttgcttatctccttctttgccgcagattttgtccctgcatatctagatccttcatcgcctagccgcacgagttatcgctaggtgcgtagccctttgggtgtttgtaagttcatcacccgatacattcgtgctttaacggcgcttaactcggacgtcggtcttcatctgcttggatcgggctcgcctgagttggctatgtcctgctggcccatccaatagggcgacacagcaagaagcccgtcaacaggcccatgatatgttttagtgtccatgaggacccgggggatatttgtcccccacagtccgcatagccagaattatggtgcctaagaccatcgtcgcccccgtgataaatacatggcagccaggttgccccggccccacgagtacgcatggattcacacctagagatgccaccactggccaaccctagtcttggcctataaaagggagaagctagcctcaaggcgaggaggatcgatagatgaaccaacatacgaagacgtgcccacaaggatgaagaggaagaagagcaccgacgaggaccaggaggtcggagccccgccaagccaatacttagctatgactccacctctcaacttctaagcaccacttccaccccgataagatatctgggagcctctcctccctctctcgactgcttgtaacccctactacgaatttgataa

SEQ ID NO: 39282 - DNA, 450 bp, Zea Mays
gccatgtgtggccgtacctccggtatggcgctgcacatcacgctggtccctgtagtccatcgctaacgtcctagcagtagtttgtagtgggtttcgcggtcagtccaaaggggcgctcataagtgggattgttttgcctaccgtcatgcgccacatgtcacctttcgtcattcacggacgcacatacgttcggtatggcgcactgtcctgtcttttccgatatacgggtcactgttgagtctccggtgttgagatctcctacaaccaaggctgacggacccacaaggcagctagagtacgcctgaaccggtcgagggacacatactaccatgctgatggtgactgcacgtctgggcgtggctaagtgatgacatgtcttgtcgcatctatcgtaggctcgtagcactggacttggatatctgcctcacaagcttgctcgacgaagacttg

SEQ ID NO: 39283 - DNA, 389 bp, Zea Mays
gccaagcaaaatgaagtaagttcatatttgttttcgtagagtaacattagtattggccatctaaaagtaggactacgaattggtgcaggcaatgccaggttgtattatgttcaaaacaaccccctagagaatgaggacgagctaaaggttatgtttggaccaattgtgtgcacaaatgaaagaaccctggtgcccggcgtcgaggatgctaattcatcttctgatgatcatttggaatacactttaggtgggggtgaaaacagcacacctgacccctgcacaaatgctactggcaagcgtaagatgcgacatgattcccctaaaccaaagaagaaaaaagattcgagggaagagtacatgaaaagacttgtggcggcttttgagtcccg

SEQ ID NO: 39284 - DNA, 452 bp, Zea Mays
cagagacaagcatagagagttcatgagtcacaagcctccaaccttttccagctccctagacccattgcaagctgacgactggctgaaatctgtggagaagatgctcaacattgcccaatgcactaacagggaaaaggtgctatatgcatcgggtcgcctcactggccccgctgctgattggtgggatgcgtattgcgcagcacataccgccactgacaccatcacttgggcggaattctcgaccaactttagaagctatcacatccccgccggtttaatgaagatcaagaagaaggagtttctctcactcaggcaaggagggatgtcagtaagcgagtatagggacaagttcattcaactgtccagatatgcccccgaggaagttgccgacgatgagaagaagcaagagttatttctagagggacttattgggccattgcagtatcagctca

SEQ ID NO: 39285 - DNA, 356 bp, Zea Mays
gaggaatcgagtcactgcagcgttctaccgcggcactcactagctgagaagctacgatggtcactggtgagctattatggctggcaatgacgtggtgaaagggtcacggcgtggtgtgatcaaggcgaacgacgtacacctcgacgacggccgctcggccacgtcgccggcaagtggatgaggcgacatagcgaaacagtgccccaagttcatcctcggcgaagatcttttcaccaggagtcattatctacgcgttactaggcgcgaatcgtggcgctggcgtgaatccgagcgtgggtcaccagcggcgaagtgcagtgaacctgaagatcttttcgtgcactttaccatggcga

SEQ ID NO: 39286 - DNA, 379 bp, Zea Mays
gatctatcttcacgctccgaacggccataggcgctagaatcgatggcgacagcacgttcgacatccagttttctcccttattctctggttgcccgatggggacggtcgtgctcggtgagttgagcttcagggaggtctcagggttctcatatataccaaatgccgcgcgcgaaactcggatggcgaatggtggccggttggaaaccacggcgggttcttcagcccgagagcttcggcggaggttgttccgaagctgcgcctgtgcccggattcctatccgtccggtttggtggaggaggagctaacgcttcggtcctacccggcagtagctaaggagggtgcgcgtgacagagccaagtcgcgagtgcatgtagaggtg

SEQ ID NO: 39287 - DNA, 447 bp, Zea Mays
tccttccggtagttcccaagccttcttctctcctctgatagagaccgggtgaccttcaagaatctgagggtcttcagctctcctgggttgaacagggttggatgcgggctcttggatccgcagggctctacgttggttatgggttaccaagtaggcctccatcaacttctggacatgctcatccttggcttgcttcagagcttcaacagcaatgacttcacgactttccaaggcagttgcatgggcttgagctgtggtgagatccacatggagctgatggttgcgcttctctgcatcttctgctcgagcaatcatctgacggtggtgccgagccaagaaatcatactgcgcatccagggtgagcaggtatgcagtgaggtacacgactgtggggtcgtcctcaagcagctgctgcccttccaatgcacgcatcctggtcatccaaac

SEQ ID NO: 39288 - DNA, 291 bp, Zea Mays
cttcttgcggccttcctgctgctccaaatgcacaatcttccccttgacctgcctaaaggggcgaggagggtcctcgtcatctcctcccactggtgccgacacattcttcgtgcgcggcatcctaacctgacgactgcaaatgagagagagaagctaagcacaagtcgataacagccgatagaatatcagaggagtggatgtctacctagaaagctcacacgagaggtgaaaatccaggcaggacaggagacggctcacgggcaggcaaggtcactgaaatgacagaagagg

SEQ ID NO: 39289 - DNA, 389 bp, Zea Mays
gcattcggcttcgcactcgtatgcatgctgcatcgtggttccaacagtgatggtgcctgctgatcccgacattttgaggtttagataggtgtagttggggaaatccacgaacttcacatagcacgatcttcttaggatggcgtgataggtaccttggaacccaactacttcgaatgtcagcgtcttcgtcctgaagttggacggtggtccaaaggtaacgggtaggtcaactcgcctaagtggtgttgcttgcctcgctggcatgatgccatggaaagcccccgatcagttggtggcggtcccggttgaggcccatggcggagtaaagatcaacaagcatcaagttttatcaggaaagacgaggcatttcccctcctgcacatcacccc

SEQ ID NO: 39290 - DNA, 275 bp, Zea Mays
aaataaggataatcaattgagttgatctgatcgcggggccgcggaccgtccgggcgctctaggaccggaccgtccgagcgctctaggaccggaccatccgccactttttggtgctcaacacaactaataatgatggataacacagtcggttactgatgtgacaagcagtataaaccaactgggctagaagcagcccaagccatgctgccatgcgggagcctacatttatagagaccaatcgagctgtctttctgctagcaacctcctaggcaaag

SEQ ID NO: 39291 - DNA, 273 bp, Zea Mays
gaaggattctcagtcacctccatgggaactgaacgaccttgaccaatctcttggctctgaagaccgccttccaaggtcgacgatgcacgagacgctgcccgagatacctctaatcccacatctggaatgtcagagcagatgtccatcatatcaccatcagttggctcggacaacagatcttcaggaacaacatcctcaagagcctgatcaaaattcgctagggataattcttgcagaccaataagagcagacagagctggagaaggaatatcg

SEQ ID NO: 39292 - DNA, 631 bp, Zea Mays
cgtggttgctgaaggtgattctgatgattctgtgtctaagtgttttgagtctgataaatctgggagttcaattgtgtggacagaggagtcttcggacgaggacttggattattttgctgcattggatgtggctgcggcggagacttctccacgtgtgatgggtgatgaggatcttccgggtgcgagtattgggcataggcggcgaagggcggtggcgaaacagagagtgagtgagttgtcgcgaagtgataggcgtcatcgtggtgaggtggagggtggtcgtcttcgtgtagacgggactggcaatcgggaattgttggcctcgccggctggggcaagtgtaggtgagggagagctgcgaagtctttttgagggtgatgagttgaggataacactgttcaactacagggagatgggtatcatctctagggttgagccaatgtaatgtgtgatgccctcgctgtatgtatgtaactataatttgtatgataaggttgcgtgccttcgctgatccggccgcgcacgtaggcgacttgtgcacttgatgttgcacatttattgtgttagtccggctgcacccgtaggtgatttttgcacggagggtccggctgcacccttaggcgacttttgc

SEQ ID NO: 39293 - DNA, 372 bp, Zea Mays
gtaagatcgcatctgagccgcatgatctgaagtctatggccaagattagatcgcctaaaaccgaaccggtatgcagccatagccctcagatccacgatcaacgctctggattttaaagacttgaatgggctctcacacgacagatctagatcggacggcgcgcagctatccgcgaagggagtacgccatcaagtcgatcacaatggttcactcgaaatccagcggctgacatcccccgaaatccaagccgttcattctaatccaacggccaccacactgccctcaacctcccgacggccagggacggcggcgcccacaggtccgacggctgagaccccactggtgaaccccaaacgcgcacacacgtacaaa

SEQ ID NO: 39294 - DNA, 402 bp, Zea Mays
tcgaagctgtattggaccgtgggatctcgcctgcacatcgtcggctctgcccacacacccgaacactggtatggttgtcctggccagttcgctttctccttccatctctctacagttaggcttagtcctaggggagtttgcggttcgccagttgtccaactccagccatggcaccgccgtcgtagctgcccgcgccggcggacatctacaccgtggagattgggggtgcacttgagccgttggatgggagatggacagcgtagattagattccgagattacggttcggccgggagagttaagtgtcgtccgatattgatccagtggtcgacagggagtgctcctttttaaagaatcgtgatctaatcttggcctctggatctgaatcctacggctgaaattg

SEQ ID NO: 39295 - DNA, 351 bp, Zea Mays
gaaaatactgggattgcgtgtatccggccacccagtcactgcctgttgcgagtcgattggttggagggacagagttcaggcatttcttggtagagacctgcctgctgatgatggtgcagaccgtactgccggggtacagattagttggttgagacagtccttcagagtgtgtccacaatatgctgacgaggacaccgttcagcactactgtcgagcatggatcctccacttgtttggctgcgtcctattcccatacgcaacaggggactgcgcattgtggatgcacattccttgtctcaccgactgggacacaataggtcaatttagttggggctccgcggtgctttcttt

SEQ ID NO: 39296 - DNA, 459 bp, Zea Mays
ggcgactggatacggcctcgaatcatgcagcgcttcgccccaccatcaccatcggtgagccatcctttcctctgtgtaccctcttcaccgcttgttgatgcttccggggctaggctgggcaacctgtgatttcgtggggaagaagcctggcgcagagaagaatggcgggccgctacggtcagtccctgtcctggctgccggttcgccgttggggcctccaaactccctggggatgttcgccggtgccctttgagactttgtgtggcatcggtgagccggttgcgtccggagcactgctccaaactactcatcggagcatggcggcatggtggaatcacccctcaacgtggtcaggactcccctcgctgccatacgcggtaagaagaccttcgtcgagttcgctgatatctctactacgcgtagcgctagggaatcgagagctgaacatatgtgcgtgtg

SEQ ID NO: 39297 - DNA, 316 bp, Zea Mays
ggaaccgcaccgaggccaaaattgtcagaaccctttccaaaagcattggcttgccgaagctggaagcggacttgtgtcgttatcaacgacaccacatcgccggaagcttgctttatgctaacttcaaggtaacgaatatttttgttattttattactattattactatcttttgggtcgtgttctaacgaagatcatttcaacagagcatattattaagcaaggttctgaaaatgcaacaagatctggaggaagagaaaaacaaagctgtcattcgagatttggctgaaaaaattgaaaatcacgaagccaatctg

SEQ ID NO: 39298 - DNA, 299 bp, Zea Mays
tgcaacctctcccactcgccttaagattaagaagggtccaataaagcgaggggacaactttcctttgactttaaatcttctcataccccggagtggtgacaccttcaaatagacataatctccctccttaaactcaaacagtcttctccgggtatcagcatagcttttctgtcttgactgcgcagttctcaaattctcccttatttgctggacttgttgttctgcttcttgtataatctcaggcccaaacaactgcctttcaccagtttgatcccaatacagtggagtcctgcactttc

SEQ ID NO: 39299 - DNA, 359 bp, Zea Mays
gcacaccatcagtatgacttgtggacccaggaccccgtgtcataggctgggttgctttggtacgcgttgggcgagattttctgcggcgtctcggggcgcgagcaggagagtctgccttgaaaagggattcaccccgcgtgcagcagttacgctttcgcattctctcccaactgttgtgccctttcaccttcgagctctctgcgcccctttgcattcgcgctcttctgctttctgccgccgtagtcgccatggcctcgctagttcatcccgagcatttctagtccgagggggcactcaacctggtgcgcaacctgctcggatggagcgcgccggcgttcaatggaaggattcgcgccggc

SEQ ID NO: 39300 - DNA, 271 bp, Zea Mays
cagcagctttcctcttcttcccccgtccccgcagcgggtagctgtagtcggggtaaacaaaaccaatagcatcaaaaactttattcaatctcttttttcctcggctctcaaaggatgtggataaggcattatcttccgctttggaatacggtccaagcagttcatcacttgtagtttcaatacatttcagccagtcatcattcggttcatcaaatttgtccccgtatttgaaggtgtatttcaaccgaaccagctcaccttcgccagactt

SEQ ID NO: 39301 - DNA, 401 bp, Zea Mays
ggatatcaaatacatatttttttaaataatgcaatgtcgcaagaattaatacattatcaactatagcttttaggagttaaattaaaatatgatcttcttctaccttgctgtcgtgcacagagaagagcaggagcagtggcagaatcctcgctgttagggaacttacacggcttagggaaatcaatatgggcgccgggaaccgaacagcttcgcggtgatgattgacgacgcgagcagagggcaactgagggcttagagtcttggtgacatactcagctcagtcaccggcgagactcgacgatgtagtgggcagcaacagcacacaggcgagcggggcagaggcgagtagaggagaacacgatagagccagcaacagggacaaggagagacaggctcgcggg

SEQ ID NO: 39302 - DNA, 360 bp, Zea Mays
ttcagctgacataaagggcaccccataggcctgctggtgccattcattgatttctggtggaggaggatgaagaggcacattaggcgagcggagagcaaatggcataccgatggaagaagcttgacgacggaggttgtcgtcagtctcccgctgacgcctcgccagctcatgcacatcggaagatatgttcctgcacatggaaaagaatgttgcaataccatgtgccagtcgagctcccatcccacgaccatgacctcgaccacgaccacgaccacgtggtgtgggagatccacgaccaggagaggaacgcgagggaccggcagcagcaggtccacaagagctggagggggctttcctcag

SEQ ID NO: 39303 - DNA, 330 bp, Zea Mays
cggatggccacctttatttgtcgctttcccagattccctagctagccctcagcccctcacaagcttgccactttttgttttccgtgggctccagctccagctccaggatcatgcttgccgcccatggccccttcttctctagggtgagtttggttgcgggacagtaaggggatagtcatgttctcaatccctgatcccaaccaaacaaacttatttaagagatcgtcccgtcccatcccatcctatcattgcaaacaaacgcactctaaaagtccagtctagacgactagactcctctcttctagttccaacccctgcattatattgaca

SEQ ID NO: 39304 - DNA, 608 bp, Zea Mays
ggcccttcctaaagttgacgccaagggttgtgatcatgcaccagccgctgctttcatatttgatgaagaagaggaggaagaagaggaagaggtcccgctgatccgaaagaacagcaggcgttatagaggtagcgaggggggaagtgatattccttctccagctctgtcagctcttgtcagtctttagggactgtcaatattggattttgatcaagcgtttgaggatgtcgtccccgaggatatgctatcagagccaaccgttgatgatgtgatggctgcttgttcagaggttccagacgatggattgggggtatcccaagcagtgtctcacgcatcatcgactttggaaggcagtcttcgatgccaagatgctggtccgagtcacctgactcccatggaggttacagaggagctctcggccttagaggtggcccctgcagaagacccggcccccgaggatggtgctggcagttacctagcccccaagggtgttgccggtagtgatccagctctggtgggtagcgcaagctgcaacccaaccctcgagggtgttcaagtgagctctccttcccgtacctccatggacgtccacgtcgggtcgtccccac

SEQ ID NO: 39305 - DNA, 372 bp, Zea Mays
ccggagcctagatggaggagtggttttacgttaaaaatgatttaaagaaaagagaggatatcaaggaaattatccagcgccccatctggtcccgcttcggcctccgaaggccgaaggtggatattgatggcaacgttgaaaagtttcagaaggcctttagtactgtgtgctccttcattggcacgagggatttaattcaagagcatatagccttcagggtatggccacttgtggagagctaggatatgccgaaggagaccactgccgaatccagtgaaggtggtctagtccgattgaagtatagcttcagatttagggagaagtttgatgagccagacgatgactggctgaagtgtattgaagctaccagtg

SEQ ID NO: 39306 - DNA, 512 bp, Zea Mays
ctcgtatttgtcgacgttggagactttgaagttaggaggccattagatcgctcggagctgaggggtgagcgcagagaccctgcatgtttccctttcctcctatcgatgatcatgtcgccggttctggggaggtgagcgagtctcatgtcacctcgaccatcccaggaccgggatgttggtggaggctgtcgatgactcagtcctggttgcacggctgcatgccggtgcactatgatcccggtcgtattcctctcgaagtcttatctcattttcatgtcggaaatcgcgtggagtgctgatgttgcttcgcgtctcgtcggctgttgatggcatgatgcagatggttcagtgggtgggcgagaggtaaaagatgattagccgcctgagtgagtagtcaccgatagccttccgcgtatggggtttgcgttaggtcgttggctatttgcgccaggacccctccaatctcgctcggcgtgtttagtgctcgagcgaagtcagggtataggttccgg

SEQ ID NO: 39307 - DNA, 375 bp, Zea Mays
tgacaggcttcattgcgaggcgacgcgcctacacacgcagcgcaacaatgcgtggggcgacgcgaaccgccttcgaaacgagaggtcctagctccaaggggacctgcatgagtcgaacttatgggatgacgaggccgagtcggccctgtgggggacagatatcccccgggtccactagaaggctagaaggctagaaggcctcgcgaaaggctttgggcccattatttcgcaaggccatcccttcgtgggccaggggaggaactgctggcggaatggattgacgcaggattggatagactcgggcccagacggctcattgaatttaagcattatctgcagcattgatctgattctcctgcgcagcgccctcagacg

SEQ ID NO: 39308 - DNA, 276 bp, Zea Mays
aagaattcctatgactcagtaaacaccctgaggggacggcgggtttattccagtaaaacataaggtctcttttgaaagaagcgcacgacgaaggggtattctcaaatcagggccgccagatcggccacggatggcccagattagatcgaaatctaatggcaccaggactgcaggatcacagatctacgacccccatttacctaagcctgatgcgatatcacccacacgttcagggatcaacgaacaacaatgattcacgtcgggatcaaatctaac

SEQ ID NO: 39309 - DNA, 320 bp, Zea Mays
caaaaaggaagcagatcaagggtagccgagcgagcagaggtaccccggtctctctttctccttccgtacataattatccaattcagtttgttacttgttaagagaattcgatagtaagtttgtagtaagcttggtcactccttgaactcaacgtagtactttctccgtaatacgccgccaagagatcattctttattttttgcaggttgtcaattacgtgccttaatatgagtcattggaagcagccgtcgaaactcgccatgcttgtagtactgctgctgctgctatgtcatgcagtggacaaagtccattgctcgacg

SEQ ID NO: 39310 - DNA, 475 bp, Zea Mays
atccgagtctcctcactagcggtgccgacatagcacaaagcgatccccaaatggtccagatcagcgatcaaaggcaaggccacttttggaaccccggacctgctaagggcatcagccaccacatttgccttccctgggtgataatgaatggacaaatcataatctttaatcaattcaagccatcaacgctgcctcaaatttagttccttctaagtgaaatatacttgagacttttatgattggtgtaaatgtcacaagcctcgccataaagataatgcctccacgactttagagcaaaaaccaccgcggccaattcaagatcatgagttggataattcccctcatgcttcctcaactgcctagagccataagcaatcactctgccttcttgcatcaacacatagctaagaccaattcgcgaagcatccatataaactgtgaaacgcttaccgctctcacgcaaagctaggatagg

SEQ ID NO: 39311 - DNA, 419 bp, Zea Mays
attttttcttggtgcttcactacttagcccacttctcacctgagtcatggtgctcgtcgccacgtcgagatcctgcacgcagtacaactgctttgccttctaatccgcaccggcggatgggtaggctattagtgggattctaccttggcatcacagcaccacccgccctcgctatctcacaagggtcccatcgcaccgtcgtaacgcgataatggctattgcttgctgccaccgcctttcgtctcatcgtcgccatctaccgtcgcatcgtcgcctaccctcgctatcccatgcctattgtcacctcaccgtcgtcattttgcggtggagtcgctgactctccacaccgacgtgctaatgcgcccgcttcgccctaacgtctagtccccgctagtccacccctttgttctctccaactc

SEQ ID NO: 39312 - DNA, 358 bp, Zea Mays
gagacgtcatacgtgtacaacgtctttacactgtagtagagggtacccctgattcagggtatcgacagagatagagatagagtcaaataattttatccaacacaagtgatttctatctctttttttagggttcaaggcctttattccctagtcttagcaaaataaagttctcagcaaccacacagcacatctacttacgcttgaggcctccttcaactaagagatgattgatctagttgtgagttgttcgctcttcctagcttctccacccaagtgaaaataatctaggatccaacaccaccgtcatccggcagcataaccggggtccgagggctcttgcccacaatttcaaagttcg

SEQ ID NO: 39313 - DNA, 547 bp, Zea Mays
gccagttatccacaaaaaaattttggtactactgtaagttcagactcttgcaacacaatccatcttttcaccctcaaaacaacagtacttaactaaagtctacttcgttcgtcctaaaataagtgctcattccgcacttcaagaagtcaatcaacaagtcttaagattgactaaatatatacaaaaaaagtattaatactcatggtaccaaatagatatcgttagattaatcacatcatatattttcatagtaaacctatttagaaatacaaatgttagtgctacttgtcctaggactgttttcagtatttaagttcgattgatgaacctgcgcttgtcctagaatgtgagcagcaaagtttaaaaatttcgaccatataccaaagtaaatcaggccaaagacagtaaacgactacttgactactgcaatgattaaatgataagcaattaaacagtatcagaatgttgtttagtacaactattattttgagcattacacttgcattttttttgaaggctagaggaattcaaataagctctgtgcaca

SEQ ID NO: 39314 - DNA, 382 bp, Zea Mays
gtagtgccaaaggtgtctacagtcgggccagccgaagctaaggatgatacggccgaagagccaaaggtggaaaaacagtaaaaatgccagaaattctgagcccaccagcagaggcaaaattgccgaaggtgcaaaatgctcctgccgcaactccaagaggaggaggatggccagcgtgctagacgctgttatggagaccacaaaggccttgagccctgctcctactaagaaaattgccgaagctgtcaaagtccaggccgaagccgaagctgggccttcagcgcccattgagacgaaggctgtcgcgcctgaagataaagctgatcaacaaacttcagataccagcatggcagcagggcaaggtatggcagaaaaagcaaaa

SEQ ID NO: 39315 - DNA, 279 bp, Zea Mays
gtcggatctagatcgcatggtctacaacggatccacccaaactggtacgcatcgcctaatcgtaaccgtcgcctggaaaatcaatggtgcacgacgccccagccctagacttcgccgacgacgacgggcagtcccaaatcgcggtggcgccattaccgcatgcggctcaccggagccccagcaccccattcttcgattcgtcggagccacacgcgaggacgaacagtgcgaaggtaggagaggcatccttacctcgattaacacggtgttgcccactgt

SEQ ID NO: 39316 - DNA, 456 bp, Zea Mays
gctccttcctccacgcccaaccctgctccaccacgatgccctcgcagtgtttccaggcctgcgcatgctcagcctctgacaacgcgctcaccgacgtgttcctcaacgtgtctacgctcatcatgctcaagatgctctagctgttgtggaaccgactgtccggtgccatccccgagggcacattcgagcccatgtgcagcctccgcaagctgcacctcacctccaacaggttctccagcaccgtcccagagtcgatcaccttgtcacgactgctggagctatcgctcgccaacaaccgcttcaagggcctgctgccggacttctccctgccggagctcaggttcgtcgatgtctccaacctctccaaacccatttcagtagggctcagccgcttcaatgaaagcatgtttgcaggtagcagaacgatcgattcatccatcgatttatcaatttatg

SEQ ID NO: 39317 - DNA, 303 bp, Zea Mays
agctgggtcggtaagggatagagaccacccttacaggggccgcgaaccagcaccttcctcgtggcctggtccttgatcaaaaagacatgaggatgaaattcaataaatgtattattgtctagagtaaacttatgaatggacacaagatttttttgtgtaaggggaacatgaagaatattgtgaaggtgtagagggcgggtggacgaaggtatgacagatgagccaatacagtcaatattcatacctgcgccgtttgccgccttgatttgttccatgccattatatcgttcatgcacggtcatt

SEQ ID NO: 39318 - DNA, 311 bp, Zea Mays
gaatcgtgtaccgattagcgttgtaggcatctcagccatggcgggccaccgtatcgctaggcgcgatcgccggagttggcagcaaggtagaagaacgctccctgaccgttgatgcgaggatggagggttgagattagatcccgcgtaccctttcaccacgtttcgatctggttcgtcgatctggatcggatggacaaagatagatctaaagtaataaaaccctcaccgtttgattcggatccaacggatgcgattccgtaccggttcgcatgaataatgatttaatctggcacgcccgtatctaatccaac

SEQ ID NO: 39319 - DNA, 345 bp, Zea Mays
atgaagtatgccaaatgcacatttctactacggactgtccgaaggaaagaagagtaccatctgacgcgttgcgtggaccgtccggcctcatgagcggaccatccaaccgttgaagatctgaccaacccaaaggtgcctggttcggtaaaatgaattatagtgtccacgcgtaccatctggaggcacgatcggaccatccacgccaggctttattttacatacgacgacacatttaatacaattatagcagttgtaactgactgttgcgactcatcagctgttgatcttgcaggggcggaccgtccggaccaggaacgcaaaccatccgcgtgtggtagaaaggtg

SEQ ID NO: 39320 - DNA, 769 bp, Zea Mays
cttctcgttaaactgagacatactatgaggatagcatctatccattcaaaaactataactgagcagcattgttattgtttgaatatataacaagttcgaggtgttgcactcttttgttaccatcatttaatttgccttttgtgccttccatcccagcatgtgcatgtgtgttttacatgtttggaggtttcaattatgtcatacttgttaacctgatacatctttattccctggaagacacctagtccattcataactcaagactgagaacctcgactctcactagtttgctatgtttattttttctcgttctatgtttttttggtgtcttgattgagttctatcaatctctgttcaaaggttgcatgtgaatgtgaattatagtatttccacaaaagttatggctttccgtagcaaggtaaacaaatacatacttacgatgaaaattctgaagtgtgggctggttatggtggcgtggtggtggcaatgtttaccatgacattttttgttcatcttgttgcttacttgcatgtactgggtcactaggtcacgggtttcaagcagtctctccgcatttgtgggggaaggcttccctattccttccctagatcccactcgtatgggagccttccggcactaggtttgcccttttttgttgttgcttactcacatgtagggatgaaattttttagacacccgtccttcccgaaaggatcataaccctacatggatgcatttgaatctgaacatttaatatatgtaacatatt

SEQ ID NO: 39321 - DNA, 312 bp, Zea Mays
caatactgccacccatctcctcaactgtctcccctccaaggcggtcagtcatcccacccctttcttcaccttcttcagcaatcagcattgtcccttcctatacacacctccatgtctttggctatgcatgctaccctaacatctccgtcaccgctcccacaaacttccccttgatacactcgctgccattttgacaagtactccgatgacaagggctactggtgccttgaccttctcacccactgaatcgaatcatctctcgacatgtcgtttttgatgaggacgtctttccccttactggctcctccccac

SEQ ID NO: 39322 - DNA, 280 bp, Zea Mays
cgcgaaacagatgacatggcacaaaaatggaaaacgatacaatcctgacaagatggtgcacgcatctgatggtgaagcatggaaacactttgatgctattcatcgtgagaaagccgaagaggctcgtaatgtacgtgttgcgctggccacagatgggttcaatccctatggaacgagcgctgccccgtacacatgttggcccgtgtttgttatcctaatcaatctcccctctggtgtgtgctttcaaaggcagaatatattcgtgtcgttgataattccc

SEQ ID NO: 39323 - DNA, 565 bp, Zea Mays
cctgcaagctaaggtacgaactatgtctgcacgattataactatcaatagtggatttaattctatgtatgaagtggtaactatatcctcccctgcatgattaaccaaccaataattgattacaaggactagccaaacagccctcgcagtcagttccagttcatcgacagttcagacttcagactacctctgatctgctaatgccttcttgtcataagagttcagagcaacgtaataatgtacccttaagactgatggtgaagaataacaagaacatgtggggattgccgtatagtattcgtttacaccaccgcatacaccagcgctacctgtattcttgctaaaactacctgtattcttgctaaaactacctgtattcttgctaacaccagcgcatacaccagcgctacctatattcttgctaaaactacctgtagcgcctacaccaacgctacctgtattgctaaaactacctgtatgccttcatgtattcttgctagaacatgtgggcatcgcatacaccagcgctacaaaggcaaatacgaattaatcacgcgacgacaaaa

SEQ ID NO: 39324 - DNA, 464 bp, Zea Mays
gtttttcatgcactcatatttaaggctaattttttggtatcttcatccttgcaagtctcctatattgtttcttcccatattaacttcagtcttcttccacctttctttccattgcagtcgcgccttaggatcctactacacaccgatgaccatctcaaatgatgttggacaaagttttctttaattggtgctaaccctagtctaccacgtatattatcgtttcggactcgatcccttcttgtacgatcataaatccaatggttagccatactatagctatgtccccgagccatctccatgcctcaactagaataccatcagggtccattgccttacctctttcattataacacactccctagatatcaatttgcaatccaagcatgctcgtttatcctctcttcttgcgaggacaaagtgaatataaggcaacaattctaactaaaggcaattcagctactcac

SEQ ID NO: 39325 - DNA, 303 bp, Zea Mays
ggagtgtatggtcctcactaggacaatcttaaatcctcctttcttcacgaattaagagaaatcagaaatacctgtgtgggaccatggatcattgggggagattttaatctgattttcagggaggaagacaagaacaattccaatattaacagggctatgttgggggacttccgtaggcttattaattccttggatctgaaagagattcatttgaagggaaggaggtatacttggtccaaccagagagatgctccaactcttgttaagctgaaccatgtcttttgcactagctgttgggaagat

SEQ ID NO: 39326 - DNA, 548 bp, Zea Mays
ggcttattagcggtggtagagctctagcaaggtgttgggtgaggttagggaggcttcggcgatcacgtcattggtcgggttttggctagtggtggtcggagctgctcggtccccatgcgcaggcggtggcggctccgaattcctataaacgacgatggtagagttcaattcgaccacctggggagcttcatgggaggtcgaggatgctaataggaattgggtggcggtgtattgggtggttctggccatgttcaccggtgagcgagtgaggctcggcgagcgatggcatgtcgctgaatggaaatagagggtgaatgggctgaacgagaatcttcactatgacttagggaagctaacggtggagctcgcgtggtggaagggtggctgtaccggttggaccacgatggtcggcgctcgggtgacaagggcggtcggtggtgcgctcggctgcggtgaactcctagcgaagtgggcttggcactggtcggggaggaagagacaagggcgggtcattatttataggcgcgggcacacgtgattgcgtttcc

SEQ ID NO: 39327 - DNA, 696 bp, Zea Mays
ctcctgtagcatcgtggaccggaaactttctgggccgccttctccgcgcgctcacaatgtccggctcgggtcgctcacggtgggtaatcacgcgacggatggaagcccttctggcgcgacccagaactccacgctaccttctcatagaggtgaggtaaggtcttcttgttctgtcctagggtttccgtcggactttgttggctcgcactcctttctgcatcttgcttcctcgctctcgtggctttggtcgcttccgtcgtcgtttcgttccagtttccgtggcgggtggttcgaatccccgatttgtcctccgcatgtggaagaagagtggtcggtgttgtctcgcggggtggtgacgaagatggatccgaaggggcgaaaccctaactgggaccgatggaatcagaaagatgcgcctcaaggatctcaatcgtggaacaagaatcggaatctcagctggagattgaagccgaatctgggcaaatcggatgtcaaggaagacatcggggcctcgtctgccggcgatggaggtcaatcaggtatcctcaaaacccctcccgcggctttgaaaaaagagattgagaatgtgcgtcgtcctttttgtcaaaagtgtggggttgatggtcaccatgctagagattgttttagatctttgtggtgtgacatttgtcacaaagaaacccacacgactgctcg

SEQ ID NO: 39328 - DNA, 351 bp, Zea Mays
cgacgggttcggaattgtgcgtaggtgcggcgtcgtttatgagcgtttgttatgtggatttgtgcactaagttgtgtgtcaaaaacaggtggtggacttccggatcgcacttagggctttgtccaaattccccggtgaaggcaggaaaaatagtgatggtttatcctgttggttgattaatgtgtcctatacttgattatatttatgtcaattgtgtaccgttgcttgaagatattcatgttctattatttacatacgttgaggatgtggtttgatcaagttacacatgttgattattatttggaaggggtggaagtatatgtttaacacatgttatttggggtggtctca

SEQ ID NO: 39329 - DNA, 433 bp, Zea Mays
aaatcagtcggtggtgtcagtgtgcaattggcaatcattcagattgtgctaacccttctggagaaggctcaggaagctaggcagctcaccagtgatgaattggaattcaggaaatggcttaaatccaaaattcttggtctagcttgcattcaaaaatcaattgcaagacaacattccaggctcacctggatgcgtctgggggatgctaataacaaattcttccatttgatggccaacaatagaagacgaaaaaataatatcatatctctagttcatggtgattcaatcttgaccagccaacgagataaaatgcatgaggctcatcatcactttaatgcagtgcttggaacaagtggagtgagacagagggctgttcgttgggataatttgggttgtttgccatttgatctatccgagttagacaatgtgatag

SEQ ID NO: 39330 - DNA, 334 bp, Zea Mays
gctgactgaattactgtattcaatcgctcttcttccagtatgtcaatatcttctagcctggtagcttctgcttcaaatatgctttcgaagaccaaccttggtgccccaaacctgaggtcggcaggtagcactgcctccgaaccatagaccatgaagaagatggtgtttccatgcagagctcgactgggttgagttcttaggctccaaaccacataaggtaactctctgatccacttccctgcgaacttttcattcttgtcgaagactttcttcttgagtgcttccagtatcatttcattagccctttccacctgaccattggctcttgggtgtg

SEQ ID NO: 39331 - DNA, 338 bp, Zea Mays
tcgtttcttgatggcagtgaagatcttgtcgttggcgcactcgacgatgtcgttggattgcgggtggtagaccgaggcgaagacaggcttggtgccgatggaggaacagaaatccctgaagtcctggctatcaaactgtttgctgttgtcgactgtgagttcggacgggactccgaatcggcagacaatgttttgccagaagaacttttgggtggtcttcgacgttattgttgatactactctggcctcgatccacttggtgaagtactcaatggcaatgaaggtgaatttgaggttcccttaggccgtaggcagtggtccgacaatgtccagccccc

SEQ ID NO: 39332 - DNA, 354 bp, Zea Mays
tacaaagcagttctaaatctaccaaacacaaaatacagttcaaccctggatacaaccttcattcggtatatgctggcaaatctataagcacaacagatttcttcatagcctcagcgtgagacttctccgctagagcaactaactgagttgacgtctcactggcatcaatgacagattcaacagcaacgctagcagacgtgttgcggtgaggcaatcaaccacggccaacgaagctttgtcagactccatcgggggtgggacaggttacatgaggcaacaaaatatatggggagagggggagatgagaggaaggtcgaactctagcaatgaaccaggacagtgtgggagcggggt

SEQ ID NO: 39333 - DNA, 384 bp, Zea Mays
ctgactcctcatggcccatataaaaacccccactttgataagagctttgggggtaagttgatgaaggaatatctcgaatgtcttcaaaaccttaaccaacatcttgtggagcggaaagtgaagcccagctttcatgaatttcttgaagaccactacctcatcaacttcgggaaggggaacggtgctttctcccccagccctcactatggaaacatcaggaaaatatttgcctttcatcgcttcaatgtgcccctgtttgatagttgacttcccaaaaacaacatggctcggcctccacgaccgatctttgacatcttcattcccactctccatgtcaaaactgtcgctatcactggagtcaacagacaacccatctaacatctc

SEQ ID NO: 39334 - DNA, 696 bp, Zea Mays
ccgggtgcccatggctgctagaaaggtgaactgatcaaacacatttccaaggacggagaagaccataaatctggatatagattccttcttcgtttcttgcaaacacactatgtcagggcgagtagactcaaccatcatacgcacaacatccctcctagctttcctattaagccctctgacattccaaatgagaatttttgacagattcatcgataacagaaatacaaccaaaacaatgcgaggctacagaaagccatcaagcacacatttcaaggcttaactccctaagcaaaggaacatccaagcattcttgcacattatctgggaccgaccatccaaacaaagctgctagggccttgatgtgtgagttggaaaggggcttgttaaacagctgtccaaattcctccagcaattcatcagtaacagccacctgtgaatttgtgacgttcaacttcatcatgagctccgcctggacctgtctgactgttgaatttaagccttcccttttctttgacaagcgactactgcgacatgggacaaaatctggcagaagctatttaattcttcttttttgaattggaggttgcggaagcaagcagtcaatgttcctggtgatattagccaccagcttcataacgggggtcgcctcctccaactgagaagaaacaacaacaggtcctagatccaaaactggtg

SEQ ID NO: 39335 - DNA, 323 bp, Zea Mays
cgaaccttatgcttagaagttgattagtgagcatcagactgcatttatcaaagggagaaatataatgactggtgttatgattcttcatgaaatcatgcatgagactaaaaaaaggaaagagactggtattattttgaaattggattttgagaaggcttatgataaagtcaattgggattttttattccttagccttcaacatcggggctttggcaataaatggatgatgtggatgcatatggttgtcgagggtggcactgttagtgtgaaaataaataatcagattggtaaatatattaagagttacaaaggagtgcgtcagg

SEQ ID NO: 39336 - DNA, 422 bp, Zea Mays
agcatttcgtggttaaccatgttgaaaccacaatctcttagactatgtatctggtttgcaacataacattccctgatgattttgtcaatgaagcaacataaatactggacgtgttttgatggtagaaaattagtgtcatgtggacccatctttttcctgcaaatgtacaagatttggcatggcatggtgataatttaaacactacagtttttggtactacccacagattgtgttgggcacaatccaaatatcacttctctgcccttgctcagatttgttggtcacagccaaattttagttcttgttagtcacagtgctgagcctttgtatttgaatgatcatcatgcagtttcttataagtcatttccaagcattattctagaccaaattccagtttttgcctgcctttacatgtgtggttg

SEQ ID NO: 39337 - DNA, 619 bp, Zea Mays
ttcaaaaactattgtatgtagtacttctaatcgctcgcaagctccgtcactactttgacgaccacaaagtcatagtagtcactgagtttccaataggagatattctccacaacaaagaagccatcggaagaatagccaagtgggactacgaactgggggctcatgacattgagtttcggcctcgcacagcagtaaagactcaagcactagttgacttcgtatcagaatggactaagcatcaggtcccggacaacccagaggctactgaagtttggcgaatgtatttcgatggctcgctgaagctatagggagcaggcgcggggatcctcttcattgcccccagaggtgaacaactcaagtatgcacttcagctattattcccagcatcaaataatgcagcagaatatgaggcactgatccacgggttgaacatcgatgtgtcactaggcgttaagaggttgatggtatatggggattcactagtggtcataagccagataaataaagactgggattgctcgactgattctatggacaagtattgtgctgccgtccgaaaattagaagacaagtttgaagtgttggagttccatcacgtggaaagagaccacaatgcaac

SEQ ID NO: 39338 - DNA, 387 bp, Zea Mays
tctgcccatcacctcaagttagactacgaatggtccgccatgctggcccggacgatcctcggtacctcgattcagcccacattcaaaaactacttttgaataagtttttctttcacaaaccaaagcgttgttagccctcatgcaaatgcaccaactatatgagcaacgaggcattaaaaacatgccaagtaagataattgacccctcttgatagtacgactatctagcctactaacccggtcaattatcaatatctaagcacctctcgatcggtaaacaaaaatctattgttatacattttgccttgagcattcaattccatctcctcaaatgatgaacaatggtcatccataagtatatccaaccatgctaccttttaccatttgt

SEQ ID NO: 39339 - DNA, 551 bp, Zea Mays
gaaaaatcaaagtggagtggttttaaaaattgattttgaaaaagcttatgacaaagtaaattggcatttcctctatactatgatggagaaaaaaggttttgggaacacttggtatgattgggttatgaggattgtgcgtggtggcaaagtagccatcaaaactaatgataatctgggtccttacttcactactcacataggggttaggcaaggggatcttttttctccccttatgttcaatttggtagctgatggtttagcttgtatgattaagaaagctcaagatgagggtttgattgagggtctgatccctcatatcattcacaatggttgttgctgcttacaatatgctgatgataccatttttcttattcaagattgcttagaaggggccagaaatcttaaattcattttgtgtttgtttgaaagcatgtcaggcttgaaaattaactttcacaaaagtgaaattttgtgctttggaaatgctaaggagattgactatttgtatgctgatatctttacctgtccaattggtaatcttcctatgaaat

SEQ ID NO: 39340 - DNA, 285 bp, Zea Mays
cgcaagtgtattatctcccatatgcgtgccaaacgaaagaacatcttaagggttgggatgttgtgtataaggtatcaccgcacggtaaattacctgttccaaacgatgaagattataacttagacccggacacatatgacggagagttcttccaagaagatgggctagaagggcgatttgagatagacttaatcgaagcgattagaatggaagtagatattgaaatggttattgatgaggaggatgatgaggtgcaaaatgagaatgacttagaaatgcttgaag

SEQ ID NO: 39341 - DNA, 331 bp, Zea Mays
cacggggggagctcctgccaccggaagggtaaagcacccagggagcgttggagcagtgaagtgccgtttgaggcttctcagcgacgtttctggggatcctgtcgccgtggactcgagtcttctggaagcttcacgacgaatggagacgacgggccgacggggaggatgtgtacataaacgatcgtgtccgctggcaatcgattggacgactacaaatgtaaagagcgacgttccagctgaatggaggactatggaggaccgtcatgatatgatcggagggccagaagaaaataaaataacgtggcgcttcgaggagctagatatgctccgg

SEQ ID NO: 39342 - DNA, 409 bp, Zea Mays
cacgcagtcatcccaagagaattcaatgaaggggacctcgtacttgtccgcacaacccggacagagtcacggggtaagctggaaccaaagtgggaaggaccatttatcgtcaagacgaagtcatctcccagcgcgtacagattaacgacacaatctggtgaagacctggaacattcctggaatatagataatcttcgcaaattttttgtttaaatcctcagggccatcacgcccttgtaattcaccaaacattattattccggcccacactcttttcctcctagggggtgagttttttaatgaggcggagccatgtaatatacaagcaaaaatccctcgcaaaaaactaagccaatgtcgaaaagaccgcatcgacggtcttcggcattcgaccacaccgaagtcaccg

SEQ ID NO: 39343 - DNA, 523 bp, Zea Mays
ggtgggataggaggagcagaaaggggagcaggaggagcagtggaagctagagtagtggaggtggtaggaatggctgaggtggtggatggcgtaggagtgactagagcgggcgaagtgggtggtggagtggtagcagtgacgggagtggtaggtgtggaggagcgaggccgagaggcaaggcgacgaactcggtaagcaatctgatcggaaggaatctgtagctaagctcctcgctctgcctactcaatgactgtcgctgctgctagagctgctcaggttgctctatctagacgccgcttcttgtggccttcctgctgctctaagtaaaccgtcttccccttgacctgcctaaaggggcgaggagggtcctcgtcatctcctccccctagcgctgacacattcttcgtgcgcggcatcctgactgacgactacaaatgagagagagagagagaggctaagcaccagaagataacagtcgataggatgacaaaagaacgaatagctacctggaaatctcacacga

SEQ ID NO: 39344 - DNA, 275 bp, Zea Mays
agagaatggctagaggtcctcttgaaaccagtagtctagaactatcttgaaaaccaaatgggaagtgagaactaggcggccataaggtttagttgatacctaattgtgtaatgtttttcacctctactaccgtaaatccagcagtcataaagaggacatttagtattatgcatcttgcggcctaaataaacctctataaaactctcgtgtgcagatagttaggcagcacctagggtctgtgtgcctctagccatgctccttgctctatccatcaa

SEQ ID NO: 39345 - DNA, 423 bp, Zea Mays
acgaggtctccttcattgaactctcttgggatgaccgtgtggtcgcgccaggccttggtttgagcttggtatttgttgagggcctgcagggcaaagacgcggtctccgtcgatgaggtctttggacgttggttcgtctacgacggggactgctgatgcgcttgttcggggtgacccatgctttatttcctgcggggtcatggcctccgatccatatagtagacgaaaagaagtgaatccaattgcccggcattcggtcgtgtttagtgcccagaccactttgggtagttggtcggcgcatttgcccttcttgtcgtcgaggagtcttttcttgatggcggtgaagattttgtcgttggcgtgctcgacgacgccgttggattgcggatggtataccgaggcaaagaagggcttggtgccgatg

SEQ ID NO: 39346 - DNA, 466 bp, Zea Mays
gggaaatgtttgaaggttttgagtggacatcacagtatacaaactgaactgaaagacatctattttgttagttatcagcctcatcaaactgattgaaagacaccaaactgaactgaaagacaacaaacatgccaggtaactgtatcgcgaaagacaacaaacatcatacttttttcggctctggtatgtttttgtagctcccattttagattttaccaagtattaaatgtacactgcttactgtttgatgactaacatcatgcagaggtcttaattttaaaaaatatcgctgaaccttgaaatacatattcaaaccattccttttgcagtggtatgtttctgcagccttttttgctagttggatttagtccagcatctgacactattatagttttcaatccatggatcgatgggttaaatggttattttaagctaaagcttgttttcctttacaagagggattttt

SEQ ID NO: 39347 - DNA, 283 bp, Zea Mays
ccggtgagccgtgcgcccggattcacgccggcgttgtgattcgtgctcaccggtgaccggataacgcttctaggtaaaagatcttcgccacgggataacaccggcggctgctgttgtacccctttgctttgtggccggctcagataagttcactggaatttaccgcttgtcgatcggatgccacgtgccctgaagcttcaccacgtcgccgtaagccgctctatatccctggctcgtcgccggtgagtctgccacggtgaaatccactaatcgtttgcgccag

SEQ ID NO: 39348 - DNA, 551 bp, Zea Mays
ctaaattaaacccacggtccttcccctaataaaacagtaaccgcggtggaggaaagggcggaggggcttaccgacggcgagatcgctccggcgaagaggccgagggtgtaggggaggtcgtgacggtcatgccgatgtgcggattgtctctggggatggtcggagtaggtaggtccacgtgcacaggcgggggagctcgtcggcagcgatggctctagcctaaccagggcggtagagttcaattgaataggtcagtgagctccactaggtgctagggaaggcatgggcgcgaggaattgaagaatggctcaccggataactcggtctacgcgcggaatggctcatcggataagtccggcgatgatgatcttgctgttccagtgagacagggcttcgattctcgcttggagaagcttcacggctcttcagggaagctgtccaagggttggttgaggctgagggtctctggaaatggctggccacggtggtaggcgctcaggtggctcgggcgggtggcgcagagctcaccggagataagggtggtgtctggc

SEQ ID NO: 39349 - DNA, 340 bp, Zea Mays
gttgggtggtgtggggtcggcgcggcggtgggttacatcagatcggagatcggagcagagttggctaattatacggtggtcgagcgcgacgtgtgagtggcgggggcgtggccgagcgggacacacgagcgttgcgcggaaaatcggttgggtgggctagcgtgcagggatggttcaacagatttaattgggtgggttagttacctgtagatgatctccacatgtgtgagatgaataagaatatcgccccttatatgttccttacctcccatactacttaaatagcccattaggatcatagccccatatggagatatgtagccgttgcatcccaaacaac

SEQ ID NO: 39350 - DNA, 300 bp, Zea Mays
gccggggtgcgtggttgtctctttacggatccgtcggtcgtggtgattgtggcgttggggcctctgtggcgcacggattcctcaccagaggaacaacaccaccgtggaccgcacctcgacgtggctgtgcccctgtgctccatttcctcagtaagaaatatgtccctcgtgttcgtcttgccttccgcatggtatatctcgattcaatttgatgcttagcgcccgggggacaccgattgatgacctcatcgtagctcggctgggtggggatcgaggggcgccgccgccgcattagcctgg

SEQ ID NO: 39351 - DNA, 286 bp, Zea Mays
gtttgctccgagagggtcatactcaaatcctcggcagtgagggcatgcaattgcatctggacttttttgggacagcgagcttgatggccaggttcaaacttgtcaccacaagtatagcacagaccattctgcctcctatactccttcaccaatctctccttagacaactcaggtaaggaagtagacccactagtgtcagacctggacacagcactccccaggcgacctggattgaccagcttgaaggatttctgtcgttgtttgtcgaaaatgccttgttggatcc

SEQ ID NO: 39352 - DNA, 599 bp, Zea Mays
tgtcccgcgtgtctgtctgcttagcttcggtctcggttttagtaggcgaatcgttcgatctcaagctattgtgaaggtgttggatctgaattctcaagtataagagcgtcaaacaattaactgccaccaaatcttgtgccagctagcaggacagcggtggattatttccatggcatcttctctatgctagacgcaagtcctggtgcttctagttgtttttgtcttaaataaagatgctaatatgcatgtggctatgtgaggtctattgcatccgatttagtgctgcacatttaagtaatgttgatgattgattcaagcaattttttacttggcctttatattctagattatgtaaccggttgaaactaagagatacatgatgattcgctaaatcataaatatatttatattgcataatatgctacctaaggccttagtgcctatccttaacaaatattttttatacttgattctattgtgtaggtatttatggctgtaagacaggccgttcaacgagcacctcattatctagagtctcaatttaaatggcttgatttctaaagtccaattagatttccagtcagcaatcacatattaac

SEQ ID NO: 39353 - DNA, 372 bp, Zea Mays
cagccccgatgtcaggctctggtctgagccagcctcggcgggctcatcctctagtgcggacgtgcctgtgcctgggtttgaggtctcagtgcctctgcccgagtcacgggcgtctaacgagctaggacccgcccctgcagtcaaggaggaggcgatagtggtcgagagggccaccaacccggtctaggtgccaaccttggggggtgaagggtccaaggagccgagggccaaggatgttaggcatgcccgagtctgggtaagttgttttgggaggtaacagagtttgactatgttttgagttcttcatgtgattttttgcctcttcatgtctcagcctgaagcgcaaggtgggcgcgccaatctttatccccg

SEQ ID NO: 39354 - DNA, 320 bp, Zea Mays
taacctcgaagtaatccactagcaaatggagaggcacagggagaagatgcttcgtctttctgagcttcagaaaaaagattgacgaagcagctgaatagatgcgcaatattgaagcgcaagatcaatacaattacaaggatcaaaactatgagggtcataatcatgacaatatttgtcatgagtcattcaacttccaagatttcatttatgacgaagcttcaccactaacaccagagctgtaggcgacaccctgtccaccattgtatagacctcctacactaccaacgtttgatggtctaactgacccaaagcagtttctc

SEQ ID NO: 39355 - DNA, 357 bp, Zea Mays
atttacagttccactttacacactggaatggcgttgttatgagagagctcagaatatgaggctatgagcccataactggtggattcgaggattgcaacaacagtgatttctttgttcagatatttgttgcattcacatattcatatgagtagatccctagcttagccataatttgttttggatgaaagaagcagtgatctatatgcagttgtcattcacttgattgtttgaagataaatggagcctaaccatgtagtacccgagtctaattggaggagttggctcttgaagatgatccttgattatgcattcatgcttcagtcattatgtctgcccaatacgtgatttgctttattt

SEQ ID NO: 39356 - DNA, 357 bp, Zea Mays
aagatgtgttgtgctgcaaagaggcttatccaagatcaaacaaacttcaccactaaaaataaaattctgattaaccggggatatatgcttgggtgggtatcagcagaaggaattgatctggcagtacttagctcagatttagtccttttttgctaagacagtcctccagaaccaagacatgtgttttttcatgaaccccatataaacagccacagtggcaataacaaatggtctggaatgtggcaaaccttagaaatgttctcttcagactcacaattcgctatcaaataactgaatgtctcagaatctggttttactccagcaatctgcatttgagacatgaccatttgtgctcca

SEQ ID NO: 39357 - DNA, 278 bp, Zea Mays
gtgtaagttgtattgagtgtgtgttgagcgtgttagcgtgtgccttgtaacgctgtgtgccttccctcttatagtttaagggaggcacatacaaggatgctgagccccgacatgtgggcccaggagcataatggaagaaatacattatgtgaataactaatgctgacagagtaacgcatgagtaatcagcgggagtcatgatggctgcagtccatgcagcattgataggtagtaacccttttcctggtaacgcgggagtaatggtgaatcattgccct

SEQ ID NO: 39358 - DNA, 491 bp, Zea Mays
tctccctcaaattcactggccaccgctcaagcctgctataaattgcgcacacccacggctccgttaagtagtcaagcccctcatccagcaacacgtgcctcgaatcatccactagagctccccaatttgggatttccccaaaatcaaccaagaacaccgagcggtgtgacctcgccgtggccaacgagtttcaggtccgttcatgtccactgtcctcttgtttcagcacccttacttgctcctgatactcgctgacccatctgattaagctaggaggccctagatcaccaggaacgtgttcactcatccgattgttcacgctgtctccgtgaaccagttgatgtagagcctcattggtgaaattgagtgaggggaaatgattaagaagggtccaatttggtgtctaccgcacgggagcaccggtcgttgtggaatccggccagtacaagctcaccggagctcggcccagcgctgttcgtcgtcgtggactg

SEQ ID NO: 39359 - DNA, 274 bp, Zea Mays
catagcctacagagtgtggctacttgtggatagttgggagatgccgaaggagactgctgctgggtccagcgaaggtggattagtttggttgaaatataccttcagatatatagagaaaggttcgacgaaccgaatgacgactggttgaaatgcattgaggctactagtgacgagttgcttggggcatatacctgggccgaagatgatgctttgtccttagccttcgggggtcggagcaagaaaagattaaacagagttttcgatgcgattggtt

SEQ ID NO: 39360 - DNA, 279 bp, Zea Mays
ttagtagtcgagcaggcagaggaagggcacacatatccagtacaacatccgatctacttcatcagcgaagttctgggaccctctaaaaagaagtatccccaagttcaaaaactactttacgttgtacttctaatcgctcgcaagctccgtcactactttgacgaccacaaagtcatagtagtcaccgagtttccaataggggatatccttcacaacaaagaagccatcagaagaatagccaagtgggcctgcgagctgggagctcatgacatagagttt

SEQ ID NO: 39361 - DNA, 508 bp, Zea Mays
ctgatgattggctgtgcacgattaaaaggaagctggaagccatcggatgctcggagaatcagcgtgttcaactggctgctcatcaacttttcggaatggccttagcctggtgggataccttcagcgctgccatcagagatgctacctgggcagagtttgaaactgctttccgagagcaccatgtgccccaagggatcgttcagctcaaggaagatgaattccgggaactaactcaagacggaagatatgtcagtgagtacgtgcacaaattcacagagttggcccgctacgcgccggatgacgttagcaccaaagtcaagaagatggcctgctttttgaaggggctcagaccagaactcaagaccatcctagccagccaagacttcctcagcttctcgcacctttccaacaaagccatgcaagtggaaagggcaagggaagaagaaaaaggccacctcaagaggaaattccaagtcctccgagctcagcagcaagaccggcaccagag

SEQ ID NO: 39362 - DNA, 1126 bp, Zea Mays
atttttattaccaatagcgtcttcgagatttctaggctcactgtcagcagagacaagaaaagcatagcgaatagtaccatcagtgtaaactctgggttgtcgaataccatgctgaagtcttgtcctcggtggattttcctctattgctggagcttgcggtatgggaactattgcttgttcaatttctcccccttgtgtcgcagaaggtccagcgtgatcaggcgttgtgctggcaatgctgggcgtatcctctggacgcgtgggtgaagaaaacagcggtgtgccatctgcagaagataatacatttacaggagagctgtcaggcggtgcacatacatttacaggagagctgtcagacggtgcacagattggagcagatggcgtgctgcatgctggtggcgtactgcatgctggtacacgtattggtagtggtggataatgctcccatgctgcagagttgcccacgttgcttgtaggggcaccttgcatgctccttttttctgctggaatctgcacagaacagcttgtcgcagtatcttgattcttagaaagattagtcacgtaatccatattcgtacccccgaaatggctaggaagcaagactggcggtaaaagtaatatttcagatcttaatttagctcctgcatttttatgtaatttagagaagggaaagatattctcatcaaaaacaacatctctagaaatatagatgcgccctgtattttcctcaagacatttgaagcctttgtgcatattgctataccctaagaaaatacactctttggatcgaaattcaagttttctggaattgaaagggcgaagattaggccaacatgcgcaaccaaaaatacgcaaggaggaaaattttggtttaaccaagaatagttttttctagagatgtggagtattgaaggactttgttgggtgtacgatttatgagataagtggcagcaagaaacgcttcatcccaaaattttagtggcatggatgctcgtgctaaaagagatagcccaacctcaacaatgtgcctatgttttctttcagcagacccattttgttgatgagcgtgaggacacgagacatgatgagagatgccaattttagtgaaaaaagggttaagtttctc

SEQ ID NO: 39363 - DNA, 444 bp, Zea Mays
aggaaatgcgccaagagcgaagggtgcaacagcaacaaccaccactacctccaccaccaccaccagctccacctagggataagcatcaggagtttatgagtcacaagccaccaaccttctccaacgctgcggattggtgggatgcgtattgcgctgctcatgccgccgtcaacacaattacctagcagaattctctactcaattcaggaattaccacattcctgcgggactcatgaagattgaaaggaaagagtttctatccatcaagcaaggaagtatgtccgtgagtgaatatagggacaaattcatccagctatctcgatatgctcctagggatgttgaggatgatgagaagaagcaggagctcttcctagaaggtttgattggaccgctacaataccaactgatattgcacacgttttcgtcctttcaacgactacttga

SEQ ID NO: 39364 - DNA, 558 bp, Zea Mays
tgggcacatgaaaacagggaagagcagggcctcagtgcaagattccccaagactcagaatgcttcggccaggactgcgggttgttttctcaaaagggcaagttctcttatgtaaaatactcagtgcgaaggggtatgagggcatatgagccgcacgatctaaaatagagcgcttggattaaatcttcattcgacgcgaatcggtacatgtgaccgttagatcgacgatgggcgacccgcgatgaaacacacctgcgatttccccgggtccctacgatcgcgcacggacacaccggattcaccttggccgaatcgatatcccagatatgatctccaccattgcccttccgatcaacggtgccagggtttcttctcttcctacgataggatgcgacagcggggtactcatccatggcggagggcggagggcatggccagcggctcccaaaacggccctaaggctccccccgagggcttatcagccataaacccatgctcccgcacacctgcttcgtatccgcccctacgcgatgcaacctgctgtccaagcacccagccg

SEQ ID NO: 39365 - DNA, 326 bp, Zea Mays
ttcatattaaaaatccaatttctaattcatttaatcaatttaaaacagttctggatcgggcctcatttactggtaagttcaggggctagtacagaaaattcctaagactctgcgaacagtcccagtggactgcgggttattttaacctaaaccgagggacttttatgcaagattttaaggccgaaggggtatctgccatgctgggccatcggatcaaaattcaagggcccagattagattgcccataacccgaatacctatatgttcacagccgttcgattcaagatctacgatctatattcgattaagctcgcgctgacgtaccc

SEQ ID NO: 39366 - DNA, 299 bp, Zea Mays
acggtcagggaagcagcaacgttcgtcctcgctatggttcaccctagggtacaccagtttgcactggaggaggccagcgcccagctcagcactcacctcaggggactccaccgactcgtcaggctacccgcactggcaccccgacgaaatttttaggacagagtgcagacactacttgctacaagtgtgggaagactggacattatgcaaatgttttcccacagaggattgctactaccccagttcaaaacaaacaacagactccaggatctggcaaaggattctctattgcaagggtt

SEQ ID NO: 39367 - DNA, 491 bp, Zea Mays
ataaaacctaacctgggccgattttacccccctggcccaactcccagcagcttaccagcccaaccgcgcactcgctactcacgacaactgacttgtgggacccgtgctccaatcgctcaacctgggagctcttggttcctcgcccgacgttgcttacatgtggggtcccagccacctgcccctcttcctcctctgttcaccgcagctggtgctgttgggatcgaatcagatctccgctaccagattctacgaaatcatcggcttcctcactcagcgcgcgctcatccggtggatccgcctcgtcgggcacaacgtcttccatcccgcacctgggcgctcgcaggttgcaataaatcgctggatctgcggagttcgttggatcctggcgaaatctccgctcggagctcttatccccaatgtataaatgtgggtaccgcacccatatcgctccaagccaaagcccctctccccttcttatcccctcagctgcg

SEQ ID NO: 39368 - DNA, 357 bp, Zea Mays
atcaaatgcaaaatttaattatgtgcgatttgaaaaaaatgggcccaattcgagtttgaggcgaaagttatggtcgttttaagtttggacttcgaatcaaggtttccgacgaggcgctagaagggtgggggtgcttttgtgggcatggtcggtttgggtgattgggtcggtttatcaagattgagtttgtggaatgatagtggatggtgatgaccaaactaacccccaaaaaatctaacccagcaacctaattatggttgttggcgaggcaaatgaacggtgaatagggttggttttgtggataggtcggttttgtggatagattggtttgtcgagattgagtttgttgggtggcag

SEQ ID NO: 39369 - DNA, 504 bp, Zea Mays
gcaggatctcatgacagaggaacatcatctgggacctatgatcggatgatgggattgtcaacctcaggaagctctgataaaaggttctcagcgatgatctcctccaatgcatggtcaaaatcagatatcgataacccctgaaggctgacaagtattgataaggcctacatcggaatgtcactgctcctgctgcgacgactattcttgcgaattaagggaacttcttcttcttcctcctcctcatcctcatcacgcacacaaccgccaacccgagcatcgtcacaacctctgacatcgtcctcgaggatggtgctcatcgggccatcgccgaggagtaatgtggaggggccagcatcttgttccaagcatgataaccgttggagtcgtttcttcctctttttctccttgtcaggcacaaatggatggttcgctcggcgtgatcgcttgcgacgagcaccttcaggtttccgaatttctttgtcttcaccaaggttctgcccaatc

SEQ ID NO: 39370 - DNA, 463 bp, Zea Mays
cggatacatcttcttctcattgaggtgcacaacttgatgtgttgtgcgcacctcaactggctcggcgtcgaacgacaccctgtgaacgagcaccatggccaccgtcgttagaagcagtgaaggattctcctgctccgcatgcgcgacatgtgcctcctccttgtgttccttctttggaggtcgcttacagtctactcgccagtggccgtaaataccacagttcctgcatcggcctttccaccatggtgttccttccgaagtcagcttcacggggttgtccttcttgtcaccacggcccctgtttctccacttgctgggattgtaccccgacttcttctcgccaccgctcgacgatgacgactccggcagaaggagataccgatttctcgacacccagtcctcctctgtcaacaatagtcgtcccgtcttgtcagtgacgtattcgatcatgacccagtcctta

SEQ ID NO: 39371 - DNA, 861 bp, Zea Mays
ccgtcagctatttggattcccagagtcgacgactcgccttcacagcctctgctacggctcttctgaccctcctcgtcgccctcacggcggtgtggctccagggacagctcacgtcgcggctctgttccgcccgcctttcacagatgggtcgcgacgttcaccagcagactttactacagcagcgaagtacttatatgagctcgtcagacggacactcctgccgaggatgggatacagggaggctaccactcatattcagctttggctccttggtgccctggtctcccactcacagtttgacgttgtggacttcctgatctgtgagatcgaggacactgttctggatgggattcgtgctcatcggcagttaccttatgctcactacttatgccacatctttgcgcagctgattcagccacctcgatttcagagcacccttgaggcctcacgccttgtgtttggatcttaccgccctgctcctgagattccagtgccagcttctgcttctgtgactctcaggccgaggatgcagctctacgacagtttgacactcagggtacagcagctgatgatgatgatgatgatgatgattttggggttcctccttcgcctccgcctcctatgcctccccgctcccatgatcatgaggctgggagttctcgtgctgcccctgctcctcctccggctatggaccctgctcttgcggcgattctggccaacctggcagccgagcaggcccggttatctgagacgatgctctcgatgtttcagagcatgcaggacaggcaggatgcacttcagcagcagcttattcaggatagggcagagaatagggcattcatggctctcatgcttcagcat

SEQ ID NO: 39372 - DNA, 931 bp, Zea Mays
ctcgtcacgcatcgggcgcatgggtctctttggtgcacgtgatcgcattggccagacgtgcatggcaaacagatcttcctctgttcttcatgtagatttcctagccaactgtgcccctaactcgtctaatcaaggtagagtgcagtattaggttacgtcataggatgaagtgttattaaccgtcatacccttaactcgtctaattaaggcagggtgcaggagtaggttgcagcataggctgaaatgcttccgtgtgtagggatgctctggcgacgttgtcctgttttctccgcctgtcaccctttgccttggttcctcgcatgctacaatgggggccatgatggcaggcgcccacgaggcacagagagtcaacggtcctgccttggtaacgcgcgagccactatgtggtgcatgcatttctgtggcagcgctcgcctctcaaatgggcaggtataggtcttatccatagttaatgctgaggcacattgtactgtggatgtcgataccgggttttcccaacggcccatgctacgtgtcgcaggatacgtgacaacgtcgagctgtccctaatgaggagggcagcggtcagcattgctctacctggtgtcagctccttttcgacccttgctcggtgatctgcaaaaaagacgtccttgcacatggccttgttatggcgctcaatggtgtatatatgggttttgttccagtcgctttcaattttcagcattttatttcggagcctcgccgagaagggtctcagtacttgttccttggccaggatgaggtctagggcttttggggccagccctaggttccacaacagccatcctaggatggtggagtgtgcaagcttaggttgctggaccaggctaagcggttacacggctccggccaccactgagaatgtgctcctctccccctgaacttaacc

SEQ ID NO: 39373 - DNA, 372 bp, Zea Mays
cttttctgtaaaaaaataaacaagcatgtcaaaaaatcggtagcacttcccatgtacggggaggtttccaaaaacctacaaatagatctaacagcacgatggctgacacgcacatatacaaacgacacgatgaatgcaagtcacatctaagtggcatccatatccaccatcacacatatttcaacgtcatccatatccaccatcacattatgccatatccaccgtttaggccctagcgggccaggctcagactagggaacgagcccgcgggcttagatggcccggctcggttttctaaccgtggccgtttggccatctcgtcgccgtgctccctacgtccgctatcacgtctgtgtcccgatgacgacggcc

SEQ ID NO: 39374 - DNA, 348 bp, Zea Mays
atctaaatcatgatgaccatattgagttgacgatgtatgctaggctactttctgaagaacagtgctcacattgcaagctaagccacaacatcatctaaagttgataacaaagatggattggatgtattaacgttattctgagaagtatcagcaccatgatcctttctagtacaaatcctcatattggaaagtgcagcatagaaaagtaaagacatgtagttgagtagggtggatgaaacgctcactcaaactgctacatgagggtctaatttaaggctgtatgtcatgatgcatgcacgtcctattcgtcctcattaatttttgccaatctacggtggcaatcacgtt

SEQ ID NO: 39375 - DNA, 376 bp, Zea Mays
ccaagataagcagaacgatggaaccgtacaaagagcgtggtatttatgtgctgctccatacttaaaaaaaagtccatacaacatgcccacgaactatctgcatgccgacctaaaacatgaatatgcctttaggctttagccttgcggagttgtggatccgtggatgagtttgagtactcgtgcaccgagactgtcgccatcctccagatccgctcgcgtttagatgctgtcaaggaagttgtggagggtgggggagatcccgtcacaatcaggtcgctttacgaccaagcaagccaacagttccatcattagagaacgtgcaacctgcaccaagtttctcttccttcatgggtcactgtgtcacatgcaacaattc

SEQ ID NO: 39376 - DNA, 472 bp, Zea Mays
gtcagcttcagcatcgccagcaccagcagtccaagcccatgctcctggaggcgacgacccggacgactctggtgatgatgatgaagacgacgaagaagaagaagaagatgaggaaaacctcaatgatgaagctaacgaagaacagtaggaccacaacatggggttatggcctgtcactgaacattacacatcaatgtttgagacagggcacttccctaacctgctgcaggatgttctacatgcgttgggaacctacgtccgacctctgtatgagacaaggcaagtgtacgagcctcctcgggcttgctactacatcactcgcattcatgtcagggtgatggatgcaggtgatagaggcttcaggactctatcagcttatgagtctctgacgtcgctatccacctacgctgcttcggtcagcgatgctgctaggcaaactctatggtccctcagccacacctatcggcagcag

SEQ ID NO: 39377 - DNA, 428 bp, Zea Mays
caagatcctagcacttataactgaagtgtacccgaattttattgcgaatcatcgaaactatgattacctagctgtgcaggctatcatttgtcctaataattcaactgttgatgacatcaacgagcgtattgtttcaatggtacctggcagtggcgtcgagtgcattagctgtgacacaatttcaaaatcagcagaacacattccagattttgatgtgctttacccaactgaattcctcaattccataaatgcacccaattttccttgccacaaacttgtgcttaaagagggtgcgatggtgatgctgcttcgcaatctaaaccaaactatgggcctttgtaatgggacaaggctgcttatttcccagctaggtcagcgtgttctgcgatgcataatactcacaggatccaggattggcgatgaggtat

SEQ ID NO: 39378 - DNA, 348 bp, Zea Mays
ccacggcgtaggacacgaattcgttgcgccagtaactcttcccctctccagccgccagcacttcctagccaaattgtgcgccaccgctgttgcgctctataaattgaagcctcctagagctccgtagggtagtcaggcatccagccaccaagtattgtcctcagttgatcaccagtgagcgccaatttctaatttcccccaaatcgattcatcacaccgcgaagaacacctcgacgtggccagccacttctaggtatgttcatgatctctgctctcccgtttcaacatccttaggttctcctaatgctcctcaacccgtttaattgagctagactgccctagatcgcc

SEQ ID NO: 39379 - DNA, 632 bp, Zea Mays
gttttgaatgatggtgctatttggggtaccttggatgttttgctgggagtggtcgaattcgaggacaaattctttttaaggggggtagagtgtaatatcccaaaaaatgttaaccaaaagttgatcttcggtgcatggatgtgggaaaatggttgtgggccattggaagttcggagtccgcatatgtgaagatctcatttaaacgatattatttgagtattcatttgtctgaatcggggcatggatgggagatttggttgtgagtcatcggtttcgcatcaagggcattgggggcatcgctccctcctcctctcaaaaaccctagttgtcctccccttccctcatagcagcagccgccccctccttccctcatttttgcagcagccgccccgccttcttctccatggcagccgctcctctcctccccaaggtgctgcacccacctccctctaaaccctagccgccccatggttcctcctttggtgtgctgcattctccattggtggattggtgggaggaagaagaaagaaagaaaaggagtcaaggtgatattgttttccttttggtaattgtgctgcaatttcgttggattggatgtgggggttagattttgatctcgaatttagtttctg

SEQ ID NO: 39380 - DNA, 320 bp, Zea Mays
tactcattcaatcaaaacaaaaggtgagatgaggtttggaataagaaagatattataaagccaaggagtcaggtaagaaataacaaggagttagacaagacatattttttggtggccaagagtgaaataagataaccatgaactaataaagtgaggataaatgatacaaccaaggatatgaagtgagttagggagaaagcattatcaaggagacaaaatagagaggcattatcaagtaggagtagggagacaaagaattcagtatatcaaggtagatattgcgcaagggtggcaatacaatggcaagacaacaaaagtat

SEQ ID NO: 39381 - DNA, 1714 bp, Zea Mays
gtattactgaggacgccaatagtgacaacaatgaagcagtggttgaggaaagcgtccaagccatatctgtagcagctgttaatgggagcgaaggtagtcaaacaattcggctgtgggcatcagtgcattgtcaacaggtgctggtcttggtagactcggggagttctgctagtttccttgggagtcatctcatgggagtcatgccgggagtgcaacctctcgttaggccagtgagagtaaaagtggctgatgggagaacttttgtgagcaaatattgtgttcccaattgcaagtggctttgtggtgggctgacatttactactgattttaaggttttacctctgggtggttatgatataatcttgggtatggactggttggagtgccacagtcccatggaagttcattgggcagaaaaatggttggagtttgactataatcacagaagggtgcagttacaaggagttcagcccaaaattcagacctgccacagtttaacctgtttccaattgggatctttgatcagacaagaggcggttgagcaactcttggaattacagggagtggagagtatggatacggccactgtattgattcctgagtcgatcaagcaagtggtggaccaatatcaacatttgttcgtgaaacctaccggtcttcctcccaagagggcaattgatcatgctattgagctcttgccaggtgcccaaccttttcggctaagaccttatcgttatactccacagcagaaaaatgagatagagaagcaagtgaaggaaatgttggacagtggcgtgatacaacaaagtttcagtccttttgcatcacctattttattagtcaagaagaaagatggtgaatggcgtttatgcgtggattacagaaaactaaatgcttatacagtcaaaaaccggtatcccatgcctatttttgaggaaatagtggacgagttgcaaggagcatccatattttctaaattggatcatcggtcaggttaccatcagatacgcatcaaggaaggcgatgagtacaaaaccgcattccaaacacatcatggacattttgagtacagagttatgccttttggtttaactggagctccagccacattccaaagctttatgaacagattactggctcctttgctacgaaagtgtgtggttgtatttattgatgatgtgctggtctatagtgctactattgcagaccatgtcagacatttgaagcaagtatttgagctgctcagccaacaacaacttcatttgaaacagtcgaaatgcctgtttgctcaagagaaattggaatttctggggcacatagttagcgctgctggcataaccactgatccaaagaaagtggaagtcatccaacaatggcctataccaaagtcgaccaaagatgtacgcagttttttggggatggcaggatactataggaaatttgttgctcattttggaatcatcagcagacctctcactaccttattaaagaaagatactatatttgtgtggactgaacttgcagatcagtcattccaggcattaaaaacagctttggcacaggcgccagtgttggccattccaaattttgctaaaccatttaccatcgagactgatgccagtgggggcggagttggggctgttttgcagcaggaaggacatccagtggcctatatcagtcgagctttaggtcccaagaatttgggcctctccat

SEQ ID NO: 39382 - DNA, 400 bp, Zea Mays
cacaattctgtcacaatagattgactggaaagtttggatgctgtggaaacaccacaaaaatcgtgttcaatagaaccaacgctggtatacagcatgtcttcggacagattttttttatgaggctcacctctggtgtttagcaggtgcaggggttatctcttggaggtggttgccttatgtctttagtcaggccgttttttgtttatcttagaatcgaatgtaactaaaatcctgccacgtgggtgtatttgtgtgtgtttgggtgcgttgtatagtccatgttcttaatggagtgatatacggttctcatgcgtattcaagaaaaaaggaaaccgggaactgggaaggagaggtgaagaaaacatggcaaactttatgttgttaaaattatggttcatat

SEQ ID NO: 39383 - DNA, 401 bp, Zea Mays
gtcttgagggttaggaagctggtctggattgcactgctctcatggaagtgactgagggaccttcagccttagaggtggctgttgcagagaactcggccctccaggatggcgctggcgcttacccagcccccgagggtgttgccggagatgattcagctcggatgggtagcgcaagctgcgacccagcccccgagggtgtccaagtgggttctccctcttgcacttccatggatgttcacgtaggatcttctcccccacactctggttgcatggtgatagcccaagccttcggtcaaggagtcgctttagaggccagcgtacccgacgacagagttttgggttctgctgatgacactgaattggttcctgctgattcgttgcaagttgctccagttggtgat

SEQ ID NO: 39384 - DNA, 369 bp, Zea Mays
ttggtatgcgtggttaggtggatgctgagcggggccgtggttgtatggttgtggtaggtggtgttgatatgtgtgggcgacaactcttgggttgtcggcgggttgcgcccgggacattctgtccctggtggccttcgtttctaggcagtccctcatcgggtgcgcgcagtcttcgccgtgaaataggcagtaaaacctgcgcggctgttgtgcccgtcctcgacctcgaccaagcgtgccattgccgcggccctgggggataatcttgacggcgaggggtctcaccatcggggtgttggttggcaatgttgtgcacctgctgctgactgcggctgtcccgaccggagtctgactgcgaaggtcttgtcc

SEQ ID NO: 39385 - DNA, 336 bp, Zea Mays
tttaattcggaagaacagccggcgctacatagccagcggggagagtagtggtgttccttctccagctttgtctgccctcgttggtctgcaagattgtctctggcaaattttgatcagactctcgaagatatggtccaagaagatctgttgtcggagccggcagatggtgggatgatggaaatttgtgctgatgtgcctgatgccgggttggagttatcccgagcggcgtctcgtgcctcatcaacctcagagcgcggtcttaagagtcaggaggctggtctggattgctctgttcccatggaagtggttgaaggtccttcagccttagaggtggct

SEQ ID NO: 39386 - DNA, 321 bp, Zea Mays
ctcatttagttctttattgctactaccaccagccacaataccatcagttgcaccaaaaccttccatggaaccttcaaattccttcactaaatctatcaacaaatctttaattttctttacttctccaaacatatcctcaggtccatatatttgggtgtacatggcatacaagaacttcattttacgtcgaggatctagaacggtggcaacatccatcagaccatgaacatccatccaatacttcataaacttttccttcatggctgctgacatgctttctatgatagagttgtcactagcttcccacttttgaatggccag

SEQ ID NO: 39387 - DNA, 950 bp, Zea Mays
gtccccgtcaccgtcagcatgtgcggttcctttctttagcacagcttggcagcacttggacacccgcgagcggctctgctcgccgtcaacacggaagccgaccacggtagagtagaatctcaggaaaacccgaccaaacaaaatgcagtgggcaggactcccgaggtccaaacaatctatggcatctttagcgctgctgcgcaccaaagaagtagaaatgatttgcaggcattgcggtaaaagtagggctagaaagatgaaatgcttccacaagtaccgcccatgtcgcatcagagctgtgtagtggactagtggcaacaagaggcagcgagtaccagttgagcatgacatggcggcaaacttgtggccaccggctacggaggcaagcggagaaatcagaatccatcggcggcaaccaaacatgtggcgcgactgaagacgaacacacgggcaaaccaatcacctaccaagcccttgagcggaatccgccgccaatcgcgtcagaagtctttgctggagccgaacccggtttcagcggagaaaccgaagggcgagcgagggagacagagaaagaagacgacgtgggggcgcttgaggaaaccgaaaccccatggatggaggagcagcagtactgaatacgattggggaggaggaggaggagggaaagccatgaacggcggcattgataggtactgcagttagatacctgggcggaattaaacgggtgcacggagaacgccgcgcgcgtcacaagaggcgaacgcgcaaggacacgccctcgctcgctccctctccgtgtgtgtgagagagagagctgaactcaacgcagtgcctctctgtctatctcctctacatccctagtaactccgctttaggccagtaggacagcgcggcgcaggccggatcggaaaaagcggcattgcccgatgcccggccagctcactgcttac

SEQ ID NO: 39388 - DNA, 554 bp, Zea Mays
ccctcaatcaattacacaatccgagctctaaatcgtcctgcccacggagacagtgcgaactatggatgaacaaatgtgtccccaacgatctagggcaatctagtttaaatcaatgggtcagggagcatcagtggcaggtaagaatgctgaaacaatatagcagagggtatgatcggacctgaaacgagctagccacggcgaagactctttcacggtggcggaaaacagatttggggggactgagcaattcgtgggctcaggtgagtaattggtggcacgagcgggtgggttggatgctggaatacctaacagagctgagggggtgctcaagttataggattcttgataggtggctcgtgaatttgaaggagacgtgcggcgactggagagggggaagagtactggcgcaagcgattggtggcatttaccgtggcgggctcaccggcgatgaccggacgtgctagagcaagtcactacaacgaagtatagcgtctaggcacatgtcatccgagcggcaaacggctaactccggtgaacttgtccacaacggctgt

SEQ ID NO: 39389 - DNA, 566 bp, Zea Mays
ggccagggcgcggtgcatcaaaaatattggtcctgcactccggctggttgttcagcaaaaaatagtaagaatccatgtccaccttcgtattctatttgttcaataaataatcataaacagtggatatagtacatcataaacttgcctcagattggcgatcaatcttaggtccaactgcatagcatgtctccgtcgagcttcggaactagaaataaaattgtagttactatgagtaaccaactgtgtaactatgcataaccaactgtgaaaatatgaataacttacttcacagtgtccgaaagattcagccccatggcgaaccttcctcttgtcagctttggtcaaagcttttatgctattcttatcaaaaaatttaatgcgaggtgtgccactcttattatggggggcagcggctgtatgcaggtgatccaagtagtacaactacattacaaagaattacaatgttcaatagcaatgtaagtagacataacaaacatcgtaaaacatgttacataactaccaaagttaggaaccaataatgaaataaatgtgcatacggaaaaaca

SEQ ID NO: 39390 - DNA, 305 bp, Zea Mays
ctatgatccagatcctgcagagtagatttttaatagccagaaggttatcgccgatatgatcctgtccattgaatactggatgaacgccctagatcacgactctgaagcggtatccgcaaatctaatctccaccgtctaatcctcacccaacggcccaccggccttcttgctccccgcgctctaccatcctcctttctctctcttcaagttgtctgctcgccggagttcggccgattcggcgagctagggcaccgagctcaccccagataggtcctatgcggagtataggcgagagcgaactatag

SEQ ID NO: 39391 - DNA, 363 bp, Zea Mays
ccgaaaccaagatgcccaagaacttccagcagaaatggccaagaaacagaatcaaatgccttgccaatatccagtttgagaagcactttggaaattttttgtttgtggattgctctggctgtttgttgcaccataataaagttgtcttgtatgcttctcccttttacaaaagcactctggttaggggatatcagctcaggaagcgtgggagcaagccggtttgccattaacttggtaacaattttagcaaaactatgaataaggctgataggactaaaatcttttatctctgcagcatcagatttcttaggaagtaaagtcaccaaagctgagttaagaaggtgcaaattcgaaacatcaccc

SEQ ID NO: 39392 - DNA, 373 bp, Zea Mays
ataatcaaaacggcaccacgaccgcggatgtcgaaaaagaccgcagagtcggtcttcggcattcaacgccaaaacaatcaccgcaacggcaagcctcggtagccattacgtgcgacaagtctaggcaaaagtcatctaagggtgcgacgcacatttttatccgagcaaaagtcacctaagggtgcaaccggataggcacaacaagtgcgtaacatcacccacagggtgcgaagtcgtctataagacgcacattttttatccgagcaaaagtcgcctaagggtgcagccggataggcacaacaagtgtgtaacaccacccacagggtgcgaagtcgtctataagacgcacatttttatccgagcaaaagtcgcc

SEQ ID NO: 39393 - DNA, 435 bp, Zea Mays
agtcgactcgcaattgctagggcttcgtgtagtatcgtgtaatttgagtttggcgctgtggcacgccacattggccgtcgccggcggtgctggatttgggctgcgccgtggggatccgtcgggggaaagggggtcgcggtagggatgacgtcgtcctggccgttagatgagatcggacgacgtaggattgatctgcgggctcggttgatgcgagccgtggatcgctgatccaaccgccctgattgcgtatcgcatccctactggggggttttaatctgggccgctaggcagagatcggacggctaggatctgagcttaccccttcgcgatggccatctcactaaagagccctcggggaaagcgggaatcaacccgcagtccttccctggctagtctgtgtcttaggatcttttgcgccaacacccctgcgctttc

SEQ ID NO: 39394 - DNA, 508 bp, Zea Mays
ttcgtcagaactctatttcgctttgtttctgcgtacagacggattccgcagaagcatttttattccggaaataatttaacgcagctcgatttcatgtttcgggccaagcccatttaaaacccagcccattaggcccactaaggaaaccctaaccctagccgtcttctataaataggggtgctcacttggccatttttcattcccacccctctattctccctagccgccactatcttttcctctgtcttctcccacacggcagcagcccacgccatcccttctctggttctgcacggcggcaggcagggagctcgacttctcctcgccatggcgctcggcgcccaggcagccggcacccctcttcctccctggttcacggcatcagctgccagcatgtttctccctctactgtaccagccgaacagcagctctgcacgctccctgcccatggcatcctacccttctccacggcgttggcagacgggagctcggctcctcccctcccatg

SEQ ID NO: 39395 - DNA, 492 bp, Zea Mays
caggaacatagggggctcggggtaagaatccagagacacagggaacaaaatccctggacggcgggttgatttctattttctgcaggggctctttaacaaaagtgcccgcgaaagggtatcgagggtgctcagccgtccgatcagagcctgatggcgaggattagatctgtagccactcgaatcggtctcctacggggaccatcggatcccgatctaaaggcctcgaatcaatacgcgttactctcctcttgcccgcgagatcagatatcaacggtgcacaataggtgtggtgacgcagtagcccaaaactcatctcagccgttcgctccaatctaacggtcaaccgactgtcttcaatccaaacacagacctgagcggcactctcccaggtacggcggcgcaggatgctccgacgaacagtgccatccccgccccggcgaccgattcgcgacacgatgagctgctacacgaagcagaggacatggcgaacac

SEQ ID NO: 39396 - DNA, 339 bp, Zea Mays
ctaggagattagggtttctaaccttgggattaaattttgggatgttataactagccaccaagtcgtggtcacaccttgcagccccacgtgccatggagacaccagcacctccgttgagacatcgtggctccgcggcgcaactaggtgcctagacttgaccgactaactgtcattgcgtgtccgtcgtccgaggcttcaatccaccgtagttagggcgtcaccgcgtgccaggacagacaaccaggggcaaggtcccatcgtgccaatgtccaagcctacccagctagtggccacccgacctggcctcccctgctctggtgcttgcagtactaggctgca

SEQ ID NO: 39397 - DNA, 277 bp, Zea Mays
caaattgtcttgacgaagctctatgtattgaggccttcggtcttggtcatcttgggtgagatgacgcatttcctcagtgccctcatcaatcttcttctgaagatcagcgagacgaagcatcttttctttcttcttttggacctattgatgaatggcttcaaggtccctaatttcttggtccaactcctcctcttggggtgttggactggtagccttccttttctggctcctagcttcgcgtaatgtttcttgattaacatccagcggctgcattgca

SEQ ID NO: 39398 - DNA, 340 bp, Zea Mays
taacggactagttgatactagtgaaatagattagaccctgctggccatgttttaacttaaattagtacatcataccaaaccacccatgaacaaataacttaccagcatatttatggtgaccatccctcctagatgttgccataatacacttatcttatgccaccagcctgttaaccatttgtccttacccacaagttatcctaactacatgaacctaattcggataaaaacttcaagaatgaagatcgaagatgttcgacctcatcaaatcaaggaaggataagattcaagatagatcttcaaaggaattaggattcacaatcttggatagaacctttcc

SEQ ID NO: 39399 - DNA, 515 bp, Zea Mays
ataccttgtcgattacgtgcgaggcgttgtcgcagcggtgcataaacatcatcgtcatcatcgtcgttgtcgtccacaggaggggctggagttggtggtgggggacaagcctccagtacgtccatgcgtgtagcaagttcagcaactcgttgatcaagctgctcataggatgtcgaggcagagtcctggtattttttaaaagcttcagtcatcgcgcgcatcatctccttcaattccatttgagagacacactcatcgtcgttaagtttagaccccttgtccttgtccatttgattctttggtcctgtcattgttagcacaaaacagagacaaaaagacaacaaacaatgtgaaccctacaactatctctcagggtggtggtggaggtggtggaatacaaattatgaagcgtcttaccccgctcttacaacgttcttaccagcactgcaggtggcaaacggtgaccagtgtgactgtccaacgagcgtgggtgtgattgcaaaagagtacctgtt

SEQ ID NO: 39400 - DNA, 311 bp, Zea Mays
aatatagtgtagctaaaaggagaatgacgtgcataggtggacagactaaccgctgatcggaaaagcaaactggtgagtgatcttgtccacgctgcgccacaattcacccaggcagcaagcacccagagcactgaaaaaacagccgaaaaagaattagctaaccagcaaggacatatgtacacatataagcacgcaaatatacatatgtatgcagattctttgctgcattgcccatattttgtgagcttccagcaatgcagattcagaatttgttgtcacaagaatcaaacagctccatgcttggctaagct

SEQ ID NO: 39401 - DNA, 435 bp, Zea Mays
gtggactcctctagggtggatgtggtctgttttcaggaaactaaaatgcagtccttctcaattcacaccattctttccctgctcggatcagacttcagttcgtacatttgtctaccttctgctggggctagtggaggtatccttgtggcttggagaagaaatgttggggtttcaggccagaaaagacaggacactcacagtgtttcagttcagttttgtagtgaagatagaagtgcgtggtggcttacttgtgtgtatggccctccaagaaatagtgaaaaggatagtttttacaagagctcagagatattagaattgcttgccctggaccttggatgatagctggagacttcaacctaatttataaggactctgataagaataatgcaaatctgaatagagtcatgatgagaaggtttagagggctgatcgagg

SEQ ID NO: 39402 - DNA, 290 bp, Zea Mays
gcaaaagggatacccgtagagatagactgatgacggagattatcatccgtctcccgctgccgcctggccagctcgtgaacatcagcagaaatattcctgcacatggagaaaaaagctgctatcccatgccgcgaccacgacctcgaccatgaccacgaccacgaccacgtggtgtgggagagccacgaccaggagaaggacgagagggaccagcagtagtttgctcacgagagcttgcaggagccttcctcaaccgccctgctggattattagggtcaatccagaaaggg

SEQ ID NO: 39403 - DNA, 331 bp, Zea Mays
gatcctgcatacaaagcatcaaaggagtcatccaactgggtgtggtagttctcaccattgaaaagattgtcaaaatacctctacgacctctttttgatgtcttgttctttcaccaagggttgatacatctcatccttaatgcatttaacttggttgaggtccctcatcttcctttcctgaatcctagccatcttatagacatccttctccccttcctttgtacttagtcttcggcaaagatcatcataggctcgaccctttgcctcactcacagctcgctttgcagtcttctttgccaccttatacctctctatgttgaccgcactcctgt

SEQ ID NO: 39404 - DNA, 309 bp, Zea Mays
gaacagtggccggagttcatccactgggtgatatttcgcactcccacagcgttatccaacgacgccgagcacgaatcacggcgaccggcgcaaatccggacgtgcggatcaccggcggcgagggggactgaaccctaggatattttagtgtattgtaccatcagaaatacaattcagagttcctgacaaccagatttgtagtgcctggaacatagatttttatataagaacttgctaatttgtctatagcaaatttgtagccctacataccagctacaattctgctatagcaacaaccccaatcgagca

SEQ ID NO: 39405 - DNA, 409 bp, Zea Mays
ggccaacgcggtgccgtcgcgacgttggggggaaggagttattaggtccttggccgtaggatttgagatggacggctgggattagaagtagcatttaccccttcgcgtattgaatccaagcctttggcgcctaatcgagtggatgtggtgaaatcgtgttgagaccgtctggaactgtggatgccgcatccaagggttgtgggttatacctgttcaccgtagggagaatctaatcccgacggttgatggatgatcggacggatttggttcatcgataccctttcggctgtgtagtattgctaaagagcccctggatgtttgggaaaccaacccgcagtccattgtattgtgctctgtgtcttagttatttagcgccagggcctctgcatttccttaattttggtgcgcg

SEQ ID NO: 39406 - DNA, 317 bp, Zea Mays
cacgttatcctgtcgctctgtgcagactgagtgtgtgtgtttaggccagccgcggcaaccagccaaaccaaatggcacgagatggatgatgacgagttcggtctggtacggccgctggatgatgagtagcttgtgattcggtagtggaaacgaaacgtgcaggctttgcgcgcctccttccttggcccacaagcaccgccctggtttcttctctgatcgatcgatcgaacacaaacacgtgtctgaaatcccagcacacactatcgattgcgtacaagcctgctagcttgcacaaagaaaacgggtacctatctttt

SEQ ID NO: 39407 - DNA, 292 bp, Zea Mays
attattagtcttaattaacacttctacctcgactaattgtctaaggaaactacaccacctaacatcaagcatgaaccaacatgtaatgaagctcaaaccaagtcatagatgcaatcaacactacgatttcacaacatcgaatttggatgcatccatacatcagcatcaatgtcttaaaacgacactcttttatgaaggggtaatatgcacttaagcaaaacctttaccaacttcaacaattcattttaattcaatggtgaaacatccacaccagatgaatgtataagaagat

SEQ ID NO: 39408 - DNA, 485 bp, Zea Mays
cgggaacgaggatgatgcggtggtcacggtcccgttggggaggtagacccgtgggctcggcgaagatgtcggtgaagtgagccagtagcgcgtcgaggagctggttgctgccgatggtgacactgaaggccgatgtcgcggtcgacgtggttctggaccagcagaccgtgcgtccatggagctggaactgcatggtgtggttggcgatgtcccagacgatcggccccaaggtggcaatccattgtgtcccaaggaccagatcaaagtccgccagtggcatgatgtagaggtcgacgcagaacggaacaccctcaatggagatcggcgcctggggcaagactcccgggcacgcgatgcgctcaccattggccactcgcgctgtgagccttggtcgagcccggacctgtagattcgtgtggacagccgcctcctcgccgatgaaattgtgtgttgaaccgatatcgaggagagcgatcagggtcgcc

SEQ ID NO: 39409 - DNA, 792 bp, Zea Mays
ggggggtgttacagttggtatcaaaggaataggctgtaggtcctagcaagtggaataacaataaattgacacactgcacatgtaggatgggttttctgctttactattgatatgttatgttattgtctatgctagtttgacattatctgaagtgatgctatgccaatcttatttacttattattctcacccatgtggtagcagctatgctgcctcgtagggctcgggatagtccacatgttcctagtggggactcgatgagtccggcggcaatgttagccgcgatgcaggccatgcagcaggagttggccattctgaggcaagctattcctgttgcctttgcgggtgctggtggaggaggagtgcctgggggcactgtccctacgggagctgctccaggtggcgaggctgaggtgcctcttccagtcaatggtctttctctaatgcattggatgggcatgaagctggatgcttttgatggtagtggtactccggtcgaggcggcagattggctaacttacgtggaggataagatgaatgtctttgagattgtgtatggtgatcgtgttcgctttggcacacagctgctgaagggagaggctcaaatttggtggagaggcgtgcaggcagcgcactcctcaccaggagtcctgacttgggatgtcttcatcaggcagtttgaaaggaggttctacccggtcaccttcctggagaaaatgaagattgatttgcagtctttcaagcaagagaagaagtctgtcacagagtatgaagtgggcttcaacaagatggt

SEQ ID NO: 39410 - DNA, 428 bp, Zea Mays
gtctgactatttccttaagatatatccgggcaagggtggctcctccaaaggtagtttttactggaatgaaatgtgctaccttggtaagacggtcgattataacccagacaggatcgttccctttttgggtccgaggcagtccgtttacaaaatccatgcctatttcttcccacttccatttgggtactggaaggggttgcagttggcatgcaggcttctgatgctctgccttagttcgctggcaagtgtcgcaccgggccacatactgtgctatctcctttttcattcctctccaccagtatctagttttgaggtctaggtacatcttggtggtccctgggtggatagagtaggctgagttgtgagcttcgtcaagcaaaacttctcgtgcctctccttttggtacacacagacggtttctgaaccaa

SEQ ID NO: 39411 - DNA, 374 bp, Zea Mays
gtaatggatgagtaggatatctagtgatcttgttgaaggtggtagatgaactccaagtgaatgagaccaaggttgtggtatgacttagcgtggtctaaactatggtagtttgctgctaagctagcattgtgtctagtaccttccctaatcttggagtagcaaagacatgagtaaactagagcaaaggtgaagcaaactaaaacatagatggatcctaactctaaagtccattgaggctagagtcacgatggtcattgtcggtgctagtgctagaaactagacatgaggtaccatgagaggcgtactagtgaaatgtagcttgtgctccataaatggaagtggtgattattgtatagcaaggagttgcaattaga

SEQ ID NO: 39412 - DNA, 407 bp, Zea Mays
atagaccaaaccaagagatgaagccgcctagtggtggaaagacatggagaaggcctaaggccgatttcgtcctaagcagggcccagaggaaggaagtactacagtggatcaagatgttaatgttccctgatgggtatgcagctaacctgagtagggggtgaacttatctactctgcgagtcttagggatgaagagtcatgacttccacatatggattgaacgaattcttccggcgatggttcgaggctatgtccctgagcatgtctggccagcgcttgcagagttgagctatttcttccgccagctttatgcaaaagagttatctcggaccgtgattgcagacttggaaagaatggcacctgtgttactgtgtaagctggagaagatctttccacccggcttcttca

SEQ ID NO: 39413 - DNA, 317 bp, Zea Mays
gcggtcgggggtggcgctggcatgctgactagtacgtggaaaggaaaaatggggtcccttctccttggatcttcattcttctagggtttaggccccttcctgggcagtgactccttggttaggaactttttcagcaacacacaatccttttaggcgtgtcggagtggttgctgatggttcatacatggggcttcaaggagtttctcgaaatggtcggtggcctccgtggtcgaggcccttctcccattctggtctgtcacagccaccaacatgtctacttgctatcatcggtctcccttccttcttgctttgggccg

SEQ ID NO: 39414 - DNA, 446 bp, Zea Mays
atcgtggtctgagtgtatacgtcgctagagctccgatggaagttcattgtagactcctcaagctctggtgacgccggtgaggaggttgaagatgctctgctgtgggcggaacacgtcctccgtggcttcagagtggtagtaagggcactggtggtgaggggagagagttttagtggataggagctcgaagtggagggagcagggcatgctgggggggttaggctttataggtgcacaccattgattggaggggagagggcgttgacatgagcagtgcaaccgtttgtcattttaatgctaggtggacatgctcaggttaatgatgcggccatgcgggcatcaagggaggaaagaggtgaaatggttgtagtgaatgtcgttcttgtccactgtcgtatgacgagcttaggggcaatgttcggggtgtgcagaggttggatcagttg

SEQ ID NO: 39415 - DNA, 574 bp, Zea Mays
caaatagcagccaaggcagccataatatcatcttttatagtgctccagcagaccttatagaaccgtctagtgaacccatctggaccaggggccttatctgaagggagctcactgatggtttcccaaacctcatgctcagagaaaggagagtcaaggtctgaaagcgcatgtcttggcagaccaagggcttcaagatcgattgtcctttctctgatcccattctgaccaatgagagtggagtagaagtcatccaccgccgaagctttgtcagtatggtttacaaggatgcgatctccatccaccaatttagtgaccagattcttccttttgcgatgccttgcgtgcacgtggaaaaactgagttagcatctccttctttaagccatgtgattcttgatctcagtcttgccatagttcgcttgaaagaagcaagcagcagggtctgttttttcagtttatttttgagccagacctcagccggggagagggttctaatatcctgcgccatctcaagcctgtgtaacaactcctttgccaaagccaactgagatcaaacatgacccacccgcttctca

SEQ ID NO: 39416 - DNA, 536 bp, Zea Mays
ggcggtttctgggctccatctatttatggctgggcaagcatcaaggtggagtggtggcggagtcagatccgagattcccggcggatttagctgcaacaaccgagcagggagatggttcaggcgagattcttgcgcgggatttgctcctggtttgttgagctttgccatcgaacgaccgagctccagcggatgtggggaaagttgttgacgccgctaggggatacgctgcgcaatctccgattgagaagggagagaagaggaacaatggttccaggtcccacccgtcagcttcctgcgcgcgatgaaggttaggctgggcgtgctcccaagattacgatggtagtggttgcaaccgcttggtccgaacctcacggagaagaagacctggcatgatggccccacccgctggctgcagagaagttggaaggcgattgtggtggtgtagctgttgtgcgggctgagcaaggacacatgtgtgcctggtgtggacggcttgtgatctgcatttgccaaggccgttcggccttatccctcca

SEQ ID NO: 39417 - DNA, 604 bp, Zea Mays
cggattggctcggactcggtcgctgttgaattcaccgtacccacttgctcttcgaccagtcgggataagcctcgccggcgttggccgcttgtcgcctgtgcgccacgtgcttaagcggaataccacgtcgcagtgaatcgccttagcatgtttttcatcgccggtggccttggcacgatgaaagccatggtatcacctgcgccagcacaacttctcctctctccagccgccagcacaactgttcaaaattagccaccaccactctcggacactataaattgatggtattgatggctccgttaggttatcacgaagccagggcacccacccttgcctctgattagccaccacagtgcctgaatttcctttttcccccaattcagttctccatgccgccgtgagtgagctcgccgtggccaaacgtctacaggtccgttcataccctccttgccctcgtttcagcacccttgtgtgctatggatgcttatcggcccagccaattgaactagaccacgttaaatcgccgggaacacctcggtttgtcctcagttcgtgccatcaccgtggacagagagattttgagctagaactccgcatttggttg

SEQ ID NO: 39418 - DNA, 330 bp, Zea Mays
tgttccacggaataccgtgccacttctctaagcaatgaacaacaagaagagaagagaacatctaatggctagtccatcgaacaccaaaatttaaactgttattgttcttaatctagtggttaggtaaagtcgctgccagatttgccgagtaaggggataaactgggatgtactgcttggttcaacggctgagcagaaaagccaagatgaggaagaagattgttacctttgatcggaggcgtagtcagggtagttactaccccaaatccagcaccccggttagctgttgtcgcgccatacacatcatgttcttgtccgcaggaagtagaga

SEQ ID NO: 39419 - DNA, 289 bp, Zea Mays
cgcaagtgtattatctcccatatgcgtgccaaacgaaagaacatcttaagggttgggatgttgtgtataaggtatcaccgcacggtaaattacctgttccaaacgatgaagattataacttagacccggacacctatgacggagagtttttccaagaagatgggctagaagggcgatttgagatagacttaaccgaagcgatcggaatggaagtagatattgaaatggttgttgatgaggaggatgatgaggtgcaaaatgagaatgacttagaaatgcttgaaggcaa

SEQ ID NO: 39420 - DNA, 542 bp, Zea Mays
ctgggttttacgaagttatggagaagaccaacatagaaaagatcaccaatgagatgctggctaggttgtctgaggattcctgcgatagcgatagttttgacgtggagagcgggaatgaagatgtcgaagatcggccgtggaggccgagccatgttgtttttgggaaatcaactgtcaaacaagggcaaatcgaagcgatgaaggacaaatattttcatgatgtttctatagtgagggtcggggggaatcatcgttccccttcctgaagctgatgaggtggtggtcttcaagagcttcatgaaagctgggcttcgctttccattacacaagatgttggttgaagttcgaaagacattcgaaatataccttcatcaacttacccccgaagctcttatcaaagtggggtttttatatgtgctatgaagagccaggggatagagtcggttgctaggtgtttttgcaatattcatgagttatctactagacgaaggcaaccggaaaagagcaataccataacaacttcggttgttacagcttcgtgc

SEQ ID NO: 39421 - DNA, 288 bp, Zea Mays
tcacgtgatcacagcctgatttttccaaaatagctgcgattcccctggcacctgagaaggcgcagacatccccgcgaccgctcaaaacttcttcaaaggcttcagcttcgttgctgatccaatcaattgggccttcaggatcgccccttacgaaattgtcctcgctagagaatgcgccaacattggcgaagctcgattttattttttgcacacattctatggatttttcgtagcatttctcttttgaagaccgaagttctacaactgtcttctcccaataatttttcc

SEQ ID NO: 39422 - DNA, 292 bp, Zea Mays
aggttggaagggtcgaccattcccgatggagtgcttgaagtctttgcagttccgcaaggtgtggcgcatatccttgtgatacgggcactaagcgtcgaggatgtcatctagtgtccgctcgcctccgcggggtgcacctcgggcacgagagacgggtggtccagcggcatggacctcttcacgaggcctcttctcccaacccttgtcggtctgctagtttgcgtcacaccatggtgcggatggagtagacttcgctcccccgatgaggtcctgagcccgttcatcggtggtg

SEQ ID NO: 39423 - DNA, 317 bp, Zea Mays
cgccgaattgtgattcctccggcgaggtcgcaatcatggccaacgcggtggccatggcggcgttggaggggaataggaaattagggccctggccataggatttgagttggacggcagagatgttgtcccgcatacccgttcacgtgaatggatcagtgcctttagatcttgatcgcgcagttcagagaaaatcaatcctcataaaatctaggccgtccatttataatccaagggatcccgagccataccggttcgattctaatcagagccgcacgtgtctgatccaacggctctggttgctccttaccccttcgctg

SEQ ID NO: 39424 - DNA, 461 bp, Zea Mays
atcaccgaggcaccctaacaaatctcctaggccacccgctcaagcttaaacgacggtggtagccaattgcagccgcgacatcaccgtcactcttccgtcgtcgccctctgcgctccaagctcactccgtgattggttcgaattactggggtggagaaaagggcgctcgcagccgtacttatacgcatcgaggaacaccagcacattgagggtcgtgggattcatcgtggttgttacctttgtaccccaattttctgaaaagaagttaaatttccatttctcttttctttcatgttctatggcattggggtttggagtttcaggaggcattcctcagggaaatagtagatcttttggcatttttttcgctggggtcgggagctcagatgggagagcgagttcgggccattgatctcgatccgatggatgggagcccccctctcctccccaaccctagccgac

SEQ ID NO: 39425 - DNA, 1197 bp, Zea Mays
gttagtttagaggatcttccatatattttaaagaactgctttttgcactgtacaatatttcccgaggatcatttgatcaaaaggaaaaggttaattaggcactgggtagcagagggattcatcagagaaacagagcacaaaacaatggaggaagtggcagagggctatttgtatgaacttgtcaatcgtagcctattacaagtagtggagagaaatgaaagtggacgagtgcagagttgccgaatgcatgatattattcgacttcttgctctgacaaaagcaaatgaggaaggcttctgtaaagtttatgatggcatggggagttattcagcagaaaagacacgtcgtttatcgattcacagtgcaaatattaagttgtcgactcaaccaacaaagcttacagtccgctcaatatatgtttttagtaatggtttgactattgaatcacttaggtctttcttgaaacatttctacttgctgtcaactctagatctccagggtgcccagattgtggagctgccagatgaggttttcaacttgtttaatctacggtttctcagccttcgaaatactgaggttacgaatatccccagcacagttggaagattacaaaaacttgaagtcttggatgtttataatgctaaactgttggctttgccagagagtgtttcgaagcttagaaaattgagatatctacatgtagctactgttccaaagataaatactaaaggggttgtgacctggattggaatccaggtgcctaaaagcatcaaatacctgacaggcttgcaaaccttgaggcttgttgaggcgagctcagagactttatttcaccttggtgctttgacacagttgagaacttttgccatcacaaatgtgcagagggatcagtgtgccgatttgtgcactgttataatgagcatgaagcatcttgttagcttagcaattatggctataagtgaggaggaaatacttcaacttgaagaactttgtttacccccaactctttcaaagcttgaattaggagggcagctggacaagaaagcaatgccccagattgtatcatccttttcagatcttggtaacctcaccttattggccttggcattctccaaacttgatgaggactcattttcatgcctcttgacgttgcatggtctacgtgggctttgggttgataaggcttatgaagggaag

SEQ ID NO: 39426 - DNA, 335 bp, Zea Mays
cgtcctcctcaaattcgtggccaccgctttgcccttctataaattgagggccaggccagttgcgccatgtaatccgcaagctatcgcacccactctcatctcttttcgttcaccgtagcgctgcaatttaggttttcccccaaattgaaactccacgccgccgtgatagccctcccgtggccaggcgaagctggtatgattatgcacttttgaatcattgttttagtagctctgggcacccgtggtgctcatcgtggcagcaaattgatctattcagatgagatcaactgggaacgtgagctcgacgccccggtttccgccctgagcgtgggcag

SEQ ID NO: 39427 - DNA, 778 bp, Zea Mays
gttttccttatctctaatcccagacacccatcaggcaatcaatggctgaggggcgtctccctcgtttcagtcgagcagagcggcgcagtggaggttccccagcgcacagtgatctaggattctagtgccccatccgtaatccctgctagtgctacgcaaatccgagtgaataccaaggatagggatgggtaccatactagtggttagaccacacataagcttgcctccaatggcgcggcggcttggccgagagcaccggaaattggacgacagattctcggtccaccgcacgacaccacgcccggctacgccctcggaaatgttctatgggtgatgccgaactctttttaccacttgtcggggtcccgcagcgatgaggcacgactctcaacaatggcggctccctccctgttttctaatggcgagcacaatcggaggcttcagcacaaccggacggaggggtgaggggatgacttcgttttatgccccggacagaaggggactagcacgagccgttggattacgcccaggaattccgcagcgcaatgagcgcctacatcttcgctggatgccacacaacagacggtgaagttgttacggtaggagatagagccgacagatgggccctacctggcagtggcgatactcatacgtgaacgcggatgcaacggactggcgctggagccccaagcgtcagtggacggatgatgcgggttggatgggttgaggggaagtgggtcgcgcgggcgaattggtgctgggccgagctggatttggc

SEQ ID NO: 39428 - DNA, 305 bp, Zea Mays
gccgaaggtgtccaaaggtcctgcaataactcccaagaggaggaggatggctagcatgttggacgctgtcttggagtcgacaagggcaccaactcctgcctctgcaaaggaggccgccgaagctgctacaactcatgttgaagtcgaagatgggccctcagttcccaccaaaacagggcccgttgaaactattgagaaggattctgaacaaagacctttggatgccgctctggtcttggaaaaagaaagcgcacctaagaaggttaaatcgcctactcccgaagcgtctactgaagagttagact

SEQ ID NO: 39429 - DNA, 1420 bp, Zea Mays
gggaaacattgctcccaagacacggagcagaacactctatccagtttaactaaaacaggatttgcttgctggttggaccatgtgtactttcgcccatgtaatggaatttccttaagagcaatgtcattgattgtttgacgaaaacgacccatcattgccctattaatattggaattgttcttgtcagcagagcagtagatgagattaaaatccccagccaccatccaaggaccatcacatgcatttctgatgtctctaagttcctggaggaactgaattttttccccctctccctgaggtccatacacacaagtgagccaccaggcctgcccttctgccctacaaaactgaaccgaaatactgtgattatgaatttttgtttgtcctgtgtgaccaatgtgtctcctccaagcaatcaaaatgccaccacttgcccccacagatggaaggtacacgaaatcaggaaaatcagctcccaacatggacaaaatatttctcctagtgatgttctgcatttttgtttcttgaaagcataccacatcgaccagggaggagtccaactcttttattgagtcctgcctaacagaggagttcagccccctcacattccaaattaaaagttttccaggatccattgagaacagataagaatcactactgaaaaaaccagaaggccggaaacctaataatccaggccaggtggaggggtccaaccaaagagggctgccaaagcctctacctgattatgggacaaatgttgcttgaaaatctttgcataagcgtctattgcctcctgtgtagtaccttcatcttcagcgaagatatgcaatgctctcatagccttcttagtagacctgttaccccaatcttgcatattaaactcaaccccagcccccgcaatacgacggctgcgcctaggagcagccacccgagaaggatgtggggctggtgaggtattcataacttgccttggagccggcagtattttatcaactgctttactgatttttctgaggaaatcttccttctctgatataggctggatcatagttctcgaggccgagtgtaaggtgatgtttgtctgaattaagctgtcctctgtcccctcattctgactgatttggagaagatgtgccttagttcttctgcgaaaatagaccttgagagcttttgttgcttcgttgtgttggactgttactgccatcctcccagccattcccaacatctgtagaggcaagccagcacttggaactgttgtctcaggcaatccagaaacgagttggggcgagactatcatgggggcgtttgtcttcagcggcccagagcacagttggggcgagacaggcaaagaaatgcatgtctccagcggcccaaccggctcaaggggcgagacaggagcggtcccagatgtctctagcgg

SEQ ID NO: 39430 - DNA, 397 bp, Zea Mays
ccggggtcttcaccgttgtttacagaccgttgtgtggtcctggtttgttgccggggcgtactgaagcttgtcttggcaacacatggacaaatttgcacaccggctcaccgaattgctcatcggggccccttccctcaccgtcatccgttccctgtcgtggccaatagtgttcctgccgtttcttccaaaaaaggtaccctctcaggtgttcgcattgttcttctccgcgtgaatcgatgatcgagccggtggttggggcttggggtgtggaggttggtgaccaccggtgggctccttgccaccgcggggttgatggcgccgttcctgttcggtgttggggatcgcgagggtggaggtcgagtgccgcgttgtcggattttagtgtaacggctcggat

SEQ ID NO: 39431 - DNA, 516 bp, Zea Mays
cctattgtttagaattcaacagtatctgcatttgtagaagtaaatgcagtgtgatgatttcgaaatttcatcatggggcatagaagttgccttaagacgggtgattgcgaacgtgccaagcgcgcagtgcgaatttaaattagcatcaatttaaaccgactgctccgctagtagggcgtagtggtcaccctgagttttagataagcgtgagcatgttgcaccgccttaagtcattgctgacttaaaccgattgctctgttagtagggcatagtggtcaccccgagttaagtatgcgtgagcatgtcgcaccgccttaagtcgttgccgacttaagccgattgctctgttagcagggcatagtggtcaccccgagttaagtatgcgtgagcatgtcgcaccgccttaagtcattgccgacttaagccgattgctccgttagcagggcatagtggtcacactgaattaagtatgcgtgagcatgtcgcactgccttaagtcgttgccgacttaagccg

SEQ ID NO: 39432 - DNA, 313 bp, Zea Mays
gctacttggagcctactccatggctgaagataatgctttgtccgcagcctttggaggccgagggaagaaaagactgaacaggatctttgatgcgattggcttcatataccccgattatcgcttcccgttgtgagggcaaggaaaaaaagaggaaggctgccgcttcggccaccacagttgtgccgaagagcaaaaaggtgaaggttctgacccaccggtcgcgttatattgaaccagctgtggtgcctgaatttgtcgaaggagcctcttcaactgctgaagcaagacaagctgcttcaattacacaaagcgt

SEQ ID NO: 39433 - DNA, 502 bp, Zea Mays
gcgatcactcggccccagggagcggctgctgcccccatggcgtcgagattccatcaatgcggtggtggagatcgaccctatcttcgacgacgaaccaatggtacagggggaggagcccccgcatgcaacacacgtcgccgatgaaactgtcgccgcaacatccagcatcaccctgccgccggagaacaggacccaactcaacctgtttcctaggacgaggcgtccgagatcaaggatactcccgacgagtggggtttttgcctattaaggaattcccaccgtcaaagttgtcgcctcgccctagagcgtgaacgtgaagcgaccaggcgtaacatcgggccctctcacgagcatctaccccttccccatgacccacaacctgagttcgcctaggccatgcaaactccaagtcaggtcagaggtgtgtgggcaaagatcgtgaacgatctatcgcgcacacctgagaaagagtgctaccattaggtcctcactcagcggcgaa

SEQ ID NO: 39434 - DNA, 1785 bp, Zea Mays
ctcgagaagagagtcgatcgtgggccgggaggggttgataaggggaaatttgtcctggcgaagatgacgtgattagagatcaagaaatgatgagtggtgaggtcaggacaccggtaccctttgtgatcaggggagtaatcgaggaagacacaatgggtggagtgaggggaaagcttatgggaagcagtagcaaaaaggttgggaagcatgcacacccaaagacgcaaagatgatcataggatggagtggtgccaaaaagagcagagaggggtgttgaagcgcaagctgccttagtagtaaggcgattaagaaaataggtggcggtgtggaggctcttggcctaatagcgagcaggaacggatgcatcaaagagcaaggaacacatgatgttgttaataatgcgaatcatgtgctcaaccttgcttgaagagaagtataggggtaagacatctggagccagacaccatgggagaagaatgatcgagaggagttatcaaactcacggccattgttacactggacaaccttaatagtgtggccaaactaagtagaaacccaagtgatgaagtgcaaaagagacgcaaatgtgttggacttcgaacgcaagggagaagtccacgaataatgagagcaatcgtcaataaccactagataatatttataaccagaaacactgataacatgagaggtccacaaatcagtgtatgagatcaaaatcatgcacatgctaagaggagctagagaaaggaagtcaaatatgatgacctagctgacatgtgtggcatagatgctcagaggtgcccctagtacaagagacaactgaactactacacaatttggacaacacgtcagggctaggatgaccagatcaacgatgccaagtgctggaggtagtggaagtagtcagtgtgtgcgactgcggcgaggacaaaagcgatgtgtagtggaagcggtaggtggagaagtggacgcaggcagtcgcaaggtgtacaggggccagagctatcatagtaggcgagaaggctccgggtagaaagatccttcacggacaatacaaaaggataaaactcaatagagcaagagttatcaatggtaaactgacgaacaaataaaatattttgaatgatataggggccacaagaacattgcgaagatagaaaggtccgagaagaaccaaatcacctacagaggtgaccgggagaatgttcctatgatagatgaaggatgagacagaagcggtgggtgagaagaagaaagtataccagcatccagagcgatgtggtaggacgcaccggaatcagcaacccagtcaatgatagaagaagttagaataatcgtgctgaacgagctagtaagtgactgcaaatcccacccactaaaaccatcggttctaggaacgatgtggggtggtaggggtagtagcgggctaaggtgctggtggcgagagggtcgagaggataccttgagcggggtattgtcaggttagccgtctagggtggaggcagatgcaatgaaggtccacccaaggacaggccaagccaggccacatagagatgcagccggtccatgggttgtagggaaagggcgaaggggcatccctctagccacccccacccccatagtcacccttcatctgatagcaaagacccacctaaaactcgccctgccccgggcctgggctaggagggaggggcgtggagcccacggccaaagggacagacgagcgtgaagacaagccccccaaggtaggagtagaagaggacgggcgcaaggactggcactcat

SEQ ID NO: 39435 - DNA, 421 bp, Zea Mays
gatgagaacagttaaagggggggaagtctgcgtgaacattaatggggagaggagcaaaattttcaaaacttttagaggccttaggcagggtgaccctctttcgcctctgttattcaacttggtagcggatgccttaagtgtcctattagataaaggggtcaaaaagggccacatttctggtgttttaggcgaccttgttcctggtggcatttcccacatccaatacgcagatgatacggtgatcacgatagatgggtacgataggtcaatcttaaacctgaaattaatcctttactgtttcaaatggatgtctggactaaaaataaacttccataaaagcgaggtctttgtctttggggcagttcaacaagaaagggaaaggatggccaatatgcttaattgttctcttggaacttggccg

SEQ ID NO: 39436 - DNA, 424 bp, Zea Mays
cgagagtaaaaatcgaaggcgcattacatcagtccgaaagtctataggcgcagccggaccgacacaataatataccagaccgggtgcgcaacacctcacgaacacacccagatgcgtgaaggcagtcaaccttatcatacaaactacagttacacgcattcagcgagagcatcacaccttacataggttcaaccttcggaatgatccccatctccctatagttaaatagcattatcctcagctcctcaccctcaaaaagccttcgcaactcaccctcacccatactcaccccaaccggcgaggacaacaattcctgcctaccagccctgcccacacgaagacaaccaccatcaaacccgcccactctacgcttcgccaccgcccttcgccgcctacgcccaacactcggaccaggcaaaatttc

SEQ ID NO: 39437 - DNA, 379 bp, Zea Mays
ctggggtcgggagttggcgtgtgaacgagttgggccgtggttcgtgatccggcccactagtttcccctaaccctagccgccctcccctaatcccttgggattttttcagccgccccctcccttatctcttgtgcagccccccctctctctagccttggacaccatcccctctcactcctccacccatttgcagctgccacccacctccccccatcaaaccctagccgcccctcctcaagcccttctctccaaggtgccattcctttcccgctcggatctacgtcacgttggtgcaagtctcccattggtttttggtggagggaagaagaagggaggaaagggggaggattcaaggtgatttttgtgtttgtatcttgtt

SEQ ID NO: 39438 - DNA, 435 bp, Zea Mays
ctggtccaaccgtcgaaggcctctggtctccggcaacgcaccagtggtggcactccatgcccagctgatgcggctgctggtctggggaaagtggacgtaccttttcggttttcgccatgtagcttctgtgagtagtgccatattctgaataatatgcagagctaattatgcacccctccatattattgcactgcaacaaagctgaacgagaaggggaaaaacgtagcttgattaggaactagcttctttttattgccgtttaggatctggtaacttgcaataccttgtagtctaacattaggccattagctatattggattgtcttagtgatgatgctgtgtgcgggtctgttaaggtaggtcaccatggaaaactgaaaccaaacaccagtaatggttccttttttacgtggtctatttgccactcgaatctcc

SEQ ID NO: 39439 - DNA, 273 bp, Zea Mays
ctcattgcctctgccgcctgggaacccggtgccgcctgcgccgcctggaaccgacggacccgctcctccagcgttcgctctttctcctccagtttcttctccttcacctccgcctcaagcttgtgctcggccagcaacttgtcccgcctttcccacatctcctccctctaggcgaggtccttcccctgttggatgagatccatcgcccactcctccagggaggcatccttcgccttgaggttttcttcggcgagagagatgttgctagtcctg

SEQ ID NO: 39440 - DNA, 495 bp, Zea Mays
ctgtatgtagcaaatccttgttcgtccaggttagtttcttcatggaactcctttggataattcttcgagcatctgttatttttcatacattgagaatttggatttaatgctccgcatggaccgtggatcatatgttctgccaccaaacagtaccctaaagggtcgatgcttggatctggaatctcagcactgatgaaagaatcaataaagttggatgtaggctccgaagtgccatttgatacccaaaatatgatatgcgagtgaggtaggcctcgtttttggaattcaattgtgtagagcactgcatggaaagggtgttagaattcatggtagattatgtaatacgtggggaataattgtctggttttttatgtacggtcgtatgtgtgttgtgggatgagaacggccatacctgcagtgcatgatccaaaaatagatccatttcttatgtcatgcatcaaatcatttaatttcatatgataaactcgaactata

SEQ ID NO: 39441 - DNA, 398 bp, Zea Mays
cgtctgataaggctctagggcctgatgggtttacagggaggttctataaatcttgttggaatatcattaaggtggatctgctggcggctctggctatcatccaccagggcaatgttcagagattgggacaactgaattcctcctacattattttgattcctaaaaagatggacgcttcgtcggctggtgatttcaggccaattagcctaattcatagtgttgctaagttggtcacaaaattactcgctaaccgtttgggccctcgtctgcatgaattggtagaatctaatcaaagtgcttttatcagaggaagatcgattcatgataattttatgttggtgtccaacaatcgatcaaatcccttcacaagagaaaggttgatagcctgtttctgaagc

SEQ ID NO: 39442 - DNA, 311 bp, Zea Mays
gttaaagccatacactacctgaaaaggacttaccttggtggtggagtgttccgccctattatacgggaactccacatgtggcagacactcttcccacatctttaaattgtgcttcaatatcgctcgcaacattgtagacaatgtgcgattcacaaccactgtttgtccatccgtttgggggtggcaagtagtagaaaacaacaactttgtccccaatttgttccatagtgtgcgccaaaagtgactcaaaaactttgcatcacgatctgaaacaatagtagaaggcataccatgcaagcgcacaatctctt

SEQ ID NO: 39443 - DNA, 500 bp, Zea Mays
gcagatcaacaggccaacgcccggatttcaatcgctgaatagctcacctggccgattcaatccaatccgttaaacaagcgaatggacggccagtgcattctcccccttcctcggccggacaccgcaccgcgtcgtactagcccacgacggtgccatggccggcgattccaatccgcacaatccgttgattattccccaattcagtatagccaaactacgcggagagaacgagggatccaagggtcagctcattaccttggatcctgtggtgtattaaccccgccgccgtatgagtctctgttaaacccgcagctcgacgtcgttgaaggattccggtcgccattctcccttggtgagaccccgagcacgcgtagagcttctcagggaatcccacatgactcacccgaggcatcactccgccccccccagagccatggcagcgcgatcacgattaagaggagccgacgtgcgcgagttgcgccagatgagagtgcgcggaa

SEQ ID NO: 39444 - DNA, 542 bp, Zea Mays
ggcgtttgacagacaaatagagacataggatgattggaattcgaattgaggcacgaaacgatatgggattgagccgagacttcacgaataggtttatataggtgaatattagtgaagtgagtgcttggtttgaatttaggcgaagaaatagggttttgggcactcggctctgaaacgatcgcgcaaaacgggaattttggtgaaatctaagcctgggatctcggattggtgtgaaatttggcaaggatgatgctggaagtgttgtgaaagtgcctgaaaaatttgggttcaattggagcaagtttggctggtttgggcatttcaccgagcacgtggtgtgcggggatttagggtttttggaaattggccatttgaggtaggaataccctcccgaaggagccaaggacctgcagggatatgaaatagggacaagggaacacaatccaccaactggatgcatgggatttcacagaattttgaaagatttgcaaaaggggtgttcactgcctaagagacagagggaaggagaggcaggggaaatg

SEQ ID NO: 39445 - DNA, 535 bp, Zea Mays
cgggctatgtcgagccccagggtacgaaggccatgggttggagtaaccataatgatgatgcctgggaccatcgccgcccccacgccatccaccacgataaatacgagacaaccaggcagacctaggccccacgattgcacgtggctccacccgaggtaaaacactggttttacctttgccttgtggctccttccgaatgaagccaccgctggccgacccttctcttatcctataacagggggaggctggtctcatggcaagggacacgagagatcggacgggatcaaagggagagagctcttaggcaaccggacaccttcagatggacatgaacctacaaggacgaacacgaggaggaggagtgctgacgagcaccgggagaccgaagccccgctaaaccaagacttagctaggactccacccaacagcttctaagctccacttccaccctgataaagagacttgggagtctctccttcctctctcgatcgcttataacccctactacgagtttgatcatcaatggtgtcggtag

SEQ ID NO: 39446 - DNA, 545 bp, Zea Mays
gttgacatgcatttgatatttgttatggatttggtgtttgaagataatcttttatagtacatttttaaaaatgtacttaattgtcttgtcctctccatatcaaaattatactccttgtgttcaattgttcataaatctctttgcatgcttatactctcactgaactgtatcagtgacttgcgtttttgtacagcaatctgatgtcaagtatcagaaaaaatcagaataccagccaccggaaatcctggacagcagtgatttgcgcatacaactttctgctactaaaaggtttcttttaggaccagaagccagcattgactcaccatctttgaactctgtgctgagaaacagagtcaacagtgtaactgataccatttcagcttatgacagtagatttgaaagctctctgaacccagattggcaaacaaaaacagcattaacatttcaaagcaattctcagggctctgaaataacggagttgtttgaccatgatcattttgaaccctactccagagaagatacaacaatttccttaggacagacaa

SEQ ID NO: 39447 - DNA, 561 bp, Zea Mays
cgaggtctagctgactcaacccgggttaccaacagaagaattccagctgtagacttggtgaaccggcttgaaatgattcttagaggcaaggtatcaaatgttggtgccccagtggcatactcggcctggaacctgcctccttccaaggccttcactcattttgtgtcgaatccacctgtcgctgatggcgatttgggccttagagtgcgaccctctgccgaagaagttagcgctttggttgcctcgctcggagaaattcctgatgatgaacggcaggtccactttgaggtgcctttggatcctagtgatgcagagataagtgctatgcttgatatgctagccgaggactcttctgatgctgctcctgctgggacattggtggtggcgcctctcccagaagctggtacaaccttggatattcagagacctgtcagtgttcgcccaaaacgcccttgccgagccaatcaacctgattctcctgctgatgagcagaaaaagaaaaagagacgtcttcggcgagtatctagtttggatcgggacgttggtcctcccgttcctgct

SEQ ID NO: 39448 - DNA, 279 bp, Zea Mays
cgggcatggcggccgacgaggaaggagcatccatggtggctgctgatggatcgccgacgacgttcccggcaggcgtatgccggtgggaaccagaccccccagcatggcggccggcggggagggaacacctacggacgccgaggaagaggaggcactggctggcaaaggtaggatcaagacctgtcgacataaaggctacgatcgaacgaacatcgggagggcctaagcttacttgggaccatgaaccttccagtggccttggaagcggggcacacgttg

SEQ ID NO: 39449 - DNA, 390 bp, Zea Mays
cttaaacagggaggtatgcagagggagcaccaggactgatggagtaaattcagagttggatttagtaaactgaagaagctttattcctccttgttgtgcccatctgatgctatggatcgtgatatggatggatataaggatgtatggtctaactcaggttctagagttttttcccactgaaatatccacttttggactgatttggagatagtagagagagtaattcggttaactgaaccttggatcagatttggcggtgaagaaaagatctctccctgctggtctccttgtgtgtttgggtggagataaggtcgaagtgcatagccaaggatccagtgtcctcagctctattgaaaaatatcaagttggactgttgtgagcaagtggata

SEQ ID NO: 39450 - DNA, 332 bp, Zea Mays
ctggtttttgccgacgtctctgctccaagtgctccagccgtccaacgtctgccatcggcgtccagtactacagtgctccgatgtttgtcacctagtcaagaattgaagatgagctcgtcatctgaaggtagcacctgctctcccttctctgattatctcccggtctcccttccctctattaccactggtagctcgtcatctgaaggtgcacctgcagacctctgtttgagcagtctatattattgcagaaattactgctagtctgctactaattatgcctatattattgcagaaatgcagtgcttatatagttaatatatagttatatacat

SEQ ID NO: 39451 - DNA, 378 bp, Zea Mays
gcgagtttgtaacctcatcctttgttgagcttttgtttcttattacctttacccttctcatctctcaatcttaccttggtgattacgctatgttcgttatctaaaacctcgaatctcccaccttagttcaagcgtggtctcttacttatctcacccgtggttatatcctatactttacctcttgcaagacttatcttatttctattcttgattgtacctagattcctggtttttttatgcacatttacctcttcctttatatccttgcctattatcacctttgacccttgacctctctccatatttaccatgacgtttacctatttcttagccccacttattccatttcaatccgagagtgttattttccctatcctg

SEQ ID NO: 39452 - DNA, 376 bp, Zea Mays
ggttagtgttgggcgcggctagtgttgccagggaggcggccaaccatgtcgattaagcatggtgtagcggtcgagctccaagatttgcgggggaatcagtgaagctcgagatccatcgtgggcatctgctggtcatattgcagtgggcgcttgcagatgaaggatagtgatccgtcgccaatggtttgtgccctcgtcgtacttgattaatggtcggggcacttccatttcctccccggaattagagcttaatcgtggaacagcatgccgccgcttgggccggactttctgcgacgccaccgtcggtgagacctccttcccttgtttcacccgatcttcacttaagcatagccgagacaaactttgtagttgcgcg

SEQ ID NO: 39453 - DNA, 461 bp, Zea Mays
gcatacaaggcccatccccaagctatgaagttgcttacatctttagctatttctgaccaggctccttacacgcttaaagatggaattattaggttcaaaggccgtgtttggttaggacacacttctgaaatgcaaaccaaggtaattgtggcccttcatgccagcgccattggaggacattctggcttcccagtgacgtatgctcgggtcaaacagttgttctattggccacatatgaagcaacatattcgagatttcgtggctgcatgtgttgtgtgtcaccaggcaaaacctgatcggtctcgttatcctggtctgttacagccactgcccgtacccaactatgcgtggcaagcgatttctctggattttattgaggggctgccgcagtcaggccactacaactccattctggtggtcgttgacagactcactaaatatggacatttcattccattgcg

SEQ ID NO: 39454 - DNA, 383 bp, Zea Mays
gccacatctaaatcggagtagctacatgaacccattggaaagcggacgagacacgacgccataccagaggtacgactgcgcactacccagcaaacgactccatatgggctacgaggcccagaagcatgacccagcatacgacaccatagggggtaagagacctagaagcaggaggccgaactccaccccaatagaatacaagttcttattgtaatgtttacctttgagctataaaagggcaagataaccccatcattcaagagacatctcacagcttcacacaagctcccaattgtaacacgctccaagcaatactactattaacactacactagaccagggcttcggcctgaaccactataacccactcgtctcagatccac

SEQ ID NO: 39455 - DNA, 319 bp, Zea Mays
acacagttgacagactcacaggtacatgaattactgttaaggcaacatcatattcgtgtactattagaaagttgccccgatgaagctgacatcgatccactggttcatacaaataaaacgaaacagactaaaacacctacaaccccagtggtaatgtttttttattacttgtatttttcattgaagggttgtattcatcgttttatttaaatagcatataaccattacaattttttcatggtgaacatggtgacgttggcaagaacatgccgaccaacacaaacgtcactcctcaagcaacaccacatacggaatcttg

SEQ ID NO: 39456 - DNA, 345 bp, Zea Mays
gatcaaattcatgtgtgttgagtgagaattgagatgggcagggattactccaaatccctttgttttggacggggacttggtttgttttctccaacaattccagcccgccctgattgtctgtctaaggccatggttgtacacttgtgctgttggagacttggtttgttttactagccctggcaggaaacacagactgagaccctgtacaaggaaatataaaaaactataggttttcttgtgttatctcgccgatttcaaagctagattgtgtagcaaatagcagatcatagcctaacacacgatcacacatgtacgagttgagggctgaggccctagaattctagg

SEQ ID NO: 39457 - DNA, 407 bp, Zea Mays
caacgatgaatgttatctttgtggcatggatggcaacttgttatgttgtgatggctgtccagctgcatttcattcgaaatgtgttggggtggtggaggatcttttgcctaaaggtgattggtgttgtcctgaatgtttgatacggaaggatggatctaaaaatattgcaaatccaatgagaggagcagagattctaggaactgatccacatggtcgactatacttcttcacttgcggctatcttttggtgtaagtcaccttggactccttacatgtgtatctctctgaacgatcttttgagctctggtgtttttttagcgccctgtattgctgtaatcaaggtttggaatatgaaaatatgctgtgcctgacatgcatatgtccaaccttcactagaaccttatggt

SEQ ID NO: 39458 - DNA, 572 bp, Zea Mays
cgggaaggacggattgacgcgctgacccgacttcgccgatttctagggtcgcgacctgactataaggcttccgcaccgtgaacctgctatccccttggccttatccccaacgacccgttaccaccatcgcgccaccgtgtaccgctcgggtaaaaacttcgctgccaccggtggatttcctcaacgacgggctttcgtcttcggggtgtgtccgaggagggacgcctacggctgaggaagccgtccacgtctgcgattgagtgggtagactcgcatcacggcgtgaatttctcgccggtgtaattcctccgccgtgaagccgcgtcccgtcatcgcctgggatttctgcaccgggattgaaggtgaaatgttccccgtgcttgttcgcattgccttacctttgtatatcacctattccctttgagtttagcgcacctgagcggtagttggctctgcgccggcgaggtccgaccgctgggattcatagcgccgccgtgtgtggccagcggtggaggtgatgaacccatggccgttgatttacggccgaacggctctgattagaagcaggcgat

SEQ ID NO: 39459 - DNA, 620 bp, Zea Mays
gggagacaaagggcagcaaacaaattatttggtagttggaatgattcttttgattggttgtataggttcaaagcagaggtagagctaaggtcacccgggtgtatagtagagattgatacagtcatagtagataataagttacattccagcaggtttttctgtgcattccaaggtagcattgaaggatttttaaatggttgtaggccttacattagtgtagagtccacagctctgaatggcctttggaatggtcacatgccagctgccttaggcttagatggacacaattggatgtttccattggcctttgggttcttgactctgagactagggacaattgggtttggtttatggaccagcttggaaaggccataggatttgtgccacatttggcagtatgcacagatgcctgtaagggtctagaagcagcagtccagcaggtatttccttgggctgaacaaagagaatgttccaggcacttgatagagaatatgaagaaagggtttactggagatgtatatggagctaacatgtggccagcagatagagcatactcagataggatgtacaagtatttcatggacaaagtgattgcagccagccctagtgtacaaacttgg

SEQ ID NO: 39460 - DNA, 345 bp, Zea Mays
ttagttatctgcataggttttgtttaagaggtaaaattagagttctaaattagtgcgagagaagttctaattcaccccctctttgacatccatgtttgtttcatatactaagcagacaagtatttttggaacatttggatggcttggatgctttgagatgatcctataacttgtatgtgatgtttcttagcccgttgatggagttgtgcccggttggatgcatatacataggttgcccgcttcaaaatagtcgttcgaaccctacttcggcttctacatactcaccggacatgtccagtagtgcaccgaatagatctagtgtcgtcttagaggttaccattgaaa

SEQ ID NO: 39461 - DNA, 291 bp, Zea Mays
ctctcgtcgagctcgttccagaactcgtttcctttttgcgagaccgaccatcgcctctcctcgcgaacgacataccactcacatctgttaacccagtctaccctttgtctactcctcagcatctacccctccgtctaaccttgtctacccccgacatctaacttcatctacccctatccacccccatcttgccatgtttcgtcgtgcaaatgtctcatgcgtcgtgcacgcatccacctgtatctctcactcgttcctctcactgtcatcctgggcgcacgcccgcgtgtc

SEQ ID NO: 39462 - DNA, 882 bp, Zea Mays
gtgagatggatgtgtcagatttaaaatatgcatgtgagcaccgtacccctttgagcaccagatatgttccctatagggtgatgggttgaggcgcgacattagagtttggagctcgaggtggagcaggcgtttatgatgcgagcgtttggctgtgtgttagagttaaaatgctttgtttgatttttaacacatgactcaattcgtttgctgtgaatcagttatcggatttgatagtacaatgtcactgctgggtactgactgaattttatgctactgcctgagtagtgtgctgtacaatgtgattgcttaataatgtttggtaaagctttgttcgtctacttgtgcttggctattcacaccttggcctgtatcgtaatgtcaaattctatcaattgcattagtaactgttcttacatgtggagtgcaacaattagttgcctgtgaggtctcagttttcgtgagagttcgttaagctgatttaaccatgcacattatgatgctttgtgttatgatggttccaccttagtaattgatctgccctatgcttactagatttctgcaatagagggagcaaattactgggatgctgtgctgaaagagccattgcgtaaaccatgagctgtctctgttgtcatactgctaaaccacgagctgcatttttgtaaattgaaccctaagttattctttgaaacctgactgggatgcatttgaccatttgctgctgtgctatattttgataggcactgtagtatgctatatatccctgtgaattctggcctttttgtaaacctagttttttaaagtagtagtgctttggtttcactgtgtcaactgaaggtatctttaactttctatatttgaaattacttcatttgatttgag

SEQ ID NO: 39463 - DNA, 710 bp, Zea Mays
ggctgctctacgcgatgtggcggaccagttttggggaaaaatggcgcagcggcgttcacgagtgaaattgagggcggggattgaggctacacggccgtaaggaactatagcttcaccgtgcatactcaatttgggagaagatggaaagggcagtacgaatttctggttgtacccgagttcacttgaagaacagcgagcgcctcgccgtgaacccaacggctatttatagccgtggcggtccggcgatcaccatgcggtcacggataacatcactatggcatgtcgaccacgtcggcaaaaggtgcagtgagggagaactacggcatgcgcgccaccgcggcggaatttcactgagtcacggcggccgccggtgagtaactccggccgagctcaggagatggtgccacgtacgagttacccctccccgacgttatccactccataccgtactcgaatcaggatggcggcggtgtgaatttggcgcaaagaggtcaccggcggtgagcaagccgcgctggcaacctgatccacacgggttactgtaccatggaatgctccgtcagggtttctgacaggggaatttacagagccaataacttccaattttgtgcagtaacatgatcgacaccctttagcaaagttctagacctaagatccagctacaatattgttatagcaatcctaggcaaatacttgctcgatcatgcatt

SEQ ID NO: 39464 - DNA, 526 bp, Zea Mays
atcgaacacaggtaataagcctatccttgtcttcgtagtgcatcgcgcattgtgtagcagcgacgaatttgagtttggatcgccataggcgcggaatcgagctcgggcgaatcacggcaatggcgtcgcggcggtgcgagctcatcaccggcgcgaatttggttggggaacgctgtggctgttggatctccgatgtgtggcccggattaagtcgtcgcgtaccggttgggttgggattgtgtggaccgtccgatcggaatcccgtgaccctggttcaatctcacttcattaaaccgcgaccgtcggatttagatccgagggctacaattgcgtaccggttcagatgagattcaatctaatctgggtcgtccgtagcagatcgagtggatgagagttaaccgtaacccttcggcctcgtgcgttttgtaaaagagaccttgtgttttacttaaataaacccgccgtccagggaccctgttccctgtgtctcgggatttttgcgccgagccccctgtacttctgttta

SEQ ID NO: 39465 - DNA, 537 bp, Zea Mays
ggcctcccagactagaccctgcaggtcccgagcatgtatcaaaggatggctagtgtcagatggtgggtcctgtgggtgtactactaatgctcgctagtcgaagctgtgtgcaggcccagggggccattgctaactctttcttaggtacgctggtctgcagcctcgacaaatcgagcctacatcccaggggggccaagcaccaaggaggaatcggttacaccacacacaacagggacaagtggtacacagataagtgctaatactgctaatactgcttgataaatagtactcaaaagtaccttacaaaaagcaaaagtattacatccgccttcaagtggagtcctagctccatctctactctacaggtatgaactacctccacactagtagggccgcgtgggaagctagctccggacggctcaccagcggaggcgaccacctctgcaccaacggctcaccagcggcaacgactacctcagcttcgagcggctcgccatcagaggcaaccacctctgcatcgggtagcctccccagtag

SEQ ID NO: 39466 - DNA, 392 bp, Zea Mays
gcagaactagctgtataatcccctgaagcactgaatttccatatatgtcgatcccttattccaggctgaagcacaactgcctcaagcacttcacaaagttccaggaattcagcaatgactctgactgaaattgcccctttcacatcagagatccaatggaaattagggagagcatctttgaccaaccgtttgttggcaagacgcaagggcaccatatcaaacattgcaggagctatgtccctaatacatctcccatccaaccatctgtccttccaaaaaagggtattggctccatcaccgagcttagtagtaacggctacagcaatcagattttgtaccaccttacaaacgtgagtggggaagtccgtccaaggcctactgggatctgtttt

SEQ ID NO: 39467 - DNA, 352 bp, Zea Mays
ggatggctgatgatggggagtcacatagaagcctccgttacaaacgaaagagaagacgatccaaacatggaaaaggatcatcaaggtctgtggtcgcccctggccaggcggtatcggcctcgtcagaggatgaggtacctccgtcgattagacagacccctgttcagtgggcaggcgatcaaggcgaaaggaactggggggctttttcttcctgtacccttgaattcagtgatgacatggctcgtgaagaagcaaatatgagaagagccctcttcgttacaatagtgggaaccagaccattagtgatggggcctgaggttcttgaggaagttgctcacagttttaacgtcaa

SEQ ID NO: 39468 - DNA, 647 bp, Zea Mays
cttgattcttgccgattcatgagtaatcattttatttcacagatccttggtgatctcgttgttcccttataacatccctcggtaatgaattttttaccttaacccacctgttggaaccttacctatcttacccttgattgttttctccacttcgccacttcatgagtcttgccttaactatatcctttgttatgcttttcattattatcatctttacctttgacacctctatatcttacattgatgtttatcttatatctgcccatgtcaatctgagagttgaattttatccattttcccttggtcatatcctcttcttgctgcttgcgagttttaactccatccttcgttgtgcttatgtttgttgctgcctttacctttcccatctctcgatctgaccttggtgattacactatgtctgctatctaaaatctccaatctctcatctcagttcgagagtggtgttttacttctcccgcctttggtcgtaacctcatctttgccacgtgtcaatctggccttagctccattcttcattgtactcatgcccttggttctcctgtacctttacctcttacattgttgtctattatcacctttaaccattgtaatatctatatcttcaccttgacgcttactttgaacct

SEQ ID NO: 39469 - DNA, 500 bp, Zea Mays
gttggatcggagaccatttttagcataatttagcacatttgatggagctgatgtgctaatgggtgctaaactttagcacaatacttttagccatcctgattgtttctttagtaggtaaactttagaaaaagtgcagtgctaaactttagcaataggaaacaaagggggcctacacttatgtgtgtacctaccacacaaaaccttaggttaataatttgcagtgcaaataaactgggcattgacttgccaaacacacaccacagattgaattgaagagcatgagtgatagaggggagggcggccgagagggagctactacgtgtgcgcgtgtggaaaagcagagctcgcagtggtgattttacatctttacagctccctttatgtgtgcacggactttaaccagttttttcccccgctaatgctctctgacttctgacccggcccagcgcctctcgctctcctatctctttctcatcctctatggctagctaccccttctc

SEQ ID NO: 39470 - DNA, 1042 bp, Zea Mays
tttacataccactctagttgacgacattgtactgacggcatcctatcctgctctattgggagcatcgtcgatcgtctcagccctgagttcgccatgatagaccttggcgctctccaccactttctcggtatctctgtcacacgctcctctgatggcctactcctgtcgtagcaacagtatgttgtcgatctactctagcgagccagcatggctaagtgtcacccacatttactccggtttactctctttccacgttgtctacgactaacaacgaccctgttgctaacccctcaaagtaccggagtctggttggcactctgcagtacatcacgttgattcggcctaaccttgcttatgttattcgacaagtttgtcccttcatgcacgacccatgagagccacatcttgccctcatcaagagcatcctacgccatgtgaagggcacccttgacgtcggtcttcacctaagcacttgtggtgtgccatccatcattgcctatgccaaactcccaacgacattctacctcgagcttctgcatcatccttggtgataacttggtctcctagtattcaaagtcgcagactacagtgtcttagtacagtgtagacaaagtactgagctattgcacatgcagttgcctcaggagcttcacgtcttgatttcttaggcaacaattgtttattacaactatgacagtgcagtctatatgactgtcaatttggttcatcggtgtcgcacaaagcacattgagattgacattcactcgtctgtgagaaggttgctttggggtaggttctagcactatatgcccctatgaaggtcctcggcgctagggtttcaccgatgacacgatcgtctcccaagtaagtctccccttggccctagggtttgcctaagcatgaggtgttcgtccccgacgctggtaaggtggttgaactcgggaaatcaggtatgtggaaggtggtgctgtttctgttatttcattttgtgtcttcctcttacaatctttgagatttatagaacccctaagtgggttggccc

SEQ ID NO: 39471 - DNA, 883 bp, Zea Mays
tgatgacactgacattcagtacacacctcctcagccacgagcgacacgttctcaagctcaacctctgaaatcttcgctccgtaccaatgagactaggcagattaggaaaggccagaagaagctcaagaagtcgcctaagaaagtctcccaagatgttgagcttgatgacaatggtttccccatcatcgactttgctgctctagaccgttttgatcctcctccacatcttgccgtggatgttgagagttatggtggaccagctgcctcaggttgatatggtggactcgtgtcactattcagacctgaatggcgtcgcaaagtggctgcaaagcaggcagctttgaggatggtggcagaaattcttgagaagaggattgctcacccacagtaatatcttgcaatcacggtacatttttttgagcttatacttccacccactcacatccattttgtttatgtccattcaaaaccaggttgacatactttacatatgttgaaaagttccttcctgaggatgatccagaagatgtgattgctttggagtacaacctaattggcagtaagcagatttatgaagcatgtgcagatggcgaaatgagaagcaatgaccaagtgtactactacaccatctgcatagctaatgaagacaagctcttcaggaccgaagctgccgattacagaattttccttcctaccaatctgtcagtaagtagtagcatttttgatttttatagtatgcaatatgcattagttttttatacctttttttctttctaaattcttcatttatcaatatcttttcagcaccagctactatgtacagtacaacagggcatgtcttgcccttctactcattgccctgcagccctatatggccaggcag

SEQ ID NO: 39472 - DNA, 350 bp, Zea Mays
cacagcctactcaagccagcagataaccctctatatggcttcggaggaaaaggaacattttcactcggcaaaatcaagctaccactgtcattcggcactgtgccaaacgcgagaagtgagcagttcaccttcgacatattcgatatggtctacccctacaacgccatcatggggcgaggatccattaataaaccagaggcattcatacacggactatacctatgcatgaaaatcccaggccccagggtgcaattaccatatatggagatcaacagcttgccaggaacatagaaagaaatttcgtccccagccagcgcaatgtgcattgcctctcatccgagcgcgaagac

SEQ ID NO: 39473 - DNA, 286 bp, Zea Mays
ctcaagtggatattgtactcttatgaaacatatacactacacctcatcactagatgtgcccgatataggataagactgacaattctagagaggaaagtacagttctcctatcacacccaacaatatacaaatatacagtaaagaccaaagcattttatcaattaacacatggtccaaattgacacatcatcccaccatgtttgcacccatgtatttctcatcgatgatgaatgtaatatatcataacgcttgttaccactgtaatttcacacctccactactaggt

SEQ ID NO: 39474 - DNA, 286 bp, Zea Mays
aacctccaggtcagaacatcatcagctgcaaatgggttttcaaagttaaagaaaagccagatgggtctattgacaagttcaaagcacggttggttgctcggggcttcacgcagcaatatggaattgattatttagagacttttagcccagttgtaaaaccagctactgtccgtctggtcctatcacttgctgtctcgcggggttggtacactcgtcagattgatatcagcaatgccttcttgcatggcgtccttgaagacactgcctacatgcagcaaccacctgg

SEQ ID NO: 39475 - DNA, 277 bp, Zea Mays
ctaatctgcttcactctagaaccgaacatagaatagagccatcccgttctactttactctagaatcaaataaaaaactgagcggctccaatctgactatcaaacactgaatggagtcattctatcatcagaatctggaatagagcttttatatggaatatcacattaacctcatgtattgatgaaccttgcatgattctcactaagttcatgttcagtttaatcaaattgattagttttttaattgtgttgtcattcaaacactaaaacctataaag

SEQ ID NO: 39476 - DNA, 428 bp, Zea Mays
tgggagactactttcttggtgcgacgtccggacgatgatctccgaggtgcagaggccttcttagagcactattctattactgagagggatactgtcgaggtagccatgcaggatgcagcacgacaggcactttctcagtattgctcgttggtcagtggtgtagttgatggccttgacctgaagtactaccctcgccattcgaccggcagtgctggaggtgtgattgtctcgccagttggtgagggcaatcccaggctaaacagcatggtcaacctggccaccgtgcacaacacagagttggaacacgcccttgaagagttgggcaaggttcacgcggaggttgcggaattgcatgttgaatgcgcggcacgccactatctggatggtggttctcccacccttgtcaggattcagcacccttaccgttc

SEQ ID NO: 39477 - DNA, 370 bp, Zea Mays
gggatgtcgaccacttctccataaatttgacatagggccctcaatgccttgcgagcgacgacttggtaggtgtctctgaatctgtgccctacagcagtgacactccattccacatggtgcagactggatccaatgtatacagtcacgacacacttctctgtgccatgctcgacgaattcacgaccatcatactctggctggctcttgattccgaggtgaaatgtgcatgctctcaataacttggggaaaccatcttcattttggcaatagctggtttggcagtggacctccatctgacttctgagagaaggaaagggggaaacatttttgaaatgaagggacgagagcaagattgttttttaagaaaata

SEQ ID NO: 39478 - DNA, 315 bp, Zea Mays
tcaggactctatcaactcatgagtctcttatgccggtatccacctacgctgcttcggtcaccaatgttgctaggcaaactctgtggtccctcagccacacctaccggcagcagctgcacaacatgaagtacatgcatcttcctctgtgtattcgtggagaaagccagaccagcattgttctaggtggagctgatgaagatcgcctcaacaccttagctggtgtggtggcaggtcttaacaccgacctagatagtgctaccctggacctctctagggtacacttggagctggaggatgcacatgcaaggatcacag

SEQ ID NO: 39479 - DNA, 432 bp, Zea Mays
acgcttgcacatcgtttccaactgcaatggccggcctcctaatgtcgaagcgagaccatatagggcgctgaatgaccccttttatatcttccctctcactcagatcaaccttcacataaaaccattcttgcatccaggagtctggacactttttccgaaatgtcggcacaggatagctggcctcgacgcgatgtacgaagctgtagcagccaaaaaagttgttatattgttctttcccggttgccttcgtctaatataatagctcgtgcatattgcagaaacacctggcatctggctctaatccttagctcctcatggcccatataaaaccccctactttgacaatagcttcgagggtaagttggtgaagatagatttcaaaagttttcagaacttcgaccaacattttgtctagagggaaccgaagtccgg

SEQ ID NO: 39480 - DNA, 739 bp, Zea Mays
cggatttgcgctggtcgccgtgattcgtgcttggcacgcagaggatatccacgggaaagtaaaagatctcacgggggaatggatttgatcgcggattgaagtttatcaccgtgcctgtagccgtcgcgacgtggccggaccgccaagtcaccgtggaagctccggtgaccccggttgcgccacgctgtagcttgttactgtgcggtagtaatcgtggcccccttaggagtattatccttgcaccgttgcaccggtgaacgccacggtcacagccacccgtattcttccctatctccggccgccagcacgccgtaatcaaattgagagccaccgcccccggagcctataaattaagtgcaccatcggcttcgttatgtattcaagcagctagcgcacgcacccgtacctcagatcctccaccagagagctccaatttctcatttcccaaactcactcaagaacaccgctcggattggcctcaccatggtcagcgacctctaggtctgttcatgccccctgctatcttgtttcaacattcttgtgtgcccctgatactccctgaccaacccaattaagctagagtccctaggatcgccgggaacacgtgtgaatatccgcgatacccgctgtcaccgtggacagagccggttagatcaccgtttatgaaattgagtgaggggaaacgatccttaggtcttgaatttggtctcggccaaagtagggcgccggtcattgcatc

SEQ ID NO: 39481 - DNA, 593 bp, Zea Mays
atgccgaagcttcgttctgggggggccgggcgctgcacttgttcggtggggcatcgtctgatcgtctgagtttcgctgatcgagcttggcttggcggagctgagaggtgggtgtgggtggccggtcggccgtgggatactgggatgcggcgacaacgagaagatattggttcacctcagggtcagtgctagggccttttataagcctttgatgataatgacccggtgcgctgcaggatgctatgccgcatcgctcgtctaggtctgcttggaatattcgcccccatggtagctaggcgtaggagcaggattaacagcgcaactaccttatatatcctctctctctctctcgctgatctgcatgctgataactggcactgcctctcacctgtatgactacatgtccacgtgtgcccgacacgacgatctatcttgccatggctgttcggtgatcttatctctaaccacacccaaattgcatgtatctgctaaatgggtattagttaattgttgttgtttttgtttaaaactatacattgtgatgccttttttaaagggatttttacgtttcagccactagtctgcacactttac

SEQ ID NO: 39482 - DNA, 446 bp, Zea Mays
tgcagccggactaagcacaacaagtgcgcaaaacccgaagtctatcgcgaagactatccgcgcagaagtcgccaaagggtgcagccggacttagcacaacaagtgcgagaaattccgatgtctctcgcgaagactatccgcgcagaagtcgccaaagggtgcagccggacttagcacaacaagtgcgagaaattccgatgtctctcgcaaagactatccgcgcagaagtcgccaaagggtgcagccggacttagcacaacaagtgcgagaaattccgatgtctctcgcgaagactccgcgcagaagccgcctcagggcgcggtcaaactagtacaacaaaagcagaagcgacagcatcaaaccatccgcgctaagaccgactataatcacaccagcacagcatagccaaccatgccacacaaagtacacagcgccctcgcaggcac

SEQ ID NO: 39483 - DNA, 493 bp, Zea Mays
cgcggagctccaaactgagacgacatgggagtagtcggtgcaggagtaggcgcagccagatactgaggaaaaccctgcatcgctacgaactgagaagtccccggcacatagaactgctatggagggagtggaactgcaacttgctgctcagcgcttgacatcatgttgacagtgccctgagaagaggaggaagtcactggctcccatctgagcttcccattgggattcctcctacacaccacatccttgtgatcctgactgcagatagaacacctgccactccactaacactcagcacggtgatgtgcatcaccacaatgaaaacacaccagccccagcccgggcttaggaacagcccgatacctctaagtacttcctcccgaagcacccgatttagaggatttgccacgataggggcggtggcgctggtgatgagacttgcccctcttgtgggctggacctccagagttgcccctcctcgcgtcctggccac

SEQ ID NO: 39484 - DNA, 405 bp, Zea Mays
gccagcgtagcctgctcgccgccagtgaccctccctacgctatgattcgcgccgccgccgtctcaattcgtgctctggatgtcgtgataaacgctcggagcacaccgccgtggataagcccggcgattaaagtatcccggccaccgtacaaagttcaccgcggtggaaccagataacctcgccggtgcactgcccccttccggccttatgccgcgtgtcctaaccgcgccaccgcatcgccatgactccctctagcctcttcgttgatcgccggaatgaccgccacggtagaagccacctagcgcttgcgccagtaccttcttctacctccggccgccgcgcgtcgtcgcccaatccacggccaccgcttgcgcgctctataaattgaccgtgcccccagctccg

SEQ ID NO: 39485 - DNA, 1157 bp, Zea Mays
atcttttctaaagcacgcaactttgggaaaatattgtctgattgtggcgaagaagaaagatgaaggctctttggcgcgacctgttgactaggtgtaaattttgtacactaggccatgctgaagattcgttaggttgagttttgcttgaaggccttggaaaatattatgtctgattgtctgccacgcttcaattgtcgaccaatacatcatgcacggtgaagcttatattacagttgattaccatgatattgctgtgtgggtaatatcttagccgaaggtcatcttgagtgaatgttacaggcatatgaaccacttagatctgatataggacccctgaacacctatatgttggaccctcctttgaagttcttgtttttatctcttattgagtggcccgaagcttgatcttctcattattgggaatatgtgctttgctggtggaactaagttgttgacgtctgagctttgggctcttcccttctactgagctggctatgttctcgtatgtggcgtttttgtggaggttgattatataacattggatcatattgtgatgggtctggtagttgggggttgtaagcttcccactgttgtgactgatgttgcacaattgggcttgaggacgaagaatgtgagttctgcccttgatgctggatgtatgacacatcatagttagtcgagcattaagatgatgtatggcacacattcttcggctggccttcctgcttcacggttgccaattccttatgcttttggatggtgatgctacaatattttgttgtatgctctttattctccccgcaaaatacacaatactagtcaatggcgcgcgccagcgcttgcataggatttccctttttttactgggaaggtagagcggcacaacaacagtcgtcgcccacgcgtgcggctagatgtaccaacggccaagatttttcgcgcgacatggatagtgcgaatgtcgaggaagttgcatcggtttaataagaagaaatagctttcttgattgaccgttgttggagtacctgcctccaaaggtgtggccccccttctgtccctttgtgttgagccaccccagaaactactttgctggctttgctaaggtccgttcgaaggttggcttgttgttggagtttgcggaaactacttttctccat

SEQ ID NO: 39486 - DNA, 278 bp, Zea Mays
tagcggggttttgcatttacattaacattaccgctcctcacaaggaaccaaatagcacctgaatgcaagatgccagccacataacccgcctactaacgcgtccatccccacgtctgggttgtgcggccggcccactactgaaactaaacatgctcactacttcctacatgcacagcacgagtgatcagccacgaccaagctgattaccggtgctgcctgaatgacggaaagaccaaaacaaaaacagatgatgacccacaagtgcagggtttacagca

SEQ ID NO: 39487 - DNA, 471 bp, Zea Mays
ccggagagaggggtggtcactggcgcaagtgattcgtggctttcaccgtggcctaaccaccggcgatgaccggacatgctaaggcaagtcactgcgacgtggtagagtacctaggcacgtggcacccgcgcgacaggcggccaactccggcgaggttatctggaccggctgtaaggcaagggggtacgacggtcagggcgaaacagtgtcccgaactcatccccagcgccagatttttcatccggtgattgttatctgtgtttaactgggcgtgaatcacaacaccagagtgaatccgggcgagagaccaccgggagcgaggggggctgaacctgagatcgtattcagttactgtaccatcagaatgccattcagagcacctgacagagcatatttgggggtgatttgctccaaaattcatgtagcaactcgaccatcccactgtatcaaagttgtaactctataaaccag

SEQ ID NO: 39488 - DNA, 290 bp, Zea Mays
tttaaatgacgacacaagtttattaaaactaattaaatgacgacataaattatggactaattagggttaataagttagtcttatggtcctaaaatctagatgcacgccaaaaaattgtgcaaactaccgtgccacggctctttcacaatgtgcactaatttaataggttaaaaatcatttcatcaatttgcattattaatattttttcagtttagttggtcagcccttaattgaagagtatcacgacaacacctgctcaaccatttattaccaccatattgttgcttgca

SEQ ID NO: 39489 - DNA, 329 bp, Zea Mays
ccccattgctttttgtccttgctacggaccttttgcaacccatcattaacaaggcaaaaacattgacatgctcaagctcccctcccgattggggaggactttaatttccccatcatccgatatgcggatgacaccatcctcgtcatggaagcttgccaaaaacaattgttcttcctgaaagcaattctaaacacttatgcgaaatcaataggcctcatagtcaattatcacaagtccaacgtataccctttgaacatatctaacgacaaaatgaacctgctagctaatacctttcaatgccagattggatatttcccctttacatactt

SEQ ID NO: 39490 - DNA, 306 bp, Zea Mays
ctttccttctgcactctagttccaccatatttccacgacccttgaaccagttagtctatgtgaagtgcgaataatcttatttccgcatgccagctaccgtttccagtagttttgtttgctttttctgtatttgaggttataaattgttgagcagctcagtttgtaatgcacactgcttggatgccctatttcttgagttgatctcttgctcattttgcaggtatattctagtttaccctcaaggatgcgatgtctccaatcacttgtcattgtttctttgcgttgctaatcatgaggaacttctcc

SEQ ID NO: 39491 - DNA, 274 bp, Zea Mays
acagatgttgtgactggaaacatatctggttttcctgccagccaatttgatcatagtgcatgggcatacaagggtgccatggtcaggaatatgccagatgacccgtcccagtcacaacatctcgttcaagaagatttagttgatgtatttgacattttggatgacctgaagaatgaccctgtacagcgtgatttgttgaaagaagtcgagaaacacgatgtaaagaatgtttctacatttggttctactgaaaggagcatccccctgtcccaag

SEQ ID NO: 39492 - DNA, 598 bp, Zea Mays
aacagataagtacagggtctaacgcgaaagaaacccatgacacagacttaccccgcggtggatggcgggttgattcgtaaaacttacggggtctctttagcaaataggccagggcgaaggggtatcgggctatttaggccgttggatcacgcgcggacggcgcagattagagcacatccaaatccaagcggtatgcatcagagaccgccggatctgtgatcgacgggcatgatttgattaaacacaggccacacaaccgtcgattcacggcccggatttaatgagcgaaggggtacgctcgcacctaatcctatccgaccgccgcggcatcgatggtctggatcaaaatttgtcacaatctaatcatagccacaccttggtcgatcaacggtccaagggcttctcctacctcccggtcgccatggacgagggagcagtggccggcgacgacgctccctggccggacctccctcccccacacacggctgcacaaactcaaatcctacgggtactacgtgatgggaagacgcaggtgaacaccaaggaagaatcttaccaagggatgggagggcacagagacccaacgatggtgaatggc

SEQ ID NO: 39493 - DNA, 343 bp, Zea Mays
caggcttcattggtttatttgaatgggttgtcatgacatttggtcttaaaaatgctggtgctacttatcagagggctatgaatttgatcttccatgagttgttaggaaacactgtggaagtttacattgacgatattgtagtcaaatcagctgagttcaattctcatctagctgatttgcgcaaagcctttgataaaatgtgtcggtatggtttgaaagtgaacccacgtaaatgtgcttttggggtgtcggatggtaagtttttaggatttatcatccatgaacatggcatagagatagaccctgaccgaattaagtctattaggaatgtgggacctccgac

SEQ ID NO: 39494 - DNA, 402 bp, Zea Mays
cttataaatattatttttgggggttatttggtgttttttgcccctgttgtataatgcaattgtgattatacccctacttttctaactgtgattttactctcgcgatcatgtttttgaagctttcgtttgcccctagtttgtactggcacttggtactgccgcattaaacgaaaaaattagaaatcgaaattagggccacacaaaaagaccaaagtaccttatatcctttgacccatgccttctctcctgtacccgttcacctagtattgatgcaaaatcctcaccctaacaagaagcggtgatgcgtcatgcgtagggatgcaagcaaaaaggttgacaccgcagaacaaggttggtttcaacgggaggtgttaccgaacgcgttagtggtgtgcgggacga

SEQ ID NO: 39495 - DNA, 337 bp, Zea Mays
ctcgccttgatttgttaccttacccctgccgattaatctcgacttgaaataggtgaccatactcgtaggttgaaacatggattcggatcacatattaatataaatatgatagtatatctgttgatgaagacgataagctagtacccaacaagatgtaacctccaatgcaaacgacctgcagtttgcaggctagaaccaactatacaagcaaggttgtttctatgccatatcataaatttgtttgcatgggttctttactaaactgagcagtggatcctagtcatacaaaaattgagaaaagagctataggtgctgccttctctcacgttggtcgaat

SEQ ID NO: 39496 - DNA, 381 bp, Zea Mays
cttagaaatgacttcaaagcttttacacctttactttgttacactcggtgtaatctcatatttattatagagtgtcaaagaatataccttcttgatgtttcttgggacaaaaatgtaaaggaaaaaaatgaaattacaatagatattttgaatagctttggttgtttgatccagtccctcaggcatttcagtagatgcgctttgattctggcacagtactattgactatgcttgcctcatattgttcccttatgtcttgttgtggagtgttttgcacagaaaattgctgctggatctgaagtggccctggatgttgttgctcatatgacgaaggcgctggtgtaaatggctgaggcaaaatccaaagagccaaagagtgac

SEQ ID NO: 39497 - DNA, 560 bp, Zea Mays
cttagaacttttagtcgatagtagaaattgttttgacttatatagagaggtggtgacatgccaaagtagtcgtcgccttctctatattcataagtcgagtcgtgatgatgcgtgttatgcgttcgttaaattatgcttcgcatatagtgtatgattgtgctcacggtttcgagtagacacttcaaataagtcaagtaggtttgtaatgaaagatgtgtgatgaagttagtttgttttaggatatttattgaaatgctccattcatgtgatagacatgtgtggttaattcaattcgagtcggtgtgtgtgacgatgatattcatgaattgaatagatgtcctaaaattgtgtagtgaagcttaggttgagtttcaaacaaggtgggaatgttttggtaaagatgtaggtgaattgtgaacgagtcatttaacgtattagacatgtcgtgtagtggtagtttgaaaaatgggttaggaatcgatcggctaaatgccaagttcggttagagttattttgttacttgggattgtggggtgaagtgatggcatgactacgtagcc

SEQ ID NO: 39498 - DNA, 449 bp, Zea Mays
atgggcgccgccctccccgctggatctgcagccaccccactccccgtcgcgccgattccatgagaggtctctcgctcgatctctttctcactgctttgagttgcccggatttatctcgtgttttctgggttgagttgcccgctggatcttgagttgcccggatttatcctcgcccaggggtgcgtctccgagcagcacccagacacgccgtaccagcagatggcacgcaggttccaggagtgggggctggagaaagaatggggcgacattgacagagcgtgcggggtctgggtgcccgaggacgacgacgagggtcttaacaccgtacccactcgaaggcttccaccatggcctccacctgtttgggaattctggatgtcaatgaagattactgatccattgagcttcaagttgggtcacagatggcgagtggaagggcttgtctattg

SEQ ID NO: 39499 - DNA, 284 bp, Zea Mays
gagaggagttgctccggctctgtacatatgcttcactcgatcagctgcctctcatgtagcccaagcaaagagtctagagtcctgagatgacagtgctaataacttgttgttttattcttgttccttgttaagggctgttgtctagatagttgaagccaaggatatttgaacaatgcttgatgtaatatgttccatagaattaccttaggtttgttctctcttcacgcagcagttctaatgatcttgtacttcttgactgttgccattcttaataagaaaccgtc

SEQ ID NO: 39500 - DNA, 340 bp, Zea Mays
ggaaaacagaggtcaaacgacgcgagaacggtgtttgaacaatgaattgtgtcatagagagttagaaattgaaaacggggcatgaaatgataggaaaatgaatcaatactttactaacaggtaaataggtatgagaataagtgaagggagtgcttcatttgaagtttggctgaggaaaaataattttggcactcggctcaaaaaggatcaccaaaaagatgaatatgttgtgtaacaggtggctagagtgttggatagttgtgaaatttggcatgtgaggtactagtagtagctggagtgtgctggaaaaaattggggttgatttgagctcgtttggcta

SEQ ID NO: 39501 - DNA, 447 bp, Zea Mays
gttgattgaacaaatggttgtccacacttaatataccaatgacaaaaacaaatatagctttggcaaaaattgattcataaggacgagtcgggccagaacaagccagtaccaaacctactacagataagatgataaagataaagatcagatataaaaacaaatcgaaaaccaggcttttagtgtataagacataggatttagggtataaaacaggagcaatacgccaacgactacgttgatttcaagtcaccccagtctaaatttgggtgaaggatgagcaattttgtcttctagtacacatgtacctcaaatttgtctttttagtatgaacttttttcagaaccgaatttgcatctcaacttttgcggcatgtccaatctttggatgcactatgagtgcaccaagttttgaacgtttcaagtatgtttctctaacaggggttttcac

SEQ ID NO: 39502 - DNA, 780 bp, Zea Mays
cctggacaaaattctgttatctcgcgccatttccactctatgcattgcctcacgagcaagacccaactggacattcacattgcccacttctttatgcccccaggattgcagagacttagctcatatttttaatttcaatgatatcttctccatagtgcaagaatcctgtaatagctgattccacaatgcagccaccacctccaaaaaaccagggatcttaggccaaaaactcccaaaatgaaactgtctcttacccaagcacacctctctgactttaagagttaagggacagtgatccgaaactgaggtagcattactgtgaagagaacaatcaggaaaataatcttcccaactgtagtgcagaaaacatgatccaatttcacaagggtaggcacatccctctgattcgaccaagtgaaccttctaccaatcaaaggaatctcctttagctccaaggaattaacaagacctctgaagttacccaacattgtcctgtttatgttggaattattcttatcctcttatttgaaaatcaggttaaaatcaccacataataaccatggccccgcacactcctccctgaccgatcttaattcatggagaaaagcttgcttaaggctatcctgatgaggtccgtacacacctgtgaaccaccagcaagaaccagactcctcctgaaactggactgagacagagaagttcttcacaatcgaatccacagagacaaaagacccatcacgccaaacaattaacacccctcctctagtcccctgagcggag

SEQ ID NO: 39503 - DNA, 456 bp, Zea Mays
gttatcgtaaatgttcaaatggactaaacaatcacctagcgtctatcaatttattcaagctaaaagtccatttaaacggactaaacaggatcaacaagccattgtgtagaggtgtgtaaatgggctaaacggccgtgtaggcgacagttttgaggccagcgtttgaaattgtaatctgttgagctgttagttgcttagcttttaggatctcttgaaacttggtaatgctttatgttgcaaaatcttggaattaatttttaaatagcaattatcgattgttatggaaaatatccaacaatgtgattactgaattgaggtatgagctagtgagaattcacccatgcctagttttggtgatcctatcatgtttagggtaatgtgtgatgttgtataaataggaagtcctagtctatgcatatgtagttatgtcagtgaaattaaatattactttatgaa

SEQ ID NO: 39504 - DNA, 876 bp, Zea Mays
gcgcctcagagtttgctggtatcgcgctgattgaatcaccatattcagtcgctcttcttcgagtacgtcaacatcttctagcctagtagcttcagcttcagcttctgctatgtcatcaaagattaaccttggtgccccgaacttgagatcggcaggtagcactgcctccgaaccataaaccataaagaagggggtatttccatgcagagctcggctaggttgagttctcaggctctagactacgtatggcagttctctgatccactttcctacgaatttctcattcttgtcgaagactttctttctgagtgcttctaatatcatcccgttagctctttctacttgcccgttggcccttggatgtgccaccgaggcatatttgatctgaatgctcttttgctcgcagaaatcgaagaattccgaactggtgaagttggatcctaggtcggttatgatgctattcggtatcccgaacctaaatattatatcttgtatgaattccactgccttagctgaagttagagaagcaatgggtttgaactctatccatttggtgaatttgtcgatagccaccagtacatgagtgtatcctccttgagcttttttgaaaggtccaatcatatccaatccccagcacgcgaacggccaagttatgggtatagtctgcagctgctgtgatggtagatgctgctgttttgacaggtactggcaggcttcgcacctctggactaactcggctacgtcactcttcgctgttggccaatagaaacctgacctgaaaaccttcccaactagggtcctggatgatgtgtgtactccacattgcccagcatggacttcatctagaagttgctttctagtggctgagagaatgca

SEQ ID NO: 39505 - DNA, 623 bp, Zea Mays
caaatcgcgttccaagggctcaattaccttaatgagcgcaaccccctctccactcaactctaggccacaccatggtcacttaattacagagcaggcacttatcccaagtacaacggcaggacaggccccactcagtacatcatgagttatcatgtagttgtcgcatctttgggagatgactacaccatggccaaatccttcattatcgccatcgaaggcccaaccctcacgtggtactcaaggcttccaccgttatcaattgactcatggaagaccctccgcgacaaattcctgcttaattttcagggatacagactcgagacagacacattcgtcgagctatctctctgcagacagctagaaaaagagtctacgcgattactacaagaaatccccatcgctcaagtcacaactgccattggtcgacgatcaaatcgcgatccactacgcaataagtggcctttgcccacgacatatgtacaaccattgcacaagagatccactatccactctccaggacttgtaccaactcttcgagaagtatgtccggtccgaagagctatactaccggaaggtagaatcacaacgcaagccgaaagagtccccgcagtccagcaagtcat

SEQ ID NO: 39506 - DNA, 455 bp, Zea Mays
gttgatttcacctaagttctctctatgtgcggtatccatccataggtgatttggggtactagggtgctctggcgcctatcggtgggggcgctccaccgcggggatcctggcgccgccgtttgtgcggtctgggggtgagagacgatggagctaccgtcactcatgggaagaacaactcagattaactcgagccatactggttcggctcaaggcacggttgccgttgggtcatacatcaatggtggggaaatcataccgtacacgttcggttgtttcatccgagtcgtctacattgtttgggacggttgagatcagagctcggttatttaaatcgtgaccgtagagactagatcggatggtccgcattgggtatctgttcacaatctttaggctccgatctggcgcgttcgtttctaatcgggcggttgataaaccaccttaccccttcgtccgcg

SEQ ID NO: 39507 - DNA, 294 bp, Zea Mays
tcgccggtgaccgccgcctctcggccttgtgccgcgtggctctacctttccaccgcatcgccgtgactctctatggtcgtctaatcatcgccggtgaggtcgccacgacggtagacacgagttcacgcgcgccagtgctcttcttcttcctctgaccgccgcgcgtcaccgctaaaattcccggccgccgctcttgcttcctataaattgagccctccatcagctccacagcatcaccacgcactcagccgcccagtattgcccccagccgatcaccagtgtgcccgaatttct

SEQ ID NO: 39508 - DNA, 393 bp, Zea Mays
agtaaggacgtttttcatacttcgtcaaggacagcatgagcttcgtttccagctagttctcggccacccttcatctagatttgggtaataaatttgatacccacgcttcgagcctcatttggaatattctcaagatcagccgggaaaatagtgaaggtgggcttgttaacattttcaaatgtttacacccggcttttgcaaatatagtagcagttcctcaggcggccactagggcgcaaaaatctccatgccccaccatcacttcgtcaaattcattgacttctttctcgacaaacttaagcacctttggagtatcgtccgcagaataattcgcttctccagacattgccccgaccgaattaaaaatttcgcgcagacgaagggagcaccgag

SEQ ID NO: 39509 - DNA, 283 bp, Zea Mays
gtcgggtgacgacgtggcacgccggtgttttagaagtaactgccgggtgatgatgtggcacgccggtgttttagaagtaactgccgggtgctgactgggcgcttttggaaacggtatctgactctggaatatcccgcatatactgcactttcagccgcctctgctttccgtgccctagttcttgctttcctgcctccagatcctctcttcaattcggctctcgctctgttcgccagtagagttgagatggcgcccaagagaaaggcctcgagttcatccgctg

SEQ ID NO: 39510 - DNA, 344 bp, Zea Mays
gatttaattgtctctaaaacatctagcacattaaccatcctttttcttttaggggtcactgctggacccttatggctttttgttgcctcagtttttgccgaaggactcaagacttctgatgtctttacttcttcagccctcgtttcttctatttttttcagtcactggcacttcggccagcacttcaatatttggcaggggagctgtctctttagcttcagtggccgaaggagtcccactgacaaatgcaggcactgtggccggttcaatataacgtggccggtgtgtgagaacttttacccttctcctcttcggcgccggctcgctaggagcggctgaagcag

SEQ ID NO: 39511 - DNA, 752 bp, Zea Mays
ctggagcgggcgaccaatcatactcagaagaaacttcctccgagtactccgagtcaccaaagtcctccgagggtggactcgaaggacgcttgcgcttgccgtcagcgtgatgaggccatcacttgcctctcttgcctctgcccatggtcgtgcagaagggggagaagtgaggaagaagaagagagcaagtgatcaagggcgagggaagaaagcagccagggcaagcaggctacttaaataggccaaggggtgaccgtccacttcctaccccgctcaccgaacagtcgcaagaattcaataagcaattcaagccgcctgaaaatgagtgaggcaactggcgctgtttcgcgtaacatggcaccggttggactcaagtcaactgctcaggaaaatgattacacccctccgtcacatcaaattactacttcaggacaacgcgataaacaccttttgcggggcagacaccctttaggcacacccattgggtgtatctcacggaatcttcaagattttctgaaatgaggatacctgcaaaatatacacaatgaatgtaccgcgacaaaaagagaagaccggctgaaacgggaggaagtccaaatgtggttactgaagcgcaagtccaatcaatagaggtattaaagtatagggttgagtggtgtccagccgggggtcctctgtttcaaccagccagatgtccaacttgtcaccgatcaaattgattcaagacctaacaaggcatggacagatagtgt

SEQ ID NO: 39512 - DNA, 318 bp, Zea Mays
cgggatcgagttgttacccctctcctgatgctacccaggatgttgtccaccggatgatctctttgaatggtatggtggactcgaggatggggcactgatggttgtctttgaatttgctcctcctcatcatccacttgatcaagaggcacttcaccatcaacactttcatgttcatcttctaccacggttggcatcctttggggttgatgaccttcttcaagacttggatgacttgaggttgatgggtttgcttgggtggaggatttatcacccaccacctttgcgcccacatcaaaaacctcattggtcatccacaag

SEQ ID NO: 39513 - DNA, 1524 bp, Zea Mays
cacatattgaagatcaatagtcttctgctgacaatgggatcgagtaaaagatgcatcaacaccgatgtgtttagtaagttaatgcttcaccggatcatgagcaatatgtatagcactcaagttatcacataacagaggtgtagacgtgtcacaagaggcaccaagatcagccaagagccagtgcaaccaaataatttcagcagcagtagtagcaagagcccgaagttcggcttcagcactagaacgagatatggccgcttgcttcttggatttccaggcaatgggagaagatccaaggagaatacaataacctgtagtagaacaacggtcaacaggatcacttgcccaagtggcatcagaatacatatgaagctgaagtgggctatcagacgcatagagtaaacatctggatattgtcccacgtaaatatcgaagcacacgaagcaaatgaccataatgagctgtagttggtgttgatacaaattggctcaacatatgaacaacatgagctatatcaggtctggtgatggtgagataaacaagactacccacaatatgacgataccgagttgggtctgcaagtggtgccccatccttcggatgaagttttaaatgaatatccattggtgttgcaacaatgcgtgcatcagtaattccagagtgatcaagaagatcttgaatatacttggactgagacagataaaaacctttttgagtctgctgaacttcaatgcccaagaaatagctgagtggtcccaaatcagacatctgaaattccttactaagatgttgcttgacataaaaaatatgttctgagttgtcaccagtaatcagcatatcatccacgtgtaatagaagtaaagtgcgtccttttggagagacatggacaaacaatgcaggatcatgttcactagaagaaaaaccagcaactgtgatgacagagataaatcgctcaaaccaagcacgaggagcttgtttcagcccatacaatgcgcgacggagacgacaaacatgccctgagggagtatcaacctccggaggaggatgcatataaacttcttcatgtagatcaccattgagaaaagcattcttgatatccatctgggatatagtccaagaagatgaggctgcaactgcaatcaaggttcgaacagtagtcatatgcgcaacatgtgcaaaagtctcatcataatcaggtccttgagtctgttgaaaaccccgagccacaagacgagctttatatctctcaatgaaaacatctgatttggtcttaactttgaagacccatttacatgtgataggaacaacatgcgagggtaaaggaacgatatcccatgtaccagtgcgttcaagagcagccaattcatcaatcatagctagctgccactcgagaagcccagaagcttcctgatatgtagtgggttcaacaattgccacaccagctcgtggaaaaccatagcgatctggaggttcaatggtaccacggtcacgaagacgatatccctgattaaaaacatcattaga

SEQ ID NO: 39514 - DNA, 314 bp, Zea Mays
atgagattcttctccgctttgcctgatagcttcgtttgctatctctctgccgccattcatccatacttcagaataaaatttcccaccaaagggcggtagcttcggcagaaggatctgtaatgtcatttgttgaaattgagaattctggctgaattacaaccttagcatgatcacaaccagcctttttgagcaatgaaacatcccctcgagcacccaaacaggcaaaaagtcccctctgccggttaggacttcgtcgaaagcttctatttcaccttcaatccatttgatcacaccttcgggatctccgcgaataa

SEQ ID NO: 39515 - DNA, 485 bp, Zea Mays
ggagggtcacagccgtacaccaccctgaatggcagcgcgtggagtgaagattggtaggcggtgttgtaagtgtactccgcctaggggagccaccgaagccactgccggggtcggtcgttggtgaagcagcgaaggtacatggcgatgacgtggttggtggcctctgactggccgtcagtctgggggtggaaggcggaggacatgtatagcttcgagccagtgagtgtcagctccttccagaatgacgaggtgaaggccgggtcgcggtccgagacgatggattgcgacacgccatgaaggcgaactacctcagcgaagcgccatgacccatcgggcttcttgactaagaggacaggcgacaagaacggggagtcgctgcgacgcacaaccccctggtcaatcatggccgcacactgccgctccagcttactgccgctccagctcatccttctgggccgccggatactggtaggggcgaactgcca

SEQ ID NO: 39516 - DNA, 512 bp, Zea Mays
gcagaggaggctccgaggaggatttcgacgagctgcttcgccggcggcgggactgaaatcggcacggaggcggctgtgcgcggctagacgcgagaagcacgggagagggtgaaaggaggctgggaaggagtttggcgagagcaggcacgcgatttatatccggggaggaggaacgggcgctgggatggcactaatggagaagaaactgtcgccattaacggggaagaaacggatgactctaatggacagggatatggacagtaaagaagaggagaggagagggcgcgacagttggggaggagaacgggacagacgcggtgctgatggtctccactacgggttggcggccgtgggaggcgaggcgacatccgttggtggcttcaactgacggcggcgacaattcagtgcgcagcaacgaacgggagaagaggcaggtagaagagatacgatgaatggggttgggcccacctggaagggagagaggtgagggagagagcatatacgggcgtggg

SEQ ID NO: 39517 - DNA, 392 bp, Zea Mays
gcgaagcgtagagtgagtgaggtggatggtggtcggcttcgtgtggacagggctggcaagcgggaattgttgtcctctccggttggggcgagtgtaggtgagggggagttgcgaagtctttttgagggtgaggagcttaggataatgttgtttaactatagggagatgggtatcatcccgaaggttgaaccaatgtaaggtgtgatgccctcgctgtacgtatgtaactataatttgtatgatccggccgtgtccataggggacttgtgcacttggtctagcacatttattatgtcggttcggctgcacctatagtcggtttttgcgcggatagtttttcgacgaagatttttgcacggatgtaacgtgccttcgattttgcgcactcgttg

SEQ ID NO: 39518 - DNA, 376 bp, Zea Mays
ccattgcagtatagattgtcatactagttaggacatgctgcactagaattcttctgccagctttgttcaacaactctgccttccagcttgggagaagatctgcaattttctcaataaagggcatgagctgctgtttggttagtttgtgtagagaaagagggagacccaagtatttgcagggtagggactccacccccacaaggtaacaagctttgaacctccaggatggtctgctccgaacatctgataggataaatactggatttctgcacattgttgtgtagacctgaggcattcccaaagatgttgagaatgtccagagtagtggaaatgtcattctgagttgggagcaggaagagggccacatcgtcagcat

SEQ ID NO: 39519 - DNA, 367 bp, Zea Mays
aagaaagattagtatttagtagatctgattaagtatgcagttttgtgatagtagattgagctggttatcaactcctagtagtcagttctatttattagcagataaggttgttatcttgagtcggtcaggagtattaggagaagttgttagcctaagggcggcaccacaatataaggtgccttagtttgtattagggaatctatacaggaacacaactctgtctccccttggcgggactcacctcagtcatcctggccgacggtgaaattcctcaacctcactgcccatacgctctccgttcccttccacacgccttgctatagctacacaaccctttgcgcacatctaggagaaaacagagatcaac

SEQ ID NO: 39520 - DNA, 366 bp, Zea Mays
ctgagatactttatgaatagggtcatccggcttcttgaggttgtgggtgtgcgtctagggccgtactttgggaggtgcggtcatgttaatagtggccacttggcatgctctcggcctatcgtttaggtgattgaccacaacttacggtgtcatgtttgtcttagtcggcatggacttcacgacgtttgacttgcgtttccaccttgcttctctttcttggttgggaccttggtggtcgtcccgcctcgcggacttgctcggctaggtcctagtcgcccactcgcctcacagacttgctcgataggaacctggttgttcgctccgtctcgcggactttcttgtacgggacgtgggtggttgccctgc

SEQ ID NO: 39521 - DNA, 316 bp, Zea Mays
agtttacctcaactcttgcacccaaagagtaaaagcagtgactaggatgcgacactaggaaaagagactccctaactccccacttccacaactccacaatagaagatgcttcgaccttcgcatatggtaccatcaatcaaattgctgataaaggagcggaatgggctaatagataactagcattctccacgaacacattaagggtttccatacacaattccataaggaccaacaacatccacaaaaaatcttgcaacaaaaagtgacttgagactattaagcatctcaatcaaacctcacgggtatgaccttcaac

SEQ ID NO: 39522 - DNA, 281 bp, Zea Mays
gaacattacaaatgtctacaaattagcaatggccatgtgttagaaaattactcaccgaattatttgcagtaatttcagcttcaacttcaattggttcatcatcttcccgaccttgagcatttaaatcgatgtcaataccaacacttcggccaccacgaatgatccttccggcactcctactaccgcgtatcacaccacgtttcacagaactagtgccacgaccggcactacgccctgccagtgtaaatcctgcgccacgacgacctgccgtcatagaacca

SEQ ID NO: 39523 - DNA, 361 bp, Zea Mays
aatctattaagcattatatagatcagaaaagggatcaattagaacaatgtatagggtgtataaatattgaagcccgcacccgcttgatcctctacgacataggaaccattgagattaccaagtacggagaaaagcagggaggacttggagccgtcaccgccatagctcatctccgctattaatcggtgcccagggaatgggtaatggcctctccaagaaccatggagtgtacgcatgtggttggtagagcatgggagttctcgggttcaacacaattgttcgtcggagagcacaagtccgtcgctgggctgcttcgctccgtggtcggactccaccgcagtcatcaagcccccagtgatcg

SEQ ID NO: 39524 - DNA, 392 bp, Zea Mays
agcgcacttgcagatccttgaatctcatccatcaccggccgtcttcctataaattgagcccgagcgctgcttctttaccacatcacacacacgagtgcttgcgaaatcgacccaattccaccgaagaactcagataggccataaatctcctcctcactgttcttagcgccgccgtgaaggacctcttcgtgggcagcccttctagggttagtactcgcccaattgtctcttgttctagcgtgtctttagcttcctattgctctcggtgccgtccaattgaattttaccagagccccaccaccggaacatcccgttgttccatagaacgccaccatatacaccctctctgtcgacccgcttccctaccctcgttcggcctaaattcaatcgtg

SEQ ID NO: 39525 - DNA, 379 bp, Zea Mays
ctgaagttggtttgttgatgtccaccccgaggaaaattaggagagctgtcaataagcttactcccaagaagaagatgcatggcatgtagacagcttcaatggtgaatgtcgactgtattttgtttcagaatatctatggcatgaagacagcttcaacgcatgttaactgaatgtatctgtctttcctttcagttatgtgttgtttcagaaacaaatgtgcatgtgattatgtgaactgaatgtatctgtgaaccgaatgtgcctgtgcaatgaatgttcgtgttaattgaatgtgtctgttacctgttatgttgtggcgtggtaactaaatgtattaactgaaattacagactacatgcagatttaactgaatgtgcct

SEQ ID NO: 39526 - DNA, 336 bp, Zea Mays
cacaaccgcaattatgcaccgagttgttacggtggcgagtacgatgatgttgttacacatcgaggagatgagtctagtgagggggccccacgtgtaggtgatacgaccatgcacgcgccacggggagtccgaacggtggtccccatgtgtcatcgggtgcgaacgagcgaagtttgcgggagcactgcgattgacaagacgacgatctgtgcgcaagggcccactatcaatgagcaagggaggatacacgggcatggagcatggttggcgcgtgggcctgacatgtcggcacctagacacgcgtgaggtggagttgggccgcggtgggctgagagc

SEQ ID NO: 39527 - DNA, 349 bp, Zea Mays
gcaggagggaccggaccctaccgtccgtgccaagtgtgcaggccaccgtacgttgtgacctaaccatgcacatcacaaacatacatatgccacttggctgctggcctagcagtttcaagtctgcgtacgtactgggctagctactcattcatgagctgcaaaggttggtggtacgcttgtacagctggggtatttggcccccatgcatggacgcgcgcgggggggaaacgggagcaccagctgtgctgtgtgtacaaccatgcatggcttcctgtcctgggggtcgacaggcggttgtaccatgagcaagtacaatgagacgcacggaccaatgcggacctagtgctag

SEQ ID NO: 39528 - DNA, 426 bp, Zea Mays
tcagaagaggaaggcccccaacagttatataaagcggaaggttatgtgaaaccaaagcaagaaaggcaaagcttcaacggcttcagacaaggatggtgaaggatcccgagaagaagaaaagacatgaacaatacattaggattgtaaaatgacataattgtatctccccgataacgaagggctattgtgtaataataggggcaatgtagtgattttatacgaaggagtgtattggcctatatctataaatagatgaataataccactgatatagggatcaaccattggtaaccctacgtctgtagcaccttctcctcattgcctctaaaggtattataatggcgaagtatattttggatgtttcctgcctctgtatctgatatctgatatcatgagtactttagtttactttaagaggcaggccac

SEQ ID NO: 39529 - DNA, 286 bp, Zea Mays
gatgattttgtgtagaaagttatggagatgatcgcctctatggttgaaatgtttggtggtaggtcgtagttggttgtgttcgcaacatggaattatggtaggcatcgtcagtgcccatgatgtattagattaagctttgttatacgataaaactagaaatgtgaatgtcatatgtggtgtttcaattgagttagcccgtagatttaatatgtgtcgttcgcaatgaattatcagtagggcctaaatggtgagttatgtgtgaattgtgttagcgcccatccgagat

SEQ ID NO: 39530 - DNA, 664 bp, Zea Mays
ctactgacaaatcttggattattttgcggcgttggacgtggctgtggcggagacttcgccgcgtgtggtgggtgctgaggatcttccgggtgcgagtactgggcgtaggtggcgaagggcagtggcgaaacagagagtgagtgaattgtcgcgaagtggcaggcgtcattgtggtgagatggagagtggtcgtcttcgcgtggacgggactggtaaacgggaattgttgtcctcgccagctggggctagtgtgggtgaaggggagctgcgaaatctttttgagggtgaggagatgaggataatgctattcaactacagggaaatgggtatcaatccgaaggttgagccaatgtaatatgtgatgccctcgctgtgtgtatgtaaccataatttgtatgataaggttgtgcgccttcgttgatacaaccgtgcccataggcgacttctgcacggagagtcttttaggaacgacttcgaatgtgcgcacctttaattccggctgcacccttaggcgactttggcacagagggtcttttgaaaaagacttcggttttgcgtacttgttgtgctattccggctgcacccttaggcgacttttgcacggagagtccgactgcacccttaggtgacttttgcacggagagtcttttgaaaaagacttcga

SEQ ID NO: 39531 - DNA, 362 bp, Zea Mays
gcttttcaactgcatgctgctcggtgatgcccttgccatagaggtcgagggagctcatcatcccaggcggagcacaaagtcgtggaacgagagcaactaccagtccctttggagctgctgcagcgtagacttgcgtgcgtgcttcaaaccaacattgatggacttgatcacctcctaaacctcttttgccgtcgtcttcattgccagcaagcggataatctttggggctacaatggagaggatggcattgagagccatgtgatcttccatgcgatcagcgcatcatacccgatctcgcatcctagaagccacgagcttccaactccaccttcatgaggaggctccaatcctcatgcttgctg

SEQ ID NO: 39532 - DNA, 296 bp, Zea Mays
aaggcaccagctgatttcaagtggcttgcctttatcctctaacacgtatcacattctgatacatattgggttatctccctcttcattctggtccaccaatacaagggcttcagatcatggtacattttggtgcttcctggatgcatggagaatttggagagatgagcttcatccaagattttcttcttgagatccttatttttaggaaccaccaatctgttttcaaaccacaatatacccttcccatcttggtggaaacacttgtacttctctatcttctgatggaggttctcttt

SEQ ID NO: 39533 - DNA, 602 bp, Zea Mays
atttttgagacattatctttgacgctgaacatttgaattggtagcttgtgcttcctgtgctaactttacacattatattaatgttgctgctagtgaggtaagcatcattaaagtcatctgcttgataaaaccactgtacttaatagcttcatgtgttgtatacatttgcttcttggttgatgtcctttgctcttgaattagcattctttagaatctagtcatctttctttttacaagacatttcattttaatttcatcaatatccgtaccaactttttatcttatttactaggactttaaagcacgagatttgtacgtcgtgcatcacacgcgaagcgcttcctcctcttcattgttgttgtcgtatattaacatccaagtccccatctctttccccatcttcgccttcatctcccaaattcttccacaccacagagtcatgcgttgcgtgcgaagtgcctagatctattttctcctctaggtgtcgtctaataaccagataaccaacaatgtaaccaacatgagcgcttcttcctcctctttgttgttgtcgtcgtatattaacctccaactccctagctccttttgcatctctatctccc

SEQ ID NO: 39534 - DNA, 911 bp, Zea Mays
gttttctaataattccaaggtctggagctataaccagcttctcaagactcatagcttcgactagcacactggggaataattgctcctcaagacaagaataatatataacaaggtcagctgtacgaaggaggatgtccttatcttcagcagcaacatgctccgctgcacctcttgggaagccaacacttagagcaacagactatcatgaacccgaaaactaatacaaagttagatacaatttaaagcaatcagactgtaaataacaattcacatgaccagacagggatgaagacaaaatatataacctcaagggccatcctatgcttctcagttatgttcccagtgaagatctttactttcaattcagattgtgcgctattctcagagtgatatctccgtaacaaaggacttactgcttgcaagacaagtgcctcttccatcaaattatcaccatatgaaaacggagtaccaacaatagcaatcaaaaaatctttgggactcaagcccaaactgatcctcacatcttcatggtaactaaatgcttctgagggggggcctggaatcacgaaatagttaccagaatcaaatgcagcatacatcacctgcagggaaatatttaattatattttcaggtcaaaggatcttcatccatatgacgataactcaattattgttgaaatcgcaatcagattagaagtaaataccggtaatatatagtttgggaaaactataacatttgccctgctgaatacatctttccaagcatttatgagctgaatcattccacttgcattatattctttagcacgatgggcaagagaatgttcatgaacagtccaaattacaggtatggatttgaaaggctcgtgcagaagactgtaagaggcacagatacatggtccaaatcaaac

SEQ ID NO: 39535 - DNA, 283 bp, Zea Mays
tgcaagccaagagttccatgtcacggcaccgggagcctggggacggccagaatatcgtgttcgtgccatcggaaaaccacgattcgtcatggcagatactcgattacgagggggaaggcacgacacaggtatcgtcttgtcggtgcccatggacgggcagaaacgcatggagtgtacctgaccttgggccttgggaaaagagcgagaggagctaggcatcaaccatcggtacaatcagcgttgtgtaggacacgttaatcccaatgaggaccgaagtctgagc

SEQ ID NO: 39536 - DNA, 427 bp, Zea Mays
gcactatctagcacccactgatggtttaattgtctttggatcttcgcatgaaccagtcaacaagaaaagatgttgaatccaaatccaccttctggcaacggcgaatatgatctgaggactgatccatctaggaagcccaaaaggtccaatgacccaggttggaagtttgcatattgggcgaacctttagaaccgagatcaggtgacatgaagtttatgtgccacgacgattcatggtgggataaaaggcttaagcaacatttggcttgtggatatggaaaagttctaatgtgtagcaaaactaccactgaaatcggaaaagagatgacatagtacatggaatcacataagagggcacgttcaatgtacttaagtgatgatgagccagtggaggatgaagcagcagatgtggtggaggtagagggagg

SEQ ID NO: 39537 - DNA, 625 bp, Zea Mays
gttggggaaatgatacccggtccctaggacccgtcagtcagtgagtgcgctgaggaaaggagaccctgatcgctagggtctgttagtcaattgggagagtcagatacgtcaacactgaaaggacccaccctcagtcgaactccgcgacaccgagccagggttgggcgtggcggaacctgacaagagagaccaggcgtgtcgaatgggaaccactcgagtggatcccgcactcggtcctagactgactcgccataagtagccgaccacacttaaccacgcctagcaccgatccacagtgcgacgccggtccgcttcccactcattacctacgagcacctcgggccacataacactcatgacctatgaatccctcgaactgtggcacattaatggcccacgcacccctcgccctacgacacacttatggcttgtcggactaggcctgagtatgcaaacctcccgcagggcactacacgatgggctgtatcgagccccaggctacggaggtcagggatcagtgtagccataatgatgacgcctatgaacattgcctccccgatgtcatctgccatccctaattaagacgttagtgtcgatgtatcataggtcttaggctatatccaac

SEQ ID NO: 39538 - DNA, 331 bp, Zea Mays
ggatgacaaaagtaaagggcataataggcaaaaacacaacaaaggttggactcaagacaatactcgcaaagtggcgaagtaaagggaaaaatgaaagagtaagacatgtaatgttcgaacaaaatatttgaagtgaaaattcattgttgagggaagttataaggaaacaatgagatcaccaaggatgtgtgaaataaaatgattgctcatagatcatcgagaaacaaggttggtcaagggcatgtatattgaaatgttattaggatgcattgggggtatatataagggcatgcgagattccaaggatatggccatacaaagaccattagaa

SEQ ID NO: 39539 - DNA, 432 bp, Zea Mays
agccgtctcttcttcttcttccccttggcaggtgtagttggatgactgacctagcgaagacgtttcaggcgagtaccctcaggctttcaggtgtccatagtttcttcaagctctaggatagttgcaacagccattgtttcagcagggaccgagtcagaagaatccccagccaacatgtccagcatagcactcatctctgcatcacctggactcataggcatctcaaagtgaacttgcctctcatcattgagaagatcaccaagtgaaacaaccaggacctcaatatcttcgagagagggtcgcactctaagacccaaaccactatcaccagtaggaggattggacacaaaatcgaaaaaggacttagaaggtggcagattccaagcagaatatgcaacaggagcaccaatatttgatactttgcccctcaag

SEQ ID NO: 39540 - DNA, 311 bp, Zea Mays
aggaaggaagcgaatatcccataccagggaaggaaaacacacaacgagcaatcctcccagtacctctgccctcaaaggaggatgggtcgaagcacaccgccatacttgctcctttctaccctgacgtcctcttcattcatgggagattggaggcatcgtccatctccgacgatgaatctaccatgcagggggaggaacctccccatcgtgatgcccgacgatggagaaactgacgctggaatgtgcggcgacatcatgaagcttaggaacgggacccagcgcaacccgtatctcgggacgaagccttagaa

SEQ ID NO: 39541 - DNA, 377 bp, Zea Mays
tgatttcttggctcggcaccaccgtcagatgattgcccgagcagaagatgcagagaagctcaatcgtaagctccatgtggatctcacctcagctcaagcccgtgtagctgccttggaaagtcgtgaagccattgctgttgaagccctgaagcaggccaaggatgagcacctccagaagttgatggaggcctacttggtaacccacaaccaacgtagagccctgcggatccaagagcccactccatccaacccagttcaacccatgagagctgaagatccccagattcttgaaggtcacccggtctctattagaggagagaagaaggcttgggaactcccggaaggagccatagtcttggaaggaatgccagtctccc

SEQ ID NO: 39542 - DNA, 477 bp, Zea Mays
gtcatctccctcaatgaaattcttcatgaggttaagaggaaaaatcaaagtggagtggttttaaaaattgattttgaaaaagcctatgacaaagtaaattggcatttcctctatactatgatggagaaaaaaggttttgggagcacttggtgtgattgggtaatgaggattgtgcgtggtggcaaagtagccatcaaaactaatgataatctgggtccttatttcactactcacaaaggggttaggcaaggggatcctttttctccccttctgttcaatttggttgctgatggtttagcttgcatgattcagaaagctcaagttgagggtttgattgagggtctaattccccatatcattcacaatgggtgttgttgcttacaatatgctgatgataccatttttcttattcaagattgcttagaaggggccagaaatcttaaattcattttgtgtttgtttgaaagcatgtcaggc

SEQ ID NO: 39543 - DNA, 342 bp, Zea Mays
caggcgcagggatcctcttcattgcccctggaggtgaacaactcaagtacgctcttcagctattattcctagcatcaaataatgcagcagaatatgaggcactgatccatgggttgaacatcgccatatcactgggcattaagaggttgatggtatacggagattcactagtggtcataagctagataaataaagattgggattgctcgactgattctatgggcaagtactgtacaaccgtccgaaaattagaagacaagtttgaagggttggaattccatcacgtggaaagagatcgcaatgcagcagcagacacgttgtcgaagctaggatccagtcggg

SEQ ID NO: 39544 - DNA, 498 bp, Zea Mays
ttatcccctgaatgaactccactgcctttgctgaggccaaagaggcgatggccttgtattctatccactttgtgaatttgtcgatggcaactagtatgtgggtataccccacttgagctttcttgaagggcccaatcatgtccagcccccagcacgcgaacggtcaggtcacaggaatagtctgcaactgttgtgcgggtagatgctgctgatttgataggaattggcatgcctcacatttctggactaactcggctgcatcattcttcgttgtcggccagtagattccggacctaaaagcctttcccaccagggtttgtgacgctggatgtacgccacattgcccagcatggatctcatctaacagcttcttcatagtagccgagttgatgctcttcatgagtacccctcctgcacctcttctatacagcaggccccttataatggtatagtgggccgactgtctcatgacgctctctgtcgcagccttatcatccg

SEQ ID NO: 39545 - DNA, 1125 bp, Zea Mays
gaaagttcaggtttttccaattgtcaactaggaaatgacgtctcttcagaagaatcaacaacaattgatattctgcagaagatgttccttccatcaagtggtccatggcatgcgaataacgaggttgtttctgctgctctcaaaaagttgccagaaaatggtttgttctgctccatattttctgttgtggaatagctttcatgtgtcatttaaggtacgctaaaattttccttaatttgttcatgttctctagaacacagcaggcaattgcacagtgctaccaatgatgtgttatccaagcttcacgtggtgatgcgtgcagtagataatcttcacttgaaacacatgcagttagcagggaactatcaaaaacaaagagattcgagtgcctggaacagagctgaacagaaacgtctgaaaggtattttgtatttgttttgtggacggtaattttgagggggttccatctcttagtagtatttgtgttcttaattgaaagttctttagcaatattttaagttttgttctataccctggatcatcaaataagttaatagtaatctcagttaaaatggtgaatgccttgtggcaataatatgttcattatgtcgtgaaactgtaaatcgattgtttcttgcagtggcactgccaacacatgcataccgatactatattttattctattatgtgtacctagctgtcgtgtaatagtaaactaacccagtatttatgtacctctcaagaggagttgactagtgttgttgccaagttggaagaaagcaaacaaaaactggcagtactgaaagcacagggagacaataagcaagcaacaccgatccttgttcctatgctgggaaagaaaactgcagaaaaggtgggagataaacaaacagaactgcaagatcttgaagctacccacaaggagttaatggtaatatcaacttcttaatttaagagctccaaactattggcgagaatgctagatgtgtatggacttttaagtttgtcgtacactaatatgagcaggaatcgatttcaaagcgtctggaggaaattagaagactgcatacagagagaattggaattttgaacaatttagcgacttttcaggttcgttgaaccaaa

SEQ ID NO: 39546 - DNA, 440 bp, Zea Mays
tttgagctaccctcaaattctctcgaattatacaaacttgttcttctgcctcttgaataagttcaggtccaaagaattgtctttctccagtttgatcccagtacagtggagtcctgcattttctaccatacagagcttcaaatggtgacatcttcaaactggcctgatagctattattataagaaaactcagcatagggtaagctcttctcccaactgccaccatgcttaagggcacaagctcttaacatatcttctagcacttgattagtcctctcggtctgcccatcagtctgtggatggtaagccgaactaaaattcaatctcgtatccaaggactcgtgtaacttcttccaataccgagaggtaaactgtgatccccggtctgacacaatcttctttggcacaccatgcaggcatacaatccatgccatgtacaac

SEQ ID NO: 39547 - DNA, 423 bp, Zea Mays
gggaaattttgcatagtgacacgatggtgcgatcattggaatggtgggccaatgggcatacatatcaatgtgatatgagggtgttggggctgggagcatatgatgctatatattttgggctatgattggttgtgtcgccatagtcctatgcattgtgattgggatgataaggttattagctttgtggacaatggagtggaagttcagttggtgggcaatactgctcaacagcaggttgtgaatgaagtttctactatacaggtggcgaaatggctgtgagggaatgatatctgggtgtttgcattgttggaggaggtgattgaggagaacaacaatgaggtccatccagaattgcaggtgttgttgggggaattcagtgacatttttgttacaccaactgaactgccgccatctcgaccgttt

SEQ ID NO: 39548 - DNA, 409 bp, Zea Mays
cacggttctaatcctatccgcctgtgatcgatccaacgacggtcgtgcatcggcaccttacccaccgcgccgagcaacggagccttgccccacggcgacggccatggccggagacggccatctcggtgcgcaacaccctaacccccaattagaacggtgctacacattgagaagggcaaggcgggtgacaaggaggtagtcttaccggcaagggtgtagtggtgggaacggtccacggcgagctgcaaatccgcggccgagtattgctccggcgagcaattcacacgcagtcgatgccccgcagtggaagatggtgccctccccacgctcgggcagtcaagacggtcctccccggcaaccctccgagctcaatcgacggcgtggccacgcaacacacgacggaccgagc

SEQ ID NO: 39549 - DNA, 428 bp, Zea Mays
gtataattggcccaagacatgatcaagtggttttcataactttttggtcatacttacctatagtactccaattgtccatagggggtgcattagggttttgggcaatttctccccctttaatgtacatggtaagccaaggcatgacatctaagataggttgcacttacttaggatcttgagctccaaatttggtgtacgttttcccaacttaagtcacatgtgatgatgggcttacttgtatagccttgagtgaaaaccctaagtaacacctggggtgttacaccacttaagctctgaaaacgatcaaacaaaaacgatgagacacagtgaaagggatcttggcaggtgaagtctaggtaagcagcacatacctcccacttgggtcctcgggccttgggccttggaccgctcggccttgaggtcctcgg

SEQ ID NO: 39550 - DNA, 277 bp, Zea Mays
gattgggtgaggtcggcgatggagactccaaaagcttgaagtgttcggggaaaggtgacattgatgctactgccaccaaccactaacaccttaacccagctctcccgaatcacatggtcgacaagtagtgggtacttgctggggtgatcgaagttaagccactgatcagcccaactgaaggatattgtgcgttccaaccatcggtatggggccagagcgctatttgtggccaccggaacctaccgatcagtgagtttctattgccttttgttctctt

SEQ ID NO: 39551 - DNA, 283 bp, Zea Mays
cctattcctctctaaggactttttctgtaatttcgttcagtaatttgtcgacgacttcgtcgacaatggattcagccatatttatggtatccaatgattccttcatctctggatcagctaggggatcgtacggctccggtggcggggatagttcagctgaaatatgtaaatacattagttcaaagctataaagcaaataccgaagctaaataatcaagaaacaacacatatactccttcgcgttctgcagcttctttagctcgcttcgcttctgcccgggcgt

SEQ ID NO: 39552 - DNA, 1820 bp, Zea Mays
gaactttgttgttgaaaatgatattgtggatgacacttactctgaaggtgggattgccctattccggattcagggttcaggatcagaaaacatgcaagcacttcaggtagatccggtaagtttgtggtcatactttggtttgtcaagatatttgtgagaacattggtataatcttcataaatgagcttcttaatcttgctcatctttttgttagctggcttcgtccttaaactcgtcctattgttacattctacataatggaaacacagtgttcacatggattggcaatgttacgacctcattggatcatgacttggttgagagacaactagatgtaattaaggtatgaatattctttctcataggggtgaatatattcatacttatgcagatttcctcatgattaacacattagtaatttggtatcgatgtaaaattttgactaaaactctctgcaaaggttgtccatgtttctaataaaaaatagtctccgttatacacgaagcaatgctcaacaacacttttgttctttcacatattagtatgtgctctaatggcttaacaaagcagaagacatacatgtgagagttaatgatttgatttctatgtttgatgatataagtctgatagttaccgatggctactagtattgggccaacatattcttggtcttgttgtaatttatatttttcttagtaattaagtaaaagaaaattagccaagcacatggatggagtgcaaatctacatgactgatgtttacttggtttagtttttttgttacaaatgtgtattatattgtagatgtatatcctattgagagcctttactatgttctagttgtgctacatattggtgcacttgtgttagttagattgtatgatggcaaaaaatgaataggtgttcctctggactcagatttagtataactaaagattggatgtttgtaccttgttataatatcactattgatgctgaatcaaccaacacagtggtagggctagattgcctaaggctgcacatggcctagatatgtaaccaagttaggtctaaacggcaaggttgatcagcatgtcgacgagactgatttaatactagttattcgtctaaaaaacccatgaacgccacctataaaacccattgggaagacatgcatgactggggtcccaacgaatctcatcgagtgacgcttgacaacaaggggttagaagaggtaataagtagtaggttgatttccaatcgattgtgtagttggatacctaaatcgtccatgatcttgcaatatatataaaggggtggtcgtaggaaatctcccaatacataatctacaagttttccacgagaacatagaattttggatcggaattatgagaactggacttgaacagggaacatcagaacttccaacgccaactcctgacacccgagagcctcgcaagttagaacatctaacatcttagcctcccaagtggatgtacctcctctgagcctttttgctatcaacagtcaccctccttgtcataattggctcgtatgcttttttatcataatggtaggagctctgcctttcacttaagaagaaataaaatttcatttcacttgtatgttattcatccattttctacatatttgaattcaatatgcttttcctttaccttaacttttctttgtgcttctattttttattgtacagccagaattgccttccaggtcactaaaggaggggagagaaaccgaccaattttgggaagtactgggcggtaaatccaagtatccaaaccaaaaagttgaaagagaaaatgaaaatgacccccatctttt

SEQ ID NO: 39553 - DNA, 469 bp, Zea Mays
gtgcaaaatcaaagtcttctccaaaagactctccgtgcaaaagtcgcctacgggtgcagccggaatagcacaataagtgcgcaaaatcaaagtcttctccaaaagactctccgtgcaaaagtcgcctatgggtgcagccggaatagcacaataagtgtgcaaaatcaaagtcttctccaaaagactatccgtgcaaaagtcgactacgggtgcagccgaactaacgcaataactgtgcaaagtcgaagtcttctccaaaagactccccgtgcaaaagtcgcctacgggtgcagccgggctagcataacaagcgtgcaaaatcgaagcattttccaaaaggttcggatcagcgaaggcttgcagtttcatataagttacggttacatacatgcagcgagggcatcacactttacattggctcaaccttcgggatgatacccatctccctatagttgaacagcattatcct

SEQ ID NO: 39554 - DNA, 513 bp, Zea Mays
ttgattgtctacctttttcatcgttggagactgtctggttgcttgcatggagttggatgcagtcacctctttgttactgtggttggcctaaactctatcacctcattcattcttcaacctctgtctccctcatcttttctgacttcctacgttatacaacatgaactacatcattgccacctccgtcccacaaaatccaaagcggcaggccttgtccttttgctctctctgcccctcctgctaatcacaaatcgtctccttggaaaacaccgatgcgagcactgaagtcaggcggcaggcaccggcatgacactgaccagccgaacaccgatgagtggcaagttgggggacgaggagcgaggatatcagccgttgcggtgaaggtcgtgggaggtgagcctcacttagtcacttagaagggtggcttgtgcaggcctgctgcctgcagccggtatgttgcatatgtaagtccaaccatccaaacaaaggccacctgcactacggtgctgtgga

SEQ ID NO: 39555 - DNA, 660 bp, Zea Mays
cacctccactgcctcaagaacacgattgtttctgcagagaccatacatcaacacattgtatggcacaacactgcccttaacaccctcactttccatcctcgccaacaatctccttgcgccatccaaattccttatctcacagtaggcccaaatttcggccgtgtaaacatactcgtccaagtgaatttatattgaagcatttcatcgaacaggtcgcgagcaagagcaaattaccggatcttaatgagagcaaaaagtatctgcaaagcggtgtattgcttcatcgcaatgccggatgagagagataggcgcaggacggtggcaactcgcgggtgcggcgaatccagaggtacgaggatgcaagaagcgtggcggcagcggtggcggcgccaggtcggaaggtggcgagtttgttagcgtgtgagagatacgaaaacgaggaggacgcgaacggggtggatgacgcgagggagagaagtagggaggcagcgtgcggagaggatgccgaggaggaagtggacgaggacaggaaagagagggcgggcgtagagagagacaggagatatgaggtgggaaggcaacatgaggagaaaccgacgtgtaaggttggaaggatgaggagagaagagacgtgcgcgtgggtgaggcgttggcggagct

SEQ ID NO: 39556 - DNA, 414 bp, Zea Mays
tgtcagtatattttgttccttctttttccaccaaaaaaacgaggaagttgtgggctagcgtgtccaatgaagcttgagtggccgagcgcggggcggagagggagatggccggttggagtgggaggagatgaggcgccgacggatgaggaagcgatgggaagacgagttgtacgggaatgaagaagaaagaaataaaaagaataaatcattttttaaactagtggcagtggtgagcaattcttaccaactccaccaaactagagttggtgaaacatcccttgaggagctccaccaaaatggtgaatctggcccctggattcaccaattttgtaaatctgaattgcgtgaatctagaccgtttgactatttttttttttccggagtggagccgttttcggcgaatctggagctgct

SEQ ID NO: 39557 - DNA, 291 bp, Zea Mays
ataggctgatgcttcttgggaagaatcacagagttataaaaatcaacatgctgaagggtccagaaccgattaccatcgatcctagcatcacgaatacgcaatgtagggttctgaaatcggatgtcctggagaagagcagaccctccgctggcagtaaaatctgtgatgggctcattcgcagatcgacgagccaccgcccggtggagtaccaaccctcggataataggagcgtgggcagaggggaggtcaatctcatcatccttgctaccatcatcatcactggtgggctcc

SEQ ID NO: 39558 - DNA, 641 bp, Zea Mays
gtctgtagactttttggctgggaatacaaatgttaagatgtaaccgcataaggatatgtcatgtgcccaagattctcgaacagaagttacctcaataatcgatagttcaataaatagattagtttgtatgattaatttactatgttgttcttacacaactggtacataaattcagctacatctaaacttagtcaatgacatatgctaacttttgttgtttttcacagtggcacagaacacttctttgcatgaattccttgatagttatctacaattcaggcacaggtggtatgatttgccacaccgaggcccaaagggaactgtagcaggtttggttgttggggagcttgagctttgccgtcgtgtatttatggtcctctatcgcatgtgagatttctatcatttcccatcttttgtcgttttgttacctttttaactgagttttttttagatcctcgaataaggatcctggagcaggtcgcggcgagtcccttagcatgaaggagcatgcaggtgaaattatgccactcatttattcattgtgtggggtttattgattccaccacttgtttgaatatactgtatttgtattctcaattccacaatgtttctttgtagcccttctgctggagaaaaaattg

SEQ ID NO: 39559 - DNA, 527 bp, Zea Mays
cacacaaatccttttctgattttatcaattttgttaatcacccacttagggacattcatagcaaggaagagataaactgggatggctgaaagtacaaagcgcacaagggttgtccttccagcaaggttgaggagcctagctttccaatttggtagcctatccgcaatcttgtcaacccaattcatcaaaatattcctgctaagcttcttatctgagataggcaaccccaagtaagtgcaagggaaggaataaggggtgcattgcagaatgttacacccttcatgcagcaattcctcttcacatcttattgggatggcacaactcttatgcaaattagctactaggccagaagcttctccaaaacagtcaagaatgagtttgacacagtttagctcttcctccctgggcttgacaaacaagactacatcatctgcatatagagataatctggacttcacaatggcaccttccagactagtcaacaattttttttcttctgccactttgaaaaggctgctgaggacatc

SEQ ID NO: 39560 - DNA, 437 bp, Zea Mays
tcttcgcttcgattcctcttctttcggccgaaatcttcggatcttgaggtacgcccttcgtctcctatggtttctgttcttcatgcgcacctctttgatgaactaattactacacgaatcgactaaacctgttaaccgtaattgattacatccgagaacacccgatttatccccggtgcgaacaagtccacggatctggtgtgccttttagggttaaacatttatatggtactctcccgctgaatatccttgatatttactggaacaaatggtactgcaaactattacggcctaatggtctgcagattgccatattttgtaatccctacactacggcttcacttcgaatctgccttaaactgtcatgtcttatgccaaaaatttttgctccccactgtccacaacaatagaccattttagtaaagtaccagcaagat

SEQ ID NO: 39561 - DNA, 421 bp, Zea Mays
aagtttctagatttgtttttttattaaaaacgaatttctatagttatttctttgtttttaatcatctctggactgggcatcaattttcagaaaggtcagggggttctggcgtaagtttaccgagactcagagaataggaaatgaggacggcgggttgaataggtacaacctcggggtctctttaacaaaatatacccgcgaaggggtatctacggtttctggtcgttggatcgtaagtggacggctaagattagaaggctgttaaaacgaaccggtttccaatctagacctttggatctgaatctaacgatggcaactctatgcacgcgagatcggattggatccgtcggatcatatccaacggtccacggtccaagtcctaaagggtatggctcaggtctaatctccaccgcccaaagaa

SEQ ID NO: 39562 - DNA, 530 bp, Zea Mays
ctctactttagtcgaaaccaaattcaaggcctaacgatcgtttcctctcaactaatttcacgaacggcctctaacctgctctgtgcacggtgaccgtatgatcaacgaccaaaccaacgtgttcccggcgatctaaggtaacttagctcaattgaataggtcgaggagtatcaggggtgcacgagaacactaaaacgagagggtaaagggtatgagcggacctgagatgagctgaccacgacgaggcctctttcatggtggtggaaagcaggtttgggggaaatgagaaattaacgagctctagtggatgattcgaggcatggtttgcttcactggttgcacaattacctagcggagcaggtggggtcgacaatttataggctcccacagtggtggccggtgaatttgagagagacgtgcggcggccggagaaagaagaaggttactggcgctcggggttagtggctttcaccgtggcagcccttcggcaatcaccgggcatgcatgatgtcattaactgtgacgtggtc

SEQ ID NO: 39563 - DNA, 317 bp, Zea Mays
catgaacggtggaatagagaacttaatcttagcaaatggatcatggtctggttcaggattatgatgacgacgtctaccattacctcccataccttgtcgattacgtgcgaggcgttgtcgcagcggtgcataaacaacttcgtcatcatcattgtcgtccacaggagagtgagctggggctggagttggtggtgggggacgagcctccagtacgtccatgcgtgtaacaagttcagcaactcgtcgatcaagctgctcataggatgtcgccgtagagtcctggtattttttaaagcttcagtcatcgcgcgcatcat

SEQ ID NO: 39564 - DNA, 446 bp, Zea Mays
cattgatgttgcaccgcatgtctcgtcgactgttgatgacgtcgcacatgttcagacccggatgagcgaggggaagaagatggtttgccgcctgggtaaggatttattggtagccctccgcatctagagtgcgaggtaggccattggcgatctaggccagaacttcgctgacttcacttgacgtgtgctcggctcaagcaaagtcgggtagcaggctccggggaaggagtggattgttgcgttggtgcctggcatcgtgttctgctcctttttaggcacgacggcgatcacatcgtcatgagtttcggtcttcatggagcgccctgtcgtcaggagtttctcctgcttcggatgccccatctcgagatacgggctaagcggggtcccgctcttcggcctcgtggtgacgtagaacgttacgatgcttgttctgacgttgatgtgcc

SEQ ID NO: 39565 - DNA, 426 bp, Zea Mays
ggcgtgttacacggaattccgttggctcctctgtgatatatgtgcatagataacatctttatgtcgtgctcttaggaatctttctagctaaacatgtcatcctctcggtagcacctgtttttcccgaaggtcggcctaatagcacatcttggcgatgacttatcgggggtctgttcaagcgacccatggaacgtgtccatgtgacaatgacccatggtatatccatctcccatagaaggggattgattcacattcagacccacaacacccaagctctccagcaatacaactcatagtggatgtagggtattacactccggtggctagaaccactctaaacccttgtatttcttatgttcatccattcggtcagccaaatctataggccccctcctcatcttaggattagggtgggtgcattccatc

SEQ ID NO: 39566 - DNA, 475 bp, Zea Mays
agaatagtcggcgttacatagtcagtggggagagtagtgatattccttctccagctttgtctgctctcgttggtctgcaagaattatccctagcaaattttgatcaagctcttgaggatgttgttcctgaagatttgctgtccaagcccatggacggtggtatgatggacgtttgctctgacattccagatgtgggattagagttatcccgagcagcgtctcgtgccttgtcgaccttggagtgcagtcttcagggccaagaggctggtcaaggttgttcaattcccatggaggattagaatccttcagccttagaggtggctgctgcagagaacccggtcctcaaggatggtgcaagcggttacccagcccccgagggtgttgcctgtaatgatccggctcgggtgggtagcgcaagctgcaacccagcccccgagggtgttgccagtggtgatccggctctgatgggcagtgc

SEQ ID NO: 39567 - DNA, 431 bp, Zea Mays
tcatgtgcagtggaaaggaagcggcgcgcgcgagacatacatgaacaggccatccgctgttgatcggaggaggtttggatcgcgcgtggcgtgggtcatcttctcgtgtaccactcctgcgcaggaagaaccagtgggcagggtttcaaagattgcctcgggatcggcggttttgaccgcaagcagcacgcaacgcaacctagggagctgaccccaatgcgtgacgtgacgtcgcccggagctgaccccaaacctggggagcaccgccctcggaactgccgtctggaaattactagtactggccaggattcatgcactctgcacggtcatcccatccagccttcccgagcgtaaacaacagaaaccaaggttctccacttgacggacgctgtacgatcctgctccagccagccagccatagtgccccccgc

SEQ ID NO: 39568 - DNA, 430 bp, Zea Mays
attaacctttggcaacattttttttgggatattacactctaccccccttaaaaagaattcatcctcgaattcgaccactccaaacaaaacatccaaggcccccatatagcagcaccattcaaaacatgggtccattattggtcttaattaacacaagaacttctaccttgactaattgtctaaggaaactatagcacctgacatcaagcatgaaccaatatgtaatgaagctcaaaccaagtcatagatgcaatcaacactatgatttcacaacatcgaatttggatgtagccatacatcagcatcaatgtcttaaaacgacactcttttatgaaggggtaatacgcactaagcacaacctttaccaactttaacaattcattttaattcaatggtgaaacatccacaccagatgaatgtataagaagat

SEQ ID NO: 39569 - DNA, 290 bp, Zea Mays
ctgaatgatcggctacaaaggaaaatggccacgtgcatagacctcacatatggaaaggctgtcagcacagccttatctgttgaagccaaatacacaaattctggaaagaataagggattcggtggtgagaggcctaatcagggccaggcaaagaagcaacggtttgtcatccggccttctagccaaaaccgtattttttctcgtccaccttcatttccctttaaacagcctatcattatccgccccaataatgcccccactaccccaaaacagccgggtgccccaggcac

SEQ ID NO: 39570 - DNA, 491 bp, Zea Mays
caataatcacaagatccaaatgtttgattggatcatcatcatttttgccatgaaattcccaaactcttgatatccgaacacaaatgatatagtggtagacccctggtcgaacttgtgatagtggtgtaatgtccatctgcaaatacaatttgttaaaaatagtatcaatttatgttgccatggctctcaatagattgtagtacttctttatacacaatattttctgttattgttccacatgaaccgtcgtcattttctatcaatattttgagccctttcttttctgtaactcgtgacacagctaaatatagttgaccgtgtgtaaacacctttttctttaaatataaccctacatttgatagtgtttgtccttgacttttatttatagtcatagagtagcaaaccttgattggaaattggcgttgacataatgtaaaaggccatttattgcccttagttgtcagattaatgcggggtatatgtattttttc

SEQ ID NO: 39571 - DNA, 353 bp, Zea Mays
tacgtgcaacaatactgatgtttctatgtctcgatgtgtgagtatgaggctatctgtctgtgagtcatctctgagccgttcaacacatctgtgggcatctaccagagattccttactagggatacagagccgcccccattcttccctcctcatctgctcgctccgtctcccgattcatgccatccccatacgaccactagctcctatattccacatatgcgtttccgtagcaattccttgcctggtgggaaacttagggcagatttgaagactgccgtcaaagatccagcgaggaggtagcgtatccatcccaaaatcgcaacatctggactaagggaaggagctgaataagc

SEQ ID NO: 39572 - DNA, 276 bp, Zea Mays
gattaatctaggctaaattactgctactcctaagataatagattgattttgtcgattgggtgatgcctcaatcaaccgtaccactttatatttatagggggtggtctggacctattcctatgcgcttcccaatagatttccacgcgattaattttataagcacgtgaaggaaaaggactttcgccggagtcaatataattgtggaccgtccgggacatactcacggatcgttcaggccacatggctgaatcgtccgttcatgtccaggtgccaaat

SEQ ID NO: 39573 - DNA, 934 bp, Zea Mays
gtaagaaccacaaatagcccaaatctgcaggaagttaaagaaaaatatgttggtgcaaggacacaggaccttgcaagtggtgttctaggtcctcaaagcacaagcaaaatgcctgtttttagaaatcatgtagataccttaaatgggaccctggacgttctaaaaggccatacagatcatgtttctcgaaaatattctgccagccatgatcagactgatgttgctgaagtcttattgaccagtcctttgagaggaaatcagtctgtggacgagctcgattcatcaaaagttgacagatggcaacatcaggagaaggatagaccctcaggtagtcatatcacagcagctggttacttaaatgccgatgccaagctcaacaatcatgagttcaatccgaagcctcgtagtgattccatgtctaactacatcaagaacacaaataactataaaaagacctctcggaattcatttttacaggaagggtattcagttaaccatatggtatcacctcagagggctgaagaaagcacactgagaggttactccaatctttctacattagaaacaagacagcaaaaggttattcaacctgctgatgttcagagcattgcaggcaatgaaaatcctaagcgtgaggatggactagatggtgcatgtgctcagaaaaggaagagcttggtctccccagctagcataaatttgcaaacggaagatttggcgtcagaaactggtcctttagattctccatttgtgagtagagtgagtgatgcatctgaaaggataataaatctagttgaagctaatgctgttaatttgggaaaggaacgctctagcttttctacaagcagacaagcaagatctaggaagacttctctcaagcatggtggtcccatcaatggaatcaaactttctgaatattcttcaagtgataaga

SEQ ID NO: 39574 - DNA, 356 bp, Zea Mays
aggaggaggaggcggagggtgaccagagccggaaggcctagggtcaccaggaataggtccaggggcggcaacaggaggagactggaaggagtcgtcaaactcttcggcttcatcctcaggagtaacgaatggcacaccatactcctattggtgccattcattaagaggcggaggagggcgctttggcatgtgatggcccatggaggccatgaagcctctcatgtcatcgtgcaacgcctgagtctcgcgcctgtgcacagcctcctcgatagcatgactatggcacattgcgaagaccacgacgatccccttatccaggcgcacaaacaggcctcgactgtgaccccttccccggc

SEQ ID NO: 39575 - DNA, 304 bp, Zea Mays
gaggttgttacaacgacacaggcaacgaacttcaggtatttttattttgacgatgagttctattttttgttggattgatattattaccagtgcataatttacaattttgtaggtttcggcggtcccttagagttccaccaacacaacccttggaccaacgtagggtcataaaccctgcagaagagaggagctaggtggaggtggcatggagtggcaaaggtcaccggacaccagttaacacagtgttgggatctatagctcgtttgcactatacaggggtggtacaattcaacgaggcagagat

SEQ ID NO: 39576 - DNA, 697 bp, Zea Mays
ggaaaatattttcacgatatatccattgtgagggctaggggagaaagtatcgtttctcttcccgaagcagatgaagtagtggttttaaaaatcttcatgaaggctgggcttcgttttccattgcacaagatgttggttgaagtactgaagacatttgaaatataccttcctcaacttactcctgaagatttgattaatgtgggggtttttatttgggctataaggagccaagggctagagccagatgccaggtgtttttgtaatattcatgaattatcttaccaaacgaaggctactgggaaggagcagtaccacaacaacttcgggtgttatagcttcgtgccccgctttgatgcaagttatcccgtgccaaaattttaaaagaaatggccggactcttggatgaagcaatggttttatgtgaagaatgatctgagcgaaagggaagatgtaaggggcattattcagcgtcccatatggtcacgctttggcattagaatgtcgtccaatgcaattaggaacgaagtgcaggcatgtttaatggctttcaacaccgtgtgcacttacatcggtaccaggtatttggtacaggaacacattgcttacaaggtatggcctcttgtgaatggctaggagatgccgaaaaaactgctgctggctccagccaaggtggcttagtttatataagatatacctt

SEQ ID NO: 39577 - DNA, 355 bp, Zea Mays
gaagaatctgatgcggggatctacaccgttgggtacatggactggctgagatgcgattaagtctgtctagttgcttgttgcctgtagtatttactcgtgctcgtgcagcatacataccagctgagctacttggagagctgtgatttcatcacaaacaggttttataccatctaaatgaacaacagtagagaggatgcccaaagtagcaaaaggatgtcactactttccattttgctgaaagtgcatgtcttgttacagaaaaaacaaaaccgtatcattctaacagcaattctaatactcaaatggaaagaacaaaattgcaaaaacaggaacccatggcaaaaaaaaggaatag

SEQ ID NO: 39578 - DNA, 325 bp, Zea Mays
cacgcttacttaactcggggtgaccactataccccactaacggagcaatcggcttaagtcggcgatgacttaagacggtgcgacatgctcgcgcttacttaactaagggtgaccactataccctgctaacggagcaatcggtttaggtcggcgatcactatacccctgatagcggaacgattgatttaagttggcaacgacttaaattggcacggcacattcggcacgttcacgactattcatcccagggcgatctctatgccccacgaaaaaattcaaaaccatcataatgcacttacttttacgactgtagataccgttgaac

SEQ ID NO: 39579 - DNA, 584 bp, Zea Mays
gttaatactaacttgtctgatgagaatactgcagtgcacagacatcaatatgcagggggtcctgttcaccgaattgatggatcactacccactgttgcaagtttgacgccaggggaggaacctgaccagtctaccgcgcatgcatctgagggaatccgggacactgtacaggcgcacgccgctcctgtgccggaccactgtaccacgcatgctgctcctgtgccgctccactgtaccgcgcctacagcccctatttcccctattactacaggcgctgatgtgactatacaggacacactctctttacagcaaacaggggaagcagccgcgttcttgccagagccggtccatgcccatgatgatactgctgacacgtccctacgtccacacacgagaccgcggagcggcatccggaaagagaaaatatacactgatggcacaatcaggtatggctacttcacgtcctctggtgagccacagtgtcttgatgaagcacttagtaattctcattggaagaatgctatggatctggaatatgctgctctgatgaataacgaaacatggcatctagttccaccaaaaaa

SEQ ID NO: 39580 - DNA, 304 bp, Zea Mays
tcatgccgggtgctgaggcctccgggtctcaaagtgctcgcggtcggacttcccggaatccttccggtcggtctcgacctgcgacaaatccgcaggcgtgggagcctgcaagtagtgatgatggtgggaaggacgatgaagttgatcttcccccggcccacgctcctgtgattcgcggcttggtcctccaccgggcagaggctcggcgtactggcaatgagccagtcactgacttcactgccagtggagggtctgctcttctccaggatcttcgtttccaaaatcctgtattgcgtattcgcga

SEQ ID NO: 39581 - DNA, 302 bp, Zea Mays
cacgtgccttgttttgcttggagctggcaccctcgagagcgttccccgtcgcgatatgggcatgcagctggcggcctttgttttctccagtgccatattgctcggcttaatgaagcctttcgccaccttgtgctcactaggctaggctcgctgtgggtctctctcgctcatgccctcataatcagtaatggtccggtttcgccatccattttgcctaagtctgtcgcgcgttatcttctccttgtctggtgaccatgccatcgtcccaccacatcgccatggccggaccacctcagaagttt

SEQ ID NO: 39582 - DNA, 525 bp, Zea Mays
tctgcgcacgcgtctaacaccagtatggttgcaagcttgtaattagccatcgttcctgtaccgtgctggattagtgcatactccttaccgtggtcggggaccgcctactcgccgctcaccggatttgcactacgaccgtagcttggaacttagggcggaagacgaccctgtgtcattgatcactggataagccgccaggatcagagagagttttgaagtgttttgaaccatgggattgatgttgggcaggcgagatcatcggtagcataccccttcgatctgagaaatgtgtgccctagatctcagatcctacggttctgagcgcatacccattcgattaagatttagatctaatctgatccgaccgctcctaattggatggtcctaatccgacgataccctttcatggttgtcattttgcataagaacccccgcaaaagagtgatgccaacccgtggtcctgggcaagtgcggtctgagtctactgatgttttatagtttagcccctacatttccctgtattag

SEQ ID NO: 39583 - DNA, 373 bp, Zea Mays
cgcgaaaggctttgggcctattgtctcgcaaggccgtcccttcgtgggccaggggagaattgctggcggaatgggccgacgcgaggaagaagcagacttaggcccaggcggctcgttggatttaagcattatccacagcgctgatccgattctcccgcgcagcgccctcggacgtcagaacaaaataaggataagtcggcaagattataggaagataagttcagtcagttcactattacttaggtacacatcgtcatcatacacgcatgtaataccacacggtcaagtatataaggcctagggctaggggtaccccatcagaatcatcgaccatctacttagccactagcttttctccatacaggagacttcc

SEQ ID NO: 39584 - DNA, 275 bp, Zea Mays
tgttcttggcagacttagtcatcttgccatcccaagggattgatgtgatcttaggaatggattggttaaccaaacacaagggcatcataagttgcgcaaataagaccgttcttctcactgaccaccaaggaaagtcagtttcatgtcaggcttagccacctgccaaagatccaatggtgtttaatctagcaacagaaagcatatctatagtagaagaattcatggatgtattcccagaagaattgccaggaatgctgccaaaaagagaagtggag

SEQ ID NO: 39585 - DNA, 330 bp, Zea Mays
ttacctgaatcttgtatgttgagaattttgttcacaatgtgcctgcaagaggtagctaggacgaaagttgtcgcactcctatagaatataaactcgatctataggctttctaattgaagaggttgctccagcagcacaattctatgggaggctggggagctatcatgaactgagcatttgataaacataaaataaaccaaatctctaatcagacttattaaagggaattccacaattttgacattttatctattgataacaggccttcctttgcaatctgagagtcagtccttctttggttttatgtttaataactactttagtttttta

SEQ ID NO: 39586 - DNA, 1004 bp, Zea Mays
ggtcatcccggacaggttcctgatcacccggattctacaggcctgtgcgtacacagaggacctggagctcgggacggcgatgcattccctggcgatccggagaggtttcatggcggagggagcgagggacgtgcccgtggggaactcggtgctggccatgtacgtcaagtgcggagagttgggccgtgcgcgcgccgcgttcgacatgatggggcagcgggacctgtgcacgtggaactcgatgatcttcgggtgctgccgctccaacgaatgggaagaggcacggaggctgctcgacgatatgaggcgccaaggtacagagcctgggcttgtcacatggaacacgctggtttcgagctacgcgaggtctggggaacttgatgtggccatggagatgctggagcagatggaggagtccggtgttgctccggacgtcgtcacctggactagccttgtgtctggttttgtccacggtgataggggtggcgaagcactttggtgtttcgcgcgcatgcgccttgctggagtcgaaccaaacggcatgacaattgcgagtgccatctcagcttgtgctagtttgcggttgctgagtcagggcatggagctccattgccacgcaattaaggttgggagtgtgaacaatgtgctctcggggaactccttggttgacatgtatgcaaaatgtggagaaatcattgcagctaagagagtatttgatgaaatacccgagaaggatatcttctcctggaactcgatggttgcagggtatgcacaggcgggctattgcggcaaagcatatgagcttttctgtgagatggagagccttggtgttcggcgcaatgtgatcacgtggaatataatgatctcgggatacataagaaatggggatgatgagagagcttttgaactatttcagatgatggaaagctgtggagtaaaaagggacacagcttcatggaatgcactcattgctggttcggtgcataatggtcattctgatagag

SEQ ID NO: 39587 - DNA, 723 bp, Zea Mays
gtgggataacagaagcttgttagagtattcgtattgatatggaattgttataaaaaacatatataagatattcttgttagttgttactaaccttaggaagattggaagaacaacgctcccttagtggagactgctatatgcagatagagcatcatgggcctatagtagatgtacacttaacaacccctttcaaactcaaggtggacaggtaagactttaagcattgagtttgaccaagtgaagccaccaccgctctctagtctgcgctttagggaaaaggtcgtcaaacaaacaactgagggcatatactgaagagcaattgttcttttatgacgatgagatggagcaaagaaggcatcaacactgatatgctttgttagttcatgcttcatagcgaagagatgtgcaatatcataaagaataccaaaattggccaagtagtagtagtagtagcaagtgttcggagttctacctttatactacaatgtggtatcctgttatggaacggggatctgttaggtcactcgtcaaagtcgagtcagagtactagagtagagtctaagtaagcatgaagttgaagtggactatcaagaataagtaacagtggactgcatgagcaatatcaaactagctaacaatgagataaacaagactgcccacaatatgccaatatcaagaggaatcctcaagagggactccatcagtgggagtgtgggacgaagc

SEQ ID NO: 39588 - DNA, 284 bp, Zea Mays
acgaagacttccagagacaccagtgcctagtgggatcctaaggcacaatagtaatggaaagagaggcatgtgcaggatgaagttgacatgggaagataccgtaaaaagaagacttaagggctagtttggaaacttaaatctccttcgggattctcggggattgaagggaaaattaagctaattttctcttcaatccccgggaataagtttctaaactagccctaaaaggtggaatataccgaaagatttggcattcaataggagtgcattgaaaaaaactattc

SEQ ID NO: 39589 - DNA, 409 bp, Zea Mays
aaaccatgtccgaaccaagaatacggtgccgaaagtccccgtcgaacacgacgatacgcccccgcgtatagtctcgtgtgtatccccgctgacttgtggggccagtcaaccccagtcgtaggggcctcagcgtacgaagtctctactgtagcccacgtatcggaaaaaggacaagacgatacgccatatcgagtgtatgcctacacacactgaaaaagtgatgcaagggtcatagtagaagatgaagctgcaccaagcacgacatgaatcacatcgtaagttacccacttcatcaacaccaagcttgctacatgggacccgtatactggacggatgaagcggtacgccatactgggagcacgacagtgtatggcctcacagacgacgtcaggagggctcctgactacgc

SEQ ID NO: 39590 - DNA, 344 bp, Zea Mays
atattatttgagtttttgcttcagtttttgtaacaactaatgcttaatcaaacactagtcataaatttcagaaacgcccattcaaagtcggcaaacctggcagttaaagattgaagatccttaataggtaccaaagaagttacaaaaatagcaatatccacgcgaagctagtaaccgaaacaaagttatcatacttccggcattctggccttttcacactcaaaacagacaaccagccatgtgaaaaggattgcccaaacagtgaaattttccatatatctccttaaggctgatgcttctatgtgcagctaaattctcagaaaagctcctcataaataatcctc

SEQ ID NO: 39591 - DNA, 470 bp, Zea Mays
gaagtcatctcatgggagccatgccgggagtgcagctacttaccaagctagtgagggtaaaagtggctgatggaagaacttttgtgagcaaatattgtgttcccaattgcaagtggctttgtggtgcgctgacattttctactgattttaagattttacctctgggtggttatgacataatcctaggtatggactggttggagtgccacagtccagtggaagttcattgggtagaaaaatggttggagtttgactataatcacagaagggtgcagttataatgagttcagcccaaaattcagacctgctacagttaacctatttccaattggggtccttgaccagacaggaggcggttgagcaactcttggaattacaaggaggggagagtgtggatacaaatgcgacattggttcctgagtcgatcaagcaagtggtggaccaatatcaacatctgttcttgaaaccta

SEQ ID NO: 39592 - DNA, 379 bp, Zea Mays
atgcagttcacaacaaagaccaatgctcaaacctttgggcgccaatgtttatgtctgaattcttataaaaatcaccagcatgctttagacatgtgattggacattaaaccgataatgttgccatagtccagcacatccacatgatggttcctcaaaatcttcattatgcatactcaatcccatgagcaccatcacatgttcgtcaccgggaacgtcgttcccgttccaggaacaatatcatccccgaagtgaaaaaccttttttaaggagcatatcatgttcctcaatcccctgttccatgacctaatcatcctaggaactttgtgactacgtccgcccatgagtccatttcatcctactaatcgcacataaagatagt

SEQ ID NO: 39593 - DNA, 393 bp, Zea Mays
tggacatagcattggggtgggtgcctgactgcctggtcagggttcgcaccgagatccttggacggaagaactgaggcgatttcgacacaatcttcttgggctcaaacaggtgaacggagaattcaggtcccacttcatccgacgatcacgcatccactccatttgccactgacctctctgttactgcgtccaggggtaagatcttgagagagcaacgcaagaacagagctcactagtagctgtatagcaatcttcgttttcttgttaaaaagggagaaaaacaagagagcacagcagatatttttgtattccattcctgaacctggtctcactttccattccattccattccattggatgccaaaccaaatcacaacccgtggttgaaaccag

SEQ ID NO: 39594 - DNA, 608 bp, Zea Mays
acaccaactacgcccctcagccccggcagatcccggtctacccagtggcagtcgaggaagttccggtggatctccctcccatccgagtggagaatgtagtcaacctggaggacagctcggaggagcagctgccgacccccaccccgttggcagagtccctggccttcgcagctgggtcatcgacgtctgcaccagccttccaagcaccagcacccggaggcgacgaccccgacgactccggagacgacgatgatgaggatgatgatgacgaagaaggtggagacgaacacgtcaacgaggaagctgactacgcccagcaggacaacttcatggggtttggtcctgttgtcgaacattatacatcaatgttcgagacggggcacttccccaacctgctacaagaagtgctgcacgcgctaggcacctacgtccgccccctgtacgaaacaaggcgagtgagcgagcctccccgggcttgctattacatcactcgcatccacgtcagggtgatggatgcaggtgacaggggattcaggactctgtctgctcacgagtccctgacgccactgtccacctacgctgcctcggtcagcgacgctgcccgtcgg

SEQ ID NO: 39595 - DNA, 303 bp, Zea Mays
tttagctgagacacatgaaatacatcatgtacatctgacagatgatcgggtaactccagttgatatgcaacttcacccactcgctttaagatcaagaagggtccaataaagcgaggggacagctttcctttaactttaaatctcctcataccccggagtggtgacaccttgaggtacacatgatcttcttcctcaaatttcagtggtcttcttctattatcagcgtagttcttttgcctggtctgagcaaccctcaattcttccaaattatacagacttgttcttctgcttcttgtataagtt

SEQ ID NO: 39596 - DNA, 338 bp, Zea Mays
tacctaaaagtgtaatgaaaacattttttccataaatgccacttcagtaccacaatcagtctcgacaacatttacatggctcatggttggggaaaaagtatgcactgacatgcttcaaaaaaagagtatgcagtgaatttcttagcagtgccatctcttgtacattttatgatttttatcactttagcatccctcttgatagcggagctatgtttctggcattctgaagggcacaccattaaaaacttaacaaacactagcattgaatgcaaaatgagtacatgtctatatacttatacgattattgttatataatttcacaataagtgttatgaaac

SEQ ID NO: 39597 - DNA, 464 bp, Zea Mays
ctatactgcgcatccttggtaagaaacccatccaatcgactcgcctcatcctcctcgtcgtgtagtatcaatcgatttcagtgttggggacgcttgggcggagaatcgtgagcacgtcggtgaacttccgccgtagctctggggcgtgccgccgtgactcggtgcagtgataggagaaggcctcctggccgttggatcggaatggaacacctaggattagatctggagagtaatcatcgtgcaccgttgattggcatatccacggttgtgagcgaatatgtcgcgtaccgtttcgatgtgggatctgggccgtctgttctagatcggacggtcccggtttcatcccgaatcattataagtcccaatctaatctgagccttcggtccacgatcggacggatctggttcatccataccccttcgtcgatcccaattcgcatctgagcccctctacttttacaaaat

SEQ ID NO: 39598 - DNA, 400 bp, Zea Mays
cggaagagtgcgaatgcaaaggtgcgcggagaactcgaaggcgaaagggcgctacagttggagaaatgcaaaagcgtaactactgcacgcgaggagaatcccttttcaaggaagactcccccgctcatgccccgagatgccgcagaaaatctcgcccgacgcgcaccaaggcaacccagcctatgacacgggggcccgggtccacaagtcatacagctggtgtgcgggtctccgagtgctgggaaggtgaaccgccacgcgaagagcaaatcgccgcccgtggtagtgcgcctctccatctctgccgaaaacaacggtccagtctttgacacgggggcccaggcccacgagtcatactcctcggatatcagtttctgagtacaggaagagcgagccgcca

SEQ ID NO: 39599 - DNA, 452 bp, Zea Mays
ttcaagtaatcttctgtggatcagggcaactttctcctcaacctctttaacaaaggcaggtccttccagtgcctttcccctacgttggaccacatgagaggggtctggcatttccgtccatacaatgcttataacagtgacatcttgatgctggcctgatggttgttattatacgagaactccgcataaggcaaactggattcccagcttctatcgaatgttaacacacaggctcttaatagatcttcgaggaccttgttgaccctttctgtctgcccatctgtctgagggtgataggcggtgctaaagtctagcttggtgcccatagctttctgaaggcttgtccaaaatttggaggtgaactgggttcctctgtctgacactatctttcttggaatgccatggagtctgactatctctttgagataaattcgggcaagggtggctcctcc

SEQ ID NO: 39600 - DNA, 289 bp, Zea Mays
gttccttttagggttttgagcactctagggtttttgtgccactcaaatccatcaaacctgatctcttatgaatatttccaatgacttttaaggtattactccttttggcttcccattacccacatgccctaatcccaatgttaagtaccctaccctagggttaagaatacttcaaaccaccacatcacacttgttttgaagttttacctagtggatgcattctaggtgtaacaaacaaaatgaaatgtcaatgcatatgatgtcatgctcaagttttagtgccagtaac

SEQ ID NO: 39601 - DNA, 615 bp, Zea Mays
aagttatcaaagtatcttgtaatactctagtgtcatgtacggatcctggccatcctgtgacaacaaatgtgaacctcatatcgaagtcacaaacggccattacattctgtgatgcgtaaccgtggcgtccaatatatttggcttgctccaaggccgggactgccgctggaaagtgactaccatcaattgctcctatgcaatccttgaagtgtggccaaaatctcgcctctcgcaaacgaggatgaatctcgatgaaatatgggtctttgggcttaattatgtgagatgacatcttaaacagtgcatcaaggacttctgtatacttgcgactaattgtttccaaggagtgaccaaacttattccttatctgcctaaatgactgtggacccccacatgcccacaagaaaatgccaagtgcttccatagtactaacaccccggcttggaagcagaccataattgtccaccaatttgtcatgcaatcgtctaaaaatagttcgtcgcatgcgaaacatatcgaagcagtcgttactattctccaacgttctctccacccattgaataccagtttcaaccaatgttcttctaggaacctgactgaaagtcctgccccaaa

SEQ ID NO: 39602 - DNA, 472 bp, Zea Mays
cttgttctaaagcgaatacttaaactcaatggttcaattggattggaagaggctaggctcagacgctcagtcacttctgaccagaagggatgttagttgttttccttccattatgaaaggattagcaaaaccatctttgagtcgattaaatttctttggtttcaattaatttttgctgcttataatctgtccaattcatttctgtaattgaacacgactattcttttcctgttcttttgggccaatgacttgaattaattgtccgtaccatctgaaggctagcagttgcttgtctattgctgcacttatctctgaggcctaagtcctttgctttttagcttctttgtttggaatgattttttggtattttttctgataacgaagtaaactataatataaaagtgaccctctagctttcatcttttaactatggtacaaatcatgttttgcatttatatgcattgcttgttct

SEQ ID NO: 39603 - DNA, 769 bp, Zea Mays
caattttgctgcagagcctgggaagagttgtcattggaaattgagagaaaaccaagctccaaaatggtctctcagagtgcctgaacatcattgccatggtacagtgctatcggggggaattcagagcacttcaccgccgtcgatcacccctccgccgcgatttgtgtcgccggccttaagattcgcgtgtggggtggattgataacgtcgcggggtaaggatcttcgtcgacggtgagctggaggtcactccggtgactcaccgtggctttctcctctactttgcggcggagcagataagctcgccggtgaaccgccgtgtctcggccttgtgccgcgtgtcctaaccgcgccaccgcatcgccgtgactccctctaaactccccgtcgaccaccggagttactgccacgatggtgaacacgtgttcactgcaccagcgttcttcctcacttccgaccgccgcacatcaacgcccaaattcacggtcaccgccgaagagccctataaattgaagcccccgctaactccgcaaggtcatcctccactcagccaccgctaatcgctagcagtccttcgccagagctcgcgaattttgaattcgccccaaatctctctctaccgccgagaactacaccctgccgtggccagccttccccaggtctgctcattcccttcttgttcctgttcaagcatccttacatgatggtgatgcttaccgacccacccaattgaaccgtgccgccagggatcgtcgggaacacgatcgcca

SEQ ID NO: 39604 - DNA, 371 bp, Zea Mays
cgatgggtgaaggaggaaggtttcccctggtccttacttatactccacggcgaagtccgactgagggcgatgttgccggaattttcgggcataacatgcctaccaatacgcaccataatcggaacagaggttggtgggatctggaggggataaatccgacagcttgggcccacgagtcagtgaaacttggcatggagggccaaggcggtgtgggacagacatcccaggcccgcttggcggtgaccgttagtggtagtcgtatagcgagggagtgaggatgggccgcggagtgagtttggcccacagcgcgccgaggacagttgggccaggacgcaataaatgtgcccaaacgcagatccacccacttttct

SEQ ID NO: 39605 - DNA, 440 bp, Zea Mays
tcgctaacggtcagactggatcggaactcctggaagagcgaggtaggaagaaccttggtgaagacgttcgcgtactgagatgttgtgggaacatgaagaacccgagcatgaccaagggcaactttctctcgaacaaagtggagatcaatctcaacatgctttgttcgctgatgttgcactgggttgctagagatatatacgacactgacgttatcacaataaaccatggtggcttagcaaggagggtggtgaagctcaatcaatagctgttgcagccaggtagcttcagcaacaccacttgccacggctcggtattcggcctcggcgctggagcgtgagattgtgtgctgacacttggaggaccaggacaccaggttatcaccttggaacactgcaaagctagaggtgggatgacgagtatccggacatccagcccagtc

SEQ ID NO: 39606 - DNA, 392 bp, Zea Mays
gccttccacccacagtcggatgggcagtccgaggcggctaacagagtcatcatcatgtaccttcgctgcctcacgggcgatcaaccacgtcattggctgcaatggctcccatgggcggagttcatcttcaatattgtgtaccaaagctcgcttcgggacaccccgttccgggtcgtctatgggcgcgacccaccgaccatccagtcctatgagccgggagacacacgggtggcggccgttgccaagaacatggaagaacgccaggaatttctcgccgatatccgtgctcgtctcgagcaagctcatgcgttttagaagcttcactttgacaagacccatcgtgttgttgcgtacaaggtcgatgattgggtgctgctacgacttcatcaacg

SEQ ID NO: 39607 - DNA, 615 bp, Zea Mays
ttattcttggtacaaggcaggggtggttttgggctcactcctttattacaacaattgtatccactttacaaattacatgaggctaaaaagcctgggaaattcttttctaaaaagtcctgagtttcccatgtagcctcatcttctgaatgctggttccactgtatcttgtaaaacttgagagtttttcttcaggtaattctgtccttttgatctaagactcaaatagggtgctcagaatatgtcaagtctggttctagggcaacatccgttacgtcaacggttcgatcgggaacccgaagacacttcttcaattgagacacgtggaacacattatgtactgcagacaaggttttgggtaactgaagtcggtatgccactggtccatattgttcaagaacaggaaaaggaccaatataccggggtgcaagcttccctttaatcccgaaacgtgatacccccttcatcgatgaaactttcaggtagacataatctccaactggaaagtacaagggtatccggtgtgtgtctgcgtaactcttctgacgagcttgagctttcttcaaattatgaattattcgctgaaccttctcttctgcctcctttaccatatcaggt

SEQ ID NO: 39608 - DNA, 685 bp, Zea Mays
tgcatggatggtcgagggggcgccgtgattgattacccacaagcttaccgtgcgggctggaattacagggaaaaacaggtccttgcgggtagcaaagcactcgatcacacaaacctaggccagtgctcagatcaaagccgacggaatcgtgtagtcaaggaagaggactggaacgaacagatggtgtgcataagggtgtagcaccgccaagattttgccgagatctgatcccctgacgccgaccgcgaaaccgaagcaatcgccgattgcaaacaaaggattcgatgcgccgatctaccaccgccaacaccacccactccgatccgcccccgccaacaccacccactccgatccgccaccactacttcgccactggaaacgagagacggcgcatgcaccgccgaggatcaccaagagtttgataccatatgtcacgacgagacggcacacacactgctgaggatcaccaagagtttgataccaactgtcacaacccgtggccgccgacgatcgcttgccgggatgtgagacgaccagatggtggtagagagccgaggagttcctcgtcccgtttctgatgtatttcttttttgatattgtttcttacacagttccaatgttttatccctcacacacaagctgacttcctggccacacatccatactcagcacttatgtcggaccc

SEQ ID NO: 39609 - DNA, 565 bp, Zea Mays
gaacgttgtccgattcgcaaaatagcccacacagcccggtaagcaaacctctgcttgcatctgcctcaacctgtgtctgagctcgacgcttcgaccaatcctcccccgcactcactgctagggttagggaaccagccgtgtcattgccacgacgccttcgcgagcagcacaacctccaccacggccacctccggcacactgcgcaaacaacttagaggtgcagcagtctcttttggtggcatctaaggtgaccccgaccatgtctctccaatgtgatggcggcaacgccacgctccatcgtccagcgacagtgtagagcgacgacaacccatatacaacaccattatccaacgacacctgacgagatgcgtaagtggtcccaggcggcgctgccatcctcgatccgagcagccttccacggggcatctactccaacccttcggccagcatgacctcaccaatccggactccctgatggccagatttgcatcccctgaagttagccatctactaccaatcaattggtccccatccgcagagcactcgcccaggtacattcccaact

SEQ ID NO: 39610 - DNA, 569 bp, Zea Mays
gagaaattcagtaatatttgcggttgatctggaagctatgggtatcagtgggaaatccacactcttccaggtctgttttggttctgtgatattccccatttggatgttgatattatatttgtacttgcatctgtaccaaactatcaatggtttagactcctggtgttttaaattttctttcttgctgactgtgtaatcctaaaaaaaggttttcctgggaaattgggcaaatgggaggtttaggtagatttgcacatggaagaaaataagaaaaatataatcatgaaggtgtatgtgcctactttggtttatagctattctttgttttgagtgctgtagattacaattcattttttttcctcgaacacgcaagagacatgcacatcatttcattaagggaggaaaaaaagatccaaaatggttcagtattacaattcaattttgatcaacttacaatcaaaatgagaattgcactcttagcctaaagttttaaatgtatgacagggtactgaccattgggcattggaaagctttgcagctgtagccaaatacccatctgctcagatagc

SEQ ID NO: 39611 - DNA, 633 bp, Zea Mays
ctttggtcggcatgataccgaagaagggtgtatctgactcggtgaggtctttgagtgcaacccccaaggctaggagtgtccgggggaaggtaatgttaatgctacttcccccgtccactattactttctttaccctgctctctcgaatcaccggatcaacgaggagtaggtacttgctggggtggtcgaagttgagccactgattcgtccggctgaaggttatcacgtgctctgaccaccgataaggagctggggcaatggtggttgccgccaggacctgtcggtcattgagcttctgctgccttctattctcctgcgacccatgtcctccaatgatgacgttgacctccctgtcaacgtgtgggaatgctccactccttcccccttctagttgctgaggctgcctaggctcgctggaccctcctcgtggtgggggaggtggcagaggctagaacggtcggtcgtgtccgacggaatgcttgaagtccctgcagttccatagggtgtggcgcatgtccttgtggtatggccactagacgtcgaggatgtcatccagtgtccgttcacctccgtggggcgcacctcgggcctgagcgatgggtggtccggcggcgtggacctcctcacgaggcc

SEQ ID NO: 39612 - DNA, 607 bp, Zea Mays
ttatggctcaaggtagttgaggaagcatgaggggaattatccaactcatgatctggaattggccgctattgtttttgctcttaagtcgtggaggcattacctttatggcgagacttgtgacattttcaccgatcacaaaagtctcaagtatatttttactcagaaggagctgaatttgaggcagcgtcggtggctggaattgattaaagattatgatttgtccattcattatcacctagggaaggctaatgtggtggctgatgcccttagcaggtccggggttccgaaggtggccttgtcgttgatcgctgatctggaccgtgtggggatcgctttgtgttatgtcggcaccgctagcaaggagactcagatgcttattcaatcctctctcatggagagagtgcgtgcggctcagtagcaggatcgtctattgtaggaagctcgaaagagggtgggtgatggtaaaccgcgggagttcaccattgatgagaatgatttggttcgtttcaggggccgcctctgtgtgcctcagaaatcagaggtgaagatggatatcttgagagaagctcataaaacgccttacactgtccatcctggcgaaaccaaa

SEQ ID NO: 39613 - DNA, 421 bp, Zea Mays
gatgcgattggcttcgtataccctgattatcgctacccgctacgagggcaaggaaaaaagagaaagactgccgcttcgaccaccacagttgtgctgaagggcaaaaaagtgaaggttctaacccaccggccgcgatatattgaaccggccgtagtgcctgaacttagcgaaggggcctcttcaactaccgaagcgagacaagctgctccaattgtgcagagcgttgaagagccgattgtagtgtcgaaggtgcttacagtcaggccaaccaaagctaaggatgataaggatgaagagccacaggtggaaaaagtgataaaaatgccagaaattttgagcccaccggcaaaggcaaatctgccgaagatgcaaaaagctcctgctgcaactcccaagaggaggaggatggccagcatgctag

SEQ ID NO: 39614 - DNA, 372 bp, Zea Mays
ttcggttcctgctgctgaggaagtgcctgtgcctgaatttactgacgctgaccccaatgggtgtgctccatctgctgctgatcccaatgggtgtgctccatctgctgttgagcccaatgggggtgttgtttgtgttgctgatgaaaacgacggggaggaagaagatgaggtccctttgactcggaagaacagtcggcagtatgtcgctagtggggaaagtagtggagttccttctcctgctctgtctgccctcattggtctacaagaattgtccctggcgaactttgatcagactcttgaagatatggttccagaggatctgttatcagagccgacagatggtggtgcgacgggtgtttgtgctgatgtgct

SEQ ID NO: 39615 - DNA, 433 bp, Zea Mays
gacaaggtgcttactgaaaagcaaaggggtaccaccaaggttttggggggaggcagtgataacaacagtctatctgctgaataggtctcctactaaaagtattaaaggaaaaactccttatgaagtatggcatggcaggaaaccataagttggtcaccatagaacttttggttgtgtatgtcatgtcaagaaaattggtactggccttggaaagatgtctgatagatcttcaaaaattgtgttactggggtatgagacaggcatgaagggttacaagtttttttatccttccactgagaggctacatgtgagcagagatgttctgtttcaagaagataagagttggaattgggacagtgaaaacagtactgaacagattccaagtgtatctgaaacttgtgaaatacagtttcagtataatatacctgctcag

SEQ ID NO: 39616 - DNA, 343 bp, Zea Mays
aaggtgattgtgtgctctgaccaccgatagggagctggggcacgagtggttaccaccaagacctgtcggtcgttgagcttttgctgccttctattctcctgcgacccatgtcctccgaagatgacgttgacttccctgtcaacgtgtgggaatgctccaccccctctcccttcctgctggtgaggctgtctgggcttgccaggccctcctcgtggtgggggaggtggtataggctggaatggtcggccattcccaacgggattcttgaagtctctgcagtttcgcagggtgtggcgcatgtccttgtggtatgggcactgggcgtcgaggatgtcgtccagtg

SEQ ID NO: 39617 - DNA, 578 bp, Zea Mays
ttcgggcaggaagcttttgggagggatgatggttttatctatcaatcacaaggccgataagggtggataacttggaagtttgtaaggatcactcgtttgcaaacaagccattcaagagagaatggtgtgaagatttgaattcatcccagtgggatagtcggcatcagagggcaatttctcaaataatatcgcttgactccacatctaaggagtgggataatctcgacgcttctaacaaccatcatcgtccttggatgcccatggaggtgcatcaatacgcgatccccatggatgtccttactgaccaggaagacatggcaggtgggcagtaccaactcaaccaaacaaaaaatgtcacgtgggatatccatggaggcatgatggatattggggacgcgtggataaattccaaggtggaagacaaagttgcagaggatgcacttctggaggatggggaggggaagaagccttctgctcgtatgggcctttccctagcttaggtgtttaaccactcttggaggcccagtgacccgaagtgcttatagattcctagacccagccttctctctagtataagc

SEQ ID NO: 39618 - DNA, 728 bp, Zea Mays
ctcctgtatagtgagcctcctataatggtgtagtgggctaattgtcttgtgatgtgttctgctacagccttttcatacggctcttcttcattctttatgtacctgatgataggctctctccagtcgttgggatctgcctctggctgagtcaaggcgttgcactcttccacctgatccgtgaggatgctcggctgtgatatttcttggtcgaaaatcccaggtggagcctgggcccgactggatcccagcttcaacaacgcatccgctgctacgttgcggtctctttccacgtgatggaactccaatccctcagatttgtcttccagttttcgcacggctgcgcagtacttgcccatcgaatcagtcgagcagtgttaatccttgtttatctggcttatgaccaccagcgcgtcaccatataccatcagtttcttgatgccgagtgatacggcaattctcagcccatgggtcagtgcttcatactctgtcgcattatttgatactggaaacagcaactggagtgcatacttgagttgttcacctccaggagcagtaaaaagaatccctgcacccgctcgttacagcatcagctagccatcaaagtacattctccatacctcagtgacttctgggctatccgggacctggtgctcagtccattctgatacgaagtcgaccagcgcctgagttttaattgtcgtgcggggctggaactctatgtcgtgagc

SEQ ID NO: 39619 - DNA, 398 bp, Zea Mays
caggcaccttacagccccttcccataccatcttggaaatgggaggatatttgcatggatttcattgtgggattgcccaatacctcccggcaccacgattctatttgggtcattgtggataggttgtccaaaacagcgcatttcttgccagtacataccacccaccgggtagaaaagtatgcagaaaattatattgaccagatagttcgtttgcatggaataccaaggaatattgtgtctgacagaggagcaccattcgtggcacgtttctaggagcaattgcaagaatcacttgggacccatgtaataagaagcttagcataccatcctcaaatagatggtcagacagaaagggtgaatcagatttttgaagacatgttgagggcatgtgtgttacac

SEQ ID NO: 39620 - DNA, 449 bp, Zea Mays
gattaatatctgatggccccgattagatcctaacctatgtgaatgagcgtcaacaggtgaccgcccgataaaaatgcaacaacccataatctatccgtgggtcggatcgcagggcccgatccatccgttggcccccagatcgacggttctgattcactgaaaccacacgccaccccaagatcaaatcctagccgctacacacggatccaacgatcccgacttgttggccccgcgctacatcacagccgcattcagtgaatcatacggctacccatcatcgtcttcaccgcgcgcaagaccacgacgcgacccgacacgccagtacggccaacggcgacgagaagcaccacattcaaactctccgccctagttcacccactatcctggcgcccaaactgcaattgtgacaagtccgacaccgcccatcactgtacgccaagcggccctag

SEQ ID NO: 39621 - DNA, 506 bp, Zea Mays
gagcagtagccctgagcgaagtttaggtgcggaccatgattggtgcgccgccagataacggcggtgtcgtgtactggtccgggctgtgtgcacgtcggtggatcaacgggagagagagagaacactggcgagggcacgacgtctgtgcatgggcggccggaggttgaagaagaatggcagatcattgatctcatctccaacggtcatgattagatggatggttgagagtgtgggaaccgtagatcttagatggacgacctagattgaaccttggcgtaccccttcgagtcattaaaccagggtcgtgaattccggatccgacggctagggttgagcgcacatgaataactagcgtgaagtctaatctggcgcgcagatgttgaatccgacggtccatgatccacgataccccttcgctggccctttttgcgcataagcccctagagatactggatatcaacctgtcgtccggggttgcagtgctctaagtctcaacttcttttacg

SEQ ID NO: 39622 - DNA, 378 bp, Zea Mays
gggatgtggttagagaataccttgtggagcatagacggcttggggtgcgcgatatccagcggtcgcacctgggtcaggttttggttcagtttagcagcgtgcttgaaagagacaatcttgttctgctcggtccgcaacagtacctcgatgcttccttcactgctcagcggcataatgatgcttggaatcatagagcccttttctttaatcgggaatgctggcttatgttgttgggattccctctggattaccgttcatcagaatacttgcaggcagctattggctcttttggcagattgattttgtgggaagaggacagacgcaatgtttacaggactttgctcagggtgcgggtcacgtctctggaggaggtccctc

SEQ ID NO: 39623 - DNA, 345 bp, Zea Mays
tgaagtggcacgcgtcatcgaccattggatcacggattagcggttttgattttatgtttgcccgagctgcccataaccaccggatagaagatctacgactatgatcgaatccaccgaatctgtacgaggatcctctaatctggaccgttaacgccgatccaacggtcacaacgccatccccacctcagaccctgattgcgtggcgacgccaccatgcccacgcggtgaagttcgccggagcgcgacgatcaaatccccaggtgcccgactacccttgtaaatgggtgtagcagagagaggaagcaacagggaacacgacagaggggtgtattatctgcaatgaac

SEQ ID NO: 39624 - DNA, 310 bp, Zea Mays
tttgtagtggctaatcggaggcgagaagtggtgctctggcttcacaacaagctaacggagcaagtcgggacatcaatttatagtgatcaacagcggtggcgcccaatttggggaagacacgctggcggccggagcaaggtgagtcaccggagttcgcatagtgtggcattcaataggcaaaatgtgacggtggtcacctggttatcctccccaacccacgacgatgtggtagaatagcttaaggcgtgtcgtgaccgaggtaaacgacgacacgacgacggcgatcgcgcggacacgtcgccggtgcaag

SEQ ID NO: 39625 - DNA, 488 bp, Zea Mays
cacgcggagaacaactcgtttgcttaaccgaattttctgcatcatcctatatgcccatatccttgaccttccctgcgtccactcacctccatcgctcggtgcttcctatcgtgaccccgtccgctgccgcatatgcagggttgtgggtcactgacccccttccaccgtcgcttccccaccgcccatgctcgctccactcttctccctgttcatgtcgtccccttcttctggctcacgtcttttcccgatccctcctcgcccatacccacctccttccccggaccatgatgccctagttcccccacacccactactcccctagactcagaggaagcctccacgttccacatctgcatcatcaaccttcagctccttccctcacggcgaggtgggaattcatatcgtcacccctcttcctcgagtggacgcagttcccaccttttacactctatcccccatcagcgaggtcgacgggccagaggccctag

SEQ ID NO: 39626 - DNA, 326 bp, Zea Mays
cggagggcagcaccagcttgtgggggcgcgagtttggagatgcgctgtgggaggaaaactgactatctcgacatcccactcaaggacagcatcaagggatggcgcctagaatggttcatcgtggagaatcatgggaattctctcccccacggtcagggagacagccagatgttcgcactccgagctggaccgaatcccccacgaaccaggaggtggctgaggcagaggctctgcttgctgaggttgggctgctgaaagagagaggtttgactgcagaggctgtggttgtcgacttcaatttcaagaacattcagccactgaaagac

SEQ ID NO: 39627 - DNA, 381 bp, Zea Mays
actgaaagacagagcatatccggcttatctgtaccgaggcttggctgactcaacccgggtaaccaacagaagaattcctgctgtggacttagtgagccggcttgagatgatactcagaggcaaggtatcgaacatcagcgcccctattgcatactcagcctggaatttgcctccttcccaggcttttaataatttcgtgtcaaatcctcctgctggtgatagcggtttgggtcttagagtgcgaccctctcttgaagaagttagtgctttggttgcctcgctcggagaaattcctgacgacgagagacaggttcattttgaggtgcctttgaatccaagtgatgcagagataagtgccatgcttgatattttagccgagga

SEQ ID NO: 39628 - DNA, 338 bp, Zea Mays
agcctcaggaagactcccaagtggagcaatcaagacctcaatgtcctcgggagagggtcgcactctatgacccgggctaccatcacgagcaggagggttggagacaaattcagagaatggcctatttggcggcaggttccacgcagagtaagctaaaggatcaccagcattcgagaccctacccctcagaatcatatccagtcggctcagcaaatcctcattgggaatctttctgtttgtgacccgggtggaatcactgatgccggtatataagtaagcagggtaaattctgtccttcaagggttgaatgtttttgaagacgaagtcagcaaccatag

SEQ ID NO: 39629 - DNA, 337 bp, Zea Mays
gacgagcatgggccgttgactaaacacaagttgaggctcatagtaggtctacgtgcaatgacacgacatccgactacgacaaggtgttcatgtcagtggttagaacagactcggtgcgcctgaccattgcaatcgcggcacacgagggatgacattgcaatcgtggcacatgagggatgataggtgcaccacatggacgccgagtcaatcatttttggacggcgacttgcgagaggagctctacgtgaagcagcagccggttttggcatcaccaccaaggagcacaatgtgctcacgcagtcacgctgcgaaagacgttgtacatactacatcaaac

SEQ ID NO: 39630 - DNA, 427 bp, Zea Mays
tgggggtgagtggtctagtgtgggtgcatcgactgacttctgcgaagacctggttgtgacatgcatgaagctaggggaggtcgtggtcgagcaagtccttaaggaggcattatcatgaatgttgaaggtcactcagggtgagtggcttagaggtgtgcctattccatggaccgttggcgaagactttcttacgtctaggctagtacaatcatttaaagtgttcctttatgggcgtaacattgatggtgttgtgtcagcttcgatggaaagttcccagaaggagtcaaagaagatggggcctgcatggttggggaccctcaaagagttgtgcgagacttgctagggtctagaatatcccccgcgaaggctatgatgcctttgagtgttgcggctatgacctcgttcacgaagggtgtctcgacagggc

SEQ ID NO: 39631 - DNA, 471 bp, Zea Mays
cccaaacaagctctgttagaaccactgatgaagcctttgatggtacagtggcaaaagatctacaaattctgtgaatctcgctgtcggtgacccttcgccacgattgacatcgatcgtcgcgattcgtgcggtgtggcttgcggataactgtggacaatgaaagatctcaactcaggaaaggagtagagacttatcaccggactattcactgtgacacttgccgcgcattggacagaggtgtcctcgttggagttcgccgtcgatcatagtcatgccacgtgcttagaagaactaccatgtcacagtagatatccgtatgaggtctgttcgtcgccagagacattaccccggggaacgccacgatagttcacgccggtgactcacctctcccctcgaccgccggtctccccctttcaaatttcggcaccaccgcttagcgcccttataaattgacggcacggtctgctccgc

SEQ ID NO: 39632 - DNA, 499 bp, Zea Mays
tctctgtctaccttgataaatacaatcatatatttcctgacatccacttgagtgattttttgccatggggcctgagattggtatgggtttgaaggaatttgtccaccaggaatatttgcacccactggtcctggagtgcttggaatagcattaaattgttgttgcctaggagctggctgactgtgtggcaactgactagtatgagaaggaagcgacgatataccctgcaaaggaccgacctgcattggcttaagagggtgatgaggtccagcagctgactcttgtttcgcttgtggagtcacagaaaaagggtcaacaccaaaagttgaattagatggcaatccattacccaagggtaccaatgccttggagtcactaactgatggttgtgaaggcatcatgtttacgtttgttgaatttgtattggcaggtgttgtagcacctggcgtatgagaattgtagactggcagaggagttgaattctgggcattgatgcaac

SEQ ID NO: 39633 - DNA, 721 bp, Zea Mays
ggaatccatcaccagagcactgatgaacgtcgccgccgccgccatgaactcagacgatgctgcggcttgggatctcggtgatcgggattgggagcttcaactccggcgggatctctggtgagtgtagtcttctagtttccatggcgatactattctcagggctcgaaatagtcacggtcagggagaatcgacggtgctatcctgctcgccgtggtggtcgtaatcttgttggggagcttcgttgggccacgcaggggtgaatcgtaccggcttcgaaagtgtcgggcgccgagccgctaggtagaccttctccggcgtgtatcgccgtcgcggctgggggtgaactggggaccctggccgtcgggtggaagaacgtgcctgtgccgtcgatccttcattgaacggtctggattagacggggacataccgtttcgcctaggtgaatcggcgtcgtccaagtgttgatgaacgctgtggattaaaagaggggagagttgatctgcggcgttggattcagatcttgtggctctggcgcgtaccagttcgcgcaggtgtagagtctaatcggggacgttccctttagatcgaacggcagagatcctcccataccccttcggtgtgcacatttacataaagaaccccctggtttcgcagaataaacccgccgtccactcccactgttccctgtgtctgcagattattaccccgagccccctgcgct

SEQ ID NO: 39634 - DNA, 507 bp, Zea Mays
catctgctgcaaatgcgtcgatggccgattcgtcgtccgaagataccttgagcgatttggtggcggtggagttacagccgggccacacggtggagtttggcgtttcgaggatttcctcggttcgcgtgtaggatatgcggcagttggggtattttggggacggtgttgggcgcatcccgggggtggaagagattcccgagcctgagggcgagttagtcgtgtttgaggccttcttcatccccggccttcgcctacctgcacatcatttcgtggcggaggtcctgtagaggtttgaggtctaggtccaccagttgacacctaatgctgttgtggccctggcgaagtatgtctgggcggtgacttcgtatggctatcaaccttctgtggaggtcttcgccaaactgtctgcactagcaaaagagaaagattgggagtaagattgcacagtttggatcgtgcatgttcacgccgaggaccggaaagacttcgatggaagtcgtggaatta

SEQ ID NO: 39635 - DNA, 377 bp, Zea Mays
catctatcgcctaaggcctggccacggtgacaaccacggtcacccgctccagtacacttctcttctcttcggccgccagcacctcccttccaaatttggagccgccactcaaacaccctataaattaatgccccagcttgctccgctaagtaattgtgcacccagtgaaccagccctcacctccaatcatcccccacaactccccaatttgggatttcccccaattctgttctctacgccaccgcgaaccaccgtgccgtggatcatcgtttccaggtccgttcataccctcccgaccctcgttttggcattcttatgtgctatagatgcttatcggcccagccaattgagctagaccctgtcagattactgagaac

SEQ ID NO: 39636 - DNA, 436 bp, Zea Mays
atgattacacccgcggtcacgtcaagttactactcaggggcagtttgctaaacgctcagggcaccaaaccgtcccttgcctacacccattggggggacgtccaggaattttcaatagattttcccaagcagtcacatccatacagtatacgcaatgaatgtatcaagacagaaggaagatatcgatggagatcggaggaaagccaaaaatagctgatgaagtaccagtctaatcaacaggagcattgaagcacgaagcgaaatgaaaactagccaagggccgtctaccggatgtcaaatctgtcgcagatcaaataaattccaaacctaacaagacatgggtagaccgcattgttgatctcaaaggcaaaaccgtatgctgatctctaaagcataaggctgatgatataatgctgaattctaaggcatccgacgaa

SEQ ID NO: 39637 - DNA, 457 bp, Zea Mays
atccaacggtcccagttttactgtgtgaaacggtatgcgcagggcaatcgcgcccgcccgatagggatcggacggccaggagccgttcaccttccccgaactaatctaaggcgttaatctatgatcggacggcgcccaatcaacgtccagctcacacatctatccctccctcacggtcaacgccggcggacccgtgcttcctcccaacggtggcgccatggccggtgcacaccaagtaggtgatcccccggcacaatcttcaaattaaatggcgaaatacagagcggagaccaaagtggggccatggggacggtactcaccctcggttgcgcggcccagagcttggaccgtggagagaagccgaccgcgatggtgtctgcacgctggtgaagatccttcgagtctccagttggcaattcggcgcggcgggggcacaagctcctttccctcaccccga

SEQ ID NO: 39638 - DNA, 349 bp, Zea Mays
ccagtggcatactcagcctggaactggcctcctctcaaagccttcactctttttgtgtcgaatccgcctattactgatggcagtttgggtcttagagtgtgaccctctgctgaagaagttagcgccttggttgcttcgctcggggagattcctgacgatgaacggcaggtccattttgaggtgcccttgaatcctagtgacgcagaaataagtgctatgcttgatttgctggctgaggattcttctgatgctgctcctgctgggacgctggtggtggcgctcctcccagaggctagtacgatcttggatattcagaagcctgtcagtactcgcccgaggcgcccttgcc

SEQ ID NO: 39639 - DNA, 429 bp, Zea Mays
acctttccccccaatcaatttcgctagaggtggtctatcatgctctggccacggtgtcaatgcgggtgatcaagtggattaaggtgttccggatcaccgaaggctgggctggctaaattgaagctagggaaaggttcctgggttcaccagagatgacgcacacgctaagctttgggctaggcccgagcaaaaaggtggggcgacggagagggtgtcatggcggtttttgacagcgcacgggtgcgttccggtgatgggcttcggccaaactccaaattgccgcatccaggagcaataagagatcaaagactaactaaaacagggagtaatttggtaattactgcccagaggagcgctggccacggatgtttcttctcggcggagctaagaacagaagagagagggaattggggctacgtgggttttccg

SEQ ID NO: 39640 - DNA, 618 bp, Zea Mays
cacaggctatgcagtccttactggagattaggcagattggatctgtggaggagtacaaaaaggtgtttgatgaggcgcggtatgcaacttctgtccataatcatgatttagatgagactttgtatgtggcccatttcattaaagggctgaagcaagagctacaaggaccggttaagtctcatttgccagcatcagtggaacgagcaacattgttagccaggatccaacaaggtattttggacaaacagcaacagaaaccattcaagatggtcaatccgggtcgattggggggtgctgtgtccaggtccgacactcgagcgactgcttccttacccgagttgtctaaagagagattggtgaaggagtataggaggcagaatggtttgtgctatacttgtggcgacaagtttgaacctggccatcaagctcgctgtcccaaaaaaatccaaatgcagttacatgccctcactaccgaggatttggggatgacactatctgagcacacgttgacacaaattgagcaggaggaaaaaggggaagaggagaattttatgttgtcccttaatgctcttagtggtactacaaatgatgaatgtatggctgtgagagccttattgc

SEQ ID NO: 39641 - DNA, 370 bp, Zea Mays
tggagcagaagtgggagcagtggaagctggtgtggtggaaggctcgagagcggaaggagctggcgaagtgggtggtggagtggagattgggtctgagggagtggattgagtagtggaggagcgagtccgagatgagaggcaacaaactcgaaaagtgatctaatcagagccaatcttcagctgacctccctgctatgcctgatctgctgcacgggtggctctgtccaactgtctcttcttcttgccccttgctactcaaggtagaaagccttgctctttcctgtttgaaggggcaaggagggtcttggtcatctcctccccctgatggtgtgacattctttgtccgcaccatccaaaactggctactaac

SEQ ID NO: 39642 - DNA, 842 bp, Zea Mays
agaagttgtgatggcacaatggcagccagtcccctatcagctctagcagcttggggtggtgccatccttattcctgctcatattgcgacgtgcttttaagcgttactgctgatggttgtgatgcattcccctccaagattgcgctacatgttgcaacatcgtccacggagacccccatgctgcatgatgtaacgcagcccaagaagaggcctgccatgtgctttgtgattgtgcgccccacccctgcgcgtggtccagatgcagatgggtggtatacggtggttagtcgttgtgaacttaggggggcagtctcgacacccacaacgtcccagaaggttgatcctagaggatcttcaaggatgatgtttcaactatttgtccaccaagcattgtgcggcgcggtgtcatcttcctactcgatgcttccatttgccatggactaggtcatcgggcaatcggttgccctcgtgctcagccacaggagcatgcatttatttgaatgtggattgagtcggcacctgtacatgttgatgacaccctctctgcctagcaaggtgcaggttctctgccttgcggtgccctccccttgagtggatgcgcacaggccgcagtgttggggttgtgttgcatgaaacaaaaactatggactctggtgggctaccaaggcgtcatcgtcgtaggttgtgacgtcattcttcaatgtcgtatgctagtactcgtttgaaacagtgccacaggatgcttatagcgggcagtagtgactagctgaggtcatgccggtggttgtcgactgagtgatgctccaaccgataaggtcgagctgctgtatcatcgagcattca

SEQ ID NO: 39643 - DNA, 543 bp, Zea Mays
tttgggggtaatcccaaattagggagctgtggggaacgatcggagctgagagttggtttactggacgcataattacctagcggaacatgctgaggcttcaatttatagaactagtgggtggtggccgcgaatttgaaggaagacgcacggcagccggaggggaaaagggctttggcgcatgacacagtggcctttcaccgtggcaggtgctccggtgatcaccggacatgcaccacatgattcaccgtgacgagagctagcgctaaggcacgtggtgcgcaacagcgacaacacgacggcggtgagggttatccgagcgaccgacgagctggggggaagtacagcatgcttagccgcaaccgagcttgagtggatcagacgtcgagatctttactgggttgtgcttatccatggccatggcgcacgaatcacggcaagcaatcgatcaacggcgacgggccaccggcgacgagatctttttggcgctggcggtctgatcctcccgatagcactgtaccatggaggagttcagttaaatgaacc

SEQ ID NO: 39644 - DNA, 363 bp, Zea Mays
gtggcacttgtggctgcccttcggagctgcaggtgcgaagggtgccttccggagtgtgttgatcgttgcgatgtctcttactgtgtgcttcgtcttcaccagctccttggtgggtgttgtcggcgagggccttgccctttttctcagctagcaaggctgccttcgctacttcgtcgacggatggggctgccttcgagttagctcttttgggtgccatcgcgggtggttttctcgtagcacgaacggtgggcgccaatgttggaacttgcgttcccgggcaggttgattccaacgggggagtgagcgagatgtgaacacagtttaactggaggcggcaattgctctgttaatccagcttctcaa

SEQ ID NO: 39645 - DNA, 398 bp, Zea Mays
aaaacagcaaaagattctaaaagcgctatatatacgaggaaatgtaatttaaatacagacctgagctacaaccctgtgacctctgtaatcaactattgccatcgcaagattgtgaaggccagaaacatcagcttcttgataagccttagttccttttaagtcattgtttgcagaagcatatgtcgcctgctcactatctgcgagttgtgcctcttcagattttgaatcaactacctcagcagatttgccatggtttgcatctggcttagttatcacatctggggaggaaaccttggtgcttctgctggacccattttggcaatctggcttgtggtcctttgaaatgtcttcatagtcggagtcgacagcaaaactaaagaaaatattgttgtgaacat

SEQ ID NO: 39646 - DNA, 420 bp, Zea Mays
cgcggaccgtccagctataattcgagtaccgtttggctgtgttgatttgctccagtccaaaggagacaaaattgagcaaaaggatttttagagctggcgtggaccgtccggaaccagggacagaccgtcgacgagtcatcaccgagggaagacaactgttgatctagccgttgggttgtcaaacataatcgttgtaatgtcagtccgaccgttggagggtcatggaatgtccgggccctagccgcggaccgtccaccagtgcagattttggcagatgcgccataacgactatttgggtggttgaagagctataaaagccaccccaaccagcccattcttaggattcacagatccatatcatacacaagagttgggtattcacttctatctactagagcaacacttctatacacatcaaag

SEQ ID NO: 39647 - DNA, 696 bp, Zea Mays
cagagaatgtggtttacggccatataggacttcaaacggagatgaacccaaagccgaatgaaaagtagtgttataccagtattctgcagtgggtaaccaagaggaccatttcttggggcaagcacttacaaaacagcggagaaatgtctctagacactgattcacccgttctgtctgaccatccgtctgggggtggtaggaagaactcatgcgcagctcagacccggccaacttgaacagatgttgccaaaagtggctggtgaagacaggatcgcgatctgatataacagccaatggaaatccatggaggcgatacacattgggaagaaatagttgagcgacagaggcagcagtataaggatgagatagtggtatgaagtgggcaaacttggtgaacttatcaaccactaccattatacaatctgctgaacctgagcgagggagaccttccacaaagtcaagtgaaactgtgtgccaagcagtaagaggaatggggagaggttgaagtttgccaggatacgccgatctatcaggtttagcttgcagacaaacttgacattgctgtacaaattcttggatgaattgcttcagtttcggccaggcaaacaaactcttaacccgacgatacgtggctggaatgcctgaatgaccgcctatagcagaggtgtgtaacgcggacagcaccctgttttttaa

SEQ ID NO: 39648 - DNA, 358 bp, Zea Mays
gcgcgcctgggccaatttcgctttgctcagcccatttcctttcccttcccccacgaccgcacagcccaatccctggaagtccgatgccaacccgtggggcagagttatcagccccacaacgctcgtcgtgcgcgatcgcttccatgccttgcgtcgttgttccacgggtccccctggcagtcaccgcacagtgcctgcatgtgtatggattaactgcggactccctctgttacgtgggcccaggactccacgcgctgttcttcttctagccagagagtgttcgaccggatggtatggaggttgttacagccgcctctagccccgcctcagccgcagcttggagcattaataccggggg

SEQ ID NO: 39649 - DNA, 522 bp, Zea Mays
tttatgtgggaatgtcaaaggcttggccggtatttctcaggactgtcgttggatttatgtgggaatgtcgaaggcttgcccggatcaggatcgttttttatatgggctactgtgtagctgccaaagcataggactaaggctcagttctagttgtggtcgttcttgctggacatgtgttctctggcatggtcaaggagactgagcttgagtctatcttcttctaactgattcgcgccgtgattgggagcgtaaatccttatctcagatcacaaggacgctgtataaatagtggtagcatcggcacggaagtcaatgcttcctgcctttgtaaacactagcccctatattacgtaggtcctaatcaacttgtgccctttagtgtccgcgtattctcctctaaccatgtcattggtttagccaagtgcacccactgcatcacccatcgaaacccccacatatcctagctatgcaggaacgaggagaaggacgctaggacattggaactagtgcactagactatga

SEQ ID NO: 39650 - DNA, 358 bp, Zea Mays
aaaaacaggtgcgaaataaaagtcatataacattacatcgattaaaaataatcttcatatgtgtcggggttagccggatcataactctcatcatcactatcaaccatttcatagtcaacaccatctgaaggcacaagttcgtcattaatgtcattgccttcaaggattactaagtcattagcattttgcacctcatcatcctcctcatcaacaaccatttcaatatctatgtccattctgatagcttcggttaagtctatctcaaatcgcccttctagcgcgtcttcttggaagaactctccatcatatgtgtctgggtctaagttataatcttcatcgttaggaacaggtaatctcc

SEQ ID NO: 39651 - DNA, 309 bp, Zea Mays
catgacatgcgggcccgcttcctttgcgctggtccaccggatgtggatggagccgaaggggcgcatagttgcggtgcagttggatgcccatcgcgtggcagtccaccctttctaccacctgcttctgtggagatgggagagcgcttgtaaccgcgggacggttacatgcctcgtgcgcggcggttcgccttcttcgtgcttcggatcagctcgtatgacgtgtgggtcctagcccccgtgtcgtagggagagaaccctggaggatgtcagtggggacttcgcccgtgacgctaaggggtgcaagcgagg

SEQ ID NO: 39652 - DNA, 307 bp, Zea Mays
tgatcgctgtcttgtccaccactgtgctctattgccatagcgtgggccagtacacgcattaaatgtgcatgtcccctgcctgtttttgggttcctttgtcttatgtgcttgagattggctcgggcgagacggactgagctgaagcaacctcgggcggggcggagtgagtggtgtcgacttcgggtgaggcagagcctactcgaggtgggagaccctcaggggacgtctcggattttttataggtggctcggctgtcgcccctcaggagtttagtccttatttctctgagtgcatttgttaggggggt

SEQ ID NO: 39653 - DNA, 3120 bp, Zea Mays
cacaactcttgtgcaaattagctacaaggccagaagcttcaccaaaacagtcaagaatgagtttgacacagtttagatcttcctccctgggcttgacaaacagcactacatcatctgcataaagagataatctagacttcacaatggcactgtccagactggccaataattctttttcttctgccactttgaaaaggctgctgaggacatccatcaccaggacaaagagcattggggagagggggtccccttgcctcaagcctctacgatgcctgatctgttcccctggaaacccatttaataaaatctgagttgaagaagcggccagaaggttggagacaagattcctccacttaataccgaagccaaggtgggtcaacacctcaagaaggaaagcccaggaaacagaatcaaatgcctttgttaaatctaatttcagaaaaaggctggccacttttttcctgtgcagggatttaattgagtgctgaaccaacatataattgtcatgaatggatctgcctctaacaaaagcactctgattagtctctaccatcttgttgagaggagcaagcctgttagcaaggatcttcgtggagagttttgcaaagctgtggatgaggctgatgggcctgtaatcaccagcagacaaggcacctgtcttcttagggatcaaagtaatatatgctgtgtttagaggtcccaaattctgagaattcccaaggtgaagggcagcaagggcggccatcaaatctgccttaagtataggccaacaagttttatagaatttccctgtgtatccatctggcccaggcgctttatctgaaggaagactagcaatggcatcccaaacttcttcttctgaaaaggggagctcaagagcagatagatcaattggagctctgtgacactcttctaatctcaaagtaaacctcctctggggggcataccccaacaaattggagtagaaattatgcagcacttcttgtttttgctcatgagatgtgaccactctttcctcatccagtaagctggaaatatgatttctcttcttgcggaagcaggcctgcaaatggaagaaagaggtgttggcatctccctctttcaggtactgaactctagatctgagtcttgcaaccgttctttccagggaagcaaggaccaggcactgatgcttgagctttcttagcagccataattcatctggagataaaaccctgctgtcttgagccatttccagtctgtgtaaaatctcccttgctaagcccagttggtatttaaagttgcccactgttttgtgcccccaagactgcagtgctcttgttagtctcttgagctttagagagatcctctccagatgcccgcaattgtgaagtggctagttccaggaatttgccaccacctcatgaaagcctggcattttggtccagaagctctcaaaatgaaatcgccttcttgccttaccttcttcttctatcatctttaaaatcaaagggcaatgatcagaatcttctgaggccttgctaaataaagtagcagctggaaacatctcttcccaactcgaggtacagaatacgtggtctaatttaacaagagtgggagccagtctttggttggaccaagtgtatctcctccctatcaaaggaatttccttcagctcccaatcctctatccaccttctgaatcttctcaacagggccctgttgatacaagggttgttcttgtcctcagacctgcatatctgattaaaatcacctgccaagatccatggtccatcacaacctgccctgacttcacttaactcttgtagaaaagcctgtttaagattatcttggtgtggcccgtaaacccctgtgaaccaccaaagtgggcctgaagccatctgcagttgaatagagaccgagtactctctgattacatgactgctgtgggtgaaaactccatctctccaagccactaaaatgccccctcttgtcccctgagctgggctgaaaacaaaattactataaccagtaccaagaattgacaaaatatcaaaatcagagatggtgctcattttggtttcttgcaaacagacaagtgatggcatgatgtccaggactagggtcttgacattatctttcctagccctactgttcaatcctctcacattccaaattaggaagttgcactgttccattgagaaagaaaaaccacgaccaaacgaatagacccaagcttatgcgagctcagatgtatcccatccgaacagcgcagccaaggcagcgatgtgctccctggagagtggtgaattgaataagacagcatatttgctagcatcttccagagtgatattgccatgatcatcacagaatcccaatttcttgcagacagaggctgctgcatcggatcctagctcaggtggaaacttggccaccctcctggatctcctaggcctgaaatttcttggtagggtcttctttctgcgtttggggattggcgggggactcagcaaaccattaatggctttagaaatgtgctgactgaattcttgcaagggggtcggggatggcgagctcacttcctgggattgcacaggcacggtatctcgtcttctagagtacaccttaaagcatggtggttttgcttgcagtgagtacttgataatatcccagggattcctgacttgtgcagcattatcagcagggacatctgggacatgcgggacatgagaaaatggcacagaggcccgtcctgaagcatcagcacaaagattttctgggccctgtcctaacctctgaaaaccgccagcctcctcaaaagccgccacattaaatgagttgtcatgcagaattggcctctcagaatccaatagaccagaggaaattgcaccaattaatgaggcgggcccaggatcttcagatggagagccggttgttaaagcattggcggctcctgggactataaccgaagtgacgagcgccgttgggggagaaaccaaaggggctggcgtcggaattgtagagcccgaagcggcttcttcagcccccacagcaaccacagcgctcaagggtcccggggcactgaacgtcccaactgtacatccaggcgcagagccggcaccaccacaaggcccgaggcgcg

SEQ ID NO: 39654 - DNA, 1025 bp, Zea Mays
gctgtatatttttcagagcagtggtagcattcaccgctggcccgtttggcggcaacctcctccggtgagagcctgcgcaaacgtggtctgctggtagccgatgacgagggttttgctgcagttgcacatgccgttggttttgatgtagcatatggcgtccttgatggggccgaggacagatccatacggcgttcataggcgcgtgccaggtgcatggcccgctgcaatgtagtcggagtcagcagttcaacatcagtccgaagcggttcacccaagcctgcggtaaacatctgagcttgctggagctgtgtcatatcctcgcagcgacttagaatggacagaaactgacgttgatagtcttcaacggtgccggtgcgccgaaggtccttgagatcagccataccgttggtccgtagaggtggtccaaaccgcatatgggtgaactcaacgaagcgggaccaagtgaggacaccgcccgtgtcccgctctagagcgtagaaccattctgctaccacaccgtccaaatggagtgatgcctgccacaccttctcatcgggtggagtcctcatgcccctaaagtaagtctcacatttattgatccacgacagggggtcagactcaccatcgtagtggggaaaggagacattgggtcttcgatagccaccatcgtcgacgcggtcacgaagagcagatcctgtgctatgcatgaccccgacaggcgctgcggtacgtgggccggtttctgaagattccggcagctgctcgtcgattgggcgcttctccaaaagcgtgatccgttgtccatgcaggtcgaggcgtgagttgatggtggagagctacgccaatatctgatccaacttggctgagtcggaggaggtcttcgcaggatcgtgaccaacgccggacatgttggtcgatgcgtcggaggagtctgagacggctactgcggcgtggcacaaaatcaagagggagtcgcttggttctcttcgtcatagctgggggaggtagtaggtagcttacttctt

SEQ ID NO: 39655 - DNA, 396 bp, Zea Mays
caccagccttaataaggcttgtcctaaggaccgcatccacttccacgcatagatcaaatcgtggattctaccttcgggtgcgacctcttatcattcttagatgcttactctggtttccatcaaatctagatgtctagggaagataggaagcataccgcttttgtaacagtggatgggctttattgctatgtcgtaatgccttatgatctgaaaaatgccttgccgacatttgtgtgggcgatgagtaagactttcggggacctgattagggacaaggtggaagtgtatgtcgatgacatcgtggtcaagactaagagagggtcgaccctagtggaagacttaaccctggtcttcgacaagctgcgggcaacctgtacaaagctgaacccagacaag

SEQ ID NO: 39656 - DNA, 596 bp, Zea Mays
cattattccaacaaatgggctccagactaatcaggtttctttcaggactcttaagatgatgcaaattgttgagtcacacaaagctgtgaataggatgtctcaatctgctttggcagcttgcatggcaccacttcttctccgacctcttcttcttggagaatgtgacatagacaatgaatttagtatgggaggggacagttcatttcagctacttcaagctgctgcggctgcgaatcatgcacaagctattgttattattatgatggaggaatttgatcagatatttgatgtatcctctttttacttgatccacttgaagtacttcacgtagttgttcatgagatataattcaactgattatcatacaggacttggaagaaggttcctgttcttcagatgcttataccgagtctgaggatgatgatgttgataaggaatattccacagataatgacattaatgatgatgatgacggttcttatgattctggtgaagatgacattgaagaagacttggactactctgatgacagtgaacatgacagtaagatcaacactaatgtcaaggatggcaaggtacttcactgatcattgtat

SEQ ID NO: 39657 - DNA, 292 bp, Zea Mays
gtttcttataaagtcgggggctcttacgcaaatcataccggtcgaaggggtacggtggatctctggccgtcagatctgaagccgactgtcaggatcatatcccaataattctgaacgggtatgccaccgaggccgttagatcagcgatcgatggacgacatgcgatcccactccggtccacccgatcaggtgccaatggctcggattcgaaacgcgaagggggggtaccccaacttctaatcacgaccgttcagtcccatctaatggttgccctccatcgcgctcctcccgc

SEQ ID NO: 39658 - DNA, 373 bp, Zea Mays
cgagagtacacttgtacatagcgagaaaatagaagcttcattgagaatgaagtcgccgaattacaagtggtagcctaccatctagagtttatggtgctactatggataaaacttcctgaggtgttcaatgttccatgagttccatatcggagtaccatccatctgagttaatcgatatgaaccgggtcaagttacttctacaactatgaaaggtccttcctagggtggtgatagtttgtgtcatccttcttccgattgtatgcggtgaagcaccaagtctcctagtacgaatgctcggtgacatggggccttgtcatggtaatgccttagggtctgctgatatatgaccgactgaataacaatgtttaaccgc

SEQ ID NO: 39659 - DNA, 353 bp, Zea Mays
cattcattgaatgtctgctaaccaggctcaaacttgagagggaagtcatgataccagaaaacttgtgctgtatctagcttagcctgtttatacaatttggtcactttggacactgagaaacattttgttcttgaatggtgaagagggaaaagagatgaaagaaaccatagcttcgccgaaggcgagttctggtggttagttttttaggatgtagagggttgccttttgtgtacaaccaaccatgatttcattattatttatctagtatctgtatttgctctgtacaaccaaccgtcaggattgttttcttcaaatacctgaacgtgcgaaacgatgctaccaaaagttcaagt

SEQ ID NO: 39660 - DNA, 493 bp, Zea Mays
ggtggtgcctgcgctctcaatgcggtggcggccatcaccggcacccgcaccctagcgccctgatgcccgaactctactgcgaatgagtgctacatgaagcagataataaatcgaaatgaaaggaaagggtctcaccaacagcgagggtagcgatgaagttgtccacgatgcacagaagttccacggtggtgccgtcgctacggtgagaaaactggccagcacagaaggcctctgcagccataagctcccacctacacaatccacacgtgctagagcatccccttgacctcttcctagcctctaagcggcgacctgggtgacttgcgatgtcagtggcctttctctctctctctctctctctctctcgactatcaccatggaggcaccacccaatcaacacaccggcgacatttgatttggggatcagcgaggggttgcggagcccaagctttatagccccttccctggctgaatcaccaacccggcgaagatg

SEQ ID NO: 39661 - DNA, 931 bp, Zea Mays
cccaggtccagggtaaaacgcgcccgcgcgcgcccgcgccctggcggttttgcagaaagggcctcgcgtttcagaacaacccgaagtagatccgtagcactattcactgagtcgctgacggtttgcagaaatgccctgatgttctatttcttcacccgacacgtcctcgacgctgttcacgcatggccgcgctccggcgagcacttacaccggccgaacggggcaatggctgggttctctgagcggtggacatgaaattggggctagcctaaccatttcccctaacttaattgtgctattgattaactatggagctctggccacgatggccgtgagcatggcgactatacggtcgtgttcccggcgaccagagggctcttagttcaattcgatgggttggcaagtatcaccgacgtatgtgaatgcttaaacaagggagcagaagacgggaactgaccggagtatggctagcgacggtgagcttgtttcacggtggcgaaaatcggatttgggggaaactccgaattcacggacctcagcgaacgatcggggctaattcaaggtggctggttagcttaggaccttacggaactggtggggggctcaatttattgggagcgacagcggcggcgatcaattcgagcaagttgtgctggcggccggaggggaagaagaaccttggcgcgcgattacgtgtcctatagcgtggcagtaactccggtgagccacggagagttcagaggaggtcacggcgacacggtgaaagagttgagccacgcggcacacggccgagaggcggcggtcgacgatgagcactttaccgcgggcggtgagccaggggagatgtgtcgtggccgatcgggggggcttccagctcggcggtgacgacgatcttttgacgccgcgaagttatccactagctatgagcgcg

SEQ ID NO: 39662 - DNA, 286 bp, Zea Mays
ctggttggccgcgctcgaacaaacctttgccctctagaaagtgtctcgcccccatggcacccatgcgatgcaccggtcccgccactcgctttggaggcgagcatggatgaccctcggggtgtgtcagccgggacctcgggcaagtctgaggtagaaaagcttcccaacaagctgcccttagtggtcggccagctaggggctcggcgggtgggggatgagtgccaccgaggccattggcacggaaagcagggtagggaatttgaggaagtcggcatcctccatgacg

SEQ ID NO: 39663 - DNA, 506 bp, Zea Mays
gtccctcagtagccaatgtaagtcttatggagttttatgtcatgtgttaatgcctctatgttagaccccctaaaatgtgctattttaggtgacttgtgggttaactaatttaagttgagcaatggttaagaaacactaattattctgctcccacccatgttttgagtcgtaatgtctaaaatggtttgctaagtcttatgctgtgattagccaactcatattaagtaggagtcgattgcattaagtgattgttatatgtatatgttgtgtctcggattgcgataataataggcaagccgacgtgcatgttatttagcgggtatgtcattgctctagttagctgaattgttagatagtttggttaagctcgtaattacgataaaatgcttgttgtagtctagatgcgcatggttatggtcgtgagtaaaaattagtagtgctcatgtggtgtctaagctaaaatgcgaactagtgggtgaaaagcgtttcgatatacatatatgccg

SEQ ID NO: 39664 - DNA, 409 bp, Zea Mays
atagctgaaaaaccttcaaaacaaccttcttcctcatccacttcatctgtcatagcctcaagtatgtcgctacccacaacctcttcttcatgatcatcaaccccatcgacgcctacaatctcgcctgcaccattagtttcattgattgattctggagccaattcttgagaaaggataccgccagcactagtagcatcaacattttcagcatcctgctccttcttagggtcttcctcaagcacactgaccacactagcaggaataaactcatcactgtttcctccatttataaccattgcggttgcctcactcggtgggtcaggcctgctggcctcatcttcaacgtcaccctccttcttagctgattcttttaaggcttcttcaccttgagcaagctgctgcagtaatc

SEQ ID NO: 39665 - DNA, 353 bp, Zea Mays
agcaattctatatattaagcgccgacacatatccggtgtctccttgagccatgtcacctccaaaaatcttagtcgtcggatcctctatatgtggcttcaacgttcagctacggtttggaactctcccatgtaccacgccacatgacaagtcgcgatgcttcgagagcttcttccccctcccctccttaaaccctatcgtcgtgccggtgctgcctatcgctcggagcgtcttcctctccccactccactcaaacgtcgacgtcttctgttcgttcgaagtggctctgggtggagcaccaatacctcccaccagatacagccgacatgacccacttctaggaactccatactct

SEQ ID NO: 39666 - DNA, 347 bp, Zea Mays
cggctcgggtgggtagcgcaagctgcaacccagcccccgagggtgtcgtcggtgatgatccggctctgatgggtagtgcgagctgcaacctagcccccgagggtgtccgagcgagctccccttctcatacctccatggatgtccacgtcagatcttctccaccacattctggtggcgtaatagcagcgcatgcttcaaatgagggagtcgccttagatgtcggcgcatcagatgctagagttctgatgcctgctagtggtgttgaattaatccctggcgatgttcttcagattgccccggttgatattccttcgtcgagccaccacctagcttctcgtgacttggga

SEQ ID NO: 39667 - DNA, 298 bp, Zea Mays
tgcggagtttgtttcaaatggcatgagccgaacatggaggggatggggatgactctggacaaccgggctcacatggcagcaggtgtttcggttgggggattctcggcagatttggcgcgatcttcaccaacaaattctgttgaggcatgcggcttcatggaaggaagatgactggcgatatggtcccacatgtcagcaacgtgaagtgagcagcacacgggtccgcacattagcaacaccagcggtgcatgctgttgggctggcagggacggctgagatgggccaaaatgtggccgcg

SEQ ID NO: 39668 - DNA, 405 bp, Zea Mays
ctaccgtgatggtggggtggttagaaagacgcaccttgctcctccgtctataatttgtggactgaccacatctccatgtggcccgtcccgtccccggtggactttcccagtgtcgaccgcagctagctcacctgacgatgcctggtcgaggaacccctggaccatcttagctctatgccaccggtaccttagccactccttctgccactaccaccccacaccgctctgtcctagaacctgtggcctaatgggtgggatcaacagtcccttgttggttccttcagcacgatgaccctgactcctctcgttgtgactgaatggtttgctgattctggtgcctcctacgacaccacttcaaacactagtatactttcttcttacctacctctctcgtccactccatct

SEQ ID NO: 39669 - DNA, 486 bp, Zea Mays
aggctgcgagggacacagaagccctgaaggtggagaaggagaaacttgaggagcacgtggaagagctgactagccgtttgagcttcgaaaagaatcttagggtggatgctactcttgaattacggatttgagatgatgtggataaattaacggatgaatttatgctcacatagtatcacttttcagattgatctagagaagagcaaggcaagagaaatttgcaaactacaggccactcttcgtgagatggaacagcgggttgaagaagccatagagatgcatgaaagagaattagccaaaaaggctattgaggaagctttagctcaagaaagggaaaagatcaccgtattgactaatgaagtcgatgagttgaaggtacttttttcctaaatcaacttatgaaatatcccaactgtaggtatctgcaaggatttgaatattgcattattaatttaatcaaatcagatacaattacagcatttgttt

SEQ ID NO: 39670 - DNA, 290 bp, Zea Mays
aaaggtcagaataccaacctttgtcgctttttaggcccttggttggacctgtcacctccaaagccccttgacttccttgggcctgcatacttagcttcaaccgccagcgctgtgctgacagccctgttgtaggagaggtcgaggcaggtggccatctttcattgtagccggtcattgaggcctctcataaaacaattcctctttttcaggtcagtgttgacctagtcaatggcgtactgggacaaatgattgaacttgttgagataccgtgtaacagtatctccaccttg

SEQ ID NO: 39671 - DNA, 479 bp, Zea Mays
tatccaactcatgatcttgaattggccgcgatggtctttgctctaaaatcatggaggcattatctttatggcgagtcttgtgacatttataccgatcataaaagtctcaaatatattttcactcaaaaggagctgaatttgaggcagcgacggtggctcgaattgattaaggattatgatttgtccattcattatcacccagggaaggcaaatgtggtggctgatgcccttagcaggtccggggttccaaaagtggccttgcctttgatcactgatctggaccgtttggggatcgctttgtgctatgtcggcaccgctagtgaggagactcggatgtttattcaatcctccctcatggagagagtgcgtgtgactcagcagcaggatcgattattgcaggaagctcgaaagagggttggcgatggtaaaccccgtgagttcaccattgatgagaatgatttggttcatttcaggggccg

SEQ ID NO: 39672 - DNA, 684 bp, Zea Mays
tcatatgcattttctataaattaaacaagtttctacatttatatatgtactaaaactattttctaaatgattttcctggttttattaattaactggactaggcgtcattttctgggaagtgcaggggcacatcaatgaaaactccccagactcagccatccaccaaaacggagcgcgggttactttcactagaacacagggtcttttacgcaatttgcgtcagcgaaaggggtatgcgcgtactacagccatccgatcaacctcttacgcccccgattaaaaccgtgcgcgccttacgacacatcgcgaggatagccctcggatgggagatctagggttcagatttggtgtggtctacaactcgtttccatcccacccttggagcccaatccaacggttccgacactggctgagtgaaagagtgtgcgcgccataatctgagccatccatgagccgatccacggcctacgactcatcttcctccctgcgctccaccatggcgaagcgagttcctagaacagcggcgtctacggaacatggtcaccagctctcgacgcaccagttgttagagccctggaaccctaacctacggagtactacaggcatggacgaatagagtcgaagcggctaaggattctcacccgaggtcttggcgccgcgatctgttcgacaccgagattccag

SEQ ID NO: 39673 - DNA, 297 bp, Zea Mays
aatagcacaccaagcgcgttaatcgaagtctctcattaaaaagacactccgcgcaaattcgcccacgggcgcagccggaccaacacaggcgtacgaatacggcaaacaggccacattaccatacaaattacaattacatacacacggcgagggcatcacatattacatcggctcaaccttcaagatgatacccatctccctgtaattaaacaacattatcctcaattcctcaccctaaaaaagcttccgaagatcccccttgcttatgctcgccccagtcggcgaggacaataattc

SEQ ID NO: 39674 - DNA, 538 bp, Zea Mays
ttcggttcctgctgctgaggaagtgcctgtgcctgaatttactgacgctgaccccaatgggtgtaatccatctgtcgctgatcccaatgggtgtgctccatctgtcgctgatcccaatgggggtgctgtctgtgttgctaatgaaaacgacggggaggaagaagatgaagtccctttgactcggaagaacagtcgacaatatgtagccagtggggaaagtagtggagtcccttctcctgctctgtctgcccttattggtctacaagaattgtctctggcgaactttgatcagactcttgaagatatggttccagaggatatattatcagagccagcggatggtgacacggtggatgtttgtgctgatgtgttcgatgccgggttggggtcatcccgggcagcgtcccgcgcctcatcgaccttggagcgcggtcttgagggttagggaactgacttggatcgtcttgctcctatggaagtagctgagggaccttcagccttagaagcggctaccgcagagaacttgggcctcggggat

SEQ ID NO: 39675 - DNA, 290 bp, Zea Mays
catcatcgccaatgcctttaggcaagggttttactgacctactatggtagctgatgctatcaagatcatgcggtcctactgaggctaccagttctacacaaagcaaacacacatgccagcccatgccctacagatgatcccaataatgtggtcgtttgtggtgtgggggttggatcttgtcgatcctctgcaaatggcaaccgaggcttcacgcacctgatggtcgccatcgacaaattcttcaagtgaatcgaggtctggcccatcaccaatattaaatttgagcaggc

SEQ ID NO: 39676 - DNA, 501 bp, Zea Mays
gaaaaacgcaacgaccggtgctccggtgtggctgacaccgaattctacccttaatgaccataacccctcactcaatcgcaaagttctagctcctaatatctctgtccacggtgatggcgcgaactacggatgaaccgaggcgtttccggtgatcctacgtgttctagctcaattggccgggtcgagaagcatcaagagcacacaagagtgctgaagcaagagcgaggagggcgtgatcagacctgtggagagctagccacggcgagctcacacactgcggtgttcttgatagatttgggggaaatcccaaattggggagctatgggggacgattagaggtgagggctggttcactgggtgcaaaactacttagcagagctcactcgggcggcaatttataggttccatcggcggtggcggctaatttttgataagacgcgcgaaggccggagagaggggaggtcactggtgcaagggatgcgtgcctttcaccgtggcaag

SEQ ID NO: 39677 - DNA, 760 bp, Zea Mays
gttgtgtcgctcgacatcaagagactgatggtatatggtgactccctagttgttatgggctaggtcaacaaagactgggattgctccactgattcaatgggcagctactacactgcggtcaggaaaatcgaagataaattcgaagtcctagaattctaccacatagagagggatcgaaacgcagcagcagatgcactgtcaaaactaggggcaagccgggcacaagttccaccagacatttatgtccaatagatacaacatccaagcaccacaccaggaccaacggaagaatgcaaggcagtggagaaggtagagccagacccgaaggaatggagggaaccaattatcaaatacatcaaaaatgaggaggaactagatgacaaggccactaccgagcgcattgcaaggcaatcagcccattatgccatcataggaggattgctatataggagaggggcaatcggtgtcctcatgaaatgcatttactcaaccatgcgaaagcatctgctggaggaaatccacgcagggaaatgtggaatacatgcaatatcaagaaccttagtggggaagtctttcagaccagacttctattggccaacaacaaaaaaagatgcaactcatctagtccaagatgcgaagcatgccacttcctagctaagcagcagcacctaccagctcagcgattgcaaaccattctggaaacctgaccttttgtgtgctaggggctgaacatgattggacctttcaagaaggctcaagg

SEQ ID NO: 39678 - DNA, 716 bp, Zea Mays
gaacaatccgacgtgttctgggtgatccagggcagtctagttcaattaaacgtgtctacgagtagcaggggattcaagggaggctagaacatcaagcaaagaagcttgaactgacctgcagaaggctggccacggcgaggcattcacggtggcgcgaaaagcagatttgggggaagaaagaaattagtgcgttatggtggctaatcggaggcaggggcgggtgctctagcatcgtgacgacctggcagagttctctgaggcttcaatttatagagctcaacggtggtggcgcccaatttaaaagaagtgtgctgacggccggagagagggactgagttactatggtgttctaccgtggcattcactagttgaggagctacggcggtcactagtgagctattacggctagcagcgatggggtgaaagggtcacggcgtggcgcgatcacggcgaacgatgtatacctcgatgatggccactcggccacgtcgcgcggtgcaagtggatgggcgacagagcggccacagtgctacgagttcatccacgacgagatcttttcactaggggtcgttatccgtgcgttactgggcacgaatcgcagcaccggcgtgaatccgagcgtgcgggtcaccggcggcgagatacgctgtatttgccgtcttgtttagttagtgtaccatctaaaccgttcatcagagtgcctgacagagcaactt

SEQ ID NO: 39679 - DNA, 567 bp, Zea Mays
gtgggtctccctgtctaagtactcgaccatgagacaagggggatttgggaccctgttaacaaagacccttgaggtggatgttgagaggatggctgcaatccaatctctccaccgagaagggaagcctagatgttgaagcagcgagagaaggtattcccatcggaccgaatcaaaggctttcgcaatgtcccatttgaggaagagcgagggtatgttcatgcgttggtagcgcctcactgcactacgcacgaccataaaattatcctgaatagttcgtttcttgatgaacgcactttggcatggtgagacgatttcatgcatatgtggcgctaatcggagagcaagagtcttggtgatgattttgacaaaggagtgaatgaggctaatcggtctaaaatcaccaactgcatctgctcccacctttttaggaagtagaataatatttgccgagttgatgagttgcaggttcatgcaccgaaggtcgtggaatgccttaactgcctccatcatatcatgcttgattatgtcccaacaagatttaaagaaggtccccgtaaaaccatcggg

SEQ ID NO: 39680 - DNA, 415 bp, Zea Mays
atcaccacaccacacacacacacacactagcaagtagatgtactatagtgtagtccgaggtcccaatcggatcgcgatccattccatggctggtctgttgggctggttggtaggctgcccgtcgccgtaccccgtgcgacagagcgtgcgtgctgggttgaaaatcaggcgcttgcctgctcggttctctctctatccgcgtgattggatacctggccgcgtgcgtctgggctctccacattccgttgaccgcatttaaccagtgattggtgggctgtatgtatggagacgagcttgtacgcaccgatgcaacttagtggctttttattatgtcaatttgcatgtgtggagatacggtgggggagcatccctgcgcatccaggccaccgcgagccttgcgcccacgagctggacg

SEQ ID NO: 39681 - DNA, 451 bp, Zea Mays
tgaaccacatgttgcaagtccaacatggtccgatacttcccttgatacaactgacatggatcatgctattagtaaggaggagcttgaagatgtcctcaacactccgcttcccgagcatccgaagctaattcgtggtcaattgaagaatggcctccggtatcttatcttaccaaataaagttccagcaaacaggttaggaaacccttttcctgctcacatctattaatttttataaatggataaggaatttgtacaattccacccttgatttccatataatggttggaaatttgatggttttctataattttgaatgtgaattatggagatacttgacaactatgggtggggacttgaacttctgaactaatgtgaggtgtttattgtagaattgtgaacttcttgatgtattgataggagatgaggtacaatatatagactcacaacccta

SEQ ID NO: 39682 - DNA, 467 bp, Zea Mays
ttttttttcctttgaacaatttgcatgcttaagcatctggagaagtatggaattcctgtgcccagttatgctcttgtcaatagagaatatccggaccaagagctagactacttcatcgagcaagaagattttgttgaggtccatgggaagcggtttttgaagccttttgtggagaaacctgtcaatggtaattcatctatacataatcattgtaatgtctgctatttgctttattggatctgaatgctgttcctcttggtaccgtaatggttggtttgactgcatgcaagatgcaactaatggttttttgtgtggccgaggtatgagagaggcaaaagggatatctgttattgcactacagataattaatttctgttattatgatcaaataaatgtattctgattcccctttttctgtgtttttaacaggggatgatcaccgaataatgatatattatcctagttct

SEQ ID NO: 39683 - DNA, 871 bp, Zea Mays
cgcgtggctctgcctttccaccgcgtcgccgtgactccctatggtcgtctaatcgtcgccggtgaggtcgccacgacggtagacacgagttcatgcgcgccagtaactccctgcccttccgaccgccgcgcgtcccattgaaattcccggccaccgtcgttgagccctataaattgaagcccccgccagccccgcaaggtcatcacccacccagccaccgagaatcgctagcaatcgtgcatcagtgagcttgaatttcagttttctcacaattcgggtttccgccaccgtgaaaccaacctcaccgcggccagccccgttccggtcagttcatcctcccctctccctcgtttgagccttctcataactctgtgatgctcgccgacccacgcaattgagctagaaaccctctggtcgccgggaacacggttgtctcgccggaacactctcggtcaccatggccagagccaaccaggcacccatttgcgaaattaggttagggggattgatcggggaagatccaatttggcattagctgctcggggacgccagtacttgccccaatcggccggcctacgagctcaccggagctcggccgcgttcaccgtcgtcgtggacctccccctgcgaagaaatagaacatggagggtttttgcgcaaactgtcagtgacacagaaaaatagtaactgaacctatccccagttagtcaaaaccccgagggcccttctgcaagattgccaacgcgggcgtgggcgcgccccctttttctgtgtttgtgggccggttgggctataatcggcccagtactattgaagcttttcctttttctttttcagtaaagctttaggaaattatagaaaattatagaaa

SEQ ID NO: 39684 - DNA, 542 bp, Zea Mays
cgccgtgcgccgtggtcggatcgcccagaagcttaatcggcggtatggctaccattttcatattcgtcgtatctccctctccgtttcgcacaagatcgcgctaggattaggactcctcggagcgttcacggtttgtagccggcgtgccgccgcaacagtgccacatcacggccgcgctcgtgctggggaagaagccctctgagccgttcatctcagaccaagggtcaagattagaatgaggggcggtgtagtgtgggctgttgatctcactgtggacggctgcgattggatcctggccttccagcgcgggcgtgggatgttagccgtagatctcggatcctaggatcacagaagcataccggttcggtattaggtgatctaatctaggccatagaatttaaatcgtgcggctacgatacaacgataccccttcggctgggtttcttgcataagagaccctgttctttattagaatcaacccgcagtgcacgactgggcggctctgtgtcttggacacatttacgctaacaaccccagtttcc

SEQ ID NO: 39685 - DNA, 595 bp, Zea Mays
gtggggaaccccgtggtgcatagtcgagtaacaaacaccgacagttggtgcgccaagtagggggtgcaacgttgataagtgccaactccgtagcagtcaccttcaagagcatgatcaccttcagtctaggagcagtcttctgatttggaatcgtctcctgcattgcaggccaggagggaactctacaccgcacagcggctccaccggggaagaaatcttccctggaatcgccaaaggcggccgcgggaaaattgtgaactacaccagcaagaataccgtcgggagaacaaaggggtgtggtcccgcacaaggccaaacccggaagtgccaggatgactatagctcgattagccacgacttctccagcacgactaactccattgtccacctcgcccactaaggtgtggacatggatcactcgacggagggagacgaatgctccaaacaaaacacagggagcaccaccggtgatcgtcccaaccactccgccctcaagggagatcgggagtgaacacaccactgctccagcctccttcctggatgtcctcctcatccaagggagagtggagacagcgcccatctttgacgacgagcc

SEQ ID NO: 39686 - DNA, 671 bp, Zea Mays
gacggtccacgtttagtttgaacccgatctaatctgtgccatcaaacccggatccgacgccctcggttcatcttcttccctctaacctttctctctcactttgaactgacgaaccacaggcgacggggtgcgccaccgcggtggctgccatggctggctagcgcgccaacaaagctatacctacgcccaaccgatgctaatcaacgcagatattaatgcgaagacggcaggggatcacataccgtagctagtagacgatggcgtgctggccacgtcggattgcagtcagcggcgaatcacgaccccccggcaagcaatttcacggccacccgacccgtaatccccacaatgaagcagggcatgtcgtccacacaccccggtgaagtccccccaggctaccaattgaatctcgagcaccagtgtgggcgagatcccccgcggcgggactttccacagcgccaccacactcagctcaccgtagatgtccctggtcggatggagagtagaggggaaccgggacacgtatatatgcacgatgttgagagcttcagcgaaatccgcgccaaccaccaggagacgatcacagcgatggattttccaccaatttcgcgggggctgttgtgcggcggcggtcacatacggagctccgccgcgcgaggtctgcggattcc

SEQ ID NO: 39687 - DNA, 710 bp, Zea Mays
tgaagaagctgcaatggctaggttcatgggtggtttgacaagagaaattcaggatatattagcttacaaggaatacactaatgttactcgcttatttcatcttgcttgtaaggctgaaagagaagtccatggacgacgcttgagaactaacactgatgcaggtcgcaatacatcttggcagccccgcactagtgttgctagctctaaccatgcgtttcagggagatgcttccaatcgataatccacaacaccataaaaatcagcaccttctcgtgctattgagacagggaaaggatcctcccaagctgtagccaaatcttcttctattgcttccacggaagaacaaaggacatctaatgcctccaatccaaaagatttgggcacatctgaagggactgcccaagcaagcgtgtgctaattataagagaaaatggtgagtactcagcagccagcgatttagataatgatacatatgccatgcttgctgcccaagatggtaaagctttaaaggctcaaaaagaagctgatgacgaaagctgtcaaatagcacttgggaatctttggtcagaggtcatcacactgaggaatgaagcccttgaaaaagataagattgtgctctccttagtggataggctaaaaatcaatgaaaccaggcttaatgcacaagccgaaactcacaaagccgaagttgacgatctaaagaaaaaact

SEQ ID NO: 39688 - DNA, 378 bp, Zea Mays
tcttgaagttcgtgtagttccacggggtgtgtcacatgtccttgtggtatgggcactgagagtcaagaatctcatgaagtgtcattatcccaccacggggtgcgccgcgggctcgagacgctggtggcccagcggtgtgcacttcctcccagggcctcttttcccgacgcttgtccggctgctggtttatgtctctccgaggtgttggggtgcgggcttcgtacctccgatgaggtcttaagcctgctcatccacggtgatgtagatgtctgccttcctgaacagttgtttagaggtggcgggcgccttcgggaggatagctcggacgagagccgagtcattggatccccgatagaagtcttcaatcacggctgcctc

SEQ ID NO: 39689 - DNA, 439 bp, Zea Mays
ttgggtttgatctttgcggacttgcggagtggtggtgggctttttgtgcttttgattgactagctgcgttccggtgctggggcggatggatttggacttttcgtggtgcccgcggatgcgttcataggactgttcctcctgtacgagggagaagccattggacgaagcgcgcttgaacttgttcggatcctctgcggcgtgaacttcgcgagacatcctgttcgggaaggagggaaccgcacactccagcctctaaagcctcctaaagcctgtgggcacgcggctggtggcgtaggcgtgcgatcctcatcacttcctcagaacggagaccctgctgtcctggaaccccgctgttgaggtctgggctcagaccattccagcccacgcatcctcctcggcattccgtcgaacacctctcttaccaccgcccccatgccgc

SEQ ID NO: 39690 - DNA, 379 bp, Zea Mays
tgctagatgacattcgacatgagtatctatcgctggagaccgaccgaccccgccggaggaagtgcaacaaatttacaaattcttgaagccgcggatgcaaaagtgcacgagggcaccaaagtggcgtacttcaggttgtaacacgacttatggtgatgaagtcagcgcagtcacgaccctcaccacgacgacgaacttctcttctctcagacacgacggagaacacgatctggttttcccctactaggcggccagagggtacgaatttctagggcccgatcactttatagagtcgagcacgtggtcaagccgatgaagtcatgcagcatagatcacgacgggtggttgcgtttcaaaacagccctccgatctctacggc

SEQ ID NO: 39691 - DNA, 627 bp, Zea Mays
ggtctaccaggggcgcacagttgatggttctcttgttgcaataaaggttcagcggccagaccttctaccttctgtactgagagacatctatattctacgccttggggtatgcatattttcatctaacatataaactgtttctcttcactcatccagtcatttttgttgtgcttatgacaatctttgcatactttctcatcatctgcccatgatcattttcctgggttttggtgcttttatttactgtcccttaatgtgctacctgtgattttattgtttgcatggtactgttcatggggtttgtttgtaacagcaaaatgcatggtcctatttccaatatggatagcctttttctcaccttaacaaatgatacacttagcttccttgttcatgaacttgctttagctgtaacttagtataattgtgactgtagcatcagtgcatcacagcatttttttatcactttagtctcattcttgtgatgcatttttattcagttgtttacctcatacaatttatttcagcttgctttcatacggaagatagccaagcgaagaagtaacatttctctttatggtgatgagttgggtagaggtttcgtcggcgagttggactacaatattgaag

SEQ ID NO: 39692 - DNA, 275 bp, Zea Mays
tgcaaccccaattgggatgaaataacaagggagcttcatcctatgcagtcgccacaggatcgtccagaccttgttgttcgcatattccgtgcgaaactagaggaattgaagaagagattgactaagcaacatattcttggaaagatccgtgcttatgtctatgtcgtggagttccagaagcgaggtttggcccatgcccattttctactcatcatgcagagaaagtacaagctaacatgtcctgagcagtatgatctcctgatctccgctgagat

SEQ ID NO: 39693 - DNA, 472 bp, Zea Mays
cggctccccaacacgaaagtatcgccacaagagaaatcaaatgactgagccacttagagtgaaaacatcgcttggcacgctaacagtccccctacctggcgtgccaactatcgtggtttcgaaaaccgagggcacatagaatttgtgttcgacaggggaggctagcgcggacacactctaaatggtgaatcgagtgacttgagggggtttatagtggttcaggcaggtacccaatggtcaatgtagtgctgatcttagtattgctcttcgtggcatgttacaaagtgtgcaagttagagtgagagagcgagggagaggagaactgctaccaaatgctcctagctctcttgcctgccttgtttgctgctcagtcgcccccttttatagttaagaggggtggtctttacagagagatgtgttgtttggagaagagtgggatctttatctacggaagctcctataacatggttcc

SEQ ID NO: 39694 - DNA, 425 bp, Zea Mays
atcaattcattctctaaccgacactcttgctgtccgttgattactacaacctggttgttcggcccacgtgtgatgctctcccctatagtggccatccatcacaacaccgggaccgactacgcgctgattcgcaatcatttcagtcctgtgtttcctatcccagctagcaacattactcatttgtcgtgtaaccactacatcaagcttcatacgcttgcttctcatcccttgacctccaccattttgcggcctgctctcctgtaatctgtttgacccagcagcagttatgtgtccctgtcctatgtttggcttggctgctacttcttcgctgttctttgtgtaattctttgtgacaaccacctgaccattctgcttagccatctctgcctggggaccttctgtagcatttaatatatcacactcca

SEQ ID NO: 39695 - DNA, 453 bp, Zea Mays
aaccccatccttgattctgcttcaaaatattagtcataccgactaattctatggtgtgctcctatatgcccccttgccaaaagtgttttattctattacagtctatacttttctcaatctagtagatctgatctcactcttgtgcttgcgacacccttgtagatgcccctgaccataaccctcttgccttttgggatttattcctcttccatcattaaatttctaccatttgacaatccttatttctttgttattgacatgctcgtacccctagattcttcaatactcttgtttcaaatacttacatctgaatttctcccgcctacttaaacactccagtttgtatgtccatgaccttcatgtcttttgagacccttccctattctatcgttaagtcgctatccttcggcaatttctattctctttgtcttggtatgctcatatccttggaat

SEQ ID NO: 39696 - DNA, 1135 bp, Zea Mays
gcgctagggaagaccggtgctgagtgctgttgttgcctcgacgaggatgaacgtgaggtcgatggccgacgcaagcctaccacgacacacggaatgggcagggagaaactgaaggcgacaggtgctcacgtccgggcacgatggtgaacagcatccgagatcgaaccaaggtgcaggacatggagaggacgacgtgcagcctgatcagcgaacaggtgaagctcgaccaaagagagggagtggaagtggaggtccaacgttgcggcacgaccgcacgactgatgcgctttgctggaactgctgctgtatgggttgcgcacgcctggctgatggcaggagacggctgctggagggtaaaagagctggaggcgagtggtgactggtgagactgatggccgaaagaagaaggatgagcagtgaaagagatgttcgcgacaagaaaatcagagggtggcggggagagacgaagtgaggcaagcgttacaggggagagacgaagtgaggcaagcgttacagggaagatgctagggctaggaatactcgtcgtgtatagaccaaaaggagcagaaagttgcatgtggctatccttatcacagtggaaggagcgctatagagccagcaccggtcgagtttggatacgtggccgcgatggaatggcacaagcaaaactggcttcagttaagcggcaaaaaaatttggatttagcgatgtccacataggaggctgtgatgggccgtggccgccggcgagtgggtcgccgggacatgagcgtgctcccacagccaggaacagatatgcaagtctcaggtagtattttcttctctattattgtcttaacccctttctcaagtctgaaacaaaatatatataaccccttacatgggccggcccacacacaaacccaatgtagcccagagtggcacacacgatcccctgttcaccacacgacactcacggcttcagacttcagcttcctctgattccactcccttgctctctgcattctccatcatggcacccatcgtcgtgacatctgcccccctgcaactcttgcttggccccaagcaagggcatccagatagcgctgacacagaacatagtaatcttcccaagttgtggcgtccgctggaatgtg

SEQ ID NO: 39697 - DNA, 378 bp, Zea Mays
aattatagttacatacgtgcagcgagggcaccacacattacattggttcaaccttcgggatgatacccatctccctatagttaaacatcattatcctcagctcttcaccctcaaaaagatttcgcaactccccctcacctacgctcaccccagccgacgaggccaacaattcccgcttgccagccctgtccacatgaagacgaccaccctcaacctcactcaccctacgcttcgccaccgcccttcgccgcctacgcccagcactcggaccgggaacaacatccgtcacacgcggagaagtcttcgccgcagccacatccaatgccgcgaaataatccaaatcctcatccgaagactcctccgtccacaccagcgaac

SEQ ID NO: 39698 - DNA, 390 bp, Zea Mays
cgaggaaatcactacaccaccgtcgggatcgggcgtgggggagacaatcgtgtggccgttgatccggtcacggacgaccacgattagaagtaacatacctcttcggctaaaagtgcggtggtcgtagaaccgggtttggacggttgggattagaatagagtggatcacgtcgtagccgtccaactccgatcgggcaggtaagattagatcacatcactttaaaatctaaaccttctgatcgtgatcgaacgacaacctgtgcgtaccggttcagaaataacttgatttaatctcatgcgtccaaccctgatccaatggctcacatgaacctataaccccttcggtcgtgcgaaagatgcaaaaaggaccctgtgcttttcacaaactaac

SEQ ID NO: 39699 - DNA, 379 bp, Zea Mays
caggcgatggggccaaggtcctcatctaagcatcgcggatggtctggcccagaggcacgggcagtccggattgcgggcgaacggtccgaccatcatgagcggatggtccggcttctacttaagacaggagcgaccacgaaccttcaaacttcgatgacccgaaataggtacacagaagcaaaacatagctaaagcacttggtcgattgattaaagttggtccaacttttgaccaactgctgtccaagtatgtgaacaagaaggccggtcgtcatgatcagccaggaaagcgacctcactcacttgaccaggagaagcaagcaaaaacaaattggacctttccaccaaacaaggccacataaatcggcccaagatattat

SEQ ID NO: 39700 - DNA, 370 bp, Zea Mays
ttcatttaaccaaattcgcaagggccttgcgtttgcgttggctgtggcaagaatgggcttcatcagctaggttctggacggcctcgaaactcccttgcatgacaaaagaccgacagctcatcgcaacaacgacatcgattttggtgggagacggaacaaaggtgtccttttggaatgatgcgtgggcgcaagggttaagaccgaaggacattgcgcctctcattttcaatgtgtcccgaagaaagaacaaatctttgagtgaagcgctgttgaatcatacttggattaggaacctcgacctattttctgctgaggtgacagaacaacacattgtggagtactataggctttggtcaatattgcaaagaat

SEQ ID NO: 39701 - DNA, 640 bp, Zea Mays
cacgctaagaaaacgatgttgaggatcatgctagcctctccgctaagaagtgctagaaagcgggactgcaggagtatatagaggcatcagccttgaaggtgtgctgcttgtataggataaatcgaacgagctagtgcatccggtggtacgggcacttgaacatggagggactcgtgcgctgataatggtggcaagggcaggatacgccgcacgcaggtggaggatggtgacgtccatgtcgccgaccgcggacaggggcatagcaggcgacacggtggaggtggaggcaagggagagagaggctgggacactaccacagacacgagagggaagggaaggaatggaatgatgatctcacaagagaaaaggttgctggtgaagatgtcggcggccgatggtggaagggggcttgcggttccgtcgtgtcgtcgcttccacacccacgcgctgggaggacttccacacctgttagttagtggatcaattccaggccgggattcagtgttttcgtgtggattgggtctggtttctgaatacgcgtgggctaaacgaacgactatttcgttgtgggcctgtattgaatccgtgctgggatgacacccatggatcagtcgtgatctaggtcattctaggcccaacc

SEQ ID NO: 39702 - DNA, 312 bp, Zea Mays
cttcttcttgcccccttgctgctcaaggtagatagccttgcccttatcctatttgaaggggcaaggagggttctggtcatctcctcccctgacggtgtgacattcttcgtccacaccatcctgaactggctactaacacactgcaagataatgagaaaaggtaagcgagagcagtagagcagtagttaaggcctgatttagaatgaaatagctacctaggaatgtctcgagagagagaagaaccaggcaggacaggagatgcgcatgcgggcacgcggaatcaccgaaatgatagaagaggtgagcacgtat

SEQ ID NO: 39703 - DNA, 474 bp, Zea Mays
gcagtgtagtggtgtagccctagttgcacatgcaacaagttttgatgggacaaacaataataacccagtatcaatgagcaaaacttattatggtgttataaaagacattcttgagctgaactaccatcaccagggaaaaatagtattgttcaaatgtgattggattgataaccgagtacgagacaaatgggtcaaaatagacaagtttggggtgacaatggtcaacttcaagcatttattcaataccagtgacaaggaattagatgagccatttatttttgcatctcaggcaactcaagtttactatgtgcaagatcctattgatgctgattggtttgctgttttaaagtcaaaacaatgtgacatgtatgatatggaagaaaggctagacaatagtacagaaataggttctttcttgccagatttggatgcacacacacaagttaatgtatctattggtggtagttgtgttag

SEQ ID NO: 39704 - DNA, 349 bp, Zea Mays
atttatcacaaggagaattaattctttggcgatgaacaggacatagattgaaactattttctaacctggttcatatttacttgtatttcttttgtgctacaaaacttgctaaataattctcccttgtgatggggggactctttagtacaaaggtctggaaagttggcatgtggatggtggtaatttgtgtgttgtgttagatgagatattgcaaggcacatttactgcaaagaatctagactattccctaggctgttcagagctgtgactgtcaaacaatgtgttcaaatcacgtcaatcataagatccttggatgttttttcttttgttaagtaaataccttacttgg

SEQ ID NO: 39705 - DNA, 734 bp, Zea Mays
tccagttcccatgaatctgcctctggcggcggcgggggtttcgggtcctctttctggactccagcggtggagcagtcagaggagctccggcagccatcgcctctgatgcagcaacaacagcaacaacattcaaggcggaagccatcggtcagctcggtgccagacagtgttaccagggaggatccttccaccaagtacgagctgctccatgagcttggtgcgactcttgctctggaattattatttcattagttctttatatgtctttttgtataatgcctgaaattttgagctattttgcgcaatgcaaattcaattggaaatgcagggaaaggttcatatggtgcagtgtacaaagcaagggatctcagaacgcaggagcttgtggctgtcaagatcatctcattaacagaaggggttagtttctagcttcttattacaaagttctgtgaatattccggaaggctacccaagacatatttcatatttggcaaccatattgcttttgttgtgagcattttgtttgcatgggcttaattgtgggagaatctcataaatgtggttgctttctgatttctgagtccttgcatttttgtctttaaaatataagcatgtatctctggcattcaggaagaaggctatgaagacatacggggagaaattgagatgctgcagcaatgcagccatccaaatgttgtccgctactttggaagctaccaaggagaggagtacct

SEQ ID NO: 39706 - DNA, 3437 bp, Zea Mays
ggcctatgacggagattcgccgcgcgcaaggagggagtggattcgcgactgcgcagccgctgccgtcgtcctagggcgcgtcgagcactgccaccccattgacgggcccatccccacgacatccgccatgttcgagggccacgtatgatctcttacccttcctccatgttttcccattccttcagcacctttgatcgtgaccatttttgatgcgcgatatggaggaaggccgcgtgattgcctagtggaccgatgtgttggtttagtcgtggcgttgttctgtccgggttaccaaatctctgtgcagatcatgttcgtatttggggatagtttggagggttagaattcggtgcgttgatgattgacccttggtcgtttgcgttatgatcttcccttgaggaagaattgcatgttgatttatggaggagcctctaaacgggcaagttgtggacttttggtgcttatgtatacgtttgttcacaattttatagttcgactgaattccaactattgaggaatctgtttactttggttgagcaaaatgccttatttcatttggcctacgatcatttaagtagctcatgacacattgtctgtgatggttgcatatggtgatctggcagcaatgtgaaagttcatagctgcggcatttctttctttttaaattgaaatctcctagcccctgttacctcccgacaatatgcacttgttgccctttaaatttggatattcttctttcgtgattgcatcttattctcaccagtgaatgcagttttgagcatccacactattatggtgagagctatgttttgtgccatcctactgcactgcttgggatttcattgtgtcttttcttttgcgtcattatgtaagaaacaatcatgctggtaaatagtggagtcgtgagtaattcatgaggttttacagcaactttgctcattcatggcaatagacacgtaccacttaaatggtgaatcatgttatgcactctttcgctatctataatttcatatcgaatttctattttttgttttcctttttttgactctttcatcattcatcatttgtgttaagttctgagccatgacatagttgtaacttttttctacaggtgctgtatctgctacgcaaatatttgggtgaatatgttgaagggctttctgttgaagctctcagaataagtgtatggaaaggtatatttctttcataataatgttcttttctattgcttaaccttcatctcctgcaatccgattccaattatttcatgttgttatatatgctttctattctgctgttgtttgaccaagcacactctttccttatttagacaaaaaaatatcaaatctcaactttattgtattgtttatttgatactaccctgaagttagatgaagtgaacaagttgtaacttctttgttgtatgaagtgggaatgtgggataggtgttataaagcttgccgattacgtgcatacagagaaacagtcttattcaggaactcgaggattgcctcccacattttactcatgtacatcccttgcttggctctaagttgagtcatataatggattactgctctcctgcgctttcgaaaaaaaaataatggattactggattctcaggcctgatttggccatgcagtgtctctgtcactcttgcatgtatgctcatggatcctgtttctagagatgaaatacccaatggtgttctatctccatcttgcttttttaaccgtaattttgagaaatcaccaaaatgttttccctctaacagtaattgtagagcttagtaagatttacaactttgtagctttaaagttttttgatttgaaattatttagagtgccaaaaattatttttaaatccttgatttcaaaattcaaaatttagaattttgaaacgaccatggatgatgatatggtctatgcaaaagttgcagttatcaatgatgtataacttcgtagtcgataatttttttatctgtaatcatttcatttagagtcctaaatatttgttttgttttcttagatttggaaattcaatttttagaaattttaaatggcttcagtttagccatagaatagtatagatcgtgtcaacatctgaagctgtttaaaaattctaaattttgaaatctaagaaaagaaaacgaagatttagaatcaatttaagaaaacaaaaatgtatatttagaattccaaatgacttaaggtaaaaaatttatgaactgcaaaattatactaccacttttgtatggaccacatctaaggctgtttgaaaattctaaattttgatttccaaaatctgaaaattttaaaagattttttgcattataaataatttcaaataaaaacttgtcaactaagaagttgtacatctcattgagctctagcatttttgatatataattccatctttattcgacttcattcaaaagttatgaatctttttagataataacaattaagggttgcttgcgcgttcgagaaaaaaaagggttgtggtataatagtcatgcacataacggtcaactatattttctcactctcatccacttcttaaaattatcattttagcagtcaaagtgtcgaagagtcaattgctatggttgaagagcgtcctctagcaaagacaacattgagtaatgttcataagcgaacactaacattgaacgatatcgtatatcaaatttagcctaatatttaccacttgaaagtttcagcagtaacagtactgctcatgtagattttacattttgtaatttgtgtactaaattacctggccttcagcttcaaaaaatattacctggctttcattttcttctgttaaggtgacgttgttctaaaagacttaaaacttaaggctgaagccctgaattctctcgggtttccagtgacagtgaaagctgggtttgttggcaccataacattaaaggtacatttcttattgcaccatatatgattgtttctgttttcagttttgtggttgcattcttacatcacaatatctaacattgtgtaaacagttgcttactaaagctgttatcatgtagcttgtttctgagtgagttgtattttgaaagggtagtttacttctttcagcatggcaatatattatcatgaggaatactactatcatattattcgttacatgtatgcacaagatccatctggataagaatcacttaaatatgcattcctctaatacgcataccgccgccagcagtcaccatttatcttattttatcccattgtgagcagttcagcacttcttgttgcctgttggcctttgttgtctagttttgtttgtggatttgaaatgctaatatttgatgctctgataggtcccatggaagtgccttggtaaagaaccagttattgtcctcattgatcgtctatttgttcttgctcatcctgctcctgatggacagactctca

SEQ ID NO: 39707 - DNA, 676 bp, Zea Mays
acccttctgctcctgctgctgaggaagtgccagtgccagtttttgctgaagttgaccccaatgggtgtgacccgactgatgctgaacccaatgggtgtgaccttgatgatgttgatcccaatgggtgtaatccggccaaagttgatcccaatggctgtaccgttcgtattattgatgaagatgaggaagaggaagaggaaattcccttggttcggaagaacagccggcgctacatagccagcggggagagtagtggtgttccttctccagctttgtctgctctcattggtctgcaagaattgtctctggcaaactttgatcagactctcgaagacatggtcccagaagatctgttgtcagagccggcagatggtggaatgatggaagtttgtgctaacgtgtctgatgccaggttagaattatcccgagcagcatctcgtgccttgtcgaccttggagcgcggtcttaagagtcgagaggctgatctagattgctccgttcccatggaagttgttgaaggtccttcagccttagaggtggctgccacaaagagctcggtcctcaacaatggtgctagcgtttgcccagcccccgagggtgttgccggagatgatccggctcggatgggtagcgcgagctatgacccagcccccgagggtgtccgagtgggttctcc

SEQ ID NO: 39708 - DNA, 319 bp, Zea Mays
gtcggggcttagccccgcgacaagtgccataccaagaggtgctccgcaactctcccccagctgggaaggacccttcaagttaacgggagtgcaccgacccaggggcaaccatctagctacgactggaggagtaccttaccccgatgccaaatatctttgtaagttctatccatagagcaagactaaggggtcgagtctgtttcctttttgtaactaaatgacgcatacgtgtatgataacccggtggggtctgcccccatgaacccggactattggtctgcacacatgcacgacaagttatgaagaagaaactaccccc

SEQ ID NO: 39709 - DNA, 283 bp, Zea Mays
tgtgatccggacctatccgcatacactcctactccccgctcaggcagagacccgatgctgccacgtggcatactgcgcgcggcataagccaacgggcggaacctggcatgatgcctctggactacgcgtgccttcgcattcattatggataagatgtacgcctgtccattccactgacaggcggcgtgcccagtccatgatacgtgggccgtgcagttactcacacgttaccatatcgagggcaatgactcaccattactcgtactgtaactgcccatcaatg

SEQ ID NO: 39710 - DNA, 515 bp, Zea Mays
gcgcttcgcggtcatggtccgacgagggtccaccggtcctttcccgataggtgagagatagtatcgagtactgaaaagatgggttgagtcatcttacccggtgttggcttggcatcattggacatcggtgtcacttgctacgttatgcggccatctccccggtccactggtcgatcttgtgggttgtgcgaccccaaggcgcacgttatgtctgtcctaattctgcaaatcaaaaatgatgatacatcagttactatctctcactgcttaccagtatggaccattggtcgggcggctgtagcttggtgtgttagtcggtcgttcttggcttggcgttgttcggcttcctcccctagcttgttttcatagggctctactcgccccctcgtcgccattgccttgaatcgcctccacctactgtgaggccaccatggggttctggagccactctttaaatgacaaaaattgcctagatgccctcatctcttgtgtgctcctctacgagggagactacc

SEQ ID NO: 39711 - DNA, 511 bp, Zea Mays
tagatatgggatcagaagagaaagattgtgcaaatggccaaatcataaaggggaacctttaccaatgatgaagtatattagcaaatctacaaaatgtattaagaaggtattacaaaaaggcccatcaaaaaccccaaaaaaattcaccaagtggggagcacactagagccattcaaaattctctaagtccccaaaaccaaccctagcacaaagatcaaatgtgttcaccattgtgctggtgccaaaaccacttggaccaaataacaaaaagtcgccaaattacccaaggctcatccctgaaaaatttgaattcaaaccgaggtcgtttgacatggtttgacatcagttttgtcgctggtgaacagtgcagacatacaagacttggtgcccgcatatcttgcaaactagggcagatcttccatggaaacttacacaaactagctagccctaggtgccaggaagagatcttgcacaagacatttggcgagattcgcacgctttggagctctgc

SEQ ID NO: 39712 - DNA, 300 bp, Zea Mays
ctgaaagcactcggcgtcaccacctgcatagtcaggacagactccaaagtcgttgctggccaggtcaaaaaagaatattcagcaaaagaccccgcactcatgcagtatcttgcagctgttcgcagtcttgagagacaattcaagggtttcaccttgcagcatgtggaccgcaccaggaacgaagaggctgatgcattggccaaagcagcggccagaggcgaagccttgccctccgacgtgttctaccatgtcattggcacaccagccgtccacaatctagagggtctacaaataaccaac

SEQ ID NO: 39713 - DNA, 543 bp, Zea Mays
tgaagattgagcaggtgctgactggagagaggaggggagaagcagagtacatatgtgtggagtttgggcggagaggcgtgggtcatacaaccgcggaggcatgcggaaagaggtggttcaaaggagaggcggggccgcatggatcgcggaccaatggagacgcacatgaacgaggttgcagacaaacagagatatgtgtcaccgctttgcaggggatctgatcatgtttcttctgcaccgacttctttccctttttctttctttgttccttcaatcgttcctcaattaactgataatagtcaattggaacccttgatttctcgccttatcactcggtttccctatcattttcctgcatgtctgcccctttcgcgcttccccttggattcaccacctgcccatccctcttgcgactggtccctctattctccatgagcacattcctatggtggactgcttccatccttcaggatgcccaggcgacgtcatactcatacacaggctgctaaggcgaagagcacacacacaggagacaggaccgca

SEQ ID NO: 39714 - DNA, 533 bp, Zea Mays
gcgatctaccgtggcattcactgaggcactgtcactggcgatggataggctacctactatggactattgcgacgtggtaacaccacagattacatggcgcacgagcggcaagcggccaacaccagcgaggatcattttggtcgaccgtagagcaagtgggtacggcggccagcacccgacctcatccgcggtaagatctttttcaccctgagtcgttatctgcgcgcccataggcacgaatcgcatcgccgacacgaatccaggcgcggaagtcaccggcggcgaggtgcactgcatctactgatctttgtcagccacattaccatcagaacccccatcagagcgcctgacataggtaattagagggctgggttctccaatttttatgtgataacttaaccagccttctgtagcaaagtttttagtctataatcccgctacaattctactataggaaccttgatcatttacttactcgatcaaggttgaattgactccaaagttcatcgaacccactgtcagaccaatttcag

SEQ ID NO: 39715 - DNA, 645 bp, Zea Mays
gtggtttgccgtttggaggaccaggaaatcaaattgtcgccgaggaagacacagaagcctgatgtggagcgatgggagtctgggcacccaacccagtcagcatcggagtatgcaatcagcttgtcgacgggtccagtgcctatgtggagaccgaccgatagagtgtcattcacgtaccgaaggatgcgcttgatcagcgcgaggtgaggctcgcgcgggtcatgcatgaacagacacacttgctgcacaacatatgccaggtcggggcgggtgagcgtcaagtactgaagagagcctgataattcgtctagtggtgaggtcaagacaacggtaacccttatgggaaggggggtattcgagaaatacacaagctgtggaacgtggtgccagcttgtgtttggaggtggctgtgaggttgggatagcaaaggcaaccgaaaacacgaagaatggtgtagtcagggagttgctcaaagggaactttatggccaatggctgagcagggacgtctgtttaggagataggtggctgtagctagcgcctctgcccagtattggggcggcatgtgagcatggatgagcagtgtgttggcagatatcgttcagagaacgaatgatgcgttcagctttgccattttgagaggagg

SEQ ID NO: 39716 - DNA, 277 bp, Zea Mays
cacaccggcgttttagaaataactgtcaggtgatgacatggcacgccggtgttttagaagtaaccgctgggtgatgacatggcacgccagcgttttagaaatgactgcacgggtgatgactgggcgctttttggaaacggtatccgacccgggaaaaaccccatatgcactgcgccttcggccgcctctactttccgtgccctagttcttgctttcctgcctccagaccttctctgcccttttgcaattcggctcccgctctgttcgccggtggagt

SEQ ID NO: 39717 - DNA, 710 bp, Zea Mays
ggctgcatcagatgaatctttagccaacatgtccagcatggcacttatttctgcatcactcagatccaaaggcacctcaaaatgaacctgcttctcgttgtcagggatttcgccaagtgaggcaaccaaagcctcaacctcttcgggagaaggtcgcactctaaggtccaaaccgctatcaccagtaggaggatttgacacaaaactgatgaaggccttggaaggaggcagattccaggctgagtatgcaacaggagcaccgatattagacaccttgcctctgagtatcatctcaagccggctcaccagatccacaacaggaatccttctgttggtaacccgggttgaatcagcaaggcctcgatacagataagctagatacgctctgtcttttagtggctgaatgttcttgaacacaaaatcggcaaccacagcctcggcagtcagaccactctccttcaacaatccaacctcgacaagcagagccccggcctcagctacctccaggtctgtgggggattcaatccagcttggagtgcaaacatctggctgtctccctgaccgaggggggagggagttcccgtgattctccacgataaaccattccaggcgccatcctttgatgttgtccttgagtgggatgtcgaggtactcggttttcctcccacggcgcatctccaaactcgcaccccccacgagctggtgctgcc

SEQ ID NO: 39718 - DNA, 378 bp, Zea Mays
cgccgccatggccgacattgtctacactctcagccaaccagtgcctgggcctcggttggtcgttgtggggtacccacggcggaatccgcgcgtcttcatggccttgttggatttgatcggtgaccaggtcgccctgatttccttcccggagttgaggtcatccgccagtgttgctccgctccatggtcggcctcgttgttgccttgcctccggtaatctactgctccttaggttagcccatcgtcttctctttcctctgcacgagctcctgcactgtgtgcgctgtggtgctagggcgggtttgtcactggaatttggcgccaccgtggctggaactgcgctgccacggttggagactagaggtggaagaggtcgtgt

SEQ ID NO: 39719 - DNA, 648 bp, Zea Mays
tttttgagcatgtttcggagccacaattcagcaggagataaagagcgattatcttgcgccacctctaattgatgtagaagctccctagccatctcaagctgcagtttaatcttcccaacttttttgtcattccagctctgcaaacatctagccgttgtctttaatttcttggccaaggtgataagtgggcaaggccctgcaggaacagacgcccaggcctgagttaccacatcctgaaaaccctccatcttagtccagaaagcttggaagtgaaacctcccttttcctctgctgaaatcatgaagcccaagcagcaaagggcaatggtcggagtcatccgtggctgagctctggagaagagaatctgggaattgttcctcccaatctgttgtgcagaaaaccctatccaatttgaccagggtaggattagagtgcccatttgaccatgtatacttccggccaatcaacggaatttcattaagagccaaatcatttgcccatctcctgaatctacccatcatggcacggtctaaattattattattcttttcttcctcccttaaaatcagattgaagtccccgagcacaagccatggcccattacagagagctctaacttctctaagagattgcaaaaactgaatcttg

SEQ ID NO: 39720 - DNA, 330 bp, Zea Mays
attactggaccttcttttggacacaacctaaaaatgttgtgacgtcgaaccgaagtgacacagtggtttgaatagatcttatgggagaccactaatagtcacccttaaatgtggcgcaccacgacatcaaggaatgccatgacaaggaaggcagcagcagcagtagcagctggagacaacttctccataccacggcctcctgcaaatggtccagcaaaagccaaccttgcccaatcatacaacgctacgctccatgaatgacaccgcgcccaccctccggtccctactcccctctctctttctctctgcatttctaggctgcaagacttt

SEQ ID NO: 39721 - DNA, 361 bp, Zea Mays
gcagagtacatagaaccttatgaggatgactattatccaaatgcacatctgtttcagctaaacctcccatcacatcctacagcgtgccagcacagtaatataacatcccaaatctgtgggagtgagtactttccggcccctcctagaaggccggaaaggaatgactagtcctatgagccgcatagggcaagtattaatgcacctcaaaacccaagccagaggggagggagacaacatactaatatctagacaaccacacctatgttggaccagagagccgatggactcccaccggtcgccattgatatagtgagggaagagatagtcgaggcgttttgagataagcttagagttatcatga

SEQ ID NO: 39722 - DNA, 350 bp, Zea Mays
cgtgttcacctccatgttctggcaagaactaatgaggctcatgggcgccaagcttcatatgtcatcagcattccacccatagtccgatggacagacggaggcggccaacaaagtcatcgccatgtaccttcgctgtttcatgggagatcggccgcgtgagtggctgccttgggcagagtacacatacaacacggcgtaccagtcttcgctctgcgacacacccttccatgtggtgtacggtcgacatcccccatccatccggtcctatgaggtggggggatacccgggtggcagcagtggctaagacgatggcagagcgggaagtattcctggaggatgtacgacttcgc

SEQ ID NO: 39723 - DNA, 412 bp, Zea Mays
caaagttggccaaggacagttcttgcagaccaataagggcagacaatgcaggagaaggaactccactactctcaccgccggcgatgagctgctgactatttttccgagtcaaaggaacttcatcctcttcctcctcatcctccacagtgacaacgcaagcagcacccccattgggatcagtagcagtttgggcacacccattgggttcagtgtcagtaaggccagttgcagtcacttcttcagcagcaggagctaaggtaccggcgtcttcatcaaagctggatactcgccggaggcgtcttttcttgttcttttgctcatcagcagaaggctcgggctgactggctcggctagggcgccttggacgagtgctgacaggttttgggacatccaaagttgtatcaatctctgg

SEQ ID NO: 39724 - DNA, 510 bp, Zea Mays
gcgcctagctactgcggtagttattgcctgtccgtcgtgggcctagtcaccggggtactcatcgctgtggggggaggggggggggctaccggcgagcagacagccatgaggagagagaaaaggggatagaaggatgcggggaggaagaagacagtcggtggtccgttgagtggtagctggacggtggagattatatggtgcctgggtcgttggattcacatggagtggcgatgatttggttggtgcgtaccacttccgtgcgcccatccgagccgttgattgagtgacgggtggtagagattagatcccgggggcgacaacaccacatccgtagatctaggatcggcctgtccgtaatgcataccggttcacagttgatgccgatctaatcaggaatgctcatccacgatccatcgaccgaaactaaaccataccgtttcgacccccccgctttgcagaaagacccccgaagaaatcactaaacaacccgcggtcctgggcaagcacgtt

SEQ ID NO: 39725 - DNA, 443 bp, Zea Mays
caagaagatgggctgtttcctgaagggactcaggccagaactcaagacaattctggctagccaagacttccgcaacttctctcacctttccaacaaggccatgcaagttgaaagggctaaggaggaagaaaaaggacatctcaaaaggaagttccaggttctccgggcatagcagcaggaccggcaccagaagactcgatcatttgggtttccacccaaggggcccaacttcagtagaccagctggacccactccgtcacgattcagccagcagagtcagagctcttttcattccccctcagtggcaagcaaccaacctccgacaaatgcatgttggcactgcggtgatccaagtcacttcaagaacaactgtccgcagctgaagccaccaggacccgcctactccaactcggtgaatggccccaagaatacctcggcatccg

SEQ ID NO: 39726 - DNA, 1163 bp, Zea Mays
ccaacccctgttagggttagggtttccaatatggtatagagccagttttttttcttttcccctgttagggttagggtttccaataactttgtctccgagtgatgtaaaaaatactatggttatgccaatggcatttcaaaactatagtattcaaaaaccatggttttaaaatactttccttccaaacagcccctaatatgtttaatctatgtttagtccatctaggtgctaggaagtggcctggtggcttttggtgacttggtcttatctaagatcgagttggactaggaggaatggtttttacatgtttgcctatggcaggcatgttgcataagaggattagcacatgagcattcagacatgaagcatatctgtggagctgcggtttcatttgctgggttctaggtgtgatgcacgaggaagagaggtagaagtgtcttggaggagtgtgtggcagtctacatgaaccacaaggtgcacacaaatgggtaaaggagcatctatttcatcagacataagaattttgaaccatggttgtcagaagttcccttacttgctctaatgaaaaatctcactcaagggattttccattcatgaaaatggccagtgtcctaaaagttggtcacctagcgtgcttaggagctaggcaacacccttctcctaaacgcttaattgctacatagccttcctaagtaacaccgcacttcatcagactttttttaaaaattgcacatgcatcgctataaatgtgtctgatcaagcacacttatttggaaattgcaaatgcatggattgattgttgtgtggtcaagcaaacagcaacaacaaaagatgagccaaagaaaaccttttcaaggacagtctatagaatcacaattacaaacagacaaaaaaatagaagcacaaactgctaatgtacaaaccacctatggatgatcgtcaacttactcatagaggaacacagaactacaagcatatcatgccaaaacaacatacacccaagaatcctggctcgggtctagctacagtagcttgcgtggaccgggtaaatctagtagttgaatttcgctttgaagacatatccctgccacaacataatctccatcgtcctaatttgttttccgcggcagcaagccagcaacccctataaacgagaccctgac

SEQ ID NO: 39727 - DNA, 365 bp, Zea Mays
cggggtagtaaatatcgccttgtggatgaacttgagccactgtttcactccggccgccgtgtccgcctaactcacggccaattcagatgaactcaccggagttagccactgatcaaccatgcgtcacgtgccttggtgccttaccacgtcgcagtagctcatattacacatgtccggtgattgccggtgagctcgccacggtaaaagccaccaatttcttgcgacagtgctctcctctctcttcgaccgctaccgcgccatcccaaattcacgggccaccgcccctggagcctataaattgagtgtgtcgtcggctccgcaaggtagtcaagcaaccaatacaccaactcgtgcctcaaatcgtc

SEQ ID NO: 39728 - DNA, 444 bp, Zea Mays
gtccactgtcgtgggccctagaagacgaatcgctcctgtcacgctgtctgctcccacaggcaacagccacgtcttccgcgccgcagtgtccgatcgatcgatcccttctaggggaggggaattcaggacaggaggaggccaggttctcgccccgcaataggacgccgatcgattccggatcttagctcgagagcccggtgcccccttctcggtgctcgttgcaggattttcggtactgttctcgcggtggcgtcccacgggatcgcgccttccttcctcctctattttatgtttttggctggctcttggaatttggttggagagtcggggatggattgcttattttattttgctatgcaatatcttcccgacaggccaggtatttaggaggaagacctgatttgtccttcagctaacagtcaacactgaaggttcacttgggca

SEQ ID NO: 39729 - DNA, 381 bp, Zea Mays
caggattgcaactgctgtgatagtctactcaacttatctgcaaaacgttggagagggcatgtagcttcatccgactgagaccatgaacttgccacctcatctatgaagccatcgagcaccaaaggacagtgatccgagatcaaagaagcagtgctttgcaataaacagtccagaaagatgtcctcccattcactggtatacaagaccctgtccagccgaaccaaggtcggggaagaccgtttattcgaccatgtaaagcgcctccctaacatcagtaattccataagctgaagctcattaataagcctccgaaaccgacacttcatagctctatccagattaccattatttttatcttctgcccggcttataagattgaag

SEQ ID NO: 39730 - DNA, 918 bp, Zea Mays
ctagtattggaaatctctgctcagatgccttccaccatactaggagatcaagcttcatttctgtgtcctcagtttcttcagaaaggtatttgtcaagttcagacttagtgttgttgcttgaaccaatgacttttcctagcctcattttcttagcaacaatttccttcagattccctcctctacctctaccttcctttgatgttattgggtcacttacattggttgtatcctcaccagaagcatacattttcatatactcctcgaacaactcatgaagacaagtgttaattgcttccgaaactatttgtcccctttcctcgccaaatatctcttcaatggttatcttggtatacaaagatagcttgtatcttggatcaagacaaccaacaataaaaattagtaaattcaggttctccttctcctttgccttccccctccccttctccatctccttgtcatgttcaccggtagagttccaaagtccccaatatttgtcaaatttttctttcattcttattcccatcagtgtttgcaaatcatctgaactctccatccatgattgaatcaatgcatgcacttctccaatctcatggaaaatgtatgtgcagtgacttggagagtagtagagacacgaacagtaagatcataaaagtgctctaaaaattctgccatcttccttgcgttttcccaatctatctcatcaggatgaccaaaaccaccccttccttcagataggtccataacataactcatgtcttcgtctgctaattttgtgaacaccttctcatacacaattgcagatttaagcataatatacgtggagttccatctagttggacatcagcctttagatatggattgttggttagcttctcttcctctataatttccttaaatttgaccattcttgaaccacaa

SEQ ID NO: 39731 - DNA, 370 bp, Zea Mays
ttttctaaactgttgtgcctttataccgactaaatcagtgactcgaggagtatggcggatggggctattgtggtagccatttgccagtacggcggagagttcacttctggccccagtggtaatctgatatacagaggtggagaagcacatgccgttgatgttactcatgattcatcgctggagagcttcaaggatgagctgtccaaggtgttccatgttgatgtcactgacatgtcactcaagtactttcttcccaataatatgaaaacactcatcacaatatcatgtgaccgggatttgcaaaggatggttggttttactgcaaatgctgcgcatgtggatgtttttctgataagtagacaggagaaca

SEQ ID NO: 39732 - DNA, 317 bp, Zea Mays
gagaaggtgcaggggggtgcattcggccccaagctatctgtgccacgccagctactacgtgtccatccaaggatcaatagcagctgataagaacgacgcacgaaaaaaatcgcggactaagaataaccatcgagtcacttgactcagataattgagacgatctggggttttcctcatttaccacctttttaatcatctacctacactacagctctaattgacacaagtaaaacaccataggcgtggagattctctcttcagtccaaaactgaaccagctttagtcatctaaacaatgttcagttcatcacatgcctg

SEQ ID NO: 39733 - DNA, 389 bp, Zea Mays
cttgggcaccccgtgaagcctgattacttctttcatgtacacgggaaccaattctgaagcagaatttgtagtcttcatgggaataaagtgtgcagacttagtcaagcgatccactaccacccatatagcatccctgcctcgaggagaacgaggtaagcccaccacaaaatccatggtgatatgctcccacttccactccagaatttccaatggcttcagtaaacctgcaggcctcttatgctcggtcttcacgcgctgacatacttcacaggcggccacatacttagaaacgtcaaccttcattcgcttccaccagaagttttgcttcaaatctcggtacattttggttttgctagggtgaacggtgtaaggcattttatgagcttctc

SEQ ID NO: 39734 - DNA, 287 bp, Zea Mays
ggataatgccatgaaatggctctgggctaggtcgcagcgcggagcgtgcgatcgctaatccgttgaaggtctcaatatacataatattgaggtcgcttcctccatccatgagtaccttatagagacgcttcgagcccacgattggctcggcgatgagggggtaggcccggggtgtgggatcctgtctggatgatcgcggcggtcgaagacgatcgggaactccgaccatctgacgtaccgagggacgacaggctctgccacgtgtacctcgcggtaggccatcttgc

SEQ ID NO: 39735 - DNA, 539 bp, Zea Mays
aaatctgaacttttatctgctccgggacatggttgcgaaatgcagctgctttttgctggccactggtcagatttaggtttggtaataatggttctcgatacgcttggtgtatccgtgagtttttcattgctatttagtctcatctcgactatcaagtgcgccttcccccaaatgcagtgaggatttatgcggatttatttggagggccatttcatcatgaatggagtaaaacagtttgttctcgtcttgttgtttcaatttttgcacaatgcattatgcttgacacctcatgttccaaactagatcagcgttctgcttcgtttgattttatacatgctaatttctccaaaggttcgtcatatgccaaatcttgcaactatcttccttgtaagacaagggaagttaacagcacgtctcattccagttcaagttgagcatattatggatgtaagtagattggcctagactgagtaagggatgacccatacatcagtagttcatttggtttacagacacttgttcctaatgagagatgattt

SEQ ID NO: 39736 - DNA, 698 bp, Zea Mays
gtgtggaggtggctgataaatcagcttcatttcattttcatgagtgtcttggtccatacatgttttttgatattgctgacggacgtgaacattgtggaagaaatgctgctacacagtcactctgtaatgattttgaagctgatgcagctcttgaaatactgtcatttctaaataacaggtgagggtattgtctctctacctgctcatgtttattattgtgtaggaaactaaggctatatactttctctgtgaacagatatccattggagttcacctctaggaaaataggaatcattactccatacagaagccaactctctatactccgttcaaagttcacttcctcttttgggcctgagattgttgccgagatggaaataaacactgttgatggatttcaaggtcgtgaagttgatatcttgctgttgtcaactgttagagcctcaaattcttcagatgatagccatcgcactggtgaagcacgcagcattgggtttgttgcagatgttagacgtatgaatgtcgcactaacacgtgccaggctttctctatggattgttggaaatgcaagaactttgcggattaattcacactggaattccttagtatgtgacgctgaagaacggaatctgtttgtctcaattaaacggccatatggtttgatgtttgaaaagggccaacctcattccagaaatact

SEQ ID NO: 39737 - DNA, 373 bp, Zea Mays
gctaacacgtgttattgataatctatgtccgctagagcgtttgttcaaagctccacccaattataacatgcttcgaattttcggttgtgcgtgttggccccatttaagaccttataacaaacacaaactctcctttcgatctaaagggtgtgtgttccttgggtatagttccagccacaaaggttacaagcgccttgacatggattccggtcgtgtgtacatctctcgtgatgtagtttttgatgagagcaaatttccctttgccactgatcctctatctcgtagcgatcacccacaaaccaaccaaactagtccaccagatcgtagcagtgttattttgaacactaacaatatgcatttgtttcctgctaat

SEQ ID NO: 39738 - DNA, 363 bp, Zea Mays
aacggcaaacaatttgacagccaggacttcaaagacttctgcttttccattggcaccaagcttgccttcgcctcagtatatcacccacaatccaacggcgtcgtggagcgcgccaacggcaaaattttcacggccatcaagaaaatgcttctcgacgacaagaagggtaaatgggccgacctgctacctgaagcagtctgggcgctaaacacgaccgagtgccgggcgactgggttcactcctttccgcctgctatatgggtcggaggccatgactccgcaggaaataaaacatgggtcaccacggacaagcacttcagccgtccccgacgtagacgaaccaacttcgaaggacctcatcgac

SEQ ID NO: 39739 - DNA, 357 bp, Zea Mays
cttgtacagggatttgtagaccttgcaaagcaactggtaattcagcaaccgcgacagtagaaggaatagctttcttcaattgagaaacatgaaaaacgggatgtatattagaggaagaaggcaactccaacttgtaagcaacagacccgactttggacaccactggaaatggcccaaagaacttaaatgccaacttctgatttgctcttggagctagcgaagactgcacatacggctgcaacttgagatacactgtatcccccacctcaaacaccctctctgaacggttcttatcggcctgtaccttcatacggtgttgggcgcgagccaaatgctgttgaaccaattcagtcatca

SEQ ID NO: 39740 - DNA, 484 bp, Zea Mays
accgtcggtttgctcacattcttggtttcactgacaatgatatctctggcgataagatcaagatccatgatttccgccagcctaccagagatgaagccagagaccttcatctctctgagtctgggaaatattgggagtctacaaacatgcataagtattatcgatacatcaactccctcagcaggatgaccctcattccaaagaggggtaatcagatgaacattcttggagagagcaaggtcttcctctcattcatggagcccagcagctcagagagtataaatgtctttgatatgatttggcaggaaatcattcatgctgcctgctttccattgaagggatgtcttcatgctccttttatcatgaagatgattgaggttgtgacccagtttcaatttgataaaggtacaagacatcaatcctatacccctttctggattgatcccaacaatccagcagggcgcttaaggaaagccccttccag

SEQ ID NO: 39741 - DNA, 287 bp, Zea Mays
ccggaatttttccagtggaccgcgcttgagcagcaggtccttggcttcctcatgatgaccatgactccagaagtcatgtgttaggttgcctcctataccacacccaaagatgtgtggtctctcctgaagcaaacctatgcgtcacagtcttgtgcatgaactgtcaacacgtgaatttctctagctactactcagaatggtatgtctcagtcggggatgcccattctcggcttctcagcttcgagaataggatgaaactgcttcatggagggatacaagccttggtc

SEQ ID NO: 39742 - DNA, 492 bp, Zea Mays
ctttcacctgcgaatatgattcatcagccttaatcaaagcatatgttctgattacagattcacgtggtctgtgataactctcctccgattaattcaccctgatggtgatttgcctcattgagaggttcatcttggtgatgaaatttctagcaatgcgcgcaatatcattgtgctaggaatacagaacaatgaatcttttgtttttgggaaatgacgaagatcattattaaatgtgggagacaaatgtgtcgacacctatatattgcctctatagattgcaaagggatccaaaacaaagtcctaggcatgagtgcttgaagctctcttatcgggtcattgataaatgcaatcgacgctgaaccaataatcgcaaaatgaaagtcacgagcttgaagttcgaacatttatgggcactactgaaataatgtgtggtgaatgcgatggttcaagtggtcttgtgagagacccatcccacatatgtgttgaataaac

SEQ ID NO: 39743 - DNA, 528 bp, Zea Mays
attgttttcatgtcaaaacagaggcattaggtgataaacaacattattacaaaattatagcaattgaaatggattaatttggatatcatatgaattttctatgtattaaactagttctaacaattataaatcgttttctaaatggttttataagtgttcttcactgactgaactgcgcattaatttcagagaagcacaggggcctcggagtaattctcctaagacacagagcgcatgcggcgtggatggcgggttagttctgcagaactgcgagggctcttttgcatatcgcatccgcgaaggggtatcgcgatcacacggccgttggattagagattcacggcggggattacatccatttatttgccgaaccggtatcaactggtgaccaccagatccaaaatcagcggccatgattcaaaaccacccagatccgttcatccagtgttcaacggtcctgatttaattacagggaaaggggtatctagcacttaatcggagccatccgcttatgatcctatggctaac

SEQ ID NO: 39744 - DNA, 589 bp, Zea Mays
cccctagctgaatttcaaaagctatcgggacgacaatgtactctgtaaaacggaagatatgtcatcaataaagaagacttcaaagatactcaatttgttcatgattgactagcacgcttacataactcagggtgaccactatgccctgctaacggagcaatcggcttaagtcggcaaagacttaagacggtgcaacatgctcacgcttacataactcggggtgaccactatgccctgctaacggagcaatcaccttaagtcggcaaagacttaagacggtgcaacatgctcacgcttacataactcggggtgaccactatgccctgctaacggagcaatcggcttaagtcggcaaagacttaagacggtgcaacatgctcacgcttacataactcggggtgaccactatgccctgctaacggagcaatcgacttaagtcggcaaagacttaagacggtgcgacatgttcatgcttacataactcggggtgaccactatgccctgctaacggagcaatcggattaagttggcaacgacttaaggcaatgcgacatactcgcgcttacgtaactcgagggatgacttctat

SEQ ID NO: 39745 - DNA, 323 bp, Zea Mays
ctcgaccatatcgagtcacggagctcaatctcaccggccaaaacttggctggccaaatcagctcctctcttggaaacctgaccttccttcatacccttgatcttagctacaatagcttcagtggccccctacctcttcttaacaagctccgaaacctggacgtactctttctgggaagcaaccatttgggggatgttattcccgattggcttacaaactcttccaacttagttgatctagatctctctgaaaacaatctcaccggccatattccttcaaacataggcttcctaacgaagctagaaggtatagccctttacaat

SEQ ID NO: 39746 - DNA, 537 bp, Zea Mays
gggttttttattattaattcccagcgacaaatgttaccgtacagtacacaaaaccatgccattgccatcatctcctcgaatgctcccgtcccgtcgcatatggaaaacgcactgctgccgtcgcgtcgtctctcctgcggcacactacacgtacaccgtaatactccgtaataccacagtatgtgcccatggatgaatgaatggatgaatgaatgacctgaaacgatttctcgatcgtatgtacacgaacgaacccaggcctcttcaagtcgcttgtttctctctacttcgcttttaccacgcaccacctgttcaccccacccacccacacagagtgagcggccgctatttgcaggggcctagcggggtagtagatctgctgcccgcctgcttccgtactgtctgcccgttggtttcaggagcaggagcggggtgaataacttcaggcaacggcgagctgtagccgctagccccatctgctgccggtggtggaccagatacgacctggtcgggctcgtgtctgggaggaggaggagg

SEQ ID NO: 39747 - DNA, 272 bp, Zea Mays
ctcgtggatggcatgcacgaaggctaccatgtactcagcaccatcaggttcaagcctgttgaagaagacacatcatcccacagccaggtgacacaaccacctgccttgtcatcccctctcaagcgcactcgtgcagcagcttccagcttcaggactgccataacttccaaccacgagctacaagcttctctgaagaaactggaaacgattgttgcaaacatgacggagttcgtcattctgctgggtggatgcaagcagatgcacagaagacc

SEQ ID NO: 39748 - DNA, 377 bp, Zea Mays
tgcagttgcaggcagaggaaatcaatcgcatccggaccctgactgaacctgacgcacgccaatcagccagcctcataatttgcatcatcagtcacctaaaagactagcaatattgcaggtggtttatttacgatgttctctaaacacatacttcctccattcttttttaattgtcacagtttagtttaaaagtgaaataatagacgacaaatatttgagaacatggaggtacttatcgcactactacactactcttacgtgtcttatccacttcaaacctgtcgagaaaagcatgcatgggctcacctcggacgccaaagccgcggcaacgcctcctcacaagtcacacgcgaagcttcaacaactaaaactaggcg

SEQ ID NO: 39749 - DNA, 303 bp, Zea Mays
ctcggatgtttttacgtttcgatagaaagatgtgcgatgtgttgtttgatgcgaaggataggttttactattttaaacggttagtcggcagactcgatcagtaaagctaaagtggattatgcgattaagatgaggtgacgacatgccatagtagtcgtcgccttctctatgttttcgagtcggataaataccataggcaattaattgttgatacccaaagattgttagaaacaagtagtcgtgctctgcctattgcgtcaaaggaaatatggtgtgataattaattgggagctaagtgacctg

SEQ ID NO: 39750 - DNA, 510 bp, Zea Mays
gagaggtggagacgcgccggtggaagagggccggagcgtgtagaggggcccgttgctgtcacatcgggcgagaggggttctagtggccagattgttcacagaaaatccagaggggtcaaactcaatggaacaagaattgtcggtggtgaaccgacggacggaaaggagattgtgagtgatttgtggggctacgagaacgtcattgagatagaacggtccagggagcaccgagacacctactgaggtgactggaagggtggaaccgtttccaacgacgatcgaggtagggcgtgtggcgggatgtgggtgtgagcgagatagtatgcatgtggtgggagttgtgtgataggatgcaccggagtcgatgacccagtcaaatgatggtggggccaacaccatggtgttgtatgcggcggcgagggcggcagggtcccagcctccagcgaacgaggaccatggtgtcgtggtagacgaccctgtaggtgggagctgaggcggtgttggggtcgg

SEQ ID NO: 39751 - DNA, 315 bp, Zea Mays
ggttcgatctggaacccgaagacacttcttcaattgagatacgtggaacacattgtgcaccacagacaatgtttcgggtaactggagttggtatgctactggtccacattgttcaagaataggaaaaggaccaatgtactggggggcaagcttcccttttaccccgaaacgtgatacacccttcattggtgagactttcaggtagacataatcttcaacttgaaagtacaagggtttgcgtcgcttgtctgcataactcttttggcgagcttgggcttctttcaaattttgtattattcgttgaaccttctcctc

SEQ ID NO: 39752 - DNA, 410 bp, Zea Mays
tctcgagatacttgtggcaggacgtcacgcacaaacactttgctctagtcaagaattcaaagatcatgggcacatggctatatactcacctttacctggttagaacctgcctgtggtagcactaatccttttctattgcttctgacctactactgatcactgcctacactcctatttctagtttacaaacaatgagctactcctggtgctagtataaacagaaggggggaaaaagaaagatctagtgtggattttgtacagaagaacctaagtttgtgtggggtgagctttgtacagtgtcatgagatacatgcatggatgttgaaccaaaagcatctggaaaaagggcagtgaatatatgttaagagtggtactggcaagtatacatatttcgcctgttacaacagaac

SEQ ID NO: 39753 - DNA, 328 bp, Zea Mays
agagagggaagggtcccacatatctatgtgtgagtgctaaaggttctacatatcgccctctcatcggaccgaccctccctttttacagatcaaggaggggaccgattacaaatatcttcactcagaaggaattgctacgctaggtaaagtggaatagttctccctcgataaaagttagttgatatttgtcctcgtatgactccatgtcttgttcctcttagtctgccggggtagtgtgttggtgatgggagtatgaacatcatcattactttctctatccatgtcttcccatgtcaaccctcagtcttcgtagtctgtccttgtagct

SEQ ID NO: 39754 - DNA, 357 bp, Zea Mays
gtcatcgatccttcacagtgggagatttggtcctccgtcgagtactgacgggagagggatggcacaaaactttcaccaccatgggaaggaccattcatcgttgcagaggttacccggccaggatcctaccgactcactcaaatggatggcaccaaagtggggaattcgtggaatatcgagcacctcaggaaattctatctgtaacaatgcctcaaaactcttggagatgagttgtactttgtaagtgaagggtctcattgtcaataaagcttccatgttctaaggcatacaagttcttgaacaacaactgacctaggtcggacacaacttgaaaccggtgcaacatacctacacgac

SEQ ID NO: 39755 - DNA, 330 bp, Zea Mays
caaccccttaatggtttgttcttctattgtatctccgtgtggaatgtccttcacaattagccatgtgttgaaccgcggcttatgttgcttcattacccaatcatctgtttgcccaggattttgctcgcgaagctcattgatgtgttgttggataaatggctccattatctctagctgatgtaggatgctgtgatgtgcctcaagtactgtattgtattctggtgggatgaaggatttctgtcccatcctaccgcttccatacagtctaccctcatgtcgtgatggaggcagacctattgcaacctggtcttttaggatactattgcaaaa

SEQ ID NO: 39756 - DNA, 542 bp, Zea Mays
agaacccactcggacaccctcaggggctgggtcacagcttgcgctacccatccaagccggatcatctccggcaacaccctcgggggctgggtcgcagcttgcgctacccatacgagccaaatcatctccagcaacaccctcgggggctgggcaagcgccagcaccatctttgagggctgagttctctacagcagccacctctaaggctgaaggtccctcagtcacttccatgggagcagtgcaatccagaccagcttcctgaccctcaagaccacgctccaaggtcgatgaggcgcgagacgctgctcgggatgaccccaacccggcatcgagcacattagcacaaacatccatcgcgccgccatccgccggctctgacaacagatcttctggaaccatgtcttcaagagtttgatcaaagttcgccagagacaattcttgcagaccaatgagggcagacaaggtaggagaaggaacaccactactttccccactagctatgtaacgccggctgttcttccgaatcagagggatctcgtcct

SEQ ID NO: 39757 - DNA, 321 bp, Zea Mays
cttggtcatgacgtcgggtccagggtggccgagacgacgatgccaagtggtggaggaggtggtggagaccaggacatgaggtgaagacacgccggcggtggatggctggagcgtgtagagcggccccgagctgtcacaacgggcgagaggggtcctggtggccacatccttcacagagaaaccataggggtcaaactcaatggaacaggagttgtcagtggtgaatcgacgaacagaaagaagattgtgagtgatgtggggagctacgagaacatcgttgaggtaaaatggcccagggagaaccgaggcacctactgaggt

SEQ ID NO: 39758 - DNA, 313 bp, Zea Mays
tccgcatcctatatatatactgaaaagtcgatagcgctatcgtttcagggttgatcgatctatcgacgacgcctttctcagcctgacttcgatcgacagaaactggcctctagctagaaggtgagctaatttgcttatgtatatgcagcatgcatggtgaggtgagatcgaactcagtcgtttggtggtgcgtgttggcagtttctgagctagtggcacgcatgtaggacaattaatattgagtttttcatttcgtagctgtaggattgattagccaccagcttgtttttgtttgtttggatcgtttgaataa

SEQ ID NO: 39759 - DNA, 681 bp, Zea Mays
gtggcttgcgctaccgacaccattgatgatcaaacttgtagtaggggtaacaagcagtggagagagggaggagaggcacccagatctcttatcgaggtggaagtagagcttagaagatgtgaggtggagtcctggctaagtcttggattggcggggctctgaacttctggtccttgtccacgctcctccttctgttcgtccttgtgggcttgtctccgtctattgatccatttgtcaacctctcttgccttgaggccagcccctcccttttataggctaggagaggggtcagccagtggtggcttccccgagaaggatccaagggtaaaaccagtgttttacctcgggcgagtccacacgtactcgtggggcttggggctgcctcactgccacgtaattattgcgagggtggcgatggtcccaggcaccatcattccggctttgtcgaccctaggctcctgtaccctagggcttggtgcagtctgtcatgtagtgccatgcgggaggcctacgcactcaggcctagtccaatagaccataagtgcaccataattcgagggggcgcaggccattaatgtgtcatagtccggcggctcgtaggtcacgagtgttatgcgacccaaggggtccatacatcatgagtgggaagtggatcggtgccacgctgtggctcggtgcctg

SEQ ID NO: 39760 - DNA, 449 bp, Zea Mays
ctttgattcgtccaaaataatcaacatcgtcaaggccgggcgtaaagactccagaacacgttgttttccgattgggccgactttggtcatagtttgttgtgcgaaaacggtatccattgatgtcatgcccagaatatttcatgaccctataagcaaagcggttggctacttgtctcaactcggcactcataggcagatctctttggccctgcaagtattagcaagttaaaagacgctaaattgagttcatagacagatctctttgacaaactaagcacgtaccttacgtttgaaccaggaaatgaaatcaagcaatccatttctcgcaccctttctaagaagagtatcatattcctgtggagttgggtcccttgattgatgctagaattcatgtagaaattgttccatgtatggcgtcacctcttcaaggttggtcaatacatatagca

SEQ ID NO: 39761 - DNA, 527 bp, Zea Mays
gaccggagtatggctggcgacggtgagcttgtttcacggtggcggaaatcggatttgggggaaactccgaattcacggacctcagcgaacgatcggggctaatttcaaggtggctggttagcttaggaccttacggaactggtggggggctcaatttatagggagcgacagcggcggcgatcaattcgagcaagttgtgctggcggccggaggggaagaagaaccttggcgcgcgattacgtgtcctatagcgtggcagtaaactccggtgagccacggagagttcagaggaggtcacggcgacacggtgaaagagttgagccacgcggcacacggccgagaggcggcggtcgacgatgagcactttaccgcgggcggtgagccaggggagatgtgccgtggccaatcgggggggcttccagctcggcggtgacgacgatcttttgacgccgcgaagttatccactagatatgagcgcgaatccggacggcggcagcatgaatcacggcggagggagccgccggcgg

SEQ ID NO: 39762 - DNA, 337 bp, Zea Mays
ccagagagcgcagggtgtttcttataaaattcggggctaaaccgcaagactcttcctatagccccggacggcgggtgaattgtggcaaagagcatgggctcttaagtaagaatgccaagtgaagggggatacggataagccctgtccgcccgatcagagatggagggcccagatcacatcgggacggcatcgaaccggtataggcccacagccgttggatccgagatccgcggtcgggattggaagcgcgtaggggtatacacggcgcgatcccaagcattcaactagcatcgtacggtcgaggcttaatgttttcacgatctaaacttgaccgccc

SEQ ID NO: 39763 - DNA, 540 bp, Zea Mays
tgtttcctgagtttgttgaaaatggtcatgcacgtgggtatgacatgcttgcacaattcgaggataccgatgatgaagagagggaggagaaccttaccatgggtgtgcccgatgatgtagaagatgaggatagactaattgttgattgggatagagaaaatccaagtctagaagaaggcaatacttttccaaccatgagagattgcaggaatgcactcacaacctattgcatcaaaggggaatacgactttatcattgacaagagttcacccaagagatacactgtgcattgttggtttgagcgatgtaagtggaggatgcatgcctccactatgaggaatagcactattgttcaagttaaggtcaacccttttctgcacacatgcccaagtgcggaaagaaaagtgacgcagagggcagccaagagcaggtggtgctgtgatgcagtgttacagtgggtgatagaaaatccttctattggtccagccgcacttattaagaagattcatgagaagcataacattcaagtgccttacatga

SEQ ID NO: 39764 - DNA, 300 bp, Zea Mays
cccgccgcgacttcttgcatcgcctctatgattccctagtcaagccatcatcctccccgtcgcaaattgtgaggaagagacgccgccgccatggaaattgtgttccgtcttcgcttgaggcgcaagctcgggtcagtgggcttcgtcggggtacggtggtgatcattgtggcactcgcaggtggaagaagcctttcgtgctgccccaatttctcaccggcaccaataattgccacggaaccacacttcgtcgcgcctggggactgcatgacacaaccacccataagattgctcatcatcg

SEQ ID NO: 39765 - DNA, 286 bp, Zea Mays
aagaaaacggttggtccgttggatctcaatccatcggctaagattagatcgggagaaaggtgatggtgaccgtagattccggattgggcggttctgacgtcgtagcacatgatctcgtgttcattagatccgggccgtcgatcggatgatgggtggccacgatgtgattccgatattttaaatccaagccgttaattgtggatcaggtggcgcggatccgtgccagtctaacccttcactcgatgtaatctgggtcgtccagatctaatccaacggccgaaaaccc

SEQ ID NO: 39766 - DNA, 367 bp, Zea Mays
gttaggggtgttccgttattcttgctgatgaggtcttttcggccaatcttgttgtgatttccttgggggcattcgatgttatcttgggtatggattggttatctcagtatcacgcagttatatcctgttttttggaagacggtgttattgcaagcaccatcgggtagggagggtggtattcttgggaagttccccaaagtactcgttatccttgttggcgcaattgcttcaggatcgccggtcaaggaagtcaggaacctttttctccatggtggtggagggtgaggctgccttgcgggtacaggacatccgtgtggtgtgcgactttgctgacgtgtttccggcagagcttccaggcattactcca

SEQ ID NO: 39767 - DNA, 334 bp, Zea Mays
ttcaggtactttgcgcgctactaacctcgggaggtgccgccgggctcggtcttgtcgtggacaaccagcgaatcaacgggaaatccttcgactctgctcacagaaaattctacgctgccttcgacgcctcgtgtggtttgctcctagccgccgccgtctgcaccgtgatcatggtcatgctttcagtttcttcttccaagtagctggcagaggtttgcacgtacggtcatgtggcatggataatttttgtttctctttattattttatgcgtcctgctttatgatgaggatcgacaggccggacagaaactataatatatatgttgtgtgttgt

SEQ ID NO: 39768 - DNA, 528 bp, Zea Mays
gttataaattaaaagatatcaccgtttgaatccgggtatgtggttgtccagaaaaatagattttcaggtggacgaacagcagcagtattagcagtttctggggatttttcgtgagtaattagtgttaatcagtatgagaatcatgtagggctttttcttacctttccaacaagtacttatgcgctcgattcggaattatattttaaaagttatcgctgtttgaatccgagtatgtcgctgcccaaaagagaaaaaaacagattgcagggtttatcttgtggaccgttttggggtagttagacgttggaatttaatcataaattgtatacaaaacttatggggaattttatgtagttgtctctggagtttttgtttgtcatcactgctttcttaattttaaagttagggaattgttaagcagcgccgctgcagtttggtgggtgtggggagaattgttacccgcggcggggtttgagactgcgcgtaggtgcggcgttgttttttaggcttattatgtgaatttgatgc

SEQ ID NO: 39769 - DNA, 433 bp, Zea Mays
cagcgcccgattggaggaagacctcaggacagaatgggagagttcctaaggctcaagcctcccacgttcgctggatctagcaacccgctcgatgttgatgattgactgcgcacggtgaagaggaagttagaggctattcgatgccctcaaaaccagcgtgttcacctagctacccaccagctcttcgggatggctctatactggtgggacaccttcagcgctgtagtaagagatgctacctgggcagagtttgaggctgctttccgatagcatcatgtgcccttgggaatcgtccagctcaaggaggaggaatttcgggagttaactcaaggagggtgatccgttagtgaatacatccataaattcatagaacttgctcgttatgcacctgatgacgttagcacggaagccaagaagatggcccgtttcttga

SEQ ID NO: 39770 - DNA, 467 bp, Zea Mays
ctctttcgcaaaacgatcgggccgaagaggtatcccacgctacgatccccacgatcctatatagatggttcaaattaaatcagccccgcactgaaacggtatgcgcccgtggccgttagatcggcaaccaacagaccagatttaaaaccccaacgattgattcccacgcgtatgattcgaatcggacagttcagtttactctaaccgaatcggtacgctcggggagatccgggccgttcatcccgatcctactgttccgaccatcacacagactcttctaatcttaacagttcatcgcaaaatcgatggcccagaacgcgcctctaccacgctacccccacggcggcggcgccgccaccaaccacggcgggggatgcccggagttgggcgaaccggcaccgcagtgctgctattctatcgtggtttggggttatacagagaacaaggtacgatgaacacaatggtac

SEQ ID NO: 39771 - DNA, 501 bp, Zea Mays
cgaccgcacaccacagggttaccttgtgatgcttttgggcaggacgacgccgttgatcgtgactcgatggttcgtgcggtggcacgataggagaaacatataagcttgtacaggttcgagccacgtgagaggcgtaacaccctacgtcatgcgatgatcttggtattgggatgagattacaagctgtgaactatgagaatggtgggctgaggtgagatgaaaatggtaggggtggctcttggccttatatacacgaccaagtgtagctatccccacattggtgacaaatgtaatccattcgcctatttctcggtttgtagcgaaatgtcctcctacatcttgggaactccctgcgctcatccgcccgagttaccaccggaggcttagcttgtcgggtgggcgcaatcgtcatgctagacatacttgtgctctcatggtgcctaaattagatgttggcctttgctggttcagaatgggcttgcttcgcctggttactttcgg

SEQ ID NO: 39772 - DNA, 330 bp, Zea Mays
gtgttgggtaaacccactatgaaatccatgcaaatatcctcccatttccaagatggtatgggaaggggctataaggtgcctgctgacttcaaatgactggccttgactctttggcaagtgtcgcattcagatacatactcagcaatttcccttttcattctggtccaccaatacagagatctgagatcatgatacatcttgttactgccggggtgcatggagaatttggagaggtgagcttcgtccaatattttcttcctgagttctgaatttttaggaacaaccaatcggtcttcaaaccatagaactcccttgctgtcctgacaaaag

SEQ ID NO: 39773 - DNA, 306 bp, Zea Mays
tcgcttgcgggcaaacgacggtgacgcctgcaggcgtcactcctaccctattgagggtgtcgtccatggaccccaccctccatgttgggagtccttgcctcgtccatcttgggggtttcacgttggctgcttagctggagtcgcagctctggtggctaggacctgctaggttagtgcgtcggtggacgacagaaagtggcaacacgcggtggcttggcaggatggtatcgacggtggttgtccctgcaaccttaaccttggtgttggcgatcagcgctgctctgctgggtcttcggaggaaacttt

SEQ ID NO: 39774 - DNA, 516 bp, Zea Mays
ccaaaaccaaacaacacttatcaacaataataaaaaaaacaatataaaatgaaacccaagtcattggcaggtgccatcaacactaggattttccactaccaaactaggatgcaactccacaaagtctttaaataacactctaccaaataggttagaacactaagcacaacaatcaatgaattcaacaacctcgtttgttaatgccactaaggccaaacatacatgtaccgacaatgtatgaaacacctgacatacccgtctctagctctataaaacatggttgttattacactagaatccaactactagaaatctccaaaactattctgttgacgtgaagcaaatggtgctcatgtcatataacatcttttccccctctcaaaagagataaaatttgcaatactcataaagcaatggagggataacaacaagaaaaaaaactaatgtacttcttgacacagactcatgcaaaagcttcataaatattactttcaacacttaataataacacgatac

SEQ ID NO: 39775 - DNA, 543 bp, Zea Mays
cgaggagctccaaactgaggtggtaaaggagcagtcggtgcaggagtaggtgctgccaagtactgaggaaaacttggtacagacaagtactgaggagtcccggacatataaaatgcagctgagggggcggtacagaaaattgttgctcagtggttgccatcatgttgatagtgccctgcgaagaggaagtagtcactggctcccatttaagtttcccatttggattcctcctacacaccacatccttgtgatcctgatcagatagagcacctgccactccactgacactcagcacgacgatgcgcttcaccacaacggaaacacaccaaccccaacctaggcttaggaacaacccgatacctctgagtactccctcctgaagtacccgatttggaggacttgccacaataggggtggtggcgctattgttgagactttcccttcttgtgggctagacccccagtgtagtctctcctcccctcttggccacgaggctagtcaacacctagagacttctgggattcaattgtgtactaatgctgc

SEQ ID NO: 39776 - DNA, 291 bp, Zea Mays
attgctcaattatttattgatcatgtttacaaacttcatgggcttcctcaagcaattgtgtcagaccgtaatccagtgtttaccagcaagctttggcaggagctgttcactcgggccggagtcagtttacacatgagttcagcctaccatcctcagtccgacggtcagacggaacgagtcaaccagtgcctggaaacgtacctcagatgcttcgtccacacctgcccctccaaatggattaaatggctatccctagcagagtattggtacaacaccagttttcactcatct

SEQ ID NO: 39777 - DNA, 392 bp, Zea Mays
gcaccttcagcactacaatcgatccttcagtgctccgggtggcgggagcatcttgttttgcttcggcagtagaagaggtcccctcaccaaattcaggcactacgaccgtttcaatgtatcgtggtcggtgggtcaaaacctttattttcttgcccttcggcacaacagtggtggccgaagtggcagttttcctcttttttccttgccttcgcaaggggtagcagtaatcagggtatatgaagccaattgcatcaaaaaccctgttcaatgttttcttgccccaacccccgaaggctgaggacaaggcatcatcttcggccctggtatatgtcccaagcaactcgtcgctagtagcctcaatgcacttcaaccagtcatcatttggttcatcg

SEQ ID NO: 39778 - DNA, 594 bp, Zea Mays
agagggaggtgggtgcagcaccttggggaggagaggagcggctgcaatggggggggagctgcaaaaatgagggaaggagggggcggctgctgctatgagggaaggggaggggcggctagggtttttgagaagaggagtgagcgatgcccccgatgcccttgatgcgaaaccgacggctcacaaccaaatcccccatccatgccccgattcagacaaatgaatactcaaatgtatcgtttaaatgagatcttcacatctgcggactccgaacttccaacggctcacaaccattttccctcatccacacaccgaagatcaacttttggtcaacaattgatttgggatattacattctaccccccttaaaaagaattcgtcctcgaattcgaccactcacagcagaacatccaaggtaccccaaatagcaccaccattcaaaacatgaatccattattggtattaatcaacacaagaacttctacctcggactaatggtataaggaagctacacaacctaacaacaagcatgaaacagcatgcaatgaagctcaaagcaagtcatagatgcaatcaacactacgatttcacaccatc

SEQ ID NO: 39779 - DNA, 373 bp, Zea Mays
ccgataaacaattccggccgccgtaccctatttaccgcggtggaatccgatagctcgccggtgaaccaccgcctcctggccttgcgccgcgtgtctaaccctttccaccgcatcaccataacctgctctcgctctccattgatcaccggatcgattgccacggcgttggacaccaagccagtgcgccagtgcccttcctttcctccgaccgccgcgcgtcataccccaaattcgcggccaccgctcgtgggctctataaattgaccgcgccctcagctccgtcatgtaatcaagcagcttctgcacctacctgtaccccaaaccctccaccagcgagctctaattccggatttcccccaattcgggtttccgc

SEQ ID NO: 39780 - DNA, 488 bp, Zea Mays
ggagagcagagagcacgaacagacctagaacaagctagccacggtgagtgctctttcacggtggtggaaaacagatttggggagaaagagaaattagagagctatggtggctaatcggaggcaggagcgggtgctctggcttcgtgattatctaacggagctagcggtgtgcttaatttatagtgttcaagaacggtggcctccaattttggaatggcacgctggcgatcggagaggaagaagatcactggtggcgcgatcgtgccgttcaccggtgcagtggttcagagagggtaagcctaagtgtgccacggttactaccgcgtagtgaagagtcacggtgtggcataattgagattgccggagtgtccacgatgacaccgacggtccggccaggtagcaacggctacaggcatggtgataagcttcccctgcaaccacatctgcttccccgcaagatcttttacctccccgtggatatccacttc

SEQ ID NO: 39781 - DNA, 397 bp, Zea Mays
attggttatcccagtatcgtgcagttatatcctgtttttggaagacagtgttattgcaggcgccaacaggtagggaggtggtattcttgggaagttcccctaagttcacgttatccttgttggcgcaattgcttccggatcgccggtccaggaagtcgggaatctttttctccatggtggtggagggtgaggctgccttgcgggtgcaggacatctgggtggtgtgtgactttgctgacgtgtttctggcagagcttccagtcattcctctggagcgcgatgtagcttttgagattagctgattctgggtacgcagcccattcataaggctccgtatcgaatggccccaaaggagcaggttgaattgaagcggcaattggatgatttgctggctaag

SEQ ID NO: 39782 - DNA, 521 bp, Zea Mays
cggggaggggtctcggttaggatgacgcttttatggggaagacccctgttgtgggcctcgggtgaggaggtgacctggtctcttgccttcgggggttgcgcctgggcaaataacctttcctgagcgcgttttaggggtatgatccgggtacccctagttatcacatccgacagtatgcgccactagcgtcactagttgaaaccattggaccctcaactggtgtaacaatcccctacgaaaggatatgtttaagggcaccatgaagacataagcaacagttgaattcttcttccttgctaggttatatagaagcttccttgctaggttatatagaagcgggaatcgaaattttaacgttcccaacccgacccaatcatcctcccaaatacgcacttgggagttgggaccatcatgtacctgaaaggtgatgggctattggcgctccttttcactgtcctcccatgccttgagctcatttcgaagggaaccatgttatttttttacttgatctccattcccac

SEQ ID NO: 39783 - DNA, 284 bp, Zea Mays
ttccttcagaaccttctccacaacttcagtaagcaattattaacgacttcatcaacaacagattcagctatattagtaatttccagtgcttcctttgtttctgggtcggccaggggatcaaacggttctggtggcggagacaattcagctacaaaaagaatttttaatcagtccgaggccacaaaaacgaatgctgaagttagatgtcgcgaagcaatacctatgcgtttttcacgctcagcagcttcttcagctcgttttgcttcgactcgtgcctcatggat

SEQ ID NO: 39784 - DNA, 315 bp, Zea Mays
gctgatccactcaattgggccctcaggatcgcctcttatgaagttgtcttcactcgagtacgcgcccacgttggcgaagctagtttttatcttattgacgcattctacagatttttcaaaacatctttcttttgatgagcgaagttctacaactgttttttcccaataatttttccagtaatcactggcatctcggtcagcttcgacaatagcacatttcaatttggcttcggccagttgtttttgaaggttttcaatttcattcctttggacttcagattgagccttgaagttagcttcatccatttttacttt

SEQ ID NO: 39785 - DNA, 316 bp, Zea Mays
gcggcacgcggctgtggtcatggtcgaggcccattatgtggccatgtcaatctcggccgtccgtgatccatcccgcgcccgccagactatttattgaggccataccataccgcctagcactaccagtagcaggcttccaggtccgcctctccaccaccgcacgtttggaactggaatggagccgtgctttttcgtggcatatctattatgctgtcttgttcttgcttcatctccttctggcggggttattgcacatccaatctgtttgtttctgttccagttcgtgattgttaggattctgcatgccgtaattcgt

SEQ ID NO: 39786 - DNA, 274 bp, Zea Mays
caagaagccatgtcggctggaaaacccatccatttgatcaacacttgagttacagctgcagaccctttcctgaccaaacgccggtctaaaatggcttctggcataggaacaacatcttcagagaatgctggggcaggtaaatccctgaatactggaacgctgttaggaacatgaggcttgagttgtgaaacatggaatattggatgaatgactgccgatgcaggaagctggagcttgtaggcagcagtacccaacttctccaagatgggaaaag

SEQ ID NO: 39787 - DNA, 508 bp, Zea Mays
tagaacatcccacaaaagagcatgagctaacctgtagacgtctggccacggcgagctcactcacgatggagttttgactgatttgggggaacttcaaaattggagcgctctggtggacaatctgaggcacgggctggtgcgttgggtgtgtgattacttagcggagctcactggggcggcaatttataggttccataggtggtggcggctaattttgagaagacacgcggctaccggaaaagagagtgagtcatcatagcagtctgccgtggcggtcactgggcaatgagctagagtagctactgagcagtcactacggctcgcgacgacgtggtaaatagcctaaggcgtggcgcaaccgcggtgaatggtgcatatttcagtgatggccgctcggccacgtcgccgatgcaagtgggcacgacaatagggcggaacagtggcccgagttcatccttaacgcgatatttcttaccccgagcagttatctgcacttcactgagcatga

SEQ ID NO: 39788 - DNA, 304 bp, Zea Mays
cattgatgtacacgaagaagaacggctgaatgcagtaattcaatcagcacgatactagcagactctaagacgctatcatgacaaggtcgtacgacaacgatccttttcagtgggagatctcgtcctccgccgaattctaacgggggagggacagcacaagttgtcaccctcatgggaaggaccattcatagtagcagaagtcactcggccgggatcatatcgtctcactcaaatggacggcacagaaattgggaactcctggaatatagaacacctcaggaagttttacccctagctgtatttc

SEQ ID NO: 39789 - DNA, 518 bp, Zea Mays
tatatgctatgtgtgcagaattaatgctaattccttccttctgcccttataccacattctgtcctaatgatttattcatgaccatccactcatattatcatcactcatatctccagaaccagcaattatatagccatataaacttcttagtttcagttttagtcaaaacgtgccttataaaatgtactaatcatttggtatgcgttatgccaaaaaggacaatgaattgcacagagcttgttttgccacgcaaaccggtatatactcttggaactgagtaaattgcctcacatcagacagctttatgcatggctttctttataccaaaatgttggctgcaaaggaacatgaatggacctgtggaaatgctcctcgtcgtgtgtccgatgcattggccactccttccacataggaccacttctccaatcaattaaaacatacaatttccaccatcaaacctccaccaccaccactagctttttattatacccctgctcgacacacctcatccctctctg

SEQ ID NO: 39790 - DNA, 877 bp, Zea Mays
gccagatggactccgacctgctctctgagtctcagtcagggcagaagtcacaggcctcgcagcatggccgtggtcgtcaccgtagcctgacgcagaaattcgcaccaaagacgttcaaggacgttgttgggcagagcttggtggtgcaggcgctgtccaacgccatcctaaggaggaagattgggttggtgtatgtgttctatgggccacacggcacgggcaagacttcatgcgcgcgtgtcttcgccaaggcgctcaattgcctctcctctgagcaccccaggccctgtgactcgtgcacggtgtgcatcgcccacaatcttggcaagagcaggagcctgatggagattgggcctgttggcaacatcgacatagatggcattgtggacgtccttgataatgtgatgctttcaccagcaccatcacactacagggtgtttatatttgatgactgtgatactctgccagctgacacttggagtgctatctctaaagttgtggaccgggcgccccgccgtgttgtgtttatccttgtcagtccaaaccttgaacttcctcatatcatcctgtcgagatgccagaagttcttttttccaaagcatagggagtccgacattgtcaatacattgcagtggatttgcaccagcgagagtctagatgttgataaagatgcactgaagctaattgcatcccgttccgatggatctttgagggatgctgagatgactcttgatcaactcagtttgctgggacaaaggatttccttgactcttgtccaagaattagtaagatatctcacaagcattacagtgtcatctatatttttttgggcctacattactctgcaatttctatggccgaatataattttctggac

SEQ ID NO: 39791 - DNA, 328 bp, Zea Mays
cataatgtcattatcatctccctcagcttgtcaaccaggtctaccacaggcaaatccttgatgtccctgatccaattattgactaattctgatagattattggtgataaagtcacactttattgctggagtgaaggcacatctcatccaatgcaagttgtgattctcttttagatagtcatatataccaggacaactacaaataattgtagacatatgcttgtcgaacacctcagacctatatgctcttgctgcaggccacattagaccatcaacatcaccatgttaatgtttcttgaaattctgcattagatgccaaaagcattctc

SEQ ID NO: 39792 - DNA, 388 bp, Zea Mays
cagaacctcaccggcggtgaagaaggagcaccgtcgcgcaggccggccgacctatgccttaatcgccggtacgtgcactttcctgtaagattcgccattggcttcgctaagtgcagatttggctcacaccggcggcagcagaggagaacaataaagctggggcaatgacccgcctgcgtcgtcgggtggatggcgcttcgctggggcagacaccgcgcgagatgaggggaagaatggctggagcgcgtgagaggtggaagatgatgggatcaccgtccgatttaggttgagtggatgggattagatctggggaagcaataaccgtagaccgttgatcgggtatccaacgcctggggtttgatcttgcgtaaattgaatccgagccatt

SEQ ID NO: 39793 - DNA, 482 bp, Zea Mays
cgcttgtgaatgaattggagatgccgaaggaggctgctaccaggtctagtcagggcggcttagtctatttaaaatatactttcaaatatagtgacgagtttgatgagccaaacgatgaatggttaagcagtattgaggcaaccggtgacgaattgcttggggcctacacaatggccaaagatgatgcaatggcattagccttcgaaggtcgaggcaagaaaagattgaatagagtttttgacgtcattggttttgtatatcctgattattgctatccctcgcgaaaacagggaaagaaaaggaaaactgccgcttcggctatctctgttgtgccgaagggcaaaaagaataatgtcttaacacaccagccgagatacattgagacgaccatagtgccgaagcttggtgaagggacatctctcgctattgaagcagagaaacctactcccaccatccctggggaagacctgactatattgccg

SEQ ID NO: 39794 - DNA, 353 bp, Zea Mays
aggcatactgcctgccaacggaatagacaggcatgccgcatgctagcggaatggacaagtctcattaaatgctgaggcggcacactgcttgctagttgaatagacaggtcgccgtttgtgagcagagtgggcaggcctcattaaatgccgaggcggcacatcgcttgtcaggcagcacgccttatccgcaataaatgcagggaccgcgcaacccggaggccttacgtcaggctccgcccgctggcttacgtcacgcgctgtaggccacgtgtcagcatcgggtctccgcctgggcggggagcagtagcgttatgcggacaggtccgcaccaggctgggcccggacacgtgtcg

SEQ ID NO: 39795 - DNA, 292 bp, Zea Mays
ggaaatatcaccgccagggataggatcacacaccagagcttatcactgtgattctagtcactgcgacgtggccggcttgcctgagccgccgtggaaacgccggtgaacccggttgtgccacgtcgaagcttattgctccgcggtgaccggcgtggcacccttgggagcgttatccatgcgctgttacaccggtgaccgccacggttacagccaccgtgttcttctccgtctccggccgccagcgcatccggctcgaattgaccgtcgccgctgtcgctccctataaattgag

SEQ ID NO: 39796 - DNA, 346 bp, Zea Mays
ggctggataagcgctagcaccatccttgagggctgactcctctgtaacagccacctctaaggctgaaggaccttcatccacttccatgggagcagagcaatccaggccagcatcctgacccttaagaccgcgatccaaggtcgatgaggcacgggacgccgcgtgggataactccaacccgacattaggcacatcagcacaaatatccatcattccaccatctgccggctctgacaatagatcttctgggaccatgtcttcaagagtctgatcaaagtttgccagagataattcttgcagaccaacgagggcagacgaagctggagaaggaacaccactactttcc

SEQ ID NO: 39797 - DNA, 416 bp, Zea Mays
atagttgttagcctttgatattaacaaaaactcacccttagaccgttttcggccaaaaatacaggccatatgcccattaatcgtgagtgagactctcctattaattagaacacatttgtttccttgacataaaccaaatttagaggttttttgtggagaccatttatcggtcaaaaatccataaacgttagccttggatattaacaaaacctcacgctttggtcgttttcggccaaaaataatggccttatgcccattgatcgtcggtgagactcttctattacttagcacacacgtgttttcttgacataaaccaaactattttgattttggtggagaccatttatcggttaaaaaatccatcggttttagccttcgatattaacaaaaactcacgctttggccgttttcggcca

SEQ ID NO: 39798 - DNA, 359 bp, Zea Mays
agagtcacttggaaccactgtgattcgaagctcagcgtaccatcctcaaacagatggtcagacagaaagagtaaatcagattctagaggacgtgttgagggcatgtgtgttacactatggtaagaattgggataagtgcctttcattggcggagttctcttataacaatagctaccagtccagcctaaagatggcacctttcgaggtcttgtatgggagaaggtgtagaacaccgctaaattggtcacaagctggagagagggaaatatttggaactgacctagtacttgaagccgagaataaagtcagagtcattaagaagaacttggaagctgctcaggccaggcagaagagctacc

SEQ ID NO: 39799 - DNA, 313 bp, Zea Mays
tatcatcctctagactcctgactccccacctgaaaccctagatctcgttgttcaccattgtggtggtgctcctaccgtagcttgtcttcatctccacctctatgctctctagctctgggctccgacgacatacaattaaaccataaatcctaaccctaacctaaccctagatctccaaaccctagatccctaacctaatttgtcttgttttactcacaggttatcggtcgatttgttgtgctggtgtcgcacatgttgttgaggtaccgcttcgacatggagagctagagaagatgacaaagttggggtgacc

SEQ ID NO: 39800 - DNA, 273 bp, Zea Mays
gcgaacagaacattcccaacttctagcgggtggggactgccaaggatgaaggaagagagaaaaagtaagaacttgtatgacttccttaacggtttaaattctagaaaagattcaacaaaccctgcactgaatggctagagctaatagaaacaatgtgcaatgaaattctcgggaactataccaagaaataagatcagttgatgatggctgccttcgacacccatgaaaaacgaaagttgaaccgggtgatggatgctctcaactttgaatacc

SEQ ID NO: 39801 - DNA, 271 bp, Zea Mays
tacccacgaacgtttatgggtacatgtatggattaagttttgtctcgcgggtatggattaatgaactatatatctgtgtactactcgaccgattgccatccctacgtgccaccagtcgcaggaggttcaaccacttctactggatgttggcccgatggtgaggcgatacccaatgtcgagtttagcggcgtcacgtcctcacggcgccgagctagcgacaaagtgatctccgtttttattttcctactgtcccttcgtgcgtctagaaaga

SEQ ID NO: 39802 - DNA, 625 bp, Zea Mays
ggactttggacatgacatcggatcctggatgactgagacgacgatgccaggtggtggacggagtggtggcagccaatgcatgcatggataacatggcggtggaggaagtaggtagccaaagtgtgtacagtggccccgggctgtcatagtcggtcagaagggtcctggtagccagatctttcacaaacaaactaaaggggtcaaacttcatggaacaagaattgttggtggtgaaccgacgaatagaaagaagattctagatgatgtggggagcaacaataatgtttttgaggtggaacagtcctggaagaaccgagtcacctactggggtaaccaggagggtggaaccgttccttacaataatagaggatggaagggatggatgagggggatgggagtgagagaacgtgctagcaccaggagtggtgcggtaggaggctctagagtccaccacctagtctgacgtggtgggaggtggagtcagcgccatggtgttgaacgagctaatgagagacgaccgatcctagccgcgacaccatgggtaccatgggagaggtgggggtccccgggagcggaaggagaggtggaggcggcgactggtgctgaagaggggacaccgaaggtg

SEQ ID NO: 39803 - DNA, 271 bp, Zea Mays
tagcgcacaaactcgcaaaacaggttcaatagataattggatttcatgtttgcagcagcaaaagactgaaactactgcaactatataagttgtctacaactgcatagtttaagagactgggccacttggaggccgccatcaggtggacaaaaatttaagaatggaattcgcagcagcagccgcacggagccgtcgggggccggcaacgagacaagagatcgctaggaactaagactgacaaggagcgagatgcgagtatgcgactgaatgg

SEQ ID NO: 39804 - DNA, 340 bp, Zea Mays
gcgaacggccaggttatgggtatagtctgcagctgctgtgctggtagatgctgctgttttgacaagtactggcaggcttcgcacctctggactaactcggacgcatcactctttgctgttggccagtacaaaccttacctaaagaccttcccaaccagggtcctgggtgctgcgtgtattccacattgcccagcatggatctcatttagaagttgctttccagtagctgagagaatgcatttcatgaggactcctgatgcgccccttcaatatagtgttcccccaatgagtgtatagtgagctgattgtcttgcgatgcactcggctgtattcttgtcat

SEQ ID NO: 39805 - DNA, 388 bp, Zea Mays
atggaatgcatggtcatgaactgaactgaattgacttgcgcttatctttttttatcctttacgtattttatgtatatgtgttgtttcatttggcaggaacatcagacatgaagaacgtagaccgacctccttctaatccaaaacggattataatccagtctactcaagagtgcttcagcgttgacataccccgtgttccggcggagactgttagacccgaaacaaggcaggctgctgatgaggatgatgactttgtgccattatccaagaagcgtaacttggacgacagtcctgggaaagttttgaagaaggtagtcacaaagcggaggaaagtagtgtcccccccgacaggttagagatttatggtctatggcaatatatcatttta

SEQ ID NO: 39806 - DNA, 601 bp, Zea Mays
gtggtggctggttagcttactgccctacgaagattgtggcgcactcaatttataggcgcatcgggcgacggtgacgaattcggccgagaggtgctggcggccggagagggggggcgagctcggtgcggggaaaacgtggctttcatcgtggcaatggctccggtgatcgccggacatgcatccggtgagtcaccgcgatgaagtcccgcgctgagacacgtggtgcgcaacgacggtagcttatcggcgacgaggctatccaaccgacgatgagctgggggaatgaagtacggcggccttagccgtagcttaacccggtgccggatttttaccaggtcgagcctatctactacacacagtgcacgaatcgcagcaaaagatcgaccaccggcgacagctcaccgacgacgagcgagcagcgctggcagtctaatccatatggagcactgtaccatggcgactaactcattcagacagcctgtcagtcccggttgaaggcaatttttctctcaacttcaaatggcaactcaactaactttctgcagcaaagttacacacctataatccatcttcaactttgccacaatgcttaccatcaaat

SEQ ID NO: 39807 - DNA, 373 bp, Zea Mays
gatggtccatgtactcgctagtttgtctcttcttttccaatatcgtataaatatgaagtgttgactttgtcttttcttttccactcatgaggctctgattggttgattaattaggtgtttctctttcatgctagattcatgtaatgattacatcgtttctatgtgttgtaggagctgaaggttctgttaaagtactgtccacagccaaggacaattgggtgccacagagtcgtgaacctgaggaggtgaaggtgagcaccgaggggttggaagttagaattggtgggcggagagatgagaatgtgtcactggatgatgggcgattgtcacaagctgcatggattcgtcaatacatggaacaacaagaggaggt

SEQ ID NO: 39808 - DNA, 284 bp, Zea Mays
tgaatttggggtcttcatgggaataaagtgcgcagacttagttaagcgatccactatcacccatatagcatccctgccccgaggaggacgaggtaggcccaccacaaaatccatggtgatatgctcccacttccactccagaatttccaatggcttcaataaacctgtaggcctcttatgctcggccttcacgcgctgacatacttcacaggcagccacatacttagaaacatcagccttcatcctcttccaccataagttttgcttcaaatctctgtacattt

SEQ ID NO: 39809 - DNA, 393 bp, Zea Mays
atggatttcattactggattgcctcgcacccagaaaggatatgattatatgggtgattgtagagagattgactaaagtttgtttcattccggtcaagactacttataaggatctcaattggtagagttatatatggctcggattgtgtctctacacggtgtaccgaagaagattatttcggatagaggatcacaatttaccttcaaattttgaaaaagttttcgtgagaatatggatacgaagttggattttagttcggcctaccaacctcagactgatggacaaactgaaaggactaatcaagaattggaagacatgttgagagcttgtgcccttcagcatggtaatagttgggacaagagtctacctcatgctgagtcttcatatgataat

SEQ ID NO: 39810 - DNA, 357 bp, Zea Mays
aaaaactctaaacagtactgggctcaaacaagcctgcgtcggcccagttagggcagaagtgcgctcatgcgcgcgtccgcgctgctctggcggttttgcgaaaaggcccctgctacttctaataattcagaaaacgctcccgggatcatttgccgagtcactgacattatacaatcatgcccttctaattctatttcttctccgaagaggtccaaatcgacggcgcgctcataagcgatgatcctgctgcgcggaccggccaagatcggtagtggatgcctgatttaactactgggtgagtgttacgggcgtgagacaaccctagaacgggtttcaattacgtagttacagccttgg

SEQ ID NO: 39811 - DNA, 425 bp, Zea Mays
tttctcagcgtctgttaactcttctccaagcaaatcttgaaagttaaaatcttcttccgaaatttcatcaatttgctctttccccttttcagttgtcgtgctcaccgcagctgcagtagtttcttcttcagccattttcaagagtatattgtcaataacctcaagtgtggtttccaggttcgactcttcagtggtcccggcttcggccccggtagctttggcttcgcagatctcagcttcaatagtttccactccagtagcttcggctgcggcgccttcggcttcgacagtctcggcaaagacagtttgtgacaccgtcgccggtggcggtgtctgatggatcacatccgtcacttgaataattctccgttttttcggcttcacaggactttttgctgccgaagctgccttgtccctctgaaaaa

SEQ ID NO: 39812 - DNA, 442 bp, Zea Mays
agtttcttcaacgatttcctcattagtgtttgggtccacattgaagtagacgacaatatgtatagttctggttgcgagttggtccacgggccttggggtctcattcaaagcgacatctagtgacccaaagaatgttacatctgaccgttgttgttctagacaagttttcttatatttgaccaactttatataaaaacatatcaatatgtgcatgtgtcatagatttactgtaaaagtatatccctaattaatataatatatcctcagttatgaccaacttgatcagcctccctatcacgctctctatccctttttctgtagcccgatgaactgttcatagctccagcaggccccctatcctgaagtgcaaaatagaagccacccctagcactcaatatgcctatgagtactctctcatctccgcacctcaaccttcactttc

SEQ ID NO: 39813 - DNA, 381 bp, Zea Mays
ccgcaacttatcgatgatatatcgtgcagctcacacaggtcaatcgaaactaatgaatcaccattatcagctactgttaacagtctggatatgtcagcctgtgccagcatggatcggacatccctcaaaagttcggatggcttcaaccaaagcatgacggaggtccgaggtcctagaagcacagggccactatcttgtgtcagcatagagcaatcaattcttctggagcctgaagaagatgatggcagtgccatcgttgatacatcctcagtagtggaggtcatgtctcggtacttccggaaaactgctgatgctacacattctgtagcatcagatcctgtgtccctagaccagtttcgaagcacacaaatgaattctgaa

SEQ ID NO: 39814 - DNA, 528 bp, Zea Mays
tctcaggggagatgttcctcctggcaccaccgagtttggacacctcagggtaagttgcaactatattgtgtttaactattgcaaatgctactccacaatagttgcaatttgttattcatttatcgttttatcattgtttttttactttcagctgagaagtatcactgacacgtgctacggcgtccccattggtgctctagcaatattacatgctccagtaccagcacctgccccagtagcagaccctaacccaacagcagcacctaacccaggagcagcagcatctgccccagtagcagcagcacccactgctactggcacatctgctgatgtgcttggcacatcccatgatcccgtcggtcatgcttccttcaatatccaactctgagtctttatcagtaccctagcttcatatcttcttttggtcaaagcattattgatttagttggaaggagtaggaagtcagatgcgctgaacatcttgaaggcttttgatgaaagcactagtgaagcccagtcgtacgcacag

SEQ ID NO: 39815 - DNA, 409 bp, Zea Mays
ctaacccgtagacgtctggccacggcgagatgtctcacagcgacgttctgaccgatttaggggaaatgggaaattgggaggttctggtggacgatcggaggcgagagctggtgctttggatgtgtaataacctagcggtgctcactagggcaacaatttatagcctccatcgacggtggcatttaatttgaagaaagtgtgctggcggccggagagagggactgagtcactgcggcggtctactgtggcattcactggatgaggagctacgactgtcactagtgaactattatggctagcaacgacgtggtgaaagggtcacgacatggagcgatcatggcgaacgacgtacacctcgacgacggccgctcggccacgtcgccggcaagtggatgaggcgacagagcgg

SEQ ID NO: 39816 - DNA, 378 bp, Zea Mays
atctatgcttaatgaaaccatattgagaatcacttatcacttttgtgatacaacttgccagtctgttgttcagaactttggaaataatcttgtagcacacattcaacaggcaaataggtctgaagtttttcatgtcagccgcattgtccacttttggtaataatgttaccaccccaaaattcagtctctcaattttgagactatcattgtaaaagtcattgaataatttgataatatccaaatgaataatctcccagaaagtttgaaaaaattcagcagggaagccatcgggtccaggagcactgttatgcttcaactcaaaaatgactttcttaatctcctccactgagaaaggagccgtcaggaaagatctatcat

SEQ ID NO: 39817 - DNA, 364 bp, Zea Mays
ccaaaagcgtcaggggaactattgtgatgcgaatatggcaaaggaaatccacctgactgctcagcagtacaaagagagtgaggtggattggttgagccaccattcggatgcttgggcgtggatgtgcgagtattgggcttctgaggagttcctgtccatatctaatagaaatcgtatgaatcgattgagcaagccaggggtccacttcttcggggcagatggacacgttggcaaggccgcacgtatggtatgtgtcaaatttcctggtcaattgttaattgcatagacttgtctagactttctaatcatgtgttgcaagaggctcgaaatggagtggagcctactttgcttcaagtcttcgtcg

SEQ ID NO: 39818 - DNA, 338 bp, Zea Mays
agcccgcactcttttcctcccggggggtgaggtttttaacgaggcggagtcatgtaatatacaagtgaaaaatcccccgcaaaaatctacgtcgaaaaaagaccgcgccgacggtcttcgacattcgaccaatacaaagtcaccgcgaggcccagcgctagctaccctcgcgtgcgacactccacgcaaaagttgcctaagggtgcagccggactagcacaacaagtgcgaaaaatcgaagtcttcctcaaaaaagactatccgcgcaaaagtcgcctaagggtgcagccggactagcacaacaagtgcgaaaaatcgaagtcttcctcaaaaaagac

SEQ ID NO: 39819 - DNA, 299 bp, Zea Mays
cgcggtagtaactgccgtgccgagctccttgatgggtctagctgccaatcgactgcgcaccggcctaggtctgtattccgcgcctgctcggtctgaactcattaactaccggacgcgtccgatccaccctcgacgacctagatctaatggaacgaatcggtatggtctgctctaatcgccaccgtcaaatcccatctgatggcgcgagaccatcttcctcacaccaaccgtgaccgacggcggcgctgccctagcggtcgaagtctcgccggcgaatcccactgaccggtgatcccgag

SEQ ID NO: 39820 - DNA, 385 bp, Zea Mays
cgcacctccagcagaggaaagataagaccggtagcaccaacccactggggaggacaaaaggcatgaactctccagcggcaagttcatcgggatggatggcgccgacgcaaatctttccgccgaacgccggcgcatcccatccaagcaggcggtataccatgtcgagcactcactcagtctgggcatgctcgggatgaacttacaaggccatggcaaactacggcaacgcaaagcagagaccttgaaggcaaaggggcgcagaaagctcgaaggagagaggacgccgcgagtgggagagaagtaaggcatggctgctactcaagggacgaacccctctttaaaggcagactcccccgctcccgcctcgaaacaccgtgagaagtct

SEQ ID NO: 39821 - DNA, 308 bp, Zea Mays
tgatgaccaacacaaacccatgacgacaacaacctgagttggatcctccatagcctccaccagtcggagctgatcccgtagttactgcctagatgcagataatgcagcaaatggcagatactatggcagatatgcatgcatagatgcggcaggaacgccaagagatgcgccaggagagagaggagatacgctaggaaaggagggtgcaacagcagcaagcaccactgccaccaccaccacctccacttctaccccgggacaggcaccgggaatttatgagccacaagccgcctacctttgccagctcg

SEQ ID NO: 39822 - DNA, 310 bp, Zea Mays
gcttcagcggcaagccaggtctctcgccgaggacctcaaggctgagcggtctgaggcccaaggcccggggaccaaaatgggaggtatgtgtgcttacctatacttttaccgcccgtgtcactttgggtgtgtcttagtgttttttctttgattgttttcagagctcaagcgggaccttggcatttccatcgacacatccgggacgctctcctaggccgtggatgagaagattgtcgagctcaaggctttgtccgaggcggtggcagaatttggccaaaccttcggcgccgaggacatccccttgggagga

SEQ ID NO: 39823 - DNA, 471 bp, Zea Mays
agtgcctgtccatgaggtctgcgtattatcggattcgcgtaactgcatcccatgtcgtgatccgtctgcctgggcactggtgctatcctctctggcataatcaccaatgcgtgttctctgttgtcgtggggttcgatgtcggggaggaagaagggtgttagccattgatgttaggattggtggggcctacgccggttgaagtcgcgccaccgtagggagacctgtgcgccactttggctctggccggaggtagatgatgacagagcaccattggattgagtatgggcgtgtaggattagatggtgcggtgagtgatggcttgccgtcgtggatgactgggctcgtcgtgtcgtcacagttctcgaccggagttgaggagagagagtgacgagggtagaagaagcgctctgcacgggagcgccgccgccttgtgcctgtgcgctggagggtggtgaagacactgtcctagac

SEQ ID NO: 39824 - DNA, 297 bp, Zea Mays
aacacactcccttccatgaggcatcggtgccatgcaagatggaggtggtggccatggggatcgagacttatactcgaagccaaggacacaggacagataaggtttagctggcagccacgagtttgttgggattttgctgatggttgttgtgatacgacgctgttacgtggaggcagacgaatctgactaacggggcccgcctggcattgtcagcatacgcgggcacaggaaggttacgccgccgcacgcggtccccatgtgtaacatcccaattttcaactatggaataaagcttat

SEQ ID NO: 39825 - DNA, 451 bp, Zea Mays
tacagttgaatacttcaaccaatgtgtttgactataatacagtgggcctcaatggaataacttgcaccaatcaaccaaaaaataatttgcagtcgaagaagactgtctgcataaaagcaggacaaacttcttcccaatcagcattctatattccatgtagccgatcacgctaaactgtatgaaggcgacctgttgttaacttgttattattcaatggttcccgatggggactttatggcattagcagaaccgtatttggcaccccaatggtcaatgcagagttattaaattcgtaagtacgatatgcatatatagttgtatcgcatgacgtaagaactactggttttggtcgagaaaaggaagtgatggtgaagtgttaatttactgctaggagagcaggagtacagcattcctccgtaagttgtgcttgaacttctctgatttgtgtgtg

SEQ ID NO: 39826 - DNA, 504 bp, Zea Mays
cgatccactactagagtgtcttgtgagggagacgaggtcgaagtaactgagactgcaccaatatcagaagtgatgaggtaatcgggtcttcttgtgctagaggaggctgttgccgaaggtaccttgattactgaagctaaaagatcgcagttgaaggagggagtgagaaaaaagatgaagaggattacactaatatgagcccagcgaaacccagccacattgaatttggtaaatctactgtgacggcggacgacatggttatgatgaagaaattgggctactttggggaggccgagagcaaacttgtctgatttgctggggaagaggtgatgaagtcgtagtttttaaaagtttcttcagggcaaaactttgtttccctctgcatgagatgattggagaagttttgaaaaattttgagatatactttcatcagttgacacctaatgcattcattagacttaatgtctacatatgggccctccgaagccagggtatgagtcccaa

SEQ ID NO: 39827 - DNA, 323 bp, Zea Mays
cgaggaaacaatgttggcaatctcaattgctgcagttagtggaggagagggtaacagagccatctaactatgggcttcaattcactatcaacaggtcctaatacttgttgattccggtagctcagccagtttcatgggaagtcatctaatgggggtcatgtctgatatatagaaactgaagcagcccatgcaagtaagagtagctgatggcaggtgcatgtggagcaaatatctggtgtctaactgccaatggttgtgtgggggtatcaatttttgtactaatttcaaggtgttacctctaagtgtgtaagacttcatacttg

SEQ ID NO: 39828 - DNA, 285 bp, Zea Mays
gtgttctttaccatacccttgaaaccgacctcctacgcccggttttaggtcacgatgttgtctcatgatattttcaccagtttgtcgcttcggtggcccatctctaaccctcttgccttttcgaaatgactttgtaccctttctaaaaggatgcttatagagaaggaggtgtcagtgaacatcaaaaaatgtttctttcttaccatgttctaacctatatgcttgtgagtcacccatacatatcggacaacgcagtatgtcgtggacacaccaaccagaaaaaat

SEQ ID NO: 39829 - DNA, 336 bp, Zea Mays
agacgtgccacctgactaccccgctgataagtgatgtgcccttttagcattgaatgtgtcctgtccactcagctggcaggcagcgtctaggccatcctgcaggcggcgtgcctgtccatcccattgccaaacagtacgcccacgctgcaaggtgcaactgtgcccatccaccaccactcgtacgttgccagggaagcttccactgcacgtcaatgctacgcagatcgcggatattaggacgcaaggaagattgcgctggggacggacactagtcgctccaagtattacatctgttatgtccctaggcccacatgtcggggcccagcacccatgtac

SEQ ID NO: 39830 - DNA, 915 bp, Zea Mays
cttttgtgaagaaatccgcaagctgtaattctgagggcacatattgaagatcaatggtcttctgatgacaatgagatctagtgaatgagacatcaacaccaatgtgttttgtgagttcacgcttcactggatcatgacaaatttgtatagctccagtgttgtcacatcgaagaagtgtaggcgagtcacaagaaacgcctagatcagccaagagccaacgaatccagataatctcagcagtagtagtagccagggctcgaagttctggttcagtactagatctagatacaacagcttgcttctttgatttccaagcaacaagggatgatccaagaagaatacagtaaccagtgatggagagacgatctgtaggatcactggcccaggtagtattagagtaagcatgaagctgaagtggggaatttgagtcataaaataaacattgtgtttttgtcccccgtaaatatctaagcacacgaagtaagtgcccataatgaactgatataggagcagagacaaactgactcaagatctgaaccgcatgagcaatatctggcctggtgacagtaaggtaaactaagatgcctacaagatgtctatatcgagatggatcctccaaaggtgtcccatcagtcggacgaagagataagtgaagatccataggcatgacaacagtgcgagtatcactaagaccagaacgatcaagatggtcttgtatgtacttggcctgagaaagataaataccattttgagtttgcaaaacctcaatgcccaaaaaataactgagtgcccccaagtcagacatttgaaattccttactcagatacgcctttacatgagcaatatggtctggatcatcgcctgtaatcaacatgtcatcaacatatagtaatagcaacatgcgtcctcgtgaag

SEQ ID NO: 39831 - DNA, 434 bp, Zea Mays
tgaaaattcactaactaaaataggatgtaaagagtaaatttaaaaacacttgtgatcaggtagtctagcagcggttcaaggctttactgacccaaacaacaattcgttcataggtttctaatgtgtagaagttacataattcttaaaaaacagaaaaactgccaaattatataacacagaagctcagtttgttcaacgttcactgaattaggtccataaatgaaggtaacatttgcttctaataagtagaaacttgcatcattaacccgtcatcaggctggcagctggtttatgaacaagtttcacagcattaacaaagatattaatcattgccaaggaaattactgatatatggtcgtaacacttaataaagtactaacaaaaagtccagaaacattaaaggcaaggaacatgagaatttagataaatatagc

SEQ ID NO: 39832 - DNA, 283 bp, Zea Mays
ggccagccatcgtgtgcgtagcaaaccgagtggtccactcgtgcgaagcatgccagaaattctcacctagtgtggccccctcgtagttcacaaaagttgatcgcccacacctggccattacaacgatggggccttgacatagtcagaccattgcccactgcacaaggcaacctcaaatttgcttttgttgcagtagaatatttcaccaaatgaatcgaagcaagagttgtatcaacgatcacagcaaagacaacacataagttctagtagaacatcgtctgtc

SEQ ID NO: 39833 - DNA, 608 bp, Zea Mays
gaaaccaagtcactcattaaggaggcatgggaagctgccaatatcattgaagtcacaaaacaagaacttgagttcctttgcagcatcaaaccttctgagaaatttgacacaaatgataatgataaatccaaattcacacactatagttcagaagttattatgaaattgtggcacagtaatctcaaggtcctctttgtgacaaatggtacctccaagattcactattacacagaaacacacaatggctgggtccgtggtacagaagatgcaccgatcactcctttcaccggtgatatgtcacaatctggcgatgccattgttgcaggtaccacatgtgtctccctcgccttctgtaatacatttctaaaggatatgttattgtttcattaatgaaactatagtttgcttgggaaccaagtcctctagggactataaatataggggcaatgtaactgtttgaaagggaggaaggcaaacattttgcctgccctcaagggcttttcctacgcgttatctcgttctccctcgctcgttgcggcactgtcgccctgtgcccacaccaccacggtgccttcctagagtcggaaattctgaccctgacccccgac

SEQ ID NO: 39834 - DNA, 319 bp, Zea Mays
caaagatgacatgctgaagcaactaaagttgagggttgttggttgcgaacatactctagaatgtatggagaatagtatgaggtggtgtggaggacctgcttcgactgattctgttgtgcttcgactaattctgttgtgcttcgacttgacaggttcttgttgtatgccccctgtcctctccacagaaaaggcagaatagtttccttggttgagagttgaatcttcctccaaaactcctacctcccctcccacctcttggggccagtggtttgaaggtgctttgctgggttcctgtggattggaagtgactttgttgtcc

SEQ ID NO: 39835 - DNA, 380 bp, Zea Mays
cccgcggattgggaggcgccggtttcatcaaggcaggaggtgtcggctccgtcagtgtctaggggagaaccatcggtgttcaatcctaccccctttcaaccgagtttcggcataagcgccttcaccagcatgtatgttgatctccctttcccctcggggtgcctcgactccgaggaggaggacggtctggagcccggcttggatttctccgggcttcacgaccatgaggccatgctgtagttcctgtacgcatgtgatgaactcctcttcgacggctctgacaactacagtacctacaaggagggttacgacctaactcgagagtgctttcacacggagcacgaggagcatgacgaagggaaccaacttggcatgccttg

SEQ ID NO: 39836 - DNA, 389 bp, Zea Mays
ccggtggaacctaacgttaatggccacaacaacgtgatgttgaattttatgttttcacatgactggcagccggaccctgttttgctgagtcacttggaaaggaaaaggaatgctcagttctataggatctaggctaactattttgccccggctggtaattcggtgacctcggtgcaggttcccaagaaatgggcgccctttttcctatccaacttgctgcatgaagattcttttagttggtcaaaaactttcctgtcttcggatattccttctgctctcatggagccagacactgagacacatccctttgtcatccccagaaagtgccctgatgacaagtttcttgattcggtcctttctgaggaatctgctgacgacgcttctgctcc

SEQ ID NO: 39837 - DNA, 378 bp, Zea Mays
ggatgagtgtgttggcaaggcaggaaatccggtaggagaagctgagctgtgggtcgaaagaccgagtgcaacattgaaggagaatatgttggcagatacgtgcgacgttggagttaagctgccagcagcgtggagaacaacatagctgcgggggggagggagtaatggtgaagcgtgttaagaaccacttgctaccgagtgtagtccaaaggctccttaactgaataataatagaacacagggagacaagagtgtagagaggaactgattctttgttactatatggtgctgttgtccaaggttacatgatatggggatctcctctctatttatagacataaactaggggttcatgcatatgggtcacatgggtcttcc

SEQ ID NO: 39838 - DNA, 360 bp, Zea Mays
tgaggacgcacctgcagacctgcttcagagttccctgatctgggtggcttgaattcgttgatgatgtaattctaggataggaaaggctggacaaaagaagggatctaacctttgaagctctacgcgttctgaagtgccaaagatgtcatcttagagaggggaacaaagtaagtgtggccaggacagatggaagggcattgattaccatggaagcgagtccagcgatgatatgaatccgatggaggcgcccaagctggtgtgcgacggcaccttgaaaagagtcctgcacacaactataaggtcctgactctccactcctgtagaggtgcagtctggttcccgcgcaccgatgcacgtccc

SEQ ID NO: 39839 - DNA, 305 bp, Zea Mays
tatggcaacggaggaaacgatatacaggtggacaagtcggtagaatagtctctgctcatccggccgagggggagcgctactatctttgtgttctcctaaaccacgtgactggcgctgcctcctatgtggatctaaggatagttgatggtgtcaccctaccgacttttcgtgaggcagcagagaaaaggggactgcttgagtcagacaacacactggatgagtgtctcattgaacgtgctcttttctagatgccatcggcgctgcgatgactttttgccacaatactggtgtactgtgagccaagc

SEQ ID NO: 39840 - DNA, 546 bp, Zea Mays
ttttgttagaaaacacttttttagtactgaatgccgctattgttttcccgttgttagaatacaacggtatctataatcgcagaagtaaatgcagtataacattttttcgcggggcatagaggtcgccctaagatgagtaattgcaaacgtgcttgtgttggattaggtaaacgcgaatgtgccgtgccgttttaagttattaccaacttaaaccgaccgctctgttagtagggtatagtggtcaccccgagttaagtaagcgtgagcatgttacaccgccttaagtcattgtcgacttaagtcgattgctccgttagtagggtatagtggtcaccccgagtcaagtaagcgtgagcatgttacaccaccttaagtcattgccgacttaagccgattgctccgttagtagggtatagtggtcaccccgagtcaagtaagcgtgagcatgttacaccgccttaagtcactgccgacttaagtcgattgctccgttagtagggtatagtggtcaccccgagtcaagtaagcgtgagcatgttacaccgc

SEQ ID NO: 39841 - DNA, 348 bp, Zea Mays
gtatgatggggccagtaatatgaagggtcatgtaaatggtttgaaaaaattaataatggaagagtcaccttcagcttattatgtttattgttttgcacatcaacttcaactaacccttgtatctattgcaaaggagaatattgattgttcttggttctttggacaacttgcatatttgttgaatgttcttggaatgtcttgcaaaaagatctctatgcttcgtgtagctcaagctaaatatatgattgaagcattgagtttgggtgaaatagaaactggctaaggtttgaatcaagagatgggcttagcaagaccaggtgatacacgttggggatctcactatagaac

SEQ ID NO: 39842 - DNA, 587 bp, Zea Mays
attaaggcatatgaaaaggaaactaatcttaaccaatccctcctattattaaggcatgcaagagggaaactaatccttatctttctaaacttagccactgattgtggcgcctgccttggctgcacgatctgcagccctcctggcgtcacgacggcgcctgtaagtgcggtcgtacatgacagaataacagtgtcctgcaaagaccttagttgttcttgttgtagacaagctttatctttgttttttgaactagggtgttttcactgtccaggataggaggaccaaacacagaactgcacttgttttggaccacatcttattgggaacatattcgtttggaagatcaggtagtgctcagtaaataactttcgatatttagaatcaagagacacgaatattggttaagatgctaaccatagaatcaaagcaacgtggatgaagtgacgtcaagcatctgacattctatgtgacaaaagagtaacacaaaaggtaaaacgtaagttttatggaacgacgattagacttgttatgttatatggtgcggaatgttagcctacaaaagacgacatgttcaacagataagtgtt

SEQ ID NO: 39843 - DNA, 272 bp, Zea Mays
gtggaatagacagcaaatgagcatttgaattgtacgacatacgagaataatcgaaagaataattctgattaactgttttctttttcgtgaatgattcttcttcgtcgtcgtcccttggtgaagaagaggaggcatcactgtcatagtagatgatcttcttgatgcacctcttcttcttcccgtccttcctcttgttgtttgagcctgagtcggtgggcttgtcaccttttggctcatcaacatagagggtatccttctccttttccttgtcg

SEQ ID NO: 39844 - DNA, 420 bp, Zea Mays
cagccgcgatgaacgacgatgagcaataactcgacccatgcctggtcccccggcttcgctggttggggagtcataatcctcgtgctttatagcgtcgcggcggaatccggccagaggggatcacggagtgggggtcggagtttgtttcgaagctcacgattgttgcggtcgagtttgttgcggctcacggtgctcaggattcatggtgccgcggattccccaagggcaggcgagcgaatcgctccatcccggccgagccgttggggtggttacgccagctggggatttctacggagatcttgtgctcatttggttaagatgacggatactgggcacctaatttgttgccgagaaagcagggggagaaggagggtaagggggcctggcgatgggcggttgtcctgccctgtgggcccaagc

SEQ ID NO: 39845 - DNA, 501 bp, Zea Mays
gtgaagttcgtgttcaaagtttataatttttaggtttcgcctattgacccccctctaggtgactttcaattacccaacttgacccattggaggagtataccttctctccttttgccatgagacaagtaggagtctcgaagtcatcgatgaggttggtgaatattcacggtgttgatgcaaaccgctgaatggcaatacttgccactccctcttcatctgagcttgagctttcttcatcataatcccattcttcaccaatgtgtgcttggccatatttcttcttcttgtactggcccttgctcttctcacctttgttgtacttgtctttcttgtactccataccttcttgatctttcttattgggacagtctgctatgaagtggccagtcttgccacactcataacaggctctcttcttgccttttctttgaaacttgttgcttcctttagcaaaccttttgaacgtcttgatgaacatagctgcttcttcatgaagatcat

SEQ ID NO: 39846 - DNA, 424 bp, Zea Mays
gtgatacaagtgtgtaatggagttagttgttttaggataattattgaaatactcggttcatatgataaacatgtatgcgttcataatttgggaagtaaatgcatggtgattgtggattggagattagtggtttacggttcatatgatttggtcgaagtgcgaatatacacgtaaatacgtatgtttataaaaatgttgtagtgtatgttgtgtctcggattgcgataataatgggctagccgacgtgtatgttgtttagcgggctatgtcgttgctccagttagccgacctgtcagatggtttggttaatcatgtaatagccataaattgcttgttgtagtccaaatacgcatggttatggtcgtgggtaaaattagtggtgctcatgtgatgtctaatttaaaatgcaaattattgtgtgaag

SEQ ID NO: 39847 - DNA, 284 bp, Zea Mays
tgggcggcgagcttctgggcgcggtcaccatggtggagcgagcgccgccagagaaaaaccccaggtacgagaaggtcaaatccatttcaattcctgaactttctgaactagatggctgtgaattgtaactagtagctgaaactgagcctgtattttgtgcttgtgatcctgaaagtatagcttgagttcttgaatttttaggggtcacaggtgattgtggtagtggtgacactgagggtacttcaccacccccagaactctcaccctcctcacctgtaccagaa

SEQ ID NO: 39848 - DNA, 347 bp, Zea Mays
caaggagcatcgacgaatggttgatacggatatgaaggaggaggatacatatatggaaaaagagcttgtaaacttagggaaagagaacgaataggaacatccttccgccgatgatggacatgagaaataccataaaagaagacctaccgcacatcgataggggtatcgagatgttgcggagattgctcgttgaggaagttgatgaacgaatcaaagtttggactccaccttgaatccataacgaaaccgagagtgaaaggctacaaatagagaaggcttgtaaattggagagtaaggggagtgaatgaatccaaatacgctccctctatttctaaggtggactcagg

SEQ ID NO: 39849 - DNA, 386 bp, Zea Mays
gggactaaaaggctttgtcatcgttgttgttctgttttgcagaatttgattccatgtgatcggatgtgaattatcagcttacacaggtttttgagtgttacatgtatacacttttctgagacagagtctacaatcaatcacatagcttgactgggaaatgatcccacttcatcgggtgcttgcaatttgaattcacacatcaagggcctcagcttaacagaattgttttgaggtggcagtagtcctggagatcaattgatcaaattagaaaacattgaattgcattgttttggttcattgccattggaaccaagatagacataacgttacatcaaatacttattttcatgctactggatctatgctaaatatagaggatggttaca

SEQ ID NO: 39850 - DNA, 309 bp, Zea Mays
gtggtttttgctctaaagtcttggaggcattatctttatggcgaggcttgtgacatttacaccgatcataaaagtctcaagtatatttttactcaaaaggagctgaatttgaggcagcgtcggtggctcgaattgattaaagattatgatttgtccgttcattatcacccagggaaggctaatgtagtggctgatgcccttagcaagtccggggttccaaaagtggccttgtcgttgatcgctgatctcgaccgtttgtggatcactttgtgttatgtcggcaccgctagtgaggagactcggatgctt

SEQ ID NO: 39851 - DNA, 294 bp, Zea Mays
accagcttggggacaagctggccatcaaggaagggaagatgttagcgacctggaggatggaagtatttcaaccatgggcgccagaaatacaaaacagagaagaagcaatgaagaagacgttactgggccaagtcagaagggcattcagaggagccaaaggacactacgacccaacaagtgcttcatagggccggaatggcgtaattgagggaggcccatgagaattagggacgctagctgctagtaaatacagagtctggtgagaggaggagggcatcgaggcacagaaccctg

SEQ ID NO: 39852 - DNA, 334 bp, Zea Mays
ctggaggatattgatatattggaagaagaacaattgaatacagtaattcagtcagctaggtaccagcaaaccctaaggcgctatcatcataaggccatacgacctcgatccttcatagtgggagacttggtccttcgccgaattctaacgggggaaggacgacacaaattgttgcctctatgggaagggccattcatggtagcagaagtcactcgtccaggatcatatcgacttactcaaatcgatggcacagaaatagggaattcatggaatatagagcatctcaggaagttttacccctagctagatttcaaaagctatcgggcagcattgt

SEQ ID NO: 39853 - DNA, 295 bp, Zea Mays
ccggacaaccaagtcatgacactttttttcaggcagagcaaggacccatggtttctttggcgttgcacagtagcaccaacctgcaaggtgagtgatgatcggagagcatcatcgaaaagcaacggaagatgacaccaggttttggaagggcagccagcagctttctggccaccaccagaccagacgtatatgaaacaaaagcagccaccaaagggagcaagcaaatcaggtttggtgacaaacaacaccgagcaacagatgaagtctggaattcattgactgatcgtaagaggct

SEQ ID NO: 39854 - DNA, 368 bp, Zea Mays
ttagtctttctctgtggcttcgtttctcagcctgatgacctctgatcgaaggttgctgagagctatagtgcagctctcgtcttctgtgttcttttgcgccctcagggcgttgctaaggattaagccctgcaagaaagaataaaggattagcgtgagaataaaagacttcatttccaagtccataagcttcaaagttcacttctgtaccttcagactattgtatgcgaggctgtccgcgaggtcagccttcgtcatggcgcagaggccagctttgagcttcggaaatcccatacttttggccatctcccagtagatggataacactttgttgtccaggaggcattacaggaaatcatctttgttcgttc

SEQ ID NO: 39855 - DNA, 1102 bp, Zea Mays
tttaagtttccgaatgaataggttataggtgtgcattttgcttctatgtatgcaatttcttgtgttttccacaatgacacatcatttctatcgtaattcactcaggtatattgtcattgatgaagcacattcatacaagggggcatttggctgccatactgcgctcataattcggagattgaagcgtatttgttcaaatggtatgtataacttttttatttgatagttgacctattcatctatcttttgtattaggactaggttctctagttacatgaatttattacttgactcccagaatcctaatcagagcccaaaaattacagtaagttccttacaagttgtaacttctgatgtgtgacttttcagacttgtaaaaatgtaggagctacttatgcagttacacatataatataatctataaagctcttggttttctgtatttgcagtttatggtagttgtcctacattcatattttgtacagcaacctcagcaaatccatgtgagcatgtcatggtaggttattccctctctttagcatagttttgagaagacatggttgtacctagcaaaaagaaacctgctgttcttaatattttttagagtaaaatgcagggtggtccctaaacttgctacaaggtggtatcaaggtctccaaattctgaaaatgcatttcacgtccttgaacttgtcttgttgtgccattgaagtccaaagctctcaaaatgttactttcacgtccttgaatttttcatatcgtgtcatgcaggtccaaaggggtcttagtcaaccctgtgccttgatgtggtaggctgctgtgcatcctcagtggcttaggtcttgaccagtgagtcatgctccatctccgtgctctgcctttctcatcctctctctctatttgtgttgccaagcagacctagcaactatcgcaatcccttacacaccttcattctccatcccctccttaaagtcaacgatgtccctggtagtgattagtgaaggccataagagcgaagctggtgttccacgaagtgtagtgctagaggttgaaatgcgggccccaccatcacgtggcactcactgatcaagaattgagccaag

SEQ ID NO: 39856 - DNA, 576 bp, Zea Mays
ggatttaagtgcaaaagagccatacttgaccctttttggttaagtctgcatttcagtgtgattgactcaactggaagcccttgtaactttcaaattatgggttttttgccctaggtcaccacatcaaaattgtagcccaattataggagaacaactttgcttaagagtgcaagccatgttattgagaaaaatctgcagataattaaggttgaagttgggctgtcagggtgccaatgtctgaattttcagacagacagtgtgatcactgaaactttaagcatgaattcaagcttgaattattgagaatttgatcaagattgctatgacagaattgtagctgaattgtcaggctataattttggtacagagagctagcttagtcaccacacaaaattgggagaaataggcgctccaaagtgctctgtcaggtgttctgatgaggtctcgccatggtacagtaccccaaactgaaacagatcacggttcaccccccctgcccgtcgccggtggcccgtcgccgttgattgccgctcgccgtgattcgtgcgtcgtggccatcggataaacagagctcgg

SEQ ID NO: 39857 - DNA, 546 bp, Zea Mays
ctgcagcggaacgcatcgcgaggcagtcggcccactacaccatcatagggggcttactgtacaggagaggcgcagcaggagtcctcatgaaatgcattcactcggctactggaaaataattgttagaaaaaatccatgctaggcattgtggggtatattcagcattaaggactctagtcgagaaggctttcagatccgatttctactggccaactacgaagagtgatgccgccgagttagtccagaagtgtgaggcatgccaattcctatcatagcaatagcacttacccgtgcagcagctgcagaccattcctataacatggccatttgcatgctgggggttggacatgattggacctttcaaaaaagctcagggaggctatactcatatactagttgccattgacaaattcacaaaatggatagagtacaagccaatcgcttctttgaccttagccaaagcagtggagtttatacaagacataatattcaggtttgggataccaaacaacatcattactgacctgggatccaacttcaccagcg

SEQ ID NO: 39858 - DNA, 842 bp, Zea Mays
cgaaactggtagtggccctggtgagttttaaacacagtcttaaactcctcggaggcgcccatgcgcacctgatgataccccgaagtcatgtccagactggaaaagaattgagtgccagcaagctcatccaaaatctcctcgaccaccggcatcggaaaccgattcttgatggtcatatcattgagcttacggtaatccacacagaaccgccacgtaccatccttcttttgcactaaaaggaccggagaagcaaatgggctcacactgggggtgatcagaccggatttcaacaacgcagcaacttgcttttcaatctctgtcttatgatgaggagaatatttgtagggtcgagcattgaccggaatggatccagggagcaacggaatatgatggtcaaatggtcgagatggaggcaattcagttggtataacaaaaatgtcactgaattcccccaacaacacctgcaattctggatggatctctttgctgttctcctcaatcacctcctccaacaatgcaaacacccagatatcattccctcgcagccatttctccacctgtagagtagaaacttcctccacaacctgatgttgtgcagtattgcctaccaactgaacctccactcctttgtcaacaaaactaataaccttatcatcccaattacaatgcatgggactgtgtctgcacaaccaatcatagcccaaaatagcatcatatgctcccagccccaacaccctcatatcacattgataggtatgcccattggcccaccattccaatgatcgtaccatcgtgtcactatacataatctccccatttgccaccctcactttagctgaagc

SEQ ID NO: 39859 - DNA, 553 bp, Zea Mays
gccgtggactgactggagcagtgccggattcaatgtaaggacttgctccccatgttttcccccttcccaattccatttcgcgcttagtttgcctagcaatcgtgcactgtaggatgaggtgagaactccggccatggcgcagccggctgtgcttgggcgccgccgcacgtggccgatgaagtgggaagatgagtcgtgcgccgtctgatctgaatcgtgaggatgagattggatctagtagtgggcgggtctctggccgttagattaggatcgtgtggatcagggtgcataccagtagggtgatgtggccttctgatctgggccgtaaatcttagagcgggcggttgagttcgcataccggttcggggatgatcgatctgatccggggcgtccagatctaatcctgcggtcgaaatcatccataccccttcgccttggcatttatgctaaagagaccttggcaaacacctgaatcaacccgccgtcccccgtggttgtgctttgagtcttgcggattcctgcgccagtgaccctaccttttctagtatttgac

SEQ ID NO: 39860 - DNA, 332 bp, Zea Mays
caattgcacaaatagtgagctatcaagctctgtccgcgtgaaccgaatgggtggcggacagttgatcgtgttcccggtgattggtgagctcgcagttcaaattggtggttcagcgagcatcgtaggcatgtgagaaagcttaaacgaggaagcaggggacggggactgaccgggaaagggctggcgacgtgagcttggtttcacggtggcggaagcttgaattgggggaaactccgaattcgagcagatgagtggatgattgtggccgattagcggtggttagctagctgactacctcacggagctagacacgggctcaatttataggaggc

SEQ ID NO: 39861 - DNA, 301 bp, Zea Mays
ctctcttccccgctcggactaaagcagcagtaacacttgggggtgggggatgccataaaaaaacataccgttttctgtgtttccatatgatccaggagccaacgatgatgagactatttaggctttcctccactgtccttccaacagctcattgttgcatgccttatctgctcaagttgaacattgattaatctgcagaataggagacgatgtggatccttggtattgtgcatgtttctactgaatccatgcttcctttgtgcacttttactggtaatctattttcattatggaaaaaatg

SEQ ID NO: 39862 - DNA, 417 bp, Zea Mays
caaggttcgtcatcagttgttgggacaatctgaattaacggctgaactagtgaagcaggtggcggatgaaaggacgattctgtctaggagggtggaggagaatgggaaggccttagcgaagatgagattggaagccatggcccgggagatggagaattttggggagaggccagaatcatcagagttggggaaggggcttgatggccaaactcacaggcaacgcagagaaagaggggagtcatcaggaggtgaaaatggaaactatgaatcaggagctggtggaagggagttgcaatcacaccttcccaagtttctgtttccaaagtttggtggggaggatcccgcgctatgggtgatcaggtgtgaggactattttcgtatgtaccaggtgcctaagtgcatgagggttctttcagc

SEQ ID NO: 39863 - DNA, 365 bp, Zea Mays
agcaaagcaggaaaaaaaacaagcacatgcgagcagcaaaagaggcatacattacgcctaaccgcgacacaaccaggggaaaaaactcacggggggattagagggaattgagggggaaattacttcataaaactcataaaactgcactcaaagaaagctggcgtcaaaggcaaagaaaaaaacaactggctacttcaaattgatcgaacgggagaaataaactgaactgaaatagtgaaatgtacttggttagatatctcacatattataacctatattttacaaggaacacaaacagaagtccaagaagagttcagttaatatattcatttgtattttctctatattactcagcaatatgagaa

SEQ ID NO: 39864 - DNA, 424 bp, Zea Mays
gtgagtgtgatcgtggtgatgctcaatgggaccgcgaggacctcgctttgcctcgctggagctgacggtgtggcagagtacacacagagagacagaggggtaaaagaagaccaaattcttgcttgctttatttcttcagtgtttgtcattatatagatgagcttacaatcagaatccctcaatcactaatgccaagtagagaacaacccaaacaaattcctattttaaatgaattgtaattgtcaagctgctaatttctgatggtgctaacttttgggtgtagagaatgcttatattgttggatatccatgcatacctgcttagctatttgtttatatttgactactactacatttgcatgtagtgcttacttgctaactcactatgtattcattaatgtgtaaaagccatttatggaatgcaa

SEQ ID NO: 39865 - DNA, 369 bp, Zea Mays
cacgacgtaaaacctccaagcgcagggtggtgaaaggcggcggccgggttatatcctggtgcccaggaccctgcaaacacgcagctggggaacggatccacgcaggaggcggtgaaatctgttcacgccgcgctatttccatggagaagaagaccggaaggtgagagggggccactgacagcggcagtagtggagttgaagcacgggcccgaggtgttagtggcataggttgccactcagctcgtggattagaggggaatttgggccggtcgcggaccacacgggcgcgaaaaggggaaggccaccttggccacgcgggtgcgtgatattgggccaggaaatattttctgtccgaaaagctgataggct

SEQ ID NO: 39866 - DNA, 365 bp, Zea Mays
cccgatcagaaacggacgcgcctgattaaatccaggtgagctacacatccgcgtttaccgctgaccgtccgatcagatcctacgatcaggatccaaccacccgaaccggtgcacgagatctaatctgaagcgttcaagcgcagatcaacgaccgagagccaactgagcgaatgggtacacctaatctaatccacgttcattccttcatcatccaacggccgaacccccttctcccccaacaccactacacacagcggcggcgtcaccgcgagcagcagcgaagttcaacggagatcgtgattctggccctcccgagcgccatgccccaattcgcatgacccacgcgaaattgatgactccccgag

SEQ ID NO: 39867 - DNA, 500 bp, Zea Mays
gcggggatgaccaaattgaggctggggaagggttcacgggttcaccaggagttatgcacacactttggtttgggcagaataagagccaaagagcaggtcgacggtgagggtggcccgacggcgttcttcagaagcaggcgcgtgttctggtgaaaggcttcggccaaatttcgattggttggcactgagagcaataggaggctaacaacaagcaagaacatgaagcaattgggtaagtactaacccgaggaatgctggccacagagcggggaagacttagacttgtcggtgacagagaaaggggagaattggtgttgtggcggctctggttgaaattggggatggggattgaggctactcggccgtgaaaagctatagcttcaccgtgcagactcaatttgagaggaggggtcagagacagcgtgaatttggggctctgattcaacgctctgtgtgtgatggtcgcaccttcgccgtggaccacatggctatttatagcc

SEQ ID NO: 39868 - DNA, 451 bp, Zea Mays
cggcaaaaagaagcgagtgcttctggctctggcatgaccctgaaggcaccacaggagaccattccgttaactccaccctcaaaggagatggaggagtgcgtgtcaccacacctagctccttcttcccgaacatcatcttcatccacgaaagagtggagggcacacccatttctgacgacgagcccaccgtactaggggaggatccccccaatgtgatgcatgcctacaccaaaacaggcgccgcaatgtacgacgtcaccatgaagccagggaatgagatctagctcatcccgtctctcgagacgaggcctctgaagtaggggaaacccttgatgaaagaacgctttgagaacaccgcaactcccgtcgctatgatcgtcgtcatgcccaagaactcgagtgggaacaagacaagcaggacgcctggctccgacgcgagaacccgcttctc

SEQ ID NO: 39869 - DNA, 667 bp, Zea Mays
attcatttgcagggagaagctagtcttacaaaaataactcatcaatgtgattctcttcagatccaatcaagttcagcaacacgatagattaacgcaattttcaagaaagaatttggtggagatagtcaaatacgtagggtataaaagaacgaacttagtcaaggtagtcaatatgcataaactatttctagaaccatcacattccaaattcctgacatgccgaaggttactgataaaagtaaccaggggaaaatggagatagatagcatccaaggtccgacccagtacctcatgagttcgggcagtagaaacagcagaaatgacagcattacaagtagcacgcaaaatcctgcaaaagctatttagtacagcatgcgatgaagttctttccattctcataaggtagatacatgtaaatacagtctgagctagagtgtgccccttgtgccatgttgcctgggaaatgaatcattaaaatacatggtttagtcaaattgaaaaggttgcacatattacatgcaacaaaggacttaagtacctcacatgagaaaagatgatccatgacatcaatagagcgttgaacatcaagtgtcctgtccaagctaagtgggattggggcaacaccatcttctattgcttcatcaatggagttgtatcgacttctctc

SEQ ID NO: 39870 - DNA, 671 bp, Zea Mays
tcgcgcctggagaggggcgttcacgtttgggcgactcgacagtaggaagaaaggcaactcaacagtaggaagaaaggagaagggagagaactcacatgtgtgtgaggatcggcgacagttctttgggcacgacggcgagatcgacctgcactccggcgcataggctgtgcacagcggtgggggtggggcaatgcaggtgtatgggaggtgatgtggtgtgagggagcagggcatttaagagagtggtttgaaagagaactagcaagcggttgtcgagctccttactatgtggctgatctaagcgggactggaggttacaaggaggaagatggtgggtgggcttcgtcgggcagtcctaagcgtgggacaagaagcttgggaggtttggctgatgggtcggggcgcatgaaatggtcttgcgggtgaatataggtgaggtattcgggcacagaggaggcagggtggttacggctgcatccgagtgagactagcacgtgtaaaaaggataacagtttgaggagatgaagtcgacacgcgagctccgaatgacaacgagaagaacaagtgaggggaaaacggttgcacgcacagcacgtgaggcactacgcgacgagacgaggcaatgtggtaggcgggggtagacgaggtagaccccagcagcacgacgttcg

SEQ ID NO: 39871 - DNA, 456 bp, Zea Mays
aaggggtactgcataataaactttctccccctttttggcaacaagaaccaaaaagagagagagagaagcgccaatccaatgatcaccagtgaggaggaggatgatgaggagcgaagaggtggtgcgccaggtcagaggcaaagtgttcctctctagactgggccggaggaggagcactgccagacgggtcctggggcggagggtaagaggatgattggcccggatccccgtgatacggaggcgggacaaactgctccggatcatcaaaataagtttcttcttcttcgacgtcatcagctgttgaaaaaggcaccccatatgcctgctggtaccactcgttgacatctggaggaggagggtggagaggtacatcaggagaacggggggcgaagggagtacccaaagcggaagcttgatgacgtaggttgtcgtcggtctcccgctgacgtcgagcca

SEQ ID NO: 39872 - DNA, 283 bp, Zea Mays
gtttgattgaaatataccttcagatacagagagaagttcgacgaaccaaatgatggctggttgaaatgcattgaggctactagcaacgaattgcttgggacatataccagggacaaagatgatgccttgtcctcagcctttgggggtcggggcaagaaaagattgaacagggtttttgatgcaattggcttcatatatcctgattactgctaccccttgagaaggcaaggaaaaaagaggaaaaatgccgcttcggccaccactgctgtgccgaagggcaaga

SEQ ID NO: 39873 - DNA, 422 bp, Zea Mays
cttcagccgctcacagcagtgtaggacatgtgtgcagataaatttgcggtcagcccaaacaaacgttgcattccggaagctgttcgccctccctctggaagagttcctcatcgacgatttcacctgccatctcaaacggaagatgccgcttcaggttgatggttcgtttggctcctgccggtgtccaaccccccgttgtgttggcactaaaaacctgtcccgtttcatgtgatgcagggccgcctctttttctccccgagaatagttgggttttattccaacatatttgggcacaagaccaagttcttctttctgtgggaggacgtcgacgacatccaggtcatccctgctacactgtccatcggtagcccgtctctgatgatcatccttcggaaggatagagggttggaggcaaagcatgg

SEQ ID NO: 39874 - DNA, 324 bp, Zea Mays
gtcaaatctggttccaaggtaacatccgccacatcgatggtttgatcaggaacccgaaggcacttcttcatttgagatacatggaacacattatgcaatgcagatagtgtttctggtagctaaagtcggtatgccactggtccacattgttccagaatgggaaatgggccaatttatcggggtgctagcttcccttttaccccgaaatggttcacacccttcattggtgatactttcagatacacataatctttggcttgaaagaacaagggtcggcgtcgtttgtttgcataacttttctgccgagcttgagcttctttcaag

SEQ ID NO: 39875 - DNA, 400 bp, Zea Mays
catacgagagacgggatgaggcccagcaagggaactgtgcaaaactggcacacaaacacgttgggtcccccggccggcccgggcttgcggaatgattccatgcggtagcggctaactgcttccgccatcgacatgtccggctgtttcccctttcaaattccaagctaagaatttcgactgttaaccgcgcacaggacgccacgtctgaaggtgatgcctcagggagtcagggtttctaggcttctagcttcctgctgtgctaccccggccggtttacgtggaggccagacgcggtgtgggtgggtgacgttcagacggtaccctctctcttattttgtattttccaagttaaatgcatcagtaacccacaaccttgtaaaaatatatgccatctgtctag

SEQ ID NO: 39876 - DNA, 891 bp, Zea Mays
ccttaatcttgtcaatcttcaattctgatgatgcctagctgcctccttagctctgcaaaacggatccttccgagtggttttgtcagtatatcggccagctgttcttcagaactcacatgactgatttccagtctcccatcgctaacacactccctgatgtagtgatatcttgtatcaattttcttactcctctcatgataaactggatttttactcagctcttgagcagaactgttgtcaattcggaggttgaatttcttcacttcagtgcccaacagatcccctataagtctgctcagccacactccctgacaggctgtcgtggctgctgctatatattctgattcacaagaggacaatgatactaccctctgcttttgagatgaccaggtgataatgtttttgcctagaaagaaaacaacacctgtggtgctctttctcttctcaagatccccagcatgatcactatctgaaaaacctagaagatcattttcagctcccttgacatacttacagccatactggaatgtgccagctacaaatctgataatcgtttgatagcactccaatgttctgcatttggattctccataaacctgctcaccattcccactgaaaaagcaagatcaggccttgtattaactagatatctcagactgcccacaatacttctgaacttggtagcatcaatggtttgatcaggtttccccggcaacaacttcatatgttgctccataggtgtgtctgcagggttgcatcccttcattccacaaatctcaagtatcttcttagcataagcactctggcagattttgatttctcctggtttttgctttacctcaataccaagataataactcaggagtcccagatcattcatactgaaacttt

SEQ ID NO: 39877 - DNA, 319 bp, Zea Mays
tggagactaaatcgggtgatggatgccctggtcttcgagtaccctgactatgaaagacttgtcgaagaagctaggggattgaaaagaaaaagggtagtaagtgtattgacaaggcaagcacagaggtctgttgaagcatgcaagaagaaaaggttgacaaagaacccggagctgacactagagccttcggcagcaaagaaaagaaaggttatatcatctaaccacggggaagaagagagaccttctccaccaaagcatttagaaatgatcccttcggtagcttccattggcatgacatgaattctagaggtaattactg

SEQ ID NO: 39878 - DNA, 636 bp, Zea Mays
ggcggtccggccataccgctaccctgcagcgcacaaagatgagttggagaggcagtgccacgccatgatcgctcaaggcatcgtcaggcgcagcgactccgcgttctcctccccggtcctcctcgtcaagaagcaggatggatcgtggcggttctgcgtcgattaccgcgaactgaacgccatcacggtgaaggatgcgtaccccatccctgtcgtcgacgagctactcgatgagctccatggtgcccggttctttaccaagctcgatttacgctccgggtaccatcaagtgcgcatgaggaccgaggacatccacaagacggccttccgcactcacgatggcctctacgagttcttagtgatgccattcggcctgtgcaatgcctcggcaacattccaggccctaatgaacgatgtactacgcccttgccttcgtcgctttgtactcgttttctttgacgatatattgatctacagcaagtcatgggcggaccacctccgacacctccgcgcggtcctcagtgagctacgccgccatgtcctcttcgtcaagcgctccaagtgtgcgttcggggagccttcggtcgcctaccttggacacacaatttcggcagacggtgtggctatggatgcgac

SEQ ID NO: 39879 - DNA, 572 bp, Zea Mays
gtggatgtgaaaagatcggaggggggagtggatcgagccggcctcaccgtacccactcgcccgacgacgtggtcgtgcgaccgtcatcgaggttgtcgccgttcacttcggtcgcgccacgccataggtcgttttaccacgtcgtcgcgagtcgtggagagtaaccagtgacagtcgtaagcctttgcccaatgagcgccacgacagatgaactccggtgactcattctcttatcaccgcaaactcttctccgtccaaattcgtcgtactcctggtcgccctctataaattgagtgtttggcttgctctgctaacttgttatgaagctagtgcaccagtcctcacccccgattagcgaccgtagcccgagaattccagttttcccctaattcggtcagtcgcgccgccgtaagatacctcgccctggctagccatctacaagtccgttcaaccccttctgtgccgttttttagcatccttgactgttaacgttgctcatcggcccaaccgattgagcgctaccgcgtttgggcatcgagaacatcatctcgccgccgtggaacacctccgag

SEQ ID NO: 39880 - DNA, 522 bp, Zea Mays
gggtgattcacggcggcgcagatgaccaatttgggggaaaacccaaattctacggctatagtggctaatcggagctgagagttagtgtctcgggttcgtgataacttggcaaagcagagtggggcatcaatttataggagctttaggcggcggctccgaatttgggagaagagtggagcttatcttcctggtgaggcaatcaccaaggctcaccgtggagcgcatgcgttcacctagcgactgccactatctcggggatgccacgatcacggcaatgtggtgaatcaagcgactacgtgtcccttgctgcaatcacgacgagcaccgatggcgatattttaccgaccacgcggccaagtgggtacggcggtgactcagcttcggctaagaccttcttccccgagatctttttaaccctcacggttatctactcttcatgggcacgaatcgtgacatcggcgtgaatcgcagtgcgaaggtcactggcgacgaggtacctgaactcggcgatctgatccaaac

SEQ ID NO: 39881 - DNA, 373 bp, Zea Mays
tcatatgcccttgctagtcgagaagcctgctgcagattctgtgggttcatcagctcgacatcgattttaatccgctctggcaatcccgtcgtggagagctgcacttgctggtcaggtgccaatggagaggtgtggcacaacagtgacgagaagcgctcttggtaatcatccacggttgtccggaaacaaagatgggacagtttgcctaatgggttggtgtgtagtggcggaccaaagcgctcattgcagagctctttgaattgaggccatgtcaccgttgcatagtcctattccaccatgaaataccaggtatgtgctgctcccttgaggtgataggaggcgagccacactttgtcctcctcaatcgtgcgtt

SEQ ID NO: 39882 - DNA, 517 bp, Zea Mays
gttggtatctaattaattattatccgactcggcctaatatctctgtgtccgaaccgaactcaaaacccgcatcgacagtgatttttaaaatgtcacgattcaccttctacaacaaaaaaacaaaaatataatgtcatatttagaatgcgcttgaagttcataatccaggttgagcgcgttatcagactaaattacgtgcgagggtaataattagtgtttagttaattagcagttgaaaatatcgataatctgcgcttactcgaacaccatgaaataaaatgaaaataattagtgcagccggtttaggattttggaccaagttcactctagcccgtttggcccatttaaaacccttgccctagcacttgtctataaatagaagtgcccctctcttgacttggagcatttttcattcccacccctagccgccactcttttgttttctcctagtcgtctcttccgtggagcttcttcttccctgtgacagccaccagcgactcctcctctacccttcttc

SEQ ID NO: 39883 - DNA, 384 bp, Zea Mays
cggagtgggtccagctggtctactgaagttgggtcccttgggtggaaacccaaatgatcgagtcttctggtgccggtcctgctgctgtgcccagagaacctggaacttccttttgagatgtcctttttcttcctccttagccctttcaacttgcatgtccttgttggaaaggtgagagaagttgagaaagtcttggctagccagaattgtcttgagttctggcctgagtcccttcaggaaacgagccatcttcttgctctcggtattgacatcatctggcgcgtagcgggctaactccgtgaacttgtgcacatattcgctgacagatcttccgtcttgagtcaattctcggaactcgtcctccttaagctgtaccagtccttg

SEQ ID NO: 39884 - DNA, 491 bp, Zea Mays
ccgagtccgggctcaacctcgatatcagcaacggaatggcacccaacgtcaccgtatactgcagagctgacatattacttagggactttttgccatactcagtattgtgccaaccactacggcatgtgcaaccccttttcaagggggctcgggtacgtaatcgagtcctcgtccctggcctcaactctcaacggaaatcaagcgggcacaagtcaatagcaagtataaggcccatgctccgagccatcccgtctacgaggggtcggctacgcctcctcgccgtacgtggacaactctagtactacagacatcccttattgaggctataaataggacagcctacgacttcagggggcagacaaacacttcacgggttatcctccaccactatatcggcacttgcctcaatcaaccccaggaacttaagatcctcccttctcccactcagcttgtactccctactacagacacttaggtgcaagtaatataag

SEQ ID NO: 39885 - DNA, 726 bp, Zea Mays
ttcgcgtgcacgtctcctgtcctgcctggatcttttctctctcgagaagtttccagcagtcaggtcaggatggtgcggatgaagaatgtcacaccgtcaggaggggagatgacgaggaccctcctcgccccttcagacaggtcaaggggaagatagtataccttgagcagcaagagggcaggaagaagagatgtatggacagagccgcacgtgcagcacttgcaatggcagcggcggcagattaggctgagcggggaggccaactccaattttcttctaatcagatagcctatcgagttcgtcgcctcgtgtctcggcctcgctcgactgctccccccactccttccgccacagtctccactccacctcccacttcgtcagctcctgtcgctcccgagccatccaccacacccgctatgtccaccaccttcgccactataggttccactgctcccgctcccgcttccgctctgcctattcctccacctcgcttcagggagcgtgatgagactgaggtgagaccacttactgctgatccgtgtctgcttgatcttcagcgagccactgctgctcgggtacgtcggttcagacacatacccgtggattcttggttgccagcccagagggacctagcagctgcgccgctcttcaacaccaggactcaggagtccttctttagggcacagttgtcacctcatattgctttgagggcgcatcggcttttgg

SEQ ID NO: 39886 - DNA, 822 bp, Zea Mays
ctcgtcagttctcatccaagagatctttctgaccttagaccatgatgatttatctcaacgagcgaaggtaagaaactcagttctgagaaaacaaaatttgtttttattacgactctttagcaaccctccatatgaactcagaactatttgggcatagtggcatacataaatttgcaataggctataatacttactttgttatgtataaacatactgttttccacccctcacaggctgctcggattttggttgtccttatatgcaaacatgaatttgatgcacgctatcaaaaaagcgaagacaaattgtacattgctcagctgtattttcctcttatagggcaggtatgtgccttatacacttcatatctagctatcatgtaatgatatcagtaattagcatgtcattctctttgtttgaaaaaaatgttgttccctcacatgatttagtatatgcttcctccgatcacaaatataagtccatctaggtttgcttgagtcaaacttcttcaactttgatcatcgatatataaattttatatatattggtaacataaggttgatattgttggatttattctgagaagtactttcatatgcaattttttttgtaaatccatacaaattttaagatattaattgttagtcttaattcataaatgaatttgacttaggacaaacttagatggacttatatttgtgtcggaggaagtgaatttttttcattacatatttctttgcttatgagaaatcattctttgttttagatccttgatgagatgcctgttttctataatctgaatgccattgaaaagcgtgaagt

SEQ ID NO: 39887 - DNA, 462 bp, Zea Mays
tatcgatcgttcttggcttaatgtacgtcaaccctctccacaaaattttggaggttccagtacatcgcccttgcctcctgttcgttcagctctaggatggattagagcatcatggctgttgtggccatgttctgcccaagattgaggaaatattgtgcgtcgttgctgctctcggcgagctggtcgcatacctttctcgtctagggcctttcagactcgaggtgccttcgctcgacatcaccatagatgcagtcgagtttttgcacgagggcgtcgagctcttcctgctaatggcggtggaatgcctcgcgagcgaggatgcgtgcctggcgttgatgctagtactcctgcttgattggaggcctccttgtcccccacccccattgtcattttgcgacggtgttgccacgaagcaggccctttcatgtgcctcgtcgacatcaaagttagcctcggtcaagc

SEQ ID NO: 39888 - DNA, 435 bp, Zea Mays
cccaaattaggttcttaatagagtagtatatatgagatgcactgttatggtatcttctggtcgaacattgataatatgctgtagtttgaagtaatgctcttgtgctcctttcaagtgtacgcggtctatatctcctggcatcattttaccgatacctgaatgcacattatatattttatcaatcatcattattctagtattggttttttgaggttatagtcaactttagctatggcaagctccttgtttcctgcattcgccatttaccctgctggcccactatttatgttgcagaagattttcacctcacaatttataaagggtctaaatagtacacattaatttttaaggcaccagtcctgcaacctgaatttatgtcatgttcccctattactttggatacgttaaagttgtcaagtgggatggtgggggaga

SEQ ID NO: 39889 - DNA, 296 bp, Zea Mays
gcccgagcgattgcgtagagcacataacggtggcgtcgaatcttattgtttcagtgcgcacatagcttcacgacggctactacttctgctatcgaatcgattactaatggcgggagcgcagggtcttcatttatctactggcgtcgtgtctgttaccgagaacacaggggagaagataggccccgaccggtagccatcaccggagggtgcatagagaaatcgcgatttcagcaacggattggaggggataagtctgacatcatggccccacatgtccgtgagagtaggaccagagc

SEQ ID NO: 39890 - DNA, 337 bp, Zea Mays
tagaatatgacttggcctatgaaccattgaaatctatgaaaggccaggtcatagcaaattttattgtagaacatcggattgatgatactcataaactaggcgtatcatacctcactgttacaacctagactttgtatttcgatggatcggtttgcaatgaaggacaagaaattggcatcatgcttgtttcaccaagcaacgcctcattcgacttctagccgattaaaaacctattttactaacaatcaagccgaatatgaggcccttttatttggcttggagcttctaaactgtatgggagtaaaacatgtgaaggcatttggtgattctcagctgg

SEQ ID NO: 39891 - DNA, 324 bp, Zea Mays
ggctttctgtgattcatccgatccacgcaccgcggccggacctgttctgccaagtgggccccccaacggcggtacacaccctcccacgcaaaagcaaaaagacacacctcagtgtagcgctagagctggaggagttagagtgaacaatggatggtccacaacaacacttataagctacgttccatctctctcagtggacgatatggtactaatcaaacaaatcctataccaacgcctatgtcctatcgttcgtgcagcccagcaattggacgtgcggcccaactgcccagcatgcagcccagcgcgcctcctcttcaacgtgcg

SEQ ID NO: 39892 - DNA, 349 bp, Zea Mays
gcaacaactgaataacaatgtccagttgaggcttattttcaagagagggcgaggatctctgctacgaacagtggcacacgtgtcagcaaagcgacgcctcacggtacacgtggaatgcgaacgtggaagcagtggttgaagttttaagaaaaagagatgggtcctaatgttgatgctatgaaggatgtgactaatgcatactaaaaagtatttgtagggctataaatatgcaacatgtcaacctctggcacgtgcaatgaacttatctctactacatattaagccaatagtgttgacgaggatctagcgacggttccggcttgccgaggatgctggaatccacccccgc

SEQ ID NO: 39893 - DNA, 296 bp, Zea Mays
caaacctgttatccgctctggccccaaaaatgcttaacatgtaatttttctgtacctcatctttgctgagtttatccgtcatgagccaattaagggttcaccctcccatgggatgacccctcgcatcgagccaaagggttcagtgaggcggaagtaggcgaaaggggtcagacgaatcggacgaaacccactcgagtggattttgcgtatccgtcagactggccgcaccgtcagctttgcatacgcctcattgactacgtcagttggcggtgtgcgacacaaatagtatcggtctc

SEQ ID NO: 39894 - DNA, 317 bp, Zea Mays
atagcgtttcccgctaatctcatagtaatgggtactcagggaatagatgtcatcctagggataaattggctagataagtatcaggcagttatcagttgtgataagaggacaaccaagttgatgtccccactaggagaggaagtggtgaccgagttagtcctgcctaagcagaagaaaggaagttgttatcagatggctgttgatagcagtgaatcagacccactagagatcatcaaggttgtgttcgagttcccagatgtgtttccaaaggacttaccaggtatgccaccagagcggaaagttgagtttgctataaa

SEQ ID NO: 39895 - DNA, 396 bp, Zea Mays
tgtagcctcatcttctgaatgctggttccactgtatcttataaaatttgagagttcttcttcgggtaattctgtccttttgatccaagactcgaataggatactctgaatatgtcaagtctggctctaaggaaacatctgttacttcaatggttcgatcaggaatccgaagacacttcttcaattgagacacgtggaacacattatgtactacaaacaaggcttcaggtagctgaagtcgatatgccactggtccacattgctccagtacaagaaaaggaccaatgtaccggggtgctagcttcccttttaccccgaaacgtgttacccccttcgttggtgaaaccttcaggtagacataatctccaaccagaaagtacaagggcatacgtcgttt

SEQ ID NO: 39896 - DNA, 483 bp, Zea Mays
gccagagttgcacttgggcagcaaaggtagtgtcagtatttcacaacatgggtgcttcactgttcttctttgcggctgtgcctagggtccagtttaatactttaatgtcatgtagaggtattgctgatttaagtcttaggataaccacagttggtgaaggaatcaaaccaagaccagtgtggccattgaaagagacctcccaaccaaagtgaggtttggtcttgtacattccaacgccaatgacaagtacgaatacagaattctccttactgagctggacaaaatgtcacgtagaggtttgttctttattgtgctcttgggcaatgggggcagtagtggaacgcctgacaatcatagctcgattctcttttggcatactgttcgggtggatcatacaatatgttcaaggaagaaacagacatgctggtttcattgactaatgggtgatgctagcaggtgaccatttatgatcagtgccaagcc

SEQ ID NO: 39897 - DNA, 479 bp, Zea Mays
gtggtcgcacctcggtctcatctcgctcccggaagcgggcaggtgggatgggtggaccggaaaagggagcgggaggaggagcagtggaagcaggggtggtggaggtggtaggtatggctaaggtggtggatggcgtaggagtgactggagcgggcgaagtgggaggtggagtggtagcaatggcaggagtggtagcagtggcaggagtagtaggtgcggaggagcaaggccgagaggcgagtcgacgaactcggtaagcaatctgatctaatgatatctgcagctgaccacctctctctgcctgctcagtggctgctgctgctagagctgctcgggttgctctatccaaacgctgcttcttgcggccttcctgctgctctaagtagacagtcttccccttgacctgcctgaagggacgaggagggtcctcatcgtctcctccccctggcgccgacacattcttcatgcgcaccatcctg

SEQ ID NO: 39898 - DNA, 686 bp, Zea Mays
tttgtacaacagcgtgcaacttgtcaaaaggcaaagagtgaaagaactcatccagctgggttattacaacctttgcctgtaccacagggtgtgtgggaagatgtgactatggatttcattgaaggtttgcctaagtcggatgggtttgatacaatcttagtggtggttgacagattttcgaaatatagccatttcttccctttgaaacatccttttactgcgaaaggtgttgctcaagtctttctggacagtgtggttaagttacatggagggcccaagtcgctggtatctgacagggataaggtgtttactagcagtttttggaagaatttgtttcagctgatggaggtcaagctgctgatgtctacagcctatcgcccacagactgatggccaaagtgagcgtgtcaaccaatgtctggagatgtatctcaggtgtgctgtcaattctcaacccaccaaatggaagaattggttggctctagcggagtattggtacaatactactcatcatgctgttttgggttgtacaccattcagggtgttatatgggtatgatgctcctctgttagcccttcctagactcatcaatattgaggacccagatgtcactaagtgggtcaaggaaaggaatgctttttctgccatgttgaaggaacagttggctagagcacagctgcgtatgaa

SEQ ID NO: 39899 - DNA, 356 bp, Zea Mays
aagatagaaataaaaaggcaagtgatagagttattaactgcaggactgatagtgcccagtgccagtccatttgcatcccccgtattactagttcagaagaaagatggcagctagaggttttgcatcgattatagaaggttgaactccatgaccatcaagaaccgatttcccatgcccttggtggatgagatcctggatgagttggcaggaactcagtttttcataagtctagacatgactgcggggtatcatcagattaggatggcagaggaggatgagggtaaaactacgttcaaaactcatcatggccattaccaattccgagttatgccttttggactgacaaatgcaccaac

SEQ ID NO: 39900 - DNA, 433 bp, Zea Mays
aaagaggaaagtggaattaaagggattgcccaactaaataactgactttattaataactacaccaagctgcaagggatacccacaccttgatgacaatcattacaaagatccaacttcattacaagttcatcacgacaagcatcaagacatatgacaagcaaactaactctaactaagactaactgagactaagacactgaattaagcattattatagactctgactctgtcgatctatggatccaaatctatctgggtcttgtagtcagggtaccataatcaaagcgaccacgtggcggctaacgataagggtgttgaatcccaacaggggcgggagaaccaccatccagatagtggtgcactgcgcgctcagcacgcaattctgcaacctccgcccgaaccttgcccaactcatcaagggcgtggtccagc

SEQ ID NO: 39901 - DNA, 521 bp, Zea Mays
atcatttcgaaggttgaaccgatgtaaggtgtgatgccctcgctgtacatatgtaatagcttgtatgatgaggctgtgcaccttcgcacattcggctatgctcataaaggcgttgcgcacttggtctagtgtgtttattatgtcggtccggcgcgcctgtagtcggtctttgcgcggacagtttggtgtagggtttagcacgggtagtcttttgaggaagacttcgattcttcgcacttgttgtgcttagtccggctgcacccttaggcgacttttgcacgaatagtctttttgaggaagacttcaattttttgcacttgttgtgctagtccagctgcacccttaggcgacttttgcatggatagtctttttgaggaagacttcgattcttcgcacttgttgtgcttagtccggctgcacccttaggcgacttttgcacggatagtctttttgaggaagacttcgatttttcgcacttgttgtgctagtccggctgcacccttaggcgacttttgcgcgga

SEQ ID NO: 39902 - DNA, 318 bp, Zea Mays
gacaaatctaatgaaaactaggttttgatctatttttctctcgacgcttcactgctcagtccactcttcacctgagccatttgattatcttccctagcgcaagctcactcgtggctcactcgcttcttcgatcatcgacagaccagtaagtcggtaacctaacccgccgttgtagcgcaccttgccttctcatcactcatcagctcgtcgactcatcgggatcctgcacacaacgttgatattttgcctcctagtctgcaccagcatatgggcaagctattagtgggaccatggcgtcacctgtccctcgctaactca

SEQ ID NO: 39903 - DNA, 662 bp, Zea Mays
agccaacatatccagcatggcacttatctctgcatcacttggattcaaaggtacctcgaaatgaacctacctctcgtcgtcagggatttcaccaagtgaggcgaccaaagcactaacctcttcgggagaggatcgcactctaaggcccaaaccgctatcaccagcaggaggatttgacacaaaactggtaaaagccttggaaggaggcagattccaggctgagtatgcaataggagcaccgatgtttgacaccttgcctctgagtatcatctcgagccggctgaccaaacccacagcaggaattcttctgttggtaacccgggtcgaatcagcgaggcctcgatacagataagccgggtacgctctgtcttttagtggctgaatattcttgaaaatgaaattagcgaccacagcttctgtagtcagacccctctctttcaacaatccaacctcagcaagtagagcccctgcctcagccacctccaggtctgtgggggattcggtccagctcggagtgcgaacatctggctatctccctgactgtggggcgagggaattcccatgattatccacgataaaccattccaggcgccatcctttgatgctgtccttgagtgggatgtcgaggtagtcggtcttcctcccatggcgcatctccaaac

SEQ ID NO: 39904 - DNA, 770 bp, Zea Mays
ggaatgaagcccttgaaaaatacaaaatactgctctattaagtggataggctgaaaaccagcgaagccaagcttaatgcacaagccaaagctcacaaagccgaggttgaagatttaaagaaaaagcttaccgaaatgaatgaaaatttcagagttgcgaaggctaagcaagaaataagtgaaatggaaagagtcagggtgcagaagaacattgaagaacttcaggattccaaggaaaatgctacgaagtatacatggaatgcgcaaagaaactaaaagatagctttggaaaggtgggagcttattcttcggagcagaaatttattcgtggtgatctcgaaggggttatccagtggataggcgaagaggctgaagcttttgatgagatacttagcgatcatggagatttttgttcttttgccgttgcccgagggccacgacaattttagaaaaagctaggtgtgaacatgttaaggtcgtagcacaggcagaatctattctcttagttgacgacactagggacccttcggctgaggcctctacattgggcgataaattctactccgatgtgtggatgaagggtggtcgtgagatggctgatgaagccattaaaaagaatgagaaagaatctcacaacgcccaagaggaggctaagcgagctgaagaagctgctgaacgcgccatgattataggtatttttatttaaaaccttttgcttcgttgttcgtttctagcttcgaaatttaccatcatacactttattacagtcga

SEQ ID NO: 39905 - DNA, 306 bp, Zea Mays
ataaaagtcgtgcgccgttatttccccttcttcccatccgcacagtaaggagagccgccataaccatccatcgtcgtcgttcccgcttagcaatcgaggtgcttcgagttgtactccgctgcgggtactgaacctccccgggaccttctcgggtgtgggcgcgccgtcctcgggcgcggtggtgaccagggatcccggaaattcatcaccgtcgagtccgcgccaccggtcggagctggaaggccatctctagcgctccgcttgccgaacttcttctcgtatgtatgtgactgcgcctcctccttc

SEQ ID NO: 39906 - DNA, 425 bp, Zea Mays
ccaggggctaaactataaaacttccccgactcaatgagcgcccgggtggatggtgtatttattcaccgaaacccgaggggctctttagaaattgtgatggatgaaaggggttcaggctgcactgcatcgcacgatcaccaatggacgacccagattaatccggtcataccacgaagcagtacgcgccaggggccataacatttgagatccacggcatagattttaattaactacaatctactcacgtccatccgatcggaatctaacggtgcatgatcaattgaccgaaacgctactgaagttatgatcctaaccgctgatcactcatccaatggccaaagttttttccccaaccctgaccagcggcggtgccatcgccggcgaacatgcgctgaggcatccaagctacaaacttctaaccagac

SEQ ID NO: 39907 - DNA, 358 bp, Zea Mays
aaagtatcttgtaatactcttgtgtcatgtacggatcctggccatcctgtgacaacaaatgtgaacctcatatcgaagtcacaaacggccattacattctgcgatgcgtaaccgtgtcggccaatatatttcgcttgctccgaggccgggactgccgctagaaagtgactaccatcaattgcacctatgcaatccttgaagtgtggccaaaacctcgcctctcgcaaacgaggatgaatctcgctgaaatttgggtcttttggcttgattatgtcagatgacatcttatacagtgcattaaggacttcactatacttgcgactaattgtttccaaggagtgaccaaacttattcctta

SEQ ID NO: 39908 - DNA, 974 bp, Zea Mays
ctattcctacgtttcactgacagttacaaaaacacccctctaattctaattcttaacaacgtcaggtccacgacgtggagcggtggagcagtagctccgacgagctcgctctggccagaatacgccacgaccagtgctctaaattggtttactcctaattcaacaccgaagaagtgcttcccctcgatcaattgcactagcggagccctaaatcgctctgtccacggaggtagtgcaaaccatgggtgagcacgggtgttcccgacaatctagcacgttctagtttaattgaatgggtcaaggaacatcagtggtatgtaagagtgctgaaacaagagagtagagggcaagaccggacctgaattgcactgaccacggtgagagcttgttcacggtggcggaaaacagatttgggggaacggggcaattcgtgggctctggtgagcaattggatgcacgagcgggtggattggacgctagaatacctaacagagtcgagggtgtgctcaatttatatggctcttgagcggtggccggtgaatttgaactcgcgtggtggcggtcggggaagaggaggtccactggcgcacgcgattggtggccattaccgtggcaacctcaccggcgatcactggatgggctaacacgagtcacggcggtgtggttaaagtaccgaggcacgtggcgcaaggctgtgaggtgtctaactccagcgaggggagatccgaagcgaccatgagctaagcggacacggcggtcggaatgaacagtggccagagttcatccactggtgatatttcttactccctctgtgttatccaactgcaccgagcaagaatcactgtggtggcctaaatccacgcgcggggatcgccggtggtgagtttactgagctggcgatctgatctggttagtataccatcacacagctcctttagtcgttctgataaagcatgtttggggttgatttgctc

SEQ ID NO: 39909 - DNA, 389 bp, Zea Mays
tgccttgcattaaatcctacgcgctcgccccgcatcggacggtcctaacaagccaaggtcgaaccgttacccggcttctaatcctagccatccgtctccgcatcaacggcccaggtgtctcccccaatacccttgtcgagctacggtggcgccgcccagggcacacggcggaccatcgccggagcacagcgcgcgcccgatttgaggccccgtaaccaaattccctgcttctactctatccccatgagttagcgaatgcaagggcagcgttaataccttaattcgatgtgctgaacgccttggccacggcagcgagcacggtcacggcggcactccgacgtcgttgacgaattcgttggacgccagcccccaattccccgcagagagct

SEQ ID NO: 39910 - DNA, 357 bp, Zea Mays
taccgtctccatggcatgcctgaatccattgtgtctgatagggatcgaatatttaccagtgcgttatggaaggagctgtttcagttgtcaggtacatgcctccatatgagctcttcataccacccccaaacggatggacaaactgagcgggtaaatcagtgtgtggagacatatttgcgctgttttgttcaatcttgtccctccaaatggtcttcatggcttccaatggctgagtattggtataattgctgcttccatacttctctgggtcggtctcctttcgaagtattgtatggccattctcctcggcactttggtctgtcagttgatgattcggtgaaccatgctgatcttaag

SEQ ID NO: 39911 - DNA, 498 bp, Zea Mays
atctgggagatccgcaggagcatatggaaagtagtggctaggaaggaaaataggagaatggaaagtagaaggaaggaaaggaggaagtgattagtgttaccatgtttaagcttgcctaaaataaaggagcgattggctccaggacagcaagccgatggctatatatgcggcacagggagacaggaataaaggcaacaaagaagttatctcttctccacctctctctaccaactaagcctacggctgtgggggataaccacgccagagaagacgacgaaccgcggctacaaccttcgtagccgagggccccctgctctagacgaccaggcccttgacaacctggtatcacgagtcaggcgatcttcgtcctctcgatcccacacctccgatcagtccctcgacgtcacccaaccaccacctagccctccaccctcaccatcgtcggcctcctccattatgagcaccaaaaccatcgacgatctggctgcgatgatcgag

SEQ ID NO: 39912 - DNA, 287 bp, Zea Mays
cttgagcaagaattgagtcccaagtcgatcaaatctcactatcagtaaaaattgaggctataaggtgtctgacaacagtacttttggtccttttaattccaatttttattcagcatcagtgcttagtcacttaatcaaatttgttctcctttcatagctctacaggtttgatgtgttgaccctaggcaaattcctcatgaactgagagaggtagggttccaaagttgctccaaatgcattgaatttctgacttttagcatatggagttcaaaaggtaccttttgcaa

SEQ ID NO: 39913 - DNA, 369 bp, Zea Mays
caccggtccaagcaacaaaaactcttacaaaatgctgctccaactagttggcaccacaacatcttatagttagaatcaagacatactaggactagcagtgtagttagcatcttcccttgcctgtgttttggctccgcccctgaaaacaactatcatgtatgaaatattatgccatgaaagatgagtatacaatgcgttaacatgtacaaactggtctggttaggctggatcctgtgcaactggtccttatcgactgccatgtcatatcaatcatactaccaaccacgctatcaaccgtcatcagcttttatctaccacatccctcctatgcctagtctatatcatcaccctacagtcgccttagcacca

SEQ ID NO: 39914 - DNA, 291 bp, Zea Mays
tggccttcggaggccggaagaagaagaggctgaatagagttttcgatgctattgggtttatgtaccctgattaccgctacccgtcgcgggggcagaagagaaagagtgcaacttccgagaaggatgctgctccagttgctccaagcgagccctcgccgaagaggaaaaaggtgaaggtccttactcaccggccgcgatatattgaaccggccgaagtgcccgaatttggcggcgagacctcttcggctactaaagccgaagaatctgccctcacacagaggaatgaagaac

SEQ ID NO: 39915 - DNA, 329 bp, Zea Mays
cccagtaaatgccacgttatgcgactccggtgactcacccctctctccggccacgagccttctccttcaaaattcggagccaccgccctcggaccctataaattgagggtgccactagctttgttaggttgtcatgaagcagaacacccgccctgcctccaattagccaccgtagcgccctaatttctttcttcccccaattcggttctccgcgctgctgtaagccaccgcttcatggaccatcgtttctaggtccgttcatgccctccttaccctcgtttcagcacccttgtgtgctatggatgcttatcggcccaaccaattaaact

SEQ ID NO: 39916 - DNA, 356 bp, Zea Mays
attttaatgctctcttgatagctattattgtacaagaactccgctaatggtaagcaatcatcccatttttgtgggaattctagaacatatgctcgcaacatatcttcaagtatctgatttacccttttagtttgaccactagtgtaacatctaggtgttacctaggtgttggcttcttattggcacatatacccattatcacatgtggttaaaacttggaggagagggagtgcttaagagcttggaagcatgagtgagttaagaaataccaaggacccaagtgttacccaagcttttaggcaatgatcacctagggcaaaggaggattgaaccttggacccccctctcttaaagtc

SEQ ID NO: 39917 - DNA, 372 bp, Zea Mays
tgggaataaaatgcgcagacttagtcaagcgatccactaccacccatatagcatctctgccccgaggagaacgaggtaaacccaccacaaaatccatggtgatatgctcccatttccactccggaatttccaatggcttcagtaaacctgcaggccgcttatgctcggccttcacgcgctgacatacttcacatgtggccacatacttagaaacgtcaaccttcattcgcttccaccagaagttttgcttcagatctcggtacatcttggtttcgccagggtgaacggtgtaaggcgttttatgagcttctctcaatatattcatcttctcctctgatttctgaggcacacaaaggcgacccctgaaatgaa

SEQ ID NO: 39918 - DNA, 731 bp, Zea Mays
ttctgatgtcactatacaacactgatcccaatttataggaagcacaagatctcagaggatgcatattcactgcttcatgcttcagggactattggtcaagtatggcagatcaaccctaccacactaagaatttagttattttctgaatatatactagtgcatcatgcttcagggactattggtcaagtatggcagatcaaccctaccgcactaagaatttagttattttctgaatatatactagtgcagtagtgcatttggccaaatagctctattctactgcaggctgagactttgaaagaaaaacggaggcgtgctgtgcaattctcaaaggctggcctggatgttcctgaagaactctcactgttcaagaaaagcggtggtacgaaagttcctgaaaacagtgatgttggggagcaagtttccccattaaagtttgttgagccagcaccaattgtggattctggtagagaatgtaataacaaaatgaaggatctagtgaaagctattgaatgccaaccgattatgggttttggagctggcattccagagccagaaactgaagagcctagtgatgatgctcatatgttgacaaatcagaaaattcagttgtcaattccaagttgttctggagcagaattagatttgcaggtcatcaatctgatccgaactatatacttatctcattttctgcatgctcatcaatgtttagattattcaaaagaatgcta

SEQ ID NO: 39919 - DNA, 314 bp, Zea Mays
gttaggagtcaacattgtcatttctctccgaagcgatgatgtacacattgacgtgttcctccttcgttttaggtcgtctgcttcgattctaataacacgtttcatttgagcgcttgagccgaaacttcttccactttatttttgacatgtattaatattcttccactttatttttgacatgtattaataaattagttgctcctaaaacaaatcataagatggtcaatatcagtctcctaaaacaaatcataagatggccaatatcagtcatttataggccttcggtagaggcatttttctcaataggattcttt

SEQ ID NO: 39920 - DNA, 274 bp, Zea Mays
tgagcagaagtttgggctcctccgatgcatagagactcagaagcccttgtttgcggcgcagcagttacgcggccttgccagcacctggtggggaaattatgtggctattcagcctactggccatcaagttacctgggacgaatttaaattggcatttcgagagcactacattccaaaagggtgctccatatgaaacaagaagaattcatgaagcttaaacaaggtggagatactgttacacagtatctcaacaagttcaaccatttgtcccagt

SEQ ID NO: 39921 - DNA, 389 bp, Zea Mays
ctcgaagttctcggtgtagtcggtgggcggcgagggaccttgtggccaccggaattcctcaccgcacctgctgcccagtcgtagaacctgctcgcgccgtagcccgactcctctgcgacgtcattgccggtaaggtgcccttggccatgttcgccgtcattactgccttgcgtagcattcgtagaatcgatgtttgggcgcgtggttcggagtttgggcgacaccggccatggtgctgccgcgggcgctctagcaccgccgcacgcgtagtggaacgggattgagtcatcaggagcagtgtgataggatgcatcgcaaccgtagatcagcagaggaacaaacgagagtggtccatgggtatttaacggctggccgttggatggggattt

SEQ ID NO: 39922 - DNA, 558 bp, Zea Mays
gtgaaaactcggggcagtagatgtttcatatgaacgtgtccatcctttaatagattcatctacatactgctttaactgatcccctcgctttctaaaaaagccttaagagatagatttggaatacttacaataggagcctaagacggaggtaggagagatgtcatatcgatctccccttgacggatgatcttctggtggcaatccagtgtgaagtatgataggtacttttctgtcgccttttcgtatcgttccttgagttgtcgcagtacttcctcctcctctttgtcatgccgtttggtgagttgtcgcagcacctcctccttctcacgccttatgaggtcatcgaagggctgctggtcatcagtcgggagtgcctccatggtcgtcttgatgattttggtggtagagacgtcagtgtgatctttagaaccagccatctaggggttgatttttgagaggtctaagcactctcgtccccaaggaagtcaccaaaaagtatgttggtgtcgatctagatgctaaacactagaacgaaccacctgacggtactctttgcag

SEQ ID NO: 39923 - DNA, 599 bp, Zea Mays
atcagcatcgaggggattgctagatccagcgaatgtgggaggcttgagcctcagaaagtctcccatcatgtcttgtggtcctccaccattcgggcgttgattctccagacttctagtgaggacctcaatgagtcgggtttggttggctagaacttgggctaaatctaagggtagctctggaggtgcggggaggtgggtctcactcccttctccaccggcttctctttcagctcttaggggaaaccctgctccaatcccagaggcggtaggcgtggttttattcgaagccatctgccagggggagagagagttactactatgcatatgccaaatttctttttcaaccaagttattttattcaatacaccaattcattacaagcatatagctactacaagtcgcactatacacgagcgctctctgaggtacttccgaactccttttctaaagtgtccccaaattccttgagaaggtcatcaaggctagctagggacatatcctcgacgtcagacaaattctctatcctggcgggaggtggtgctggaggggctttcttcttccactcagtcttgcatccttggctcttggtcttcttttgg

SEQ ID NO: 39924 - DNA, 668 bp, Zea Mays
cactactggcgttgtcagggacatcggtcccagcggtgggtggcctaccctcaccaagaccgactacgtcgagtgggccacaacgatgaggatacggctccaggtttgccacatgtgggaagcagttcagtacgacgacgtcgactactacgagtatcgacgggcgctggatgcactcattgctgtagtcccacccgagatgcattttttgctctcccagaagcggactgccaaggaggcctaggacgccatcgctgcgacccgcgtcggcagtgaccgtgcccgcaagaccacattgcaggcacttcacaaggagtgggagaacctggccttcaagccaggtgaggatgtcgatgactgtgctctccgcctcaacactgttgcagaagatggtgcaggtgacgacacctacgatgaggagagagatgttgagaagctctttcgttgtatccccaagaagtataagcagatcgctcgctcgatcgagtctctgctagacctctccacgatgacgatcgaagaagcgataggtcgtctcaaggtcgtcgacggcgatgagccataggccctctctaggcctatcaccatcggcaggaagctacatctcactcgggagcagtgggaggcctaccagggtgacaagaagggagagtcctccttgatacgtg

SEQ ID NO: 39925 - DNA, 408 bp, Zea Mays
gaccacccttgtttcccgatgatccatgaacattcattttatttcgcacatccttggtgatctcgttaattccttgtaacttccttctgtaatgaattcttacttcaaccattctattgaaacatcacctatcttaccttgattgttttctccacttcatcatttttcgagtcttgccttaactctatcctttgttatgccttttgttattatcaccttagcctttgacacctctatatcttaccttgatgcccatattatacctgcgctccaaaaccttctccctttcatctcaattttaaaagctaaaggttacatattttcccttagttgtatcctattccttgtcgcttgcgagttttaactccaccctttgttgtctgttattacctttaccttcgtcgtatc

SEQ ID NO: 39926 - DNA, 422 bp, Zea Mays
gtggtgggttcctccagggcagacactacctgcctcctctagctgaccgatgggccccagttgctattggctttccccggacgtgctcgctgatcgatcggccctagggactagggatcttatccccgatagtagcccctgagcccctagggggatagtatttcccctcgggggcttctcccgggtctggcgtcgtcttgtcccttttgtcgctcgcaaccaattagttggagaggctcgtgaggcccgctattggcttccgagatccagtcaggcgctataagtaaagggtccctctgcacttcccccaactgatttcaatcgtcgctcccttgcttcctaagaacaacattctgttaagagggtaacactgtctaaaaccctttaggatcctcccagctgaccatgaaccatggcaagtg

SEQ ID NO: 39927 - DNA, 315 bp, Zea Mays
caataaccctgttcctgcaaggatactaccacccaagcggcgtcaacgaggccaagcgcctcaaacaccgaagccgggacttcgtcattattgagggccaactatacaagaagggggtcagtcaacccatgctcaaatgcgtcaccgaaaccgtaggcatccagatcctgcacgaagtccacaacggaacttgtggttctcactcggggcctagggccctcgctgccaaggtgatccgtcaagggttctactagcccgctataatctgcgtcgcgaatcgagtcaccaggtcgtgcgaagcctgtcagaagtttt

SEQ ID NO: 39928 - DNA, 411 bp, Zea Mays
cggcacgctccaatatctcaagtgtgtactggcgctgagaaagcaacatgccagtggccgaacgagtgacgccgatccccaggaaatgctaaagtggaccaagatctttcatcggaaaagcctgctgtaatgaagtgatggtctagcaaagcaatgtcggtgtggaggcagtcaaaatgatgtcatcgacatagagtagtaggtaggctttgtgttgaccatgttggtagatgaagagtgaggtatctgtcttggcctcaatgaaacccatagactgtatgtgagaggcaaagcagttgtaccatgcgcgaggagcttgcttcaatccatagagagatttgttgagacgacaaacatgatctgggtgagtagaatcaatgaaaccagctggctgggtgcagtagacagtct

SEQ ID NO: 39929 - DNA, 491 bp, Zea Mays
ccaccgtgtaagacccatcacccacctccgttcatcgcgcagattccgcgtaacgcggaccgggcgccgtgagcttcgggaatctctcaacagaaacctggttcgcccgagatttccgtcatggctcgtccgaatctctcgcggccgcgtacttaccctccccacgcgctcgtatctccgcatggctcgccgctcatcctggaacccgtcgtgatctggtcaatgggatgtacccttgatccgaaacccgtgccgagatctcgggttgcgtttgccgcccccatggccttgcccaggtgcatataagtaggccctgttcctccttgcccgactaacggccgttagcccagccaccgacaccaccgagagccgcccgcgtcgacctggtcgacgactacggctcggagcccacattgtggccatagatgatctacgaagctcatggagcgtatctgttgccgtttcgggtggaatcgtgtgcggggcgatgc

SEQ ID NO: 39930 - DNA, 351 bp, Zea Mays
gagaagttcgtcgaggacgacgcggatgtggcgcaagtgatctgcccaggtcttgctataaatcaaaatgtcataaaaaaagacaagaacaaaccgacggaggaatggccggagcacgtcgttcatgagcgcctggaaggttgccggggcgttgcataatccgaacggcatcaccagaaactcgtagaagccgtagtgggtgcgaaacgccgtcttgtgcacgtcagccggccgcatccggacttggtgataaccggagcgaaggtccagcttcgtgaagaactgcgcaccatgcagctcgtcaaggagctcgtcgacgatggggatggggaaggcatctttgacggtgag

SEQ ID NO: 39931 - DNA, 399 bp, Zea Mays
cttgttggaagaatagtaagttaaattttatgagctgagtttgaatttacgtttttgtcagggaaatgatccccggtccttgggacccgccggccagtgagcgcgctgaggaaagagcccctgattgctagggctcgttagtcagtcggaagagacaggcatgacaaccctggaaggacccgcctcctgtcgaaccctgcggcatcgagcccggggccgggcatggcggagcctgacaagagaggacaggtgtgtcggaagggaaccacttgagtggatcccacgccacggccctgaactgacccaccataaatgactggccgcattaaccatgcctggcaccgagccacagcgtggtcgccggtacgcttctcactcatgatctacagacccctcgag

SEQ ID NO: 39932 - DNA, 518 bp, Zea Mays
cagatttgccagaatgaagatggtttccccaagttgctgagagcatgcacagtccgcctcggaatcaggagccagccagagtatgatggtcatgaattcgtcgagcatggcacagagaagtgtgtcgtgactgtatacattggatctagtccgcaccatgtggaatggagtgtcattgctgctgggcacagattcaaagacacctgccaagtcgtcgctcgcaaggcattgagggccctgtgtcagatttatgaagaagaagtggccaacacactgctcagattctttccgccctttcagagagaccatcccgtttggatggccaggatgcgtgcattggaaggtcagcagctgcttgaggatgaccccacaatcgtgtacctcactgcatacctgctcaccctggatgcacaatatgatttcttggctcggcacaaccgtcagatgatttcccgagcagaagaagcagagaagcgcaaccgtaagctccatgtggatctcaccacagctcaagcccg

SEQ ID NO: 39933 - DNA, 421 bp, Zea Mays
tttgacccctctggtttttctgtgaaggatctggccaccaggacccttctcgcccgctgtgacagctcggggccgctctacacgctccagccctccaccgccggcgtgtctccacctcctgtctgttatcgccttggcgaggaagaagcagaagacaggcaggaaggaaagaacacggataggcaaagaagcagactgactctgttctggtatatttcctgtctatctttccattacacgcttgctttatattcctgtatagctatggcctaaggcccattactctatccattctgctcccttgacacggagattaggcctacgaatgcgacagcccaccatttgaacgccatcccttggttcctttcctcctgcgccctcttcaccttgtgctggcgccggtaggtctctgacattctcc

SEQ ID NO: 39934 - DNA, 574 bp, Zea Mays
ggagcgggtttcggcgggacggccgcggtcgattcagacatttgagcagggccgagttcgcggaaccgggtagggagcatctccgggacgcctgggtgcagtgcgaatttctcgtcgtcgctcttttgccgccgcagggctgtggcgtcccgtggccagggatgttgggcacgcaactcaaggtatggatgtctcccctggattcatgttggccgccgcttagtctaggtttgattagtctgggtaataaaccatagaaccaccgtggggttggccgggtgttgctccagtggcctcgccgtcgcgcggtgcgtgctgttcgccgtggcccacggagatagaagaaggcctggtgccattggatattcttttgatggcctagatttggttgccgcgtaacgcttcgaatagagataacaggaaccgttagattgtgatcggacggatccgaccaggcgcgctcgtttaaactctgcaccatcgatgggagatccatcggccagcgtggcgtactgtttcgtagataacagagtctaatctggaccgctgatagggaatcgtgtggatctgagcg

SEQ ID NO: 39935 - DNA, 591 bp, Zea Mays
gacaaaagcacaataagtgtgagagatgacacgtccgagcaaaattcgcccaaggttgcagccggacaaaagcacaacaagtgcgcgtcaccacccacagggtgcaaagtcttctacaaagacagcttccaatcaaaaaacgcccaagggtgcagccaaaaaaccaacacaacactcgcggtacgcgatccccactacataaacaacctaccgaacatatgccgcctatgggcgcaactggataagtgaaaaaagttgtgcaatcacctatcaaaagcagagtcccctacgacacgaacgtgattacaaatcgaagccaactcgcaataggcacaacataattacatagcacaatcacaaataaacaacaagcgaagggctcagcggcaccatcgcacaatattacaaatcacggcttttaccctcacaactctattgcaaagagggggagggcagtgttttcacttaatatcgcaacagagcaatgagggcaacaaaaatgtcacataggctcctccttcgaaataagacctgcctctcaaaaattgaacaacatcatcctcaactcttccccctcaaataggtcccgca

SEQ ID NO: 39936 - DNA, 335 bp, Zea Mays
gattcttcgagtctgaaacggaggacaattggaaatggttcatgcagcagttacggaaggccattggagatcttcctatactagcagtttgttctgatgcttgcaaaggtttgaccaacgcaatgagggatgttttcccaatgcagagaagagagagtgtttcaggcatctaatgaacaactttgtcaaacaatttcctggttcggaatatatgtaccctgctgctagggcgtacagcaaagaagtttatgatatgtacattgcaaacgtgaaacagaaccctgccatcgctgattggttggataagtttcatagtttattgtggtaccgcagtg

SEQ ID NO: 39937 - DNA, 340 bp, Zea Mays
ctaagtgcttgtagtagggggtacaagatagtcgagagaggaaatggatcccaagtctctagtgatgattgaggcgagtgtcaataccggttgtggaggcaaaaacatgtgaagtgttctcctctcctgtttgaagccctagactcctttaatagcctcaaggagggatccatggagcgcctcggcttgtcgtattgaggagggaagacgagcccgagccactgtagacggcatggccaccgaaatggcttttgtactagggttgacttggatcagggggagtacatccggcccttgtgtctcgcatcttgactaagcagagaaccaaggccagggtcgg

SEQ ID NO: 39938 - DNA, 295 bp, Zea Mays
ccggcattgcgcccatcgcaaagagaccataccgcatggctcccaccgaactagcagaactaaaactccagatcacagagcttcaatagaaagggtacattcgtcctagctcatctccttggggagcaccagtccttttcgtcaccaaaaaggatggaagtatgaggatgtgtattgattaccgatccttgaatgaggttacaatcaaaaacaagtatccactccctcggatcgacgacctcttcgaccaacttcaaggggccaagtatttctccaagatagacctaatgtcagg

SEQ ID NO: 39939 - DNA, 278 bp, Zea Mays
ggagaaaaccctaatcctgggttggacatgtattaatagagaggttaagtgggccaaagcccattacaataggggcaaacagggaaaccctaacaatatacgggaaaccctaacagttactctctaacagtaaataccctactactataggtacaggccccaaatgaacacgtgaggtgaggatgggaaaccatgaaatatgttacgctctaaagtaaaggtaattttgaaacacatggcccttcatatatgaccctaaattaatttggctgattcag

SEQ ID NO: 39940 - DNA, 362 bp, Zea Mays
ggatgatgatgttgccatggaaaatttggagaaaacctgtcctaaacctcggctgtcaggctaactgaaaaagcttccaatggtacagtaccaaaatatcaacagaagcaggtcccccctcgccgccggcgacctcgcgcgtagattcgcgccgatgaggtgatgtgtgcccacttaagcccggataacgccgcgaggtaaaaagatcgtcaccactgttgggctatgggtactaatccggctagtcgtcgtgctcctttctgctttgcggtcggtccggataattcaccagagttggctgcccatcgaccgaacgccacgtgcctcaacaattaccatgtcgcaatcaccagtgttatgca

SEQ ID NO: 39941 - DNA, 296 bp, Zea Mays
atatattcagttcttaattttatttagatttcttaagtaaaccctttttcttttctcaattcttcacaacttttgcaggctacacttgtgggtttgccatgcccgatgaattctgtggggagcttacctactccttatttgaaactaaggaaggtcagaaataactgtatgctatgcaaaaaaacctgttgtgcttggctcaacactgcttgttaaagtttgttccctatatacaggctgatgaagttgaagccgttctggccaatacaaagcaaattcttaaccagtttctccga

SEQ ID NO: 39942 - DNA, 351 bp, Zea Mays
ctaatatttgatactttgcctctaaggatcatttccagtcggctcaccaagtccacagcaggaatcctcttgttggtaacccgagctgagtcggtgataccactatacaaataagccgggtatgctctgtccttcagtggctgaatattcttaaaaacaaagtcggcaaccatagcttcagcagtcagacctctctccttcaataaacaaatttcagcaagcagaaccttggcttctgttatctctaagtctatgggggactcaatccaacttggagcacgaacatccggctgtctccctgaccgaggggggagggatttgccatggttttccacaatgaaccactctaag

SEQ ID NO: 39943 - DNA, 364 bp, Zea Mays
aaatgtgtgaaaactgaaaagactagagaagtagcttgatgctagctggttgtgaaaggaggcaggaataacttttttaggtgtggcgccgagttaaaaacaaaagtaaacgctggtggtgaaagtagcttgatactatgaatttgattcctttagttaccgtaaaagaccccatcactatgaatttaaagttgtttatcaaacaacaacaacaaagaaataaacgctggctggaaaccatatcatatccagcaggtgtaaccacaaatggccatcgagtgagtctatctatgatcacactaattaccagactaattatcacaacactggacaagcgaacgtttttacacaaccactacaaccg

SEQ ID NO: 39944 - DNA, 597 bp, Zea Mays
cggggaagaaaaccccctggccgtccgattgactatgggtggctggttggagaagatggcgtgggatggaaacggtgaccgttagatcggtaaggtacgatcaagattagaacaacagataacccttcggcactttgaatccgcgtcattgatcgtcgatccggtggtccggggtgatctcatttgtatgcacgtgtgtgtggtggtggggatcttgtgcggatcggatcccgtgcgcctcaccatgtgcaccggggtgtggcacgatctcagccagtcgtaggacgccacgtgtccttgtgcaggaatccgagattggttttgcagagaggcccctgtctttaaaggaaagtaactcggtgtgcgtgtatgtgcaaagtaattacatcaaagtccctagactttttaaatatacccctagaaacctttacagagttaaaataaataattaggaaacctagaaacttgtttatggcataacttactcgttttaattctgttttactccgttccagttgcgttaggttcataaaaatattctctacatactaaaaacattaatcataccatatctcatacttttatagttagatattt

SEQ ID NO: 39945 - DNA, 448 bp, Zea Mays
cccccttttgcttcttttctacctctctacaagaaacattttcttattttatcaatggcttcaaatagcccaatggggaaagtcgatcgccattgcagcaaagactgtcattccagaaagaacatgttgcacaagcacttttctgctagccctattcatcaaatcagccttccagcttgggagacgatctgcaatcttttccaccagaggaaagaactgttgtttggataatttgtgcaaggatagaggaaggcccaagtatttgcagggaaaggaagcaattgcacaaggcaacctattttggacctccacaatgatctcttcagagcatctgataggataaacatttgatttctgggtgttgttgtgcagaccagaggcatccccaaaaaggtagagaatatcaagagtggtggagatatcagcaacagaggggtgcaggaataag

SEQ ID NO: 39946 - DNA, 275 bp, Zea Mays
catcccgatgtgggcgaacgtccatgcgtcatcatcgcttgtgagtttctcctcatctaattcgggctggtctccgcgctcgttttcacctgatagcatgggggtagatcactaacggctggggtcgtggctcgccggccatggtgccgccgcgctggtgaatacgccgccgttgatgcctggtagggagtggggaagacacggctagtgccgtcgattcttatctggacgacccagattaaatggggggaaacactctgatctgttaaccctgg

SEQ ID NO: 39947 - DNA, 490 bp, Zea Mays
gcgatacgtggggccgacaatgatgacacatgctggtccaggcatcttcagcttgaggtatgtatagtttgggatggccatgaactttggtgtaacacggcctgccgagcacaacgtggtaggtacctcaaaaccctaccacctcaaaggtcaggacctccttcctgaagttggttggagttccgtagcagatgggcagattgatctgctcgaggccgtactcgatccgagtgacatgaactccaagctcccaaacctgatcactgtgtcgagcctcaagcggtggtggaagctagccatccgtggtcttgatgggaactagatgtcttacatgcgacgaacccctacctggcacgccaactatcggtgtttggacccgaggacctaaccaactagtgatataatgttgcatgcccctaacccaaatggtgatgcaagttgacacaagtcttttatcctggtttgggcaaggagaggccttacttctagc

SEQ ID NO: 39948 - DNA, 373 bp, Zea Mays
accacaacactaggaagagttgttatgtcgttaggagaaatgaaaacatatttgctcacaagtacaaagaacacttgatatgggttgttcctcacttctctcagctcagattttgtggctaggataactagatgttctccctcttctttcttttatctcttgaatttggcttttagcactcactcatcgaattgtggatggcactcaatttcttttgctcttctcctcctctacttgttgaactaatttcagttttcttttttaagtttcagccatgatttgttgagaggtcataggcttcagtacaaactttctccctttcagatctagtgtgtactgatttgttcttccacaatgctgagaatatcggtca

SEQ ID NO: 39949 - DNA, 537 bp, Zea Mays
ctcccagaaacgtgccacaaacagtgctcctctatcagacacaatagtcctcgggattccatgcaaacacactatttggtcaatatagatctctgcatatttttccgtcttgtgggtggtatgcacagacaagaaatgggttgtcttggttagcctatccacaacgacccaaatagaatcatggtgccgggaggtatttggcaatcccacaacgaagtccatgcaaatgtcctcccacttccaagaagggatggggagaggttgtagggtacctgctaccttcaaatgactagctttgattctttggcaagtgtcacacccagacacatacttagcaatttccctcttcatcctggtccaccaatataaggatctgaggtcatgatacatcttattacttctgggatgcatggaaaattttgagagatgagcttcgtccaacatcttcttcccgagttctggatttttggggacaaccagtctatcctcaaaccatagaacacccttgctgtcctgaggaaagcatttatacttatc

SEQ ID NO: 39950 - DNA, 322 bp, Zea Mays
gcttcgactagctggcgcccaaccatcgtcgtgccagcttccgtttgatgccatgccatgcatcggcttacaactggagttccagacatggcatgcgtaaaacttggctcatcacttccgtctccactcctatccacaccgcccaaatacatctaacgtatctgaacacccatttcacatacgatcgaaatctccagcaaacgtaccgatcccaactgggatttcaaatatcgcttaccacaggatgcatccgtgcatgccttcgtctctcgtggacgtggactcgtggtggtggtccggtcccactcccacagtgctcccg

SEQ ID NO: 39951 - DNA, 385 bp, Zea Mays
attctgcaaatacaagaattagcaaaggaatctatttatcaacacaagtaaagtagggcaaaggttatctcacctgaaggttagataggaacaaaggaaacccaaagccggaggcattgacgcaccgtcaaaccgtggggtactagcaaaaacaatattgagagcaaactcaagccccaaaggaggatcaaaactcgcgcccaaggcagtactcagtgaaacctcagctccgacagcgtgctgcgaattcccagcgcccgggtcactgacctctaaagtgatcggaccaacaagagcgacaggaagaatcgtcaacactggctccttggattgagcttggcaccgttgagggctaggtcatcctcggcagcaccctcgggggctg

SEQ ID NO: 39952 - DNA, 402 bp, Zea Mays
agcgcaatagcctcgatgcccatcatcaagggaaaagaagacaatggcaaggagacgaacattcctaatctagtcttctaggtgtggtcaacaatagatcaataggttgtagctcttactttcatctatgaccaaagatgatctgtcttaggtcatgatatgtcgaactactgctaaacatgtaaggttgtacaagggaactacacagcatcaataagggcacactccatcaattcaaggattgcactttctattaccaaaaaggagacatctccatcaccaaatacattagcaagatgcactccttgtgtgacgagctagcatccaccagcaagctaatcgacgatgacgaattgatctccaacaaccccatcgacctcgactacaagtgcaacctagtca

SEQ ID NO: 39953 - DNA, 415 bp, Zea Mays
ccggagtgaaaggaggcggaggcgtcggcttcgatcgggctcggggaggggagtggctagtggctagtgcaagaggtagaggagctgtgggcactccttttataggcgctcgtggagcagtggccagatggctccctgtgggcggagcatagcggcaatgagcagtggcgtgcacagcggtggagatgagacggcacaacgagggagagaggcggtgccatgcagttacatgtgcacagtatggtggggacgaagtggtgcctaactccactgtggctatcgacggggagagaggagaagaacggtggccatgaagaagccgtcgtcgctgtgtgcccatgaggaggtaggagggactgacgggcggggcccagccaacagccacgagaggagagggctgacaggcggcctggat

SEQ ID NO: 39954 - DNA, 287 bp, Zea Mays
aacgtttattcattgctcaagatttttggttgtgcctgctggcctcacttacatccctacaatcaccacaaattatcctttcgttctaaaccatgtgtcttcattgggtatagttcacttcataagggctataaatgtttagatatgaattcaggtcgagtctacatttctcgggacgtagtttttgatgaggctctatttcctttttctagtccttcatcccccgttgcggaatcatcccagggcagtacgagtgctatttggaacaataatcatttgcatacttt

SEQ ID NO: 39955 - DNA, 382 bp, Zea Mays
tggacctccgtaattgctcgacggaggccgctacagctgccaaaccccgtcgtcggctctctacaccgatcaaccaccggtaagattgcccccattgagttcgccgtaatctccactaccgattgctcatcaccgcgttcggaatagctcgccaaatcgcggatccgtagttcgccgccatgctcacatccgtaggattagctgggcggcgccgccgcgcacggtcagtgcgttgggaacgatgaagtgctggccgttgatcccgggttggtcggtcaggattagatgagtgtggggatcgctggtagccgtcgaatgccaatccagcgcatagtattacataccatttcgggtgtggtcttgatctaatcaggaccctcgg

SEQ ID NO: 39956 - DNA, 360 bp, Zea Mays
gggtggattatgcacactagggaggttgtcaccatagtatgttgttgtgaagttcgacacctcctctagaatgtatgcctctgcaatgaaagcctcgattttgcatttatttctacatttctttcgaagaacctttaaacatctctcgattggatagcaccaacagccctgcacaggcccccccattcgtgcctcatatgggaggtgcaaaatcaaatgctgcatcggattgaagaagccaggtggaaatatcttctccaacttacacaacaacaccgatgacatcctttccaagtctgcaatcacggtccgagataactccttggcacaaagctggcggaagaaatagctcaactctgc

SEQ ID NO: 39957 - DNA, 384 bp, Zea Mays
gccgcagcagatgctgaaggccccaggtatgtgctggagcgtgtggctgttgcctcgtctcaagtcccggctatatgtccccatgcatgcctacttgtctgctgtcgaaacctctgcggacggacgttgcatcgtttcagaattacgtcacatggtcatctgactgaagagggttcacatgacgattcatcggtgcagcttggcgtggaagcaggcatgtgagctgtgtgcccctctacgcctgggcgtcgtcacatgaccaggtgaccgaccgtgacgcctgtttctccctacagcagtcaagtttgttctgtcgatcatatgatggtgttcaattccttggagcaaattacccctctcccgggccccggcagtaaatacacg

SEQ ID NO: 39958 - DNA, 421 bp, Zea Mays
ccaaatctcgcccgctactcatgcgggcagcgtaccgaagggccccttcgtcctcatcatcctccgccacctcgaatcatgggaatgccacatagcaatgagagcacataatggccggagggagcccaggcagatcttcgacttccccacaagaaacataaaaccaaaagtcccaccagttgccccacttgttcctggcacaagggactatctccacaacttccaccgaagtctttccagtcctcggcgtaaaggtgcacgatccaaattgtgcaatcttatctcctattttactattttgccagtgcaggcaatagttcttggcgaagacctccacagatggttgcccgctgtatgaagcaaccgcccaaacatacttcaccagcacaaccacggtgttaggcgtggtggacctgcactt

SEQ ID NO: 39959 - DNA, 547 bp, Zea Mays
gcagcgcgtaccatccgcagtcggatggccaaacggaaagagtcaatcagtgtttggaagcatatttgcattgcttcgtccattcttgcccccgacaatggtatgcatggttgtcactagcagagttttggtacaatacatgtcatcactcctctctaggaaaatctccttttgaagttctgtatggttatactccatctcaactggggctggtgtcagttgacaagtgttcggtaccagatctgcaacagtggatgcagacttgccaaaacatgttgcaacaggtgaaactacatcttcaaagagcccaggaccgcatgaaaaagcaagccgataaaggtcataaagaaagggagttcaaggttggagatcgagtacttttgaagctacaaccattctgccagaactcggtaactgagtgactgaaccacaagctagctttccgctactttgggccttttgcagtgaccaaaagagtgaattctgttgcgtacgagttacaacttccaccaggcagttccatacacccagtgttcaacgtctcgca

SEQ ID NO: 39960 - DNA, 434 bp, Zea Mays
gaccactatgacctactaacagagcagtcgcctttggtcggcaatgacctaagacgatgctacatgttcacactgactcggcttaggggaaccactataccctactagcaggacaatcaactcaaaaggcagcaatgatttaaaagtcagcacgatacatctacctatcctaaggcgaccactatgcctaaccagccaagcgattggcataagccagggaaagttccaaaaccagcacgctacatttactttcataattgttcaggatgactgttataccctgacaacaaaaacagtcagtacttcaggagaacaggatgttataattgtcagcatcaaggacccgttctagtgccctatccacaaaatattcaaatacaaccatcacaaacacatagaattcatagtacattcagtatttcgcaggatgtcac

SEQ ID NO: 39961 - DNA, 378 bp, Zea Mays
tgaagggaccacactgtgtcaaccaatgcagattcacaagtcatttgggcgccatttgccacacggaccagcaatggttgtggcaaggaagtaagattggaacattgatttgcaatggtggagctaataaatgaaattgagctgccggaatcaagcaggatgagcaccgagagaccacaaacttcgcccacaaaacgcattgttttcatttgaggcacctgagcaattgctgaatacgataactgaaagctgttgagctgaatgtcctcgagcttttcagaaagggcctcttcagacggttctggaaattgatcccaaagttcttccacgaggtgcagctggactgaatctgggcattgatgaccgcgggtataaggt

SEQ ID NO: 39962 - DNA, 406 bp, Zea Mays
tcggaagcttggttcgtatagttgggtcaggagacaataagcaattttcttgcgtccgaagatctcgggttcttgttgctttgctacgtcggacgaggaaaggataagcaggagatgatagattcgataggtgagccccatctttagtgacgtgcatcgggagtgggcgtgacatccctagctgtggagtggccgcccctagatggtgtcccaaggaacgcaggtgcgagcgatcactgcataaaagaaggctgttgcgtgtgcccgcagcaccagtgacctaatatgtttagacatgggggagacatgattgacacccgggccccagttgtcggcaccgatggtcttgttgggctagggagagggagggatcgactaggccgatggggtggaagtgacccacgag

SEQ ID NO: 39963 - DNA, 440 bp, Zea Mays
gcgcagagtgccgagttgttgggaggcttgaatgcgcaggtgtgttgatcctccggtgacgcttgtatcggaccgttgtccatccatcgacctcgtcttcagtaggtttacctaggctggcatccagtggcgcctcgtacaggagacttgaatgctgattcgcagtgacagacgatctcaaggggcgcacgactgtgctgcaggagtggctgagggatgtagcagggattctgaatcgaactcgtttggtgagggagccagccttggccggccccgcgacaatggatttgaggccgtaatgtgccatggctgacagctttgccggcgaggtggggagctagggagcatgactgggacgcgaggcgtggggcgagacggggtgcgggcggtagcttgtggcctgatctatcgacctatgcggttgtttgaggcgggaagcc

SEQ ID NO: 39964 - DNA, 327 bp, Zea Mays
cgaaaccctaacctaaaaggtatacatgtgcacacccacacctttgctggatccgcccctgttcatggtgatcattgttagctgacttccttattgcagagattagaaaaacaggctgcttgattagtgtcttgtttgaatgcatagggataattgatatatatctgatttttaaccctaactcatctgaacagggggctaataggtgggttaatttttgaaccaagcctccaactagttgttagccaaccccctcgggctaatttttagtctcagctaataactagccctagatgatccagacagaccctaattgtcgaagtttgc

SEQ ID NO: 39965 - DNA, 363 bp, Zea Mays
ataacttggacggattcactgctgtgatgtggtgtcaaacatgcccgacggataacccccagcagtgtccatccggtgtctgtctgtctaccttcgtgtcctcacgccatgttcatcacctcactgtggcgttaaccttgcgtggtgtccatgcgttgtggtgtattctggtaccagcagatggccaaccaggatcattttgtccatatccacaataaagagcaagcttgcgtggtcggatgtccctctgcatgaccaaaacgttctaggaaagcattataaattcgtcgtgcccctcactcctttgttcaaattagtcgtgcaccatggtctgccatccccttgtgaccgtatagcccaagt

SEQ ID NO: 39966 - DNA, 640 bp, Zea Mays
gtcgagggagccaaaggtaatgcggcttccaagcgcgaaggtctcactaccggtgaaacacagatgattgagccatcggagtgaaagtgtcgcttggccctacctggtgtgcctacaatcgtggtttcagaaaccgaggacacattagaatttgtgttcgatgggggaggctagcgtggactcactccgaatggtgaaccaagtgacctaagggggcaggcttatatcagtttaggctcgcgccctacggccattgtagtgcttattgtagcattgctctaaggaacatgttacaaagggtgcaagtgtgacaatgacatgaaggggagaactctggcataatgctcctaactctcctgcctatgcctgttcggtcatccccttctatatttcaagggggaggctcttacaaggggacttgttaactgaaggagggtgcaatctgtcgtctatgggagtccttctgacgtagtattcctgatgtcatcccctgatatgtgcataggaatacgtccagtacggcggatcgcttcatcctactcactatgcaggtcactgtagagactctaatgctgaggttctccgttgtaacatcccaattttgatcccaaggttagaaaccctaaactcctaaccctcc

SEQ ID NO: 39967 - DNA, 550 bp, Zea Mays
gtcgtcttgtggagttgtactgacgactttccttttctggcttcgtgcttctctcaagataattccatcttagtgaggatccaagggtgcagggatgggacttggtaccgtcatctttttcagtggcatgatgaagcatgtcatggtcgtaaatgagttcaccttgggaaatgctaaccatgatgaacgaaggagaagagtcggtgtggtcatcactgtcaatgcttactttgtgttcaaggtttcacagtggaactagaggactggacaagattgaggacttaaccaagatgtaggaaagaggttgtgcacgacgaagaagctacgaaatcaaccagagctcagtggagttcagtttgggcttccacacactttggcaaggcacaacagttagcaagtttgttatgggttcactagagccttacacagcggacaaatgagagctaaaatgttccacctatcccctgcatggtcaccaagtcgaggtaagacataaggaaagggttgaacacacactcactgcatattggacaagcagttgagtcaccta

SEQ ID NO: 39968 - DNA, 407 bp, Zea Mays
cggaggcttcttcgcgtgttacggatgctaaagttttgcctggtccgagtgttgggcgtaggcggcgaagggcggtggcgaagcgtagagtgagcgggtttgatggtggtcggcttcgtgtgggcggggctggcaggcaggaattgttgtcctcgtcggttggggcgagtatgggtgagggggagttgcgaagtctttttgagggtgaggagctgaggataatgctatttaactatagggagatggggatcattccgaaggttgaaccaatgtaaggtgtgatgccctcgctgtacgcgtgtaactgtagtttgtatgataaggttgattgccttcgtgcatctggctatgtttgtaaggcgttgcgcacctggtctagcacgtttattgtgtcggtccggctgcgc

SEQ ID NO: 39969 - DNA, 364 bp, Zea Mays
ggaatccccaatttggtcggaacgccattctagagctcggtccacgcacaccctggagctagcgaccttcctgacgtgttcccgatgttatagtgtgagatagccaaattggccgagccgacgagcatcacaagcacacgaaagtgctgaaacacaaaccaggagggcgagagcggacctggaggtggcggaccacgacggggtgactcgcggtggcgcggagagtggatttggggaaatcccaaattagggcgctatggtggacgatcggaggcgagggctggtgctctggctttgtaacaacctagcggagctagcagcgtactcaatttatagtgtccaagagcggtggctccgaattttg

SEQ ID NO: 39970 - DNA, 636 bp, Zea Mays
caacactgaaccatataacgtaaaccgagccccacatccgaacccacgttccaggaataccgggtcaggcccactttccacgcggtcaaccgagcatatgtcctcatcgtccacatcacctatttctctaccctaaccccagtcgctgtcctcttccctcgccgactcgttgtcaacccaccataattcatcgtgcagcgcagcggtgactcctcgttcctccgcccctgcacgcttctcaaccctaaccggtgtcgttctcactctcctcgcggtcaaccggagtatatgcccctgtgctgccgccgccattcgtcgttgagccaccaccgcgcgactccataacaccaggtgcccgcatccctctcccaccaccgttgctgcattactctttcccaatctcaccgcctcattcttctgttccatttcttctccgccgctccgccgccgtatatgtgaggtgtccctcatcgtgtcgccccatctgccccatttcatcaccggtgtctaggctgctccctggttcatcattcggcttcaagcactgacagatttgtggtcgtcgatgacaaggaaaagtcaggtcagcgtggcatgcataaatgtatattttgctggtttgtcattgcataaatc

SEQ ID NO: 39971 - DNA, 733 bp, Zea Mays
acaatatccaccacaccacgtcttattttgttgttatagtagaagatatgagagttattaaaagtaaggtatggctgatgccacactaaaccataatggctcctccgccgctgctgtccggcaaaccatcacattttgtgacgcgggacgtcgagcaactcctgacttggggcactccggtcccatgtgacaaaatcccccattcccatttctatcgtgcaaaccatcacacactccggacgttgggcccacattgcagactacgggcgcccacatgacagccacccttagttttgcacacaccggacccacgtctactcgcgcaaaaagttgcctcaatttgacactggcaggagcatttgaccacgattgctttctctgaagaaggaatacttataagccggtagaagctatgttggctggcaggtatggtcataaaaatgtgtaagccgtgacgacgacataggttgcgtgtgctgtgtttctttggtgcggcccaagtagctgccaggaggtcgcacgcttcttaccctgacccagcttggctttagggtcagtctcccttgctttctctgcccagcgagccctcgccctctagctcttcctgctagcattgtctccgtcccgtgctctcatgttcatcgtcgatctcagccatcccaggagcacccgctcactcccagacgcccgcgcaaaggaatcccccacgatctccctccaaactgcccactcc

SEQ ID NO: 39972 - DNA, 403 bp, Zea Mays
gggctgccacgccaaaggtaatatgaaccgctctccaaacgaacttagcaaaatgacagtcaaagaataaatgttggatcgttttattgcatgaacaaaaaaaaacacatctcttatctccttgccaattcctacgccccagattgtcctttattagcaccacccatttttaagataccacataaaaactttgattttaagcggaatcttactacaccatctatagtcttttcccggcctactaacaaccccattgatcattagcgtattatacattgaatgagtcgagaatttttttgttctaatggagatcccacgtaaaaatatctctagcctcattcaaagtaacatttgtcaataaagctaccagattatgccatgcagctaggttacgaccctccag

SEQ ID NO: 39973 - DNA, 782 bp, Zea Mays
aaagtcatcaactaccctatgctacttcaatacatcaatctactgcgcccatacaaatgatcttctctgatgtttgggtctggcgccacattctgtgaatggtttaaaatattatatcagtttcattgatgacttcagcaaattttgttgggtatatttgatacatgatcgcaccgaagcaccttgcatttttcgtgaattccagcttcatgttgagcgtctattagattctaagattaaatgtgtccaatccgattggggtggcgagtatcagaaaatgcataataccctttttcgatctcttggccttgatcatcatgtttcatgttcgcatgcacatcagcagaacggctctgttgaacgcaaacatcgacatattgtcgaaactggtcttgccatcctcactcatgctcacatgcctttaaaattttgggatgaagcgtttcttacagcctcttacctcattaaccgcattcccacacgtgttatagataataccagccctctagaacgcctgtttcaaaaatcacctaattattcttggctccgagtatttggttatgcatgttggcctaacctccgcccataccaaacacaaaaactctccttccgctcaaaacaatgtgttttcatcagctatagttccttgcataaaggatacaagtgtttagatcctgattctagtcgagtctatatttctagagatgtcatttttgacgagcatgtttttccctttgcacatctctctcaggcgctacttcctcacctgatcctcagactaa

SEQ ID NO: 39974 - DNA, 402 bp, Zea Mays
acaagaagcaagaaaagtacaatgagcacaagaaagccaagaaagactcaggttacgttgtgattgtcaccataagattatgatatgtgggcttactgtaatgtgtgaacacttgtttgtatttgattcaccatcctaaaatgaggactaaactttagtcccagcaaattttatttaaaagacctattttagttacctgactacatgagatatgtatttctgtaaaaatctatgaacactatatgagatatcagcatgtgccaactgccaacccttcatgtacaaatttgtggacgcacaggaagtacatgagaaatttcggttacaatgtcacacacgcacacatattggagctttcggaactgtaaacagattagcgttcctccataatctgcatttttc

SEQ ID NO: 39975 - DNA, 805 bp, Zea Mays
tgccatgcgcgaagaacaagtgggggaattagtgggatttctggttttacttggcgatgaaggacgccaaggggattcccaggctgcctctgaccattttgtgctcacactactacatcgccttcccacagtttaaggtgaggaagggggatgcgaatgaagatgccctgcaccgcacatcaaaaatgagcagtgatcgtgacttggtggaagagtttattgcttgcggagtgtggccactggcgcacagttgggaggtgggcgaggtaaaactgtgtctactgccatttttgaagaatcagatggtgatgagcccagccttcacaattgatctacgtggttaggatggtgcgacctttgttagggatacaaaggctgaggtggtaaggactgttggtaaatattcgacgaagactaagatgacgagaagctaggatatacgcggttcgaatgttaggctaaatcatgtgtttcagctgaacgacctcctctatggcctgtatcctaaagagggatccgctgatgttcggggtgctgaggagctcaagaagaagggtggattgaagcatggtggggtggacgaggggtgttccaagggtaaggctgtggtgtcgccggtgaggaagaggagaaaggtggagacaaaggagaaggggtcggcgagcgcgactcgagttgcagaggcctcagacaagtttgctgaggagctagccgagagaagcgctgagccgggggaggtcatgtgatcgcataccctgcgggaagcatctgctcggatgttggaagtgactgggggtgagtggtg

SEQ ID NO: 39976 - DNA, 366 bp, Zea Mays
gagagagtggcagtggacaggaggaggaggaggacgcaaaggctgcaagcagccgagttgtgagctgccattatggttggattggcgacaggaggaggagggcgcaaagcctgcaagcccacggtggcgatggcgaggtgtggcagtgtggcactggcaccacaagcgcctgtgtggcgttgtgtttatatctctgaggaagatatcgatgacggtgcaacgccactactaggcctgcacgggattcgtctagttgaagtcctgagagctgaggcctgctctggattccatggctcaaatctggggtacaggggactttgaccgctggtgatggcagtcagtcgtcggcgcaccttcatacacggc

SEQ ID NO: 39977 - DNA, 390 bp, Zea Mays
gctaaaacacgaataaggagggtgagtgcggacctgagagcggctagcctcgatggggtgattcacggtggtgcagatgaccattttgggggaaaacccaaattctacggctatagtggctaatcggagctgagagttagtgtcttgggttcgtgataacttggcgaagcagagtggggcatcaatttataggagctttaggcggcggctccgaatttgggagaagagtggagcttatcttcctggtgaggcaatcaccgaggctcaccgtggagcgcatgcgttcgcctagcgactgccactatctcggggatgccacgatcatggcaatgtggtgaatcaggcgactacgtgtcccttgctgcgatcacggcgagcaccggtggcgat

SEQ ID NO: 39978 - DNA, 806 bp, Zea Mays
cttcgatttagacgcaacctgttagctacgtagtagatctactggggttttgacagtggtggcggcaacacagccgtatcgcgatcaggtacgcggttctttcgtgttccagttccaccagccaaagtctctcttctccattacaacccaggcttttatataattgccatgggctgcccgttacatgggcctaattcatccacacattttctatatactttggattcggccttttagcccgagtgctcctctttgcttcctgaacctcagcgtccgcctcttccatcgcagcatccttcccggtgttcaggtgccctgtgctgctaacatccccttccccttgacagacagcttgtccccaagctggagcccgtgggaactgctgcttgatggcgtgttcatcttcccaggtagacaatgaagccggccagttagaccatcggattaggagttgaggtattaccttgttacctttgcgaagcagcctagactccagcacctctgtgggtattttcagctcctgcagcaggtctggcatggttgcatcggttgtgatacgagtttcttcggctgatttaagttgggacacatgaaagaccggatgaatcgcacttccttctggtaatgccagtttataagccacgggattcacctgttttgtgatcagaaacgatccaaaatagcgaaatgacaatttagtgttcaatctgctccccatcgaactctgacaaattggctgcagtttcaaaaatacacgttgtcccacttgaaacaccctttcagatcttcctttgtcagcttgtttt

SEQ ID NO: 39979 - DNA, 292 bp, Zea Mays
caagtagtaggacagaatggtgatgtgaccaagacaagtaaagggccattgatcatgaagtgtagcaaaatagctacaaaagagaccaagagagtatagttgcatcaatgatgatttgctaaatggacgagactcagctaaccaaagagaaaaaacttggcttacctgacaataaatttgtcagacacgcatggcatggacaaactgttgtgtagaatcggacatggatgcaatggaatttaggaaataggcctcaatatacacagaacaacacccagtatggacagagaag

SEQ ID NO: 39980 - DNA, 340 bp, Zea Mays
aattctgaacgtggtgtgtaaccatgtgatcaaaaaggctgcgtcgccacaacctgctttgaggatcgccggagattcaactgacaggactgccaaccggctctccgaatgacactaagcacaaaatgctgctgcttttcaggtgctgtcatgtgcgtgtgtttcagaaatcgtggcacccatcttattcgtctgctttttgacctttgaatttagctagctctttcaatgaaagaggaaaatgacatttttatacatacacaacaagctgtaccgtaatagatgagctcagcattaggtcagggtgatctccgttgatcattcacatcctagagcttga

SEQ ID NO: 39981 - DNA, 398 bp, Zea Mays
cacccctgccttgtaccagaaataaggaagtaaacatgtgacacatttccttttccattatttaccctaggacttttaatctcgggacgagattcttttatggggggaaggatgtaacacccctggtgttactataactaaaacttgagcatgacatcatagcattggcattgcatatgtttgacacacctagagtgcattcactaggcaaaaattttcaaacaagttgtattgtttaaagtgttttgcaaaaagaaccctggttaaaggacttaaccctaaatagtggttaaaggggtaaaacttaacccaagataagaaaaccaaaagactttagggtaaaagtcataaaatgaccctaaggataagcttgaatcacttttatacccctgagatac

SEQ ID NO: 39982 - DNA, 340 bp, Zea Mays
ggaaccattcgaagaattgaaggactatctgataaagcttacaacactatctccaccttcgacaggggctcccctgttactctatgtgtcagcgtcgtagacaactataagcactgcattggtctaggagacactaaccaaaggtataaaaagtcagatgcatgtttacttcatctccgaagtattgagtccatccaagagaaattacagatatatggaaaaggtccttcatgaagtcctgatggcttcgagaaagcttccgcactatttccagtcccacaacactattataccatcatcacagccactgaaggatgttataagaaacagagaagctccg

SEQ ID NO: 39983 - DNA, 332 bp, Zea Mays
ccacccggatagagtcacagggcaagctggagccaaagtgggaaggtccattcatcgtcaagtcaaaggcgtcccccagcgcatacaggctaacaacgccatccgacgaagacctagaccattcctggaatattgacaatctacgcaaattttttgtctaagtcttcagggcctgcgcgcccttgtaattcaccaaacaacattattcagacccgcactcttttcctcctggggggtgagatttttaatgaggcggagccatgtaatatatttgcaaaaatcccccgcaaaaactaagatgcaacatgtcgaaaaagaccgcatcaacggtc

SEQ ID NO: 39984 - DNA, 397 bp, Zea Mays
ctttcgggcttcctctcatccaagggggagggatgtgttatttggagttatttgtctttggtagagatttttgggagtattgtgacagggggaggagagttgagccttttggagcttttgctagttgtgttgagccgtttgcatctttctgaaggaactagctttgattttagattttgtgctgattttatgctctgaattgatttttatgctccgataaagctttttgtgctccgatgagatttgttgctactggctaatggtgttgagccctgtttttgcctcttattgagggctagccttttattgcttggtcgtgttgagccgttgcccatttctttggggaccaagttttgcttactctaaatgacttgtctggcttttatatggcttttgg

SEQ ID NO: 39985 - DNA, 557 bp, Zea Mays
gcggtgaggctaaaccgagtggagttcggaagtgaattgggaaaaattcaaaattagagttctcgggtgggggtttgggatgcaggtgggtgcagtagctgcgtgaatacttgacggtgctgaggacgcgctcaatttatagaccccaaggtcggtagctctcaatttgaacgcgatgtgttggcggccggagatagggaagaacacggtggctgtaaccgtggcagtcaccggtgtaacggcgcaaggagaatactcctaagggtgccacgcttacaaccgcgtagtaacaagcttaggcgtggcgcagccgaggtcaccggcgcttccacggcgactccggtagttcggccacgtcgcagcgactatacccacgacgataaactccaattcgcgatcctatcccttccccgtcgtgagatcttttctctgccgtagttatccaacctccagtgaacacggatcacggcggcggcgtgaatcttcgcgcagggaggtcgccgtcgacgagcaagccacgctggcaaccatatccgttcagttactgtaccatggcg

SEQ ID NO: 39986 - DNA, 512 bp, Zea Mays
cgattaggtatgtcacgcggcccgcttgatctaaaatcaatgacccagatcaattaggtgaacgggtatgcgagtgatataatcctagccgctcaccacagagtcaatagctagattcctttcttctttctccagtcacctgagcggtccagagtagagagctccacggcggcggagatcaccggtgtgtagtgctccggcacccaggtgccccatctaggatacggagctatgccgaacaacgcggagggtatgaagaacataatggaatgcatcataccggttatggtagcgttagtagtgctgcccacgccgcgacatgcatccacgacatggccaacccatcagcaagaaatcatcttcacgccatggtccctcgcgtgccatgggttacctgagcgcccacccagacactcggcggacatcaaaggtcaaccaatgggcgcaaatcgatggggtggtcacgatattgcgacagcggagcactcctttttggcgacttggtaatggcg

SEQ ID NO: 39987 - DNA, 279 bp, Zea Mays
caacgtccttgttgcccccaatatcattcaaaatcttctttccgttcgttagttcactactgacaattcttggtctatggaatttgacctgtttggtctgtctgtgaaggatcttgccaccaggacccttctcgctcggtgtgacagccacgggtccctctacacgctccgcctgtctgcttcccctacatcgacttatgccccgcctgtccttgcaacggtcgcctcctctgtgacctgccatcgtcgtctcggtcaccccgggcgtgatgtgatgtc

SEQ ID NO: 39988 - DNA, 354 bp, Zea Mays
gaaaagtggggaaatatcctgagcaatcatatattttatgcaatcatgagtaatctgtatcattgattgtaaatcatgcgttctgttttgtttcttagtgcaaataccccctcattattcgaagacgccatatgatgaccaatcaaatgtggagatttctaagctatagcggccacgttttttgttgtagtatgcatatcgtatcattttctgcctggagaactcaggtcagatggagtttaactgcgcttaggaaatgatgattagagaggattgtgcagaaaccggcaaaattatcttttcaaaaggacaagaccactttttttctctctttcataattcataattgttgtc

SEQ ID NO: 39989 - DNA, 367 bp, Zea Mays
tcagttgccaagccgatacgaatgtttcttgtatcactggcaaaatctggatcaaagttgtcaagagccttccatgcatcaccatctgacgggtgcaccattaacccatcttgtatgtccgtacaatctttatgccacctcatgtgcataacggtcttcctcgagagaaacaaatgtttcactctaggagtgagaggcatgtaccgaagctgtttatgtgcaacctttgtcaccaccttctccccatcttcatttacaagctccacgtacctcgacttcccacattttaagcatttctgctctctgccatgttccttccaaaaaagcgtacaattgtcctggcaaacatcaatcttctcatactcca

SEQ ID NO: 39990 - DNA, 685 bp, Zea Mays
gtttaaaaggagcctgacccccttttttatagtttgcttgatcgctcgttctcctttagctagcgaggtggtactatgtgggagcgctgcgttgcgtgtggcttcctatcgtgttgggtttgagtggtttatcacgacccttctgtggtgtaccgacccattggtaggcgagaagcggggaagagaaacaggctgacacgcttcgcacatgacgcacacatgacacacgaaattgatgcttgaaagtagtagagattagtaggcaagaagcgggaaagaggaacaaacctacacgcttcgcacgcgactcacgacgcacgaaacttgtgcttgaaaggagtagataagagaagtatgccttttaagggcttaatcattatacgagtttctatcaagtcctaatgagccaaaacagattagattgaaccacttagggaggatcacgaagacgtttgtgccatcttgttgatgtggccgagacgtttgtaccaccgctaggcgtcgttgtccttgggttgggcaagctgcgctacctggcgcaccatctgaagccatagtacgtacaactgattcttctgcagctccacccgggcgagcaaccggtttcgtgatcccagatgcgaaggatgccgtgctcgacctcaacacgggagccaccctcgtcgagttgacccacactgatgat

SEQ ID NO: 39991 - DNA, 319 bp, Zea Mays
gaacgcttctttggaagcagccatcgaacttagctcaccaccgatggttttggcgagggagactaggatttgcaacgagtgaacacgcaatccttcccgaccatcgacggcagcttcgaacccgtcaggtttgtctttgtagattcgcctcccatgcgattttccctcccttcttccactcttcagtctctgtgtcgccatcgtgcggacgcgcgcggtcactgactacgtgttcaccttcgacgtcgtcgctcgccacccgttcacctgcaactcttacaagcattgtgttcctcatcctctcttttgtctcctgccg

SEQ ID NO: 39992 - DNA, 280 bp, Zea Mays
ctcatccatatctatcttaaccatatttcccaaccccgataatatacactaacctcgaatcaatgagaccaagaccggaggagaaaagatcaacattgacaaggaagggtataacggtcaaagcgaatctcgagatgaagcaggacttaaacattttggataaagtattttccttgccataatctttcttacctcaatatgttcagtttatatcccacataaatagtagctggatacctatgctctcccaatcttccactacctccaccaccaccaccag

SEQ ID NO: 39993 - DNA, 354 bp, Zea Mays
gctaaaccccaaagcttcagctcatctccagccattgccatagctgatctaaggcaaggagagataccatcaaagacacaacagttcatcatatcatcaacataaagaagtgtgcggccacaagatggagcatgaataaacaaggcaggctcatgagcgctcgaggagaaaccaacatcagtgatcatagaggcgaagcgttgaaaccaagcatgaggagcttgtttcagaccataaagaagagagcgacgaagatgacaaaccatgccttcaggaacaaggtatctaggaggtggtcacatgtagacctaatggagtccatcattaagaaaggtatttttacatcaagttgag

SEQ ID NO: 39994 - DNA, 400 bp, Zea Mays
gtcattataggtattaatctctctttattcttccccctccaacactctcgatctatatattggagcatatactgcaacgtcaagtgttggtgtgcattgtggcagatactgctggtaatgaactaaggatgccttgtcttgtgttgaagggacctaccccacctgcttcgactttgtcctgttcattcctggcatgctacactagagattcttaaccattttctaccatgagttagccccatttttttcaaatatatcatctatcggtgagacctctgctgctgtagtgtcaatgcttgttcacggtccagagctcatttgggtgttacctataatctactatccttggtgttcacagtccagactcatttgggtactgcaaacaaaggcagagactgat

SEQ ID NO: 39995 - DNA, 465 bp, Zea Mays
ccacgatgcgacgcgaaccaacaatccgacaagcgttgggagaagaggcctcgcgacgaggttcacgacgtcggaccacccgtctctcgtgcccgaggggcaccccgtggaggtgaacgaacattggacgacatcctcgatgcccaatgtctgtaccacaaggatatgcgccacacccttcggaactatagagacttcaagcactccgtcgggaacggccgacccttccaacctctgccacctcccccaccacgaggaggaccctgagaacctcgacaacctcagcaacaggaagggggaggaggcggagcattcccccgcattgacagagaagtcaacgtcatcttcggcagacacgggtctcaagagagcaagaggcaacaaaagctcaacgaccgtcagatactggtggcggccactggtcctcccgccccgtaccgatggtccgaacacccgatcactttc

SEQ ID NO: 39996 - DNA, 749 bp, Zea Mays
cacacgatcacgattggacagagagtggagaactatttttggttctgcacaaaaacctgcaacttctctgttcttccttttatacttactgaagaggtaattgattgttacaataatccagccgctaagcacgcaattgacgcgtccatccccatgtccacgctaagtagctggctcactaatctaccactactacatgcatggctcacttgaacaaccggattggcaaccaggtgacgcgactgaaaatgcaggctgacaggaacatagactgaaagttttgaaacaaatacaacaacatgatgaagagctgcagtgcaaagctttaagtaacaactctcctcctaaaccttgcgcagaagcttgagattgacgaggccgattcttgtgcggaggtcacagaaatgttcccgcggcagggctttcgtcaagatgtctggcaactgtccagttgtgctgatcggaaccacacggttcctcccttcttcgatgcattcatgtatgaaatgaaatctagtgtctatatgtttactgcgattgtggaagacatgattcttactgagctagatggcagattggttgcccacgttgatcttcacagcgtcttccttccctcctctcagttctgctagcagacgcgagatccgcattccttggcaagcatccgttgttgcagcaatatactctgcctcacatgaaggcaaagaaataaccttctgcttttgatattgccagttgatgccattgtt

SEQ ID NO: 39997 - DNA, 282 bp, Zea Mays
ggacctaaccttcgggttaactaggcctcagtgccgcatgacgccggggacatcatgcccaaatgatgtgggcgaattcagagttgtgtctgaacatattggtactagagatttggttcaggaatacttagccaatagagtatttccgacgttaaaggaatggagtatgctgaagcttaaaggagagaagaaaaagaatgaacttgttcgactgccttatcattttaaattcaagaaacacttcaaagagccctgccaagaatggttggatacaattgaagt

SEQ ID NO: 39998 - DNA, 442 bp, Zea Mays
ttccatgataactgttgcactgctcagtgtccctgcgccaatcgctcctgatggctggtgagagaacagatgcggaatatgtgaggggtattcagaaaaaaaatacaagaggagaaaatcccagtacaagaactttacatgatcgcatccgattatgtgaagggtattcagaaaagctacctgagtgtgtttgatgcaagtcgtagtcctgttgttccaacagatcacagtgtcctttatcgaagatccacacaaggtgatgaagttcttggtcctaggaatgcgcacctgctgccggtgcacaccaggactgatcctgatgacggtgcccacttggttgttcgacggaacaacatccacgacgtcctgaacgcttgcgaatgagacgaccccatcataacaaaggactactacctcaggagacgcaacaagcagaaccctc

SEQ ID NO: 39999 - DNA, 280 bp, Zea Mays
aaagggtacgctagggatctaatctcattcactcgtgcctaatctaacggttcacgagcaccttcctcacctcgaaccctatgtacggcgacgccactgttccacgttggaaacatgccgaccccgatggggttctgccagattacaacgatgcccggcgccctcaccagcacaagaccgaacgtagacacaatctaacaggaaacaaagaaggtgatgacgaaggggcagagacactcaccaatatcggagacaaagatcgtgtcaatgctgacctcgg

SEQ ID NO: 40000 - DNA, 557 bp, Zea Mays
acagggttttacagggtctctttagcaaatattacatcacgaaggggtacaggtagaattcagtcgttggatcggcatttgagggctcggattagatcaccatcatctgtgaaccgatactcaatccgggccgcaggatccgggatccatggtctagatttcatgggcgaagggttatgtggtcgctctaatcacacccgcacatcgtccgatagacgccctagatctaactgtacgaaggggtatccagatatctaatctccaccgcccacatctggatggacgacagagagatcatcttccccgcagccctccatagccaccgcggcgcgacccaatacccgacggcgccatggccgaggcaatccgcccgcgttttctaatgcccgactaccatgcgaataggtgcctaccgaaggcacatcataccgaggattagcatgctgacaaggctgtccacgcaccatggcggagtttgcacgacgatgagcaattccggaatcgcaacccaccaccaagacccaaacgaaacttagacgcgatccttggctcccgac

SEQ ID NO: 40001 - DNA, 363 bp, Zea Mays
atattttctccaagatactagtaacgtttatgcatccctcagtttgttccctgagctgtgtcctcttcctttaaacagaatcatggtaggtctgccatcaatggaaagccgggaactcataatgcggcgacttctgtcaaaggagaaagttgatgaaaggctgaacttcaaggagctagcaaccatgacagaaggatatagtggaagtgatctcaaggtcagtaacatgaactctcgatttattttttctgagaatgtgtaagagagctgtgtatcgttgtattgagaactaaagtagagatcaattctgctcgatcctgaattcttctttaacagaacctgtgcacgacggcagcatatcgc

SEQ ID NO: 40002 - DNA, 461 bp, Zea Mays
cacgcatgcaaatgcaaggcttacatttcgttgcactcccttgtgacgctcacgtacgttcttttgttccgtgaagcgcagcgaccggccgggaaagcaacagctacccaagctagcaaagcttttgcgacgacgtacgtacccgacacccatcggcgcacctgcatccatatccatggatgcaaatatgatgcccactggccactggtggcagtgcactagatagagtacagctcgccgagcacacatcacggtacgtgcctgcgcgcggtcactggcgagatgcatgcatgcgaacggcggcagtgcatgttctcgcccgggcctccattggtctagaatagatgacatagacctttggatggatcgcatgtgttggaagcacgctggttagtgttttttttttctatcgggcggctcgtcctgctagtagtgctgccgcgaaagccaagttccatcgc

SEQ ID NO: 40003 - DNA, 561 bp, Zea Mays
gccatactctatccggtatctactggagtcagccatccgcaactgtgacggttttcagattacagagaaggatgtcgaaaatatcattgactgggagaataccgctcccaagctagtggagatacccttcaagcctgcccgtgtgcttctgcaggtgtggaaatgaaccgacttcattcttcgcttcatgtggtgtaaaataattattcattttctctctctctctctctctctgaaggattttaccggtgtcccagctatcgttgatcttgcaagcatgcgtgatgctatggcccgactgggtgatgatcctggaaagattgatcccctggtaggcagcactcaatacagtgagacacattagaatcatcatgtaaggatagtcatgccactgatcatcttctaatatttctcaacttctcgcctttttgctattcgcttgcagattccagtggatctagtcattgatcattcggtacaagctgatgtggtaagatcagagaatgccctccaagctaatatgcagcgcgaattcgataggaacaaggagcgcttcgcttt

SEQ ID NO: 40004 - DNA, 519 bp, Zea Mays
tttcacaagatgacaagttcacaatttccaatataacaagtttacaatataacaattaacaactccacaatataacaagttcacaatataagaagctcacagagatcacaattcataagttcacaagttgtctagttcacaagtccacagttcataagttcacaaagttgacaagtttacaagtccacaattcccaagtttgaaaggtcacaaagcattacacaacgaatacaataagaaacacccataacattcatgccacactagcgtgattaaatagacattgcacttcacaaatcacaattcacatatgtagttcacataaaacctcatatgcagttcacaattcacataaaacctcatatgcagttcacaattaattaaatggacattgcttcaattaaatgaacattgcttctaggtgcagatggactgacatgtatgctggttgcaagagagcagggtaactgtaattttggttgaacatgcaagtatgcaaccctttggtgcatattgaca

SEQ ID NO: 40005 - DNA, 319 bp, Zea Mays
tggcggaggaggcacagcaggacgacgacgtccagcagtaggtggagcaataggacgacgacgtccagcagcaggcggcgcagcaggatgatgaggacgctcagtaggacacctcaagttctagcgtctcaggttcgaggaacgtcaacctgcgaggtcccacaagtctccttcggtgtcccatactttgggacaggcggtcgctaattcggccgaatggggagaggcatgtaactttatgttctccatgcttgttcatattatgtgttcaaaatcataatataaactaatactttttatttatcacttggacatgtct

SEQ ID NO: 40006 - DNA, 275 bp, Zea Mays
tccatgagttcaccgtagcctccgcattgtgtcgatgccgttaaatttgggaatggtttccttggacacgggcgggcagttcaccggcgtaatcgccgccgcggtggagttctcggcggctgtgtgcccagcgtaagggaggagacgggctagggccatcgatcttgcgatgtgcggttaggatcggattagggcaaaagcgattctctgccgttggattccgatcccgcgatcacggtttgatctgtagatttaaaaccgggaccgtcagatct

SEQ ID NO: 40007 - DNA, 299 bp, Zea Mays
ccggagtgcaagcagaggtagcgggcggaaacagtggtgttcttaccagttcttgtacgccgcgattcgcagaccatcgtccatggcatcccgcaactccacagtggttgaaaacaaactccaacgcgaccaccagggctggcgcggccacacgcaccactatcgcgaggaggagacagccactggcgcgcaggagcattaccatccgtctccctgaccgatcccacgaccaagcagacgggatggtgcgccacggaactccctccaatgtcgaccgcacgcagccacggaactcccag

SEQ ID NO: 40008 - DNA, 433 bp, Zea Mays
cgtgggtctttcaagaatatcaaaatacgagatactgtcattagattatgctatttctttaatgaaataaattcaaaggtgctagatattgaagcccttgacaacttacaaagggaattggttcaaactttatgccaacttgagatgtactttccaccttcattcttcgacatcatggtacatttgaccgtgcatctagttgaagaggctaagatttgtgggccgcatttcttacattacatgtacccgatcgaaaggttcatgggaatcttgaaacgctttgttcgaaataaggcacgcccggagggttctattgcagaaagttatgcaattgagagtgtcatcgatttctgtgtggactacatggatgaggtggcaccgattggccttccactgtcacgccatgagggaagacttaaagggcaagggggac

SEQ ID NO: 40009 - DNA, 536 bp, Zea Mays
tgatgaattatagcaaaattctgcccacggtaaccatttcagccatgatttaggatggtccccagctagacagcgcagatacatggtgattattttgttaacaacttctaaaaaaccatcggtttgtgggtggaatgctgagctcatttgtaacttcactccagccatggtaaatagttcagtccagaactggctagtgaaaactatgtcccgatcactgactatcgagcatggcagaccatgaagtttgacaatttcatcaaagaaggcctttgccactgatgctgctgaatatggatggcctaaagtaataaaatgaccatacttagagaaccgatccaccactgttagaactactgacttgccaccaacctttggaaatccttcaaaaaagtccattgatatatcagcccacaccatagagggaattggcaagggttgaagtaggccggctgggtgaagatgctgagtcttatgttgttggcaaactgcacagctgtgcacaaactccctgacacgctggagagctttagaat

SEQ ID NO: 40010 - DNA, 458 bp, Zea Mays
ccgtcgaagctagaccttcggaaagcgctccgataatcctgaagaaagagggcgcttctaagaaatccaaatctcttgctcctaaagctcctggtaaagagctggaattcattgtgcgacatgcttcagagaagcaattatcagaagagcaaattgctgaagcgcaacattatgccaaggatctgaagtacccccgaggttccttggtgtatggtggcgatgacgaagatgatttcctttattgtctaccagacaataaagagataaatgtctgccagaaaatggcggacaatataggctatccgaagcttgaactcggcttatctgcgatgtcgaaggatcagcttgctgacagtcttgcttacaacagcttgaaggtgtgtatgttttggtttgtcattctataatgacacatttctatggtttttcttacccttatttcatgctcatttttcgct

SEQ ID NO: 40011 - DNA, 491 bp, Zea Mays
cctaggttatgatttttgagcgcgtcttggcagcagtcggggacatgttctttcccgcacaatgacaatgccattgatgagttttggtgtttcaaaggtttaggtgaagatttaggaagaaagctaagattaccttgtagaaagattttttattgcctcctatttcagtcctttggtcaataaatcccccctagatccacgtccacccccgtggatcaatgcatcagatgtctcctctcagacctgagttctgtttcacccccaaggacaagacacgacatggaagactcaatgcgtgctgattggatcgtttgctagcaataccatgggcactttctggcccatggaccgctaggcgttccgcgagtcccctctcccctgggttgtctccagttctcctcccacagacttgccacttgcacaattgcatcgccttgcaggaaccaggaagaagggaaccacgccaccacgggggtcggggtgcatcatcc

SEQ ID NO: 40012 - DNA, 491 bp, Zea Mays
atgaaatattaagagaaaatctcttcaatgccatcaaaagctataacaataccttcaatgccatcaaaaaatatgtgttcccttggataccatcgattttaatttttgatcccttgaatgacattaccatccataagcagttaaacagcagttatacatttgttcacagaccaaaatacccctttgttcacagaccacacaccatacaaaatatatatctcatttgttcacagaccatatcctagtatgataggtcatactggtgcaccaaagctacaagtgtcctcacagaacctagagatatccagaacatactagatatattatcaagcaaaataacgcatgcacaatgcacgccacacaaaagtgatagggatctcaaagtgatatggaccaactacagattcaagtctggaagctttctcttgctccttgtgtgggcagcagggctttgcctttgaggagttctgcttcttgtagacattgctgga

SEQ ID NO: 40013 - DNA, 506 bp, Zea Mays
gagaggggagactagggcggcagggtcgtagaggagagggatgagagattatccaaataatattgttcattatatttcagtaggtaagggagagaagttatccactgatctgaatcattcgttttgatggtgtgtgtagtctgggtgtattttgtttggtggatttagtggaggttatgggtgtggaggtgatttgattgtgtgggttttgcaaagtttaaacttgtggattatatagtggtcggtgtttcaaacatagctccgacaagtaaatttgttcatgcatattctaggttccggatggtgtgctcagaggatgcgagatttatattgcttcgagcagaacatccctacatccagttttctgaggttcacgctacaggcactgttgttgctcaatactcatggtaggggttacaagcgggagagagggaaaaggagatcttaagtatctaatgcatggctagacctaagaactacgggactagagctcttcgctaagcctt

SEQ ID NO: 40014 - DNA, 364 bp, Zea Mays
cattaattgatcctctttcttggtgtagttgccaagaatttcattgcacattgtttcgatcatttctagccactctttgcatggcttattgaattgtttctcaaatttaaatcggtaagggagccaaacaagttcgtactttttgcccccctccttcttaggcattccccagccactagaggtcggaaatattctatttgccaagtacttttgcactagatctctggtgctgatttcggctgctaccgctctgaattctacttcggctacttggcatggggagccaagctgcatgtggcacaagggccttgtcatcccgaagctcaatttcaatggactcatgaccatagtcattagcttctcc

SEQ ID NO: 40015 - DNA, 383 bp, Zea Mays
gttggttctcttggtctgcccatcagtttgaggatggtaggctaaactaaaattcaatcttgtatccaagcactcgtgcaacttcttccaataccgagaagtaaagtgtgatcctcggtctgacacaatcttcttagacacaccatgtaagcatacaattcgtgccatgtacaactctgctagcttggctcctgaatacatgatctttactggaataaagtgggctactttagttagcctatccacaatcacccatatagagtcatacctagcagatgtgcggggtagacccacaatgaagttcatgccaatctcttcccatttccactcaggtatcttaagcaggtgtagcaaaccagcaggtctttgatgttctgctttca

SEQ ID NO: 40016 - DNA, 358 bp, Zea Mays
cataattgcgtcccacaacctgcaccacattggttgtcaagcccttacaccataggtatggcaccagtacaccactatgggtacacgcatggacacaaccaccataactagtgattacatccaccatgacgtgtaggcgacaatgccataggactaagatgaacttacaccttctatagcaacagtaggcgaggtatgtctaacaggatggtaccacataacttgtgatactctcttccttggactataaaagggataggggtacccctctataagaggggttcaaacgtccaaacccatccccaaaccaaattcaagccaacaactcaaagacaagatcaaactgggcacaccagat

SEQ ID NO: 40017 - DNA, 276 bp, Zea Mays
tgggaattcacctacaagtttgggtgctcgacttgaagaccgcaggcagggaacaggggtggcactggaatttctcgccggaaggcgggcattgccctgtttctgcctttgccgtggttgggattctctgctacgttaaacaccggtgagttgtccctaacctattcgcaagaagctctatgttgtgttgcgctagggccatatgggatggttcatcaagcgccaggatgtatggtcgctggtgctgcgtcgcagcggtcaacgtgtgccatggag

SEQ ID NO: 40018 - DNA, 645 bp, Zea Mays
ctcaaacgtaaaagtaatcaagacacagacgcaaccccgcggtggatggcgggttgataaatgtaaaagacagggtctcttttgcaaggttacaccaccaaaagggtatatcgcgatatcgtccgcccgatctagaatcaagggctctgattagaccgagccctatacgaaccagtacgtgcgcggtgtcgttggatttacatccgatggtttagatctaatgtacccgagttctaatctcgcgcatccgatccgaaatggacggctctcgctaccctaacccaaacgatacgccatttctaatctggaccgtatgccctagatccaacggtacatgatcgacgtcgtctacccggctcatggccacggcggcgccattccttgcggcaataatcccgccggcgatcgccgtcccggctattccgagcacatcacacctatttctctagcgcaaaaccaagggaatgaccgcacgaatacggaggttgggtgctcaccggcgattagggcacggaggtcccaggcgacggcgaggtgtggctctgcggtgaagatcgactccggcgacaaattcccgcggtagatcagcagttcagctccccgtatcgcccccgtgtagacccccgatggctctaggaacaccac

SEQ ID NO: 40019 - DNA, 311 bp, Zea Mays
gttgaaatagaggctgactccaagaattttggaaaattgaatggaagtcttcaagctggagccaataattttcaaatctgaagatgtgcggtttgggaacattaatttggacattgaccatccaaggaatgtgatccgaggttcctctagtgagcgagagtgcagaagtggctggaaagttgacagaccatgcgtgcgacacaaagcaccaatccaatttttcaagtagagggtgacgttgcatatttgaccaagtgtaagcttgtcctttgagaggaatttcctgaagccccaactgactgattgccaag

SEQ ID NO: 40020 - DNA, 427 bp, Zea Mays
gactacgcgtcaaatccagagaagtgcagggattaactcgtaaatttattcagactcaggttactgctactgtggacggcgggttctatttaaaacaaacgtaggggctcatttagcaatctgcatagccgaaggggtatggcggcccatcagtcgtttgatccaaaatctgtgcaccagattagactcatgctagttactcattagcgctctcccctggacgtcggatccgggatccatgggtgcgagcccaccagcccgtaataaaatccaacgcctaggcacaatgatcgacggacatgatcaattccctgtcgaacgaatgccctagactgatcccagtcgtctatttcataatctatggacaccttggcgtcatcaacctcatgacgcccaggcacagccgtcgcgccatacccaacacaca

SEQ ID NO: 40021 - DNA, 381 bp, Zea Mays
cggcgttccgcacccacgacggactgtacgagttcctggtgatggctttcgcgctgtgcaacgccccgacgacattccaggccttgatgaacgatgtgctccgcccgttcctgcgtcgcttcgtcctggtattttttgacgatattctgatttacagcaagacgtgagttgatcaccttcgccacctccgggtcgtcctcgacgaactacgacgccaccaactcttcgtcaagcgcaccaagtgctcttttggtgcttcctccgtcgcctacctcggccatgtcatatccgcggcgggtgtggccatggacccaaccaagatgcaagcgatccatgattggtcggctccactttcgccccgggctgtgcgcagtttcctcg

SEQ ID NO: 40022 - DNA, 358 bp, Zea Mays
catgtagtgagccccaattgggcatggtggtcagccagttcaagaggggaactggtgggtcaggattaggctttgctgctaaggatgggagtgttgcttgctttgggaagattggtgagtggagtgtattgcaaccatcagagaaactatcaactactcccaagcttatcaaaatcatcccacctaagcctatcacccctatgaaagatggtgtgattgaggagcctgtgagagcacttccttagaaacaagtgtgggttccaaaacctaaccacctaaggaacacacttgacacccttgccgacatctctagtgatccccttcctagagcccctcaactatccaaaaataaagcccc

SEQ ID NO: 40023 - DNA, 544 bp, Zea Mays
tggagatatagccattttttgcatttagacatttggttgtgcagcattgtgtattgaaaagcattttttgcattatgcttttcattagcttaccatatgagctgagctgtccaactttaccatggaactcaatgacccttgtacaatataagtttgcatgtgccatttgtgtttatttgagattgtgcgaaaaggtgtggagaagtggcgcattagagctggcttggtgatgtggtgtagctagtcattaatgcactcgcaaatgagatgcactagccatcagagctctcacaaatgagatgtgctagcctttggaacacacacaagagggccacattcatggagttggatttgagctggcatggtgtctggctagctgttagagcattcacaaatgagatgctctaactgtttgagcaccacaagagagtcgcgtccattgagttggatttgagctggcaaggtggtgtcctctagctcgctgttagaacactcacaaatgaaatgctctagctgtaagagcacacgcaagagatgcgtccat

SEQ ID NO: 40024 - DNA, 281 bp, Zea Mays
accgtttgaggctttgtatggcaggaaatgcaggactcccctgtattgggatcagactggagaaagatagttctttggacccgaacttattcaagaggcaaaggagctacacagataatagaagaagaccactggaatttgaggaaggtgatcatgtgtacctcaagatgtcaccacttcgtggaatgaggagatttaaagttcagggcaaattgtcccctcgctttattggaccctttagagtttttaggcaagttggagagatggcctatcaactcgag

SEQ ID NO: 40025 - DNA, 386 bp, Zea Mays
gaataacgttaatcgaagtctctcattacaaagacactacgcacagagtcgcccacgggcgcaaccggaccaacacaagcgtacaaatacggccaacaggccgcatcaccatacaaattacaattacatacacacggcgagggcatcacaaattacatcggctcaaccttcgggatgatacccatctccctgtaatgaaacaacattatcctcaattcctcaccctcaaaaaacttccgaagatccccctcgcctatgcccaccccaatcggcgaggacaacaattctcgtttaccaacccggtctactcggagacggccacgctccatccccaaaatcgtgaaaattcacccacactatgttttcccaccacccttcgccgccta

SEQ ID NO: 40026 - DNA, 382 bp, Zea Mays
aaatgttggaaaattgctatgcgtgaaggagatttgttcgatttatctctgtcatgaagtaagaattgagtctgtgttgtcgaggcatagcgggagtgcataacgctgttcatgggttagagtgtaacctttagttattgcctttgtaaagtagggcttgagtgcaccctgagtcaagcgacgcatgtagcaccgaactagggtcgaacttcaccgctcgagccgattgcctcatgttagtaagggattagaggtcacccatgagtcaagcgaggcatgtagcaccgaactggggttggacttcgctgcccgagccgattgcctcgtgtaaggaagggcttagaggtcacctatgagtcaagcgaggcatgtagcaccgaac

SEQ ID NO: 40027 - DNA, 779 bp, Zea Mays
tggacctgccacctgacgagcaacaggtcagcaatccacattcggacctgtcctcggatagttcttctggtcacattcatggtgccctgctgcagaatgcgcaaattcagaatgggcagattcctgatgatctggtggttgtggggccggtgcccaactttaatgcccccgccccctgccttgggtgacatccctatgattgggccccaggaggttgacggcccaccaattcagggagttcttcatgtgcctggggatattgttatccctgatgcctagccggtggaacctaacgttaatggccacaacaacgtgatgttgaactttatgttttcgcatgactggcagccggaccctgttttgctgagtcacttggaaaggaaaaggaatgcccagttctataggatctgggctaactattttgccccgactggtaattcggtgacctcggtgcaggttcccaagaaatgggcgccctttttcctatccaacttgctgcatgaagattcttttagttggtcaaaatctttcttgtcttcagatattccttctgctctgatggagccagagactaagacacatccctttgtcatccccaggaagtgccctgatggcaagttccttgattcggtcctttctgaggaatctgctgacgacgcttctgttccctcagacccggcctcctccccaccaaaacatgttgttgtggaatctgacctgaggagaagcaagaggctccgtgacgcccgggctgggttcagacagggttcctgccagaa

SEQ ID NO: 40028 - DNA, 329 bp, Zea Mays
acctcaccatatttagagaaaccttgtagtaatttggacttttgtttgtatcttgaataacatggctatttgttcatgtctgacttattatcaatgcttttcgtgtaggagtatcaaacaccatttcatttttcttgtaagatgcatgttgtatgtcgtatagaaaaatacaatttgttacatgtttttcatgcctattgttgaaagaactgcaatccaaacattcagatgaacatatttaattcaggtataccaacaatgaaaggtgtgcaactatgagtacagagttctgaaactttaattgtgccttcatagttctgaaacttcaa

SEQ ID NO: 40029 - DNA, 307 bp, Zea Mays
aaagaatgtctcccaattgcattttctggtctcctacacaaaacaaacaataagtacggatgcaacaatacatctcatgccatcaagaacaaatgtcaaccccttcgtaatctaccatatggccacaaaaataccctacatcaagctccgaaggaactagtccatacttagtttcaacacaacatttgcagagtacaggattggacttgcactcttccgcccgctcattctttttcttctcctttgcctctggctcaggccaatgggacctaggcccatacaaccactctctaaaatacacctacgt

SEQ ID NO: 40030 - DNA, 373 bp, Zea Mays
gaaaatgtgctcgttacttcttggaattggctatatcttgcggactttgcatcattcaagccaacgtatatcccggatgatgacccgtctgatttctcattctactttgacactggaggaagacgacgatgctatctagcacctgaagtgagctcctcaatctaaattgcttgaaatttatatgctacatctttgatctaacacatctgttttgttgtttcttctgtattttgtgaatgaataaaatttacgtagagattctatgaaagtggtggtgaatcccaagttgcagcagacgcacctctgcaaccatctatggatatattttctcttgggtatgcacattcatgttaatttttagttttgtttcatg

SEQ ID NO: 40031 - DNA, 704 bp, Zea Mays
aagagatgtcttcaccgagtgtcaagcttggatcaggatgctggtccttctgctcctgctgccgaggaagtgcccgtgccagtttttgctgaagctgaccccaatgggtgtgacccgactgatgctgatcccaatgggtgtgacctagatgatgctgaacccaatgggtgtgatccggctgaagctgatcccaatgggtgtaccgtctgcattgttgatgaagatgaggaaggggaggatgaaatccctctagttcgtaagaacagccgacgctacatagtcagcggggaaagtagtggtgttccttctccagctttatctgccctcattggtctgcaagaattgtctctagcaaactttgatcacactcttgaagacatggtcccagaagatctgttgtcggagtcgacagatggtggaatgatggatatttgtgttgatgtgcctgatgccgggctgtagttatctcgagcagcgtcccgtgcctcatcgaccttagagcgcggtcttaagggtcaggaggctggtctggattgttctgctcccatggaagtgggtgaagggccttcagccttagaggtggctgttacggagagcttggccctcaaggatggcgctagcgcttacccagcccccgagggtgttgtcggggatgacccggctcagatgggtagtgcgagctatgacccagcccctgagggtgt

SEQ ID NO: 40032 - DNA, 850 bp, Zea Mays
agagcgttccctgaggtactaccgaactctttctctaaagtatccccaaattccttgagaagatcatcaaggcttgctagggatatatcctcggcgttggaccaatcatctatccttgggggaggtggggctggaggggtcttcttcttcttcttctctgtttggcaccctcggttggtggtcttcttctggattttcttcttgggagcaagcttctttagcttcttgtcatagtccatctttaaggttcgataggcctcacgggtgttggcctcctcgccttctgctatgtcgagacactcctggagagatgccttctcttgcttaagctctttgacttgctgctctaggctttccacccgggagtttaggtgggtgcagtgggaggagagatcattgtagtggttgtcgagggtgtggaggtatctggccatgtagacgatggtggggtcatcttctgtggggtctcctcctgacagagcctggagtcttttcctccaggtgggggtatttttgttgctgggtggaaaatatcgaaggggggtctcagagatctctcgggtgtagttttggcacaactgtttaagggcttttcgggcaacactctggcaagtgtctgggaagcggtgcccgatgaaggtgacttggaagggagggtggtttgggtagttttggctttctcccaggtagactgccatagagcacttttctactccattttcacggtattccttccagacatattcgggcttcttgcggatccccatgcgtagcgcgcaacttcgtagaaggtgaggaaagccttcctcctctgagcagtaggatgtcctaataacctaggggccttcca

SEQ ID NO: 40033 - DNA, 296 bp, Zea Mays
gcacaaaatcgtctctggacagcggatagacttgctaaaagagggctgagtcatcttgagaagtgccccttttgtgatcaagaagatgaaactattgatcatctccttgttacctgttccttctccagggaattctggtacctgttgttacggatttttggtctgcattctttggctcctcaacctgatgttggctcatatctagctggtaggaatcggtggggaatattgctgctgggctcactagaaaagggcttgattcccttatcattctggagcctggaccttgtggaagc

SEQ ID NO: 40034 - DNA, 590 bp, Zea Mays
ctggcatagaaggtctgaccctggggttcgggtgaccaagggaatttctaggtgtgtagagggaatgccatgtttttccacaaaactagtgctatgaacgaatgagatgctcctgaatcgaaaagtacagtagcgggagtaaattcaactaggaactcaccgagcactactcccggagcttgctgagcctcttgagcatcgacgtggtttactcgtgccctaccatgatactgggtcttactctgctggctgttggaggagggtgccttggaggcgggcgctggggcattcttggggccattcaccgagttagagtaagtaggtcctgatgccttcaactgggggcagttattcttgtagtgactagggtctccgcagtgccaacaagcattagctggtggttggttgcttgcaacagagggagcctaaaaggagctttgaccctgctaactgaaacgtgacggagtgggtctagctggcttattgaagcttggtcccttgggtggaaacccaaaggatcgaattctctggtgcctgtcttgctgctgagctcggaggacttagaatttcctcttgaggtgacctttttc

SEQ ID NO: 40035 - DNA, 296 bp, Zea Mays
ctcggaatccaaggaaaaccagacgaagtttgtctgattttaattactctaacaccgattaaaatatggcgaccaaaatcattttaatttagttcccttacaactttccgaattctagccttgaactccggctgatatttacgtttgtatttaaactcgcgagtgcaaaaataaaagaaatgaaaatattttctccctcccgttgttctctcttagcccttgattttttccagttgctctcgctctctcagatttttttggccgcgccgctcaagcacctgagaaaattcccagcc

SEQ ID NO: 40036 - DNA, 634 bp, Zea Mays
gtcggtctctaaggagacttcctgatttgaagcacgtgctgctgccatgcaatcagaatgtggaggagaagacccaatgtggacatccatggaggtatgagaaggggagcccgctcagacaccctcgggggctgggttgcagcctgcattgctcatcggagccggatcaccaccagcagcaccctcgggagctgggtaatcactggcgccatccttggggaccgggttctctgcaacagccacctctaaggctgaaggactctcagttacctccatgggaatggagcaacctagaccagcttcttgactctgaagaccgcactccaaggtcgatgaggctcgagacgctgctcgggataactctaaccccacatccggaatgtcagtgcaaacgtccatcataccaccatctgttggctcggacaacagatcttcaggaaccatatccttgagagcctgatcaaaatttgctatggacaactcttgcagaccaacgagtgaagacaaggctggagaaggaatatcactactccccccactgaccaggtagcgtcgtctgtttttccgaattaaggggatttcctcctcttcttcctcatcctcgtcaacaatacgaacaacacacccattgggg

SEQ ID NO: 40037 - DNA, 621 bp, Zea Mays
cctcgattgatttggtactttgaggggaaggtcacagataggttttataggaagaggcgggaggaggcatgcacgaccggcacaacagagccgtaacaatctgcacacaaatcgtaacaaacctacgacaggggcggatttggtggtcctagagattttgtgcgatttgaatctgggttacggctgatgaggcggatccatagtttagtagtgtagggccgcggcgtattcaagtctagcgctagatcctgtcgatcccgtgttctactccatgggcgaactggaggtagatgagatacctaacaatagagttcactagtcactgaaactccctgtgcgcgaggtgggagcacagcgagcctgtccatagggtcccgctggttggcgaccatgcagttacacgtgcgcgtgggtggatccatcgctacaggtttcgtccaagcacgacgcgcatgcaacggctgagaagctaccttcgtcaagcggtatcagcgaaggggatggagctgactccatggtcccacgtatcactgagacaggcaacgtttggctggcggaataaagaatgagaaaagagaaaaaacaaggagacgtgggctacatgaagggttaaaggtgatt

SEQ ID NO: 40038 - DNA, 310 bp, Zea Mays
cagacggattagtgggttgttccataaaaatttgaggaaagagttcctaaacttgctctgtcagaacgacttattgggatcacgatggtatagtgaactgaacaagaatccaggttcagcgcatctcgtcgccgatgaactcacgccgcgatccacgccagcgttgcgattcgtgcccagtggtgcgcggatatctacgtgaggtgaaagatctcgcgcggaggatgaacttggggcactgttactgctcagtcgtcgtactcacttgaccgacaacgtggccgcgcgaccgccgtcatcgtgcccgccg

SEQ ID NO: 40039 - DNA, 448 bp, Zea Mays
ctcctttattataccatgcggtttattgatgggttacgtgctgacatcaaacaagtaattatagttcagagaccgtcagatctcgatactgcttgtgtgcttgctttggtgcaggaggaagccaccgattccacagggccccgaaggaatgagctatcgttccaccggacagctcccaagactcatcatccaacttatgacagtaacaagttgggccgctcggagggtgtcatactagaacccaagtctggtgatctgcatacgcactcatcccatgctgataaactggcatctctccgtagctacaaaagagctcaaggtttatgtgaccgttgcacggcgaagtggtcttatggacacaaatgtgcctcttcagtacagttgcatgctttggaggaagtcctcgaactggtcagctctgatagtgaaccagacgccaaggagtcca

SEQ ID NO: 40040 - DNA, 586 bp, Zea Mays
ttctgatgatatagtgccacagaaagatctcaggattcagtccccctcaccgccgatgaccttgcgcccagatttgcgccggtcgccgtgattcgtgcttggcacgtagtggatattcacggggaggcaaaaagatctcgcgggggtgaggatttggtcgcgacagaagcttatcaccaagcctgtagccgtgcgacgtggctggatcgccggtgtcgccgtggaagttctggtgacctcagttatgccatgtcgtggctcgttactgcacggtagtaaccgtggcacacttagaattaccatctttgagccattccaccgttgaacgccacgattaagccaccagtgctctcccctctctccggccaccagcgcgccatctcaaattcacgggccactgccctcgggtcctataaattgagcgtgccatcagtttcgctaggtagtcaagcatccaatacaccaactcgtgcctcagatcgtccaccagagctccctaatttgagatttcccccaaatcggtcaagaacaccgcgtgggtgagcacgccgtggccagctctccacaggtccgatcatgccctcct

SEQ ID NO: 40041 - DNA, 451 bp, Zea Mays
gcgaaacattagattattgctgtacgtactggaggatggaattgtccagctcaagaagaaaagaaagcgactgtgggaggagagggagaggtgagaaaagaatggtagcataggctagcatagcagagtgggtgtgggaggagggagagggaaaaaggagaccttgtagctactgtctgaccctagcatttgcgtgtggtgtgtggagaactgaagatgagatgacctgagatgaaaacaacccgatggcaggcctgagcatgcatgggctatgcatgctagtgcatgagcatgagagaatccaatcatcatcgtcatctgtcggtcggtcagtcagtcagtcactggccgtatgcatgcagctagccgctgttttgctgtcactcagctatctccacatcgatggggacgccatggatctgatgctacgacatacagtgctctctctttt

SEQ ID NO: 40042 - DNA, 336 bp, Zea Mays
gcaggtacaaaatgttaggaatcaagagaagctaaaataccccccatatccactaagtacagtggagcttcagaaacgtgcttctaggtactttagaatgagttcagagcacacaatgaaggtctaagaatatcttgtcttatagttttaatttcccttccagttccactatctaataatggacatacctcagtagcttcgttgtttgcttgttttttctttggtggtctcttccctttcaacaccaggtggctgaagaactttatcaagctggattcattagttatccgaggacagaaactgataacttctccccaaacactgacctgcatgtta

SEQ ID NO: 40043 - DNA, 790 bp, Zea Mays
ccaggagcatatcgggatagctagatgaatttgtctctgtattcacttactgacatacctccttgtttgagggatagaaactccttcttattaatcttcaaaggccaacaggaatatggtaattcctaaagtgagtggagaattctgcccaggtaatggtgtgagcagcggcatgtgcaacgcaatatgcatcccaccaatctgcagcgaggctagtaaggcaacccgatgcatatagcactttctccttgtcggtgcactaagctatattgagcatcttttctatagactttaaccagtcgtcaacctgtagtgggtcggaggagttcgagaatgtaggtggcttgtgactcataaactcccagtgcttatccctgggcggagctggtggtggtggaggtggtagttgatgtcgttcctatcgttcttggcgcatttcttggcgttcttgctacatttcctatcatttttgacggatctgggcttgcatttctatcatcatgttagccatttgttgtagtaatcgcatttgagcagcagtcacgtcatcaacgggcgggggattcggaggaggattcatttctagatccggattagctacagcccttctttggcgaatttgtgcgggtagatcaacacttcctcccctcatgatattaaccatctgggttagagacatatggtaagatagttttgaaaggtgaataatttagtaggcagaacagatagcctaatagctggtcataagctgagggttcttgggccgagctttgatatgttgttttttgtc

SEQ ID NO: 40044 - DNA, 492 bp, Zea Mays
ataagatgctacaatttgaatttgagtattaccatactaattactaaagatttaataccacacggtggaagacgaagtccatctttggggaatttgactatagtaatatccaaagtttgcattgtataccctgtaggttctaaggtgtcaaaggaaaatgaataaatggatgatgctcaatgaacaaggttttaacttcaacccattttacttcaattattctattgtgctgtactatacagtattactctcttatttcttttctgttcttttgtgagattactagacactgtttccaaaggcataagcatggtacagttgtagcctatacatgattctgcagctactattactataaatgttgcttgtgccctagagccaaatacatgcttaagctttacgaaatattcagttagtggaaattaagggcatgaatgctggttcttttttttctcaaatacgcaggtgagctgtgcagtgtgcactaatata

SEQ ID NO: 40045 - DNA, 314 bp, Zea Mays
agacacgcggcacaaggccggaaggcggcggtcaccggcgtgcatatcagaatccactgcgacgagctctgtacggtggccgaaatattttactagccgtagcttatccacgacgacgtactccgagcgttatccacttacccagagcacgaatcgagacggtgatggcacgaatcacggcggagggatcgtcgacggtgagatctctgaagcttatcttcttcagtactgtacaatggcaaaccccattcagttggactgacagcctgatttgtagagcagaaacctctcgattttgtgtagtaacatgatca

SEQ ID NO: 40046 - DNA, 648 bp, Zea Mays
cgtcgtcccacttctcaccatcggctcaggttgggagcaccagacgctgacgctcgggcccgctcgtccagtggcctacctacctcacgccaccactgatgagtgggaccccggcaaccacctcctccgcacctcgcgtgttcccgcctgactcacctacacgtgggtccaggtagtcagggtcatcatctacctcggcagaattccccgtcgcacgaatggggcgtacttgttgccgcgaatctcgggagcctggggtcgacttcgcaggactataaaagcgtgtgcctggtgccccgtgaccttcacgcttgcaccacgccgcggaagctgcttcatcgtggagaaggggagaaaggcaaggagatctgccaccgtggtggaatctcggattgcaccaacattttggccgtgctgggtaatcgggggacttcgtcggtgatcatcgagcgcgggcgtgctcttactggcaaggacatcggcggtgggttcgacaaatcatcactagagttggagccccaccgttaaaccatcccccaccgtggtcggcctccgcgacttcatcatagctggtatgggatacctcctctattccgcccatattccaattacattttgcacggggtagttcgacgtggtcactggggc

SEQ ID NO: 40047 - DNA, 431 bp, Zea Mays
cggaaacattattcttgttgcgattgtccacacctttgtcatgggtctggatccacgtcgtgagatggctgtctatatgaagcccatggaggagtagtgggtgggttctccaagtctaaagagtctggtctcaaaagttcacaatcttgctaatatggacaacatcacattcaatctttcccatagtttggatggcgcgggtgcctccatctcagtctcgctcccttgttttaaagacgagccttcaagagtctagggtttcaaattccaaacaccatgtctgtcagtgaaagccatcctctagtctactcaattgatgacagcccagtggcaccatatggacgcaataagctagtctccaaggttcactctcaacaaatagcatatattgaataggttcaagttctttagcatccttccttcagcctcaa

SEQ ID NO: 40048 - DNA, 408 bp, Zea Mays
gtccccccgaacaaacaaatcagccgtccccgacgtcgacgaaccgacctccagagatctcatcgacggagaccgcgtcctcgccctgcaggccctaaacaagtatcaggtccagaccaaggcatggcgtgacaacactgtcgtcccaagagaattcaacgaaggggacctagtactcgtgaggaccaccaggacagagtcccggggcaagctagagccgaagtgggaagggctgtacatagtcaagatgaaggcatccccaagtgcttacaggctaacaacttcatctggcgaagacttagaacactcatggaacatcgataatctccgaattttttttatttaagatccaaggcccaagcgcctttgtaattcttcaaacaatgtcattcagtcccacactctttt

SEQ ID NO: 40049 - DNA, 505 bp, Zea Mays
ggcaatcagagccttgaattcctccatagcccggtgctaattaggatcaacaagggtagaacaagcaatcttcgaaaccggtgacgcagttggaggggatgttatggccagaactaggcggtgaataggctgtcgaaacccacgattggcacgcgtggtcatcggatgcgggttaaccgacgacgtgattagctcaggacccataggaaaatgtgtcaacagggtggcagagcagtagtcgatcagcggcatcgcgagtagataagggtgaggaagggtcggcgacggagagcgaggcaagcttatgtttggtagttaaggagaggtttggatagcatgcacacccgaaaaccttgagatgcacataggaaggtgcggcgccaaataaagccagatatggacatgaagcgttgattgtgttggtggcatggggcgaagtgcagggataagacatctgaagcagtgcaccatgagataggaagaaagtagaggaagcattatcgaa

SEQ ID NO: 40050 - DNA, 888 bp, Zea Mays
agaaggcttgggccacagactctgcggagtaagggtggcccaatggtatgaaatggcactgcttgctgaagcgatccacgaccgttaagatgacagatttgccgcccacctttggaagagcttccacgaaatccatgcctatgtctgcccatacagccgacggcacgggaagagggaggagaagcccggctgggtggagatgttcggacttgtagcgttggcaggtagcgcagtttcttatgaaagcctgaaccacggaacggagattgggggagtgaaaatcacggcgaaggcgatggagggtgcgctggaccccctcatgaccatcttcatgtatggcagtgatgagttcttgcagcaggggggcgtctggcggaatgtagaggcgtccctagaaagccaccataccgtcgatgagagtccagggagccctgcgaagatcgctggcaatttcctccttgagggcgaccagcgcgggttcctgatcatgtgctagatgaagtcggtcgatgaactcaaatctgggcccagaaatagccaaaatagtactgtcatcggtgtcacggcgtgatagagcgtcagcgactgtattgctgttgccggtcttgtattccacggaaaaatcaaatcccagtagcttgcccacccagtgatgttgcggtattgtggctagcctttgatctaacaagaacttcaggctgaaatgatctgtgcgcactataaatcgacgtccccacagatatggcctccaatgtcggatggcaagcaccaagccaatgagttccctttcatatgccgcgagagataaatgtctgggtgctgctggccgactgaaaaaagccacggggtgactgtcctggatcagaactgcgccaaaaccgtgcgtgg

SEQ ID NO: 40051 - DNA, 658 bp, Zea Mays
gctgctccaaaatcgccggtgagaaaccctccgcaagatcctccctgctattatctctgcgtgactcttgccggtgtgaagttttggcgtttaagcgtgtgaattcctgggccacggcaatggcgccaccgtgcccaatttgggcgccgccactctgctggtgttcatcgggtgaggaagacgaaatgtgggccgttgatgcgctgcgcgatggtggagattggatcgtcacctacccctttcgtgcaaccaaccacgaccgtcgatcggagattgtgcggacaggattagatctcagtgttttatattgggtgcgttgatctgtgatcgcagggtcacgattgcgtaccgttttggagtgtgcttaattaaatctggaccgttgaattgggatcgtgcggatctgattgtagggtaccccttcaccgtggtcaattttcaaacgaacccctagcctttactgaaatcaacccgccgtccaccttggggttatcctgagtctcgggaaaacttgcgagcgagcccctgcccttctcagtaaatgacgcccagtccagagctcatgaaaatcaaataaataaattcagaaatggatttttaatataaaaacaattcctagaaactcatttaatccatagaaaatccatttttagtccaa

SEQ ID NO: 40052 - DNA, 444 bp, Zea Mays
aatatggtacggtagccgaaattgtttatcggccggagtttatccccggcgatgtacaccggtgttatccactcaccccgagcacatgttggaccggcggcggcacgaatcgcggcggaaatcggtcgtcggcggtgagtctgccgcgttgtcgttctgatccatttgggacactgtaccatcgcgatgctaattcagtgtgtctgacaaccaagatttagggccagattcctctcaatttcctatggcaacataccgagtctctgcagcaaagttgtagagctacataccagctacaaatcgactatagagattaaactcagttgagcactggatcaaggttgaattcaagtccaaagttagctctgttacactgcaattctgaatttcagagttccattagcctgacagtccaactttgggcttaattatctccaatttctt

SEQ ID NO: 40053 - DNA, 450 bp, Zea Mays
gaagtgtagataatgtcgaggcgaggtgaaaatatccagtgcggggtgaatccggtcgctggccggaccggccgtcgtgtcccgccgtggtcaatcacgctggcatcaccggagtgtccggccaggctacgtgcctcaaagccttaccacgtcgcaatagactgctttaggtagcttgttcatcacctaagacactgccctagtaaaagcaacgacagcacttgcgctagtgacttcccctctctccggccgccaccacccttccttcaaattggacgccaccgccatagaactatataaattgcggcccccgtgtgtttcgctaggtatttacgcatccaacacaccagcccttgcctcggatcacccaccagagcccctcaatttctcatttcccccaaatcagtcagaacaccgccgtgagagagctcgtcattggccagacgtcta

SEQ ID NO: 40054 - DNA, 338 bp, Zea Mays
gttgaggctaccccattagaggtggccggtgaagttgaggtgttcgtgcggaacgtcgacggcgcaagaaggttgtccacgacgggcagcgatagtcccagcgacaaccggctccggcggtgctggggaacagcgataaactgcctctgtaacagtgggtggaggagacggtggtgtcaccaactcttacatccatcggcactgttggcgacgaatccgcctctcccatcggcaccgacggtgacgggaggacgatagggaggccgcattcaaccatcggcagcgcactaccgctatctatccagcatagatcgcgcaaaagtgcacgttctgcactt

SEQ ID NO: 40055 - DNA, 274 bp, Zea Mays
gccgtcttgggctggtttgatttgagaggaggagcgggcagtgatccgataatgaagaagacaaggcttgcagcccatgactaccaaagagatcctcccattcaccgttgcaaaatattctatccggcctgaccaacgttgtgcgtcacctttcattgctccatgtaaatttcctattctgtaagtgtaattctttgagttcacactcatctattgcctgtctaaattgattcatgagccacaggttaagacagttgttatttttgtcccttgc

SEQ ID NO: 40056 - DNA, 423 bp, Zea Mays
gcattgaagctactagcgacgagctacttggggtatactccaaggccgaggacaatgccttgtccgcagctttcgggggtcggaataagaaaagattgaacagggtatttgatgctattggcttcgtataccttgactattgctacccactgcgagggcaagggataaagagaaagattgctgcttcggccaccacagctgagccgaagggcaagaagatgaaggttctgactcaccggccgtgttatattgaaccagccatgatacctgaatttggcgaaggtacttcttcagctgccaaagcaaaagaaactgttccaattatgcaaagcactgtagagccgagtgtagtaccaaagataactacagttgagccagccaaggctgaagataataaggccaaagagccacaggtggaaatag

SEQ ID NO: 40057 - DNA, 295 bp, Zea Mays
tcaagtcaacattcatgcttcttgggcttcggcagcagcgcaacatgcatacatgtttcaggaagtctcatcaggcacaaaagcaagtctaaaattctgatataggtttaataaatgtatgaataacttgatccttccatctattcttcttttctttctttctctgcaaccatgcctaagcaaactttttcataagagaaaagaagttttacaacaaatggtattattaagccaaggcttctgtaatctaggattttggtttctttaactatttttttctcaaacactaatgctg

SEQ ID NO: 40058 - DNA, 272 bp, Zea Mays
cttgaatttccacattccactaagtggtgacaccttgaggtacacatgatttctttcctcaaattccagtggtcttcttttattatcagcgtagctcttttgcctggtctgagctaccctcaaattctcccgaattatacggacttgttcctctgcttcttgaattaattcaggcccaaagaactgtcttcctccagtctgatccaatgtagaggaatcctgcatttccgccgtgtaaagcttcaaagggtgacatcttcagactggcctgt

SEQ ID NO: 40059 - DNA, 292 bp, Zea Mays
aacatcgcccatcgattcaattggggaaaatctaatcttggcggccgacagctgatcgaacagccaggatggctgcgtaccccttcaccctggcgtttttacataagaaaccctctggaattagataatgaacccgtcgtcctgcgcagtgtggctcagtgtcttgggaagaattaccccgaggcccctgcctttctctgttttagtgcgcgcagtctagagcccatttaaattggacaaatgaattagaaaatgaatatttaatatgaaaataattactagaatttgttta

SEQ ID NO: 40060 - DNA, 559 bp, Zea Mays
acgaacttctgtatgagacaaaggccatgggtaaagaacaatatcacaacaacttcggttgttatggatttatcgcccgtcccaatgcaagccaccaagtgccaacacttcagaagagatggcctggaaattggatggaagaatggttttatgtgacgaacgacttgacagcgagggaggacatcaaggaggttatcatgcgccccatatggtctcgcttcggtctccgaaagccgaaggtcgaaattgatgacgccgccgaagtgtgtcagaaggccttcaatactgtctgcttcttcattggtacaagagatttaattcaagagcatatagcattcagagtatggccgcttgcagaaagctgggaaatgccgaaagagaccatcaccaagcctagcgaaggtgaactagtccggctgaagtatacattcaggtatggggataagttcgatgaaccaaatgatgactggctgaaatgcatcgaagctacaagtgatgaactgcttggagcatattccaaggcagaagataatgcactatccgcaaccttcggaggtcg

SEQ ID NO: 40061 - DNA, 397 bp, Zea Mays
gtttctggaaagcataggggttcagacgcaaatcaacctaacgaaggggtatggcggtatctgggtcgcacgattgcaaatgaacggcgcggattaggtccagattaacttcgaaccggcaccgcatcgaggccgtcagatatgggaatcatggttcggatttaatgactcgaagggatacgccagatttgatctaggccattccctgcacgatcgacggttgagggccaactttcccctagatctaatctaagccatcgagtacgcgatcaatggtcacgatctcacaagcgaaaaggggtatgcaggggtgatcctggcccctgatccgtgaatccatggctcaaaaccccacacgcctgcatctaatcccaaccgcatgatggatatccaacgg

SEQ ID NO: 40062 - DNA, 491 bp, Zea Mays
cgaaaagagtgcgggccggaataacattgtttggtggattacaagggcgtgtgggccctcagggttagacaaaaaatttggagtgctctaagtctttgccggagggcggtgctagcctgtacgcgctgggggatgccttcatcttgacgatgaatggaccctcccatttcggctccagcttgccccgtgattctgtccgggtggtccggacgagtacgaggtctcctttgttgaactctcttgggatgaccgtgttgtcgcgccaggccttggtttgagcctggtatttgttgagggcctgcagggcgaggacgcggtctccgttgatgaggtctttagacgttgattcgtcgacgtcggggaccgctgatgtgcttgttcggggcgacccatgctttatctcctgcggcgtcatggcccccgatccatataatagacgaaaaggtgtgaatccggttgcccggcattcggtcgtgtttagggcccagacc

SEQ ID NO: 40063 - DNA, 465 bp, Zea Mays
aaatcattacctcatagtactccttatatcagcgagatcaattactaccttagggttgatttggtgaccaggtaatttgaggggatccaggtgactagggaattgaaggggatctatccttccacgacagcgacctattcttgggtcagcgggcccgcgcttaagaatttcccgtccctctggcggtcctcgtcgtatcgagcggttggcttaaaaaggtcggtcgcaaagatccccagtgggacggtcgtttgccccgatgccattttcattagggtgtttgtcatttcgttcaagaccatcgaattgctcctccatccaccttacctcctgacagtacgccgccatcttgcggtcgcggcattacaactacttcatctcatgtcctatgatgagatgagagtctcctcggatatctagacgccgaacacccaactgcacgacaatgtgtagcccatttacgag

SEQ ID NO: 40064 - DNA, 408 bp, Zea Mays
cagttgggtgctggtcattcaaatattgcatcggacaagggcaaaggtgtggcggtagatatggatgattatccagtggtgaaagaaacatctagtaaacagccgtactgctatcgttgtttgaccaaaggacatgccatgaaaggttgtactgctaagctgttttgtgacatctgtcgtgctgatgcccacaacacggaaaggtgtccgaagttcaggggggacaaacctagtgccttaacctgcggttacgccgtggatggtttaggtttctactacatcccctttgtgccacaacagagaaacaagaccgtgtctttgttggcctcagtgaagatcactagcggtgtgctgtcggagtcgcaagttgtggctgaattagagagattggtctcaggcaattggaat

SEQ ID NO: 40065 - DNA, 481 bp, Zea Mays
actgggtcttgcttagctggttgttggaggagggtgccttggaggtgggtgccgaggcactcttggggccattcaccgagttggagtaggtaggcacagatgtcttcaactgagggcaattattcttgtagtgactggggtctccgcagtgccaacagtcattggctggaggttggttgcttgcaacggagggggcctgaagggaactttgacctagctgactgaaacgtgatggagtgggtccagctggcttgttgaagcttggtcccttgggtggaaacccaaaggatcgaattctctggtgcctgtcttgctgctgggctcggaggacttggaacttcctcttgaggtgacccttttcttcttccctagccctttccacttgtatggccttgtttgagaggtgcgagaagctgaggaagtcttcgctggcgaggatagtcttgagttctggtcttagccctttcaagaaacgggccat

SEQ ID NO: 40066 - DNA, 303 bp, Zea Mays
gaaagagccaccaccttttgcttacattgccggtaggctggaccatggtgtgttttatgggagaagaggttcccgacatttgatcgactttagtgacaaggattaggtcagtgataaggatgacagaaagagcaccagcgacattctatactaccacgatgatagttccaacacatggcaatcaagcaagcatgaggtggtggccctttttcatgtgatgctgaatacattgctgcaactctgggtgccgatgtctggccgacttgactatagaaggacctcattggtttagtctagagcacc

SEQ ID NO: 40067 - DNA, 706 bp, Zea Mays
tccttcttgataaaatgacacgcagctctcctgtgctgttcgagaaattaaaatagggaacacgaccccttcttgtccactgaaagtctccccacacccacactccatccttcttccataaatatggaacggattgtcccaagatatccagctctggtgttcatccctccatcctaggacagacctttctctaacagagagtactgtgttctgacatgggagggagctaaggtcagacccctcctgtcctttggcacaccctaataacatccatccgccgatggattctagggacaactatcctcattggccattactgattccagatccatcctgggggattccaacagaggatccctttggtgaacattgagggggctccctctgatggctgcttctgtctagctagcaaccttcagaggggcccttcagggctgctcctgatagttcttctgtaggtccccaaagggaccccgtcagaacatcctccaagggccttcctcccaagggcctccaggaatcaagcgatggcccacttccccaacactaccttcggatccatgaatagcacttctttcttctgaaactcaagtctacagtttggatatcaacactgcagctagcagaaaagggggagggacataacaattgcatttgtacaagcaccaactgatttttcttggagcaatcagataacacagcataa

SEQ ID NO: 40068 - DNA, 332 bp, Zea Mays
tcgctgacaacacccgcttccttcgtgaaatggtgggacaacaacttcaacagcaaggcgggagggcttatccgcagggaccccgcgaaacttcatatttggatttctcagaaacccgtccccactatttgtcaaggttgaggatcctctcgaagctgacgaatggattcgggtcattgagcaaaagtttagactcatccgatgcacggagacccagaagccattatttgtggctcagcagttaagaggccctgccagcacctggtggggaaattatgtggccattcagcctgccggccatcaagtcacctgggatgaatttaaattggcat

SEQ ID NO: 40069 - DNA, 529 bp, Zea Mays
tgccttttgttctcttgtgacccatgtccgccgaagatgacgttgacttctccattgacgcgcgggaacgctccgcctcctccccttactgctgctgaggttgtcgaggttctccgggtcctcctcgtggtgggggaggtagtagaggttggaagggtcggccattcctgacggagtgcttgaaatctctactgtttcagagggtgtgacacatatctttgtggtatgggcactgggcattgaggatatcgtccaatgttcgttcgcctccgcggggtgcccctcgggcatgagagacgggtggtccagtggcatggacttcttcatgaggtctcttctcccagtgcttgtcggtctgttggttcgtgtcatgccgtggtgcagatggagcaggcttcgttcctccgatgaggtcctaggcccattcgtcggtggtgatgtagaggtccgcctccctaaacagctgttcgaaagtggtcggcaccttttgtagtatggctcggatgaaggccgagtcattagatccccg

SEQ ID NO: 40070 - DNA, 321 bp, Zea Mays
ggtacttccgggacatgactattatgagggttggaggagacagcgctgctcctactcctgaagtaaatgaggtggttatttatcgaagctttttgaaagcagggcttcggttcctgttgagcaaattcttggtcgaagtactgaagacgtttcagatctttcgtcatcaacttacccctaaagctataatcaggatgggtttgtttatttgggctatgagaagtcaaggattggaaccaagcgcaaggtgtttttgtagcatgcatgaacttctgtacgagacgaaggccaccgggaaggaggagtatcacaacaacttcg

SEQ ID NO: 40071 - DNA, 357 bp, Zea Mays
gactcccagcgacgacccagaggtcttgcgttgcagccgagcttgattccgtgagcgcagttcaccagcgacttcttccaggcgagatctgaaatccgcgacgccggtgagaatcccccgagctaccagccgaggccaagcggcttcacgagcaagtagcggcactcgaatttctctccccccaagcgcggcaatggaggccaagggagtacaaccaaggcactgagctccaatcccccagggccttgaacatagaggagagggtagttgaagtggtgccacggggttgttttatatacttatatacccccaaattggtggtccgagcggaacacgatgcgacatgtgcggagtaga

SEQ ID NO: 40072 - DNA, 324 bp, Zea Mays
aaagactccctcccgtaagccagaagtagagggtccatctacctggagaactctgctgaccacctcttccatggaagaatggacataaatcacaaggaaaagggaaccaaacgaggtaaaagctcgtcaagcggctctccaggtacctccgtcctcaaaggagaacagaaagaagctcgtcacaacgacagttccattctaccccgacgtcctctttatcgaaggaagagtagaattttctcccgtctccgacgacgaaccaaccgcaccgggagaagaaccccttcagcgagaatctcaccgacgaaggaaccgacaccaaaa

SEQ ID NO: 40073 - DNA, 343 bp, Zea Mays
cttgagttgagacatgtggaacacatcgtgtacatcagacagatgatcaggtagttcaagctggtaggccatctccccaactcgcctaaagattctgaagggtccaataaagcgaggggatagtttgccttgaactttgaatcttctcattccacgaatcggtgacacctttaggtacacgtgatcaccctcttcgaattccagtggtcttcttcgattatcagcatagctcttctgccgagtttgtgctaccctcaagttctcccagatcatatggacttgttcttctacctcttgaataatttcaggcccaaagaactgtctttctctagtctgatcccaa

SEQ ID NO: 40074 - DNA, 271 bp, Zea Mays
ttgttatgtttaccttattatgtcgattgcatttagtttacaccatttaactaaatttctgccatgtgcacaactaatagaatggacctagcaaacaatgccacatcttcgcaaccgatgtcaaataactcaactggccagcaatttccccctccacccctgttatggcctacgccattcatgcaccagacacctatggattgcaacatgatgggaaacctgaattttcctaatcctggtcaaggtccaacaacaatgtgggctcccattc

SEQ ID NO: 40075 - DNA, 760 bp, Zea Mays
acaaagcttttgttctgtactactggtatccttctcagaaagttatctgtaagtagtgccttcatatgcataatagttaacatttgatgcattttttaaattacatataaaggtgatatcagtttttcattggtcttatatggttaaactttaaagtgaagctgtcttccctctatataagtctttcagctaatgaaaaggagtccaattttggatcatgccttaatgattgctaaaatatgttttgttatccatgctatatgtttcagggaaacagagacttaagtgatgttacccatgttgttgtggatgaagtacatgaacgtacaattttggtatgtatccgtttcttttatttgttttcatgttacaaaacatctaatatgttcctatgctggatgaggtacttgaactatctttatttctcgtttcagagtgacttcctgcttattgttcttaagaatcttgttgagaaacgctccaatcaacaaggaaggaagttgaaagtgattctcatgtaaaattcttcccttaggcttaatattttacatcagtaaattttgcattcactttcttaccgttttcccttctaatcttgttttaactccaattctgtttataatcattaattaggtctgcaacggttgattcaagcctatttgcacgatattttggagaatgccccgtgatcagtgttgaaggaagaacacatccagtgtcaactcattttcttgaggatgtttatgagaaaatggagtac

SEQ ID NO: 40076 - DNA, 403 bp, Zea Mays
tgctctccaaccagccctcaacaacttgctatagcaacacagggtataaaacacactgatagaaagttataatgccccaagttgtcctaaaccaaaggaattttcttgtttcagttagctgaaatccaaaacgtgacagtgaatgttttgggacagtttactgcaagctctgtgcaggaccatgccaatctcataataagaaatctactcactaaccaaagatcttcaacattgctataggagtcatggctcatacccacatagattagtcacaacaaggatctaaaactgagtaagcacactgaacttggactttcagttggctgaaacctgaattcggacattaaatcctgacagcccctctttggaccaacatttctcccaaatttgtgtagtatcaaga

SEQ ID NO: 40077 - DNA, 493 bp, Zea Mays
gatgttgtgccctagtttgtgcttttgtgaagaaattcgcaagctgtaattctgagggcacatattgaagagcaatggtcttctgatggcaatgagatctagtgaatgagacatcaacaccaatgtgttttgtgagttcacgcttcactggatcatgacaaatttgtatagctccagtgttgtcacaacgaagaagtgtaggcgagtcacaagaaacgcctagatcagccaagagccaacgaatccagataatctcagcagtagtagtagcgagggctcgaagttctgcttcagtactagatctggatacaacaacttgcttcttggatttccaagcaacaggggatgatccaagaagaatacaataatcagtaatggagcgacgatctgtaggatcactggcctaggtagcatcagagtaagcatgaagctgaagtggggaatttgagtcataaaataaacattgtgtttttgtcccccgtaaatatctaag

SEQ ID NO: 40078 - DNA, 405 bp, Zea Mays
cgttgaggccacagagaagattgaggacgagtgtgcgatgggagacactccctggggtcaacagaggggggccaccatgcctttcatctggcgataatactcggtgacaaagaggtctccctaaacgaaggtccaaaaggcagcgtcgaggtggagagcgtgagcctcacggttgccaagaaattgttcctcgacagcaacctagtcctgacgaacaatgccaccacattcgcggacatcctgcaactcaccgatgacggtccccgggatcccggagaggaccacactatccatccaccaccaagatgggatagtgagaaaagccatgtcaatgaggacgaggtcgcgtcgcgggcgtaggtggaagaaggcagatcggggatgagaaccagagaacgaatgttc

SEQ ID NO: 40079 - DNA, 383 bp, Zea Mays
gccttgtatggacgaaagtgccagacccctctgatgtcgtccaatgtaggggaaaagacactggaagggcctgctttcattaaggaggcagaagaaaaagttgccctaatctgcaaaagactactcgaagctcagagtcggcagaagagttacgcagacaacagaaggagagaactcagtttcgaggaaggagattttgtctacctcaaggtatccccaatgcgcggggttaaaatatttcaagtgaaagggaagctagctccacgattcatcggcccctatcctatcattggcagaatagggcccgcagcctaccgccttaaattgccagaatccatgtcagatatccacagtgtgttttatgtatcccagctccgcaaatg

SEQ ID NO: 40080 - DNA, 321 bp, Zea Mays
gccccgcacggtgaggaccccggttggagacggcatcttgaggaccaaatacccgtaatgggcaatggccatgaaccggtatagggccggcctgacgatgatggggttgaaggggaggttaacctcagcgacgtcgaacatgatgctctccatgcggaagttctcctcggtctcgaatgtaaccgggaaagcgatgcacccaaggggatacaccggctatgggcccagtccggagaatgggcgtgagggtcccagacaggaccccaggatctgcaactgtttgaatgcagcatggctgatgacattgaggcctgccccgcc

SEQ ID NO: 40081 - DNA, 423 bp, Zea Mays
gtttttcttgaacatgcttgcatgctttcgctatcaacgctatcttggattccataatgggctcgtcaagtcaaagaaacaacaactcaaaacaaccatgctagcgtcaagttcaactactattagtttcatgctgcccgctagccatatgtatagtgtttacatgtgtgtcctatcgtgacctttcctcaaaacatgtattgtgttgtgtgttccggcattgctacactactcacatgactcctcactcctggtatgtgtgtccatggatacatggatcatttggttctttatttgtttgtcatttcttgttgtatagtcaaaatggttcacgaaagatcacaggcttatattttcatgttcgcatcactcctacaggaatgacttttgttgtcagcatgtcaccgtcgattggtaaaggac

SEQ ID NO: 40082 - DNA, 443 bp, Zea Mays
ctgacagattagctcgtagagggttggaacaccatgacaaatgcctcctttgtgatcagcaagaagagacaactcaacatattctggtttcctgtgtgttctccagggacatatggtggcgggtattgtgtaaagtgggtctgcaacagttggcacctaggcatgaggatatgatattccaagactggtgtagtagaacagaaagtcttgtgccaaaaattcaaagaaaaggttttaatacgatagtaatcttagtggcatggtggctttggaaacatcggaacgcttgtgtctttgatggaatagccccaagcactggcaccattcttcagcacattcatgaggatgcaactttgtgaagaatggctggagctagggctcttagaagcctatggccttagcttatggcatgtgcctcctctcttaaggctaggtcgttgttg

SEQ ID NO: 40083 - DNA, 529 bp, Zea Mays
accagagccagatggcctagggtcaccaggaatgggtcccgggcccgggtagggaggcagaaggtgagaggatgattgacccggatccccatggtagggaggcggggcaaactgctcgcgatcatcaacgtaggcttcttcttcttcttcgtcgtttgctgacataaatggcaccccgtaggcctgctggtgccactcattgatctccgggggaggaggatggagaggaacgtcaggcgagcgaggggcaaagggcatacccatagtggaagcttgacgacgaagattgtcgtcagtctcccgctgacgccttgccacctcatgtacatcagcagaaatgttgcgacacatagagaaaaacaccgcaaacccatggaccaagcgagcacccatccctcggccacgacctcgaccacgaccacgtggcatgggagatccacggccaggagagggacgcgaggcagcggcggggcgagaggaagatggatgatggggaggctggggaggtggctcagcggaggaggcaggg

SEQ ID NO: 40084 - DNA, 614 bp, Zea Mays
cagggatcttcatatctctgagactgataaatattgggagtctaccaatctgcacaagttctacagatacataaattctctctgcagaatgactctcattccaaaaggaggtaatcaaatgaatatcctgggagagagcaaagtcttgctctcatttatgaagccaaatagttctgaaagcatcaatgtatttgatatgatttggcaagaaatcatccatgttgcctgcttccctctcaagggatgtcttcacgcccccttcatcatgaagatgattgaagtggtgactcagtttcgctttgagaaaggaacaagacatctctcctacacccccttctggattgatccaaacaatccagcagggcgtctgaggaaagccccctccagctctcgtggacatgctgctgccggtccctcgcgtccctctcctggtcgcggatctcccacaccacgtggtcgtggtcgtggtcgaggttgtggtcgtgggatgggagctcgactggcccatggtattgcagccttcttttccatgtgcaggaacatatcttccaatgtgcatgagctggcgaggcgtcagcgggagactgacgacaaccttcgtcatcaagcttctt

SEQ ID NO: 40085 - DNA, 426 bp, Zea Mays
ttttcacgattatcatctttactcttgtcacctctatatcttaccttgatgcttatgttatacctgttctttaaaaccttctctcttccatctcaattttatagttgtattttacctattttcccttggtcgtatcctcttccttgtcgcttgcgagtttttaaccccatcctttgttgtgctccggttgggtactacctttacctttctcatctctcaatcctaccttggtgattacactatgtctgttctctaaaatctccaatctcctatccaatttgagagccgtgttttacttatcctacccttggcaatatcctcttctttatcacgtgaaagcctagacgtgaccccattccttgtcgtactcataccataggctatttaatgccttcatcttttctctcatacccttgtccgttatcg

SEQ ID NO: 40086 - DNA, 315 bp, Zea Mays
gtgaatcagtatgatgtgtcatccagtacataaaccatgtgattatagtagttacccagattcccagaacaagataggttatgttgatgttacatacaatgctcaaagcaaaaggaggaactccaaaattctgcgaggaccagtgcaatttgacctgctgacatagtagtgcaagttaactaaattaccttaaccagtccttataacataatgttcacataaaggagtacacgggacagaaatctctcccctcgttcattgacaccaatcagttcctggtaacttgtctgtcagtttcttgtgacttcaaactcc

SEQ ID NO: 40087 - DNA, 380 bp, Zea Mays
gcacaatgtccctagtacaagttcttctagatggcacttggaaccgtgggcaagcttttgacataaattttctgaaacccgacttctcaccaaaagcaaatggcaactcatcttctatgagcatttcagcaaatgcatcccttaatgaattttgatcaaacctccaagtgctaggagcttcccctccggttgcttgcaaagtaccttgctttgggtctttatcaaatttattggggttgcgcttgcagacattaaaatgtttattcaatgaagatgtaccatgctgattggaatcagccttaaggatatgctgacaatatttgcacttagcagactttagcctacccttatcatctttgatcttaatgaaatgatcccac

SEQ ID NO: 40088 - DNA, 508 bp, Zea Mays
ctcggccgtcccgccgccgcctcggaactcaccgccgccgctaccgtcgcagcgccctccatctcgacgcgcgtcgtcaagcagatgtgttgcttacctaggtcaccactatggatctctgacgacggcgtcgtgacgccctccgagacggctatcctggcgtttctgaggttcatggggtgggatatcccggggcctaaggtgagcctgtggccttcggaggtgaggcggtggtcgggaaaggtgtccattaggtatgagcgtaagcggcaagggtcggatgcaaggtgcttcagcgcgaagaggcgccgactactggcatcggccgcaggtagtttaatttcttagaaatgagattcactctttcgtgctgtatgtatgatagttctcgagggctatccgtttctctgagctcatttcgggagcatttctgcagatttggtggaacaaacggagcaccagtcgtggcagctggttgcgcagacctgtactacggctgctactggag

SEQ ID NO: 40089 - DNA, 468 bp, Zea Mays
gacaaaggaagcgtgggatgccatcgctgcgacccgcatcggcgtggaccgggtccgtcgagcaacgttgcagcgcctacgccgcgattgggagaacattagcgtcaaccccggcgagcaagtggatgattttgccatgcgtttatcaaccctgcaccagcaacttgtcatccatggtgacaaggacatcactgaggagcgtgtggtggagaagtttctgcgcacggtgccggccaagtacgcgcagattgttgtcgccattgagcagtttctcgacttcgaggcgctgactcttgaggaggtgactggaaggctcaaggcggtggacaatcgcgaggaacaagtgctgaccgagccggtggctatcaacggcaagctgctgtacaccgaagagcagtggagagcgcgctgcagaaaggagaagaagggagaagatgcaggtggttctggtttcagaaatcagcgcgg

SEQ ID NO: 40090 - DNA, 283 bp, Zea Mays
cgcacctttccttttctgaccctgtagtggataccggtagtcagggtacacaaatcctatagcatcaaaaactctgtttagtctcttcttttttcggttcccgaaggccgcagataatgcgttatcttctgctctgcagtacggcccaaccaattcatcatttgtagcttcgatacatttcaaccagtcatcatccgactcaacaaacttaccttcatatctgaaggtgtattttaaccgaactagttctccttcgtcagtcttagtgacagtctccttcggc

SEQ ID NO: 40091 - DNA, 339 bp, Zea Mays
cctctaggcgactttcagtatggccacaggccatatgaaattttactctcgtaagtacttaatacttatgaaaataaattcaaagggtgaatctcatgatactttgaacaattatattgtgaaaataaactcaatgatgtacctaatgatatttatttggtaatgaactgacggagacaatttgacaagattatatataacatactaatatacatcagtacataccagattaccagctaataatcaattgacctaagacaatctagacaatgtaggtgtcaactaagatggatttctagagtcactcatcatatatgattgtgtgttattgttcctgtg

SEQ ID NO: 40092 - DNA, 315 bp, Zea Mays
atgctgttagtggggggccagatacattcctttgacttgtgggtgcctccatatttagggcatgtacaaccctgagcccctggattggttttccaagcagaagatacagctaagagactacacagtgcaatggaccatctctaaacgatgtctcttaataagttgcggtattggggtggcggaggcaggtgcctatggcggggttggtcttcagatgcatcgctgctggctactagatgcgagtcctcacaatttgttgggaagtgaaatgaaatagaggaaagacgagtgccaaggcaaggatttggagggaaa

SEQ ID NO: 40093 - DNA, 448 bp, Zea Mays
atcaagtggtattcaaagactcaggtattaccatcaggcttaccctagtttagtttatgtttttcatcctataactccagaaaattgccatacaaaaaaattccgctgtcctagaacccttgtttagcctttgcaatttcgttttcagtttggctttgttcagttagtgtccgtggttgagtcgtgttgctggtttagggtgtatcttcgtcgtagttcaactgcaccttcgccgctatcccatccaccattacccagatcacaactcgatccaccccattaatcgacttgccctcgctagccgccttgtgtgacttctcgcggcgccagcactagataggttgcgagccgccttgagtcttctgcctgcactgcagcccttccttattcatctggcacaaccgccttgagccgccttgagttttgccctaaccgccgctttctagtt

SEQ ID NO: 40094 - DNA, 358 bp, Zea Mays
tcagaagttagtggtgagtggacaaaatggattcaattccaaatagtgaagcgaaacggccactgtgcacgccagcaatagatgtgcaggaagggaggaatccatgccatgtccaggaacagtagcagcaacacaagcaccgaaaaacaaaacagcattaccattgcccaacaggggtgcctaagctcagaacagcacagcgcattgattgatgcagcatgcaagactgtgctgcgtgttactgctgcagcaacccgactagtcgaaatctaatgcgcgcatgcatatggatgcaagcggttcccgagttaatggctgcatatctctttgcatcttccttgaaaaagggaactttact

SEQ ID NO: 40095 - DNA, 939 bp, Zea Mays
cttgactccgcaattacacattctgttctgcggttccagttcatgcctatcccatcgctggactcctcatcgattcataatccttcgcaagttgggcttactgattggctttccagctctgcacgatgaggaggcttgccagctctgcaagaagacgactcatgagtcatgatgtatccagttttgcatcaaatgcttccagatctacaagagtaagtactgtatgtatgtgttagtttgtcatcatacatgacaattgattgggtcttggcaactagaggaagatggcagatgttgaccgtatacggctgggcttggaacgaggcccgttccacatggatcggcgggactcggattcaatcctggtccaactgggaatggttgttcggttaatttggggatgaattgcagctggttcattccggccgtttttcctgtctcatcatcccattggatcgacgcccggcctcctaccgtctggcctctgggagggaccaagcctacgacgacgacgtgaacactagaccagaggtgaggcaaccatgactccatgagcattgagcaccccccgcgcgtgaggcgatggcggcgacgacacgatcgggttttaggatcttggatcgggtttttggatcttggacggttagcaactgagcacgatggtctagttctagttgacatccgtgatgcggatagtcgagatgtggaatgattttgcactcgtgagttcttctcttccttcccccttttttctgcccggtgctgcctagggttcatagttcttaaaatcaagatccttgttcttgtcccttcttgttcgttcatgttcaaggtgatacttgcatattgttttagtttagttcagtttcgtttgaaaggtaggcttacagagaggttagaaaataggacaaacagataaaagacacctgacgtgtcccg

SEQ ID NO: 40096 - DNA, 303 bp, Zea Mays
aaggtacgcctacaagtaccaagagcacacggttcaggctgaaaaatgagcatcagaaaccagagagaagcaaccttaccacaacagtagacacaactaaatacgcagccatggcaaaagagagaagcaaccttaccacaacagtagacacaacttttactggccctgcccgtgctcgagttcttggcattaaaatcagatcccagcttcatttttgataatctcgtacaatatcagatcagggcacacaaaacacacgtatcagatcagggcccatcagggcacacagccgatgggaggtgg

SEQ ID NO: 40097 - DNA, 500 bp, Zea Mays
accaacctttcctatgattaaggcatatgaaaaggaaactaatcttaaccaatctctcctattattaaggcatatgaaaaggaaactaatcttaaccaatccctcctattattaaggcatgcaagagggaaactaatccttatctttctaaacttagccactgattgtggcgcctgccttggctgcgcgatctgcagccctcctggcgtcacgacggcgcctgtaagtgcggccgtacatgacagcatgtaaataacttatgcgtccaaaagattaagtgaaggctcagaaggtaaaggaggtggacaataccaacttgaagctttggtacaccgagacagctacaaacaagaatggagtatgagttttgattgataggtctcaagaacggtgtggtggatgtgaggaggcaaggatataggattatcttagtcaagcttgtcatgggtgatttggtcttgaacataattagtgtgtatgccccctaagtaggccacgac

SEQ ID NO: 40098 - DNA, 446 bp, Zea Mays
gtcctgcgtaactgctgcttacatagcttgttcagtgagaaagattgtagatttcctttctcttatttgactagtacactcttgcatgcgtaggattaatcttattctaaactacacgaactacaaagcaatagatagtattgatagtaaccatagaaacctctctagatctttcaggaaggaattaccaaatgatgacatagtgttccaacttctaagtattcaatggtcagtcttctgctcttcttctcaaagagtggcagagctcttgtctttttgttcagaaaacgaaagtggttggtcttctgaagatccaagaccaggtcaccagcatagttaatgcaaaataattaaaaaaaactagtgactacaaaactgaatattcttctatgtatttgtgctgtgtttaacaaatttttagaatatggtgtcttggttgattaatt

SEQ ID NO: 40099 - DNA, 586 bp, Zea Mays
ccaggtagacgaaggtgccttgcaagacccaaaaaacattccccggacccgaaaccaactctttggtatatatatcaaagaacataaacaccaccttaaccaaacacgacatcccccactagtatatacacgactttttcagtactactacaccactccagcttcagatggaaatcagtacgtattacaacatggaagtcaagttcaccaaaagcgtcaggaggccacatcaactccctgaactgtgactgcaaatttgagtagcaaattccatcgaccttagcaacgcgctacagcaaggcctcgtacgaattcgaaacttcagaggcagcgcggtttcacgggaaatggaagcgtgctgggttagaatcgggtggaaatgagcagtggtcaccttgaggagcttgataagggcgtccttgcctaagcgcggctgcgccaggcgcttcccgagcgccctcacgactagctccggtgagtcaggcatcacgggcggcggccgcggcgcactggagctcgaaaaactgaaaaccctagaatgctgagcggcgggagaacgggcgggtaaatgagggttaggcgggag

SEQ ID NO: 40100 - DNA, 413 bp, Zea Mays
gaattaaagaagccaaatttagaatgggctgactcctcattgctgcggcccagcttcgatttgcctccgcgcggcctagatcaggaaccagtcgcatgggagggtatgacacgtgggtccatttggtcagtgcaaccgcgttcgcatgcgtatcgctgagtgtggccccagggttggactcatcttcttcccgatgcggtctggtgcgcatttccggccagagatctctcgccgccttgagtccgctcggctgcgtaaccgatctcgcgccagaatcggactttgggaaaaccaccgaagaccctcgccaaccgggggcccactcgtcgggtctatcatcttcttcttagcccctcgtcgtaaaggattgctaactatgcgcggtcgtcgttgctgctcgtccgggatccgcg

SEQ ID NO: 40101 - DNA, 466 bp, Zea Mays
atagtttagcctttaacttctaagaagtgtcatgttatttagaaagtggttatgaaaacatgggtatatatatgtatagccactttattaggtatgataaaagatgtctttaaagcatagataggtttgggtaagaagtagtgggtaagaaaatactccatccaagattgtggatcttgattcctttgaaggtatggcttgactcttattattctttcaacgagtttgatctccttcttttcgagtcttcatccagattagggacatgaggttaagatagatctgtaggtaacacattagtaggttgagtagctagtttggtagatggctgagttaaatgagattagtcagaatctggtttggttgtttgcttctagatgggtgggataggttatgtaacctattatgtaggtcaagttgttgggtatggccgagttgatctaggtcaccagtttaagcttaagtg

SEQ ID NO: 40102 - DNA, 304 bp, Zea Mays
cctgaagccattattaggatgggggtttttatttgggccgtgagaagccaggggctagagccaagcgcaaaatgcttctgcaacatgcatgagctgctgtacgagacgaaggctactggcaaggagcagtatcacaacaactttggttgttatggctttgtgccccgccccaatgtaagttacccggttccaacattccgaaaaaggtggcccgggcctgtatgaaggaatggttctatgttaagaataatttagttgagagggaagatataaaagaaattattcaacgccccatttggtctcg

SEQ ID NO: 40103 - DNA, 406 bp, Zea Mays
tttttatgcttatttacctctccctttatatccttgcctattatcacctttgacccttgacctctctccatatttaccatgatgtttacctatttttcttagcctcacttattccatttcaatccgagagtgttgttttccctatcccgctcttgttcgtttcctttccctttgtcgctttgcaatcttgtctcaccttaacttcatcctttgttgagcttttgtttgatatcgtccttacctttgtaatctgtagatcttgccttgatacttatcttaggtctgcttgttgatatcccctcttttctatctcaattcgagagctatgttttacttatctcacccttggctatatcctcttctttaccgcgtgtaagccttgacctacctccattctttattgtac

SEQ ID NO: 40104 - DNA, 299 bp, Zea Mays
tgaagatgatcaattgtttagtgctatgaagatttccatatatcttttcttatgatgaaagactgtggagccagatcttatatgtgtgtgttttctacagatgtctgagaacaggcgcagaggtggaaggtgtgctcaacaggagcagcaggcaccccaggaggaggcagctcagcagcagttgccactgccacccccgatgaccattgagcagatgttcctgatgcaaacccaagccctccaatcaattgatcagacgttagtagcagcgcagcaggtgtagtaacagcaacccccac

SEQ ID NO: 40105 - DNA, 488 bp, Zea Mays
atttctactaagtgcaggggctcttctgcaataattacacgacgaaggggtatccataaattctatccgttggatgcaattctgagggccacgattagatccaaaccagccaactcacctgagccactggatcaataactgacgcgttggattttaaaatgcctaggttgatccgcaagcgcccaatcatgatccgagggtcaagatccaaccggtatacatgctctgatcgtggccgctgatccaaacatgtgtggcccagatctatacccgaacggatatgagtaggagctaatcttaaccgttgatcagcgaaccaacggtatccagttcatcacccacccggatctaatcgcgcgtgcccatcatggatctaacggcaggcacgccatcacccaccttcagccgagatggacagaaccgggcggcggcgccattggccggtgatgaggtatccggccgactgaggcccaaaccgcacaccagaa

SEQ ID NO: 40106 - DNA, 526 bp, Zea Mays
acaacacattgagagaaacaaaaatgaagaggccgacacattggccaaagcagcatccaaaggcgaggccctgccctccgacgtgttctaccatgtcatcggcacaccatccgtctgtaatcccaaaggtttgcaaacaacgcaagacaccgacggccaccggatcgtcaaccttataatggccgaagactagcgggccccaataacactataccgctagggccattaccatccatccgatcgcaacgaggccagaaggcttcaacacatgagcagatactttgcaataatcgagggctagctttacaaaaagggaattagccaggctatgctgaaatgcataactgaaaccgaaggcctagagatcctccgcgaagtccacaacagaacttgcagatcacactcaggaccaagggtcctcgcagccaaggtaattcgttagggattctattggcctgcaataatatgtacagccaaccgagtcaccagatcatgcgaagcgtgccagaaattctctcctcgatta

SEQ ID NO: 40107 - DNA, 289 bp, Zea Mays
tctggcacacttgtcagccagagcgaggagtgcggtgacgtcgtccacatcgcgtgtggccaatttttccaacatcttctcatcacgtaccccctggcagaaagcagagatgatggaagcatccgagatacgggggattgtcccacataccttggtgaagcgggaaatgaacgctcggagggtctccccgggctcctgcctcactgcgtggaggtgtgcctccactccgtgccgctggtaagcgctggcgaagttccccacgaaccgcgcacagagctcttcctaggag

SEQ ID NO: 40108 - DNA, 442 bp, Zea Mays
tgccctcctcgtccacgaagccggcgcttctccaacttcacgcgcaggtcgtggtcgtccagaacatccgtgcacttgtcccggttgttcttgacatcgcttccgccttctacaccagatggcgtgattccttccttctcgggcaggtacacgctaaccgaccgcgtactcaccgagacatttgcgccctcctctcccgattgggcgctgatggattgcatcgtcaagtcatggatcgtcgacaccattaccaccgaacttgtcgataccatgctcatatgcgacgtccctgctcgcgacgcctggcttgccatcgagttccagtttctcggaaatcacgagacccgagctctcgtcctcgacgcggagtttcgcaactttcgctaaggcgaccactccatcaccgactactgctgcaagttcagagggatggctgatgccc

SEQ ID NO: 40109 - DNA, 404 bp, Zea Mays
gcggatccgtggctccgacgagtaattgagccctccccggccaccgaaccctcccgagctctcgacccgcgctaagctattcttccggttctgcccttactgtaccggtgaggttgcagatcgctaagcacaggcgcgatggtgatatgttttctcacgacggttaccaacctcaccccagcactctcctctaccttgcctaagacctaatgaagtggtagcatggcacggtgatacttataccccggaggtcgagcacgaaccacccgcgagatcctcgggtgcgcggcaatggcagccatggttttttttgtcgccggattccattgcgaggaagaagctgactgtgggggtcccacacgtcatcgactcaggttgaaagagggacacatagattggctgac

SEQ ID NO: 40110 - DNA, 491 bp, Zea Mays
aattccagagctcgggtgaacgattacgggtgggagtgggtgctaaggcttcgcgatgacctagcgcagctgcccgggggctcaatttatagaaggagcgagcggtggccgggaattttatgaaggacgcgaggcggtcggagatagaagaaggcactggcgcacgtgaatccgtggctaacgtcgtggcaacctcaccggcgacgatgggacggtggtagggagtcacggtgacacggtagatggacagagacatgcggcggacacggagatggcacgacggcggtgagcccctttatccacgggcggtgagcaaggggggagtaccgcggctggccggggtggagtccagctcacccgcggcgaagattcttttaccccgcagcgctatccaacacccaggcactaatcttgacgccggcgacatgaatcacggcggagacaaccgtcggcggtgagggactgccgcgctggcggtctgatcctttaca

SEQ ID NO: 40111 - DNA, 293 bp, Zea Mays
tatgtggtggctttatcatccgaatctctggatcccttaatgattctgcctcgtatctggttatctgttgtaacccattctcaagtatcgaatgttgatcttgcctaaatctctcattctaatcattctcatactctttctccaaggatcatgacgtcattttatcaacttatctctaatcagtgtatccatttagttcaatggatttcattgttgtccttggatctcttatgtctctaaaagcttatcagtctcgatctcatggttggttcctcctcatattaaatatcgta

SEQ ID NO: 40112 - DNA, 387 bp, Zea Mays
taggagagcatgtgcatccggctacttattatgtaggatataagagatggataggttagggtaagaatagcatggggtaagcaagtttatgatgggaaagaattctgtgttgagtggtaatgcatctgaagatcttgtttgactcctctctttccttgacgaggttgatattttcttctccggtcttgagctcattgattcgcggtgagtgcatatcatcgggggtgggggaatgtggttaagatagatttggatgagataggctacatgatgtaggtctaaagttcatttgatgttaggtgggaatagacagattatgcaatccatcatgacactattggttgggttagctcttatgttcacggttgagttggtctaatgcactaa

SEQ ID NO: 40113 - DNA, 446 bp, Zea Mays
ggggaggaaaggggtatgttgtcttgatcccggccgtttgatcaggcatccaacggcaacggatcgtcttcttatccaaaaggcaggacgcggcggagcagtgcgcgtgcggcggcgctcacgcaggagagagaatatcggcgccctggccaccgaatcgcgacacggggagcagcaaaacgaagcaaaggatcacgcagaccgcatggacaggttcttaccccagtagatagctcggacgcatgcgaccacgatgagtagcgacaccaaggcaccgcgcgaccacggcgagggatttcctagccgcagatcaatctcacacccgccaaccaactcaatccgcttccgcatatgccgaggaagactccctagtagtcaatccaggcaccggcgcaagcttgccgcgaatcgatgatggcagccacgacggcgtagctgaaatccat

SEQ ID NO: 40114 - DNA, 380 bp, Zea Mays
gtttgacgagctccggcgagcggaccgccgtgtggcttgtgcaccgccgtgcgtgaataggggacttggggaagacagtggctgggatcgtgcgggccgttagattgttcaattgtggctcggatttggtgtaggataccgtttcggagttatggaatcgtaaccgtagggattgaacccaaaggtcaggcgcggattgcggttcataaaaccttggccgtcgatctcagatcttgcgatccttaacacgtaccggttcaggcaagtggcagtctaatctggaccgcacatcatagatcggatggcccgtgatgcttcataccctttcgcgaatgcatatttttataagagccccttcgttttctagaaaataacacgcc

SEQ ID NO: 40115 - DNA, 592 bp, Zea Mays
gcctagttcagttcctgcatctgggtggatctttgacgcagggttggcacgttttacatctgcgcgagcgcgactgtgccgaaggagcggcggatggcaggcaggcgtgtgccgagtgtttgacaccgggccgggaccgggagtattctgaggtttcgggggctatcaaagcagccgtggatggaatggaaggtggtggtaggcaacgcatgaaaggactcgaaatacttgaaaaaactcctgtggcttgcgaccggtatctttattccacgcacaatcatgaaacaacaactcgcaacgtcaccatcttcgtggcgagaatgtggagcataggacaaacagtatgcaacagcatcgtttccgccagctcgtagccgctgtacctgtcgtctttacaatagctgcagcctgcagggtagttagggccaggaagaagacgaaggtcacaagaacgcgcgcaccgatggccgtacacagtttctcagtgtgcttcgtcatgccacgagcctggcactatgtacgtacgtaacccactaaccagacatgatcacatcaatcatgtcagagaataacgtaacgtgcagagtgcttg

SEQ ID NO: 40116 - DNA, 516 bp, Zea Mays
gggctgcgcagggcctttgccggacatggcgccgtcgggggatggccctgtgtcgctgtgtcggccacctggggagggagatgatacgtaagtcgtggggtggtaaacggacggctgggattcggtcgaggatgtagttcggccgtatccgatatctgccgttggatcggcaatggatgggcgaggggtcacagaccggtgatccatccgtgaacggtcgagattaaaacgtcgacaccgtttcgggtagatcgcttccacacggttgatcttcacgtctagggtcgggatcgggtccatgttactttgaatcgccaccctcggttctgtatctatgggttcatataagcatactacggtgatctaatcggggtcgttcaattctgatctggcggctgagattgaagcataccccttcggccatggataattgctaaagagcccctgcaatttttcttattcaacccgccatcccgtgccattacaagaccattaccgtttagtcctagaatttat

SEQ ID NO: 40117 - DNA, 328 bp, Zea Mays
ttgcacttctgtagggtgcagttgttttcggatatcataaccactatgtgactgctatgatactctgtgtgatgactctgaataacataccatgtgggttcttttgatactagccagatgcacgacgggctgacgagcacggcgccttctgctcgatccagtgcatgcgccggcccggccatttggccagtaccttcgccgagaactccttgatccttgtgtgacgctgacgcagcatgtcagcatgtggtgtagtacttgtacttctaacttctaagagatactcaagcgacagtacgacactatgctacagggtaccgtatcgccc

SEQ ID NO: 40118 - DNA, 502 bp, Zea Mays
aagatacattagagtgtgttcttgtgttccacctaagaggagcgtgtagtgagattattagggataaccgtcaccgtttgtttcctgtttttgtgtttcgatggcaggcgacgacgaggaagcaaggatccctacagacttcgatgaatgtgttagccgccaagatcttgaggcaaacaacaagctcttgaaggagcaaatggaggagatggtccacaagtcagtgcatgatgccttcattgacatgaaccttggcaagacttacgagaggctggatcaacgattgtcccagatcgtcgacagacttgctgtattggagacgcaacaacaagcaccgccgccaccaccacctcctcgtccacgtcttcccgatgatgccgtgtttgatgaagaaggtaattatgatgaagcggccaccagagatttgcgcctatgtcgtcgtcttcatcaaaacacagaaggtatgccacaccaacaccgccagcaaggtaataacaatcgt

SEQ ID NO: 40119 - DNA, 525 bp, Zea Mays
gcgcgctctgcagaggtgtcggcaatgttgggatgctgaagcacctcggagccggagatagcgtcgaatggtgggtgcgcactgaggcggaagcgaagtgggaaaaaagaaggatctgtcggtagacctaggtctgtgataccatgtaagtaagcaggattgaggaagaatgattgttgtatagaatgggggacatactgtgtacatatataggcgaggaggaagagaggtaaaacgaaacccctatgtctatggaagctaataatacacaggatcaatcagatccggactcctctccctaattccctctatccataagtacagtggccggccgacacaggattgccaggctcaggcccttccatatgtagctgattctctaacaggcatcaacttcttttaaaaattgaatatgtgacctcagacgtgcaactgtcctttgcaaagaagccaggaccagacaatgttgtttaagctgtctcaataaccaaatttcctccctggacaaaattttgttatcttgcg

SEQ ID NO: 40120 - DNA, 409 bp, Zea Mays
ccctatcgtctgctactcgatcaacggccagatctgacgttaccgaacccatctgcacgatcaaatctgaaccgtttggtatgatccaacgatcaaaactctatcttccccaactcaccagaatcacggcggccacccccgcccgcgcgctgagctcacggcggtgcatgccggagctcccgcataggtgctctatccctcaatccaaaatgttctacaccattctcagaccatagcgattcacagggaagaggtctcaccagcgttttcgttgtgcagattcccgcccacggtgagacacgcacccacgatggtcatcaattccgacgagaaattgagtctggctcgggagaggatccttcactgggtggccacggtaaccattcccgagcaatggcgaagaactccc

SEQ ID NO: 40121 - DNA, 427 bp, Zea Mays
aacgcgtcgagagggagagaagtggagcgcgaagtttcctggctgtggcgcgggcagcgtcttccgcgagaagcaggcgagggggagagaatagtgaccccctgcatctagcgtgagagagaaggggatcgcgatggagaggaggcggtagcacgcggcgctgcggggtgaagggggctactgtttcccctaaacgatgaacagtggtaggggaggggaggggaagggttgagcgctgcggacagtctaatggggatactggttagaggctatgccattggatcaggatcgggggtatggaattccatcgcaacattttaaatctcgagcgttgaattctaatctgaggggcgagagcgcgtatcggttcggcatgatgtgatctaatctcggccgatggatcgacatccaatggtcggcattcaac

SEQ ID NO: 40122 - DNA, 399 bp, Zea Mays
acaacatcgatgcgaccaccaccggccaccgtccttctccctctcctcgccattactcacacaccagtgaagtttggcaccgattcgtcccccgcgcgctgtgaccgtgtgcccacacgccatcgtcttcatcgagccatcccatcaccaccactgtgtcaccattatcgctgccgctgtgcaccttgccggtgcccgccagcctccactcctccccttccccgggcgcctataaaagggccgccccatgcccctcatctcctcgcaccagcctcggccactctcctccccctcctctgagctcaatcaagccaagcgccgacgcctccctccgctccggtgagatcccctcccctccccagtagcttagggtcaaattgagatagctcacgaacttca

SEQ ID NO: 40123 - DNA, 275 bp, Zea Mays
gccaggaggaaccactccaaggattccggtgaggaccatctgcactgctaatccatatcctcaatttcgtgttgcgtcgtttaatttgagtatgggggtgtggagcgccggtttgagctccctccggcggggtcgccaccatggccagcgtggtgccgtcgcggtgttgggagggaagaaaaccttggcaccgttgatttgcaagggggcggtcacgattagatctgggttgtggccggttggccccttcgatccgcgccgttggttcatgatcc

SEQ ID NO: 40124 - DNA, 505 bp, Zea Mays
gtcggcttttgtcctgacctcgtggcacccccacaccttacaaggacttttgcataagggtgaagaatgagttgatgagtcactgctcactatgccacactgagacatgcttcagctcgctgtttactacaggggagggaactgttggggacatgaaactcctctcactgtcgcgatgctcaggaggcatggtcgcggctgtcgtcaaagtgatgctcgaccatcacgcgggcccctctacaacgcgtccatatttcgtggactccccatcgccccgccccaactcagtagctcacacgccagatccagtacaaagcctacagaactttccccacctttgatttgagttgtctgcttccagtcaatcgatgtcgccgctgaactagaagttgaaaccagctcgcccggggtccggtcgattccccctcagattttgctgctgctaggaggccacgacgaccatgggcaactgttgtgccacaccctcgacggacgaagcggcaaa

SEQ ID NO: 40125 - DNA, 375 bp, Zea Mays
gcatagtagtggtggtcgaagcggcagttttctcttttttccttgtctttgcaatgggtagtagtaataagggtatatgaagccaattgcatcaaacaccctgttcaatcttttcttgccttgacccccgaaggccgaggataaagcatcatcttcagccctggtatatgtcccaagtagctcatcgctaatagcctcaatacttttcagccaatcgtcatttggcttgtcaaaccggtccctgaatctgaaggtatacttatccttcggcatctcccagctatttacaagtggccacactctataggctatgtgctcttggattaagtctcttgtgccaatgaaagcacaaacattgctgaaagccttttggca

SEQ ID NO: 40126 - DNA, 314 bp, Zea Mays
cgccgcacgccggtgggagctccgccgtcgttcactggtgcgtcgccgtgttcaggctgggggtagaagatcagacgcggaaccatggatccatagatgggcggcccagattagttttagcataccgcctagggcgttggatctgtgtcgttggatcggtatcctacggctcgaaacagatcacgttccattaatttgtagccgttgatctccgaacttgcggctgatagctacactggttcgacaaatgtttggatctaatcctcaccataaatcgcggatccaatggccactactcactgataccccttcgc

SEQ ID NO: 40127 - DNA, 565 bp, Zea Mays
taaaggaagctagaacggatagtaattgggctggaattaccataggagaaggtggccacggaagagtcctcttcggcggcgatggcgaccgaattggggggaaatcgaaattctctggctacggtggctaatcgagggcgaggggcggtgctctgggttcgtaacaagttagcggagtaggcgggggcgtcaatttatagcgatcaacagcggtggctccgaatttggggaagacaagctggcggccagagcaaaggtgagtcaaccgagttcgctcaatgtggcattcactgtgcaaagacttacggccatcactggttatcctccacaactcgcatcgacgtggtgaacggcggcaaccccggcgacggtcggacaaccacgtcgctggtgcaagtgggtacggtgagactggctcgatccactccccctcatatctttttacctcccgcggttatccacttcacacagggcacgaatcgcggcggcagacgtgaatcgcagtgcggagatcaccagcggtgagttcactgaacctggattcttattcagtccactgtaccat

SEQ ID NO: 40128 - DNA, 438 bp, Zea Mays
ggagtccatacgtcaaccaacctcatggaaggagggggctcaaaaaggtctaactccccacccagcgcgcgtcccgcaacgtgggagggtccggcttccgcctcagcagggtgcgcaggtgcactagggtgtaattgcgaatacagtatatggacttcctcatgcaacgtattgcaatagacctgcaggtcatcgacagttgagctaagttccttgattcgggcctgagcccttgcttccttagcacatgccagcaaacgggactgtactgcccagtcgagcaccaagtcccgatcagcaagctgatcccgcaggtgacggatgtcccttcttagttcatttattctatctccgtccgcaacccaagcgttggtcctgtgttgcaactccgcttgaagtcgacttactcgggcttcaagatctcctattgggtcattg

SEQ ID NO: 40129 - DNA, 458 bp, Zea Mays
aaacgggttactattttcgttgtacagcaacaactaggcgacaaagttgatgtcccaaaaaagagttcctgcaacaatctatgagcacgaaaaatgttttgtgggcgaaatgaaacgcaagcaatacacacatcctaaaatggaggaaagaaatcatggattagaccgagaagccaaaatcagagaaaagcctaaaccctaaaatttttggggcaaattgaggagtagagacgttcgttcaatgcacaaagtaaaatattgccctttcgaaccgtaatggagcacacaccagaaaccctaaactttgggagaaacgactgaaaaagagatgcttagttaatgagctaagtaaaacagtggccttttcgaacctcaatgtataaaaaaaagcatgaggttctcaggtacaagaaaatctcagtaaaaggatgctgagcatgattgaaagcacggatctg

SEQ ID NO: 40130 - DNA, 280 bp, Zea Mays
cactaattagatggcagctcatcacccttcccttgcaatgataaaaacttaaactttgaatatggattggaacaaacagaggcaacgaatcgaaacaaggtacgatatcagtaaaactgcaattttctttcaaattgtttactgccacaggttatctctgttttcagtggaactgcagagcctgacactaaagttcaacactaaccaagtgctaagatgggcatgtcatcagattggatataatagtaatgagtagaagaagcttctagcttcaattgag

SEQ ID NO: 40131 - DNA, 398 bp, Zea Mays
aaaacctttggaagctgcaccactagacgtggaaaagaaggtgcatttgaggaatcaaagtctcctgcccccggagcatctgtcgaataattagagttcattgtgtggcatgcttcggggaagcaattgtcggaggagcagattgacgaagctagacaatatgccaaggatctgaagtaccctcgagggtccttggtatacagcggcaatgatgaagatgatttcctttattgtttgccagataataaagagatttccgtctgccgagaaatgatgagaaatatggggtacccgaagcttgaactcggcatgtctgcgatgtcgaaggatgaccttgcagatagccttgcttacaatagcttgaaggtatatatacttttgttgtaaaataaactatg

SEQ ID NO: 40132 - DNA, 405 bp, Zea Mays
ctgggggagagttgcggagcacctcttggagtggcacttgccgcggggctaagcgccgacccagggttcctatccgcatttgacacgggaacccttgtctctggctgtgatcacttctgcatgtacctgtctgcagctcggacccgtgggaggtccgaaagagcctccggaggaaggcgtgcttcagcttcgtagaccgggggacacggagttcccccgaggtccgtctagttgtcttcaccggagtaggagcctccggcaaagatatccttcaggtccccctcgggcgactgatacccgaggtctcattcatccgcgaccacctcaccgtcgtccaccttttccttgctgggccgacggcgaggcggggagccgtctttggaggactgctcgcgccgctcgctg

SEQ ID NO: 40133 - DNA, 391 bp, Zea Mays
tttcgattagtggttggagatcagtcctttttacattcctgtaatgaaggggtagccctagatactttccgggtaagctagagtaatttccagggaacacgtccattagcgttggccataatgatgctggatatcgaattgggaaaatttctgttttgtcatagttgatctttagtcctgaacacccctcgaacgcgttgagaatccctttcagcacctccaggtctgatttgtcagctctaacaaaaacacccgcatcatccgcgtagagagagcaccgaagcttagcttctctaggcaatacctgtccaagcagtccatcctcagcggccttctcaatcatccgatgcagcggatccatcgctaaaatgaaaaggaagggagatagagg

SEQ ID NO: 40134 - DNA, 487 bp, Zea Mays
ttatttggagtatataatgattttcatgtaattagcattgcaactcgtagaatagcaacctgggtgtacctctgttttgtgtggtgctcatgctctacattgatgatactctagctcatcttgaatttagctgcaaatgcagctgtgttggttttcccaagggcacggtgatttagaatgtcaccatgttggcagtagactagttaccaatgcgtggccagaccaaatttactatttattcacgagaaaaggtagccagacttttattataaattccaatagtatcttttacttttatgtattctagtatatttgagaagggcagacctagtacagtgtgaaagcattttgcggttgaagaattgcctcagtttattcctttcccagacccatatgagttgggagcctccggcactgggtctacatttttttattctgctatatttgggcatgctaagagcctaaggttaattcattttgcaacaat

SEQ ID NO: 40135 - DNA, 344 bp, Zea Mays
gtaactttggacgtgtcgcgacctcgcggacctagcccgagtctagtaggagataattcaccggtggccaccgtagctcggtcatttccgccaccgtgtcatccatgcctcgctcctccctcactgtatcccttctttacgtggtaaccatgcacgaatggtgtactccgcggccgtggatcgttagccggaccaccgcgcctttaaatagccccgccacccatggcgaggtattcacatctccaccagtgagctcagttgaagcccaaattcgtggaatcctctccacctctcccaaaattggtagtgcacggtgaaaccatagtcctttacggctgtgtagc

SEQ ID NO: 40136 - DNA, 711 bp, Zea Mays
ctccccgtctcttcaaacaattcgatgaatgttcgggtagaggtctttgaagttgtgcagtagctcccaagtagcgtcatcggtggtcataccctgccactgtaccagcacatgccaagcgccatgatgtaaatgggcgagtagcacactctctggagtaggcaacaaccgaccatcctaaatagtggcccttgtggtggggtcatcagagggtccccctaagctctacatggaacacgtcattgacgtgtgccttctggaagctaaaggctgtaggccacctgcccaacacgctccaactcctgaacggggcctgcatagcgaggaccaagcttacccttggactagggctctagtgagtgcgtcgggcaatggagacggcgaagccacacctagtcgcccaccctgaacttgagctcacgatgttggtcgtcataggaagttaggaacacttggtgtactgctgggcttggataagcgccgatgaacctccatgaggaaggcatcgctgtcacgtaggatggagcccaccacctccatttgagtagcctctgccatgtgtggtaaaaaaggggacatgggatggccaacaccgcctggaaggggatggcgcggagcgtcgtgtgggatgaggtattgcagcaatattctacccacggaagctagtcgacccatgcacgtagtcggttccttgtggcatagcggaggtac

SEQ ID NO: 40137 - DNA, 615 bp, Zea Mays
agttgtcacacaaaaattggagaaccaaggcctctaacttgctctgtcagatgctttgatgatcatcaccatggtacagtgcacaaaaagatcttcaggttcacttcacttcaccgccggtgacctccgtgcctggattcgcgccggctgccacgattcatgccctgtgatgtgtggaattacgatcagagtgaaaagatcttcaccgtggatgagtatgggacactgtggccgctctgtcgcctcatccacttgccggtgacgtggccgagcggccgtcatcgaggtgtatgtcgtttgccatgatcgcgccatgtcgtgaccctttcaccacgtcgttgctagccataatagttcactagtgaccgccgtagctcctcaaccagtgaatgccacggtagaacgccgcagtgactcagtccctctctccgatcgccagcacacttccttcaaattggacgccaccaccaatggagtctataaattgctgccccagtaagctccactaggttattacgcatccaaagcaccagctctcgcctccgatcgtccaccagagcctcccaatttcccatttcccccaaatcggtcagaacgccgccgtgagacatctcg

SEQ ID NO: 40138 - DNA, 436 bp, Zea Mays
cccttctccagagcatttaaggattggtgtgctagtctagtcaattaggtttctgtttcttctttagtcattgtccacattaaatccattgaaccagaatcatctatcctgtcagttagctttccattgcgtgtgcaaatttaagtatcagtattaggttatgtggagggcctaaaatgacaaaaaggaaatcatagctcatgctgtgtagttccttctcaggtagctatgccaaggcaaataggtttgtgcttctccctcagtcaagacaaaacagttcattctgttattgaacttcacgtcaaatgcctttattaatcattattgctgttaatacattgactactactcggggtgggctacgaatggcccccaacgatttaggggttgtttggttacaaaataaggtggtgcatcattagttaattcctcaaat

SEQ ID NO: 40139 - DNA, 483 bp, Zea Mays
cagacagaaccgtatccctggattttttgcagtgatcggacacagtagacaggatgggcggcagtgacgacgcgaccacagggcggggggtggttgtgctgcattgataacatcatcttcaacctcggacgactctgcgaggcgggcaacggcgcgcaccgcagaggccagagagtggtgcggaatgagcacagatgacgcaagaacaagaggaccccgagtcacaattacattcgcaatattttgactggcgactgagaccctgaacacccaaggacgcaagcacacgacgcggaggcgatccggatgcaccgagaggaggtagtttgcggcgttgctgacggagtggatgttgtagtgggggagaagggaagatggagttaaccagagatgagccgacatttggtggcaaaccgaacctggggtagcggtggaatgatagttggcgaggagccatccctgcatgcgggcacctggacggag

SEQ ID NO: 40140 - DNA, 339 bp, Zea Mays
gggctgcaatcttggcatgagcttcttccagttctctatgtacccttgagagatccaaggtaacactgtctaggtcagtgttaagacctgccaccacacttactagggtgttgaggcgatcttctctagcttcacatggaacaacactggtttggttttccccacgaagacgtagcgagagatgtctgtacctcgtgttatgcagctgctgccggtaagtgtggctaagagaccacagagcttgcctagcagcattgctaaccgaagcagcataggtagatagtggcgtcagagactcatgggctgatagagtcctaaaacccctatctccttcatcca

SEQ ID NO: 40141 - DNA, 363 bp, Zea Mays
ttgagattgacgaagctgccgaagcatgccaaaaggctttcggtattgtttgcttttttattggtacaagagatttaatccaggagcatatagccttcagagtatggccacttgtagagagctgggaaatgccgaaggagactgtcaccaagtctggcaaaggtgagctggttcgactgaaatacaccttcagatacggagataaatttgatgaaccaaatgatgactggctgaaatgtatcgaagctacaagtgatgaactgcttgggccgtattccaaagtggaagataatgccttatccacatccttcaggggccagggaaaatagagattaaacagagtttttgatgccattggttttg

SEQ ID NO: 40142 - DNA, 285 bp, Zea Mays
gtcagggtgaaccgttggattggttatgaacccttgggattggatctggtgccttcctccgatcgggtgaatggggaccgttgatgctaaatcagacgagtgaggatggggcccgactgtttaaaatcaggatcgttgatccctacgcccacagttggaactgacttcactgcgtagcgttttgttggtcaaatttatgggccgtccagatctaatctagtggctagaattggcccataccccttcggccttagaaacttgcataagagtccctgtacttttcta

SEQ ID NO: 40143 - DNA, 701 bp, Zea Mays
aaaatatgcccggcgagctggagagcgcagattcagtcagcttttcgaaaatgagccgttggtcagcattcaactgcgagacagcagcggcagcatggtcacgcaatagcaatggttcagacctcagttcgtcgtttatcagtcggttgccaaacatttcgtcaccacaggccgataagattggcaggtcataatcagctatgttggcaccactgttagcaaacgtgtccgctagtttcctcgaaagcaatgtaaggagttgctcatgtggagctgtgtagcatggattgccaaaggcctctctaagtccacagtgtatgtcatcggtgaagtagatccaatatttgtcaagtaaagcacgaacattgcaaacaggacagtgaacgacaatggtaacgaacagttgctgaagctgaaacgccgaggcagagactattgcctcatcaaatagaaggttccactcgttgtcaccttcgagcaaaccacgtgcttcgcacgcctctctgaacgtatcgtacacaatatcctggaaggttcttacatcaacaaacctcgttgcaccggaaacaaacatcaagagcatgcgtagatagtataacttcccagctgttgggtgtatgtagtacatgcgaccaatcttggcagacgtcaacctccttctacgccaacacctagtagaagcgtcccacgaccactctttt

SEQ ID NO: 40144 - DNA, 474 bp, Zea Mays
gggaggatcagatcgccagcgcaacggtcctcaccgccggtgacctaccgccgcgattcgtgctgctgttgccgcgatttgggcttggctaagttggatagcactttgggtcacacaaatatcctcgccgtggataactccggccataaacaagtccggccaccgtaccgtgtatgccgcggtggaaagttcgatgggctcgccggtaaaccgtcgtcgcatggccttatgccacgtatccgagcaccccgtcgtatcatcgtgactccctatcgctgtctcatcgtcgccggtgaggttgccacgacagtggacacgaaatcgcaaccacaatgttcttccttatctccggccacccgcacggcccggccaaattaagcgccactgacgaagcttcctataaattgatggctcgggctactgcgctaagtcatcccgaagctatagcacccgctcccaccctcgatcatccac

SEQ ID NO: 40145 - DNA, 342 bp, Zea Mays
gtgctgcctctcgcggtgacttcggggtggtcgaatgccaaagaccgttgatgcggtctttttcgacatgttgcatcttagtttttgcgagggatttttgcagatatattacatggcaccacctcgttaaaaacctcacccccaggaggaaaagagtgcgggcctgaataatgttgtttggtgaattacaagggcgcgtaggccctgagaacttagacaaaaaatttgcgtagattgtcaatattccaggaatggtcttggtcttcgccggatggcgttgttagcctgtatgcgctgggggacgccttcgacttgatgatgaacagaccttcccactttggc

SEQ ID NO: 40146 - DNA, 326 bp, Zea Mays
ccaccctgcatcacctgagaacatgtatggtactccctgcatcaagtattttgacaacgagacaataagagatttggctaggggtgacagacgtggcccctgccaaactggagaaccatttggtcatgcagaggttagccataaacatatttttcctgttcatgcaaatggtaaaattccaatacatgctaacagttataacttggatttaaacagtttcatagccgcacagagacatgttatgtcattgctccagaacgaccgatttctgaagtattcaacatatatgtgccacgcataaagcatttgattggcaacaagctgaa

SEQ ID NO: 40147 - DNA, 417 bp, Zea Mays
gaaggctatctcacatgggcagggtggcaggagtgttcgtcctcgctacgcttcgccatagggtacaccaactcatctaggaggaggaccacacccagctcagtatgctccacaagtgtctccacggacacctcccactcgtcaggctgctcccactggcaccccgatgaggtcggcaggacagaagactggccctacatgcttcaagtgcagtcagattggacattatgctaatgcttgtccggtggggaattctggtacactattgctatggttaatcaagtcagcgttgatgctactcctgatggtgctgacatcgtacttggtatgttttacattaatggcattcctgcaaccatattatttgattctggtgctacaaattcattcatgtctgctcgatatgccaacacaaat

SEQ ID NO: 40148 - DNA, 623 bp, Zea Mays
agaacggacagtagttgggctggaaataccttaggcgaagctagccacggaaaagttctcctcggcgacgatggcgaccaaattgggggaaagtctaaattctccggctacgatggataatcgggagtaaggagcggtgctctagcttcgtaacaagataacagagcaggccagggcgtcaatttatagcgaccataagcggcgactccgaatttggacgagatttggattacggtggcgtcgcggtgtgtcaccggagtccatcaaacgtggcgctcactaggacaaaggtttacggcagtcactcgttactctctacgactcgcgacaacgtggtactatggcatgtagcgtggcagactccggtaatggcgtacacgacgacggtggtcgcgcggccacgttgccggtcaagtgggtacggtgaggccggctcgatccattccccctccgatatttttacctaccgcggttatctacttcacacagggcacgaatcgcggcggcctgcgtgaatcgcggcgcggagatcactagcggcgatagatgcactgaacccgtgatcttgttcagtccactgttcatcactgaacaccatctcgagctgcctgacagaccaagtt

SEQ ID NO: 40149 - DNA, 325 bp, Zea Mays
gaacggttgagattgatgggaggcagaacaatggtgcacgggtatggtctacattagagtcttatagagtagtagagaatcattagtataatactgcatataagttgttgcatatctattacatgacttcattattagaatcatattagactatcataaattagtcttaagtgtcacgtgctgcgcgggaccctagatgttgactcgtttttcatgcgcctagtgcatgttctaggccgcttgcgcaagtgcaaatctatggacaagtctgccaccttctacttcttgcacgagcacaaagccacaaagaggatttgagattcta

SEQ ID NO: 40150 - DNA, 331 bp, Zea Mays
gcttaatccttggaacattaataacataaaaggagtgacatcattaaactgagttaaagcattaacaactaataagtaaagcaacaagcccaagtttacatcaaggtatgggttggtaaagactactaactgctacgtagataatcccatcgagattatgcatattataaagcataaacttagttgtcatgatgatttgggttcaaatagaaatgcaagggaaatgtccacttgccttcctcacaaaagtcttgagggtcttcttcaaactaatcctgattttctaccacgagagtgtcttctaatagcacatatgcaaaataaagtaaac

SEQ ID NO: 40151 - DNA, 427 bp, Zea Mays
gctttttcaggcagaatttgttctacagcttcttctttcgctgccttttgtccggtttcctaggatttctccttggcgggctctgaaggcccagcttcggtcttggcctggatctttgtagcttcggcttcggttagctttgtctcagtctgcgcttttgaagcctcgacagttttccctggagtagagcttgaagtttttatcgtctccagcacatctagtacactagccatccttttcctcttgggggttgctgtaagacctttttgtgccttcggcactgtcacttctgtcgaagggcttagaacttctaatatttttgtccccttgactcctatctcttcaatattatcggccttcagctcagctagtttggctgaggatgccttcggcattgcaaccgactcttcaatcctctgcgtaagcg

SEQ ID NO: 40152 - DNA, 385 bp, Zea Mays
acacccttgcattgtgtgcatcacagggatctataagtggaagttcatgtcagctttactaacagataggatccgaggcttgagtgcttgacttctcttcctcttccctcctgtatggatcaagccacagataattagccttctcctttactcttgcttcaactttctagtctgactctgatcttgcctttgctgagcttcaatggttagctctcatggatttcttctctccctgcaagcattaaccatggtttccacaattatgacaaacactggagtgatagccactcaagggcaagccttctgtccttcttcctcctgtgggcatcttcaagacatccgatctcctttccgtatgcaaggtgacccacaaggttgtggtttc

SEQ ID NO: 40153 - DNA, 321 bp, Zea Mays
cttcagtttttactcccagaagcttcggcggaagaaggtagtgccttcacagattctagaacagcttcaaaaatgcttgccatcctccttttcctcggagtgcctgtggtagttggtagcttcggcaatattgttactttcatcttcggctgctctggtactttttctattactggctctggctctctggccaggtctgcaataattctaataggcaccataggaatagcctctatggtcggggggttgtttccaccctttcacttagcttcggcacatcgatcgtctcaatgcgcctgggtcggcgcgtcaaaactttga

SEQ ID NO: 40154 - DNA, 408 bp, Zea Mays
ggaagctggtttagccagttggtggaatgaatataggtgggattcttgaatggataggtagttgaacgataaggaacatttgcagaaccaacagtcctgattaccaccttctggcgcttcgttgttgactaagaaaaccttggcctagaaccttttcatgcctgcttcacattctgatgcactcgtgccttttcttccacggctatggccacacttattgcccgattgaaggtaagatcatagtaagtggccatcttcttttgcaattttgagttgaggcctctcataaagcaatctcttttcttgatatccgtgttcacatgctcaatagcatattgagaaaggtgattaaatttcccaatatactacatcacagtatctgccccttgcttatgtctcaaaaactcc

SEQ ID NO: 40155 - DNA, 358 bp, Zea Mays
caatcccttaccagctgccacctaatctcactaatctgtatgcggcttttgtccctcgtagtatatttgttctgtagtatctggcgtttcactgtgattggtgatgcaggaatctgggtagcaacaatttcaatggcaaccttccatactctatatcaaatatggcttcgattgaatacctgtaagttgctaaccagtgcagccttgcctttttacgttttgtttgcacaatatactgttagatcatgctggaacagtataatctactgaaacttttgatgcagtaatctcagtcacaactcaatttctcagcaactgggtgatatatttggaagcctcaactcactttcagacttgt

SEQ ID NO: 40156 - DNA, 470 bp, Zea Mays
gttatgtaactttgtaaggcgaccaattctaagggtgagggccttgatagttggtttgggttacaccgggcctcagtgtggatagtacttgtacaaacaacgatgcgacatggtgtttgttgctatatgccactaaaattcaattatcccttctctccacagcaatgtgtcagtatgcaaatatgttctgtatttgtttatgtgcgcatcttgcattttacctgtttttacaacaatctgaacggtctgtggtggtacatgccgctgaaatttaacggttccatctctatgcggtgcatgcatgattcaacaccgaataagtgctattgaaagctataccttactggacgggttactcagtgtcaatcagaatattgagatgtcctcattgccccataattgaaaaagatcagatccaatgctagaggctcccacatgagttggaggtatagggaagggacaaacttatt

SEQ ID NO: 40157 - DNA, 424 bp, Zea Mays
gtggtctccaccaatatctggcgatcgttgagcttttgttgtcttctattctcctgtgatctgtgtccgccgaagatgacattgacctccctgtcaacgcgcgggaacgctcctcctccttcctccttccgctgctggggttgtcgtggttcttctggccctccccttggcggaggaggaggtagaggttggaagggtcgaccatgcccgatggagtgcttgaagtcccggtagttccgaagagtgtggcgcatgtccttgtggtacgggcactgggcgtcgaggatgtcatccagcgtgcgctcgcctccgcgaggtcctccccgggcgtgagaggctggtggtccggcggcgtgtacttcttcgcgaggtctcttctcccagcatttgtcgggttgctggttcgcgttgcatcgtggtgctg

SEQ ID NO: 40158 - DNA, 278 bp, Zea Mays
ccagtgtacgtacaacaaggagatacatcacaccttgtagaattgtccagacttcaagaactccgttgagcacgaccgaccgtaccaaccattaccgcctcccccacctcgaggagaacccgccgagcagggtcaacctcagcagcagggtggtggtagtggtggggcttttttgtgcattgacaaggaggtcaacgtcatatttggaggccatggggtgcgggaaaataggaggcaatcgaagctcactaattggcaggtcctggtggctacaaaca

SEQ ID NO: 40159 - DNA, 409 bp, Zea Mays
aattgtttctcaaatgtgaagcggtaaggcagtcgaacaagttcattctttttctttgttcccttcagcttcggcattttccattcactcaacatcggggacaccctattggccaggtactcttgcaccagttctctagtgctgatctgttcagccaccaccctgaattctgttacagcttgttggcatggtgaccccgacgacatgcggcacaggggcctagtcagcccgatgcttaaactcagcgggctcatcactagcgtctttaacttctccctcttcttctcatcggccttgatatagaaccactcacttttccaaccggttggccatttggtgcgatagctaagcaccggggccttcatatccttgcgatatgcgaagttataacagccaaagttttcatgca

SEQ ID NO: 40160 - DNA, 274 bp, Zea Mays
aatacctcctatgtcaagccctttgcttcacttgtgtttgcttagtattactaacaaatcatgaagccctttgttaagtatgtgcttgcttagtgttactaagaagtcataaagccccaacgagtttctctagctgaatatgaagcagtcactatctgtccttgattgatcgaaactaatttgcatggttccttttgtgcacaacaacatgaaacataaatcttgaagattatgtcaccgtaagaagtaggtgttccttacatttagagagaac

SEQ ID NO: 40161 - DNA, 341 bp, Zea Mays
tttgggtaattgtggataggctaaccaaagtagcccactttattcaagtgaagactacttattcgggagcctgattggtagagttgtatatgtcacggattgtgtatctgcatggcgatccaaagaagattgtcttagatagaggatcctagttcacctcccggttctagcagaagatactcgagagtatggacacaaagctaaactttagctcagcctaccatccccaaacagatggtcaaaccaaaaggactaatcaggtgttggaagatatgttgagagcttgtgctcttaatcatgctggcagctgggacaagagtttaccctatgcggggttttcc

SEQ ID NO: 40162 - DNA, 395 bp, Zea Mays
gaagaggccgacgcgttggctaaggcagcggccagaggtgaagcccttccctccgacgtgttctaccttgtcattggcacaccagccgtccgcagtccagagggtctacaagtaaccaacgacaccgaaggccatcgcatcatcaacctcatcatgactgaagattggcgggccccaataaccctgttcctgcaaggatattaccacccaagtgacgtcaacgaggccaagcgcctcaaacaccgaagccgggacttcgtacttgttgagggccagctatacaagaagggggtcagtcaacccatgctcaaatgcgtaaccgaaaccgaaggcagtcaaatccttcgcgaagtccacagcggaacttgtggctcccactcagggcccagggctct

SEQ ID NO: 40163 - DNA, 328 bp, Zea Mays
gcacgaccaagtgagagatcaagtgggcgattggtaattcgtcgtcggactctgaccctcgcggccgagacgccgcgcagcgagggcaagcttcctcggagtctaatcgccggtaaattactcgtccctgtcctcgttgtccattggtttcatattgcaccaggtagcataggtggggaactactcgagcgtgagatttgggttactacggcgaggatccaccgtgggcgctgggcggcgccgccgtaccatgctcgaatggggaagaaaggcgttgcccgtcgatttgattacgagcggctgtgattagagaatcgtgtaccgcttc

SEQ ID NO: 40164 - DNA, 429 bp, Zea Mays
gaacgggagattattacacagctgtggcgcacaaaacgaagctacccagccaccgccgaaagcgcttttgaattttcctgtggcagttaaaggttgctcctttgggatgggggtgatgggcacggcagatttggctacagttagtgacgcatgacagggaagaagccaccatcctatgaatccctctagtggacgctagtgctattcggtgggcacggccggtgatcggcttccgtgttgctgctttggacttgtacaccagaggagatcttggtggcggctgcaatgtggcgtcagatcgggacgcatgatatgatgcaatggtcggcctaactcgaaagtagatccgcggttagttgattggtgggggcaagagcactgatgaaggatatacaaaacaatgacgatgctgatgttaaaccgccaaac

SEQ ID NO: 40165 - DNA, 364 bp, Zea Mays
tggattgggagggcagtgcctccttgctccatgacgatgtggagtgggtgccaagtgccaaagctatccatgtcggtgggtgcctattggtcgatctcggcttgctgcacgacgaacttctccaccaggttatggaggttctggtacatcgcccttgccttcatctgggtcggggatgggccagagcatcatggtcgttgtagccatgttttgctcggggttgaggaaatattgggcgtcgttggtcccctcggcgagctaatcatagactttccgcacccgaggtcttttggcttaaaggcattgtcgcttgatgtttccataaactctgtcgagttatcgaacgagggcatcaagctcctcc

SEQ ID NO: 40166 - DNA, 498 bp, Zea Mays
gattatttggtaagaaggtgggtagcagaaggatttgttagtgcacatggtagaagaaatctggacgatgaaggcgaatgctattttaatgaacttatcaacagaagcttaatacaaccggtagattttcagtatgatggtagagtatatgcatgccgggttcatgatatgattcttgatctgattacatgcaaggctgttgaagaaaatttcataactgttgttactaatagaaaacaaatgttgccctcacatggcaaggtccaccgactgtcacttgagtaccatggtcttgaaaccttaagaacaaatcccatttttactactcatgttcggtccctgaacatatttagatactctgaagaaatgcttcctctttcaggcttgcactccctaagagtgcttgatctagatggcaatgagaatttggaaagctgttaccttgaagatatagggaagttatatcagttgcgatacctacggattaaggcaagtaat

SEQ ID NO: 40167 - DNA, 577 bp, Zea Mays
gggagctctccagacctgagcaacagaacctctgcactcacatgatgagcacagactcgagcttgggggtgggggaaccttcactggaccatgccctaaagccatcagatgagaaggcatgggtatagttttctgaacttgtccagcacatggtggagaggaatttaccagatgccagcactgcatggctgtcacacgtgtccaaccagcacatacaccacactagctcataatttagcacaattatcccctttgtccatgactgaaattattaaacaattggacatagaccctcctactcacagctcacaaacagccaagactggatatttcttagtagcaagtgggacatctagcacctatgcattacaccctcatcttcattcaaatacacaggcaagagcatcttcttcagttaccaattgcagccttgaactcgagtataatgaagcctgctgctccatccactcctcactgtttaagtccttgcatctcacaattttacatgataacagaccagtcctttttaaccaaagttacttcctagatgtagccctactactttggtacataaatc

SEQ ID NO: 40168 - DNA, 766 bp, Zea Mays
ggggcattgggttaccattggcctccttcaaggtcctgggctcctccacgctcacggcatgcagctcagcctcctcgtcgtcatggtgcaccagcccgggcgctgcacccacgctgtggatgttgtccagtgtccagtaccggagctccctctttcctttgtgatcagcgtcaaaattcaggtcggtggtgagcggcgtcgcaaactcaatgagtggcccggcaagcaggtgttgctgtctgcggagtcacagctcgtggagcagtccatggcgaagtaggtgtagacgtcgtgcccggtgcagccggtgcgcctgtagaaggtggtgtgcccggtgaggatggtgttcctagtgatgacaacctaggtacaagcacctcagcgtggctcctcaggttgtagtcgtattccaccgtgaaggagtcctcgctccctgctgccaatgcttctccccagtcccagtgcgcgctctcgtcaaagacggcgtcatgtgagacatggacgcgcttggtgacagggttgtagaaatgatacgccttcgacccgtcctggtagccgatgaagacgaccttttgcccgcggtcatcgagcttgctaaggcgtggacgtaggttcttgatgtaggcaacacacccgaacaccttgaggaagtgcacgtgcggcttcttcttgtaccatgcctggtacggtgttagcccgtcgagcgcgctggtgggcgcccagttgaggaggaagacagcggtgtgcaccgcctctccccaaaggt

SEQ ID NO: 40169 - DNA, 541 bp, Zea Mays
gtaattgttcacctctctttgccaataaaaattgttgcctgttttgcccataaaaagaccccccttctccaaacaaccttgagtttagcaagtaaaacctcttaaaaaaatcatgatggtgttggtgttttctagcccttgtgtgttgcgctattggtaatgcacctgcacagcttatagacccccatagcttaaccactagccaaaccggaacttccttgtgcacgcggttatgtcgaaaaaaaaacatcgtttgttgtctagttgcgcaaaccatgaccaagccatgtttctttccataaatccttgccccaaaaacttcatagcatttctgttgatcatcctagctgatcctgtttgcatacctctcctttcacctggatctggtaatctttttccttgcgaatcatgttgtggctttatcatctaaatctttggatcctttaatgattctgccctattatctagttatctgctataacctgttctcaagtatcggatgccgatcttgcctaaatctctcatttctgatcattctcat

SEQ ID NO: 40170 - DNA, 332 bp, Zea Mays
tgactatagacatatatgatccaagaaattggaataatcttgataacaaagcaagagatacattagtcgagaagggaccgataagggaaaagaatattgtctttccaatggatggcaactctagacatttttcctattcccattattttagaaaattaagcaatggtgaggaacatgacagaaaatggttagtttactcaaagcatgttgatagagtgttttgcttctgttgtaagcttttcaattctgatagttgcacaagttcattagcacatgatggatatagagattggaaacatattagtgagagactgaaagaacatgaaaaaaat

SEQ ID NO: 40171 - DNA, 483 bp, Zea Mays
tttaacttgggccgagacacacttaagttccagatacgtaacgaaggctgtaaattgatcctaccgatgtcaacgcactgttatgtcttagctagctatatatgtacacatccaactgaactggccggtggtgagcttagcacactacagactacagctagctaggtagaggcagttgctcgagatgggagcgcacgagccactgcatccccacaagcagatgaggacatcgtcgtcttcttccaaaggcgggtacttcgtgcccagatccgtgtgcgcttggcttgtctgcggcttcgtcgccttggccctcctccacgtcctgtgctgcactccccccggcactcaagaagccgtgttgtctcccctgctgcagtacgtcgacgacacatacaacttcgtctcatctgggtacgtacgttgcattgcattcattcaccagcttatctccatgcatgcatggtctgtttgtcgtttgctcac

SEQ ID NO: 40172 - DNA, 1085 bp, Zea Mays
caatttgtggggggtcgtggcactgaggtttggatagcacaggcaaccaaaaactcgaaggagtgagtaatctggcattttgcgataaaggagatggtagggaataccgttatgtatggacgatgaaggccgccggtttgtgagaaacacgacagtggagagagcctcggcccaataaggaggaggcatggccgcatgaatcagaagcgtccgaacaacattgttcagagtgcgaagcatccgctcagctttgccgttttgggcggatgtgtaggggcacgaggtgcaaagaaggatgccgcgggcagccaggaaggcggcagtggcactgttaatgaactcagtcccattatcggtctgaaaacagcgcacagaagaactgaattgtgtgttagcgtaagcagtgaactgaacaatatgttcatgaacttgagatttatggcgtagggggaatgtccaacaaaaatgagtaaaatcatcaagtatgacaagataatatttatagcccgaaatactcaaaactggagaggtccagacatcacaatgaacgagttcaaaaggtgtagatgtattagaaacagaactatcaaaaggcagcctagcgtgtttgcctagctggcaggcatggcaaatgcggcgagctgctttattacactgtatagctgaaagtttatttagggtttgaacggcggctggcgctggatgaccgaggcgagcatgccacaactctggagtaacgacagcaacatggcagcgaggcggcagacgatgtggaatggtgtagagatccccgttgctattgcaccgaaggaggactgttttggtttagagatccttaacagaaaaactagaagcgtcaaactcaatagaacagttattgtcgcgagtaagctgtcgaacagataacaaattacgagcaagctgaggagcgacaagaacattattaagatgaaaatagcgatcagctataggtaagagagatgtgccacggccagatgaagggatggactgcccgttcccgaccgtaacggagcacggtggggaaggtaacgggaaaggagtataccgtcgttggaggacatgtg

SEQ ID NO: 40173 - DNA, 504 bp, Zea Mays
ctaccctagggctttccctggcagtgtacaacacaacaacacttttgacttactcatccaccaccgtcctttcaatacgcagcccccttttaggtgttggagtgtgttgggcaggtggcctaccgccttaagcttctagccgatgcctgtctccatgatgtgttccacatagtgctgatcaagccgttctgcgtggaccctccaatgactccgccataagtgccgcccgttcaagatggctgattgttgcctgctccagagtgtgtgttgcgtgcccagttacatcgtggcacctagcatgtgctcgtacagtggcagggcctgaccaccgatgctgctgcttgggagccactgcacgacttcaagtacctactcggacgttcacctcgaggatgagctgtttgaagagatggggagagatgttatgatcgacatcttctatgcgcgccggaaaacgagccacgcaggtgttgagcccaaactacacttggttgaacagtaccc

SEQ ID NO: 40174 - DNA, 282 bp, Zea Mays
gcaagattttactgacataaaccaagtcatgcagcgtgctatcacccatgaaagtcgtgctagggacaataaacagtatagccgatttagagatacgaatggcagggagaaagagaagcagggggttaacatgttagagcccaataatgacagtgatgaagagacagatgtatgtgtggctgaatgggtagatgcgccaaagggtaggcccatgacgtgtgcttttttaaagccaagtctagggaaaagggaagagatgaaatatacatttgatgtgtccaa

SEQ ID NO: 40175 - DNA, 657 bp, Zea Mays
gctatatcaaataggttgaatagatcaattcaggtaaaggaattatatccccactttcgtacaaatataaacatctgtgattattatatgcttttgtacctaatttgtttgtgaagaaattgttattatatgcttgttagggaaactctctaatgccatttgcagttataatattagagtttgacaaatatttatacttgtacagcatatagtgtaccatttaaaactgtcccttcgtaatagcgtaatagccttgtagtatgtccgtctgttgcagtttagagcacaatggttcttttcccatttcatagccaggatctgccagctacactacacactagatctgacacacttttatgaacattctaattttatattgtggtgtggattctaggtgtatgatgaagctgtcagaaggctacaaacttccaaaatgtagtagatggctacaaacttccaaaatgtagtcattgtatgcaaagctttggatggatattcaatatcctgagagagaagattccatcacactattccaggattatgaatttgatgcttcagagttcacgtcatccataccgaaagtttaggaaaaatgcagaatcatgtgggtgtcttagtgaggatcttgcttgccaatacatatcattttacttgaaa

SEQ ID NO: 40176 - DNA, 333 bp, Zea Mays
ccaaagtagcagccattgatgtccagctgcaggacatagatgcatttcttgaggaaatcaaagcacgtctagtgcaagctcaagtcactatgaaaagttaccaggatcagcgtcgcagagaagtggaattcagtgtgggagattgggtctggctacggctacaacagtgaacggctgtaggggtcactacggcttctccctccaagttgggaccaaaattttatggtccatatcagatcacacaaaagataggggaggtgtcttacaagttgcaactaccaccaaatgcacgcattcatgacgttttccatgttgctctcttgaagaagttcg

SEQ ID NO: 40177 - DNA, 716 bp, Zea Mays
gtttgttgacgtccctttctctattcatgtgttttagctgcaggaaagaatgcctaggaaagtggggtctagtgctacatctatgaaccaagtcaaaggtagacctcttattgtaaccaatgttacctttgacatttatatctctattaaaatcttattgaccaatcttcacaaaaaaaagatacgtgtttttccttgtcaattcatagctagaacttccctttgcaaactcattctctgatttagttgataaaaaactataatgggtgatttctttcccaaaatagaagcatgcttctgcttgcatatccacacctcaaactttctttttcaaagcacattttctgattttatttacacacagttataacgtgtgattttcccagtggtaacttactggctttttgaacatgttgcaggtgaaagcagacactataaagaactgaaatccaatataaagcaaacatcagaaagcagttctaatccttcattagggccaactaaagttggtgttctctccagaggaaactcaggagcaaacaataatttgccccgttgtaatagtgatgatactgtcgttgtacggtttataggctctgctttggttgggaagtcagagactgaagatgcctgtcaccacggcctagttgagccaactataaacactaaagaggctttggatgccattaatagcatgtttatggagccactggaac

SEQ ID NO: 40178 - DNA, 399 bp, Zea Mays
caataattaaacctttagaatctagttattctgtggcttctactgatgaagctttggtgtatggcatttctgctagcggtgtagttgtgctaacactgtcaagagttagagtccctactcgacaatttaactgctttgttatgggctgccaatctgcgtcaccaagtatgtatgtgcttcatgtgaaggagaaacagcgtttccctggatggaggacaggtttctcgtcatcaatcgatgggattttggatggtaaacgaattggactgtgcaccaagcatgttaaagatatatatctgggacacatctcccttcaatcagtcgattttggttccctgattagatgactcaatgatatgttacctgtgattttctaataattgaaggccttgaaaatga

SEQ ID NO: 40179 - DNA, 345 bp, Zea Mays
ggcagacctcctcgcttgcaccccttagcgtctcgggtgaaatccccactgacatcctccagggttctccccctacgacataggagctgggacccacacgtcatacgagctgatccgaagcacgaagaaggtgaaccgccgcacgcgaggcatgtaaccgtcccgcggttacaagcgctctcccatctttgcagaaactggtggtcgaaagggtggactgccacgcgacaagcatccaactgcaccgcaaccgtgcgccccttcggctccatccacatccggtggaccagtgcaaaggaagcgggcccgcatgtcatgtaatcggcgcgccggttacgacgtgca

SEQ ID NO: 40180 - DNA, 450 bp, Zea Mays
ctcggatttaaacatgatccagcgccagtttgagcatgattcccataacaaatttgtagctagtatgtagcactacaactttgatgcagagacttggggatgtttccatagaaaattgggaggaatctggccctaaatcttggctgtcagacacactgaataagcatcgccatggtacagtgcctggacagatcagatcaattgctcacctcgccgccgatgacttcgcgccgggatcatcgccgccgttaagattcgcactcactggtaaccggatagcacttggggtcgcgtagatatcctcgtcgtggataaactccggccattaaacaacttcggccatcgtaccaggttcaccgcagcggaatccgataacttcaccggtgaccgctgcctctcggtcgtgtgccgcgtggctctgcctttccaccgcgtcgccgtgactcccta

SEQ ID NO: 40181 - DNA, 494 bp, Zea Mays
tgggaacaaagtgcaggcgtgtttaatggctttcaacaccgtgtgcacttacatcggtactagggatttggtacagtaacacattgcttacaaggtatggcctcttgtgaatgactgagagatgccgacagaaactgctgctggctccagccaaggtggtttggtttatctaagatacaccttctagtatagaagccaatttgacgagccgaatgacgattggctagaggctgttgaggcaaccagtgatgagctgctgggagcctacacgaaggcagaggacgaagtcacgatcattgccttcggcgctcgaggaaaaaaagagactgaacagagtttttgatgtgatcgggtttgtttatccagactattgcttccctgcctgaaaactagggttaaagagaaaaatggcagcttcaacctcttctggttcacagaaaccgaagaaagctaaggtcctgactcgtaagacgaagctacattctttagaaaat

SEQ ID NO: 40182 - DNA, 304 bp, Zea Mays
aagatctttggcagccctactttttcccctagctttggctctttggccacctcttctttggcctcgacacgaagtttcaacgtttcggctggcccgattgcaggcaccttcggcaattcagataggtcttccctaggagcagcgggagcaggttgttctgcttcgacaatggaagatgtcccttcatccagcttcggcaatgtggccgtctcaatgtatctcagccggtgcgtcaagaccttgatcttttttcccttcggtacaacagaaatggccgaagcggtggttttcctcttctttccct

SEQ ID NO: 40183 - DNA, 299 bp, Zea Mays
tggtgcgtcgctgccataccctctgcacgccgttgtggacagttcatccgtggtcaccaaactggggtaagaaccatcgccaagcctacatttgcctctacgattgcagtgcacctagagttgtaggaaatggcgctgttttgggtgggcaattgctcgccgtcgtgcgccgccaccgcggtgccgctctctgtcgtgggtagactccgtgtgaactggaaccgccgaagtgatgtctctacgttattcgatagacgctctgctccccgtaccttgagccaggggtagaaatcatggct

SEQ ID NO: 40184 - DNA, 362 bp, Zea Mays
ttcgtagtagtacgcggtgtgccctatgggtcagttcaatggtgcggtcgtgcgtgtcgtggctttgtctgttgtcacgaacctgcgtcacccaccggcgtgcgtaggcatacacctagtatggtgtatctgttgtgttcttttgggtatgcgggtcactgtagagactctagcgttgaggccctacgaccggggttgactggcccatgtccgtgggggcttacttgaggcaatacgtgatggcatatcgtcggtgttcgatagggacttttcgacaccgtacccgaggtccgtacgtggtttggtgatgacacatcttgtcacgcttgacgcggggtcaactgcattgggtcggtccgtcg

SEQ ID NO: 40185 - DNA, 724 bp, Zea Mays
cagaccggccgattggggcagtgaccggcgctaagcttcggccgagaccaaatccgagtccccatgaatgtttcccccaggttaatttggctcatgattgactaaggagctctggccacggtggccgtgagcagcgcggcagaaccgacgcgttcccggcgaccagaggctactccgtgcaaattaagggtttggcaggcatcacaacgatgtgagagtgcacaaacaagaaagcaggggacggggactgaccgggaaagggctggcgacggtgagctcggtttcacggtggcggaaatcggatttgggggaattccaaattcaagctctctggtgggaggtttgggatgcaagcgggtgcaatagctagtagagtacatggcgaagctgagggggggctcaatttatagactccgagagcggtggctctcaatttgcccacagcgagctggcggccggaggtgaagaagaagcctggcaagctttccgcgcggcggcttccggtgagggcacggggtcgccgcttaaccagaggtcgccacctcggtaacatttgccacggtgccaaggaactttaccgcgaccaccgacgaccggtcacgccgcggtggcgttcttatcgccggcggggtgaatcgtgatctccagtgcgaatttctgatggctatgaacagtgctctgaattcaaataagagcctgactgacagagcaagttcaggtcaca

SEQ ID NO: 40186 - DNA, 372 bp, Zea Mays
gtagttgtcatggcttcatctttggcctttgactatgctccaagcagctcgtcactagtcgcttctatggaatttagccagtcatcattcggttcatcaaattggctcctatacctgaaggtatacttcaggtagactaaaccaccttggctagagccagcagcagtctccttcggcatttcccacccatctgcaagtggccacactctataagcaatgtgctcctgcaccaagtcccttgtgcctatgtaagtacacactgtattgaaagccgcctgacatgtttgtatatcattcccaagggcagtggctggcctcctaatgccgaagtgagaccatatagggcgttgaataatctcttttacatcctcc

SEQ ID NO: 40187 - DNA, 305 bp, Zea Mays
tcgacgtctcgcgttccctaaaatttgttaaacaacttgattttcaccaaatataaaagttgttagtaactaatggaggcacatcatatcaaaagatggcattcatccgacccattttgacaaggtttgacatccattctttggtgaaattaaccctttaacagtagcaactttggacttaattatctcttaatatagtttgcaaatggctgagaacccttaatcaaacttgtagagtattgcgtgggaaatatctttgctacagtgacccatgtccgaatccaagcagaaaacgccaaaaatgg

SEQ ID NO: 40188 - DNA, 345 bp, Zea Mays
ccacagtgaaagccactaagcgcttgcgccagtgcccctcttcctctccggccgccgcgcgtcttcatccaattcaccggccaccgctcacggactctataaattgagcgcactgcgagctccataggataattacgcatccatagcacccacgcttgcctccaatctttcaccagagaccgtgcattgctcgttgcccccaatctccgtttccgccaccgtagaaacaccctgccgaggccagcttgctccaggtccgttcatgctccctgttctctcgttttagcatgcttgtgtgtccctgttgctcctcgacccctccaattgagctagagtccctaggat

SEQ ID NO: 40189 - DNA, 590 bp, Zea Mays
agatcaatacagattcatgcagtagcaccagcaccttctttcgtccagccagagctcctagaaggactcctctaactcattgtccaccacaacatgttgtgcccgttgttggcctagcttccaatctttgatgcacaccaacatcttcactgtctctgcgttcaaacgcatcgccgatcctcaagaatcctgccagacaaactgaaagtagactttgaagaagtagttgaggcaggaacatacataatgtctctagccataattgaaagaattggataggttagtttatgctcatgccaccaatttaagatatcaaaatcatactaatgggcagccacattgtcactgtcaaggtaaacaattagttcacaaagacctgcaccaggtccactactacatgaagaacctgatgcagttgaggatctagaagcacctattcctcctaaaattttaccccatgcatgttttctcatacctgtcatacctgattgatgtgtggttctggatggcctagctgcaccaaacttagtttcatacttggcatatagctgatacaactcagtcttaacatcagcaaaataagtactata

SEQ ID NO: 40190 - DNA, 344 bp, Zea Mays
cacgacgagggtgttcttgcggtgggatgaaccgatttggggaaaactcgaaatttgtgagctctggtgaacaattgagggtgggagcgggtgcttcggcttcgtgataacatagcgcagctgaccaggccttcaatttatagagggcttacgcggtggtgcgcaatttgaccgagcagtgctagcggccggagagaggggagattactggcgcagtggattcgtgtcctccgtcatggcgacttcaccggtgatcaccagatatacttaacacgacctactgcgacgtggtaagatgcccgggtacgtggcaaccgaccggcagtcagccaacaccggcgacc

SEQ ID NO: 40191 - DNA, 457 bp, Zea Mays
agagtacctcgacatcccactcaaggacaacatcaaaggatggcgcctggaatggtttattgtagagaatcacgacaattctctaccccctcggtcagggagacaaccggatgttcgcgctctaagttggactgaatcccccacatacttggagatagccgaggccagggttctgcttgccgaggttggcttgttgaaggagaaaggtctgactgctgaagctgtggtcgccgattttgtttttaagaacattcagccactgaaggacagagcgtacctagcttatctgtatcgtggcatcactgactcgacccaggttaccaacagaaggattcctgctgtggatctggtaagccggcttgaaatgattcttagaggcaaggtgtcgaatatcggtgctcctgttgcgtattcaacctggaatctgcctccttccaagactttcatcagttttgtg

SEQ ID NO: 40192 - DNA, 288 bp, Zea Mays
ggaatccaagggagtctacctgacccgatccttgtaaatcaaagattttacatagattttaatttcgtagtaacatattctgcatgaatcagcaggcccatgataactggagaaaatatcattatcagcacctgcaattggagagataccatgtttgttttgctgccttctaactagtacattccaagttcttatgaactctcatgtttcatctggaggatgcaactttctaagtatcctccatcaacgcgcttatctccggtgtaggacacctcctgtttatccaag

SEQ ID NO: 40193 - DNA, 482 bp, Zea Mays
ggagaacgggaccttgggtttcagtcacctgagggggttctgaaggatgttttcactggggactccgactctggtgatggcaatgaccgccacaagaagctgtatgtcatgtatgacgggagcttggagctcacctcccgcaggaatgtcaagtccctgcgccgagaggtcctttcggtggtcctgggggtcccgaaggctgctccacatcagcggtggaggagcaccaccatctccttcgaggcattcgactgccccgacaacatggcaggggccggtatactaccgctcatcaccgcccctatcatcaccaacatgcggctgcaccatgttctgatcgacggcggggctaggctcaacatcattagccacgctgcgttcaagcagcttcagatctcagggtcccgactaggaccctctcggccattctccggagtgggcgctcaaccggtgtatccccttgggagcatcacactcccggt

SEQ ID NO: 40194 - DNA, 467 bp, Zea Mays
ggcaaatcactatttgaagcattgtatgaatatgttcccaggcactttggtgttcaggtcccgaactcttcttctactgacgcgacatctccaccagaccaaacaacatctgttactgcagtagcatctccaccgggccaaataacgtttgaagcatcaagcgggtaagcacagctctgagcgtacattccaaatggggaatttggtattcgtcaagctccaaccgtatgtccagacgtctctagtctcccatgctaaccagaagttatgtttttgctactttgggtcctaccgtgtgttgtcccagattggtgccactacatacaagttgtacttaccggattcctcagcagttcaccccgtctttcacatgtcataattaaaacagttcatttggccatcctcgcaggtctctgttgtcatatcgaacttatctgatccctttcaagttcatgaggctattctac

SEQ ID NO: 40195 - DNA, 1816 bp, Zea Mays
caagatggagatgccgctcatgctcttcctcagtctttgaataaatcagaatatcatccaggaacacgaccacaaagtcgtccaagaactcatgtaacatcctattcattgcttccataaaagcagcaggggcattagttaagccaaaagacatgactatgaactcgtaatgcccatacctggtgcaaaaggctgtcttctcaatatcctcctcacgaatcctcaattgatgataaccagagttcaaatcaattttggagaacacctgggcacccctcaactgttcaaagagaacctcaatacggggtagcggatatttattcttgattgtcacttgattcaaagcacgataatccacacataacctcttgcttttatccttcttctcaacaaacaatactggggaagcccatggcgacctgctaggcctaatgaaacccttagccagcagatcatccaattgccgcttcaattcaacctgctcctttggagccatccgatacggggccttatgaataggctgtgtacccggaattagtttgatttcaaaagctgcatcgcgctccggaggaatgcctggaagctctgctggaaacacgtcggcaaagtcacacaccacacggatgtcctgcacccgcaaggcagcctcaccctccaccaccatggagaaaaagattcccgacttccttgaccgatgatccggaagcaattgcgacaacaaggataacgtgaactttggagaacttcccaagaataccacctccctacccgacggcgcctgcaataacactgtcttccaaaaacaggatataactacgcgatactgagataaccaatccatacccaagaaaacatcaaatgcccccagggaaatcacaacaagattagctgaaaagacctcatcagcaagaatgacggaacaaccctgacaaactgaacaactactaatggagccattagcagaactaaccataattgggtgacccaacctctgcaccgaaagaccagcccgcgacacaaaattctccgaaacaaacgaatagctagcgccggagtcaaaaagagcatgggccacaaacgaatcaactgaaatcgtacctgtcaccacgtctccctgctctctgccatccgcagagggtagcacatatgctccggaaatacccgcagaagaggaagctcccggagtgaagttaacagaagaaccccactgagtcgatggatgaggcagacacggagctccaaactgaggtggtataggagtagtcggggcaggagtaggcgcggccaaattctgaggaaaaccttgcataggcacaaactgaggagtcctgggcacatagaactgctgcggaggaagtggtactgaaaattgctgctcagcgcttgacatcatgttgacagtgccctgagaagcggtggaagtcactggctcccatctgagcttcccattgggattcctcctacacaccacatccttgtgatcttggctacagatagagcacctgccactccactgacactcggcacggcgatgcgcatcaccacaatggaaacacaccagccccagcccgggcttaggaacagcccgatacctctgagtacttcctcccgaagtacccgattcagaggatttgccacggtaggggtggtggcgctggtgttgagacttgcccctcttgtgggctggacccccagtgttgcccctcctcgcgtcctggccacgaggctgatcaacacccgaagacttctgtgactccatggtgtactggtgttgcatctccacacccaatgcctgctccactgtagtatgaaaatc

SEQ ID NO: 40196 - DNA, 567 bp, Zea Mays
tccgacgatggtaagcacctccctctgtttcgcaaaaatcctctcttcgtttagcgtcggtcggatcgggggttcgagcactagagcctaggatagaggggtccgttcatgggcgccgccgcggcagatttgtgcgccgccgcgccctatggctgggggagaagaaactcgtgagccatcggatctgtgatgaagggtggggagatcttgaccgtgggatctcgatcgtgggccaaagaatgatgcggtagatggcggctcggaaattcgatctggaccactgatctgttaacagacggatcctgttggatctcatttcataaaatcgtgaccgtaggattaggatcttacggctgtactggttcagatggacttgatttaatctcatacgtccaaccctgatccaacggtccaggatggcccataccccttcggtcgtagatagttgctaaagagccctctgacttcttttaaataaacccgtcgtccactgatggcgtaagattattacggttaggtccagatttttacggaatagaccccgaagacttaagaaataatatccgc

SEQ ID NO: 40197 - DNA, 436 bp, Zea Mays
ggaaggtgaccgggtagaacctcctttcaaactgcctgatgaagacatcccaagacaggactcctgatgaggaggagtgcgctgcctgcacgcatctccaccaaatttgagcctctcccttcagtagttgtgtgccaaagcgaacgcgatcaccatacacaatctcaaagacattcatcttatcctccacgtaagttagccaatccgctgcctcgaccggagtaccactgccatcataagtatccagcttcatgcccatccacttcatcagagaaagaccactgactcgaagaggcacctcggcctcgccacctggagtagcactcgcagggacagcgtccccgggcacccctccaccaccagcaccctgagcagcacccgtaggggcaacaagaatagcctgtctcagaatggccaactcctactgcatggcctg

SEQ ID NO: 40198 - DNA, 627 bp, Zea Mays
ttaatttattaagtccctagggtttcttttgtaattttggacggtcgaaggggtatcgtgcactgcgagccgttggattagacgcaggcgaaccagattagcccagtgctgctgtgaatcggtacgcatccaggatcgcaggatctgagatcgacggctagggttctatgagatccagatacattgttggtcgtcgatcgaccgctcgatccagatcaacggatcagaacgaatcgtggcgaaaaggtatggcaagatctaatctgagccgttcaccccgtgatcaacggtgggtatcggatcaagtcaagcaattaccttgacctaatctgagccctccgctctgcatctaacggctggcgtagcttcttcctcgctctggtcgcgcacagcagcgccgccccgtgccgcggcggcgaaacccgccggagccattggaacacgtgacacacgaccctagctttctattcgaacggagttacgcgatcctgcgagatcggcgaacatggttaaggccataccagaggcgaatacgacttcagcagctgtgcccatgagcgatgcgttcccccgcggtggagcgccaactacggcgaagaatccctgtcgcctcgaggcttcgcaaac

SEQ ID NO: 40199 - DNA, 571 bp, Zea Mays
gagaaatcatccaggatgaccagatagtattggtaaccggagatgcttggaacaaggggtgtccaaaggtcacagtggatgaggtcgaaggggagcttgggacatagaagagaagggtaagcgagtatgacgcccgagctgatagagatgacaaagcgaggtggagttaccgtatgggcaaggaatggccgatagtcgagagaggacgtcgtggtcgaggtggccaagacaacggtgccaagtggaggtaggggtagtggaggcaagggcgtagggttggacaaaatgggcagaggaaggtggggtagggaagcgaatagggtataggggactggaactgtcgtagcgagcaaccacaacacgagtggtatgatcccgtatggtgagtccccaaggatcgaactccatagagcaacagttgttagtggtgaagtgacagatcgagaggaggttctggatgatgttgggggcaacaaggatgttgttgaggtacaacggaccaagaaggaccatgtcacctactgaggtgacaggcagagtcgacctattgtcgatagtgatggaggaaggg

SEQ ID NO: 40200 - DNA, 305 bp, Zea Mays
gtaccttctccatgatgtgccacatgcagaatctatgaattgtatgtggaagaatagttctaattgctgatttcatactagcatcttcatctgttataattaatcttgggtcttttcctcccattgcactcaagaaagtccgaaacaaccactcatatgactcgatcttctcatttgctatgaatgcagctccgaagaaaacactttgcatatgatggttaacaccagtaaaaggtgcaaatatcatattgtactgatttgtactatatgttgcatcaaacgataccaaatcaccaaaatggcta

SEQ ID NO: 40201 - DNA, 410 bp, Zea Mays
atggttcacaagaaggtggatttgcaatccaaaacttgagatttggacttaagtgcaaaagagccacacttgacccttttggttaagtctgaatttcagtgtggttgactcaactttgagcccttgtatcttccaaattattgagaatttaccctaggccaccacatcaaatgtgtaaacctatcaaaggagaacaactttgcttaagaaggtaagcctagttgttatgaagaaattggagataagcagacccaaagtcgggctgtcaggtcattttaagtctgaattttcagactgacagtacactgcaagaactttgggcacaaattcaaacgtgatttagtaggaatttggctatagttgttatggcaacattgtagctagaacattggtctacaactttgctgcag

SEQ ID NO: 40202 - DNA, 559 bp, Zea Mays
ccctatggcggcgccacggtttccccacggtggaagtcgccggagttcttcgggacggtgccccattgctccccctacccctcaacaccgagattcgcaacgaggagaaagatttgaacacgtcggggatacttaccgccgtagaagggctacggagggagctggcctcatttgacaatggcaccaggcgcggaggtgagccataggtgagaactcccggccatgccccaccgccatcaagccagcagatgcgttgcctaggtgcagcgcagattggagtatccccagcttccctcgtaaagccattaccattgcttgactacgaccctgatgtgcactctctctcctttcccttccccggatccctggcaaccccaaggctgcagcccgacatggaggtcgaagacaaccgcaccaccgcaacgaaacgacgggataccctagatttattgtccgaacgcaaggccgaggaacagcaaatcccattgacccgcctaaaacctcggcatcagttaggatttggtacaatggggaggacgggtctgagcgctgggggcca

SEQ ID NO: 40203 - DNA, 405 bp, Zea Mays
actagattagcatagctagagcggctagagagagagagatcatctacttctgctgctcctactagctagatagtgagggagattggatgtgtgggtgcgtgtgtgtgcaagaaaaggtgccatcatcattgcacaataatgcaacgtgtgtctggtcctgcaagccgcgcccaacctccaaagctagctagcagtgaagtgagcgcaacatgggcacgcacggacgacgagatcatcagagtcagagaagagccggcccaccccattgcgatttcctttggacagttctggccggccgggtgctccgttttgtgtgcgatttccctttctccccccgccccacacgatctcctccctccctccctcccgatgcgagcagaaactgtgtccgcagctttgctttct

SEQ ID NO: 40204 - DNA, 1564 bp, Zea Mays
tcgctatatggcagtcctaggttgatacagaacaagtacttccataataatttggattgctctgaaccattcttttctccaagacagagagcatggtcagaactagattcctacatggaaaagattagtcccgaattgataaatcgagtacaaaataatttgagagacataaaatctgcggaaacaattaacgaccaaagaattatgcaaatgcctaaactgaaacaatctaaggggtcaaatgcagcaacagattctctgaaggacatttttgtatagggtgatgttctgggtcgtatgtcagataatggacatgtatcaggaaccaatatatcacttccaaggttattgaaatcgtcacagattcttgatgtgcagagcattgcctgtggagagaaacacgcggcaatagttactaagcagggtaaggtattctcttggggtgaggaaaatggagggagattgggacacaaaacaagtgacagtgtctctgaccctaaaatcattgactctcttgcctccacacctatgaagactattgcattgggggcaaagtacacctgtgcagtttcagtttcaggagaactttatgaatggggtgaagggattcacagcctagggttcaagaacaatcagtgtcaaagaagcccatggttcccacataaattgatcagaacttcagatggtatatctgtggcgaagattgcatgtggtcagtggcacacagctatagtatcctccacaggtaagctgttcacatatggacatgggacatttggtgttcttggacatggtgacacacgtagtgttgttcagccgaaagaagtggagtccttgagggggttaagagttaagtccgtcgcatgtggaccatggcacactgctgctattgtggaaacatcaggaacacccaagagcaatgctcctggtgggaagctattcacatggggtaacgcaagtggagagaagctgggccatactgacaaaaagtcgaagcttgtaccaactcgtgttgaatcactcattgattgtgattttactcaggtatcatgcggtatgtcattaacagctgtgctaaccataacaggtgtcgtatttaccattggaagcaaggaccatggtcaattagggaatcctcgatctgatagcgcatgtatttgtatggttgaagggccacttaagactgagtttgtcaaagatatatccagcggaaattcccatgttgcagtcttgacaatgaatgggaaagtgtttacctggggcaaaggcacagaagggcaacttggtttgggggattaccttgacaggaccttcccaactctagtggaggccctggaagataaacaggtggacagtatagtttgttcttccaacttcacggctgtaatttgtgtgcatggggaaatctcaagcaaggatactgtatgcagcagttgcaggttggcattccggtttacaaggaagaagcacaactgctacaactgtggttccatgttctgcaattcttgcagcagcaacaaggttcaaagggccacccttgcaccagataagagcaaaagatgtc

SEQ ID NO: 40205 - DNA, 800 bp, Zea Mays
agaacttatggactaaagtaattttaagtatgaaacataggtataccttaaagtagatcatattacggggattcagtttattatcctgcttattgcatgccaggcagcagcttgagccacacttccaactgttttgtataccaaaaacatctcctcttgctaggaacctatcaaacttaaagtactcgttcaaagcttgatctaccatgtcttggtactcacttcctccaaaggatgaatttatctttaaagaagcaagcacaccacaatcaggaatcctcacaacagaaactcgtaaatgcaacgcatatttaggcacttgagggcatggaagaaggtctaagtgaagagaaagatcacttccagaactggcagttgcatccatctcttcagctcgagaacagaacttgaaaggctgcccttctctttgaataagtagtttaaggcaagaaacaggcaatcccaagttgaatgccaaaagtgggctaacataaccaacatcttcatccatggatgtaaaaccagtagcagggaacgtgcgacaaggtaagaagcccattgcatgaccagagaccacttggtcagtatgttctgagcaggacttgtcaagggacgggttaccaaacaatactgctttgacaatcctcccaacattattgtcagtattcttgacaagcacctgcagatcagtagatgcatatcatatttcactaaaatgaacagaacagaatcccacacagtacccatttaccatctaagcacgaaaagctgcacctgaattatgtcagagatgaacttgc

SEQ ID NO: 40206 - DNA, 329 bp, Zea Mays
cggagatagaggacctatggcgtgagaacctcagatgaggcagagacatggttccttgctttcggaggacatggtgggacagagaatcttcctaagcatgctttaagggtataatccgggtacccctaattatcatatctgacataggtgatacataaagtttaccatacggaacacagagttgggtgcagtccggtccggtcagcccgacccaaatcagatttgtcaagattcagtataaatgtataatgcaagaccactgtagagtccaatatgctcggcttgttccccaagcaaaatcgtgccaactcgaatccaaccgtcttgag

SEQ ID NO: 40207 - DNA, 393 bp, Zea Mays
acgaccttcaggtgatgttccttttgatgactctgaagtggatacatcaatcggaaagccaattatgggaccaaacgaagcttcatcttatccagaacaggctcaggcatgccttgctaatgatttcttgagaaggtaaatcatctttgtatgatctgatgattcatttttaactttgtttcttgtggatatttggagttctctagtgatgaaaaaacattatttcaccttgcataatcacccccctctcacttgacttgattctttatttattttataggtttgatattgatgatagatcggtagtctcacatatatttcatcattggggcaagaagcaggcatttcaaaatccaaagagattacttgaaaaggtactgaaatgttcacagt

SEQ ID NO: 40208 - DNA, 616 bp, Zea Mays
ctaacttcttcagcagagggtcgcactctaaggcccaaaccgccatcgccagcaggaggactcgacacgaaatgggtaaaggccttggaaggaggcaagttccaagccgagtaggcaacaggggcaccaacatttgacaccttgcccctaagtatcatttcaagtcggctcaccaagtccacagcaggaattcttctattggtgacccgggtggagtcagcaagacctcggtacaggtagtccgggtatgccctgtccttcaatggctaaatgttcttgaagacaaagtcagcaaccacagcttctgcagtcagacccctctccttcaacaatccaacttcagctagcagaactcctgcctcagccacatcctggtctgtgggggactcagtccagctcggagtgcgaacgtccgactgtctccctgatcgtggggggagagaatttctgtgattctcaacaataaaccactccaagcgccatcctttaatgttatctttgagggggatatcgagataatcagttttcctcccgcggcgcatttctaagctcgcgccccccaccagctgatgctgtcctccggccatcccaggccgacagtgatacaaatatttcc

SEQ ID NO: 40209 - DNA, 365 bp, Zea Mays
tacctttccctcactagaccggacatctctttctgcgtcaatagagtttgccaattcatgtcctcaccgacactcgaacattggatggctgttaagcgaattctgcgatacttgactgctacgattgaaatgggtctgtgtattacaaagtcgtcatcaacattgctcagtgccttctctgatgctgattgggcaggtaatcctgatgatcgacgaagcaccggtggttttgccatatttttttggcaaaaatctcatctcttggtgttctaggaaacaaccaacagtatctcgttctagtacagaagctgagtacaaagctattgctgatgccactgctgaagtaatatggttacaagtccttc

SEQ ID NO: 40210 - DNA, 597 bp, Zea Mays
gactaatcaagtattggaagatatgttgagagcttgtggccttcaacatggaggtagttgggataagagcttaccatatgcggagttctcgtacaataatagctaccaggccagtctgaagatgtcaccatttgaggctttatatggcaggaagtgcatgactcctctgtattgggatcaaactggtgaaagacagttctttgggcctaaacttatacaagagacagaagaacaagtgcgaatgataagagagaatttgagaattgcacaatcaaggtagaagagctatgctgatacccggagaagactactggagtttaaggagggtgatcatgtgtatctaaaggtgtcaccaatccagggtatgaggagatttaaagttaaaggaaagttgttccctcgcttcattggacctttcttgatcttaaagcgagtgggagaagttgcatatcaactagaactacccgatcacctagcgatgtacatgttgtattccatgtatcccaactaaagaagtgcctcaggatacctgaggagcagctaccaatagaggaccttagtgttcaagatgacctgacttatgctgagtaccctatc

SEQ ID NO: 40211 - DNA, 530 bp, Zea Mays
agcgagaggatgtggtgaacacgtcggtacctttggtttggttggaggtggtcggagtcatgttggccacgtgcgggggtagacgaagtcggcagcggcgaggggcttggcctatacacggtagtagagttcgaatggactgctcgaggagcttcactaggtgatgtagaggttgtgcgtgcaaggaatctaagaatggtgtgccggcttacctgggccacgtactccggcgagcgaaggaagtctggcgagggcgatcgatcgtctccggcggggtagcactcggtttgagggcttgggaagtttcaccggactctcggaaaactggtcgagcagctagcttgggcagggatggaccgcagcggccggtccacggtggtcgagttcgggtggctttggcgggcgacagagctctctgttttttaggcggttctctggtagccgagcgcaggcgagagtgagagggctacgggtaaggatgtctgagggacctggcgacttatataggcgcgggcgcagcgagggcacgt

SEQ ID NO: 40212 - DNA, 335 bp, Zea Mays
gcaaaactaacgaaccaatggaagcccaagattattcgaacacaatgaaatcaaacacagctagttgcatgttcgaggcatcaaagcggcaagaatgccctataagcctcatattggcagacaagaaaggcagtttgcaagaagtttcagttgaacaaaatgttccttgtggtgattatgttgccctttcacaaaaagcagacggtagtgaattgacatcaacccgtgaagctcctgaaggctttctaacttcctctagcaaagtttatgtattaaaggaagcccaagatggttctatcacaacggaagcttctaaagtaaatgtttgtgcagct

SEQ ID NO: 40213 - DNA, 427 bp, Zea Mays
cgccgtcgagcctctatcgtgttcgttgctccggtgagctccgcctcctcgccagcaaatcaagacaccccttggtttgcccctaccccctcgattcccctctgctcgcgctcaccagactcctcgccgtgcagccgtgtcaccgtcgccgttgactcaggggtccgttgtgttctcaccatcgctcaagcgctctagagccatctcaaggtaactcacctccatgtgcccctgatttcccagtccctgccttgttgatcgtgcaatcgctcgctggagtaggctagcgtcgccgccgagccactttgccacagactgataccctctggtgcctctatgtcggtgtcgtgcccacgaccaagtccgtcgtgtcaccccgaacccacctgagcccttcccagcgccccagggcccccgacgtgcccac

SEQ ID NO: 40214 - DNA, 327 bp, Zea Mays
tttcgacattgcagataggtcaagttcaagctttggatatcctatattgtctgttatttcctggcagacatgcatttctttactgtctggaaggaagtcatcttcgtcattgccaccatatactaaggaccctcgggggtatttcagatccttagcaaagtgttgcacttcggcaacctgctcttctgatagctgctttctcgaagcatgtcgaacaatgaagtccagctctttaaggggtgcttcaggagcaggagatttagatttctcaggaaaattccctttgtccaatattatcggtgtagtttccgaaggtccaacttcgac

SEQ ID NO: 40215 - DNA, 528 bp, Zea Mays
cgaaaagtggtggcgaagcatagtgttggtgagagttcgcgaagtggtaggcgccggatggggttggagcgaactcgtcttcgtgtatatcggggtaatcaacgcgacttgttgtctttgtcgtttgggacgagtattggtgagggggacctacggaatttgtttgagggtggggaattgaaaatgatttttgtttaattatcgggaggcgggcattatcccgaatgttgagccgatgtagaatgtgtgatgccctcgcttgtcgtgaggtagtagaggacgcaattgtatttatttgtgcggtgggtctggtgacccttcgctgtgtgtatgtaatctgcgacttgtattgtaatgtggcctgttgcccttcgcttggcagtgtgatgttgtaagtgtctggcggcacccttgggcgatttttgcacggggctgtcttgtgggaaagactttgtgtcgcacattactgtgcttgtccggctgcacccttaggcgacttttgcacggagttgtcttttagtaaaagac

SEQ ID NO: 40216 - DNA, 438 bp, Zea Mays
tccggagttcaatcgcttccattcaagtgtgcacaacctcttcgcccgagatatcagtgcttcggtctgcgcataactcaaacgttcggtcttcgtcttcctagatcgagctcgtccggtctgttgtggcctgatggcctgtctcgctaggcaagccatcgggaggtccatcaggcagctcatgatgtgtttttgtgttcgtgaggatccgggggatagctatccctcatagttcccgtgccttcctaccgcgtgtgcgtctcccttcacgacgtcctctcttgactctcaaccacctcggtcatcccttgccccgcagcaacgccaccccgctttgccatgcctgtcaggggcatcacactcgcttacacttctcttcttccacgtcccgagctactcgtcccttcgacctcatccattgtgacctctagacttccc

SEQ ID NO: 40217 - DNA, 389 bp, Zea Mays
taaatagagtttttgatgctattggatttatgtaccctgactaccgctacccaccacgggggcagaagagaaagagtgcaacttctgggaaggatgttgcttcaactgctccaagcgagcccgcgccgaagaggaaaaaggtgaaggttcttactcaccgaccgcgctatattgaaccggccacagtgcctgaatttggtggtaagacttcttcggctaccgaagccaaagaacctgcgcttacgcagaggattgaagagccaacggcaatgccgaagacatccttagccgaactagctgagctgaaggccgataatattgaagagacaggagttgaggggaccaaaatattagaagttctaagcccttctacagaagtgatagtgccg

SEQ ID NO: 40218 - DNA, 310 bp, Zea Mays
cggccgctgcaagaacatgtggggctgaggtcgaagtagtgggagcaggcaggcgaagcgtgtagaggggctcggggctgtcacaccgagcgagaagagtcctggtggcaagatccttcacagaaagaccaaacgggtcaaactccatggaacaagagttgtcagtagtaaattgacgtacgaaaagaagattttgaatgatgtggggggcaacaagaacgttggttaagcggaaaggaccggggaggaccgcgtcacctactgaggtgacgggaagggcggactcgtttccgacaatgatggaagaggg

SEQ ID NO: 40219 - DNA, 390 bp, Zea Mays
cttggacggctttcctgagaggctatgaagctttcccaagcttgagccgagaccctgccccgtcggagaagcaagcacaacctcgccggacttcggacgcccaccgcctcacgtagaccgggctactaggtaaaccattttccaattacttgcgcctacgacctccctgacttcccgtgaagctccccaactcattggattgagctatgccaccgtgattaggccggaatcctcgcctccgacgtgctcccccgcatgcgcacgaggtccaaccaactccagccatccccgacgccgacccgcacatcgacatgaccgtcgtgacctccccaacgtcgttgaccacttcacaggagatacttcactgccggtgagtctcgctgccgtaat

SEQ ID NO: 40220 - DNA, 429 bp, Zea Mays
gaaattactactatgacgaaaattcgagttcatcagaataaaggatgaaatgtattggggggagaaggagccgaaaggtgaagagtggtcagatggatggtgtattggtgcggtaaagtgtgctgcaaaagcaagcaggcaccaggtgcagtgctgctgctgtgcagactggcactggcattgctgttttggcaacagagagcgtctgggtctgggtggcatggtatgggtctgcttcatgcacgagcacggcgccaggctctgttttgtccgcatcgcggggcggttgtggaaaagcgaggggcggtttccatttctgttgcaaagcctgacagcttagcgagaccttttatttttctgatttcctgcttcgattccaactttcatgtggtgtgtggtacgggcagtagttgcgacgcgcaatttcgc

SEQ ID NO: 40221 - DNA, 396 bp, Zea Mays
gccgaggcggcacgccgcctgctagtggaatggacaggcggcgcgccttatccgcaataaatgcagaggccgtgcagcccagaggccttacgtcaggctctgcctgttggcttacgtcacgggcaccatgccacgtggcagcatcagggcttcgcctgagcggggagcagaagcgtatacagtaaggtccggacacgtgtcggctccggacacccgcctggccttgattaaggcctggttattctctgtcccagaatcccgggatcgtgctgtgagtagcacggaccccacatagaggggtccggaacccatcctaggggtccggtttgtgcccgtggaggtcctagaccttacccggaggcctggtctgtatatacagaagtccgacactttcca

SEQ ID NO: 40222 - DNA, 385 bp, Zea Mays
gttgttcctgaatatatgccgtcagagccaactgatggtgatatgatggacgtctgctctgacactctagatgtgggattagaggtatcccgggcagcatctcgtgcatcgtcgaccttggaaggcggtcttcggagccaagaggttggtcaaggtcgctcaattcccatggaggtgactgagaatccttcagccttagaggtgactgttgcagagaacccagtcttcaagggtggtactggcggttgcccagcccccgagggtgttgccggtaatgatccggctcgggtgggtagcgcaagctgcaacccagcccccaagcgtgttgtcggtgatgatccggctccgatgggcagtgcgagctgcaacccagcccccgagggtg

SEQ ID NO: 40223 - DNA, 790 bp, Zea Mays
ctggactggggctcatttaaacaggaacatagggggcccagggtaagttgtccaagacacagtgaacagctacgaaaggacggtgggttgatttcgctaaagtccgagggctctttaacaaaagtgacccgcgaaggggtacggtttgataccggtcgttcgatcagaaacgacaggcgctgattaggtcgcgattcccccgagctggcgtgcaatggtgaccaccggatctaggatccacggttctgctttaattagcactaagtcgcatcagaccgcccgctagaagatctacggtgcagaattatccgtacgcgcgttccaatctaagctgtcgtccatggatccgacggcgcacagaccgtccccttcgtcatatcctgaccgcccaccgaatcggacggtcgaaggcgcgtcttcaacctccgatcagaccccaggcagcagcgcataaccccacggtggagaccttcctccgatgccccgatcgtcgcctagtgagctaatctcggattggagacatgctacacgaagcacaatgcgaaacgaagagaatgaatgggttattaccctcgatggtggtgcagagacccgcgcccacgacgaagcgacaaaggggatctccagcgacgaatccttggagttgcagaggatagtcccgcacgcgatgctatggtggaccttcccccgggcctggtgaagggcacggactccacacgaggcgcggatggcggcactactggggattccaccgcggcggcaatggaattgttgggcggcagtgatttcc

SEQ ID NO: 40224 - DNA, 617 bp, Zea Mays
gcacttgaacctcgcttgggaaaaggagggaagtagcagcacgttcacctacacttctaaacaactttaccactgcttagtaatgtctttaatcaggggcttcgggtcaaggatgttggtcactttgaaatagtgtgtgcaagtggtttaacatgttctggtcattatggtggttgttcttttggttagctaaattaataatgttctgaatgtttactcttctcttgcattatgtttatacactgtggtttcctcgtttatgcaactttcaagggaggtgttgctgaatttttctttctttctttatctttttatacacagcattttgtgggaagggtgattttggtgacacccggggtgtttgggttctttaggtgttacagttggtatcaaagggataggttgtaggtcctagcatgaaaatgttgataaattgacacaatgcacatataggaggggttgcttgctttactattgctatattatgaattgtcagtgctcatttgttttacttgaagttgatgttgtgctatttttatttatttatttatttactcctgtggctgcagctatgccacctcgtagggctcgtggcagcccgcaagatcatagtgggg

SEQ ID NO: 40225 - DNA, 563 bp, Zea Mays
gaacagtgcccggggaattttgggcaggattttgtccccagcattaatggctctgccggcccagcggcgaagggctattgtcatatttgggatcactctttttcaggtaaaaatctacaaatctttggtttttcggggcagaagtgcaagcggtcttttggctccttccccaataagtttgagaatgcttcctgggtgtatcccccgcgattatggttcaggtccccctgctctcgcttacgggtgggcctccttccccgcccttttataataattttggtgagttcgctcaggtggttctctcgagtagcggctcttcaccttccacggaacttgcactgttcacaaaaccccatccctccccgctgccgtggaagagtccgccaacttcaagctcttcgtggcacgtggtgctttcgtcgccttcgcgatttgctcctctcaaaaccgctgaagaaatggcatttcatagagttgatcttgcaccgttcctcccccatggctttgtggcgcagcaggtcgatcatcgagaaatcatggtacgtactgtgactcgacctcaa

SEQ ID NO: 40226 - DNA, 298 bp, Zea Mays
cacctattgccttctttagttgttgcataaaccaagtccaattattttctgtttcagaagctatgaaaccataagcaagtggatacatccaattatgtccatcgactcctacaactgctgccaaatgaccattccaccttccattaattgttgtagaatctatactcaaataaggcctacaaccttccaagaaaccatcaatgcatggttttagagcatagaaaaaacgattgaaatatacttgaccatccacatcaagtacatcaatctccactacactcccaggacacctcttaag

SEQ ID NO: 40227 - DNA, 398 bp, Zea Mays
ggcgtctgtgcttgggcagccaagggttgaagacgatgtgttggccgtagattggggaatcaagggtgtagattagatcgggggcggatcaggccagggtgaatgcggactgttcgatcgcgatcgggcaagccgaggcgatcgcaggggtttttaaatccgagccgtataattctgataggacgatccctgatgcgctcacatttatttaaatcagaaccgttcacgcgtgatccaacggcttggatccgaagataccccttcgaccgcaagttttgcagaagagcccttccagtatttaagaaccaacccgcagtccaccctgtacaacgcttgtgtctcggtttcttttgcgattgagcccctgcgttttccagaaagtgtggcccagtcccgag

SEQ ID NO: 40228 - DNA, 355 bp, Zea Mays
tgggtgtgtgttgatggagttgctcctgacaagcctcttgattccgctgttctaagccggttgaaacaattttctgcaatgaataaactaaagaaaatggcccttagggtaagtactgataccaacggtctatctctgcattataccgatgctatttgtggttcattttctttgtaattgtaggttattgctgagagcttatctgaggaagaaatcgcggggttaaaagaaatgttcaaaatgattgacagtgacaacagtggtcatatcacattggaggaactaaaaactggcttgcagagagttggtgctaatttgatggattcggaaatcaatgctctaatggaagctgtaa

SEQ ID NO: 40229 - DNA, 325 bp, Zea Mays
cggggaagacgctccggtgatgaattctggggccccctagtcaccaatcctcacgacgacgccaccgaatccatcctcgaggcatggtgtgctccttcgcacggcttcgaggaagtgacgacgacgggcacatgaattgactacggtggctctctcctccattctctcggttttacacatcgatgaacggtggtgcggggatctccgaagctaacacagatggatgggggaaggggtagcggtcgacacttataggcgtcgagaggaggatcggggagtcccaccaaatactaacaacctcaacctagaatccatgagccataac

SEQ ID NO: 40230 - DNA, 278 bp, Zea Mays
ttgggtgtacacatgtataaaattggcatttgttctctgcttcaaccttggctgacgagacgaccactacataggcaaccctcgtcattgtcgccagacacaggaaagtggtggcatccatcctagatccatgtgcccctccaggatccatagcactaaagggggagggcgatggaggagcgaccaacggaaggagctagaggactgatgcggagggagacgagtggtgtagacaaagatgtgaggggacgggatgagcacgaatgcacgattccaat

SEQ ID NO: 40231 - DNA, 509 bp, Zea Mays
tcggcccaacaacagcagaaacacgaccacgcgcgcgcgcccgcggcaactttgcacagaggccctcggtttattagctaaatcgaagtaggtttgcttactgctcctctgtgccactgacaaattgcagaaatgccctccatattctatctcttccccgcgaatgcccctgaccacggcgcgcacgcagatcatccctgacgtggtccgtaccggctatggccggcgatgactgcttggaataactaatgggaaggcttcactgacctaaggcgacctaggaacaaccctaaactaacatgaaccctactgggagtcgcttgtccacgatcacggcggacaccgagcatgggagcacacgttcccgcggattggggatggtctagttcgatcgggtgggttgatgagcatcacgaatgcatacaggtactgaaacagaaccgctgagagcatgatcagacctggaagtggctggccacggcgagggtgcttttacggcggcggtaaac

SEQ ID NO: 40232 - DNA, 560 bp, Zea Mays
ccgctgtagacttggtgaaccgacttgaaatgattcttagaggcaaggtatcaaatgttggtgccccagtggcatactcggcctagaacctgcctccttccaaggccttcattcattttgtgtcgaatacacctgtcgctgatggcggttcgagccttagagtgcgaccttctgccgaagaagttagcgctttggttgcctcgctcggagaaattcctgatgatgaacggcaggtccactttgaggtgcctttggatcctagtgatgcagagataagtgctatgcttgatatgctggtcgaagactcttctgatgctgctcctgctgggacattggtggtggcgcctctcccggaagctggtacaaccttggatattcagagacctgtcagtgttcgcccgaaacgcccttgccgagccaatcaacttgattctcctgctgatgagcagaaaaagaaaaagagacatcttcggcgagtatctagtttggatcgggacgttggtccttcggttcctgctgctgaggaagtacctgtgcctgaatttactgacgctgacccc

SEQ ID NO: 40233 - DNA, 497 bp, Zea Mays
gaagctagtaggctgtgttccatcatgtgttcttcaacttccttttcttagatccaagagggtcagtgaaaatcccgtgagtgctcaagtgagagagttgggccaacatttggtatcggagccttgttcgtgagatggcgaagatcggcggcgacaagagcgacaacagcgccgacgaggtgcagataaaggaggcgggggtgacactgcgttatcccatgctttcgaaggacaactacagcgtgtggacggtgaagatgaaaatcttcatgcgcgcacaaggtgatggccatatttgagcaagagacgacgaaataggcatgggacgcgctcaaggagatgcgcgttggtgaagatcgctttaagaaggcccgagtacaaactctcaagagagatcttgatggtatgttcatgggtgagtctgaaaaattcagtaaatttgctttggagaccattgttgtgaatgagatacgtgctctcggcacgaaagtggagga

SEQ ID NO: 40234 - DNA, 447 bp, Zea Mays
catcaagcactggtcctctggggaacttgagccccctcctcagcgagacggctcaatcatcaatgctgatgcccgtgtacgacaagaatcgtgctgaaacaccaaacttggcacgccctaagctgccaccaaaggagctgttcctggagcagcttactgctggacatgagagtccatcaacctgccactcatcaggccaaactctctatttccctttccaacagcctttaggctacaacagtgagagtggcagcagcgatggggcgaatatgaattcactctggttcaaccagagtgacttcaactgcagcacaatttctacagtgatgccgccagtttcaccatcggccctctctacatcaatggggctgaatcttccacctgataatcctcgacatggaggaactggcattggaagtaccgcagtagattcattctactgggatg

SEQ ID NO: 40235 - DNA, 401 bp, Zea Mays
tgaaaaaccaagacgtcccctcgagggtctcccacctcgaacagggctccgcctcaccagaaatcgacgccactcacttcgccttgcccgaggtcacctcagctcggtccatctcgcccgagccagcctcaagcagataggacaatggcacccaaaaacaggcaggggacatgcacatttaatgtgtgtgccaacccgcactgtggcagcgaagcacagtgatgaacaagacatcggtcacgtccagcgcagtggcatgattatgcctacacaaacagtgtgtgcatgccacctgacgccctccgatgggacgcctaatatgacaagccgagcggataggccttcgggtgcaacctctccgcctcgcctgaccccaggtccagccttcgggcaatttctcc

SEQ ID NO: 40236 - DNA, 462 bp, Zea Mays
cagcagatgaacttgatgctttccgcttgggcgccatctcaatctcgttggtgagcaggacggaggcagtatcgcgcgagcacaaggaaagcttggatgcagaaaaacaagaattagggcacggaaagcggaagcgcgcaacgatgcagtacatatggggtttttcccggccagataccatttccaaaaagcgtccagtcatcacccagcggttatttctaaaaacgctgtagtgccatgtcatcgctcggccgttatttccaaaacggccgacgtggcccgttctaactcggctgatacctctaaaacgccgactccaccgtcagtcactcggttgttacctctaaaaacaccgatgtttccattaatcactcggctgattacacctaaaacaccgacacgacccaccgtaactcggccgtcattcctaaagcaacgagggaatttcggatgactcggccg

SEQ ID NO: 40237 - DNA, 401 bp, Zea Mays
ccctcgggcgactggtacccgaggtcccgctcagccgcggctacctcaccgtcatcctccttctctttgctgagccgacggcgaggcggggagccgtctttggaagactgctcgtgccgctcgctgacgcgctttgtgaggtcaatgatctcgcgacattccgctgcactgtggcgaccatacgggtgcacagggcatggaccactgccactcttctacggtcgtgggcgcttgttgcggtcgccctggcctctggtcactgttgtggccaccagagcagtggaccgtggcctctggtagtcgcggtccttcttctttttcttctttccgtcccggagggcgacccccgagccacctgactgggcagccccagtttgcggggccgagtgccatgcacggcc

SEQ ID NO: 40238 - DNA, 816 bp, Zea Mays
gaagccaataaaggaaaagaatttaacagaaagaagggcttcttttagtttgaaaaaaccaaacattccttcatctccaaggtctgacagctgtatgaagtcaggggaaagaaaaaatgatcagcatatttctggaacaaacatacttaaaagtagcaaaagacctggtaagctcttcatttacttaattatttctcaagagtaagggaaatggaaaatcttagttgcgcacccccctgatgtgctttctttatggtttgcttgaatcaggatatgctgaaaagaatctgaggtacgatttgtccagaactgacaatggcaatcaagatgttaccgtgcatccaaaaccaatggaagtttctggtaaagatgcttacggagtaaagacatctaatccactatttcgatcccaatgtgccaaaaagtatagatcaaatgatgttgaagatgatgatttacccatttcagtgaataatgttaacattgcgccaaatgagcatgctgaggtggttcccacaatgtctactgccatgactcgtgaatcaaatttacaagatgttccaagagaaagcacctctgatgatttagctccgaaagtggtttgttgccaacaaaagcttttggaaaacacaggagatgattcctgtaaaactttagaggtggttcaagattcaggcgatatattgtctgcgactccacgtggtcttcagatggcacacaatctatacccctatgacaacaaattggataaaccagatttgaagaaggaagcttttgctgatcaatcttcagctcttgggaatcctttaaaagatt

SEQ ID NO: 40239 - DNA, 518 bp, Zea Mays
ctcacacttggtatcaaagacgggtcagcggtcttgctgggtagcgattaccagcgttgtcaatacggcgcctgtcaccaaaccattggtgtagacacattttgttttggaagccatggcggatcgggatcgggaaactcaggagagtttgagcaaggtcatggagactctggtagtggtgagtgatcgattgaatgatgtcgagcgcgtgcaacaacagatgatgatgcacacgaatttggctgcgtctgttgcggagcaggcggcgaaggagccagtcgagttatgtcgtaaggtggaagaaacagggaaggtggtggcccaaatccgtttggaattgatggggaagcagttggaggattcttctgggggagcggaatttccatcatccgctcatcaacatcacagtgaatcaacaggtttcaggggaagacaggagcatgtggaatcccgtggtgaattcagaggtggtccttctagaccatctggtgatgttcatcagcattcataccattctc

SEQ ID NO: 40240 - DNA, 373 bp, Zea Mays
gtcgacgcatcgcggtcaaattgagagccaccgctctcggagcctataaattgagggcagggctagttacgccatgaaattgtgaagctctagcacccgtccccatactcgatcgcccaccagctcgcctgaatttcgcgttgcccccaaatcggttttccgccgccgtgaatcgatcccaccgtgggcagccctccacaggtcagccccggtcctctgctatttcgtttgagcacccttccatctccgtgatgcttaccgaaccattgaatcgagctagaccggcgcccatcgccgggaacacgatcatgttgccgttgtgcttacggccaccgtggccggagctccctagtccactaatagtgcaattaag

SEQ ID NO: 40241 - DNA, 394 bp, Zea Mays
ctggaagccaccccggtcagccgcggtactcctcccctggctcaccgcccgcgggtaaagctgctcactgtcgtcgtgccatcgccgttgtccaccgcgtgtctcaaccgcgccaccgcatcgccatgacttcctctagcctctccgttgatcgccggaatgaccgccacggtaggggccacgaatcccttgcgccagtaaagtttcctctcctccagccgccgtgtgtctcgtccaaattcgcgaccaccgctcgctcctcctataaattgaaggccgggccggctgcgttaggtcattacccacccagctacgaagaatcgttagccatcgtccactagtgagtcccaatttccaacttcccccaaattgactctccgccaccgtaaaccac

SEQ ID NO: 40242 - DNA, 661 bp, Zea Mays
gtggagtcatcggagggtccccacgtaatggaacaagcccacgtggaacgcatcgaggagacgagcaccctttggaagctaaaggtgataagcggctaccgcattagcgcttagcatactgctgagccccagagaatacactcgcgaacaaccacggggaaggcgtcgctgtctcacaagagggcatccaccgcctccgtttaagttgcccttgcgacgtgtagaagtagaggcggcagggtcagtcgtacaccacctggaacagcatggtgtgaaatgccatgtggaacaaagtattatagcaatacttcgcccaagaaaactagtcgacctaggcgcgcagacgttctcacatggcataacggaggtacatggcgacgatatgggccaatgcaagtcaagatgcggtggcatgaagacgcgcttatcgtagagcaggaagttgtcggttgtctgccatggcaacccaagggacgcatcctgaagttactagtggaggcagactccccctcatcatcatccgcggttgcagcgctgatcccgtcaagtaggcagaacgagggccccaagagggagtgcagcattgtggaattcatggaggtgtcggtgtcacagcgcaagagggcgtccgtcaccgagttgaggcgccagaggtggtact

SEQ ID NO: 40243 - DNA, 371 bp, Zea Mays
atcaaggattatgaccttgaaattcattatcaccccggaaaggccaatgaggtagcagacgccctcagtcgaaaaccattcgaaataaagggaaccaactttttagaagattggaagaatgaatcagctcaactgaatacatgtttgggaaacaacgacagtctcgaagtcaaaccaatgctagaagacctcatatgcaaagctcaacgcctagactcagagacaacgagacttgtggaaaaagcccgcaaggaacaactcccggacctcaggacagatgaacaaggagccctttgattcaaaaatcgtctgtgtgtaccaaaaggggaggcatgagaagtcctgctcgaggaagctcacaactcagccta

SEQ ID NO: 40244 - DNA, 344 bp, Zea Mays
ctcagatattgttgttgctaacagtagctctcaaagctatgtgtctaactatggcggtgatgaggtaataagtgttgatgatgacaaggacgtagaacctatgttttgctatgatgttgatgaaccttatgttcatgaaggtgtgatatatcctaatatgaatgcagtcaaatatgcattgacacgtcatgccatagttactgattatgctttccagactatgaagaaagacaagagcagatttagagctaagtgcaagaaggaagataaggggtgcaagtggactctttttgcatctaccagcaagaggttctatggttgcaaaacatattcaattttctacg

SEQ ID NO: 40245 - DNA, 327 bp, Zea Mays
atgcgggccctaggggacaacgccatgaccctacttccccgatgtcctcttcatccacgagaggatagaagacgcccccatctctgaagacgaaccaaccatgcagggggaggaacccccgcagcgcgaggcatgcctccaccggaatcaacgtcgtaatgtccgacatcatcacatagtcagagaacgggacccacacatcctgtgtcccaggatgaggcgtccgaagcagaggaaacctcgaatgagcgggcgtcctgcgagcaacgaaactcacgacaacggaaccgttgtctcacccaagatcacgagctggaactgacagaa

SEQ ID NO: 40246 - DNA, 342 bp, Zea Mays
ctacgacgtgtcgctcggtaagaacctgtcccactaatttgtctggagctctagagcatttagcacttaatcgcatgatgaatcgagcaccagaacgccgccgtgcggacagagcgccgcctcaggtcggagcaaaaaggtaggagaagatctcagcgccgttggatttagtgaacggtcccgattagagatggggagggaaatagctttagttcgttggatcctttttgggtgatcgtgatcaaaacgctgataccgattcggctcggggatgtttgggtcgttgatcttgaatcggagggccgcgggttgattccggattcggatgatgcccgatctaat

SEQ ID NO: 40247 - DNA, 440 bp, Zea Mays
tgaaggcccaattgattggatcagcaacgaagttgaagcctttgaagaaattttgagtggtcgcggggatgtctgcgccttctcaggtgccaggggaatcatggctattttggaaaaactaggctgtgaccacgtgaaagctttggcccaaaccgaagctaccttatctattgaaggtacaaaagacccctcggccgaagcaagcttagttggcgggaaattcttcactgacatctgggaaaatggcggccgagagatggcgcacgagataataaaaaagagtgaaaaagattcccatgatgcaaaataagcaacgaaggcagctgagaaagctgcagaacttgaaaggcggataggtattgcttaattgcttttgactttgtgttttatttctgtgacttcgaatttatttatgtttcgtatcgtagctgagctatctc

SEQ ID NO: 40248 - DNA, 985 bp, Zea Mays
cacatcaaatttgtaaacctatcaaaggagaacaattttgcttaagagtgtaagcaaggttgttatgaagaatttggagataattaaacctaaagtcaggctgtcaggctgttaaagtctgaatttcagactgacagtgcaactgcagtgactttgggcatgaattcaagcaggattgagcaagaatttgcttaggattgctataacaatattgtagctggatcttagagctaaaactttgctaaagggtgatgatcatgttactgcacaaaatcgggagtaaacagccctgcaaatcgctttgtcaggtgactgaatgggctttcccatggtacagtaacctgaaatggatcagatcaagcactcagctcaccgccgacgatctccgccatgattcgtgttgcctgcgtctcgattcgtgctcggggtaagtgcataacgtctcgggtagaaagatcatcaccgccgttgagctggacaccaatccggctagccgccgtacctcccccttgttcaccgatcgctcgggtaggatctcaccgccgttgatccctcactgccgtccgccgcgtgtccaaacactttaccacatcgcagctaactatgctacgcacgtccgatgatcgccggaggagcagccacggtaattgccacgttgcgcggccaccagtgactcacccagttcatacctatcgcaatccgcgctcctcctccgattccggtcgacgacctataaactgagcaaggattctgcttcttcaccacatcccgcacctcagtaactgagcaatcggctcaatttcaccggagaactcacgcagcccacaaattccctcctccctgttcttaactccgccgtgaagaactccaccgtggtcagcgctcttcgggttagtaacttcccaatttctccctgctctagcttgtttgtagcctcctattgctctcagtaccgaccaattgaagtttggccaaagcctttcac

SEQ ID NO: 40249 - DNA, 493 bp, Zea Mays
aggggaggcttgtctgtaccagttttagtcgagtatctgcagctctagaacttggttgatggggtagatcttcaacctgacatcgcataccaacatatttggcgcctctctagtcatggtacttattgtagcaaatcggcatatgatgcatttttttactggctctatcttttttgccccttggcgacttgtctggaagacctggacccccttaagatgcaaattctttgtatggttggcaataaaaaatagggtttggacagctgatagactggcaaaaagaggcctgccccatccagttgcttgccctatgtgtgattaggccgaggagtccatccagcatattcttatctcatgcgtgtttgctcggcaaatatggacgttaatcctccacaattttggcctcctagccattgtccgatgcacacggttttcaaactggtggcgccaaagtatcaaaagtgttgagaagagtctaagaaaaggtcttaac

SEQ ID NO: 40250 - DNA, 294 bp, Zea Mays
gacgacatagcaaggaacgttcctctgataccaattgttagctacagctagagaatacagaaggtagcagaattagggaaggagacaacaggaagaagaagaaggtggaggcggcaggaatacgagagtttctttcagtagggttcacaatgttcaggtttgatgtcttacacgacagccacccaaagaacttaactccgcccacacacagagagcagcatgcaggttacacccattctaggccttggactcgagggttggcgtggagctggcgacgtcgacgctcgtctgcca

SEQ ID NO: 40251 - DNA, 393 bp, Zea Mays
ttcagctgtggattcctgaaaatctgatttttgaaatcagctgtgggaaagctgctgtgtgatggcgactgtgagaaagctggaagctgtttggctaaaacagctgtgagctgtggattgtatctgaaatgtttgttaagcccctaagactgtttatatactaattaaccgcattgacgtgtagatgactgttatgaaaatgaaatatttatgtttgtcaatgtttgacatatataataatttgagaatgttttggatccaccaccatgacatatataactacaaaagatatattgatccaccatcaatataacgatactatcttcaactaaccaatgcattagctatattatcacgaatggtgttcatgtcaacctcattctcctcctcaag

SEQ ID NO: 40252 - DNA, 429 bp, Zea Mays
ggggtctggtgtaaaagtctctaagactcagcgcactgttaactggactgcgggttagtttccaaattccaggagggctctttaacaaaatagccagggcgaaagggtatcctgaaatctaggccgatggatcaactatcaacggatctgattacatctggacacgggtgaatcggtactcagcgtggtccctcggatctagatctgacggccccggtttaatgaaccccagagcgatgaccatcatccgatcccgatcggacggttccagttacccctatccgaaacgctacgcagtcaccacatccgggccatcaaatggagatccaacggcttcgatcacactctagagaaacattacgtgggttccaatctcgaccctcaatcttcgcatcaaaggccagggacattcttatttctcgcgtcaaa

SEQ ID NO: 40253 - DNA, 273 bp, Zea Mays
gggagtcgaggaggtggcctcttcaatgggacgagcggtccattctccttcatggttggcggcaggcacaggaaccgaggcgcacattgggagaatgctggcggccgacataggaaccgagacgcactctgggggaatgctggtggtcagcataggagccgaggcacacactgggagcatggtggtcgttcctgccagggaggtgttggctgtccatatggaactcacggcagcagacatgggcacaggtcccgggacagactgcgcaaaggt

SEQ ID NO: 40254 - DNA, 559 bp, Zea Mays
gaggtgtttcaacatgagttacgtgaaatgaatgttatcgatgttcacatagttcactcggatgaagcatcctctgctggtttgttggttgggccagaggtaagcattctagtcccccggggagctcctgcattagtcggtcatgtcgccgtccaacagaaccttcttgacctggctttcttggatcacaagatcgacatgtagagggtacttgctgggatgatcaaagttaagccattgattggctcgactgaatgtgatggagtgctccaaccactgatatggcgttggggcactatggtttgccaccaggaccagacgttcggttagcttctactgcctcttgctctcctaaaacccatggcctccgaagatgacactgacctccctgtcaatgcacgggaaggtcctgccaccacccctcctattgcggcggttgttcttgtatggcttgctctctccatggtggggggcgacaaagatttaaatagtcggtcgttgccgactgagttcttgaagtccctgcaattacgtagggtgtgacacatcttcttatggt

SEQ ID NO: 40255 - DNA, 303 bp, Zea Mays
tcacctgcacttacaggagcatttacttgtttctagcacaatttcagtcatagtaacaaacaatctacttaatcaggttctaaaatatgttaaaccaaaaatttagcaagctatgattttaataatattttgctttaatttgttactaaaatttgccaagttgtcgtatttaatttgccaaatccatagtaaatccaaacatggcaaaacaccggaaaatagaatgaaaacgggaaaggaataccttatacctgagttatccgtcatttgtacttgctaaaacttatactatgtatatctgca

SEQ ID NO: 40256 - DNA, 422 bp, Zea Mays
tatatgttaataatgttgatgaacatgatttgagaatggtatatgtggttgactcacgtctttgaggaagttgaagtagaacatatatcgtaatttctactcgtcgtcatcgtccatcagtgtcgtccaatcgatctccccatcttcatcgtcggagaggatgatgactggcgctaccagctccagatgcaccggcatggagacaacctcactttcatttgtcgaagccgaggagcccataacaatgcgttgacggcggcggcgacgcttcgagagaactcttgaggcgcacacgaaaatatggcatgcgacgtcttgatgattgagcctcgactggcgccggagctcgaggtggcgatgatgcatgagtcgcgccattgccagccgctccagtagtgtacgtgtcttgagacacactgcga

SEQ ID NO: 40257 - DNA, 315 bp, Zea Mays
cctagcttcgcaattacctctatttcggtttgcgcctatcggatcgagatatcggagcaggattcggatagttgagtggccggcgttgatctccgccgtgggtttttggacagcgtcgccgttctagtcgctgggagaaggaagaaggtttggtgaccgttggtttagtagtgaacggctgtgattagtccgcgcgtaccctttcaccacgtttcgatctggttcgtcgatctagatcggacgaacagagatagatctagaataataaaaccctcaccgtttgattcggatccaatggacgcgattccgtaccgg

SEQ ID NO: 40258 - DNA, 540 bp, Zea Mays
attatatgtgccctcattttctgccccctctaccattttgttagggctagtttgggagccataaaaccggatgtgattggaggggctaaaatcgccttctgaaaactagcccttagtgatcagtaaacttccccttctctttttctttggatttcacattccagaatttcgtctgagtagtaaaccataatatttacatagttgtttttcttatttatttaccttcacttgtggcttactagattacaatttggagttggagatatttggtgacacctacctcgctgaagatattcatgctcctcaatatttaagtttaatctgagtaaggcaagaaaatttgtgatcatgttgaggccacaaagatacattgactgtgttatttggttccccctattacacaagctattcttgattaaacaagcagttgaaatgtttgatgttcagttgtttcccatccatcaagtgttttgaaactctcttgttgttgaatgcctactccacttcggtttggacaagccattttgctgattacagtac

SEQ ID NO: 40259 - DNA, 494 bp, Zea Mays
ctcgacgcgcagatggggttcgtcgtgggcggaaccattctcatgctactcactgtcgtcttctttgagattcaggtcagtctcttctccttccctgaatcgggagtgttaatcgcagcctgtacaaatccattcaaattgcgtgaaactggttgtttaactggttgccaagcaacttcaggcagatatccatcccattttgatttcaaagttttaatttatgctctacatgtacatatcaacgtgttttggtacttttactaatacatttgtcagctactggtcgcattttccttttgatgtatttacttctatgcttgctttaattaatttcagatgtttgctaaaccaccaaagaaattatgcaacaacaaattcatatttgtgcatcagcatttgtttattatcatattagtgacaaacaagtaaagtcattttttgtagggctgctaagcatatacaagatcgagggaaaaactcataggaccaattac

SEQ ID NO: 40260 - DNA, 607 bp, Zea Mays
ggaaatttttcttcacttctctggaccaacttctgctctgccagccatgttacaaatacttgcagattttgcgtcttctgaaggttaattacatttttaattcatttccatctgattgagttggactactgaatttgcaacatgtgtttgtttctttgaagctttgcagttcaccccacggttgaaggacgtgcttttgcgtgttttacctatcctaggaagtgtgcgagatggccaacggcctgtttttgcgaatggtattgctaatgcatttcccgaatcatcagtgattctcctctaatgtttctgaaaaattttcaatatttagaaaaattgcttattacttttgctctcttctgttttgcagcattcaagtgttggtgccaggctgcatggcagtacctgggagatgccccctctgagcttcctcttgataacgatgttatgtaagctttcagtttgtcaaaacttgtttttggaggtaatggaagttggcatgccatttatctaatatcttaatgacaggtccttcatgaattcagtatttgagttacttataaaagtatggacaggctcacgtgatctaaaggtgcgtccgaattttggc

SEQ ID NO: 40261 - DNA, 281 bp, Zea Mays
gttcatgtgcagaagcaagttaggcaattctttatgtcctccgtggtttctatgataggaaatggcgccaatacgcttttctggtcggacagatggttaaatgggaagacagtacaagatcttgcgcccgaggttatatgtatggtgggcagcaggaccatcacgtccagaactgttgcccaggtgctggctaattggcagtgggtttctgacattgtgcatcctctctccctgattggagactgcagcagttcttgtagttatgggatgctctttagaag

SEQ ID NO: 40262 - DNA, 317 bp, Zea Mays
cgaaagggtatcagacgagctgagttcgtccgatcaacgacccatcgctcagattagattcctatttctattgaaccggtatgcgatatgagtccaaggatcacagatcaatggcgatgatatcacttagttgagatccaatcacgagcctccgatttagattggaccgacgaccctatcataggacgaaacgttatctaaagtctaatcttatacatccgtatggatatcaacggtccaggtgtctcctccctcaaccccgacggagcaccgcaacagcgtgtggtcactgttgtctggcacgccggcgcggatca

SEQ ID NO: 40263 - DNA, 491 bp, Zea Mays
aaacgatgtgagccaaatgttgggcactgacacgcgctggcgcactatcaggtggacccaaacacttagagacagtgggagagagctcaggtgcacgataaggcaaacaacatacaacagtaacttctcgttatgcgtgcccatctcgctacatgatgggggtatttatagggccgtacagggtaggtggtccaaagtacgccactgcccctagttaacggtcgttttttacaacacggactatacaacggggtaattacagtcccgcagccccctctggttatgtgcacttgcaaatgtacccgctaattacattgacaaatgggccccacccgttgtcactacgggcccgcgacttggacaagcaagtctaccacgctcgtagccttcacccggaggagccttcacgtctttcgccagtttttgttacgactgcgccttggcgaaggcttcttgtttccaaacgtctcgttcctcaagatgggtcgagg

SEQ ID NO: 40264 - DNA, 357 bp, Zea Mays
gcaaagtataggggtctcggggtaaaaatctgtagactccgagtacagcaccaatggatggcgggttgtttcgctaaaaagtgaggggctcttttacaattttggctcggcgaaagggtatggtgcgatctgggcctttggatcgtaagccgagcgctcagattaaattcacgtgttaatgaaccggtataacccgtcatacgttggattagagatctacggtcagtatcacccagatgcgcgttctaatccaagccgctagatctcgatcgaacgctcctctgcccgtccacccaatcggtacgccatgctataatctgaaccgtcgtccacggatccgacggtgcagagcacttc

SEQ ID NO: 40265 - DNA, 422 bp, Zea Mays
ggagttccttctcctgctctgtctgccctcattgggctacaagagttgtccctggcaaactttgatcagactcttgaatacatggttccagaagacctgctatcagagccagcggatgatggtgtgatggaggtttgtgccgatgtgctcgacgccgggttgggatcatcccgggcagcgtcccgcgcttcgtcgaccttagagcgcggtcttgagggtcgggaaactgacttggatcgtcttgctcccatggaagtaattgagggaccatcagccttagaggcggctactacagagaacttggtcctcaaggatggtgctgacacttgcccagcccccgaggatattgccggggatgactcggctcgggtgggaaacgcaagccactgcccaaccccaagggtattgccggagatgatctg

SEQ ID NO: 40266 - DNA, 382 bp, Zea Mays
ccgggtcctccaccagcggtggctcctacgcttccgtccattctacgacaaagtcagcgagagcataagacttgatcacagttttggagacatagacgatgtcaagttcgttgagctcggaccacttcgcaacacgtccggacgcgtcataatttcgaacaatctcaccaaggggtgctattgacactacagcaaagggcactggtcgaagtagaagatcagctttcgcttggcgatgaggactacatagagcagtttctgtatctaagggtatcgtgccttagaatttgtcaatacctcactgacgaaatacaccagcctttggaccttgagcacatgtccctagcttttgtgacagaacctctcaagtcattaggcccac

SEQ ID NO: 40267 - DNA, 395 bp, Zea Mays
cgtgaaaatgggcagattagagatggagaaagaagaactgtagttagcatagcactcatggatgcatgataacatctttttgggtatggtatgcaaaatttccttcatttagcatggcattactctaaccatccattgaaagtacaaacacctagcaacgccgaggcaatgcctacattgcctaggcactaggcggaggcataccgccttcgtagcacctagtgtttttttgaaaaatcaagtgacctccaagcacaagtaatgattgttgttgaacaaccaacaacattcctggttaaaactatatgatcagaaaacaataaaggcaaatcatcctggtaaaaaaacacaaataaaaaaacaggtccacaaaaaataagaatataagacgctcg

SEQ ID NO: 40268 - DNA, 732 bp, Zea Mays
cagagataagtgtcatgcttgatatgttagccgaggattcttttgatgccgctcctgctggaacattagtggtggcgcctctcccggaagctagtaaagccttggatattcagaggcctgtcagtgttcgcccgaagcgcccttgccgagccaatcagcctgcttctcctgccgatgagcaaaaaaagaacaagagacgtcttcggcgagtatctagcttggatcgggatgctggtccttcggctcctgctgttgaggaagtgcccgtgcctgaatttaccgacgctgaccccaatgggtgtgatgtccgtgttgctgatgaaaatgaggaggaggaagaagatgagatccctctgactcggaagaacagtcggcgctacgtagctagtggggaaagtagtggagttccttctcctgctctgtctgccctcattggtctacaagaattatctctggtgaactttgatcaaactcttgaagatatggttccagaggatctgttatcagaaccggcggatggtgacgcgatggatgtttgtgctgatgtgttcgatgccgggttggggtcatcccgggcagcgtcccgcgcctcatcgaccttggagcgcggtcttgagggtcaggaaactgacttggattgtcctgctcccatggaagtgactgagggaccttcagccttagaggtggctgctgcagagaactcggccctcaaggatggtgttggtgctcacc

SEQ ID NO: 40269 - DNA, 406 bp, Zea Mays
tagctaatggccttgacctgaagtactaccctcgcagttcgaccgatagtgctggaggtgtgattgtctcgcccattggtgaaggcaatcccaggctaaacagcatggtcaacttggccaccatgctcaacaccgagctggaccacgcccttgacgagttgggcaaggttcaggcggaggttgcagaattgcgtgctgagtgcgcaacatgccactatttggaaggtggttctcccgcccctgtcgagattcaacacccttaccgttcatcactccgtggtcgcttcgactatggtacccctgactgcaggacctagattgatttggatccctagatcgacggagtcggagtctgtaataatgattaattcagtatcttagttttagtcagtcttggtaagagtta

SEQ ID NO: 40270 - DNA, 1073 bp, Zea Mays
gggtaagagagtatgacgcgcaagctggtaggcatgccaaagcaaggtggtgtcatcgtgagggcaaggaatgaccgaggtggctgagagtcaagagaggtcgtcgtggccgaggtggctaatgcgatggtgccaagtggaggcaagggcagtggaggcaagggcataggattggacaacatgggcgaaggaaggtggggtgggcaagcgaatcgggtataggtgactagagctgtcgtagtgagcaaccacaacacgagtggtaagatcctgtatggtgagcccaagggatcaaactccatagagcatcggttgccagtgatgaagcgacagaccgagaggaggttcttgattatgttaggggcaacaaggatgttgttgaggtacaaaggactaggaaggattatgtcacctactaaggtgacaggctgagtcaacccattaccgatagtgatggagaagggaaggtagggctatgggcgtggagtaaagtgatggttctagggttgggaatggcatggaatggggcgccagagtcaacaacccagtcaatgggaggacggggcagtgaagacaagggttgtgagaagagagacaagggaggcacccctatagagccaccaggaggagagctagggccaagagtggcgagcatgctgacgacaatcatggtgggagatgataaggtctcaatcgtcatggaggcaatcgcgacactagggaacacaagcggcttagtagtgtggcgacccgcctgagggtggagctcaacgcagacacggaaaatagggttcatgacccgatcaaagaccacgaatgtgccctagagaagctggtcgtcgtgaagggggacacacacatggtagggaggcacggaaaccacgatagaagcaggggttggcatggcggggaagggggtcggggcgacatcggtggcgatactaggcaagggaaaggggcacgggcatccccagcgccacgggaggagggaccactttttggagtgggaggagctatatgcggtggcaccggttggcatgcaacggagcaagggaaggagagcgtgggcgttg

SEQ ID NO: 40271 - DNA, 395 bp, Zea Mays
gcggatttgtcgtggggttactgtcccgacagaggatacccacgagtccgttgtttacatcccttttcttatctgcggccttgctcttcccatttctcccttctttcgtggtctccttgacttttaccatctgaatctcactcacctgaatcccaactctattctacaattttttgtctttgttcacctgtgtgaagcctaccttggaattttccctcacttcggtttgtggaagtacttgtatcattgtcgtcctaggatggctgggggcagcaccagctcgtaggtggtgcgagtctggagatgcgccgtgggaggaaaacggaataccttgacatcccattcaaggatagcattaaaggatggcgtttagagtggttcattgtggaaaacca

SEQ ID NO: 40272 - DNA, 662 bp, Zea Mays
gaataggtttatataggtgaatatgagtgaagtgtgtgctcggtttgaatttagacgaagaaatagggatttgggcactcggctcggaaacgatcgctcaaaacgggaaatttggtgaaatttaagcctgggatttcggatgggcgtgaaatttggcaagtaggttactgaaagtgttgtgaaggtgcctgaaaaatttgggttcaattggagcatttttgactggtttgggcatttcaccgagcacgtggcgtgcggagttctagggtttcggtgaaaagcgtatttggtggaaaaaccctcccgaaggagctaggaacctgcaaggatgttcaaggcacacatagaaacacaaatggccacatggtttcactggatttcacagagattcaagattggcgcaagaggagagaaaaagagggctccactgcctttcagtcagagaacaagagaaagggagaggagagtggagtgcagctcaccgagagagggagaggatgagtgtaggcacaaggtcgccggagagtcgccgccgttgaggggagatcgccggtgaggggagggaaaacgcctgagaccgagagcagacgctgacagggagaaacagggagcctctggctcggctctgcgggctggaggcctttttaaaaacgcgatatggg

SEQ ID NO: 40273 - DNA, 706 bp, Zea Mays
tgccactcaagattcccagaagcttcctgatatgtagtgggttcaacaattgccacaccagcccatggaaaaccatagcgatctggaggttcaatggtaccacggtcacgaagacgatatccctaattaaaaacatcattagacccattatggttagtacaagaatcaggtacaggatcagtatcgggaccgaccgtagaaatagagtgggaatgacgaatgtaggtttggatgacaggtggtttggaagagtaagaagaggatgacgtggaggtggaaggtggtgttattggaatgagaatatcagatgtggatgatggtgtagatgcgacaatggaaggaagacacatgaaagaagtagattatgtgggataaatatgaggagtgagtagactggttgtgaaagaaggggcgattttcattgaaactcacatctctagaaattcgaatacgacgagtcgaaggatcataacaacgatagcctttgtgttctggactctatccaaggaatagacattctacagattgagcagtcaatttggtccgctcacgtggtggtaacaaaacataacagatacatccaaacacacggagatgatcatatcgtggggggtcccaaaaagaacttcacccggggatttgccagaaagtttagatgatggttgtctattaatgagatacacatcagtggaaacggcttcactcc

SEQ ID NO: 40274 - DNA, 286 bp, Zea Mays
gttcatcaacggtaagcgcggcttcctaggcatgcgggtcggagaaatcatttcggcgctacaagttcttcaccacggcgcccgcagccaagccctctgttcaaacgcggttcatcttggatgctatggcagatcaggagcgcgacatgaaggaggattaggggcggatgatggagacgttggaagcagtgtgtgcgcggctgaaggatgtggagcgcgcacaacaacagttgatggtacgctcgaaattggcggccaccgtggctgagcgggcagcggtcgagcg

SEQ ID NO: 40275 - DNA, 371 bp, Zea Mays
atgtcgggcaaccggattcacaccttttcatctattatatggatcggaggccatgacgttgcaggagataaagcacgggtcaccccgaacaagcacatcagcggtccccgacgtcgacgaaccaacatctaaagacctcatcgacggagaccgtgtcctcgccctgcaggccctcaacaaataccaagctcaaaccaaggcctggcgcgacaatgcggtcgtcccaagagagttcaacaaaggagacctcgtactcgtccggaccacccggacagaatcacggggcaagctggagccgaaatgggagggtccattcatcgtcaagacgaaggcatcccccagcgcgtacaggctagcaacgcccttcgacg

SEQ ID NO: 40276 - DNA, 295 bp, Zea Mays
cttctttaggcctgatatggtgaaagagaccgaagaaaaagttcagcgaataattcatcatttgaagaaagctcaagctcgtcagaaaagttatgcagacaagcgacgacaacccttgtactttctagttggagactatgtctatctgaaagtttcaccaatgaagggggtatcacgtttcgggattaaagggaagcttgcaccccgatatattggttattttcctgttcttgaataatatggaccagtggcgtatctacttcagttgcccgaaaccttgtctgcagtacataat

SEQ ID NO: 40277 - DNA, 474 bp, Zea Mays
tttcaggagcactacattccaaaaggagtgctccatttgaagcaagaagaattcatgaagcttaaacaaggtggagatactgttacacagtatctcaacaagttcaatcatttgtcccagtacgccattgaccaggtcaacaatgacctgaagaagagaaactattttatgagaggccttaatgactggctacaacggaagatggctaccttcctcgacctctcctacagcagggctatcaacaccgctggcagttgaagccaagtatgctggcccaggcaagacaaagggctatggaggtgacaggtccaaccaagggcctgaaaagcgacaaaggttggtaatccgacctttcaatcaaaatcgttcttcacctcgtccaccctcctacccctttaaacagcctgtattcattcgccctgccactgcccccacctcaacaactcagccgagtgcccctggtactcatttccc

SEQ ID NO: 40278 - DNA, 537 bp, Zea Mays
agccattctagtcggtaccaccctctccctgcaactcgtttctttccccgcatcatgtagaggtagttagattgggatttggtgcatcggggaggggattcgcgttacgacggtggtgctccgccgcgctctgtgtgctgtgctgtgttgtgctgtcgcgggatagctcgagggggagaagatgagcgcttgccgtccgatctgtctgcgacggccatgatcacgtccagcatgagatgcgaccgggactgaatcgggtcccttcgatcacaatcgggcgaaccagatcggtcgagaagtatttaaatccgaaccgtagatctcggaattgacggctggcgttgtgtaccgattcaatctaatctcgcgcgtctgatttggatccaacggctcaaaatgcatgataccccttcggccctggaaccttgcataagagcccctgcgtttagtcgaaatagaacccgccgtccagtggggagttttctgagtctagagttttcttgcgccaagccccctgctgtctctggtaatcttgcg

SEQ ID NO: 40279 - DNA, 329 bp, Zea Mays
ccgacgtcctcgacaaggtgggagaacactgttgtgcgacgacgcgtgcatggtgtttgaggaaatgccaaatcggcgcccagaatacttgaacgcaaagcgatggtttctgttacgtttttgaaacattttactaattgctagtacatgtttggtggttgatgccgacgtagcgaagctaaccctttgttaaattagttgttgtttaaataaaagaataaattcggtgaattaagttggtatattaaagagtatgagatatagaaatgaattttagaggacgttgttggagacagggaaaatatagaggataaaatatgttagagtgt

SEQ ID NO: 40280 - DNA, 382 bp, Zea Mays
gggaatatggttaggatagatatggatgagatagactacatgatgtaggtcaaaagtttgtttgatattaggtgagggtagacaaattatgcaattcatcacgactctattggttgggttagatctcatgtgcgtggctgagttggtttaaggcactagtttagttttaattgcatgaggggtatggccttatcttttgtaccaacattaaataacttactctagattagatcataatagattagataaaatctagattaggttggatatgactggatttgtctggttaagatctaagtaaattttggattagctcatgattgttattctagagtgggataaatatgctaattagggcaagatgaatccataaggataaggt

SEQ ID NO: 40281 - DNA, 416 bp, Zea Mays
tacaagtgcggcctcacttactccaagggtcacaaatgtgccgacattgtgcaactacactgggtggaagaaatttggaaccaattcaccccatccgagtctgaagaacctgtggatacagtgcctgccgaattgcatgttgtagtcatgtctcaagccgctcatggcgaagtctctgcaactaaaacaatgaagtttctgggttccattcaggggatcgacctgctgattttattagactccgggagttcccatacattcatcagtgcagcagtggcgtctcagttaaccggttgttctcagctttgccagcctttatctgtacagattgccaacgggacgcgtctcatctgctccacagaattccctaatgccacttggtacctcaatgactatcagttcacctccacactgaa

SEQ ID NO: 40282 - DNA, 952 bp, Zea Mays
attcagaagcctgtcagtactcgcccaagatgcccttcccaggcccatcaacttgatcctcctgctaatgagcagaaaaagaaaaagagacgtctccggcgggtatctagtttggatcgggatactggtccttcggctcctgctgctgaggaagttcccgtgcctgagcttactgacgctgaccttaatgagggtgctccacccgctgctgaccctaatgggagtgctccacctgctgctgaccccaatgggtgtgctccacctgctgctgaccccaatgggtgtgttgtctgtgttgctgatgaggacgacggggaggaagaggatgaggtccctctgactcagaagaacagtcggcagtacgtcgccagtggtgaaagtagtggagttccttctcctgctttgtctgcccttattggtctgcaagagttgtccctggcaaactttgatcagtctcttgaggatatggttccagaaaacctgctatcagagccagcggatcttgctgtgatggaggtttgtgctgatgtgctcgatgctgggttgaggtcatctcgcgcctcatcgacgtagagcgcggtcttgagggtcaggagactgacttggatcgtcttgctcccatggaagtatttgagggaccctcagccttagaggcggctactgcagagaacttggtcctcaaggatggtgctgacacttgcccagcccccgaggatgttgccggggatgattcggctcgggtgggaaacgcaagccactgcccagcccccgagggtactgccggagatgatccagctcaagtgggtagcgcgaactatagcccagcccccgagggtgtccgagcggggtctccctcttgtacttccatggatgttcacgcaggatcttctccacactccggttgcatggtggtagcccaagccttggaccagggagtcgctttagagggtag

SEQ ID NO: 40283 - DNA, 346 bp, Zea Mays
cgtcctacccaaaagcaccacgagggtatccctgggtgtgcggtcggacactagacaccgaaagcgccccccagctgttgcttcgtcgttctaccgtcgccgctggacttctgccagcgctttggccacggtgagctttgcgtgagcttggcgcttcgggaacccgtggttgtttcccatttctcaactcctctacccggtccgcactcaacctctcctctgcacaggtcggagttcgccgtcgctgcgtttctttgacgtccgaccaaccggagcctcctcacgccgtgctaagctgccccaattgccatctttgggtaagtgacctttccccatgccacttttg

SEQ ID NO: 40284 - DNA, 727 bp, Zea Mays
cggatttggagaagtggacgagagctcacaacttaggtggatggagatatgagtttcagtgtagtaacatggcgagtcattcaacaaattattattgggcatacgtggtatgccggtcactgctatagtaacatttaccttttacaagcttgtggcatggtttaatgatagacacacccatgcagttggattgcagaatcagggagagagatgggctccaaaacctaagacttttctagagaaggcaaaggaaagggcaaacacacacactgttgattgttttgacttatagtcagggacatatgaggtattccttcaagctggtactacttccgacggtgagtcacaagagtcgaggaagcatgtggttgtccttaatgacttgtcatgtacttgtggcgcacccaggcagtaccattttccatgttctcatctaatcgcagctgctcgagctcacaactttgacttagagaggaggatacctcaagagtttactattgataaactagttttgacttcgagtccaagatttattccttatcgtgacgcgggtgagtggcctccgtacgatggcccaaagtatgtcgccgatccaagcagtcgttggaccaagcgtggatccaggaagaggacgaggcacaagatggttatggatcaggttggtggtaggagtagaaggggaaggagaacaccatttcttaccgaccccgaacagtatgagtgtggc

SEQ ID NO: 40285 - DNA, 372 bp, Zea Mays
ctcctggctccacgcctccacctctggcactcttgcctaaaggtgggacaacacccctcccgatgtaccacctcgctctgtgcacgacacgtgggaccctcccgatgcccacgctcagcgccttcatggtggtacccccataagtcgtttctcgctcccctttggcctctagcactcctactcggctcctctacgacaagaccatgcccctcccgatctgccatctgcctccgcatgcacgcagccgctcctctagttccatggcgtgcaactgagccgtctacaactttgccttctcccacattatctaggctcacgtgtaggtgctcgcaccgtgatatggtgcgcacgagcatgttcaccttcgtgccc

SEQ ID NO: 40286 - DNA, 1527 bp, Zea Mays
tagttacatatttgatcactggtctgctcagaaacagaaactttgcattcaattgaaacattcttacctctatgacatggataacagtgtccatctcaattatgcaacaaaagtaacagggaaaccaccatattgaaagctggaaaataaatttctgtaatcctccaaacatttaaaagtaatgaaaccttcattactaatctagtttactggcagtgctttggctatgcattatattatatggtttagtgcctaatcatagataggtaggctatgttcttatcaggtattaggtggcaggcggtgcttgggtgactgattttctttaagttataacagtttttgtcggttgcttttctatgtaggaatacacttgtgcgttgacttgtacacccaattaaaataataaatactctctccttcctggaatgataagcatatcttgtatgtgaaaatattataaaccttgaccgagaattattcaaattctgtacaagttaaggacagaacctgcatcaatagatttgtatgcaaggcgcctctgaggtgatactgttttttgctcacatgactattataagagaaattaagggtcaaaatgtattttgtgttaatttccccttatcaaaatacgcttatcgttttgggacggagggactatttaaagcccattccatgaagtcatgaacagtcatttcttcctagtctcctctgttactatatttccctaatgcaccttgcagctaagccataaatcattgccatttcttctcaaattgatagtctcctgtccatttgactctccccatcaaattgcacacatatccagatatccttaatcaccttgctgatagcttgattcagttaccgctgcaaccagattggcaaaggtgaaccttgaagcatgtactacgacacattgttgaatctggatgcaccatttctgctcgtttcattcacaacctgaccagttgctgatgctggctcagaggagatgagatgtgtagatgagagaagttgtctgtatacctccaaaggttagtggcgggcagtggccagccatgatggtcaacatgttggattctcccagccaactgaaatggcttagtaagcatgtgagccaattaagatggtgtgttatgagcaaaaccaagtggtactgtgtatgtgtgtgtgtgtgtgggggggggggctgtttgtactggaattttttttattctggaatacatactttcttggatattatgccgtctttggtagtttgaagacatagttcttaaggcggtaagacgagacaaggagttgggccatcgcctggatgcctaggcgacgcctaggcgcttactaaggcgagcaagatgacgccttaccaattaaagaaaagacagaacaacaacatatatgaggaagaaaaagaaaaagggagaaagaaaaaaagaaggaaggggtagaagagatggcccagcccaccaggcaggcagcccatatatcctccggttagggttgctcccatctcactgtcgccgc

SEQ ID NO: 40287 - DNA, 599 bp, Zea Mays
ccagaatcccctctgcccacgacgacgacgagcaccaaggacgaaccgaggtgttcccgatgatctagcgcggtatagctcaattggctgagccgatgagcaccacaagcgtacgagagtgttgaaacatgaacaagaaggacgaggacggacctgtgggtggctggccacggcgcggtgtctcacggcggcgcgacaaaccaatttggtggaaaatccaaattcgggcgctactgtggctaatcggcggtgaggagcggtgtactgggtttgcaacaagataacggagcaggctgggacatcaatttatagcgggtgactgcgagcacgacgaatttgaacagagaagagcccacggtgatgagggaatgagtcactggagcttgctaacgtggcattcactgggcaaaggcttacgaccgtcactggctgtcctccacaactcacgacgacatggtgaaatgacttgaggcgttacgtgaccgaggtaaatggcggcaaccccagcgacggtcgcacaaccacgtcgccggtacaagtgggtacgacgactgagctataacattgcccaagctcatccctcgcgcgagatcttttac

SEQ ID NO: 40288 - DNA, 275 bp, Zea Mays
cgcgggagtaagaaatatcgctcagggatgaactttagccactattttactccggccgccatacccgagcgtgtcacggccaccttgggtaggttcaccggagatagccacttcgcagccttgcaccacgtgccttggctcgttaacctcaccgccgtgactcacattagtccatccggtgatcgccggagagcttgccacggtaatagaccacgaatcaccgcgccagtgactcgtttcttctccaaccgccaccgcgcccaacccaaattcac

SEQ ID NO: 40289 - DNA, 305 bp, Zea Mays
tgggagcagaacagggagagaatacaggcggaatatctgtagcaagcgatcagacactgagctgatgcaattttcaggcctgatgggataatcaaatatgtttgtgagaggatagattagggagatgataccgctatatacatggtgaaaacaacgtgaagggggaaactgtgaaagtgaaagaaatggtacctgtccttagttgcctaaactaataataagtttgtacatcgttggtacaatggtaccgtgtctggtttaaagttactttgtactgtacgtgtactgtacatcttggttccttc

SEQ ID NO: 40290 - DNA, 328 bp, Zea Mays
gcaagcttcccggggcatgtgccgataaggtgaaacaatcttgtctgggaactagctgtatatttatatcgaagggattataagtattattgcttttgcgcaaggccatgcgtgctataatctctgttagcagatcagattctctgccgtcaacttgggctccgaatcagctatatatggctacctagcccctgattgatcctgattgagtctgattgatagctataaggatagctagagatatgaggggatcccgattggctccatcactatagatagggatatgaggagatctgatttgttttgtttctataaaccacacaaatct

SEQ ID NO: 40291 - DNA, 491 bp, Zea Mays
gtgatcgccgacaagctcaggaccgagaacgggagtaagccaagctaggtgcaaggctgcatcgagagaaccctctctttgctcagaacctataccccgacttcgctcacgcaatgaacacgccgagtgaagtcggagaggtgctggcccagatagctgacggcctcccatgaactccagacgcggaaggttaccagcggctgcttacttgagcagctaatcaccttctgcccatcgctcatcctttgagcaacctacgccacgccatcaacaaccggcgagatgcgcggagctccatcaacgcttcacgcgaccgacggcacgaaagtgagataaggcaccgggagaagtatgactgggatcacgacgtcccagcctaaaatcgcgccacccgagctgagtcagctacaacctcgactagtggcccattccagggacgatcgagacgacacactaccagctcccctccccgggaccgacctcacgaacgc

SEQ ID NO: 40292 - DNA, 412 bp, Zea Mays
ccgacccccaaatgctgaggacaaagcatcatcttcggctctggtatacgctccaagtaactcgtcgctagtaacctcaatacatttcagccactcgtcatttggctcgtcaaacctgtctctgtatctgaaggtatatttcaaacgaattaatccaccttcgctggacccggcaacagtctccttcagcatttcccagttgttcacaagtggccatactctataggctatgtgctcttggatcaggtctcttgtaccaatgaaagcataggcattactgaaagccttttgacatgcttcgacatcattatcaatcgccacagtcggccttcgaaggctgaagcgagaccagatggggcgttggatgatccccttgatgtcatccctttcaatcagattattcttaacatag

SEQ ID NO: 40293 - DNA, 331 bp, Zea Mays
catgtatcctcttcctggttaccttgttcctgatggtcacgtctgttggctttgtcgttctctctatggcctcaatcaggctcctcatgcctggtttgagagcttcacattcgttgtcattgttgctggtttcgttgtcagccaacatgatcctactctctttgtttacacttcatcttgagatctcacaccctcattcttctctatgttgatcattggtgttgatcttgtttatattgccttcgtcaaggcatagttccatatgtctaacttgggtcctcttagcttctttcttgggattgtggtcacctccacacctaatagttattac

SEQ ID NO: 40294 - DNA, 1329 bp, Zea Mays
ataaattctttctctatttggtatgggtatgggaaaccaaaatttgaatcagaatattcatgagtaatattcatccaataaaataggtgagtagcctaatagacaataagacaataaatttaacaactaactctacctcttcctatccttttaagcaccattccacctaaggcctcattcggttgtgcccaaccagaccaggttgagcctggaatgggaaccaatccacgttaaaatccaggcccaagaaaaatccaggatcctatttcttttcgtgttcgtttaagcccattggaattctagcccatgggtttggatttttttttgacttgaggaggttctggatcggatccaggagtcgtatggtctggaaaaaaccctggaagcgagtgagcgagcgacggcggcggcgcaagcgagacactggcaagctctactccggcaagcttctcttcggttggatagatctactctccacctctctctccctgtctttgttgcttcaaagaggtcgaagtgggtagatccgtttggtaccttcaccaggaggcaaaagtgggcagatccggccatacatgaagatgtgcttgctgacggggaggccgagcgatggcagcgcacagcggaacaggcggatgtctcgggacagcactgtcttggcgacgagtctgcatgggaccttccggcgggttggagagctgcggcggagcgccggtatgacctgctatggctctcgccataccttgccgtagtctactagtctttttctctaacgtcgctggcatgccgactccacttccgcagcctgcttctccgtcgccggccgccgccattccagttctcctctccagctctgcccgtcagtctactagtctttttctctaacgtcgctcgtagcctcgtcgagtcgctcgcacgccgactccactaccgcagcctgcttctccgtcaccggccgccgccattccagctctcctctccagctccgcccgtagcctgcttcttcgctcacggcttgtttgctccggtctgagtgtccgtttgtcagatagaaaaaagaccttctatttgcctgatagtaaaactcagaaatcaagcgttctctggatgcttgagatatattagatgaggatttctgcctagcagtaggatgttaccactatttggttgaacgtctttcgttgttaaaaaacagaaggtgaatcaacataataagcctgaagttgtagcttcgtgtctttttctgtccagttgcatggttgattgctctggttttggaccgcagggtcgtggcgctaacctaattttgttttttccttctttcttttc

SEQ ID NO: 40295 - DNA, 278 bp, Zea Mays
agatcctcatgccttagagttcgtcggcgtaggtcttgctatagttgggcgaggtaggcctgctaccgcatttggtgccattggagaagatcttttcctggatgagtccgcaatgcggtgcaggatgccttcctgatctgcaatgcggtgcaggatgccttcctgatctgcaatgcatcagagggatctaaagcagaggatctttccagcattgaaggtgaccgggatgttgaaggctatagccatggagtcgttgtagatcaatgttgcacccccta

SEQ ID NO: 40296 - DNA, 301 bp, Zea Mays
ctgggggtgttcgtgacgagttccgccgcgggagccgcgccgccgtgtgccgtgtacagggatatttccgccgagaatcgaggtaatttcacctcctaatcagttcgccataatctcgtaggggctgtgcgctagtcgattcgaactttgggcactgggttgccgttaggcgtcatcgccggtgatcggctatcgtggggggagtctgcgcgtcgccgtctgcgtgccggagatagaagacgtccgaggaccatcgatgtcctgagggacggataggattagcatatgcgtttcctcgcgt

SEQ ID NO: 40297 - DNA, 313 bp, Zea Mays
attgggagagaatgcgaaaaggtaactgctgcacgcggggtgaatcctttttcaaggaaacctgagtccttgttcagggaaacccttccgcgcgcccctgaatcgccgcaggaaatcccgttcgacgggcaccaaggaccaaggcaacccagtctgtgacacggggggccatgtccacaagtcatacggtttgtgtgccggatttcgggtgcagaaagagcgaaccaccgcacgcgatagcgcgccgccttggggccgctgcagaagacaaaaggttatcttttaaaccaaggcaacgacaacgaggcgcccc

SEQ ID NO: 40298 - DNA, 333 bp, Zea Mays
aaggcgttcattatcacccacaggaagcgaggtccccatcccatccaagtaccacgacaacacgattacaagtcgacacaatctcacaacaagcgccgcacgcagtcttatcatagtttacatacacaaagcgaagggtccataagccacatggcacatcaatacaaatcacatcttgttgccctccctctctattgcgaatcgggggagggcagtgttttcactcactatcgcaacacgagagcgaggccagcaaacatgttacatcggctcagccttcggaataagacccgcttcccggaaattaaacaacatcatcttcaactcttcgcc

SEQ ID NO: 40299 - DNA, 658 bp, Zea Mays
tagaagtctggaaaaccagcgcccaggtggtggaaggccacggacaggatgggagaatttttgagactcaagcctcccacgttcgcggggtccagcaatcccctcgatgcagatgactggcttcgcacgatcaagaggaagctggaagccatcagatgcaccgaaaatcagcgtgtccaactggcagctcatcagctttcaggaatggctttagcatggtgggacactttcagtgaggccgtcagagatgctacctgggcagaattcgaaacagccttccgtgagcaccatgtaccccaggggatagttcaactcaaggaggatgaatttcgggagctaactcaaggcgggaggacagtcagtgagtatgtgcacaagttcacagagctggcccgttacgcgcctgaggatgtcagcaccgagtccagaaagatggcccattttttgaaaggactaagacccgagcttaagaccatcctcgccagccaagacttcctcagcttctctcacctctccaacaaggctatccaagtggaaagggcaaaagaggaagaaaaagggcacctcaagaggaaattccaagtcctccgagctcaacagcaagaacgtcaccagagagctcgaccctttggactcccacccaggggtccaagcttca

SEQ ID NO: 40300 - DNA, 308 bp, Zea Mays
tggaaggaccaaatctgatttgatgctacatattggatcaggtagctattttaatccaactgaaggcatttcaaatatgtattcctataatcaaacaaccacaattaaactttaaatagccaactaagttactaaagagaatctgcattatgtagctgaggacccctaaaaaagaacagatgatcgacaggtattagtacaaacagagaatcagaattcaagatatcaaactcttatctgtgtcagtggtccatgtccaagagaatgttagaaatgttaccatttatcattacatgccaaatacatgt

SEQ ID NO: 40301 - DNA, 499 bp, Zea Mays
gaactacggatgggatccatactcccagcggaaccaccaaggcgacaggttgacaacgttcttccagtgggtgttcaaaatcgcggcgacgactattctccatcttagttcacagtgggggcggtcacaacgcgatgctcacgttatgggttgagggaggagtacgagcagcgactttttatgccccacatatacccagatgaggacaagggaactttgttaggatccaacccagcaaagaacaagcccaaagatcaggaagttaaacttttgtactttgtgtttctctcatgctagcactcggggcttggttagattgagcacttgagacttgtctacgattcgtattgcatcccccttgatagtacgacatacttgtactcaagataaagagaatataactatttgaccacttgagtcttcaatgtcttcatatgccatttcctctcaatatcacttcatatgggattgcaataatctttgtctcatttcttcaagc

SEQ ID NO: 40302 - DNA, 420 bp, Zea Mays
caacaacctggagctgtcattcagccacgaatctctcggcaccgagtatttatatacccaggcctgcgcccataccgccatctacgtctagccaggaagagcagtctgccaaggaagcttgccaccgtgagaagagatgtctgcctcacatcgccattgagaaagagagatcgggccacgctgaaatccatgcctgtgtggtcgtccagagccctattggtggtggagaaacttcaccgtgaggttgcaaacgtcgtgagggtaaccgagagccgattaccgccgtagagttgtgcaggagtgggttgccctcgtggtgtggtgcatcctgacgtgcggccactgcagactgccggagctcgctgcgcggtcatcagcgtctagccgaacgatggtctcggcgatcgcagggagaaggag

SEQ ID NO: 40303 - DNA, 445 bp, Zea Mays
gatgagtaagactttcggggacctgattagggacagggtagaggtgtacgttgatgacatcgtggtcaagactaagagagggtcgaccctagtggaagacttaaccctggtcttcgacaagctgtgagcaacacgcacgaagctgaacctggacaagtgcgtctttggtgtctccgcagggaagttgctgggattcctagtttgacaccggggcatcgaagcaaacctagagaagataaaggcaattgaggcaatgaggcctctggcccacatcaaggacgtccagaagcttacgggtcaatagccgcccttagccgcttcatgtcaagacttgctgagagggcgctgcccttcttcaggctattgcggaagtccggtccattctcttggaccgaagaggcagaacgagcctttcaagagttaaagcagcactataacacccctg

SEQ ID NO: 40304 - DNA, 319 bp, Zea Mays
ctttttcaattgtcgtgttcaccgcaaccacaacagttttcttcttcagccattcttcttcagccattctcagaagtatattgtcaatatcaccaagtgtggtctctagattaggatcttcggtggtctcggtttcggctccggtggcttcggcttcagtggttgctccggtggctttggctccggttattttggctccagtggtttcggcttcggtggctgtggcttcggcaatgacaatttttgacgccgatgtcggtggcggtgtctgatgaatgacatcagccacttggataattcttcgttttttcggctttgc

SEQ ID NO: 40305 - DNA, 336 bp, Zea Mays
gtcgtactgcaagctgatgttcctgatcagttcagatggaagttgacacaagatggctgttatagcagcaagtctgcgtatgaggccttcttcgtgggctctaccaagtttggcccttggaagagaatctggaaaacctgggccccgtcgcgttgtaagttcttcttatggttggtgcaccataatcgggtttggaccgctgatcgtcttgagcgcagaaatctgccccatccagtgtcttgtccattttgtgaccagatgactgagacggtgcatcacttgttggttggatgtgtgtttgctcgccaaatttgggccctgatccttcaacagttg

SEQ ID NO: 40306 - DNA, 271 bp, Zea Mays
cttgagcattcagagcaaaacaacgataaaaagagaaacatttgttctcaatatgtcatgtcaagcatgtgtccttcctgttcaagcggggtatttataaggtaatcaggagtatggctctaacatacatgactaggcttgattacctgccacattctcaaaatatattatacaatggtataaatagagagtagtgcgacccaaattctatttacacctatcactattttctgagctaggacgattcatctgcttccgcccaagtttgttg

SEQ ID NO: 40307 - DNA, 464 bp, Zea Mays
caaaattgttgtggtattgctctttcccagtcgccttcgtctgatatgataactcgtgcatattgcagaaacacctgacatctggctctaacccttggcttctcatggcccatataaaaacccctactttgataatagcttcgggggtaagttgatgtagatatatttcaaaagtttttaaaactttgaccaacatcttatccagggggaacctaagtccagctttcatgaagcttctgaaaataaccacttcgtcagcttcgggaagtggaacattatgcacccctccggccctcacgattgaaatgtcacgaaagtatctgcctctctttgattcgatctgcccttgtgtaatagtcgactatccgaaaacaacatggctcgatctccatggctgatattcgacatcttaatatccactttccacgtcgaaactctcgctatcgctggagttttcagataat

SEQ ID NO: 40308 - DNA, 473 bp, Zea Mays
gtgattcgttgtcggagaagacctgcgtcaaccagcacttccagatcaatgttggtaacagaagacacaggccacggcccacaggtcgcagggaggaaggacagtgatattttctgccatcgaaacaaacagaaggtgagaggaaggcaaagagctctctgggcaaaaggtgaaaacgacgtttgaaggaaaaggattgaaactgcaaaggtaatggtctgaagctctccctctcggttagctttataggacgaacagaaccaccaaggtacgattcgaaaagcggctagatgacggtcgtttcgaatcccgcaagcacgcatgccgcgaacggtcgatgggaaggtagaacgtcttgtcgcattaaatgactgtgtcccctctgaggaaaaacacgacgagcgtcgttccgcgctccgcctcaaaaggtacaccctctcccctcgactataccgcctcctactcccctcggc

SEQ ID NO: 40309 - DNA, 1028 bp, Zea Mays
aaggagtccaatgcttgtaccccgaagtgtttgggctggtatccatagagggcttcaaacggtgatcgaccaatagaagaatggtgactggtattataccagaattccgctgaagcaatccaactggcccacttagacggacatgcatggacgaagcatcacagataagtctccaggcactggtttaccctcttcgtttgtccgtctgtttgagggtggtatgagctgctcatgagaagactgacccctgctagtttgaaaagctccttccaagaagtgcttgtgaaaattttatcacgatccaacacaattgcagatggcaaaccatgtaatttgtatatgtgctggaagaatgactgagcaactgtaatggctgagaaggggtgggacaagggaagaacgtgttcgtacttagtaaacaagtccactaccaccaatatgcaatcgtagcgctgagaacgcggtaatccctcaataaagttcattgaaatggtatgccaagcagtcttcggtatgggcagtggttggagcaggccgggggacttagaacgatctggttttgcttgttggcaggcaaggcaagaagccacacagttgtgaataaaggtcttcatacccttccatgcgaaaacctgtttgattttcctataagtgacaggcacgccggaatggcctccaactggactttgatggaatgctgctaccagcttgtggtggagagggggggggggggtcaaagccaacccagattctgttcttgtatcggaggatgccatctttgagggaaaaatgtggaactgatgaaccgtccagcgccagttttgccaagaggtcctgagcctgggtgtcttgtaagtaggaattagccactgtatctgcccaggagggtgtcactgctgacagagcagcacaactggactcatgtgaagctttgcgagagagagcgtcagccacccgattgtcgctgcctttcttgtaagagactgagtattggagatcaagcaactttgtaaacaccttttgctgcc

SEQ ID NO: 40310 - DNA, 330 bp, Zea Mays
gtttgagacgtggaggttgggatcggacgacagggacgagacgagaagacgccacccctcccctctccccttatctgattgagatcgatggattcagttccactgattggttgggatgactgtccatcttctctccatcgactcgtagcagttagcagctgctgtcgatcggtaagggagaagaggcttccttccttgtcatcggcttagctatttagatggccttccgtagaatgttcgtatggcatgatgatgtttcatcagaaaatccaagtcaaccaaggccatcgtcgtctatcctcccccaaataaaccacgttgttgttcttg

SEQ ID NO: 40311 - DNA, 491 bp, Zea Mays
gatgtgttttctcaggattctaactcgttgttctggatccaaaaactagcaccgcgtcgattaagctagggttccgttcccagcagttactcatgctttgcttagcacacatttcgatctcaccgaggcaaacaaggttgtcggcattgcttacccgtgttttattgccttcgtcataaatcatgctggactctttatggctagtcctatgcaattcattgggcacacagtagtaagatgggttggggatgatagttttcagtggactagtaactcaggaatttgcatgaaaactttgttatctttcacgagcatgttatttccttaaaaccgaatttcagtcgaccatcaagtaacgattttccacgatgtcaatgttatcttatatcttacaatcatattccccccctttaacttttcttgaacagaataaccatgtcaaggttgctgttgttgctgacccacaggcgagttccccttctagcattatt

SEQ ID NO: 40312 - DNA, 315 bp, Zea Mays
gaacaatcatatgaccgtgtcctagcaaaagctgaataacaagtgaaaaaagctggaacctcaagcaaagtttgcatcagtagagaatttataaattcttcctttgtgtgaaatcaccatactgtaagaatgttcacttgtgtttccgaataagaacttcaagggcagtgaatagttctatatgagcaatcttttgcttagtctaatctcaatattggaaacaaatttaggtagctgagctgatatatgggcaagatactaaactcgtgatcacttgtttgattgcttccctcaattcatgagcatggatctata

SEQ ID NO: 40313 - DNA, 324 bp, Zea Mays
gacggtgagagctttttctgatgcgttgctccgaatacaagggtagaactgatgaattttcattgctaaggtgaaatctgaggtcgtgtgccatgcagtggtgcggcatgtaattctcccaaaaataaatagatctacacgtcccgtaaaccattttcgttcccgttcctatatactatcacattttcgtcatgttcctgttttttctccacaaatatgtatacggtccggataagtatttttcctatccgttttcaccgcagcatgcgatacgttctctttgaagttagaggtgcgtaacacataccttaaggcctattttgg

SEQ ID NO: 40314 - DNA, 465 bp, Zea Mays
tcttcctcctctccctacccgtaacagaaggtcgtgtttgccggatctcgtgcgtccagctcggagcccacccgacgccctataagtatagagcgggcgacctccttctaccaggagcttgaaactcggccaccatcgccgagatccggggggcgattgaccctgccgcaggaagaggatcatgccgccatgtgggaatttcggccacaccgctgcgtatctctcgacgtgtggttgggggtgttcgtgaaggatacccgaacggagacgtggcactctctagtcgaatgggcgagccaaggccggagaattcctcgccgttctgcaccatcaccgcaaagccgccaccctccgtcgtctgggctctgcactgctcgtttgtgggtaagagcttactcttttgtcttgtgattcccaactcttcgtcttatctaaaattgcgactcagatcgtgcaccagggcgc

SEQ ID NO: 40315 - DNA, 624 bp, Zea Mays
gaaaaaataaatatgggacatttgtacaagagcgccactgaaataatcagtaaattgttagtgttttaattgatgtttgtgtccattcaaggcacatattatggttaggggctggcagtactaattttaatgaaaagacaggagctctgccactcaattaaagaagttcatacaacaacacactgtactcttacaaccgcacaacagccgatccagtagcccttaagacacaaatcgttgccaagatttcgtgcaaaagcaacaaaacagagtgaacacaaaccgttgccaagactccgtgcaaaagaacaaaacagagtggattcttcatgacaaaccttagcccctgctaccaagacacagccacctgcacacaactggattcaccaaacacacctagaaagaggctaccacatgtcatcgtcaccaagcttcatcatgcccccaacgaaacaggccggactccatatcaacagggcgccaagagaaagaagcagcaccaagaaggcatacctgtccgctcggctttaatccgtactggcttctgctgagtgtttttgtctctatagattaaagccgcagcagtccaaacagccggccggcttgaatccaaagtgaaccggc

SEQ ID NO: 40316 - DNA, 507 bp, Zea Mays
gcacagttttctggcttcgctgacgagtgggccgcgtcggtcaggccgccgtcttcaacaaccaagaccaggctcagcgatatcgccaaggaaagcgaacaagtggttgcgaaccaactcggtgcgcagggaggcagggtccacgagtataagtatcgttgcctcatgacccatggggttattggagcgaaataaaagggaggtctagacgccggtttgagagagactcctcgatgggcggaagaaggtgcgcctccgcaacaccattgcacctcttgacgctgctcaacccccgatattgggtctaggagtgctgtgaggacccagtgtgcgtgtgcgtcgagaatcaggtcggttgggcactctgggacacgaggattgcttgtcggagttcgtcccccctcgtcaagccgttgggcaccgcggacggctcgagccggcactctaattcatggtaatgatagtctctctagatttcatatacttccctcactgtttcgcatcccg

SEQ ID NO: 40317 - DNA, 292 bp, Zea Mays
cttcaagctgttgcggaagtccggcccattctcttggaccgaagaggcagaacaagcctttcaatagttgaagcagcacctggtgtccctaccaatactggtagctctagaacctggggagccgttgtatttatatatcgcggcggctgcagaagtggtgagcatggtgctggtcgtcgaaaggacggcacaagaagaccaggtggcgctagaaggccaggaacctgagggctcggcaggggtccggaccgttcagaggccggtgtactacgtcagcgaggtcctccatgaa

SEQ ID NO: 40318 - DNA, 327 bp, Zea Mays
ctcgggaaaggtagtcactcttgaagttaagaggtcagatacgatcgataatgtcaaattaaagatctatgagaagacccatactcggcacatacagcaaatgataatatttgatgggatcaagctggagggcagcaagacccttgcatactatggcatagaggatggggataccctacatatgatgccctgcttgtgtggctgctaaggttgatgtattgcatggtcatcagtcatctttctttcgtgcattggtgtgtgttatcagtaaaagcagcattgtattgctgcagcctctttccagtactgctggtctatgagtaaaac

SEQ ID NO: 40319 - DNA, 423 bp, Zea Mays
ttttgatattgtgctggtttcatatttcgttggttgaaccttagttcggattgctgcaagttgtcaatctcggtgctctcttcgcgagtctcaacttttttcaagcaatgaatattctgtggttggtggttacttggttcctgactcagatagtaccatttatggctatgggttggacattgctgttctgcaatttgcaaaggtccatccttttgtttttgttcattgcatgctagtatttgcacaaaacataagataaagaaaaggaacttctagctggctgtggtgagaatctggattcgttccctgggactctgtaaacttactgccttgtgggtttatatatagcttgcctcacattcgttgccttcttggattgaccttgatctgggaaaggtggtctgtttgttgtccatcttttat

SEQ ID NO: 40320 - DNA, 410 bp, Zea Mays
gtgtcgggggggttgacggcgaggctggcctaccatggcgcccgcactctctctctttcagcgctacctagcgactcgatgttctaggggctcgaccctggtgtggttcgcggcgaggccacacgatgtgggactttatccccggaatcaggtgacaacaacccacccgaatcctagtggaagactccgagccggcatcttcgtagtttctgttggcgctccccgattctcttggggaggttgacgatgtcagacaggtgggtccctcggctagagagagcagtagcagcacgcgaagcgtaccggctgacaggctacccggttgggccgagtggtggagggaagtcgtgggctaaaagcaaggttaaggcccagttcggttaacactttattctttctttttctttgtt

SEQ ID NO: 40321 - DNA, 351 bp, Zea Mays
cttccatcgacgccatgcattcggagctctccaagatctcatgacttctggaacacgacaccatgaagcactttagccatccccccgtggtgctcaacccccacgagtcggtggtggggcacccacctgctctgatgacgcacaccgacgacccttttgggcaccaccattcctcgacaatacgggggagtggtatgggtgtcatctacacccataaccatctcccagccaacggtatgcccgacacatcccaattttgtttcctcgagcctgtcatccattcacccaccgttgctcatgccgacaacctggctaggcatcaccagcctatgcattttgggggcatctttc

SEQ ID NO: 40322 - DNA, 512 bp, Zea Mays
gcgtgggtctacggcaccgtgctatggtggagcgaggacgctcttcctggcgccatcctggcctctggtaagtaccctggtctgtccagcacatccgtaggatcgtgtgacaccagtagggtagcagttggatcaacggtttgccggcgattgctcaccggaactcgtctgtgccgcggggccgccatgggaggtagattgacgccggcccattgcgatttagcgtgtgaggtggtcgcccagcttgggtgcaatcatagcttcgtctagagcatgtccaattggagattggggggctcggtgtgtggaacgggtcttccccgatgaggccaccaccgcccaatcgctcgccggtgttgggagttggtcggaggaatgggaaaaagcgtgtggccgtcgatttcgtaggtaacgactgcgattagatctgggttcccttctcgcgcggtcaatctctgccctccatcggaaatcggtcggcggagagtgtgtcttcactattttaaaatccg

SEQ ID NO: 40323 - DNA, 544 bp, Zea Mays
aaattagcactcataatgtaaggggtgcaactaaaataacataatacctagttaaataaactaaactgcattgtctgtacacaataaaaaagtggccaaaggttgtaaaataaatatgatattataaatgcaattcagaacttggaacctaacgtgaaatttcgagtgaaatttcgactagattcatccttactgtatactactaaataatatctaatatgttgtatcagctcatgactattgtatactaattagtatttaatatatatgaaaacataagtataacatataacctgacgtggagtttctactactttcggcctctttgtgcatgtcttccgtaagatattcatatgacttccagcagcattacgcttctttgtaggtgtcatgaagtcatcgtcgtcatcgccagatccagtttgttcattggcttcataaataacagatggtttctcgacaggtgcaggacgatgatcagaatgctttgtgtttggaggaactccaatagaggccggacgtggtatctcaacactaaagaatt

SEQ ID NO: 40324 - DNA, 396 bp, Zea Mays
gtcgagccgacaagcattcctagcatgcataggtgctgaaacgagggtgaggagggcgagagtagacctggagacggtggtccatggcgcggtgactcatggcggcgcggagaactgatttgggggaaatcccaaattggggcacgctggtggaggatcagaggcgatggctggggctctggcttcgtaacaacttagcggagcagactggggcatcaatttatagaagctttgagcggcggctccgaatttggaaggggaagtcactggcgtgagctaccgtggcggtcactgaggcaatgcttcaggcgacggacaggcttcctatgccggttcactgtgacgtggtaaagcttcgaggcatgtggcattcgagcagtaggcggcaaactccgg

SEQ ID NO: 40325 - DNA, 497 bp, Zea Mays
ctccctccctcattcctggcatgtggaccccactcacccctcccagcactggtcgtcttccggctcctcacccgcacgcaaggacagcgcagccgccgtcgggacgtctgctgtcgtacccttttggctctgcgcggccacctctacgcctccctgccctagccgcgagtagagcagccttatgcccgcacctgtccgtttcctctcctcactgaccgcgtcgtcgttttccctcccgcattcacgtctgctcgatggcggtcattaatagtatttggttcgtgcagacgtttccgaggtcgccattccttctccctgggctatttatggacacgtcgaactcttctcatgttcccttgatcactctcctctgcgcccgcgcatccaacctgcccgcaccgcgctgcgtcactgccacccacgctacgatgcgcccgcagtcgcgctcatctcgctacgcctcacctgtttcccattcccgcagccgttttttgttc

SEQ ID NO: 40326 - DNA, 521 bp, Zea Mays
ctgacaccacacactgcaaattcagttttcaggcagctggatgaaattcagtctctgcaactgagagtccatttttgggcagtctttacaccactttgtgtgtggggtcaagcccaactcacttaaaggaagttgttctataacacatggtcttcaaacttgctacagaaatttcggtttaaaaccacctagaacagacactacacagctccaaaactgcactaaaaatattgatttcagactttcagttctgaataaactaagtcaccaaccacctgacagtcaaattttgagcagctgttactccaattttcgtataggatcattccaaacacacttaaataaagttgttcaccatgatctggtcttcacttcctctatataaaccacaatccaaaaccttctagatcagccataaacaggctctaaaatagctatcaaaacacagaaatctgatttcagagactgttcacaatctgaaattcaaaagtctgacagcctcactttggatcacctttttc

SEQ ID NO: 40327 - DNA, 280 bp, Zea Mays
ggttgcagtcggctcttatgagcgcacgaggatcggcatgggtttaacgccaccacgccgccgagcacgcaacgacgcccaccattctcgcgaatgccgttggaggggagggagctgatagctggggccacttgcctgtgactgtatgatcgagcgagtcagcgtggagtcgacggctggtatgcgggccccacgcgacagagagtgggcaggagtatgtgctgactgacgggcggggcccaggtgtcggcgccgctttcccccgagttgggccgcgcgg

SEQ ID NO: 40328 - DNA, 356 bp, Zea Mays
agttcatcgttcatctaccaacaggcaaaacgcttaagccccctcctcatcttaggatttaggacgggtacactccaccacccggccggagaattccctttccgacaaggtcctttcagggtggatctttcccacattcttctactgattagtggccctaggaagtccgaggatcatttccacgacaccattattgtaccaaacaatattattctagaaggtaacattgttctttagcggctaaaattcaatatcaatgatggtccctctaatattgaacttccttcatatctgtgcatatgaatcctttaacaacctgtttggatgtagatagtaaagtctaaaattaggaattg

SEQ ID NO: 40329 - DNA, 402 bp, Zea Mays
gctaacgaaagtttcacctcaagtcaagtcgtctggtggagttctcgcctttgggagaggtgtttcaagagggaaataggttagctttctgatgttgggtttctgagtggggcacataattgatttttagctcagtgtggtgttctttgtggacctgtcgggaaatgttctatccacctgttgacctgtatgcggtaaacggtcggtctttgttaatgctaagactggggctcggacctagaactccaaaaaaatgcaaagtaaacattaaactcatcaaaataatggttgatcacttcaataccttctggaatgatgccgatgcatgaccaatttctttcttgttcctccgatccgcctcaacgatattcagttttaacgaattctcctgcagcttatgat

SEQ ID NO: 40330 - DNA, 378 bp, Zea Mays
tcgtaccctcggtccgtcttctccggtgaggttttacccctcttccgaaggcttgagagtggtagggatgagggaggagataactgtgttattgcttatcctctcacagatgccggctacaaggctttatagcctgagttgcaacaggaagggaaactaatctcctatagtttaggatctccactaaagggaagctaatctctataatttaggatttctactaatctcttccctcttctagccggccttccttctccagaggtggcggctgcatgctctgtggattccttccttcttctagccactaattttctggctttccttttctagcgccggcgtggccctggctgctgctcgctctgcagcgcgcctcacgtc

SEQ ID NO: 40331 - DNA, 911 bp, Zea Mays
acaatatccaccacaccacgtcttattttgttgttatagtagaagatatgagagttattaaaagtaaggtatggttgatgccacactaagtcataatggctcctccgccgttgctgtccagcaaaccatcacattctgtgacgcgggacgtcgagcaactcctgacttggggcactccggtcccatgtgacaaaatcccccattcccattcctatcgtgcaagccatcgcacactccggacgttgggcccacattgcagactcgggcgcccacgtgacagccacccttagttttgcacacaccggacccacgtctgctcgcgcaaaaaaagttgcctcaatttgacactggcagaagcatttgaccacgattgctttctctgaagaaggaaggcttataagccagtagaagctatgttggctggccggtatggtcataaaaatgtgtaagccgtgacgacgacataggtcgcgtgggttgtgtttctttggtgcggcccaagtagctgccaggaggccgcacgcttcttatcctgacccagcttggctttagggtcagtctcccttgctttctctgcccagcgagccctcgccctctagctcttcctgctagcgtcgtcttcgtcccgtgctctcctgttcatcgtcgatctcagccatctcaggagcacccgctcactcccagacgcccgcgcaaaggaatcccccacgatctccctccaaactgcccactctctccacgatctccccctctagctcatgatccctctgcccgcctgccacgcccacgggcgcaacaagccaacaacccacactcggccccgctacctcaatctgtcgccataaatccgctacctcctcctcgagtcctgcttgatcgccccatgctcgaccggtcgaccggacggaagg

SEQ ID NO: 40332 - DNA, 305 bp, Zea Mays
gcccaacaccggcctccccagcccatctcatcactacagtcattgaccacagggacccgtaagttagtcacaccacgcgctcttgggcaagcgctagcagtggggctcactcctcattctccagcacatgacaccttctcacgtgtgcctcctcctcactagctaatggacccccaatgtcatccctatccactcttcagtcgtgtttccgcgccataaccacgcccgtgggacctggagtccattgcttacagcccggaaccaaccttcgcagggctataaagctatcggtgtttatgacccga

SEQ ID NO: 40333 - DNA, 553 bp, Zea Mays
gccgcaacggcgttcctgccggcgcgacgaccgtccacctccccgtaccatcccgaagggcacccagcgcaatggagcacagaggacacaatacattgattggtgacttcttaccggcgattgtgaagccgacacagcgggtccgaatggtggtcttctccctgacttctctctcttctcttgcaatggcggggctcggtgctggcacctatgcgtagggtatgggggggacgaggatcgcaccaaacgatgacgaggttgcagggtcacagcgcactgcggcctgcgacgcgatgtgtcactacggtgatgcctcggcaccggtacggaaatccctgggcctgggcgcagtcgagcagagggcgagacggagtagctcggccgccggtggaagcttgcaatggggaacaaggagagctggtcttcgattttataccccagaggcaaggatggcaacctccaccatgggccagcgccggagatcacagaaggtgttcaacgaactctaatttggtacacgcagctttcacgagggagaagcctggcgacccgg

SEQ ID NO: 40334 - DNA, 359 bp, Zea Mays
atatcatttgaactcaagccaggccacatgagtccacctatagtccctagcagcgtaggatctgtgcaagaattcgtatcgggcaccaagtaccctgtagatgatattgttgaggacaagccttgctttcttcatattccaatcaatcaatctgggacaaaaacaaaacaagctgctactgctttggtaaaaccaggacttcttaactacaaggataatcctgtcccgccacactatgctgtggtccaagttctagagatcacagacagtggttgtgaagattgggagatagactttccagttgaggggatcataactttgcaggaggcaatgaacgagttggtcctttggcatcgacg

SEQ ID NO: 40335 - DNA, 531 bp, Zea Mays
aaaggaagacaggagagggggtcgtcggagtggtggccagctcaccggcggtaaggatctttaccgagttgtgcataaccaatgaccacgacgcacgaatcacgacgagcagagatcaacggtgatggacaccggcggcgagcagggggggtgaacctgcgatcttcttcagtttggaactactgtaccatggtgaaaacctgattcagtcgcctgacaaagcacattggagccactttctctctcaattttgaatggtaacttaacccaagctctgcatcaaagttgtaatgctacttacctgctacaaatcaactatagggattaaacctatttaagcactggatcaaggtttaattcaagtccaaagttagctctgttgcactgaacttctgaacttctaactgaatcagcctgacagccaatcttcaggcttaattatctcccatattctcttaacaactttgctcacttccttaaacaaagttgttctcctatgattgagctacaaacttgatgtggtgacctagg

SEQ ID NO: 40336 - DNA, 290 bp, Zea Mays
gtggccctaccatgttgaggacccagcgctgcggaggccatgtgttggagattcgctttgtgagctgcaaaggtgtcctactttgaagggcaaacttctggcaggattcgctgcatggcacaatgtgattcgccacgcatacgatatctgaccagtagagtccttggcgcatcactttggcggcgagggccctagggcccgagtggcagccgcgtgttcgtctatgcacttcgcggatgaggtctaccctttcgatagtcgtgatgcatttgagcaaaggttgacatatt

SEQ ID NO: 40337 - DNA, 652 bp, Zea Mays
gagagggaagcggcggcggtcgacgtctccgggtagtgcttgctcctcgtcggcgattggcccttcgagccctcggtacgccgtccagatccgaactccgttgtggtttctattaggttttagttgcttcatttgttcgatctgtgtggttctagggtttgtggtgtgcgaatattgggcatagaacctgaacgacggtttcgatctgtgtggttctagggttatgttgcgcgaatattggttctagggtatgtagatgctagcggttctaatttgtggcaggtctggtcatgttgtgctttttgttgttcaattgattcatctggaaactaaaaaaagaacacttcattacatatcatattggcacgaaaatgaaacaatggtaaccagggtagtaccgtcgtctgaaaatgtcgtcattgtacacagggatgtctgcaaagtagcattgcacaagcctagcataacctgaagacctatcccgatgaataatacgtctacctggaactgatcctctatgcacatgtagcttttcttcctcgtctgcaacgttagatgcatgaagcatgtgtaccacttgttcatcctcgtacatgcgtttcaaacgttggtgccacagattagatgaagaagccatcttgtcagtaggata

SEQ ID NO: 40338 - DNA, 318 bp, Zea Mays
ggggatgccatgcttttccacaaaactagtggctataaaagaatgggatgctcctgaatcgaaaagtacagtagcgggagtaaattcaacaaggaactcaccgagcactactcccggagcttgctgagcctcctgagcatcgacgtgatttactcgtgcccttccttgatactgggtcttgttctgctggctgatggaggagggcgccttgggggcgggtgctgaggtattcttggggccattcactgagttggagtaagcaggtcctgatggcttcagctggggacagctgttcttgaagtgattgggatctccgca

SEQ ID NO: 40339 - DNA, 410 bp, Zea Mays
gcggggataatcttgatgagaaggcctggtgtagttgtttctaatgacattgttgcgaatgtcaaggctacgcctgatgcttcgagtctcccttcctcctcgattgctcctgtgaaagacattgccaaatagagatgttttgctgtgtttagaagatactgaatgcatttgtgaactatatgtgtgtgtgatcagtgcgctcgaatactcggtaggatattagaatgtgttcttggcgttgaaaactataacattttgtttctgttgttagaattcaacagtcgctatgaacgtttgcagaagtaagcgtgacatgctggtttttggaatcttttcctaatttatgccaattgatcaactggcaaggcatagagatcgccctatgacaagtagctgtgagcatgttacgc

SEQ ID NO: 40340 - DNA, 376 bp, Zea Mays
tggccatcggataagcacggctcagtaagaatctcggcgtccgatccacttgcgctcggattgcggctaagcttgccagaccccccctccggccgtcggtcgaccagataagtctcaccgccgtcgagctgccgccattacccgccacgtgccttagtgctggacttcaccgcggtgactcaccgaatgcatgtccggcgatcaccggagccactgccacggtgaaagccacttttcccctgcactgagctcatctcccctctccggccgccaccgcgccatcatcaattcaagcaccgccgcctctggaatctataaattgagcccaccgttatctccgcaacctcatcacgcaccacaccgtctagtatcgctc

SEQ ID NO: 40341 - DNA, 427 bp, Zea Mays
ccaaattcaggcactacggtcgtttcaatatatcgaggccggtgggtcaaaacctttattttcttgcccttcggcacaacagtggtggctgaagcggcagttttcctcttttttctttccttctcaaggggtagcagtaatcaggatatatgaagccaattgcatcaaaaaccttgttcaatcttttcttgccccgaccccaaaggctgaggacaaggcatcatcttcggccctggtatatgtcccaagcaactcgtcgctagtagcctcaatgcatttcaaccagtcatcatttggttcgtcaaacctctctctgtatctgaaggtatatttcaatcgaactaatccaccttcgctggattcagcagtagtctccttcggcatctcccagctatccacaagtggccacactctgtaggctatgtgc

SEQ ID NO: 40342 - DNA, 478 bp, Zea Mays
gaactgctttgggtccgaatgcccatcatacatgggaagctgtggtggtttgtacgaaggtggccacggcgtagcctgcaattctgtagctagggggaagcatcatcaaaagtaatgttatcatgctgaaaatcatcataccatacgtcatcatagcttaggctttcctgacgaagctctctctgttgtggcctacgcccttgcttgttgtcttgtgtgatgtgacacatctcttcggatgcttcatcaatcttcttctgaagctcagttagccgaaacattttctcccttcttgtttccacttgttgatggatagcctctagatctctgatttcttggccccactcttcttcatgtggtgtagggctaatggctttccttttctagcttcgggcctccctcagaagatgcccctcttgattagtgtccagcggcgcaagggcaacccctggcgctactgccttctttagcggcatgg

SEQ ID NO: 40343 - DNA, 387 bp, Zea Mays
ttcaaaataaacgagatatcaaccgcatacagcatcaatcctttcatgagtggcttaggttgcatgtaagtaagaaataaacttaatagatttatttgagatggaattcacatatactttaacggtagcatttcaaattcaggtggaagaaacgtgtgaagaagcatcaggcgagattaaaattttagccaaggcaccaatgatggttgcacacaagtataatagctagctataccataaatggattcaatttccacacacactcctatgatgatggtagagctattcaaaatagtggggttgttgtagttgcagagtcaacaagctttgacaggggtaataatgataatgtcataataggaaataagacctattttggtattatca

SEQ ID NO: 40344 - DNA, 438 bp, Zea Mays
tatttattctgtgcttttgccgcaccctgttctcttttcaaactcataaaatctgacgtagtttcttcaaaatggcactggctttgcatcgtttcttctctttgatctgcctctacttggtccagtcgtcccagatcttggactttcgttgttctcttgctcatcttcattgttgtctgaaagattaaatgttttaccatgatcttgttgcagttcagtccctagaccctgcctgccactttttaccaacctttgatgtgaggatcttttcttctgccgatcacgttgtacatgctaacgagaagaatgtttctccattccttgagtttgtatatatagtttcggttgtcccatccatgtgttctaggctcatcagatctcaatggatgaccttgttcctcaccatcagatgtcaaagcatgggatgctacattgttt

SEQ ID NO: 40345 - DNA, 309 bp, Zea Mays
ggggttcacatcaccacacgtagattatcatgatatggataaccgacgtaagaatgcccaataacctgagtgtcacatctcgagatctggccttttaccaccagctaccatagataaaattcaaaaagaaatagctaaattattctgagacaggctagggatcagtatgtctggtttagtgtcatcatttgaaaaccatatgatcaccgatttgacatcatacgatacccgcaagtgtcacacatagatttaagggcaaacccgagtgcgtcttaaatgtgtgcaaggatcaagtctcacacatatgat

SEQ ID NO: 40346 - DNA, 337 bp, Zea Mays
gcagaagtttcatcactttacacccgaaaaaagagaagccatacaggctgagttagctcgcctcgtagcagcaggtttcattaaagaagtaacgcacactgagtggcatgcgaatcctattcttgtactaagaaagaataaagttggttcgtgcatgtgtgtcgactatatcgatctcaacaaacacttccagaaggatcccttcagactccctagaatagatcaagtggtcgactctaccgccaactgatccatgctctccttcctagactgttacttgggatatcactagatcaatctagcaaaggaggactaggagaaaacaacgttctttacg

SEQ ID NO: 40347 - DNA, 337 bp, Zea Mays
cgagcacccaccagagtaccagactattcgtccctgcattgcctccactattaccgccatcttcgtctgcgcgctgtcgctgccgatatcgctagccccaacctcctagtgtcatcgttggtggtccgccaacctggtccgcttaccacgccaccgtgttcctccctgccatgccgcctccgatatccagcccttgctcgtgctcctactggccccaccgcctgcgatgagcttctctgcttgctggtagggcctcgacgacgtggatctgcccagccaccatcaccatctaaaaactattccctaaactaggccacaaataaatccctagagcaaa

SEQ ID NO: 40348 - DNA, 376 bp, Zea Mays
aaaaatgtgatcaccgtgacgggggaaagtggagtcggcaagacaaagctggtgaggaacttgtacgacagcaagcagaccctgtctcactttgacatctacgagtgggtgagctttgggcccaatctcagtgcctctgatgtcctcaagatcatcatcagacgcattacagatggagaagaatgttccaaggacaacatagagaggaagctgcgggagatactgaaagaaaagaagtatctgttggtgatagatgctgagctcagtaactcggagtggaatcgcattttcgctatgctccctgaccccaaggatgtggatgtcgatgctgccagcagaatagtgaggatttctcagattccgccacataagccac

SEQ ID NO: 40349 - DNA, 300 bp, Zea Mays
gaaaaaggaggtagagttggactgacttgcacctgagaacccacagcttttttcaacagggacacatgaaaaactgggtgtattgaggtgtattcagggaggccaagtttatatgcgaccgcgccgactttggccaccactggaaaaggcccaaagtatttaaaagtcagtttatggtttgctcttttcactaatgaggattgcacatatggctgcaacttcaagtataccatgtccccaacctcaaaagttctctccgagcgatgcttatccgcttgggttttgtaacgctgctgagca

SEQ ID NO: 40350 - DNA, 361 bp, Zea Mays
gagatgtggctgcacatgtggctatgtgcgatgtatgccaaagagttaaagctgaacaccagaggccagccggattattgcacccactgaagatacctgagtggaaatgggaagagattgacatggacttcattgttggattaccccgcatgtctgctggatatgattctatatgggtgattgtggacaggctaactaaagtagcccactttattccagtgaagaccacgtattcaggagccaagttggcagagttgtacatggcacagattgtatgcctacatggtgtgccaaagaagattgtgtcagaccagggatcacagttttacctcgcggtattggaagaagttgcacgagtcat

SEQ ID NO: 40351 - DNA, 311 bp, Zea Mays
tgagccagccctgccatatccacttgcctggcgacgtggtcgagcggccgtcgccatggtggccaccgttaatctggatcgcgccatgccataggccatcttaccacgtcgcagtaagtcgtggagagtagccggtacattaccccattgcgcgccaaagtgaacttgcctcggtagaaatatcccgccgccgtcgtgaacaccctcgtctcaaattcgcgaagcagtgattggctcctttaaattgagcactcccgtcgcttcgcctctctgttatgcgcacatcccaccctcagctagcctctctcgtg

SEQ ID NO: 40352 - DNA, 399 bp, Zea Mays
gggaggatgatgaccttaccatcagatgtttcttccttatcttattcaaccgtctgttgtttccaaccgctagctggggcataacaaaccatgaagtgcttctgatagaagaaatgcaccatttccatgagaccgattggtgccagcttatatttaatgacctttgtgaagcggtgaagaagtggcataactgaagcaccacaaacgtctccacgacgatatacaaatgctcaattgttgaccttgtaagtatagagttcatcttctgtacatatattgcaaatttttagctcactgtttctttgtggggcatgatatatcatattttataatgtttgttatgtttacttacacagcccttgcacattgaaatttttctgtagttgtattacctggatc

SEQ ID NO: 40353 - DNA, 291 bp, Zea Mays
caggagccaagctagcagagttgtacatggcacagattgtatgcttacatggggtgccaaagaagattgtgtcagaccgaggatcacagtttacttctcggtattggaagaagttgcacgagtccttggatacaagattgaattttagttcggcctaccatccccaaactgatgggcagaccaagagaaccaaccaagtactagaggataagagcttgcactcttaagcatggtggtagttgggataagagtttgccctatgtagagttctcctacaataatagctaccag

SEQ ID NO: 40354 - DNA, 300 bp, Zea Mays
gttgtatgttgtttggagcctgagaactcaacctagccgagctctacatggaaacactcctttcttcatggtctatggttcggaggcagtgctacccgctgatctcaagtttggggcaccgagattaatctttgaaaacatagcagaagttgaggctactagactggaggatgttgatatactagaagaagaatgattgaatacggtgattcagttagcccggtatcagcaaactctgaggcactatcatgacaagaccatacgacatcgatccttcgcagtaggagacctcatcctccg

SEQ ID NO: 40355 - DNA, 365 bp, Zea Mays
atgtatgcttgtaatgtattggtgtaatgaataaaataacttagttgaaaacaattgacatgtgcataatagtgactctctccccctagcagatggcttcggataaaaccacgcctaccgcctctgggattggagcagggtttcccctaagagctgaaagagaagccggtagagaaggaagtgagacccacctccccacacctccagaactacccttagatttagcccaagttctagccaaccaaacctgactcatcgaggtcctcactcgaagtctggaaaatcaacgtccgattggtggaagaccacaagacaggatgggagatttcctgaggctcaagcctcccacgtttgccggatctagc

SEQ ID NO: 40356 - DNA, 341 bp, Zea Mays
actggcgtgcggacccaagagggcaacgagacagagaagagaaagaagagctccaactcatgggctgcatttgaatggccgttgcgtcagccagttggaccaatacctaatgctccgcagctccggtcgggttttcagacttggagccgccgttgatgacgcattgacgctggtcctaaacacgcccgcggcccgcggcgaacaacggagattgtttttatccagaattcgaaattttacaatcctcatctaaacatgcccttagtttgcactgggctatagctaactgtctaagactttatccagctttttattcatagtttaccgaaaacattgttttt

SEQ ID NO: 40357 - DNA, 342 bp, Zea Mays
gtcagtcccagggaggggagtcggtagttggtcgtctcgaccgtccccagaatggcccactggttgtggttgcagccgactcaactcgggtggcacaactccatgatggtatgccgtgatcccggtcatactcctcccgatgccttatctcattttcatgtcaccaatcgcgcgaagcgttgatggagctccgcgcgtctcatcggctgttgatggtgtgacgcaggtcaatcgaaggatgagcgaggggtagaaggtgattagctgcctgagtaagcagtcgtcggtagccttccgcgtctaaggtttgcgggagaccgtcagctatctatgttagtactc

SEQ ID NO: 40358 - DNA, 288 bp, Zea Mays
ctgctgtccggtgatctcgctgccatggattcgccacaccacgactataaagatggaccggacacctcaatgatcccccgcctccatctattcgtatcaccacaaccaaccgagggctttggaggcgccgttcgcgggtgagaagggagtgcgggaccgccgcgctcagattcccatctccaacgtcggtcagtgttcgaggaagggttgtggggacccactgtcgtgctaggatcgctcgtgttcggtgtgtcgagggcataagccgggggaaccgggggaattgct

SEQ ID NO: 40359 - DNA, 289 bp, Zea Mays
ggggacgaaaaatcggatctatcaaatccgatccattagatcagatctattaaattagacctatcagatcggtcgcaatggccaatcccaaagatcacaacaatatcgtcctagacattaacacaaggctgactaactcgccgaccaatgaggatgagaaattagaagaccacatgaaaaggttggacgaggaattccaacgacaacaggctcagataagcaaggtggcgaaaaagtggtacctctcgcacttcaaggtagatcaccaccagaaggtcgtcaagaagag

SEQ ID NO: 40360 - DNA, 298 bp, Zea Mays
cttgtgtagcttcggtttctgtttgcccactttcggtttcggtctgcgatttggcttcattcggagtgactttctttgcaggaccatggcttagtgcctttgtagtctctagtacagcatctagcacgttagccattctgctcctcttgggagttgcggcagaagttttttgcacctttggcaaacctgccattctcaatggactcaggatttctggtatttttgtcactttttccacctgtggctctttggccttattatcttcagccttggctggctcaactgtagtcatctttgg

SEQ ID NO: 40361 - DNA, 1154 bp, Zea Mays
cagattaatcaagtagccaaggaggaaacaaagggcactaaccagcatttgccatctccaaatcagatacctgctgctgaagcagcactggattccaatgtgttagagacagagctctttccgggacagaggcaccctgcgatctcagctgaccagccatctcgtcaaccaaagcctaacattgaaaacaaatgagtgcaaagacagtatttcacccggagtatagtcagatcaggaaaagccaaattacctggagattggagaagaacgaaggaagccccaaatcatgggaagtcagttggtgacttgacgaaggattatcaactgaggcaatctgcagagcatcattggggaccaactcagcatcactagcaggaatcaaaactctagcatcaggtgcgtcggcctctaaggcgacttcctgacccgaagcacgtgctgctgccatgcaatcagaatgtggaggagaagacccgacgtggacatccatggaagtatgagaaggggaacccgctcggacacccttgggggctgggtcatagctcgcgctgcccacccgagccggatcattaccggcaacacccttgggggctgggtaaacgctggcgccatccttggggaccaggttctctgcagcagccacctctaaggctgaaggattttcagccacttccatgggaacggagcaatgtagatcagcctcttgactcttaagaccgcgctccaaggtcgatgaggcacgagacgctgctcgggataactctaacccgacatcaggcatatcagtgcaaacgtccatcataccaccatctgtcggctcggacagcagatcttcagggaccacatcctcgagagcctgatcaaaatttgccagagacaattcttgtagaccaacgagagcagacaaagctggagaaggaatatcactactctccccactgactatataacgccgactgttcttccgaattaaggggatttcctcctcctcttcctcatcctcgtcaataatacggacaacacacccattgggatcagctctgaccggattgcacccattgggatcagcatcatcaaggtcacacccattggggtcagcatcagccgggtcacacccattgggatcagctccagtaaaaatctccattggcact

SEQ ID NO: 40362 - DNA, 443 bp, Zea Mays
ctggtagcttctgcttcagctatgctttcgaagaccagccttggtgccccgaacttgaggtcggcgggtagcaccgctttcgaaccatagaccatgaagaacggggtatttccatgcagggctcgactaggttgagttctcaagcttcaaaccacatagggcaattgtctgatccactttcttgtaaacttttcatttttgtcgaacaccttcttcctgagtgcttccagtatcattccattggccctttccacctgaccattggctcttgggtgtgctactgatgcatatttgatctggatactctgttgttagcagaaatcaaagaattcagagctagtgaagttggattccaggtcagttatgatgctattcgatatcccaaatctgaatattatgtcttgtatgaactccactgccttggctgaagtaaaagaagcaat

SEQ ID NO: 40363 - DNA, 284 bp, Zea Mays
ctcaatactctagtttcaaatacttacatcggaaaactttgttgcctattgaaacattctagtttatatgtccatgaccttcttgtcttctgaaatcccttcttattccgttgttaagtcgttatcctttgcctttttctatccccttgtcttggtatgcccgtatccttaggatattacatactcttatatttttatatttgcttatctttataccctaatgtttgtttataaacattttagtttacatgcccttgaccacccttgtttctcgatgatccatg

SEQ ID NO: 40364 - DNA, 297 bp, Zea Mays
cttggggtggtggatgttttgctattgcgggtgtggaggtggtagtgggggaggtacgatttgtacctcctggtggtgttggtatgcatggttaggtggatgctgagcggggccatggttgtatggttgagggagttgttgatatgtgtgcgcaacaactctagggttgtcggctggttgcgcccgagacatcctgtctctggtggccttcgtctctgagcagtcccttgtagggtgcgcgcagtctttgtcgtggaacaagcagtaaaatctgcgcggctgctgcgcacgtccccg

SEQ ID NO: 40365 - DNA, 460 bp, Zea Mays
ccgaggcgaccacagcagtagctttcctcttcttcccttgcccccgcagcggatagtggtagtcgggatagacgaagccaatagcgtcaaaaactctgttcaatctcttctttcctcgactcccgaaggctgtggacaatgcattatcttctgccttagaatatggtccaagcagttcatcacttgtcacttcgatgcattttaactagtcatcgtttggctcgtcgaacttatccccatatctgaaagtatacttcagccggaccagctcaccttcgctagattcagcgacagtttccttcagcatttcccagttctctacaagcggccatactctgaaggatatatgctcttggattaaatctcttgtaccaatgaaaaaacagacagtactaaattccttctggcatgcttcggcggcttcgtcaatttcaaccttcggccttcggaggccgaagcg

SEQ ID NO: 40366 - DNA, 423 bp, Zea Mays
tgaaaaacaactttgtccataatagcttcggccatcttaataatttcatcttccttttttgcttcggggtcggcctgtgacccggagggctccggggcagaagataatttggatgtgatacaaaacatgaataagttcgaagccacaataataaaacataaagtcaaaagcaattagacagtacctattcgcttttcaagttctgcagtttttttcagctgcatttgctgcttctctagcatcgtgggtatctttttcacttttctttataatttcatgagccatccctcggccaccattttcccagatgtcgttgaaaaattttccgccaacaaagcttgcctcggccgaggggtcctttgtatcttcaatagagaacgcggcttcggcttgggccagaatcttcacatgctcgcaacctgc

SEQ ID NO: 40367 - DNA, 480 bp, Zea Mays
gcagctgcaacggaagcctggagcttacggcgctgcggtgggcgtggaggtagttggtgcacggggaagacagagatgtgggggttgagggactgaccggtgggcccgcggaggagtggcacccgcgaaaaacgcatgcgaaatcgtggcgctgtccaccgggtcccacaagtcggcgtagatggaaggagcaggcaagcgcgcatgcgaggtaagagcagctgacatgaggggtccacctgtcggcacgcgtggtaagtgaagcctgggccgcgcggttggcattcggtttgggccgaatgttaggttcttggcccaagcgcgggtataactccttttctttttcttttaatcttattttctgttttcttttctcattttgaatttcaaattcaacttggtgacaaaatttgtattcagatttaatttccacttgatcataccaaatttgaagaagttatttattcatagatttatttt

SEQ ID NO: 40368 - DNA, 408 bp, Zea Mays
gccgaggaggccgacaagcaggagggggcggcggccctggaggagaagaagaagaggaacatggccaaactccgcggcggtgcctaggcccagcagagcagatggatcggagcaggtgcctaggcccagtctgccaggccgcgctgcgctcccgtcatcatctattcatctcctcacccagattttgcttccctcgctcgctctctcattcgtttgtgcagctgattacgctaggtctatttacgcaactgtcgtgtgtcgaattttaacagcgacggccatgcaccaaacccccaccccacacatcattttctttcttcctttcttttgattcgacgacgcctgtgattcatgcatgctctcgatcgaggcaaagctgttgtatgttgttatggtgtactgtttttt

SEQ ID NO: 40369 - DNA, 421 bp, Zea Mays
tctttaataccaagtccaccatttttcttgtttgcacaaactctatcccatttaacaaggtgatatttctttttatctccaccaccttgccacagaaattttttccttttaatatccagttttctaatggtggtgctaggaaggagatacatcgacatatgataaatgggggaattggataaacaagcattaatcaaagtgatcctcccagcaatggaaagggagcttcccttccagctatccagtctcttgtcaaatttttcttccaaccttatccaatctgcaattctcagacgggaaggactaacagggaccccaagatacatcatggggaaagagcccaattggcaatcaaagagattcacataatgcatcttaatatcctcatccccattgatcacaaaaatttaacttttcataa

SEQ ID NO: 40370 - DNA, 321 bp, Zea Mays
caccccattatcccattaattaaggaacacagaacattagcaaaactgttaaatggcacgttgtggtccatttgttcacgtgctcaattgtgcactcaatcacaaaggtacatcatacatggaaattggcttcagacgtcaactgccactggccgtttgtccatggaggagccaaatctgcaggtcctttagttgtaataaatgctttgcatgttttgtttggatttcagttattgagaaataacctactgacttaacctgttactatgtagtgtgttgagcatgtggtggaattcgatacagggaaaagcgataaagatt

SEQ ID NO: 40371 - DNA, 542 bp, Zea Mays
ctagaatctccgttgattataccttgaactgggggctgagggtaaccctcttcttccttgggtgcgagcttgggtagctgtcttttggtgttggatcagctagggtggtggtggtagaagttgtagcctttcaggatggttatgtaggagttggtagttttgctggtactgttggtatgggtggtagatatcttgataaggatgatggaattgtggttggaaagtatgggttatggccttcagtagttgctctaggtggcccctcgttgtcctcttagcctcaagtctctctttggcttctttggtggtgcggcaatctctagttggatggtcaacgtcctcgccgtgaaaacgcagtaggacctatgttcacgcatggggtcgcggtcacgtcccctgcctctaggtgctctaccacctctactcagttgttgattgtggttgtagttgtgagggggtcctcaaattgttgctgttggttgatgttgtggacttgctggtttggaagtggaggcagctaacctcgggaccatggtttcgag

SEQ ID NO: 40372 - DNA, 346 bp, Zea Mays
gcgacgtcggcgttttagaggtaacagccgagtgataacgggccacgccggccgctttggaaacaatggtcgggtgaagtctggtaacgtcagcgtttttagaaataaccgctgagttaaaatgggccgcgtcgaccattttggaaataacggccgagtgatgatgtggcacgcctgcattttagaaataacggccgggtgatgacatggcatgccaacgttttggaagtggcgcctggcccgggaaaaccccatatgtactgcactgtcgcacgcctccgcgtttcgtgccctagtttctgcttttctgcatccaggctttctctgctctcctgcaatattgctt

SEQ ID NO: 40373 - DNA, 495 bp, Zea Mays
ggcccaatcaaccgaagtggacttgcattgtcctccccgtacacacatctcaccagctagccagagagcttcacccgaacgcagatggtttttctcgtcggtcccatcggcatcactcacggacacacatacagctgagctgcaccgcttaccgccggatcgaatgcgcgtgcacgtttggaagggtctcactctcaccgcctgggggatgattccattccattccgtcgccagcaggccaggcacccgccattatccggacaggtaggcggatacgtctcgacgcgaccgccaactaactgccgcaccgacctcacttgtatgtactgtttggcgtctggacacgagtcatgactcatgaggtggagctgtgggtactcggagattgttgagctggtttctgcctatgaataagcggtggcctgcaggctgcagtggtgcgcggacagtgcgtacgtcggccaggacaggcaaatatctctccggatacacccg

SEQ ID NO: 40374 - DNA, 360 bp, Zea Mays
ttcaatggtacagtgccacacaaatatcaacagattaagggtacctcgctgccggtgatccgcgcgtccggagttgcgccggttgccgggattcgtgccgggcacgctgtggatattcacggggaggtgaaagatctcgcggggaggcagatagggtcgcaggggaagcttatcaccgtgcctgtagccgttacgacgtggccggaccgtcagtgtcatcatggacactccggcgacctcaattatgccacgccgtgactcttcactacgcggtagtaaccgtggcacacttaggcttaccctctctgaaccactgcaccggtgaacgccacgattgcgccaccagtgacctcttccttc

SEQ ID NO: 40375 - DNA, 289 bp, Zea Mays
aactcgtagtgatgcaccgtcaaggatgctttggtgggactgcacctataggactattttgacggtgttgaattgttggggctgccctaacatgattgttttgatggcgttgcactattggggctgcaccaacaggactgctttgatggcgttgcactgtcggggctgcaccaacaggaccgttttgatggtgttgctcaccatcatcacagtgatgattgatgtgattttctgcacaatcttcatcttctacaaattgagcatcatgttgcgcctccacatcatgctc

SEQ ID NO: 40376 - DNA, 393 bp, Zea Mays
tcgacggaggacgaggtctcctactgcgaaggatcgatgccgtatggccttgtcatgatagcgtctcagagtttgctgataccgggctgactgaatcaccatattcaatcgttcttcttctagtatatcaacatcttctagtctagtagcctcagcttctgctatgttttcaaagattaacctcggtgccccaaacttgagatctgcgggtagcactgcctccgaaccatagaccatgaagaaaggagtgtttccatgtagagctcggctaggttgagttctcaggctccaaacgacgtacgacaactctctaatccactttcctgcgaacttttcattcttgtcgaaaactttctttctgagtgcttccaatatcatcccgttggctctttc

SEQ ID NO: 40377 - DNA, 486 bp, Zea Mays
aatcggcaaggacgaaaggtcataatattcaattaagacctaatgtgcctgtgtggacacctccacctccatatacgcccatgacatatcattatacatacataccaccaccatatatcccgaatcagatgtggggcacgccaccatatccattcgggataccacaataccccgcctaggggtacccaatcatctgtttttgacaggttgatgcctcccgtacaaggccgattgagagcccttcaatctggtcaacaagcataggcccaacaagattgccggaccactcggccctaaaggccgactaatctggcagggggcatatagctacagcctccaacaggacgacaaaaggaatcgtcatcaaaattggaacagaagatgtcgtcatacaagaaaataatgaatgggcgatgatttttggtgaatcgaccagcacaagcaaaaaagaagatacggttgtcaacaaaacagccgatccaaaat

SEQ ID NO: 40378 - DNA, 996 bp, Zea Mays
ggagaacccggaaccatggtgcccagcagtgacaacctcctccacaatagcagaagaaccatcagccactaaataggagaacccgacaccatgctgcccagcagtgacaacctcctccaagttggtcataaggaccacctccaaaggatcgtccgagcaaggcttaaccggcgagataacatcctgcgacaaacaatccacctgacaactaacccccaaatcctctgctagatccaacgccaaaactggagggtgaccaggcgcctccagctctgcaaccgaaacttcctggagagccagggcatcaactgatcccaaatccatagccataatcatctccaaatctggagggtccagctcctcaaccgaaacaaccgggagagccggggcatcaactgatcccacctccaccaaatcctgatcaacagcctgaacagacatgaggctgtaatccaccttaccagaacgactgcgctgacccagtcgcaaataaattggaacttgaacagaagtcgcagggcacccccactgctccacatgatgctcatgatcactatcttcgtcgataaagcctgaagggggtggcgaaggaggatccacactgaaagctaaaattccatcagaatgaataaccaccacagaaacagggaacgccaacgtgcaaggagcccagctcccatcctctccaaagacaatcggctctttagcaaggagatccaccaccaccggcagcagctcaggtgaccggcaccagactttcagtatgagaacagacatgtcttcctcctcgactgagccaggaaataatccatgaatcaaacagaaagcaccaagcacagcctcaacagcctcaatcccctagagatgtgcaggaattccacgtagctcaacgctaacgggcacgtggctgaccacttccaaaagtgaaagcctgacgagaccaccttcgaatatgcaacctgagcggagggacatgaagagattgccccccaacca

SEQ ID NO: 40379 - DNA, 435 bp, Zea Mays
gagacccgttgaggtagcaaaggagtttagaactgctctgaggaaaaataattgtctggggcaagcttccaaaatcaagagagtgtcgtcagcatattgaacaatcgggaaatcttgaccacagttctcagtgagaggcaactagagaagaccctgttgttcgccttattgattatactttgaagcagatctgccgctagaacgaataaaagaggcgaaagggggtctccttgtcttaccccacgcttgcaatgaaaagatttgcctggcacaccattaaggagaaccgaggacgtgccagaatggaggatatccctaatctagcccagccatttgggcccaaatcctctggaggacagcacctgaaggatcagatcatgttcaactgtgtcaaaggccttctcaaaatccagctttagcacgatgatttctttt

SEQ ID NO: 40380 - DNA, 340 bp, Zea Mays
tcgtcgttgattgagcatcgcggccaagtctgttgtgaccgggattcttcaacacgttccacctcgaggtatggatccaaatgctagcagcagcatctctcaactacttccgcgtgatgcgatggtgctgggtacgtagatgtgcttccgctctctgctgcatgccgttgtaggccatcctattgcctctcacgccctaaaaccgggtctccggctaaccacctagcttgcggacaaactctcgccgacggaggttcaccatgccgcatggacagcttcgccttgcctcctaaccttcggtaatgccccttggatcgattcgacaccttctctgcattgc

SEQ ID NO: 40381 - DNA, 421 bp, Zea Mays
aaatctcgccaccgaggagttcagtcccatctcaaattcgcgaatcaggtggtcggtccctttaaattgagtgccctccccgctccacccttctattgtgaacccaacccaccctcagcccactcctctcgtgtacgctagctcccagtcactggaattccccgagcacggtcaccggcaccgacgagttgagccccgccgtggccatcccttcttaggttcattcatatcactttggtccccgttttagtacatctctggtctctagaaactcatggtcttgaccaattgaacgctaacacagtatagtctgggaacatcatgttgctgcccgggaactttgccgtggacacccctcacgtcgaccgatactctgatgcttacttcgcccgaattcgcataagaaaattaatcttggtga

SEQ ID NO: 40382 - DNA, 767 bp, Zea Mays
cttgcttcgcgtctttctcgcctctggtctcttccgagttcgtcgcgcgaaagtttctgtggggggtggatctcctctccgcttcgcccgccttcgcttggtgaggagtggcctcttccgggtcgctctggtgtgtcggctccgatggattcgaagaatcgaaaccctaactgggatcgatggggtccgaaggaggggccgcaaggttctcagtcgtgggggaagaatcggaacctcagctggcgtttgaagtccggatccggaaaacctgatatcaaagaagacattcctgtctccactcccggtgatgccggtcagccaggtatcctcaaaaaccccccgcctcccattctaaaatccgagaatgatttggtgcgtagggttttttgccagaaatgtggtttggatggtcatcatgctagggaatgttttaagtctttgtggtgcgagatctgtcgcaaagaaacccacaacactgctcggtgtgttcttcccaaacagaataaacctagtatgccgattgttggtatggcggcggatgggttagggttttactcttctcatttcgccaaacccctttccaacaaacctaaacgcagttttattggcttggttaaaatcgttgagggtttgatcaccgctaaagatctggagaaggatttcggttttcactttccttggggccgcacttggaaagctactaagtgtcattctggcttcctcatgcaattcccctctcaagagagattggatgaaatgattaattt

SEQ ID NO: 40383 - DNA, 344 bp, Zea Mays
tctgactgaccatcagtctgaggatgaaaagcgacactaagggaaagcttggtgcccaatgcactgtgaagactctcctagaatttggatacaaatttggagtctcgatcagaaacaatggacttaggcaccccgtgaagcctgattacttccttcatatacaaggggaccaattctgaagctgaattggtggtcttcatgggaataaagtgcgcagacttagtcaagcgatccactaccacccaaatagcatccctgccccgaggaaaacgaggtaagcccaccacaaaatccatggtgatatgctcccacttccactccgaaatttccaatggcttcagcat

SEQ ID NO: 40384 - DNA, 277 bp, Zea Mays
ttactcttccatagacacttgtagatagagtgaacctgtgtctgtcccattaaatagatcggttttgacccaacccactttgttccgaaaccaaacacactactagagagtgcgagtaggcggcgacggcatgcgacgcccgcgccagcatcacaacagcgtgcaggaggaaggaggggctcgtggcagcgtgcggctggcggtttgcgtagtctgttgtgtgagaaggtagtgacggtctcgctgggtcgttgaaacgcaatcctacgacaggata

SEQ ID NO: 40385 - DNA, 314 bp, Zea Mays
gcacgggactcttcagccaacaatgtacaactccgtggtgttatatggcctggtcagacttctgagaaacctcgtggttgggtgttttcgcatcacgggatgcctatgaggatcggggtaccactccgaacgagctacaaagaatttgttatgcaagacgatggtcctgacggagtaaaggggttcgcagttgatgtcttcaaagctgcaataagtttgttgccctacccagtctcatgcaagtttgttttgttcggcgatggtttgaagaatcctagctacagtgaacttgttcagaaggtatctgaaaatgt

SEQ ID NO: 40386 - DNA, 601 bp, Zea Mays
cttgattccacaagaatcactatgtcctagtccgttcctcgaaattaccaaccacccgacaaaacaggcaggtccatcaattcgatttacaccgttgcaacaattcgatttttcagcacggagaagtccaagaaagttgagaaaacaataattgccagacagctaacaaaaaagaaatgggaatcacagtctaccacccacaaatggaccagaacttcagtctacagtgccagcctaatccgtgtggaaattataagatatagtgactgacattgcaggggggggatgctcagacggtacaggagcaagaacaagaacaggaaatgaatataataacctcgcacgcccagaaaccaacaatttggcttagtcggtcggccaatgctgatcagatgtacctgcaaccaatatgcaagcgcacgcacgaaacgcagagctcatcggaccaagatcccaccagtttcaggctttcagcaacgagacgttgcggcgcaagaccagcagaaccgaaaaaagggaaatacaacttccaaatctcgattcgaacacgacggcattccaatctcccccaatgcgcgaggacgagattccgggggtcgat

SEQ ID NO: 40387 - DNA, 297 bp, Zea Mays
ttacagagtagtagagatttggacagcagccccaagtcttcaacacaacggcatcaccggaccgcgatcaacggccaccgcccagctctctccaaagcttaccttacgcgccagtgccccgctctagcgacgcgatcaggaagtaaattggcagagccccgctcgagcgattatcgacgcgcttcccgacgagcgacagtagacacaaggcatcaaccgaaaacgaggaggcgacgtaggatcagtgggcggtgggctgggaagacagtgaggacgacagctacatccggtccggtg

SEQ ID NO: 40388 - DNA, 468 bp, Zea Mays
gaggacgagctggacttcgaggcagggagagatgtcatgtgcggacgcacatatgctaggagcaaacgcgcccgcgacgtgcgtcgcgcggctgagcgcgctgagagcgttgggcaggcgctgcatgtgttagattagtaagttgttttggaaatccctagaatcaaggagagttgttttggaaatccctagaatcaaggagaaccgtctccatgtcggttgggccattggctatatatacttgtaagcacttgacaatcaattaagcaagaattatatccttaatctctctctctctgttaagcctgcggttgagggggataacctcaccggagaggacagctacgagctgcgtagccgcggtccgactagtcgggggctcggcgcccttgatagcatttcatgtctttcattactctcaaaaaatttctgctagattatgatagaaataaattatctccatgtcaa

SEQ ID NO: 40389 - DNA, 289 bp, Zea Mays
aagaagcgccgtatggacagagccgcttgtgcagcactttccgcggcaacagcagctgagcaggcagagcgaggaggacagttgcagatctcttctgatcagatagcctacaaagttcgttgcctcgcatctcgacctcgctccactgctccctccacaccttctgccatagtgtcttatccacctctcacttcaccagctcctatcgctccagagccatccaccacttccgctatacccaccacctccaccactccagcttccactgttccccctcccgctcccattt

SEQ ID NO: 40390 - DNA, 369 bp, Zea Mays
gcaatactcccgctccaaaataacatcagatgcgagcgctctcctctcttttcctaccatctacactcatatggttctccaactaaacaaagaacggaacgactccactttatttatagagtgactcttttaataaacgtagaataaaataactctattttttaaaacgggaatggagccaacccattctaattactctaaccaaacaaacctttaaatcttaatttggacaactacccacaactttctaattcatatatcgtgtggtgagtctattttttttaaaaaaagaccgaaactcagaaggtgctcgcatctcatatgggaagatgacaagttgtgacgaacccatgcgtcactgagcatttc

SEQ ID NO: 40391 - DNA, 436 bp, Zea Mays
atgtaccgcagatgttatttcttaagttctcagggtctattctaaaaaaatttggacctaatcgtaataatcttacgccatcagtggacggcgggttcattttaatgaagtctgagggctcttttgaataagttcgcacccaaaggggtagcgggagttcgggccgcctgatcatcagcgcacggcatagattagaccgcatgacaacacgaaccagtatggcatggtgactgtaggatcctgattctacggttcagatttaaaatcccccgtgatcaccccggacccgtacgatcgcgatccaacgcctagaatcgcccaggctaaatcgtttcgtggatccaatctccatcgtatactctgggatctacggctaatacactatcaccacaagatctaatcccatctgtcctacgtagatccaacggccccgcgc

SEQ ID NO: 40392 - DNA, 775 bp, Zea Mays
aaagaatagcagagggacagcacaacgagcaagcaacctagcagaggctgcagagtgagggatgggggaggagagagaggaagatggagagggaaaggcacacaccttcatcggaggagctcatcacgaatattggcagccacttgaactggcagagggcactggctacaccgctcactagagaggaggatgatgcatgggaaacagaacagcacacggaggaggaatcatgagcgggagtgggaaatcgtgcatgggaagggaggagtcgtgtgcgggagaaattacagccatcgtttggatttacctgcgtgtctcccttgctttgtgtttctgtggtgctcttgtactcccatacgtaggcccagttaaacaggcttcaaaaaacagagcaaccaatctggttgtccctgttctagtcggacgactagctttctgaattctgatcgagctaatcgtcttggcacctccagtccagtcgattaggatggttaatggtgaacaccactgatggtgataataggtgctttacctatgtagggtgtattagagaaaacaagtgagctaatcctaaggtccgtagtgtcattcttccaagataagagtatacatgtcccttatgagaagcataattcaagtaatgattgacatttgacaattcatattgccatagtgcttcatgtgtaatataaggaagatctcatggaggatactctgatttttgcgggaaacttgattatttgtgttgatatgcaatcctgaacaatctacaata

SEQ ID NO: 40393 - DNA, 466 bp, Zea Mays
gtcggccgcgttacattgaaccggccgtggtgcctgactttggcgcagggtcctcttcaacagccaaagcaatacaaactgcttcaactgtacagggcgctgaagaaccaaatgtaatgtcgaagacgcatatagttgagccagtcaaagataaggctgaaaaggctgaagagccgaagattgaggagaaaatgccaaagattctgagccctccgatagaggcaaatctgctgaagatgcaaaagacttatgctgcaactcctaagaggagaaggatgcccaacatactggatgcagtgctggagaccacaatggcattgagccctgctcctgcaaagaaagtcgctccaactgaaaccaagtcgcaggccgaaatcgaaactaagcaagcagaagccgaagttgcgcaagttcaagctaaagccaaagctgggcctttagtgcccaccgagacagagcctatcgc

SEQ ID NO: 40394 - DNA, 302 bp, Zea Mays
ccgaggcccatatacgacttgctaaacagagaacgctaatcaagggccgctaaacaaggcaacagtgccatgcagccctagctagatggctagcaacggacagcgacgcgactcgcgaggctgtgtgcaagtgtacagcagtggctggcggctagcactgttcggatgatcggatcatcgtcacggatcccttcagatactctgcggccgaagtgcggactgccgtgccgcggtgggctatttttctcatgaaacaggagtcgtagataagtactgtacgcacgtggtagtacgagttcctc

SEQ ID NO: 40395 - DNA, 402 bp, Zea Mays
ctcgaacccacgaccacaaggttaagaacccgtccaatttaagttaaaggaaactgtcgaaacaccaatgtgccggccccgtgatctcgccgaaacgcccagccgttgcggcgtgatttgtgaaaccacttaccgatctctccctctcgtgagctgtgacccgagtggctgagccaggagcaatgctacagcttcacgtattcaccttttggctgttcctaagctcctagccttgtagggtggaagttgcaggattcgtgacccttcgtgacatttcaatttttattactacattagaatttagaaaacaatctatatgcacacatatcacatatgcaggagtacatacatgggttcatgagccctgtctagtatgaccccctggccatcacccctctggcc

SEQ ID NO: 40396 - DNA, 669 bp, Zea Mays
cgaggctcctgtattccgaggggtcagcaaccagagcgccctctgtggcggacaacttggccctggcgtccacaggagtggcagtagggtggcactcggacatgccagcgcgctggagaagatcgacggcgtactttcgctgtgaaaggaacagcccgctgctgtcccgagtcaccgtgatgtcgaggaagtggtgcagatcaccgaggtcggtcatggcgaactccgagtggaggcgtgcgatgacatgctggaatagggctgaagacgacgaggtgacaatgatgtcgtcgacgtagagaaggtaggccagctcgtcgccagccttgtagataaacaaggaggcgtctgtcttggaggcggtgaagccgatgttgcagatgaacgtggagaagcgttggttccaggctcgcggagcctgtttgagtccatataaggacttctgcagcaaacaaatgtggtcaggggcagcagggtcgacgaagacggatggctgctggcagtagacggtctcctcgaggtggccgtgaagaaaggcattcttcacatcgagctggcggatgggccaatcccgggacgcgacgatgctaaggacggtgcggatcgtggccggcttgacgaccgggttgaacgtctcgtcgtagtcgacgccggcctgctgggagaagc

SEQ ID NO: 40397 - DNA, 273 bp, Zea Mays
agactatgcacaaagtgcaataaaaaacaagcacttgacaagaacctcagtagatggaatgaatagtagctatgaatccgaataggacaatttgcgatggctaaacactaagggagacccgatctatgatcagaagcgagaagcgtaggcgctggtgcacacatatctaaagtggagcaccttgatccatcgctaacctgatacacatcatgaataaagtaaattattaaccaaatcaaaaatcagtcgaagcaaaatgctagaataggtatg

SEQ ID NO: 40398 - DNA, 305 bp, Zea Mays
cccagacatgcattcagctgagctgattctttcttccaatcttctaaaaagttggttccctttatcccgaaaggttttcggctgagggcgtctgctaccacgttggcctttccggggtggtaatggatctcaaggtcataatctttgatcagttccagccatcttctctgacggaggttgagatctggctgagtgcagatatacttcagactcttgtgatcggtgaagatgtggcatttgttcccaattaggtagtgcctccatattttcagggcatgcactatggatgccaattccaaatcgtg

SEQ ID NO: 40399 - DNA, 294 bp, Zea Mays
gaggcagggttgccacctatcaactcaaccggcaggtgccaataaaactgggttgtattatatttagaaccaccctcctgattatgggattggagagtgtggatatcattctaggaacggattggttatcccgacatcatgttttgattgatgtcacagcaagagccattgaaatccactcgccaatttgcagagaaatcaccctgtacctacctgaccaaggttgtacccattcttgtgcacttaccgaggtagggtcacccgtagagagaattccagtggtctgtgagtacc

SEQ ID NO: 40400 - DNA, 362 bp, Zea Mays
gggtatcttgcgatctaagtcgtccatccatcaatctgcggcttggataagatataccataactcgaaccgatatctagtgatagccacccgatctatgatcaacggaccacagcgacccacaccattatataaccgaagcccttagatcagcgatcgatggccacgattgaatacactaaagcgttttcctgtgatctaatctggatcgctcatcgggagatcaacgacccccgcggcttttcccttcctaatcacccaggccacggcggagcgagcgccccacggtggagcattgccgctgcacacccaatcctggcctcctagtaccaatctcctacggaattcagtgctatgcaaagg

SEQ ID NO: 40401 - DNA, 275 bp, Zea Mays
gggtgaactcttctatcgagagtgatgccgtgaaatggcgcgaccccagcctagacctgggaccggccgatccccataaggtccaaggtttctgcatagatgatgttgaggatgttgcctccatacatgtgtaccttgctaagtctagtgttgctgatgattggggacaagcgggtacctcctaggatttgggacgtagtccgggtgatcgtctcggtcgaaggtgatgacgcggtcagaccagtctagatagacaagcgccgctatctcaatgg

SEQ ID NO: 40402 - DNA, 480 bp, Zea Mays
tgtctctctccacatgcggttggtatagaaataaggagcagtgtaaatataaccccacatcctcttgcttctatattatatatatagggggcacagcaccacgattcgtctcagtttcataaacccgagtgacatagaagaaagatgagttggtgcgaggaatggtcacatggactacattaccaattttgtagacaattggggaattggagacaccaggagcacaaaatcaagtagcagttgtgtgtaatgtacagcaaagcgagacaaattgtctacactcaatagtagattaattgggacgttgttatgctttgcactatggtattgtcatctgattagtaaaggaagattgggttcctagtagccattgcaaaagaaacaatatgtacattcaggtgttagaaaatcaagggatacacaacatgtgcaatggtaagttctttcaagaacaaagctactgactagtaactaattgta

SEQ ID NO: 40403 - DNA, 350 bp, Zea Mays
ggcatttgttcccgatcagataatgcctccatatttttagggcgtgcactatggctgccaattccagatcgtgggtagggtagttctgttcgtgcggcttgagtaagcgggatgcataagcaatgactttctcattctgcattaagacacaccctaagccttgcttggaagcatcacagaagatgacaaaatcctggtgtatgtctggcagagtcagaactggtgcggttgtaagcttttccttgatgatttggaaactctcctcaaacttgggggtccacacaaacttattgtcctttttgagaagttcggtcatgggctttgctatgctggagaatcccttgataaag

SEQ ID NO: 40404 - DNA, 277 bp, Zea Mays
gcctcaggattcgtcctgctgggtaaagctctgtcttgtgatcccatcactcattcatcagttgtgttgtgtgccgatgcccttggtcagtacgtgtactactttagtcgtactagtgtcatagtgtgtaattagtgccacgtacgactgaatgaaggaaggaataggcaaagaggtactgctatggtgactgatggtgatgcacataaataaatgtatgctaattgctgtcagcggcatcgagaggacgacaactacaccagtagtcgtacgccga

SEQ ID NO: 40405 - DNA, 406 bp, Zea Mays
tgaggatattccgggtgagagtgctgggcataggcggcgaagggcggtggcgaaacggagggtgagtgagttgtcgagaagtgataggcgtcatcatggtgaggtggagggcggtcgtcttcgtgtgaacgggactgccaaacgggaatagttgtccttgccggctggggcgagtgtaggtgagggtgagctgcgaaatctttttgagggtgaggaattgaggataatgctattcaactacagggagatgggtatcatcccgaaggttgagccattgtaatgtgtgatgccctcgctgtatgtatgtaactatgatttgtatgatgaggctgcgtgccttcgttgatcctgccgcgcccgtaggcggcttgtgttcgggtgcttttggggaagtcttcgtttttgc

SEQ ID NO: 40406 - DNA, 491 bp, Zea Mays
gtagaagacgtggtggcagcaaaaacagcagctgtggcaggtgacgaagacgaagaagatgtggcgtgcggaaaccgaagggtgtagagggggccggtgctgtcacatcggaggagggggcgccgagttgccgagtccttcacagtgagaccagaagagtcaaactcgacagaacaagaattatcagctgtaaaacgacaaatagaaagaagattgtggacaaaagaaggagcgacaagaacatcaggaatgcgaaaagagccgggaggtccggcggcacccacagatgtgacaggaaggcacgagccattcaccaccatgatggacgaagggagagaggaaggagggcgaacagaggtgagtataccagggtcgggagtggtgtggtaggtagcaccggtgtccgcgatccactcgggacccatcggcggagtcagagtgggagtctggaaggcagccagggcggccgcgtcccaaccaaccagcccgga

SEQ ID NO: 40407 - DNA, 377 bp, Zea Mays
ctcattttgtgacaacatagtgtgtggtgggacaaccctggaaagagaccccgaggccatgttgtagctatgaatttaggccctgttttaatcccacagataaactttaatagctttttagctatttttagctatttggtgatctaaacaggagagttaatggtggtgtgataaaatttaacacctattatctcataagctgctcaaggggtgctaaaaggagctaaacgtgggtcagagaaccctattttccaccctatatcctccaacctcattctctctccgcattagggccatggttgtctttttattacaatcctggaaggagaccctagaccatgttgtagctatcaatttagtgcagtgtgtttatcttg

SEQ ID NO: 40408 - DNA, 978 bp, Zea Mays
gttgggtgcctgatgcgtttagtaaaaacccatcggtgtcactgatgttaagttgaggtttatttgcgcgtggaaagtaataatatgtctaatacttagagctcttagtcgttagtagaaattgtttgggcttatgtagagaggtgatgacatgccgtaagtagtcatcacttcctctataattataagtcgagtctatacgcgttaggcgttccttaaattgtgatttgcaaataagtgtattttgtgtagtgtggatcgattgtgaatgcatgtgtcgcaagaaaagaattagtgcgcatataggcgatgaatgggtgtgatgagatgatgacatgctttcatagtcatcatgtcatctgttggtgacctaactgaaggtcgtagagaaaggtcgattgcctgtgtgttattattgtcaccttgtggttctgtatgaattgcaatgtgaagtagtaggctccgtatgtgatgctagatgtctaggtagacgttcgagaattgtggtgctcggaccgtcgtgatgaaggttaagtcggttgatgccgcttaagtagttaaaatgattaatagaataagcatggggttaaaactagaaactagtgttctcgcacccgtttgggatgttgtagcccaatttcgcctggttatggtcgcgggtaaaaatttgtagtgctcatgtggtgtctaagttaaaatgcgaactagtgggtgaaaagcgattcgatataagtatatgccggatttgatgattgtggtgaatgcgtttgttaactgaatgtggtaattttagtgcactaaatgatttggataaaatttgtaagtctacttgtagtcctcgtttaattaattcaactctatcaattgtcaaagcgttagaacaattcgagcatctagaacgccgcaattcttgaattatatagaagctaaaatgtattgattgctgttttgggctgcacgcactgttttcggtgtgct

SEQ ID NO: 40409 - DNA, 401 bp, Zea Mays
aagactcgcaggatggaaaggaaggcttctctcaaaggcaggtagagagacattagttaaatctgtgttatccgcgcaacctatttatcatctgacgatcttcccggctcaaaaatggctattgaaaaaaattgataagataagaagaagcttcctctggaaaggaagtaatccagaatcatgcaacgggggtcactgtctgatcaactggtctactacttgcttgccaaagtgcaaagggggattgggcattctagacctgaatcgttttgcgagagctctaagactaagatggctgtggtttcgatggaaggccaaagacaaagcatgggtgaatttgcagctgccatgcgatgaattagatgaagatcttttcaacgcttccacttgtgtgaaggtgg

SEQ ID NO: 40410 - DNA, 531 bp, Zea Mays
gctagagcataacatcgataggttacttagacttgtcacctttgaacactcaaaacttagaatggtgatataactcatttactaactttctaaaatatttctgtaggctaacttgtataatactttgacttactaactttggatataaaaaatttaggataaggatgaaagcaatgcaattaaccatttaatccaacaagacctagagcaagtatcaataaagcaatacaccgtactcaaacaacaaggcatttcatcaaatgtttacttacatacgcataagaacataggtaaagctaattccaagtaacaagtatcatgatcacatctacttgaataacccactccccaaacaaaaacccaagcaatggtatgagaaggcctagagatccacaaatccataatgccaccttctgcttacaatctgtttgaaaaagataacacgtagataacatggacatgataaagtcaaaatgacaaaagacaaatgaatcataagtaaatatccaccctccatgattaacttaagtg

SEQ ID NO: 40411 - DNA, 401 bp, Zea Mays
ctccttccggtagttcccaagtcttcttctctcctctaatagagaccgggtgaccttcaagaatctagggatcttcatctctgacagattgaactgggttggatgaagcgggctcttggatccgcagggctctacgttggttatgggtgaccaagtaggcctccatcaacttttggacgtgctcatccttagcttgcttcagggcttcaacagcaatggcttcacgactttctaaggcagttgcacgggcttgagttgaggtgagatcaacatggagctgacggttgcgcttctttgcatcttctactcgggcaatcatctgacggtggtgctgagccaagacatcatactgtgcatcaagggtgagcaggtatgcagtgaggtacacgactgtggggtca

SEQ ID NO: 40412 - DNA, 334 bp, Zea Mays
atgcagtgcaagtgctctagctgttgttgctgaatcataggagtgtggattcgtggctaagaaaacagatgcgctgctgatgtatgttgtatggactatggtgtggatggcagtagtgcgcgggtagtgcctgcagccaaaaaaatgctcgatctatctagctgctttgctttcgttctagctagtggatggatggagatggactctgatcggtggagtgctgtggagggatgggccgcagagcgtgctgcgttacgacggcgaagatgagtttatttgctgtgtcggacgtgtcggagctcagctccatgcagccctgtgggccgacttgttc

SEQ ID NO: 40413 - DNA, 525 bp, Zea Mays
gacgccatggtcccgatcatactcctctcggcgccttatctcgttttcgtgtcgtcggtcgtgcgaagcgttgatggagctccgcgcatctcgccgactattgatggcgtgtcacaggtcactcgggggatgagcaaggggtagaagatgattagctacccgagtaagcagcggccgatagccttcagcatccgaagtccgtgggaggccatcagctatctgagccagcactcctccgactttgcttggcgtgttaattgcacgagcaaagtcagggttcaggtttcgagcaaagagagggttctctcggcataaccttacaccatgttcagcttgttcttgatctcggtcttgatcttgtcggcggtcacgtcggcgagaattcctcctttatctgaatactcgctcgacgggagtttctcccactcccgagacatcatcccgagatacgagctgcgctgggtcccgctccccagcttcgtgatgtcgccgaatattccggcgcctgttccttcgtcgccgagc

SEQ ID NO: 40414 - DNA, 397 bp, Zea Mays
gcggtggttcacggtgtgcggaaaaccgattttgggagagaaagaaattggagctctctggtggcaaattggaggcaggatcgggtattttggcttcgtgatgacccaatggagctgatggcatgattaatttatagggcccgagggtggtggctcttgaatttggaatggcgcgctggcggccggagagagaggagagcactggcgcaagagatgcgtggctttcaccgtggccagaccaccagcgatgaccggacatgctaaggcaagtcactgcgacgtggtattgcgcttaggcacgtggcacccgatcggtaggcggccaactccggcgtggttatctggaccggtcgtaaggcacgggggtatggcggctagggcgaaacagtgtctcgag

SEQ ID NO: 40415 - DNA, 484 bp, Zea Mays
agcaactagcccctttcccattggtactcggtaccctctgcgtgtagcaccagtctccatgggggattcaacgcttgggtgggtaatggctattctccggtggcgcgccgctgttgaccgtgcgcgtaccgccgctctgttggtcgtcgggaggaagaaacaccggagccgttggatcaagtcgtatgactcggattaggcgcagtataccaattcgttcatccgccctggaccgttggatcccagatggagagtagggatttaatcgcagccatattaaatctggtgcgtcgatcttagatccgagggcttgcgttccgtaccgattcatttaaagacatatttaatctgcaccgtgcgcctctgatcgtgcggctctaatcgctccatacccgttcggctgtgcaaatattcaaaagaaccccttatctctattgatataaacccgcggcccactgctgtgtataagtaattccacataggc

SEQ ID NO: 40416 - DNA, 282 bp, Zea Mays
tgataactatgtgctcctaagtaatagtgaaccgactgaacttatctccctattatcctgccaacttatcctcgttcagttccgacgtctgggggcgctgcacgggaaaatcggatcaaagttgtggataacgtttaaatccactcgagccgcctgggctcgagttgatccaatcttgcgtcgatccattctgccagtgattcctcccctggcccacgaaggggtggccttgcggaataatgggcctggagtctttcgcgaggccttccaaccttctagtgg

SEQ ID NO: 40417 - DNA, 341 bp, Zea Mays
cacaacatggaatttaagaattgcaaggatatacagaatcctggtaaagggtcatattggcattacagaatgacctcaatttcagcactctcactcatttatgccatgtctctaccatgtcatttgacgtgcaaaacagtatgcacgaatatctggtcccaaacatagaaaattatagttaatttaggaatcacaaagcatactgataaagagttggactgtcatactaagctcccacagcaggtgaacataaaaaacttaaaccgagatatctctgtatttccatcatcactgtaaactttggctgacaatagagaaaataccaatatactttctaactg

SEQ ID NO: 40418 - DNA, 325 bp, Zea Mays
agggacaacagtcgccaactcaggcaactagacgcattcatactcttaggctctagatagccaactataataggacttagccattctcttgaatccaattcacaaaaggagaatgtaaggtgttatgtatgcaacagtggcccaaacctttgagaaacccctagttccctagcagtgttgggagggttgttgttgccatcttccaacaatcgggccatgcctttatcgtgaaaggtattagagtactccaagaaccccttgtcaatcctctatggaggtatcatccttttttcctcgactatcaaacactgacatcgtcgatcgt

SEQ ID NO: 40419 - DNA, 613 bp, Zea Mays
actctgtacggtgctctaaaccgatttggggaaagtctcaaattggggctctctggtggataatcggaggcacgagtgggtgtgtttggtgcttgactacatagaggagccgatggcacgctcaatttataggattcaagggcggtggcccatgaattggagatggtgcggtggcggccggagagggaagaagttactggcgcaagcaattcgtggatgttaccgtggcaagaccaccggcgacgaatagacatgctaaggcgatgtactgcgacgtgtttaaagggtcatagcgtgtcgcgatcacggcggacaacgcatacctcgacgacggtcgcttaaccacgtcgccggtgcaagtggacgagtgacagtgcggccacaatgtcctgagctcatccgcaatgagatctttttaccgttgagcgtaatccatacatccgaggcacgaatcgcgacggctggcgcgaatccgggcgcacggctcaccggcggtgaggggagctgcacctaggatctgtgtaagttactgtaccatcagtaagttatttagatcacctgatagagcagattgcaatgcccaaacatcaaaattccatgtaacaacttgcta

SEQ ID NO: 40420 - DNA, 334 bp, Zea Mays
cgacgagcttggcgggcgcaaccttgtgtgtgacaacgcacagcttctcacttacgtgaaagacacgtatcgtctccacggaggtccccgtgtgcaccttatctcactaccgctatcccttttgtttatccgaatccgccattgattcaactcttcactacatgccgcgccttccgtcactccgctaccgcatgtccgacgtgctagctagtgtaaaatttgggaatcgattgatttcataaatctggactgcgcatgctatccgaggaaaacacacgcaaagtcgataaccgaggttggtttcatcctacacgctatttatggcagagaaatc

SEQ ID NO: 40421 - DNA, 322 bp, Zea Mays
aacgggcctaccgagcgacccaacaagatgacaaccggctcttagaaagagtcggcctggtactatcaagccacgtcgacacgacggaacattacagagctatgaccggaccatgaaagcggtacagaggggtctctgtcaaacacaacaacggatacatatccccgctgactaatggacccagacaatcgtggccgtagaaacctcaacatcgggggtctttacagtgacccatacactggaggggttgggcaatatgtcgtactaggcatgcgtctacacttgatgaaatatgacactaggagatgacagaagatgaagt

SEQ ID NO: 40422 - DNA, 273 bp, Zea Mays
gtttccgtggccgcgggttttgcgcgcgtggactcctcggacgaagaacaccactgggctcgccgtgttcgtcgacggtgctttgcgtgtgccagtgatccgtgccacgccgtggtcgagcttgcctccgtcacaaccaccagtaagtcatatccagtagtcttcgccttaacctcttggacgtgtagcactaattagattagactattgcggctttgggtgcttggcggctattgccggccatggcgccgccactctgcttggagcgccgcc

SEQ ID NO: 40423 - DNA, 282 bp, Zea Mays
agccggaccgccgtggctataaatagcaccatgggtcacgacgaggtattcacatctccaccagtgagttcagttgaagcccaaattcatggaatcctctccacctctcccaaaattggtagtgcacggtgaaaccgtagtcctttacggccgtgtagccttaatctcacctcccaattccacccagaaccgtcgcggcaccattttcccctttttctgtcaccggcgagcacaaattcaccgtgctccatggccggaccactctagtatggctctatatgt

SEQ ID NO: 40424 - DNA, 333 bp, Zea Mays
ctaggccctcactctcagtaggtgaggtccagggttcgttaggtgattggcccaaaaagtgccaacatagaagaatgtgttttttcacaagaacacaaaactagtgagatctttgagctcgtgaggagatagacaaactcacttcataggagtgcgccttaggtgtcctttctcaaattgatccaaccaagacttcccccgaaactcagattcaaatggtttttcgaaaagccaaagaacaagagaccaggagatggaagaatagtgcgaaaacacacgagcgagacaaaaccttgagccactatgaaactaggagattaaggcctccatttc

SEQ ID NO: 40425 - DNA, 920 bp, Zea Mays
caatatcgtcgaagaatctcgaaagtaagatctgcatcttcattccatttacctgataacccacttttggcctgtaccctgttgttataattttttaaagatggtaacattgtaagattatttaattatatgaaagattatgtcactgcatcaaatacaaagggtaaaagacttgacaagtgaccattggcaaatctttggaagaagagaaaaaaaaaatcaatcatggtccttggtcttgggtgaagaatgaataatatttggcccagttattttgtttttccttctctaggccaaacaatattaactattcagcagtatgttgtattatgaggttccttactttcctttctcatgtaaaactttccttactttccttttattaaagctactaggaatcattatatgttgtatggctgaagtaaaacctaacacatctcccaaattggacgagtaactgaattgcaagttggaattatcatacatatcattctttaatactttcgtcatagcaagctaatgacatccctgtcgtttattgttgtgatatattatacgtttcatgcaattacgccctccaactatttttgaagagacttgtggttctttgtcggctttttctttgtgcaggctttgggtgcactgctctgctttatatgtcataacaatctcagcctgcattcttcttttccacgtatgatccgtacgcgttgctcctgtactaatggtttttaccttagagttcctgtgttataaacgtcagtgcagttgattttaagaaagtcatcacgtcgttacaggaatacaagtatatttcgaggaagagactagcacatgttactggatatcctccaaatcctgggctttttaccgtgcttgtccgttcgattccgaggtttgacaatgagctgcttgatgac

SEQ ID NO: 40426 - DNA, 466 bp, Zea Mays
ggaaaagcagggaaaggatcgttggccataggatcgtaaacgaatggctctgattaattggtagctacccccccttcatgtttgaatcccagccgttgacgtgagatcggatggattcgtgccgatctcggtcaaataaaatccagactgttgaagttagatccaatggccctagttgcataccgattcattttatgggagatctaatcctagcccttgggttctaatccaacggctcaaaatgcacgataccccttcggccctggaaccttgcataagagcccctgcgtttagtcgaattagaacccgccgtctagtggggagttttctgagtctaggaatttattcgcgcagagactcttgagctttctgagaattgatgcccagtccagaacctgtttaaaatgaataaattaattagtaaatgtatttttaatgcaaaaacaattgctagaacttggaaaat

SEQ ID NO: 40427 - DNA, 327 bp, Zea Mays
catggagacacttcttaagttgagacacatgaaatacattatgcacatgagatagagtagcaggtagctcgagttggtatgccatctccccaactcgcctaaagatcatgaatggtccaataaagcgaggggacaatttgcccttaactttgaatctcctcattccacgaagtggtgacaccttgaggtacacataatctccttcctcaaattccagtggtctccttctattatcagcataactcttttgcctggtttgagctaccctcaaattctcccaaattatacggacttgttcttctgcctcttgaatcagctcagacccaa

SEQ ID NO: 40428 - DNA, 274 bp, Zea Mays
gtcagacatctgctcaaagagaatcaaaataaatttaatatttctaaccgcttttaaactatcttgaatcataaacacaatatcataagcatattggagacatgcataaccttcatcaatgatatggggtgctaaaccaaccaacaaaccagccccttgtgcattcttaatcaaacagactagaccatctgtagctatgttaaacagaaggggagagaaaggatcttcttgtctaacccctatatgcgtggagaaatatggaccaatcatatca

SEQ ID NO: 40429 - DNA, 409 bp, Zea Mays
acagaggcgaagacaggcttggtgctgatggagaaacagaaatccctaaagtcttggttgtcaaactgtttgccgttgtcgactgtgtgttcggatgggactccgaatcggcagacaatgttttgccagaagaacttttgggcggtcttcgacgttattgtggatactgctctggcctcgatccacttggtgaagtactcgacggcaacaaaggtgaatttgaggttctcttgagccgtaggcagtggtccgacaatatccagcccccagcgttgaagtggccatgtgtgggcgattagcttggtgaattgcgaagggttgctcgagcgaggggaaaacttttggcatgcttcgcaagacctcatgactcgattcacagtacagattatcgcgggccagtaaaatcctt

SEQ ID NO: 40430 - DNA, 458 bp, Zea Mays
cctcgataaccactatgacgacctttcctctcactgcacccacctaaactcccgggtggaaagcttagagcaacaggtcaaggaacttaagaaggagaaggcgtctctccaaaaaagtctcgaaatagcagaaggtgaagaggccaacactcgtgaagcctaccgaaccctaaagatggattacgacaagaagttaaagaagctcgcccccactaagaagatccggaagaggaccaagagccaaggatgccagactaagtggaaaaaggaagccccaccagcactgcctccctccaggatagagaacttgtccgacgtcaaggatatgtccctagctagccttaacgaccttctcaaggaatttggggacactttagaaagggagttcggaagcaccttagaaagcactcgcgtgtagtgtgacttgtggtaactgtatgcttctaatgaacttgtgt

SEQ ID NO: 40431 - DNA, 466 bp, Zea Mays
tggatatgcaggtcggagtgtgctgcctccgtgccgtgcacgcgttcagagtgggaggagagagagaaagaggtaccaccgccgccgccattcttcgcattcaagggtcgattggcgttcgcggtgcatccggggtgttcgggtgatggcatggatcatgcgcgtgggatggtggatcgtatggcttcctgggttggcatgaattgcttgtcggagcgtttcttcaccattgattcgccgctgcgtcgtggactgcatcacctgtgcgacaaccagtggtgaggacccttgcacccaactcgtcttcatcttctccacgtgtagcactcttcgaattagagcttggcgtggtgtgctggaatttgtggtggtacagccatggcgccaccgtgcagctgcccgccgtcggtcgtctggacggttggtggcgggttgaagtgtggggactgttggatggcgtttgatc

SEQ ID NO: 40432 - DNA, 350 bp, Zea Mays
aggcaacaccttaggggttgggcaaaaaattccagcggagcgtacaaaaaagtgaagaaagatattctgaataaactagatttcttggataaaaaggcagagggggttggtctggcagttgatgaaattgatttgaaacaatttcttcagaataagttagcccatatgcttagagaggaagaaatcaagtggtatcaaagagcgaaaactaaggaacttcttcaaggtgattctaatactaagtatttccaccttgttgctagtgggaaacataggaagtctaggatttaccaattgcgggatggagacaatgtcatacatggggaagaagctttgaggaagcatataac

SEQ ID NO: 40433 - DNA, 689 bp, Zea Mays
cgtgtcatcaagagagagcggctctgtttttgtggtcatggcggtcacaaaagcatcataatcagcttcaagacctgcaaagagataagagagaatctcgtcgttggagataggacaatcagcagccgccatctgtgcagcaatgtccttgatcttggcaaagtaatctgcagctgagaggtcgcgtttcttcacgctggcgagctccacccgaagctgcacgacgcgagctcgagttgagaaggagaactgacgcgtcagcgagtcccaaacctccttggatgttgtggccgtcgtgagatcacaaagaatctcctctgtcatcgtggagagcagaccactgaggatctgttgatctaggtcacaccagctttcatacgccgggtttggcatcatcgtggcgccggggtaacagaagaaggcacctccttggttggagcaaccatagtgccatcgaggtagcccattaatttggagctacggaggaacggaaggagttgcgcacgccatataagaaaatttttcttggtgaggcgaagtggcgaacagtgacgacatggtgtagaggaatgatggagatcgttgccatggtggtgggagaggagttgacggatgtcatggtggtggtgggaaaggatcagatggaggaggaggtgctggtttaaaagaaccttgcctctggtaccatg

SEQ ID NO: 40434 - DNA, 436 bp, Zea Mays
cctacgttggaccacatgagaggggtctggcactttcatccatatagtgcttcgaacagtgacatcttgatactggcctgatggctgttgttatacgagaactctgcataaggcaaactagattcccagtttctatcgaatgttaacacacaggctcttaataaatcttcgaggaccttgttgaccctttctgtctgaccatctgtatgaggatgataggcggtgctgaagtctagcttggtgcccatagctttctgaaggctcgtccaaaatttggaggtgaactgggttcccctgtctgacactatcttccttaggatgccatggagtctgactatctctttaagataaatccgtgcaagggtggctcctccaaaggtagtttttactgggatgaagtgggctaccttggtaagacggtctattattacccaga

SEQ ID NO: 40435 - DNA, 342 bp, Zea Mays
tgttgtctggccagccagatcactggtttgtttatttttcttgattgcaaatcgtcgtgtgtaagaaccacgtccagaggcattaacctatttcatagtactacgtcccagtattcttccatcccatagtgatttgatttatatatggtgttttcttctctgctgttctactatcctggatgtgtatatgcactctaagagcaactccgctagttgttctctaaaagcactccgagagagtaaccatttagcagtcccctaaacaaaaatgttgactgcagcatgtaggtaataaaggtggttgttgacatttatgacctatttgtttttatgtggataaat

SEQ ID NO: 40436 - DNA, 439 bp, Zea Mays
ataagtcctcgcaaacttcttaccgagctatacgaggataggccccgtgaacattgagtgactcgccacgccacaacctccgatagcgtgcttgccacgaccgtcgccactataaatttctggcctctagctctccgcgccagcgcagcgaaaatggttaccaccactagcggcagggctcgaatcccccgaggtggcgggctcttcagatatctgtgtcgtcagtctggtgttggcgtctgactgtttgccatgacacgtcgaggttagacgaggacacggagatatgctggtcggtggctgtggccatgggctccctcgctgtagcaccggcgacgaggaggctgtactcgagcgacgtggcgcgggtgtcgttgcacgtagggaggcgctatccgctctacatcacggcccattgttccatggtagttaaggactc

SEQ ID NO: 40437 - DNA, 324 bp, Zea Mays
aaggtctctgagccatccgatcgcgcgtgggcggaccagatcatagcgcatgtttatgaaccagtatcgaaccgtggtcgcccgatcgcgatccaacggttcaaagccaatcccgcgaaggggacacacgatctaatctgaatcgcctatcgaggaatcgacggctatctacgcttctcccttatttccccatactcccaccagcgccagaccgacggcgtaaggctgaggcacggcggcgccatagatgacggggtctaggcctgcgacgggatactactcctaacccaacctggcgcaaaacagagagaagagtgtggcggg

SEQ ID NO: 40438 - DNA, 310 bp, Zea Mays
atgagctccgtaggatcatcacgcacccagccaccgagtattgctctcaatcgatcatcagtgagctccaattttgaacttcccccaattcggttttcgccaccgcagacaccctcatcgcggccagtctactccaggttagttcaagcttctcagttgtttgttctagcatccttaggttctcctcaagctcctcgacccctcgtattgaactagaccgtcatggatcgccgggaacacgttgttcctctgattgtctccgctgtcaccgtggccagagcaagttaggtaaccattagtgaaattactt

SEQ ID NO: 40439 - DNA, 336 bp, Zea Mays
gaggccttgacctgtctagcaacaggttgtctggaactatccccgcacacatcgggaaactgacagagctgtttggcttgggcctggccaacaacgagctccatggccccataccagacagcatcgggaacctgagcaacctacaggtgttagagctatcaaacaaccacctcacctcagtgatacccccggggctatggggtctcgagaacattgtgggtcttgacctgtctcgcaacgccctgcgtggctcgttcccgccggaaggtactgaaattctgaaggcgataacgtttatggacctttcttccaaccaactccacggcaaaataccac

SEQ ID NO: 40440 - DNA, 622 bp, Zea Mays
gtagggtatagtggtcaccctaagtcgagtaagcatgcagattgataataaatagttcgagtgcccttgagaatgaattctttttattgatgatgtattttccgattacagaatacaatgctgccccgatagcttttgaaatctagctaggggtaaaacttcctgagatgctctatattccatgaattccctatttccgtgccatccatttgagtaagccgatatgatcctagccgagtgacttctgctaccatgaatggcccttcccatagtggcgacaatttgtgtcatccttccccccgatagaattcggcgaaggaccaagtcccccactgcgaaggatcgatgtcgtatggccttatcatgatagtgcctcagggtttggtagtatttagctgactgaattactgtattcaatcattcttcttccaatacatcaatatcctctagtctggtagcttctgcctcagctatgttttcaaagaccagccttggtgccccaaacctgaggtcggcaggcagcactgcctccgaaccatagaccatgaagaagggagtgtttccatgcaaagctcgactaggttgagttcttaggctccaaaccacatacgacaactctctg

SEQ ID NO: 40441 - DNA, 296 bp, Zea Mays
cgggaatggtgatcgatgattcgttgggtgggtggggggactgggctgacagctgactgtgtattgtggtttggatggcaggtttagcgtcagtaatagctaggattagggttcaggcgatgctaagattttggggcgccaattgcagaatcactggattgattcatcttttaggggtttcctcgtactcggagtacgagggcaccgttttagttgaatgttgctctggtgtctaagcgccaggtagtcaattttgcagtttcagttggggactgtacgctggcatcagtttttac

SEQ ID NO: 40442 - DNA, 284 bp, Zea Mays
gcgaagggagaagtgtcctgaagtgcggcagaattctctagaaggtcttctggacagagtagacctttttacgtcggcgcactggaagcgtcgattggaaatcgaacggttcgcaatttcctgatgacgtggatagactcgttgctttcgttttgaaccggctttaaagataaagaaatggtcgctcctgctccagcgtgccccatgctcgaatttcatctttctcagcattagtgcgtctcagtcggtccctgccctgtggcacgtgcccccgtgcatatcgg

SEQ ID NO: 40443 - DNA, 377 bp, Zea Mays
cgccgagaaagtatgtgggcggagcaactgatcaagtccccatagagcaactcggtgaggctgaggtcctagtccagcgctactgacccgcatcagctacgataggatgcatcatcatcaagccacgcccaaaaatacatacatcataccgaaggggcaccgagaggtcaccgtcaacataattgtagtctccacaaaaggtctcaggcatatccccactaccctatggggtcagtcaacctcagtcgtgggaggacctcagcccggagtctcaacagtgacccgtatactgggaaagacagaacaacgtgccataccgaatgtatgcctacgcatgcaagcggaacccgccacacactactgtgaagacatcagca

SEQ ID NO: 40444 - DNA, 537 bp, Zea Mays
ctggactggggctcatttaaacaggaacatagggggcccagggtaagttgtccaagacacagtgaacagctacgaaaggacgacgagttgatttcgctaaagtccgaggctctttaacaaaagtgacccgcgaaggggtacggtttgataccggtcgttcgatcagaaacgacaggcgctgattaggtcgcgattcccccgagctggcgtgcaatggtgaccaccggatctaggatccacggttctgctttaattagcactaagtcgcatcagaccgcccgctagaagatctacggtgcagaattatccgtacgcgcgttccaatctaagctatcgtccatggatccgacggcgcacagaccgtccccttcgtcatatcctgaccgcccaccgaatcggacggtcgaaggcgcgtcttcaacctccgatcagaccccgggcagcagcgcataaccccacggcggagaccttcctccgatgccccgatcgtcgcctagtgagctaatctcggattggagacatgctacacgaagcaca

SEQ ID NO: 40445 - DNA, 297 bp, Zea Mays
ttgctctatatcaattttttgctgaccttccactacgtcaactgcttactgagccatactcatcacttattttaagatggcaagaaggttggaactattggttatggttttcttctgtgatgacttgagcattataaatggggttttgagctccaaattgcacgttttcataaaacaggtgaattgtcatctacatcaagggtgctggttacggaggataggcgaagatctggctttgtagatatgttattgaatatagatgcagatacaattccttcatctgaaatagaaaattct

SEQ ID NO: 40446 - DNA, 426 bp, Zea Mays
cctccgacttaggtaggttaccacatgctcctttccttcggtctcttgcgtcaaaacaactccaataactttatcttcggctgcaatgtataatctaaacggtactcctacctgtggcgcttttaacataggagccaaagacaaatactttctaatgagatcaaacgcttcatgttgttctgccccccaggtgaattcgacatcattttaagccgaaggatagaagtaaaggcatcaatcttcctggctaggttagaaataaaccttcgtaaataatttaccttgtcgaggaacttctgtacttcaagcttacaggtcggaggtcccacattccgaatggatttaattcggtcagggtctatctctataccatgttcatgaatgatgaatcctaaggacttaccatccgacactccaaaagcacat

SEQ ID NO: 40447 - DNA, 341 bp, Zea Mays
tcgtgctcgaggggcaccccgtggaggtgagcggacattggacgacatcctcgatgcccagtgtccgtatcacaaggacatgcgccacaccttgcggaactgcagagacttcaagcattccattgggaatggctgaccattccagcctcttccacctcccccaccacggggagggcctagcgagccaaggcagcctcaacgacaggaaggaggagggggtggagcattcccacgcattgaaggggaggtcaacgttatcttcgaaggaaacaggtcgcaggagaacaaaaggcagcaaaagcttaacgaccggtaggtcctggtggcagccactagtgccc

SEQ ID NO: 40448 - DNA, 429 bp, Zea Mays
caaaaagactatccgtgcaaaagtcgcctaagggtgcagccggactagcacaacaagtgcgaaaatcgaagtcttcctcaaaaagactatccgtgcaaaagtcgcctaagggtgcagccggactagcacaacaagtgtgaaaaatcgaagtcttcctcaaaaagactatccgtgcaaatgtcgcctataggtgcagccggactagcacaacaagtgcaaaaaatcgaagtcttcctcaaacgactacctgtgctaaaccctacaccaaactgtccacgcaaagaccgactacaggcgcgccggactgacataataaacgtactagaccaagtgcgcaacgcctttatgagcatagccggatgcgcgcaggcgcacagcctcatcatacaaactatagttacatatgtacagcgagggcatcacacctta

SEQ ID NO: 40449 - DNA, 333 bp, Zea Mays
ccaccacagataaatcaataagtcgtgaagaccaacttttcaaaaataaaaactgcttagaaaccaatattggaatcgtcaggactagaacactagacctaggatgaaaggccttaggaatagtgggaaaacatgtggctaattaagtaggccatataggccaatcttagaatagtaaggatgccttaaatgcacccttctgatcggtgaggagacgtctttttccagcatgcatgcatcataacacatgaaaagattaggagttgaggaaaatgcatccaagtgtgaatagggttaataatgaataacataagaagaagaatctaatctaac

SEQ ID NO: 40450 - DNA, 608 bp, Zea Mays
tagcaggtagatccaatagccagtgcactcatagggcgatctgtgccgacaactgagctcggaagaatgattcccgaatcctggtagtgaacagatctgccgctataggttccctctgagctggtagccaagactccacaggtaggtgtctgaacctacgtacccgggctgtagtggcacgctgaagatcaatcagacgaggatcggtagcaaacggtcgcacctcggtctcatctcgctcccggaagcgggctggtggaatgggtgttgcggaaatgggagcgggagggggaacagtggaagcgagaatggtggaggtggtgggtatggcggaagtggtggatggctcgggagcgactggagctgccaaagtgggaggtggagtagtagctatggcgggtgtagagggagcggatgagcgaggtcaagacgcgaggcgacaaaccctgtaggcaatcttatctaacgagatctgcaactagacacctcgctttgcctactctgctgctgccgctacaagagctgctcaggctgctctatccagacgccgcttcttgcgaccttcctgctgctctaagtacacagtcttgcccttgacctgcctgaag

SEQ ID NO: 40451 - DNA, 425 bp, Zea Mays
cgattgccagatctcgggtactcgcaaagcgattatacatattcctaaccggccggacgggcccattcaatttagttgacgccaccaccgctagatagtgctctgctccacaccaccaccccgccatcggtcatgggcccatccccgtgtcattgtcccgccccactatgactgtacaatgagactatatggttcgacacatgatggactagtcacattagactacaccagggacctattagaccacgtgatagctcaaactacccaagttagaccatgactacctagatctcaaggagcctaagatcctatgtaagtattcatccacacccaaatagcccaccaagcgcctccttcaaaaccttttcaaattgttttcataccatttgaaaagtcgctaactctaagtgcattcccatcaaaat

SEQ ID NO: 40452 - DNA, 481 bp, Zea Mays
caagttcaaacaccttattgaaatcaggtagttgtagtaagggggcatgtgttaacttatcttttaggatggtgaatgccttgtcttgtgtcgtaccccaggggaaagggatgcccttcttggtgagttcatgcaacggggcggtaatggagctaaaatcacacacaaaccatcggtagaatcctgcaagcccaaggaaactctgaatctgtgtaactgtcgccagcgtgggcctagattggatggcctcaatcttgctactgtccacctcaatgccctgcggagtaacaacatagccaagaaatgacacacgtgttgtgcataagttgcattttttcaaattaccaaataagcgagcaccgcgcaaagcatcgcaaactacacgcaaatgttccaaatgctcttccatagacttcctgtaaattagaatatcatcaaaataaacaaccacaaatagtcctctgaaaggcctcaaaacttc

SEQ ID NO: 40453 - DNA, 430 bp, Zea Mays
gctaagtatggttgtttctgtgacatattttctctcaggtgaacaatggggcaacatttgtccgtgttaataaatttaaaaacccacgagatgggaacccctcattgttggttcaaggttgctgtttttaaggctatgttaatctgtttgttttcatatgaactgttatctggattgtaactttgttgtgttttacttttacattaataagatgatggaggggggatggatcctgaggcactgagacgttgcatgagcttcggattttcagataaacagtctgatgctttcattgggcaatgtatggtcttgggtatccttccttgtagtttcttgtgaatcagttgtcttgagcccctgaccgttgaatttatattgtttcttggatcagatggcaatggtttcaagactagtacgatgcggcttggag

SEQ ID NO: 40454 - DNA, 475 bp, Zea Mays
cttgttaaaagccactagaaattggatctccctccgcgcttcgcgctggcatgatctccgctcggtcgacgcgtggcccacactactgttactgacacagcacaccattgttttggttttctctctccctccacgtaaacattctctctcttgtaatgataaaaactgaagcccaacacggggaatcacagtgaacagccctgacggtgacgccctctcggagtctcggtccctctccaggctccagccttacttgtgcgcagccgctgcttttccttcctcttcatcccgtactcttgctgatccatccatcggcgattgatctgggaagctccggcatccatccatcggcgatgacgctgggaagctccggcgctggatcgagcatcgtgggtaagtaacctacttccccctttttcccttgctgtggatctgcctatccggtccgttctttgctgtaccttgcgtgggtgcg

SEQ ID NO: 40455 - DNA, 372 bp, Zea Mays
ccaccagttccaccccgagacaagcatagagagttcatgagtcataagccacctacatttgcaagctcacctgatccactggacgcggatgattggctgaagtccgttgagaagatgctgaatattgcacagtgcacggaccgggagaaagttctttatgcctcaggtcgtctgacaggtcctgctgctgactggtgggattcttatactgctgcccatgatgctgctgatactattacttgggcagagttcagtacacaattcaggaactaccatattcaagctggtatgataaagatcaagaagaaggagtttctgtcattgaagcaaggtaacatgtcagtcagcaagtacagagacaaatttattcag

SEQ ID NO: 40456 - DNA, 346 bp, Zea Mays
aggaattaaacaagttcctacaattatttttacactaaaaatcgttttctaaattcattactctgattttctaccctttgtactgcgcgcactaataacagaaagtttaggggtctgcttctaattttacagggcacatttgtgattcttttgtatacgcagtggaccgcgggttaatacctgtaaattataagtgcttctttgtaaagcgacgcgattaaagcggtatcggccagcctgggccgttggatcagtttcgcacagctgcgattagatttgttaatttgtggaaccggtatcctatgttgaccgcatgatttaagatccacgatcgacgatagtgcat

SEQ ID NO: 40457 - DNA, 575 bp, Zea Mays
agtgtttcgatgaaactgtgtgaccggtagttgtcgctacatacttgattttgcgaaaatcctaggtcaattgattggtaggatcaagtctgggttttactgcaaaatcttaccaatatttgtggaaggaaactcactccaaaaccaaaaggtttcctttttgtttggtagataatagtaatcaacccggggatcttggaactgtttgtatagtggtattggaatccaaatccttcaaatttacttcaaaaattccaccacaatacactagatatttcaaggtttccatgctaggtcttgaacttatacggtttgtgctactgagcagtatcctgattccaatgtttagtgattttgcttctgatctaatatttaatcttgctttgtgccattttgttctgttgaagtctaccatgttgtgcttctgtagcttggccctagttttgttgttggctacattccctggatccactacataagattgctccactatcatgacttgttatttatggggtgcttttgtacacccaatacgaactttggcatgcctgcagactgagtgctgcagaactaag

SEQ ID NO: 40458 - DNA, 334 bp, Zea Mays
ggaacacctcaggttgtcctcggttttcatcgtcgtggacagagggatttcgggctagaatcgtgcaattgatggagggattagggtcgctaggggtggaattaggtgtcgaccaagtgagaagcctagtcattgcgtatttcggccggtatgggtaagctagagaatttcgtcgccgttcgccgtcgtggacttgacgtggtaaagaaatagaactctaagggccttagtgcaaacgtcagagacacaaatgaatagtacacaaggattcttaaccagttattcaaatagctgaggtcctctgtgcaaagtcgccagtgcaggcgtgttttcc
